United States Patent Application Publication US 2026/0103690 A1 - sequence listing, part 46

SEQ ID NO: 219077 - protein, 420 aa, unidentified
MSLNVVGGSSCYVGIDWAAATHAICVLDPAGKRVAAFSVEHTAAGMAALTQRLARLGAPETMQNGIERPDGRLVDALLEAGHPIVPVKPNAIKAWRDGEVLSGAKSDAGDAEVIAEYLRLRQHRLSLVTPYSVETKALRTVVRTRSDLVDMRVAATNQLAALLDAHWPGAKAVFADVESPIALEFLTRYPTARHAAHLGAKRLTAFCAKHGYSGRRTGEQLLTRLRAAPTGVTDETLCEAIRDAVLALVAVLRAVVAALKDLGRSVVATLGEHPDAEIFTSLPRSGQINAAQMLAEWGDVRQAYDGPDSVAALAGVTPVTKESGKHRAVHFRWACNKRFRVAVTTFADNSRHESPWAAMVYADARARGHDHPHAIRVLARAWIRIIWRCWIDRTPYNPSRHGNAVRLNQSGQTELVAARG

SEQ ID NO: 219078 - protein, 358 aa, unidentified
MDTDRKDSGGRVMGQTERPSSPVDASSFQYVVGVDIGSQTCSCCALKPDKSQALKPLEFANAPAGFTQVQEHLEHLGVPANHLLIGLEATSRYGENLYRFLESRGYQLCLLHPRQTHQFAQQRGLRAKTDQLDASTIARILLSGEARRGYVPTELIATYRELVRLHSHLSDEVARYKNEIHAELFVLFPEFRQIFSDPCRPTALGILKRYPSAQACASAGVEAMTVTLHELAPRHYGRKTAEQLVNLAQHSTSAGIAVSARSSSLKILCDQLEHTQSNLAHLEEEIENLLDADRGATGLQSVPEFGRRTVAVLRAELGDVTRFGRADQVVAYAGLDIQVRQSGKWKGEAKLSKRGSGR

SEQ ID NO: 219079 - protein, 343 aa, unidentified
MQAVTTIGLDIAKSVFQVHGIDAEGNVIVRRQLKRRHILTFFQKLPLCLVGIEACASSHHWSREIKALGHTVRLMPPAYVKPYVKRQKNDATDAEAICEAVRRPTMRFVETKTPEQQSCLTLHRTRHLFIRQQTAVINAIRAHLAEFGIVAPVGRQGVDKLLDIVADARDTRLPEVARACLAALGNQLRMLKAQILNFDRMITAWHRSNETSKRLDALPGVGPALATALVASVADPKAFRSGRDFSAWVGLVPKQNSSGGKQKLGSISKQGDRYLRSLFTAGALAVIRYAKIHGTGHRPWLTALLARRPTKIAAIALANKIARMAWAMMARGERYREPVALAA

SEQ ID NO: 219080 - protein, 348 aa, unidentified
MSTAYIGIDLHRTVIQICVLDERGERIAEERIRYESLEEGLRAVAVVQRFAPDCRIAVEALGLNRWFVNACLEAGLDVLVCDARKLDLKKLGKKTDRRDAREIARRLWLGDLDRIARTYYPSDEEYGRRKLLRVRHRLVQMRQQTINQLRGMLNAYQIPAPRGVLYTRPSRKRLASVRLPVPELQQAFAALLAVLEGLQGQIDALNRRVRRLPREEARVAVLATTIPGIGPQSAATLLAELGDPKRFPGPRAVAAYAGLVPRVSQSADKAHHGRMTKQGNPELRWILSQWAVRLMKDDPFVRAWALRLRRRVHKNKARMALARRLLVGLWVMLTRGEAFDLRRCLGQV

SEQ ID NO: 219081 - protein, 343 aa, unidentified
MTVVIGVDPHKASHTAVAIGAGEQELAQKKVRSGAAQVRQLLSWAEPFGSRCWAIESASGLGYLLAQQLVSAGEMVVDVPATLASRARLLATGRSNKNDGNDALSVAVAALRSSGLRRVEPAGHAEVLRLLAKRNTDIGNQRTRVVCRLHALVAELAGGGIAKEINASDVDRFLETMTPVTPAEQVRYDLVAELLDDVRRLDAQLKISHERIRTAVRASQTSLTELFGVGPIIAGMLIGYSGDITRFASRDHYASYNGTAPVEFSSAGRVVHRLSQRGNRQLNHAIHMAAISQLRQPHSDGHAYVQRKLAEGRTKKEAIRSLKRHISNAVYRQLRADAERRPH

SEQ ID NO: 219082 - protein, 342 aa, unidentified
MDEYDGRQFVGIDLHRQRSVIVRQSESGEQLSAVRIVNDPVALALQLEQAGSDPEVVLEATYGWYWAVDVLQACGARVHLAHPLGVKGFRYRRVKNDVRDAADLADLLRMNRLPEAWIAPPQTRELRELVRYRAKLVAIRSGLKAQVHAVLAKAGVLIAASDLFGVTGRQRLAKVPLGFAYAERIRSLLDLIDILDGHEARFAAMIAERLRAHPGYQAIQQLPGIGPVLAAVFVAEIGDVQRFAGPAQLCSWAGLTPTHRESDTIVRRGHITKQGSKLVRWAAVEAIQRQPDTTKIARDRQRIEARRGRNIAKIAAARKLLTLVYYGLRDGHIRALAPRRAA

SEQ ID NO: 219083 - protein, 342 aa, unidentified
MKNHTVIAADIAKNVFQYVQFNKGKQVSRNRPCNRARFEQLILSSKPMKLVMETCTGAQHWARLAKSHGHQVVLIPPKVVWAYRQGQKTDANDAMAIYEASQRKQLKASPLKSAEQQGLSTLESVRYHYQKRKNKLSNAIRGHLAEFGIILPKGYKSLRAMLPLILEDAENGLPMSARLAIHTYWEDWQAANQTVLKLEKAKLEELNQIQVAKELMKVQGIGPVCASELICTMGDASVFKRGKDAAAFIGTSPKQHSSGGKVVMVGISKTTGHKRLRAALIQGARSVILRLKAKTEPYSDKERWLFNLMQRQGENRAAVALANKNVRIAWALIAHQRTYVCN

SEQ ID NO: 219084 - protein, 354 aa, unidentified
MNTTQNSTKSKIVKVIGVDLAKDHCDVIGYDENGKICLRLDGCSYAKLREILANLPQAVVLMEACKGSMFHARSIADLGHEVRLVKGTDVKALRNVNHKNDLRDAAYIANLYFVPGIKYVYIKNQQQQSLQFLQNEYKSLQELRIQVGNQIHAGLEEFGCPVRKSSKFIKTRMVAHLEKHAELIPEDVMASFKRRREIWLNLLQQEEEAKRRLEQVAATDANAKRIMTVPCVGPQTAVGLLVHVGVDFGHFKNSRQFAASLGLVPKQNSTGGNNTLNHITKCGPKSLRSNLVQCAQLVLMYAEKWKGNFGDWVRKMRDSGKKHGVIVCAIAAKLARIIYRLMKDKVDYTPILSC

SEQ ID NO: 219085 - protein, 361 aa, unidentified
MFIERTSVGLDVHARSIVACGLDTATGQVMRRRLVPSAQAVLDWLRELPGSVAVAYEAGPTGFGLARQLRVAGVRCVVAAPSKLQRPAGDRIKTDARDALLLARLLRMDEIVEVRVPSIEQEAARDLVRAREDARADLMRCRHRVSKLLLRHGIVYSGGHPWNGSHETWLRGQRFGQHGVQLAFDADLEAMLLTLDRRDRLDKAITEMATTGEYAAVVRRLGCLRGVSTLTAFGLAVEIGDWHRFTGATIGAYLGLIPTESSSGQQRSQGSITKAGNTHARRLLVEAAWHHRRDYRNPGAAMRARWNLASPAATARGNAGNHRLHQRWQTFVARRKKTVVANVAVARELAGWCWSLAVLDD

SEQ ID NO: 219086 - protein, 342 aa, unidentified
MKKGITIGMDLGDKNHQVSILDEDGQLVERRTVLCTRAAVTAFFRHYPGAVVAMETGTHSRWVSQVAQEQGLEALVGDARKLRAIWTSEQKCDVRDADMLARIARFDRALLHVVQHRSEDAHADRELIKARDLLVRSRANLIVHIRSVVKSCGERLPSCSADAFGRKIQPPAALRQALDPLFKIIQALTDQIRFYDWLITEIAAARYPETARLTQVTGVGPLTALAYVLTLADPHRFTHNRMAGPYLGLTPRRDQSGQTDKQLRITKAGDGHLRRLLVGCAHYILGPFGPDTDLRRHGQRLMARGGKNAKRRAVVAVARKLAVLLLALWKSGANYEPLRKAA

SEQ ID NO: 219087 - protein, 392 aa, unidentified
MLYVGIDVAKSKHDCCILNENGKALSTFVIKNNKQGFEELIAEITRFSSVSDLSDAKIGLESTGHYSINIQNYLLQKRLCVRIYNPLSVNLLRKAQSLRKTKTDKSDCKFLATLLFSDDSKSYSQPVLPISELRNLTRSRHRLVSMRSKLKLSLSRLITILFPELPSAVWSVNQKSCYAMLSEFPTAQDIAKASIVRLTNVLSANSKGRYGREKAEHIRELARNSIGHNSGAVGFELRQTIRLIQNLQSEIVLLDKEIRQIMDDIQSPVLSIPGIGYVLGAIIISEIGSIENFTNPAKLLAFAGLDPSIYQSGQYNASSTPMVKRGSTYLRWGLMQAARLVAYRDETFSTYFGKKLSEGKHYYVALTHVAKKLVRVLFHLLRTGQNFAPQFG

SEQ ID NO: 219088 - protein, 394 aa, unidentified
MRFAGVDIASETHVVALVDEDGKVLVKPTAFTEDAAGYEKLFEQLGASAELLVAMEATGHYWKNLFAVLAARGFSVALLNPLRTHRFAEEDLQRTKTDAIDALGIARFAAQKRPPPTRLPDPATEELRELVRLRERLLQDFGDRVRQLHRLVDLGFPEFTRYVKSLDSELASAILHDYPTAAAFRGVSAKRLAALRYDGRHQVGAELAGLLIAAAKHSVGHHHGEAYRVQVRYACEDLDILRRRLRQLDRDIAGTLGAHEVGTLLTTIEGIGPNTAARLIAELGDPAAFRAPGALAAYVGVVPALSQSGKRKNTRAATTPIGNARLRAALWMPTLTAVRRNPWLRAHYLRLLARGKLPKVALVACMHKLLLAVYSVAKNRRPFVAHLATVETTP

SEQ ID NO: 219089 - protein, 367 aa, unidentified
MSNYVTAIGLDVHARSISACAFDPMTGEVVRARFGYDPASVAEWALGFESPKAVYESGPTGFHLCRALRALGVDCAVGAVSKMHRPAADRGRKNDRRDAEWLARLLACRNVVEVWVPDERTEAARDLSRALEDAREDLHRAKQRMSKFLLRHGLVFDETTPAGRRRSNWTEAYWRWARSIEFAEPDDAAAYEHYTDAVDRCGEAKRELERKVVEAASRPEWAPAVDALCLVKGIDVATAFLLAAEAGDFSRFPSAPSFAAWCGLAPSERSSGETESRGGITRAGNSHVRRALVEAAWHVPASTRRPKRPRSGHGVAPAVSRHAAKCNRRLQDRRDAMSQAGKRPCVANCATAREMACWVWAIALMAR

SEQ ID NO: 219090 - protein, 342 aa, unidentified
MNEVITIGLDLAKNVFQVHGVDAEGAVVIRRQLRRGQVLPFFKKLPSCLVGIEACATAHHWARQLIALGFEVKLMPPHYVKPYVKRNKNDAADAAAICEAVTRPTMRFVAVKSTEQQSVLMVHRTRELLVRQRTMVINAMRGHMAELGIVAPVGVPQVKKLLDIIADGDDDRLPPVARTCLESLARQFVSLHEEIIAAEMRIHAWHRSNEVSRRLETIPGIGAITASALAASVSDPSVFRSGRELAAWIGLVPRQNATGGKARLGRISKQGDRYLRWLLVAGAMSVIRHAKRRGTHLPWLADIIDRKPTKVAAVALANKNARIVWGILMGGGSYRMAVPTKN

SEQ ID NO: 219091 - protein, 475 aa, unidentified
MGKNCIKTNPVHSKKTVKQDTTKTFVEMPVINPKAAGIDVGSRSFFVCVGQGPSDVREFGVFTCDLHDIAKYLKELGYTTVAMESTGFYWKQLFVLLQDYGIEVILVNARHIKNVKGRKTDVIDSRWIQLLHSLGLLSASFQPDIMTEELRTYTRQRQYLLEQSSQQVLRINKNLTLMNLILKPVLRDLVGATGKKIIEAILGGTRDPFKLAELIHPNCHHSKDDFIKALEGNYRDEYIFELQQCYDSYLHFQAQVKKCDGKISELLEQFVSLKKCETKNDPRQGKPIKPKYKAPKTIKFKNCPPVSLAENVFNLTGGIELLKIPGVNTGTILSLVSEVGLDLSKFKTAKHFCSWLGLAPNNKITGSRMISSHTEKKKNRVALAFRDAANSVERIVANNPLKSFMKRIASRKSRAVAITATARKIASIVWVMLTKKVQFNHDLATEYQVILRKQKIKTLQRIINEFGVFSTEVKF

SEQ ID NO: 219092 - protein, 399 aa, unidentified
MLIVGIDWSKSKHDLALMEPDGSVLQYLVVKHSLEGFEALAVAIGRHESDPGEVHISVEQHDGALLAWLRAQGYIVHGINPKSSQRARDRYRPAGAKDDRSDAYILADMLRQDRGNIRPLGRESQTPAELRTLGRLRARRVQERTSPMQQLRALLDDWCPELGSLCNNFGNIAWQRDFLRRFPLLEDLATAHVRTVNAFIRRHRMRATTADRIRELRKCRGLPIPAGREPALRLDIAFLVDQVERLTEAIRTIELQLQQLIDQHPDAEIFQSLPVKGLVSISGLLGGFAGQDAPRHAELAARWGVAPVTIASGRSRFVKYRRACDGYMREVLMFFAFNTAFRPDCWAHDYYRRKRAAGATHYGALRCLAQRWLKIICRMWTDKTTYDEQLHRRRLSLVS

SEQ ID NO: 219093 - protein, 410 aa, unidentified
MPLFCGIDWATEHHDVAVVDDDGRVVARGRVSNDAAGFAQLLTLLAEAGDSAAHPIPVGIETDRGLWVAALRETGRVIYPINPLAASRYRARYAVSGAKSDATDAVLLANIVRTDPGAHRPLPADTELAQAIRVLARAQQDAVWARQQIGNQIRDLLKDFYPAALSAFAGLSEGGLARRDARSILAAAPTPAQAAKLTPARLRRLLVKAGRQRHLDRDVERLREVFTDTYLHQPPTVENAMGIQLAALLGQFEAACTAAADLAEAAIAHFDQHPDADIITSFPGLGKLAGARVLGEIGDDRSRFTEARGLKAFAGSAPITRASGKKTVVLHRHIKNRRLAAIGPIWALGSLRASPGARRHYDARRAAGDWNHQAQRHLFNKFLGQLHHCLQTGQLYDEHLAFPPPLLLVA

SEQ ID NO: 219094 - protein, 570 aa, unidentified
MVREWRSHVGGRTPTTNRCHPMATAVFWSRQRIASTSSCSLRYLRGVRGTVAADISVAVIHDRAKRFCTARRREVVNNCDAGENFAGGRPAPARSQSQSPNPKRVIGRPLAEPEALAPTSYRKRPQEGHYISTMDGRAKRRKSQKQQQKTMNDSTQWQPHRAFGALDWASEKHSVIVVNPAGKVIEDFEIEHSALGWKKFREKLQPYGSIPFAIETSQGVAVEQLLEAGMLVYPLNPKSAQAYRERKAPSGVKDDRLDAWSFADALRVDGQDWKALRPEEPLIKELRLLCRDEVSLIEQRTAFVNQLRHALAEYYPAALEAFEVWTSVSAWMFLQRFPSPELLAQAGKGQWQKFLHSRRLWGSDQGPRRMEIFAHATEFAGTAPTVKAKSLLALSLVQMLFTIEKQLALYRQQIEALFARHPDHDLFGSLPGAGPKIAPRLLSEIGDDRQRFGGDPQNLQCLAGSAPVTKRSGKQRKYWHVHQRWACDKHLRHAIHLFAEQSLSRCAWAEIYYQHHRQKNQSHANALRRLAHRWLKIIYKMWIDRTPYNAELHHRNQLQHGSWIFQLQQS

SEQ ID NO: 219095 - protein, 423 aa, unidentified
MLEEARDTGEIIERVAALDIGKAELVCCVRVPDEGRPGRRLQEVTPHSTMTRSLLFMADRLRGLGVTRVVMEATSVYWKAPFYLLEAAGFEVWLVNAKDVKHLPGRPKTDKLDAVWLCKVAERQMIRPSFVPPPEIRRLRDLTRYRTSLVVARNAEKQRVEKLLEDAQIKLSVAASDIFGVSGRRMLAALVGGQRDPKALAEMACGAMRSKIPMLEEAFTGRFTGHHAFLLAKMLARVDELDADIAELDTRIEAEIHPFADQVERLDAIPGIDRTAAQAIIAEIGVDMSRFPTPAHLASWARFAPGVKESAGKQKGRGATGHGNRYLARTLGNTVAGAGRTQTFLGARYRRLARRRGAKKAVVAVGRSTLVIIWHLLSDPDLEYVDLGVDYYELRTTDPARKKREHIRQLEALGYKVSLEPAA

SEQ ID NO: 219096 - protein, 473 aa, unidentified
MARKKGKDPAGPGGLELTGEPVEVSDEPAEVIARAAAIDVAKGSGMVCTRVPHESGPRRRVQRVWQVSARYSEIAALMAELAKLGIQRLVLESTSDYWRIWYYLAEAAGLEVWLVNARDAKHLPGRPKTDKLDCLWLCKLNERGMLRRSFVPPEAVRDLRALTRLRSRLAQDQARHQSRIEKILEDALLKISSVISDLMGASGRRFLAALVAGERAPDKLAALGDRRLKASPAQLEQALAGRFRDIHALEIGMLLELIDDITAKMARLDAEITARLARIPGLAPACAGCGEIGGGHAPSCPRPGAPVLSVIERLDELTGIGIDAAQVIVAELGTDKTTFPTPGHAAAWAKLASRTIQSGSTSKDGRTGKGNPYLRAVLGRAAMTAAKTDTYLGERYRRIARRRGKQKAIVAVSRTICEIAWMIITDPSVRFSELGPGYYARLDAGRQTRNKIRELERLNPGMKVTLTPAATAA

SEQ ID NO: 219097 - protein, 349 aa, unidentified
MSENTKYFVGVDLHKTILQVCVLDGDGKVLRERRFRGGSLEEGLVAVEWLAQWKEGGRFCVEALGMNRWFVNACHELGLEITVVDATKMCLRMLGKKTDRRDAYELARRLRLGDVDQNLATYFASESEFAGRKLVRTRHALTQLRQDVVNQIRALLATYRVAAPLNQLFRQKALQKLRETSLASEDLTLCLQSMVSSLETIQASIEELTKRITARTQEEKATATLMLLPSIGPLTATTMVVELGDLHRFRNSKAVASYAGLAPRVANSADKSHHGRITKRGNRELRWILTQWSVRLLSFNSTVKKWAAPLLLRMHRNKIRMALARRLLIGMYIMLTRGDVFSLKRCLAR

SEQ ID NO: 219098 - protein, 323 aa, unidentified
MEKEPLYCAIDISKATLDVDGAALALPEQLGNDQAGYRRLIKAAKKYPGPVHFVFEASGPYHLGLALALWEAELPLSVLNPARVRFFAKAQGKAKTDPLDKQVIGAFARTMRPEPTPAPEPVFRELTELLQRRHGLVDCRAAEQNRLGQSHHSLIKGQISRLISQLTAQIEQIDQLVNKLVSSSAGLKAKVDQLCQIKGVGQLTAVTLLVTVPELGTLNRNRISRLVGLAPLNDDSGLQKKKRFIQGGRKVPRCALYMASLSASQHNPVLSAFYQRLLKAGKPKKVALTAVMRKLLICLNALLRQALEQKAFSGDFCSAKAPQ

SEQ ID NO: 219099 - protein, 405 aa, unidentified
MNEHLLVGIDVGCHSHQVAIAKSNGTYLKEFGISHNASGFNSLFSEITYYESTLKCPVVIGMEGFNGYARPLDQLIQQKGYTLYNINNLKLARFKELFSGPAKTDAIDARKIVEFMRIAPSFQEQRRAITEIKPGNGVNQTLKRLTRRRRQLVNEKICIQNRMQADLQSVAPGLVDLVKNVDSRWYLHFLTCRPSLRNLATMRKESLLKIKGVGKKYAAVIASWQKEAHFSTDVDLVSSMIIEDAKRILELMEAIATIEQELEPLGEQSDLAVTIGSIPGFGLISSAELAGEIDNLSRFPSEKSLALYLGMAPLDNSSGKKEGCKIAKSVNTRAKAAMMVAVAHHSWQVEESKRYYEKKRAEGKKHNQAIRSLGRHLVRVIWSLIKEKRFYEIREENERNILKMA

SEQ ID NO: 219100 - protein, 428 aa, unidentified
MDQVNRNRLEEFRQLRKEVRHSEEYLIVGIDIAKERHHAFFGTATGKTLLRRLVFSNDHEGFRKLLDQAEAFRVRHGLKKVVYGMEPTANYHKPLGEYLITLGRTVVLVSGVTVKRNRESLDGRWDKHDAKDSANVADLISQGKCLYYEHPSAELRGLRGLLSLKKRLKKQEHGYKVRIRNHLIAQYFPDMDGDYERLGAAGLSIVRWCLPASQITELDVEPFIERVTSRRIRMETRRRLEGVWEKAGETIGCEGVPGVGHEAKVMVEGLRQIREMIKETEEKIQELCKQFPEYPYILTIPGFGPDLSAKVLGAIGDPYRFQNGKQVLKLAGLDLSADRSGKDSDKAIPEISKRGKADLRYALYQAALIASTKNQDFMRYYTRKLEGRQKEKGIQTKMWVKLSAKMLLIAWTLMKKKEAFDPVYLKVE

SEQ ID NO: 219101 - protein, 472 aa, unidentified
MRKHKRAKTKSKASKPIHDPQPDSAGVDIGANEIWVAVAAERTEKSLRRFDAFTQDLKALVKWLLDCGVRSVAMESTGVYWIPLFQLLEDAGLKVCLVNARHVKNVPGRKSDVRDCQWLQYLHSVGLLLGSFRPHQAICAARSIYRYRQNLLSMAAQHIQPMQAALDQMNIKLHHLIDDLTGLTGRTIIEAILSGQRDPVQLAKLRDKRIQAAESTIVKALEGDWRKEHLFVLAAAWDNWKQVQQQILKCDQQLWEYTRELEAATTIAKPTKTMRLKPQWIGSSPVIGPQPAPRVRKKTSKNQPEAPWREELSRFFGVDLTAIPGISVLTGLTLMTELGNDLSAFKSQHHFASWLCLCPDNETSASKVLRRATRRSQNRVRQALRMAASSLHHDKSYLGHKYRRLRAKLGAPKAVTAMAHQLARIIWTLIARRVPFDLSIFALQEQANEQRRLNRLAASARQMGYQLTPIAA

SEQ ID NO: 219102 - protein, 417 aa, unidentified
MEDKASASPCRYVALDIHKYYSVVAGVDREGEEVLPACRVEHVDLENWLKKHLLPSDRVVIESTTNAWHVYDMLEPLVREVLVANPIKVKQIACARVKTDKKDTLILARLLAANLVPVVWVPPKPVRELRQLISHRRRMAGMHTQVVNRMHSVAHRHHLNHPKGKDFQAKNTGWQRDESLSRLEKMQLELDMETREHLEKQIERMTRELGRMSHEEPWASEMLYLMQVPGCGVVTGMTILAAIGDITRFETPKALASYSGLVPGLEQSGVKLRGKGITKEGRRELRWVMVEVAWRAVKADPHWRKHFEELKRRMHPNQAIVAIGRHLLTMVWYLLTRHEPYSHYSPERIAYKYLTWSWALDEDQRQGMTRPQFARFYLMRLGIGNELKRVALNPQFPYRLASVEEVLELRPELRPPD

SEQ ID NO: 219103 - protein, 363 aa, unidentified
MNYNTVYVGMDVHKESFTLCSMTIEDEKASHYQKTEADYKKVLKYLEFLRTIYGDNAKFICGYEAGCLGYTLYHQLLSQHVECVILAPTTMLEQRSRKRIKTDKRDAEIIAKCLAQHNYSPVHIPTATDEQTKEFLRMRDDHKLALKKIKQQILAFCLRHNYRYDGNSHWTAAHLRWLKSLQPEALYKEILDEYLLTYTTLSDKLERLDKRIEELASKEEYKEAVKKLCCFIGVKTHTALSVLVEVGDFNRFASAKNFASYLGLVPGENTSSDDRNLLGITKAGNRHVRLLLTEAAQSYARGQIGYKSKDLKSRQSGNSVQVIGYADKANERLRRRYYKMVLGQSKKHNVTKVAIARELACFM

SEQ ID NO: 219104 - protein, 458 aa, unidentified
MNRKRSKAKIDRKMPMVHPNAAAVDVGATMHMAAVRADRTPEPVRSFGTFTTDLHRLVDWFTENGVESVVMESTSVYWIPIFELLDARGFTVFLVNARDAKHVPGRKTDVSDAQWLQRLHSYGLLRASFRPKGQIAELRAYVRQRERLLEYAASHIQHMQKALTEMNLQLHHVVADITGATGLRIIRAILAGEHDPKMLARLRDYRCHASAQTIEKALTGSYRAEHLFALEQALALYDAYHEKVSACDARIEAVLKELSIGRGRRPDSVLSPRRLRTDHVNGLAFDVRAALFALLGKDLTQIDGLGPYLSLKLVAECGDDLSAWASAKHFTSWLGLAPNNKISGGKMLSSRTRRCGSRAAALLRLAAVTVGRTDTALGAFYRRLSARIGKAKAVTATARKIAILFYNAVRHGMEYVDPGASYYETRYRTRVIDNLHRRAKSFGFVLQPVDTCPEGAVS

SEQ ID NO: 219105 - protein, 353 aa, unidentified
MSHDIILTVDYHDRVCVIRRRDCATRREQLLEEVPTSKDSLLQVVDEARRDAGRRGRVIWIQESTTGWARVKELLGPRVEFRLANVLQIPKTAKSHKRKTDKLDTGRIQREYINGDLPLAFQPQPELRQLRRVVAYREELVNRRTALRNWINRFLSHETWYDTTGMWSVKGQRRLRTFLKTLPRTDALIIGQKLDELARLEAQLKLAINELLVAHQSSSEAQRLDVIKGISLVSSVSISARIGPVSRFKTAEQLIGLAGLAPGIAESDQTRRNGHIGGGGTDTRLRHYLIEATLWARDLPRYKSAYQRTARRKGPKIGRLVVARMLLRSIYKILKDGVAFDAGKEARARAAAC

SEQ ID NO: 219106 - protein, 325 aa, unidentified
MEITTIGLDLAKHWFQVHGVDANGRVVVRRRLWRSGVIAYFRSLEPCLVGMEACATAHYWARELIALGHRVKLMPPAYVKAYVKRNKNDAADAEAICEAVARPSMRFVPVKDAEQQSVLMLHRARSLLVRQRTMLVNALRAHMAEFGIIAPQGLRHVEILTKTIAHQQERLPELARAILQMIVGQLNGTMVRIREIEGQLARWHRESPVSRLLATVPGVGIMGASAIAATVADPTLFRSGREFAAWLGMTPRQNSSGGKERLGRTSKRGDKYIRSLLTAARLRCCAMRVIDQPATASGSALCWRASRPNLPRSRWPTRPPASSGP

SEQ ID NO: 219107 - protein, 350 aa, unidentified
MKTTHPVIIGIDTHKASHVAVAIDTQGTRLATLSIPTNPKGYLELERWSQSLGKVQAFGIEGTGSYGAGLSRSLLAHGHNVIEVTRPNRQLRYTQGKTDSLDAEGAARSVLSGQATARPKTQTGSSEMIRHLKIARDTAVKSRSQAMVTLKTLIINAPADLRDALNHIRGKIALIRHIAAFRPGDIDNPLASAKAAMRALARRWLWLHEEIIAHDKELERLVTERAPELMASHGIATLTVAQMLILVGDDPTRIRSEAAFAKLCGVCPIPASSGKTHRFRLNRGGNRQANAALYRVAFVRMRSHEPTLAYVKKRTKDGKSKSEIIRCLKRYIVREIYSQLCVPKSSQIKA

SEQ ID NO: 219108 - protein, 415 aa, unidentified
MRCIGLDVHCDFCEVAIAEGGRVRHAGRIQTSRAALELFGASLAPDDRVVLEATGAAFAIARILGPHVARVVVANAQEVRAISHARVKSDRFDAATLARLLSADMLVAVWVCDERIGALRRRLARRAALVRQRTRAKNEVHAVISRCLLGRPPVSDLFGKAGRVWLAGQDLVEEERETVEGCLRQIDFLDAEIALVDRKVAQFVLGSPDAQRLMTIPGIDVTTAAALIAAIGDIARFASPRQLVAYLGLDPKVRQSGAEPARHGRISKRGDARARFVLVEAAWTATRTAGPLRAFGERIRARRGAQIAAVAVARKIATIAWHMLSKNQDYAFARPSLTRAKLRRLERLAGATPGTLTPARYQRRLRAQERELQRQAERSYRRMVSDWQATKVGAGATPGRASQRSSKDKAARQTP

SEQ ID NO: 219109 - protein, 408 aa, unidentified
METLHRRCAGLDVHQKEIVACRRIVSGGKVRSELGRFATTTQGLLALSAWLAEARVTHVAMEATGVYWKPVWHVLCHDFSLVLANASHIRNVPGRKSDANDAAWIADLLAHGLIRASFVPPQPIQERRDLTRTRRALTREIVRHTQRIQATLEEANIKLASVISDILGFSGRRILKAIVAGESDPQRLAELGHSRLACTREELAAALDGRPRDHHRFLIGQHLKTIEQIEATIAEFDARLEAALAPFLDAAERLKDIPGFGGNVAQTVLAEIGADMAAFPTDDHLVSWAGMCPRLDESAGRKRSKRLRKGAPWLKPVLVQAALAAIKVKNSSLRARYFSLKPRLGHKKAIIAVAAAMLRIAYHMLKDGTFYQDLGPDYRGRRNPQRAAQNLAKRIRALGFEVELKRAA

SEQ ID NO: 219110 - protein, 482 aa, unidentified
MKKRNIYQNQSQELLTLFEEAGNSAKVMCVPIDYAKTDHVVMFCNGHGSIVRKPFSVKNSPLGVDYLTDQVIRSCKSRGINKRHVFFGGEDVGSFAANFVTTLRSQGWLVAGVNAHDAKKQRANLQASTDRLDLMGIASMLLNRRANSCPAQSGIYWNLRTVVRHRQKLVKLTTEVRNRIHGVVDRLFPGYLDEEKSGISPFSKSSLWLMQARFSTPQIRRRKRSTLIKGLRKLGAKNPEFAAAKLQQYAAQVLKPPQEYIATLQFSLAQHIRHFSCLQDNIDQLEKEMAVGLAQTQGAFLTSFRGIGIVLASGVTSEIGNPYEQAPLNNLVSYTGIIPRVKQTGGPQGESYSGKVAKRCNRILKNYVVQSASHLGLHGPQELMADYKRREAAGQHADFGMGRRFLRIAMCLMRTSQIYLPPRLREPEAKLQERADYYLMNWPSLHEKWRKSGALEVAFDKNMPLGQWRNIVQQLYKIKLAL

SEQ ID NO: 219111 - protein, 370 aa, unidentified
MKKQTKTTPSVVSTPAAPVIAGGFTIGLDLGDRNHYVCVLDATGQTIHEGLLPNSRVALALLLTQYPSAVVALEAGTHSPWISRYLTGLGATVIIANPRKLHAISRNERKCDRRDAAMLARLARADVALLHPLQHGSAQAQLDLLGLKLRDALVRTRVGLINTVRFTLKSLGHLVSNPSSEAFHKHIVTEVPADCLPVVQPLLAVLTLITEQIKTLERGLVTRSKKDYPLTQRLQQIAGVGPLTALCFVLKIGDPTRFGRSRDVGPYLGLCPGRDQSGGTDKQLRISKCGDGLLRRLLVSAAHYVLGPFGPACALRAYGQHLSGTSAREKKRAVVAVARKLAVLLLSLWKHGTDYEPRVPAAPALVMTPA

SEQ ID NO: 219112 - protein, 318 aa, unidentified
MSDTIVIGVDIAKLHIDVAASDNSLTERFSNDEAGHRKFLSRLSRMHVHHVLMEATGGFEDVLACTLQAAGLPVVVINPKRARDFAKAMGLLAKTDAIDARALAQYGVMLSQREGFAQFLKAPENVERKRLSAVVARRRQLIAMLDAERKRLDQADAIVRPSIEAMVESIRRQLKDIDRQLRDEVDEHHRELDALLQTVAGIGPVASATIIAELPELGRLNRRELAALVGVAPFANDSGKKTGRRCIRGGRSTLRHTLYMATLSAVRHNPPLKAFYERLREAGKLPKVALVACMRKLVGILNTMARTGEPWDPNYAKA

SEQ ID NO: 219113 - protein, 415 aa, unidentified
MEGLSPLHRRVAGIDVHRMLHVVTVLIEQPDGSVSKHSREFGGFKRDCHALAEWLAGLEVQLVVMESTGIYWKSVYAHLENAGITAWVVNAHFIKHVPGRKTDMLDSEWLAVLARFGLVRGSFIPPKDLRELRLVSRYRRKLNSMCSRQINRLHKMLDDAGIKLGAVASDIHGVSARAMVRGLIEGQSEAVLLSHARGALKRKTEELAASLDGDLSERHLFVLRHLSESIDALPRQLADIDAYLMRAMQPYAWAHRLLQTIPGIDATAAALILIEIGQDMARFGSPERLACWAALSPGNHESAGKRKSGRTRHGNNTIRFILCECANAARMTKSTLASKYRSLMVRKSHKKAIVAVAHKMIRLIYILLSRRQPYLDQTIDYAAMSAKKNAPRWIKQLKAIGKWPETGATAAHATT

SEQ ID NO: 219114 - protein, 389 aa, unidentified
MQTARKTATHPIAPVECGAIFVSLELSRSFWLVTALATPVGSKMSRHQVRGGDMSGLLERFSDLQRNVQRRTGQVVPVIVIQEAGLDGFWIHRALVTEGIESHVVDPASIAVSRRHRRAKTDRIDGEALVRTLMAWRRGEPRVCSMVCVPTPGEEDRRRVCRELKTLIGERIRHVNRLKGLFFAQGTDGYEPRNKDRRERLEDLRTGDGRELPKHLKALALRELEIIELLNQQIEAVKAERNALLEKAPVSGSAPEPVRMLLELKGIGAGFAGALWSEGLFRQFENRRQVAAYAGLAPTPWKSGTINHEQGVSKAGNPRLRAIAVEMAWLWLRHQPDSALARWYHERVRRLGPRTRKVTIVALARKLLVALWKYATSGVVIEGARTKTA

SEQ ID NO: 219115 - protein, 343 aa, unidentified
MELYVGMDVSLKETSICVVDDDGEIQCEGTVISEPEALARFIKTNAVGAKRIGLETGPTTTWLWHELRALGLPVICIDARHAKAALSMQINKSDRNDAVGLARIMQCGWYKEVQVKSLSCHEIRAVLSSRAQLVKIKRDLENQIRGLLKNLGLVIGKAGGNVFRCRAEELLGSQGLLWEAVRPLLDIREKVSREIAALHRKLLDLARNDEDSRRSMTVPGIGPITALAFHTAIDEPCRFKRSRSVGAYLGLTPRRHASGEVDWSGRISKCGDGMVRTYLFEAAGVLLTRVPQWCTLKAWGHRLWKRIGFKKAKIAVARKLAVILHRMWRDGTDFQWSTKEAKA

SEQ ID NO: 219116 - protein, 414 aa, unidentified
MFLTRRSDQQTAFLFYNAYSGIFVHRLSIRPARNKFQAHSKTNFTPRRCDMKEFDINDFTVLVGIDWADKKHDVCEHVIGTSKYYYSVILSKPESLHEWVMSLKKRYPGRTIAVACELTKGPLIYALSKYDHLVLFSINPSTVAKYRKAFIHSGAKNDPSDAFFQTEILEQHMDKLDVVRPDSVNVRALSQLLEYRRKVVQDRVDLSNRIIATLKNYYPQVLDWFKEKDTHLFCDFLEKWPSLDAVKKARKQTIMNFLKQHHSRYPAVNERRVEEIKSAMALTDDLGVIEQNKIMIEVLIPQLKCLLESIERLDKEIKQRYEKQNDRVIFDSLPGAGSQLAPRIFVAFGSDRTRYQSANEIQKYAGIAPVIEQSGKKKWTHWRYSCPKFLRQTFVEWAGQSVRYSFWAKAYYEQ

SEQ ID NO: 219117 - protein, 411 aa, unidentified
MDVYCGIDWAEDHHDIAVVDRDGKLLARRRISDDAGGLATLLALLAEHGDTAGDPVPVAIETPRGLLVACLRATGRAVYPVNPMAVARYRDRHSVSGKKSDHGDAVVLANVLRTDMGMHRPLPADSELAQAIAVLARAQQDAVWDRTAAHNKLRSCLREYFPGFLAAFADARGGITRPEARAILAAAPTPAAAAVLTVAQLRSLLAKAGRSRGIDTEAARLRDAFRIQQMRQLPLVEQAMGQQALALLRQLDAACASADDLEQAAVASFNQHPDAGIITSFPGLGPLTGARVLAEIGDDRSRFQDAKGLKAYAGAAPITRASGKTKSVTRRKVKNNRISAVGYTWAFSALTASPGARAHYDRRRDAGDKHAGGLRNLFSRLLGCLHHCLTTGQHYDEATAFPAPAKQPAAA

SEQ ID NO: 219118 - protein, 416 aa, unidentified
MNKRSYRAQKVNEVRWEEMADRVKDKAVVWAIDVAKVEQFGVLMDSDREVMVTVKWAHPAETPAVLERLRGLPCGSLTAVMESTGVYGDTLRRQLREAGIEVHLMSAKRVHDACEVYDGVPSMHDAKAAQVIGRLYFEGASRVWVEASEQQRSHDAIGRLYRLYQKQHQQQQNRLEAALQRHWPELAGYLDLDSVTLEDLLLSFGSPAELSVRAEEGRERMRRVSRGKLAAEKIEAVLESARQTIGVPCVAAERDYLMALGAELRHSREQKDRVGVRLSALTQADPQLHALGVTIGRVTTGLLIAEGLDPRAYANSSSYCKALGLNLKERSSGQHKGQLKITKRGSGPARRDLYLATLRLIQRDETVKTWFENKVKPNGGGNKQRIVVALMRKLSRALWYVARGQAFDARRLCAVG

SEQ ID NO: 219119 - protein, 385 aa, unidentified
MKPNSQMTLDKYFRQCVGIDISKDKFTACLYMYDMASDAGCCTESIDFPNNRTGFNQMVKWSRKESQKGFPLVYLMEPTGSYYEPLAYHLHKIGQTLYVVLPNKAHKFCEYEGIKTKTDAMDARCLALMGCKNRKLRPWEPPLPIYRELRQLTRLRADLVKMQTQMLNHMESIDHMEDVAPEVRKSYEKLLDTIEKQLEKNEKDIAAKLAQDKELETKVKRIATAKGIRVGTVTCIVAETQGFHLISNRKQLTSFAGLDVKARQSGKDDPRHHITKKGNAHIRAALYMPALSAAHCNRQMAQAYGRICAKHPDVKMIGVTAIMRKMLLLVYSLWKSGEEYDETRDNTHTPRKKEPQPTNSPEDCLKPNAEPPDWNAADKEGNPPF

SEQ ID NO: 219120 - protein, 395 aa, unidentified
MENPIIACDVSKGKSHIQGFIGLSNPFGNPFVVRHLKCELKQIKELAKSLEKQSKIKPVFVFEYTGIYHECIANFVRDIGLECYAISPLESAKVRKSSIRVTKTDSKDCLNIATVYYTRKVRQFNCDNNDIKALSRRKTELKSQLIQLKCAYRRYLDLIWPCFDDVFDLDTQFASIIISRYKHPYKLKKWNVKAIANTLLNHGHFSKSRAFDIANDTKDYAMNCVSGVDEDSEYVSGLIETYGRIQNIRDEISRINVRLEKILQSSVPYRLLKTIPGFGENILLQVSAEIGDYTRFKTAKQFVAYCGLDPSILQSGKDDGEHYSITRKGNRIIRSSLYLAVSQMLTRKLDNQITRFYFKKKSSGLSHKVAAVASCRKLACCVFGMLSNGTCFETI

SEQ ID NO: 219121 - protein, 355 aa, unidentified
MPQTPNTAIAVIGIDIGKNSFHVVGHDARGAIVLRQKWSRGQVEARLANILPCLIGMEACVGAHHLSRKLASLGHDARLMPAKYVRPYSKGQKNDFNDAEAIAEAVQRPTMKFVATKTAAQLDLQALHRVRERLVSQRTGIINQIRAFMLERGIAVRQGIGFLRTELPTILATRTDALSPRMLRVIEELAGDWRCLDQRIDGLSSEIEALARQDQACSRLMTVPGIGPIISSAMVAAIGTGDVFSKGRDFGAWLGLVPKQISTGDRTILGKISRRGNRYLRVLFVQAAWVVLVRIKNWERYGLKSWIEAAKRRLHHNVLAIALANKLARIAWAVLAKGRAFELTRTDDAGVVQPA

SEQ ID NO: 219122 - protein, 402 aa, unidentified
MNAVGIDVSKGKSMVAIMRPFGEIVSAPFEIKHTASGINSLVELINSVEGESRIVMEHTGRYYEVLAHQLSEANLFVSAINPKLIKDFDNDSLRKVKSDKADAVKIARYTLDKWQNLKQYNVMDELRNQLKTMNRQFGFYIKHKTAMKNNLIGILDQTYPGVNTYFDSPARSDGSQKWVDFASTYWHVDCVRKMSLNAFIDHYQNWCKRKKYNFSQSKAEEIYGKAKELVPVLPKDNITKLIIKQAVNQLNIASATVESLRTLMNETASQLPEYPVVMAMKGVGTSLGPQLMAEIGDVSRFTHKGAITAFAGVDPGVNESGSYEQKNVPTSKRGSSNLRKTLFQVMDALIKTHPQDDPVYQFIDKKRAQGKPYYVYMTAGANKFLRIYYGRVKEYLSSLPES

SEQ ID NO: 219123 - protein, 425 aa, unidentified
MLAVGIDWSEEFHPVALGRPGEGVFDVRRVEHSPKAVDALVERIAVLEPEAAEVRVVLEMRHGLLVERLLDAGYVVVPVNPYLVARRRGPARKKDDTEDARIACLLALDRFERLRPVIPHGEIAGELRAIARDDERAARDERRLLNRLRQELIATFPAALEIAGADLGAPSFLRLLERWPSAEALLTASRDELVAFARESRHGWPERFADKVVQALAADQFQPRAYLVRAKADTIRLSASQLLAIGKQRRSWERRMGELLLGAPHRGRAKQPREDERGQSFPGGEVYLSFPGLGDRLAARVAGEIGDHPHQFESPNALQCYAGKAPVTRRSGKSEFVVSCRLAYNRHLGDTVQQWAFCSLRTSPWAREFYNQRRATGKGHNAALRALANRWLEVLWHCLQKDVAYDEAVHTANRNRALQQLAQAA

SEQ ID NO: 219124 - protein, 321 aa, unidentified
METWVGIDISKDTFDAAWIMDGKKNHLKLENGSSGFKRLLNEVPAGSRFAMEATGEYHLNCARYLSSRGNPVAVFNPFAVKMHMQSDLRRCKNDRADAYSIAKFAAEKNTVCWSCPTDDEIRLKHLDAVIDNLQKQIRQSKNVLHSLTQVNLSDDQAVSIIKKTISSLETLMERARNRQLEMVKTSRKEEIALACSIPGIGLETSLKFFTHVGNIERFGSSRSLISWIGLTPRNAQSGTSIHKNGSISRMGCTRLRGQFYMCAVVAIKYNPDCRSFYTRLKESGKPSKVALIAVANKLLRQLYAILTKKEAYVPNFCTKAS

SEQ ID NO: 219125 - protein, 339 aa, unidentified
MDKIAGCGLEVSARELVVALEGQRVQRYANTAAGHRKLLEILTRGGRRVRVVLEATGMYGVDVALLLSTTEGVEVMIANPRAVRDFAKAMMQRSKNDPLDAVVLWEYAMRMPFRAWQRPSQNRLALWSITRRIQALTEQCRGEKNRQHAAGISQTTPACVRRDIARNLRAQQQAIKKLRQEAQKCVAAEAQLQQEYQLLVSVPGIAESSALQILGELAMLPADRDIRQWVAYAGLDPSEHQSGTSVRKPAHLSRSGNRHLRQALYMPALTAIRWEPHLRGFYEHLVRRGKRKKQALLAVARKLLHAIYGMFRTNCIYQGELVFRLTPTEENLVLAQKCC

SEQ ID NO: 219126 - protein, 334 aa, unidentified
MENIALIGIDLGKNSFHIHCQDHRGKAVYRKKFTRPKLIEFLATCPATTIAMEACGGSHFMARKLAELGHFPKLISPQFVRPFVKSNKNDFVDAEAICEAASRPSMRFVQPRTESQQAMRALHRVRESTVQDKVKTTNQMHAFLLEFGISVPRGAAVISRLSTLLEDSSLPLYLSQLLLKLQQHYHYLVEQIKDLESQLKRKLDEDEVGQRLLSIPCVGTLTASTISTEIGDGKQYASSRDFAAATGLVPRQYSTGGRTTLLGISKRGNKKIRTLLVQCARVFIQKLEHQSGKLADWVRELLCRKSNFVVTCALANKLARIAWALTARQQTYEA

SEQ ID NO: 219127 - protein, 373 aa, unidentified
MANGINWIGIDDSADRWVIAHYQGPAATAAREFELLPGESGYRKLIGWIKQLQGETRVVYEAGPCGYELYRHLRKKKIHCEVAAPSLTPRRSGDRVKTNRRDAAKLAKLYRAGELTLITVPDAAHEALRDLVRARRAVQRDVLRARQQLNHLLLRHGHRYREGEHWTFRHWTWLRALELPQPDAQNVFEETLRALDERIEQLRRYDALLEDAAERERYAPYVRALKTLRGVDTLTALGIVAEMGDLRRYQTAPQLMAAVGLVPSEYSTGEKTHRFGITKTGNSHVRHLAIEAAWHYQRTAKEGKTLSHRRRGQSPAMVEIARRCDMRLHRRFHRLTSRGKPSHIAVVAVARELVGFIWAIGQQFDLNERKSSS

SEQ ID NO: 219128 - protein, 367 aa, unidentified
MIVNEVAKNVEKIISIDTAKNSFQVLVVNQKTGKKKNTKVQRSKFVEYILKQGPCLIFMESCSASQHWARLFESFRFTVKLIAAQHVKAFLRNRRVKNDERDAEAIYTCGIQPDTKFVRIKTVEEQTVALLHTLRKAAVSQRVELSNRIRGILAEFGIVVARGRGSFNSEIEALFNECEKIHDVNLRVAISSLFEDYHRLEQREKELSEKIEALNKDNELVKIALTCPGVGSLTASAIVAEVGDASQFRNGREMAAWNGVVPSQHSTGGRSTLGGITKTGNRYLRTLLAQCACAVIQNASRHLEQGKDTHLDRFALRLKLNGKPVKKIMIAIANKIIRILWAMLTQRKTFENKAEETSDISAELQLA

SEQ ID NO: 219129 - protein, 454 aa, unidentified
MRKPQVVPDEDHEVVYERVAAVDVAKASGVVCLRAPDPARPGRFVNRIWDNVPAMRAQIAELGGELLRCRVQMVTLESTSDYWRIWYYVLESIGLAVQLVSASQAKNLKGRPKTDKLDAMWLARLTQWGMLRPSFVPPAAIRRVRDFTRARQDLVAERTRCLQRVEKLLEDAMIKVTSVAKDGMKAKSVVAMVAALAAGERDPRALADLAKGPLRARRDQLAQALDGMFDSHHGMIARSLLDQVAFLDRQITLMEDQAIAALAGVPESWGVDADGQTGPQAGTSPDSPVLAAAHRLAEIPGISLWLAIVIIAEIGLTMTCFPTPAHLVSWMGLCRSAASSGTRHGKGKPKKGNSYARAAAGQAAIGAARTATFLGERYSRIARRRGKAIAQAAVARSIMIIAWHLLNDPQARYRDLGPDFYASRINRDKKIRNHIRGLQALGLTIAITGDEQAA

SEQ ID NO: 219130 - protein, 333 aa, unidentified
MLDTTTFVGLDVHARSIKAVSLDVMTGEVRAATFGYDAGAVAEWVRSVDPRARCVYESGVTGFDLQKRLSGLGVDCVVGAVSKMIKPSADRRRKNDRNDAEFLARMLSVGNVVEVWVPDDECEAARDLTRALEDARDDLSRAKQRLSKFLLRHGLAFDERTPTGRRKGNWTRAHWSWIESIRFAEGADNDVLAYYVDAVRRAAEEKARLEGLVEAEARKPRWRRRVDSLRRLKGVDTATAADLVFEAGEFSRFRNARSFAAWVGLTPSEHSSGESDRRGAITKAGNKHLRKALVEAAWHYLTCSGRPKDLAKGQAPDRGARRHAAKGVLDWLH

SEQ ID NO: 219131 - protein, 346 aa, unidentified
MEHYVGLDVSLKLTSICIVDRTGKVEREGVVASDPEAIATFIKLHAPHIVRIGLETGATSTWLWTELNKMGLPIICIDARHAKAVLKMQINKSDRNDAVGIARIMQCGWYKEVCVKDLDSHATKALLVSRALLVKIKRDIENQIRGLLKNLGLVIGRAKMNMFAVRAAQLAEDRSELFAAVDPLLKAREAVEQQILDLDRKVLRLARNNAQARRFMTAPGIGPVTALCFLATIDDPARFKRSRSVGAYAGLTTRRYASGEIDWTGRISKCGDKMLRSYLYEAANVLLTRVAKWSALKAWGVRLAKRSGLRKAKVAVARKLAVILHRMWIEGTEFKWSSKEAADQPA

SEQ ID NO: 219132 - protein, 348 aa, unidentified
MTQYKRIAIDTSKSVFTIHCIDAQDRPVLRTNLRRGQLLPFFRKLAATEIAIESCSGSHHWGRELTALGHTPRLVPPQYVKPYVKRGKNDRNDAEAICEAAGRPGMHFVPVKSRTQQAQGMVLKVRDTLISQRTVLGNTIRGHAAEFGIVAGKGISTIAPLLSAIEQEATVPPEAKEMFVLLGQQIAEIGARIKEIDAKLNAAHKASEVSTRLATIPGVGRVIALTLSTEIDPSAFESGRHLAAWVGLTPKEHSTGGKQRMGKISRAGNERLRALFVSGATSIINAAMKPSSRQMTEWLRALLLRKPRKLAAVALANKNARTAWAMMTSGETYRRPTPPPGATGALAA

SEQ ID NO: 219133 - protein, 355 aa, unidentified
MNSTQYIGMDVHKESISIAVRNAAGKIVMECVIETKANTILQFMDGLRGDVQVTFEEGTWAAWLYDLLKPHVTKVVVCDPRRNALLQEGNQNDRVDARKLAELLHNNQLRSVYHGDHGLRTLKELVRSYLTITQDLSRVMTRVKAVYRSWAIPCTGKQVYAPHHRAEWLAKINEPGVHRRAEFYYQQLDALRCVRQQVRRELLAESKKHPAWKRLCGIPSIGPIRAAVLLGILQTPHRFRTKRQLWTYSGVGIETSSSADHQVVKGQLERKKKPVEIRGLNRNFNHDLKNLFKGAAIVAATKPGPFAEFYAELVAKGTRPEMARLTLARKIATIVLIVWKRGVCFDAQHLKPQTA

SEQ ID NO: 219134 - protein, 340 aa, unidentified
MEKAIMIGLDIAKNVFEVHGRSAAGEVVLRRSLKRSQVEKFFAKLPKAVIGLEACGSAHHWARLLSKFGHDVRLMPPAYVKPYVKRNKSDAIDAAACWEAVGRPDMRFVPVKTVDQQAALSLHRSRDLLVSQRTQLGNALRALLSEFGIVAGKGRAGLAQLVDGLRAGRHELPADATVAATALAEQRAALDAAADALERRITAQAKADRKAVMLKTAPGVGPLSAHATLATMADPSLFRSGRDFAAWLGLTPRLHGTGGKTHTGRITKQGNQPLRRLLVLGATAWLRHVKARPEKGSPWLRALLARRPIKVVAVAQAARTARILWAMLTHNQPYRAPAIG

SEQ ID NO: 219135 - protein, 399 aa, unidentified
MPELWAGMDAGKGAHHCTVIDTDGIKVLSRRVPNNEAELLELIADVLDLSQDVTWAIDLNAGGAALLIALLVNHGQRLLYIPGRTVHHASGSYRGDGKTDAKDAYVIADQARMRRDLHTLAVGDEIAVDLRILTARRYDLAADRTRAINRLRAQLLEYFPALERAFDYSTSKASLMLLTGYQTPAALRRVGKNRLAAWLKNRKVRNSDAIAAAAVGAAEAQHTAVPGENLAAAMVAKLAKEVMAFDEEIAETDALIEGRFREHRHAEVILSMPGMGPLLSAEFIAITGGDMDAFGTSDRLAGVAGLAPVPRDSGRISGNLHRPRRYSRRLLRVFCISAQVAARWCPVSRTFYERKRGEGKGHKQAILALARRRLNVLWALIRDNRTLETGSPQSDAAAA

SEQ ID NO: 219136 - protein, 432 aa, unidentified
MIVVGIDIAKYEHVAALLDWKPGPCSPSGKDGCKIVKFRNDLNGFLKLMTNIRGFSPDLSNVMVGMEATGHYWMALYAYLKKQGLANVFSINPMVVKAFRGSEIRKTKTDPLDARLIAKTIAVGDLKVTRDKAENYMLLQKLCRFRLNLVREQSKFKVEILTVLDTAFPEYAAVWSKERVFLKSSLMLLSKYSTAKEMAEAGSKRIDTLLQKASRGMVASEMGKELKEAANTSIYVEALEEGNSLEMKFTVEKLKLVEQQIANIEQKIEELYDSLDLTLHTVNGIGKMMAASLASEIGEISQYSNPKTLVALAGIDPTISQSGTVEKKGMKISKRGSKYLREYVYLAAFASLCQNAALRMKYNDYVSNKHKHHNQALIAVGRKILNICFYLMKTGENYVMVFPQFTDQPQKAQEPTEEELDSLISSTERNDE

SEQ ID NO: 219137 - protein, 367 aa, unidentified
MSNYVTAIGLDVHARSISACAFDPMTGEVSRARFGYDPASVAERALGFESPKAVYESGPTGFHLCRALRALGVDCAVGAVSKMHRPAADRGRKNDRRDAEWLARLLACRNVVEVWVPDERTEAARDLSRAPEDARDDLQRARQRMSKFLLRHGLVFDEATPTGRRRSNWTEAYWRWARSIEFDEADDAAAYERYTDAVDRCGEAKRELERRVVEAASRPEWAPTVDALCLVKGVDVATAFLLAAEAGDFSRFPSAPSFAAWCGLAPSERSSGETESRGGITRAGNSHVRRALVEASWHVPMSTRHPKKPRPGHGVAPAASRHAAKCNRRLQDRRDAMSQAGKRPCVANCATAREMACRVWAIAPMVR

SEQ ID NO: 219138 - protein, 313 aa, unidentified
MDLFVGIDVSKTMLDVAVAPTGEKWSVSNSAEGTQQLVQRLKELSPTLVVLEASGGLERRAVASLAAAAIPVVAVNPRQVRDFAKATGRLAKTDAIDAAMLGLFAERIRPELRPLRDADAQELEALVVRRRQVVDMITAEKNRLSAAPPSKRVRTAIGKTIKWLEAQLDEIDSDLDKTVRSSPAWREKEDLMRTVPGVGKVLSRTLLSLVPELGTLGRKQLAALVGVAPMNQDSGAHRGRRRIWGGRAHVRAVLYMSALVAARYNPSIRAFHQRLIAAGKLPKVAIVACMHKLLSILNAMIRAKSPWAPEAIA

SEQ ID NO: 219139 - protein, 274 aa, unidentified
MSMSTTQTAGIDIGKAYLDIALYPSGAALRLANDSEGHGRLLHWLIEHDIARVGLEASGGYERGVAEVLRDAGLEVALLQPRQVRAFAVFRLRRAKNDRLDAQLIAHCTAELDRVRSAPDPRLAPFAEHLRLIEQIETDLTRSKTRNEAYRCPRLKRWLAQETARLERRLKAELVLLAKTVSASADLHHRLTLIESVEGVGRRTALSLLILMPELGHLTRAEIASLAGLAPFDHESGKQCGQRRIAGGRHRVRRSLYAASLAASFRWNAGLKAL

SEQ ID NO: 219140 - protein, 351 aa, unidentified
MLIIGCDFHPGFQQVAIFDNRTGAIQKRRLPHREEAEQFYRSLSGPVRVGMEACGHYPWFERLLEELGFELWLGDAAEVRASVVRKQKTDRRDAEHLLHLLLENRFPKIWVPSLEVRDGRQLRVHRHKQVQARTRTKNQLQAMALSQGVQKKWKLWTKLGRAELEQLPLLPYAAERRKRLLETLDGLEADLVELNRQVEEEVRKRPEAMRLRTHPGVGPVTALAMVLTLGPAERFASGKDVGSYFGLIPREDSSGGKQRLGKISKQGSSFLRFLLVEAGQTAARYDPQLKRFYRRLAMRKNRGVAKVAVARKLATRLYLMLREQWTYPQLCQAVMQVSPSHSVVEPEKPTA

SEQ ID NO: 219141 - protein, 421 aa, unidentified
MSYKIAAIDIHKRVLMVVVASVAEEVADATGAAMEFECRRFGTGAQERNHLVSWLQQHQVREVVMESTAQYWKPVWLDLEPHFEKLHLAQAQSNRAPKGRKNDFRDAKRLARRLLAGELMLSFVPEPEQRTWRLMTRGRLQLVRERVRLQSQVESLLEEARIKLSSVISDLLGVSGRRILEALSQGQTDAVKLAELGDERLQCTKEQLADALRGAPEAGHLELLKLHLERLKLLDEQIDRLSQMSATALKTYQDAVVRLAAVPGFGAESSQQMIAEVGVDAEAFNSAGEFASWTGTCPGSDVSAEENHSSRCPKGNRYVRRILSEAAHAAVKKKGSHFQNVFRRFLPKLGYNAAIWVVAHRLARLTWKILHDGVSYIEQGEETNPRAKKRRAQKLAKALRNLGYTVTLTEINPGTVANASA

SEQ ID NO: 219142 - protein, 318 aa, unidentified
MGGVNAAIEVGKQQLVVQLGSQGEQFSEANEPRAIKRIAKRLLQAGCERVLIEGGSYQSVLIAGLRAAELPVVIVNPRRVREFARSIGQLAKTDKIDARILALYGEQTQPPLRELPDEQSQALRALWVRREQLIEMLVMEKNRLEHTAEKAKAVRHNLCSHIDYLRKQVKQADNDLDREVRNSALWDKYEMLNSVPGVGPVLSVALLSDLPELGRLNRGEIAALAGVAPFNCDSGTLRGQRRIDGGRSRLRRVLYIATVAAVRCNPALKPFYLRLRAAGKPAKVALVAVARKLLTILNAMLKTKTAWRPPCPARPELT

SEQ ID NO: 219143 - protein, 474 aa, unidentified
MTQSTKSPKTKPESLSQLNPKCAGIDVGAAELFVCIAKNSSEQEVRSFSTFTADIKLMIQWLKKNKIVSVAMESTGVYWIPPYEFLEEAGFEVLLVNARFFKAVPGRKTDVQDCQWIQQLHSYGLLRGSFRPTNEIVALRSYVRQRSRLFECAGTQVQLMHKSLTLMNIQLNHAISDITGLSGMNIIKAILQGQRDPKALAELCAGRCRKNKDLIAKALEGNYREEHVFALEQAYEGYEFFHNQIVKCEQAIQKILEFIQLESIEKAQDDSRNRVVKIEESEITLHSKKKCAIKKSYNRSPYSFNAVDAIRKVTKADLTTIPGIDVNTGMKILSEIGTDMSCWRSAKAFASWLGLCPGNKISGGKVLSSRTKPSDNKAAQALRMAAASLYKSNCYIGAFFRRMRARLGAPKAITAVAHKLAKILYRMLLTGENYRELGENYFEQQYQKKILENLKRRAKEMGYALAPMPKEDCI

SEQ ID NO: 219144 - protein, 392 aa, unidentified
MTKTTTRVVIGMDPHKRSVTIEVMDAEETVLDGGRFGTDEAGFAAMRDYVSRFTARVWAIEGCNGIGRHVALRLVALGEEVVDVPPKLSARARVFSTGQGRKTDATDAHSVALVGTRMSGLRPVVDDEQLAVLRVLVDRRGWLGEEHTRKVAQLHHLLLELIPGGAKKNLSAAQAKALLAKVRPRDAAGKARRRVAAELVADLERIYRARKAADKELTELVRTTGSSLLELHGIGPTGAARLLVDVGDITRFPTRGHFASWNGTAPIDASSGDYIRHRLSRLGNRQINKTLHIMATVQLRRPSIGKDYYGRKKAAGKTSSEAMRCLKRRLSDMVYKTMLDDLARNKGTDPGGHRGNVSDSSATGSQPHTGSSDKSLPGPAEHQPRTPLPAAS

SEQ ID NO: 219145 - protein, 384 aa, unidentified
MVASLKYSTGFDCSKEEFVAAILLVNTDQRSVVKATRKFSNTNKGFIDCEYWINQHKKVDVPVVITMEATGNYHENLAFYFYQKGYYVSVVLPNKAKKYLQSLGLKSKNDTIDAKGLAQMGAEQRLSQWEPFSESFYELRALTRYCEQLSANRTQLMNQLSSMEYSMYQIEEVKNGLKELIALTEKQLDQIKERIEELVRKDEKISGRFNNILTIKGLGLLSLATVVAETNGFELFENERQLTSYAGYDVIENQSGKRTGKTKISKKGNSHIRRIMHMPALNVVRCKEERFVNIYERIMSRTTVKMKAYVAIQRKLLCMIYILWKKNEAYDPNYTGTTGNAEQKSLFPHGFGETIKKVGEINPPTQDELPYKAVAGSPLSAMQI

SEQ ID NO: 219146 - protein, 346 aa, unidentified
MMTTTTPTIVGIDLGKNWFHLVGVDARGATVLRKKLNRGQLATYAATAPRCVVATEACAGSQYWGRVFAQAGHEVRLLPAQFVKPYVQANKNDFHDAAAIAEAGGRAGIRCVPLKTTEQLELQALHRVRQRVVMERTAVVNQMRALLLEHGIVVPLGRALFAHRLPATFAEAEQRLSPRLAGVLHRLRQRWLALDVEIADATRDLTAWADHSALCQRVVTVPGIGPLIATATVAAIGNGRMFARGRDMAAWLGIVPGQYSTGGKPTLGRISKRGNTYLRQLFIQGAQSSFLYLKRDQSALGAWLREVEMRRHRQVAVVALANKMVRICWKVLTSEEVYQPYPSRVA

SEQ ID NO: 219147 - protein, 406 aa, unidentified
MELEALHKRVVGLDVHQAQITACALIEEADGSTRIERRQFGAFQRDRRELADWIASLHPDEVVMESTGIYWKSPYAALEKVGVRAKVVNARHVKNVPGRKTDVADAHWLAMLSRAGLLRGSFIAPAPLRELRLLARQRQKLVGQLASEKNRLHKVLADGGVRLGVVVSDLHGQTARAMVKAIIAGQSPHEILHLAGRRLKASREELFDAIQGELTASHCFVLDELMRHIEEIEARIARFDARLLDGLRSEHPALALLQTVPGIDLIGAAMLLVEISTDMDAFGHPDRLASWVGICPGNNESAGKRKSGRARKGNPYVRRLLCEFAHAASHTRSVFKAKFQALLPRRGYKRAIIALAHKLLRTVYFILKRREHYRDSVVDYEALAVQRNAPRWIKALVKHGFLNSAA

SEQ ID NO: 219148 - protein, 371 aa, unidentified
MKEFSKYVGLDVHKESIAVSLAEASGGEVRYVGEIANRPEALAKLARQLAKGAGRLSFCYEAGACGYGVYRQLRELKHECLVVAPSLIPRKAGDRVKTDRRDSLSLARLHRAHELTPVWVPDGAQEALRDLTRAREDMKHMQRQVKQRLQAFLLRHGKRYSGESRWTQAHFRWLETVKCDHPVQQIVFQEYVDTVKAMTQRVQGLDKQIESAARESVFWPVIEALMALRGVSLLTATTVVAEIGDLRRFASAPQLMAYLGVVPSEHSSGGKRSRGGITKTGNGHVRRVLVEAAWTYRHPARKSPALQRRALRTSESVQAIAWKAQTRLCQRYRLLERKGKLKVQVCMAIARELAGFIWAIGHAMPQSSAKA

SEQ ID NO: 219149 - protein, 320 aa, unidentified
MSSAKVYVGIDVAKDWLDVSQRPGGEAWRVSSDEAGVAALVERLKGVQPALVVLEATGGLQIPAVAALVAAGLRTVVVNPRQVRQFAGASGRLAKTDAIDAQVLAQFGEALQPEVRPLPDAATRELAALVARRRQLIEMLTAEKNRLRMATKKVQPNIEAHILWLENELLDLDAGLGETIRSSPVWREQDNLLRSVPGVGPVLSSVLLADLPELGKLSRKEIAALVGVAPLNRDSGQFRGRRTIWGGRSQVRAALYMAALVAARFNPAIRAFYQRLGAAGKPKKVALTACMRKLLTILNAMMRHQTLWQYPLSLDGQDSC

SEQ ID NO: 219150 - protein, 344 aa, unidentified
MAQVTTAQVTTVGIDIAKNVVCIHGVDAHGHVVVQKRLARQKVLPFMAQLPPCLLGMEASGGAHYWAREFTQLGHTVKLMSPQFVKPYVQSQKNDPNDAAGICEAVERPRMRGVPVKSITQQDVQALHRIRERQITARTALINQIRGLLTEYGIVIPQRASQVRHKLPLVLEDAENGLTATAREWLHALAEELQALDQRIAATDQQIERVFEADEACQRLAQLPGIGPLTATALVAAVGDATAFKNGRQFAAWLGLVPRQHSTGGKTTLLGMTKRGNCYLRTLLIHGARAVLRVVDRKTDARSRWLQGVKARRGMNCASVAQANKTARVAWALLAKGDRYRHAA

SEQ ID NO: 219151 - protein, 368 aa, unidentified
MNTVKFIGLDVHKKTITIAIADKCRENKPRVYGTIANELEAVDKFCRKMLSSASQLHFVYEAGPCGYGIYRHLTAKGFDCMVAAPSLIPKKSGERIKTDRRDATNLARLHRAGELSAVYVPDSADEAMRDLSRARQDAVHASRKAKQQLKALLLRHHICYSGRSAWSKAYFRWLADIAMAYPAQQVALQEYIDAVHEAIGRVDRLTDQIRQLVPVWRMAPVVSALQAARGVSLLVAVTLVAELGDLSRFRKPSQLMAYLGLVPSEHSTGERLKRGGITKTGNRHARRALIEAAWAYRLPARVSRFLQKRQQDVSEPVCRMAWKAQLRLCTRYRRLVARGKLKQKVVTAIARELSAFLWAIAKRVQPAP

SEQ ID NO: 219152 - protein, 447 aa, unidentified
MRIVYQRCCGMDVHKDSITACLLLIDEVGEFRTESRRFGTMTRHLKEMAAWLASEGVQAIAMEATGVYWKPIWNILEAEKKFELLLVNAQHVKQVPGRKTDQKDSEWIAELLQHGLLRASFVPPVEIRHLRDLTRMRARIRQTLASFANRIQKVLEDANIKLGSVASDVLGVSGRHMLKALMAGEQDPQRLANLAQGHLRKKIEPLQLALQGHFTDHHRLQLKLLLEFVEFGGQQLSHLDSEIQLLLNKVHAEPDLPGPAEGTVAEAEASPPQPTSPLQTAVELWDSIPGIDQLAATTLVAEIGANMDQFPSAHDLASWAGLCPGNNESAGKRRSGKTRKGSVWLRRALCQAAWSASRTKNTYLAAQYRHLIVRKGKKRTIVAVAHSMLIIAYYLLKRQCTYQDLGPDYFNLRNEDAITHRLVKKLTGLGYHVTLEPARAEAGSETA

SEQ ID NO: 219153 - protein, 316 aa, unidentified
MLSIVPSAGVDVGQQYLDLGFFPFAKPMRVANTQEGIDKIVSTLRQKGATKVGLEAIGSYAHRLVCALSEAGFQVFVINPRRIKAFRDAEGLIAKTDRLDAALIARFAHKMSQDLRPLPDAELLTLKALSTRRRQLTELVAMEKTRLKQAANTMIALSCRELIAILEMKCAAIEEELRRRIEANSQMARNRDILLSIPGIGGRISTLVVVEMPELGTIDRKAAASLAGLAPHPSQSGLSKGRNAIAGGRPCVRAAFYMAALVAARTNPKFKQLYKDMRDAGKPAKVALVAIARRIVALANALIRDNLTFDESHFVS

SEQ ID NO: 219154 - protein, 451 aa, unidentified
MAKQSNRFDEVRRYVAGVDLAGNADHYVCGPRKDDGTHDIEHFGTTTNELLRMAAWMKERKVESAAMESTSVYWIPVYDTLESAGIEVILVDTRTVKMVPGRKSDVKDCQWLQRLHSCGLLRGAFRPPEAFNAVRSVIREKGNVLQMRTQAIQSIQKALDQMNIRLHHAVSDIDGMTGMKILGAIVAGERDPRKLAALRDRRCKKSEAEIAEELTGNWREEHLFNLKQAYGTLCFLDGCISDYDMKIRAMYAKIAAAFPPVDPPPDGGGRKPKDKEDAKAKADLARICGGFDMTKIDGIGYDSAAAILSELGPKLDAFPTESHFISYIGLAPALGKSAGKNVSSRKKHKNTSRVGIVLKMAASTLSRSESSLGARYRCVRSRTCSRTAIKDVAREMAKRILRGIKYGQSYIDEGERAYMERTRERIIKSMKKKISKLGISAEELGICAVAM

SEQ ID NO: 219155 - protein, 346 aa, unidentified
MMIIGCDFHPSWQQVSWLDMATGDCGERKLVHASGEAKMFYQQLGAPVLIGMEATGNSQWFVELVEDMGHEIWIGDAAQIRASYVRKQKTDKRDAAHILKLVVEGRFPRLWTPDREQRDLRQLVLHRHKLVEIRSRVKNELQHLSLNKGMQRKAKLWSQAGQKMLRELPLKPWAGCRREDLLGLLAMLNQQVGKLDAAVQTAAEQNPQARLLMTQPGVGPNTALAYVLTIGDVSRFRRGKQVASYLGLIPREHSSGGRQKLGVITKQGNRMLRSLLVEAAQIAVRFDPEMKKQYLHRCHQKPKGVAKVATARKLAVRLYWMLRTNVAYPEIVRIESSPRVPLVGAS

SEQ ID NO: 219156 - protein, 351 aa, unidentified
MNSITIGMDLGDKNNVICVLDNASKPIKKVTIENNDASLRSFFNQYKGVVVALEAGTHSPWIGRLLSSLGCSVLVGNPRKLRAIWDSDQKSDDRDAEMLARIARFDPDLLYPINHRGEQAQIDRELLQARDLLVRNRASLINHVRSSVKSLGGRMPSCSACCFHRKGEQHLPLVLQEYLKPMLDIIEQLTLQIKEFDQKIEQISSQRYPETELLRAIQGVGPLTALAFVTTLEDPDRFSKSRQVGSFVGLTPRRDQSGETDKQLRITKAGNPYLRRLLVGSAQYILGHFGEDCNLRRFGLRLAARGGKNAKRRAVVAVARKLSVLMHCLWQRGEVYDPLYSLKTGCLQRAA

SEQ ID NO: 219157 - protein, 412 aa, unidentified
MLAVGIDWATSSHAVVLMAKPGEVIARFTFENSLEGYLHLLDRIRWYAADQQIEEVAFAIESRNLRLVDFLLANGLTGYLLDPNRMKGYRQRYTSSGTKSDGRDAFILADVLLKDREQLTQIKAESEAVQRLKMLLADRAGFVDSQTALANRLRTCLREYYPAVLEMFADPTGQAALAFLETYPSLARTKDLAAEELRRFLKDHHAFTKQRLVAMLGVLTKPAIPTPAVIVEVKQKTMLGLAAQLRGVQKIIAGFDAEIQTLITGNSEIKRFDGLPGAGPIISGTLYVLFGEDRSRYHDASEVQSYVGVVPRTFQSGASRVIGFRFGCSQGYRTILTRWAFSCLRRCQWARRYYQRKRREGKNHYHALRCLANILLKIAFTIWRDRADYNEDIYLAQVARHQMNNELIPGSP

SEQ ID NO: 219158 - protein, 340 aa, unidentified
MGDAVLYGGLDLHGDNVFCSLLDGARQVIFERRLPNDLTTIRSTLEPYRKRIQSLAVESTYNWYWLVDGLKKLNYPIKLANPARMQENIGLKHANDKTDARFIARQLINGTLPEGYIYPEETRGVRDMLRRRMRLVHARSGEWISLESLIARHTGRDFGVKELKECELGEVLAGQPHALTMAHASFRHIEFLDKEIKTLEKAVMEELPDREDYTRLMTVPGIGPVLARTILLETGPVTRFKEAGNYASYCRAVKSEHTTNGKKKGECNGKSGNKYLAWAYVEAANYAVRYSPEIRAWFQRKQAHSGKRVIALKALANKLSKACFFMLRDGKDFDVKRLVG

SEQ ID NO: 219159 - protein, 360 aa, unidentified
MAKARTLVGLDVHATRIVAAVLDAETGELQFFEMGSDVSKTGGFCAALPRPVRVAYEAGPTGYGLARELVKRGVECIVAAPSKIPRASGDRVKTDRRDAELLARLLLAGKLHAVRVPDDEEEALRDLVRAREAVRVDLMRCRHRLSKLLLRHGIRFDDGKAWTQRHRDWLATVTLEWPAAQATMLDAQGAIDLLSHRREQLEREIVALLLSSPWTVQVGVLRCLRGVDTLTAVGLCSEIGDFARFARAEQLMSYVGLVPCESRTGQQRRLGSITKTGSGHARRLLVEAAWHYRPRPSVGRALSDRQEGQPPEAIAIAWSAQRRLHRTWARLEARAKRRTIIAVAAARELAGFCWAITQIE

SEQ ID NO: 219160 - protein, 452 aa, unidentified
MRQRKKGKSVKVLHQIQPDAAGIDVGATEIYIAIPDDHRTPETMRCFGTFTQDLHEAARWLQSCEIKSVAMESTGVYWIPIFQILEIYGFEVLLVNARHVKNVPGRKTDVQDCQWLQYLHSVGLLRGSYRPAKDVCAIRALLRHRDSMVKISSTHIQHIHKALTQMNLQIHNVISDITGLTGLAIVDAILAGEHNPKKLATLKHGRIKASDSVIEKSLEGNYLPEHLFTLKQALQSYRHYRQMIRACDKEIESYLIDFESRIDPDENPPPLPRIKKSKPKGNEPDFNLHSHLYRVFGTDLTQVDGVSVLTAQTIFAEIGPNLSKFPTVNHFCSWLGLCPNNKISGGRILSSKTRPGSNRAAQALRLAAHALWRSQSYLGHYYRRMRARHGTPKAITATAHKLARIIFHLIKTGKTYDETVFADQENLHKRRLERNLKKQANFLGYQLVPCVT

SEQ ID NO: 219161 - protein, 431 aa, unidentified
MLKINPLSTLYVGIDVSSKSNYVCALDFFKNKYINSSFANNQPGAEELALKILECLKEHPDITTLVAALESTSVYSIHIANYLSSCEELMRFKPYVFVLNPKCTANYKKSYIGLGKSDPIDAFVIADYARAGNIESEPWRGSQFLALKRLTRHRLHLVECMTREKTYLVSNLYLKFSELQMLEGDDQPFCDIYGATSSSVLMEYFSPEEILDSSEEDLIAFLAKKSRNRIKDISKTADLLKKAARDSYRLDQALYEPLNVSIASSFNCIETFKREIKVIDNAIEKEIKGLNPNAFIILQSIDGIGPVFAGGIIAEIGDITAFHSSDALAKYAGLTWKSNQSGDFDGEDTPMIKAGNRYLRYYLGEAANSMRKHNVEYGTYYRKKYNEVPKHQHKRALALTSRKFVRLVYGLLARNQLYSGVSLDTSIKDSN

SEQ ID NO: 219162 - protein, 344 aa, unidentified
MEHYAGIDVSLERSSVCVVDALGKIVKEAKISSEPAALVAFFEALGFAVKRIGLEAGPLSQWLHAGLTRAGFEAVLLETRHVKAALSAMTVKTDRKDARGLAQLIRMGWFRPVHAKSIRSQEVRALLVARKQLLGRLIDVELSIRGILRGFGLKVGPVTRKGFDARIRELVTGQATLERIAGAMLSARVALKAEYEKLHKTVLAIVRDDVVCRRLMTVPSVGPVVAITYKSAIDDPNRITKSKAAGALFGLTPRKYQSGEKDVTSGITRAGDEMVRTALYEAANVLLARITRFSKLKRWAMDVAKRRGSKRAKVALARKIAVILHRMWVDGSTYRWTETQPIAA

SEQ ID NO: 219163 - protein, 452 aa, unidentified
MAKRSKKRCEELPILHPYAAGIDVGASELFVAVSADRDPQPVRSFPTFTRDLNALADWLQQCGIRSVAMESTSVYWIPVYQILESRGLEVCLVNAQHVKNVPGRKTDVSDCQWLQYLHSVGLLRASFRPPGFICAIRSLWRHRSSLIQMAAEHVLHMQKALDQMNLQIHRVLNDITGMSGLRILDAILAGERDPVTLARLCHGGVKSSEDTIAKSLEGDYRPEHLFALRQSLAAFHYYQQLVVEVDQEIQRQLGSLETAITAEPTVPKRTKASAYQRRRYEPKTFDLRGELYRIFGVDLTNVPGISAITAQTILCEIGTDVSRFRNASAFASWLGLCPENKISGGKVLYTKSRRVRSRVATALRMAANSLHHAKDYLGEFFRRITRKLGKPQAITATAHKLARIVYHLLSTREAYNESVFHRCDEEANKRAQYRLRKQAAQLGFQVLPVQNG

SEQ ID NO: 219164 - protein, 461 aa, unidentified
MPDLCGETGVPLSGLRPSLLDTGPRPLTEAAIGFQRQRPEMVHQRTLVRGKREPLGSTKNKEGAMSAVVGIDVGAYRHAAAVCRAGEREAERGVFRLSADRAGFEELDRWLERQAPVERVVMESSGHYYWPLASHLHRHGYRVAVVNPLQAKYFAKSRLQRSKSDPADARTLAAMGMSEEPRVKDPLLGAEAKEAARFWGGLVKEQGQVRQKLLRLVEIGFPELKECFEDPLCETALAVLREAPTARAASHKRVSTLADATRPGGRRRLGESKARRLHELAKQTIAPPELDAQMSFEVGMLIQQFDLLDKQIEIAEQRVTEVLDSELARRLQTIPGVGPALAATFIAEIGDIWRFEDFDQLASYAGIHPKEQSSGTKGQNPETSWHMAKTGNSYLRSAAYKMAVVGIQHNPLIRAHYLRKRAQGKSAMNAIGHCMSKSLAIVWGVWRSGLDFDPTLGGPRS

SEQ ID NO: 219165 - protein, 458 aa, unidentified
MSSNQRRLDYTDFGRSKQSDFFAVAKEPEFAMNTLIPIRDRKYVLSVGLDWADQTHALCQRVWADGQRQLLQIGADPASVEAWLAQLKALAGPQGRVAIGFEQSRGALFEMLRTHTDWIDLYPLNPLTVSKYREAFFTSGAKDDPVDSQLIEELLYHHLDRLRPYQPPEPELRELDLLCQQRRKAVDAAVACANELCSLLKVYYPVALDLHDELRCSLSLHFLKRWPTLEQLKKAKPQTLRTFYYQHHSRSQSLIQQRLEKIARAQAVTDDPALIRPLVLSLQRLVNQLLSLQASVAAFDKAIQALFAKHPDHLLFESLPGAGPQLAPRLLAAFGSDRAALSLPSEMQKKSGIAPVLDRSGQGKTIRRRWCRSKFLCQTFHEFAAYSIPHSIWAKAYYQELLARGKSHNAAVRALAFKWIRIIFRLWQDRSLYDENHYLQALRNRRSPLCQKIPYPNA

SEQ ID NO: 219166 - protein, 415 aa, unidentified
MSTCTNTGAAGEAPSFSVFCGLDVGKGDHHAVALDPAGGRLADRPLPNDEPALRSLFSELQAHGEVLAVVDQVASIGALPVAVARSMGIVIAYLPGLTMRRLADLHPGEAKTDARDAYVIADAARTLPHTLRRIASDEQTIAELTILAGYDDDLAGELTRLANRLHDALTHVHPALERLLGTHLNRAGVLELLAAAPTPTQLRTLGLSGIQALLAPRSRKLATRLPEQILTALDQQTVVIPGTDTFGRVIVGLARQLLNARDERDSIAEQLTARLETHPLAEVLTSMPGVGVRTAITVLIHVGDGTAFRSAAHLAAYAGLAPVTRRSGSSIRGESASRRGNKQLKRALFLSAFASLRDPISRMYYDRKRAQGKTHTAALLCLARRRTDVLHAMIRTSKTYQPPALQPAQDPSVAA

SEQ ID NO: 219167 - protein, 318 aa, unidentified
MTPTPARFVGIDVSKSTLDVHVRPDATAHQFANTDAGCRALIEWLTPLAPSLVVLEATGGYEGTVVAHLSLAGLLLSVVNPKRVRDFAKALGRLAKTDAIDAAVLAEFAEVVRPPVRPLPDANAKRSQAILARRGQLIGMRTAETNRLGGETDAFTRASIAAVLRTVGRLIGRVDRELDTAIRSCPAWAAKDDLLQSIPGIGPVVSRTLLAEMPELGTLTRGEVAALAGVAPMNRDSGQQRGKRRIAGGRAAVRSVLYLASQAARQGNKQWRAFSDRLKAAGKAPKVIRIALARKLLIVANAVLRSGQAFREIEPKIA

SEQ ID NO: 219168 - protein, 412 aa, unidentified
MDVLYPCCAGLDVHKDSVYACVRRVGPGGAVRETVKVFGTMTPELLQLADWLAGEGATHVAMESTGVYWKPVYYLLDEHFELLLANAQQLKRVPGRKTDTQDCAWIAKLLQHGLIAASFVPPEPQRDLRELCRQRVQLGRQKAAASNRIQKVLEDANLKLGSVASDVLGKSGRAMLRALIAGETDPEKLAALALGRLRKQLPRLRPALTGRVTEHHRFVLKLLLDEVEMIEGLVIRLEERIGAVLGPFAEAVRRWMTIPGVDVRTAQAVAAEIGTDMSRFPSECHLAAWAGMCPGNDESAGKRRSGKTPKGSPWLKRALVQAAWAASHTKDTYLSAYYRRLAARRGRKRALVALGHTILVIIYHLQRNGTDYTDLGGDYFERRDKDKLTRRLLRRLESLGMKVTVESSEQAA

SEQ ID NO: 219169 - protein, 329 aa, unidentified
MLFVGVDVSKDHLDCAVITDDTGKLLGQRSFLNASEGIGRLLSWVRRLSGAGDASIHVVVEATARYHELVANGVVAAGVAVSVSNPARVRSFARGIGILSKTDQIDAFVLARYGQLARPKLWYPPERELAELQALLSRLDELEGDLRRESNRHEQARARACPEAVARSFLESMQALKAQCHTLRKTIAAHLDASKALRDDLRRLLTIPAVGPKTAARMLVLLRSRHFESARQAAAFLGLVPVERQSGRSVHGRPRLSKAGNPRLRAALYMAAVVATKLNPDVRAQQARLLGRGKAKMSTLGAAMRKLVHLCFGVLKSGSDYKVGVAEPA

SEQ ID NO: 219170 - protein, 356 aa, unidentified
MSQKLNAAIAVIGIDIGKNSFHIVGHDHRGAIVLRQKWSRGQVETRLANLPPCLIGMEACVGAHHLSRKLQMLGHDARLMPAKYVRPYSKGQKNDFRDAEAIAEAVQRPTMKFVATKTADQLDLQALHRVRDRLVGQRTGVINQIRAFLLERGIAVRQGLRSLRSELPGILATRTDVLSPRMLRIIEDLAGDWRRLDERIEGLSSEIETLARQDKACERLMTVPGIGPIISSAMVAAIGTGDVFSKGRDFGAWLGLVPKQISTGDRTILGKISRRGNRYLRSLFVQAAWVVLVKIGPKHWDRYGLKSWIEAARKRLHHNVLAIALANKLARIAWAVLNKGRAFECVKTEETASRPA

SEQ ID NO: 219171 - protein, 344 aa, unidentified
MGKRVFVGIDVHKRTYSVVTVVEGMVVKKWRTVASPEKLAQQLARYFPGASIKTAYEAGFSGFVLHRVLETAGIHNIVVNPGSIEVAIHNRVKTDKRDALKLATLLEAGRLKGIRVPSLQQEQQRLLTRTRQQLMEERSAIKNKIRMKCHQMGLIDPDDTREMSHKLVVEMLARTPGPEFSLIIEAYWSIWKSIETQMNKIEQKLKEQAQVDPNETIYRSAPGIGSLSARILSNELGDLRQFTNERQLFSYTGLTPSEFSSGDTVRKGHITRQGNKRVRYILNQAAWRAIKKDRDLKDFFERLAPRTGKKRAIVAVARKLIGRIRAAFKNRQPYQMNPISLESA

SEQ ID NO: 219172 - protein, 350 aa, unidentified
MNARSDAACFVGVDLHKDTLVACTIATKDREVSYRKIACVAREKVREFLADLPRPSVVAIESVGFYRWLWTEAEPIVDQVVLADARGCRALAGRRIKTDREDAFNVAELLMTGRLPTAWAPPNNIQRLRDLTRHRNGLSRDHAKTLHRVKSIMNRLNRPGPARMDAAGLQRYLVASVERIEADDLMMLWQHQRRLVEVEQDRSAIERRIIDVMRAEEFRRLREILESIPGVGLITAATAIAEIGDFSRFPDAKAIGRYAGLTPTGYSSADKHRLGRICKTGSPDLRWALQQAAWTAIRCEPAFKKVASKISKGEKKKKAAAVAVARKLLVLMWTLVRKDELYKAREPLAA

SEQ ID NO: 219173 - protein, 318 aa, unidentified
MNVIGLDISKDTIDVTLITAKGEMDYIKIGNSHEGFEKLIGWIKTKRVRKIVISMEATGVYYEQAAEYLSAVYTVYVINPLKIKDYAKSQFSHTKTDKADSKLIADYAKRHLDKLTPFRPSENPMLYKLINLLQQLKQQKHESQNRLHTAKDPFIRSTHETIILLLSKKIDETSKRIESTIKQQKSLNTEYQNLQTIPAIGKDTAAILLRHLTDKTFRTANQFVSFAGLSPKIEQSGSSVNKKGRLSRYGHRQLKRALFMPALVAYRINAFPQLVKNLEAAKKPKMVVIVAIMRKLAKIAYYIHKTQKPFDKARHQTV

SEQ ID NO: 219174 - protein, 420 aa, unidentified
MNAVGIDVSKGKSMVAIMRPFGEIVSAPFEIKHTASDINSLVELINSVEGESRIVMEHTGRYYEALAHQLSEANLFVSAINPKLIKDFDNDSLRKVKSDKADAIKIARYALDKWQNLKQYNVMDELRNQLKTMNRQFGFYMKHKTAMKNNLIGILDQTYPGVNTYFDSPARSDGSQKWVDFASTYWHVDCVRKMSLNAFIDHYQNWCKRKKYNFSQSKAEEIYGKAKELVPVLPKDDITKLIIKQAVNQLNSASTTVESLRTLMNETASKLPEYPIVMAMKGVGASLGPQLMAEIGDVSRFTHKGAITAFAGVDPGVNESGSYEQKSVPTSKRGSSDLRKTLFQVMDVLIKTHPQDDPVYQFLDKKRAQGKPYYVYMTAGEQVSKNLLRTSERISFISSRILIIIIIFRPALVWWSYFDT

SEQ ID NO: 219175 - protein, 345 aa, unidentified
MSPYKRIGIDTSKAVFTLHGIDQQERPVLRINLRRAQLTSFFAKLPPTEIAMEACGGAHHWARELTALGHEVRLIPPQYVKPYVKRSKNDRNDAEAICEAAGRPGMHFVPVKSITQQAQGMVLKVRESLVGQRTQLVNTLRGHAAEFGVIAGKGLGKVAPLLAAIEQETTIPSDAKDMATLLGQQIADLDAKIKELEVKLTAAHKANPVSQRLATIPGVGPVIALTLAIEIDPAAFESGRHLAAWIGLTPKEHSTGGKQRMGGISRAGNERLRVLLVVGATSVINAAMKPGSKQMTDWLRALLMRKPRKVVAVALANKMARIAWVLMTRGQVYRRPAAPTAAAGA

SEQ ID NO: 219176 - protein, 436 aa, unidentified
MNDAEFAAWVAIDWAEHQHYWHLAVSATSRREKGHLDNTPLAIDQWASGLQLRFPQAPVAVCLEQSRGPLAYQLAKYAHLVLYPVHPATMARYRAAFFPSGAKGDPGDAALLLEILLQHREHLRRLEPDSPETRLLALLAEQRRTLVDERTRHSNRLTAALKLYYPQPLDWIDDIDSPLGCDLLQRWPTLAHLQRARADTLRRFFAAHNCRSTPRLEQRLQAIHQATAAVHDPVLLDAGATATLSLVALLRSLNHQIAALDRRLAELTPKHPEAYLFAGLPGAGPVLLPRLIVAFGTRRERFQSAVELAAYSGIAPVCRQSGHSKTVVFRRACPRFLRQTFHEFAACSKLKSGWARTFYQRQKDRGKSHPAAVRALAFKWIRILFRCWQDRTPYDEERYLRCLQQRHSPLASPDTPPACSHPAQGRPADPKRDHAE

SEQ ID NO: 219177 - protein, 428 aa, unidentified
MADHLNNKPYGAWIAIDIAKNSNAVLSETKDGKRQNFRMANSAADHDRFIAFLKSLPSPCIIGFEATGNYHRALGHRLATAGFEVCFISSVASARYREVMFNSWDKNDPKDAAVLLELLKQGITQRYVDPFIAGHHDLQELSKTYYQVTLSRTRLQHSILTHYLPLYFPEMGKWWNSTRADWWINYLLRFPIPSAVTKHSQEQFCEIASPVVGRKVNKAAKLIELYETAQHSIGLPVEADSLACKTFQIQLRRYQEINACRKQLEETAQAVLADNPDSAILQSVPGIGPINALTILAEGGDLRRFSHHRQFLKYCGFDLAKNQSGNYRGQEQISKRGNARLRLALWMAVNTAIAQPENSFQQKYSRYIKGAPQDRDLQRKARTAVAAKMARVVYGLVKSKQMYQSYYEKALPSGSIPLYRAVEAARTS

SEQ ID NO: 219178 - protein, 316 aa, unidentified
MSEPVYVGIDVAKASFEVAVSGEAQTLTLGNDEAGHAELCQVLVPLAPRLVLLEATGGHERLLALALAAAGLRVSVINPRQARDFARCMGKLAKTDRIDAQVLRGFAALLDAQGHEPRALLDEQQRELTALVTRRRQLVAMLVAQRQRLALAHPKAKASILAIMDAIAAQLHDVDGQLREHVQAHHADLAKLLTSVKGVGPTTASTLLAQLPELGHLNRKQITSLVGLAPMNRDSGTLRGQRHIFGGRADVRRVLYVAALVGTRFNPVLKAFYAKLLAAGKPKKVALVACMHKLLIILNAIARSKSPWSQEIAGIA

SEQ ID NO: 219179 - protein, 349 aa, unidentified
MKQYYAGLDVSMEETAICTVDEKGVIAYEEMVPTKPKLIDMCLKAKGLPIEKISLESGSLSHWLVKELMSFGWRVVCIDARSISAVLALNTNKTDRNDARGIAEALRSQCKYSREVYHKSQGSMELCTLLGARRTLVEESKATNNTIRGLLKAYGICLGVGGNEKISQFVRDKIINQQEVTKLGFEPLLVIFETLNKEIEKTEETLLKIAKEDAVVKRLMTIPGVGFITALTYKVTIDDPSRFKQSNTVGAYLGMAPKQRSSGAMKRQGRISKCGSKELRTLLAGAGLSLLMRCKKESALKTWGLKIQEHHGNKKACMAIGRKMAIIMHRIWSNNTVFDPGISKETSNK

SEQ ID NO: 219180 - protein, 399 aa, unidentified
MKNRDWYGNVACVGMDVHYQFSNVTMRNAAGEVVRRERLDHRDRGVLRRRLAQWPSGLEVVMEASFGWNWLADEMTAAGMNVSLSNCYKLEQMRKARGGAKTNRKDADLVSLLPMELSDWWKVWLAPPEVRDRREWMRYRADLVGVQTQTKNRIHAVFHRHGIFHEFSDLFGGKGRAFLAELCREGRHAGGVLADGALAALRGQVRLLDQVRGQLAEVAWRLRQELERDELTRRLSSIPGFGRILAHVLRAEIGQIERFGGNHNRLASYSLLGPRALETGEPDPTKTPVGRRLGHRGNRTLKWTFIEAARAAVRHGGRYRALFDRVTRGGQENRNRGYIKVARELVKVVTAVWRNGTTYQEIPPARGGQSPRRQMEQFFGSTRSGTGQRYRPMVPAEQA

SEQ ID NO: 219181 - protein, 370 aa, unidentified
MNDLIRIGIDTSKSVFVLHGVNAAEQPVLRRKLRRRQMGEFFAQLPPVQIGIEACGAAHYWGRELAALGHEVRLLPPQYVKPYVQRGKNDAADASAICEAMSRPRMRFVPVKTAEQQAALMLVGVRDQLVARRTQLSNMIRGYAAEFGVTAAKGLDKIEPLLARLAREPGVPEEAKALFAVLGEEFAALKPRVRKLEAQLLVWHRHNELSRRLVEIPTIGPIGSALLTMKVTNPHAFRCGRDFAAWIGLTPKDHSTAGKQRLGVITRAGDETLRRVLVVGATALIQQARKGRGDPSPWLIELMRRKPPKLVAVALANKTARIAWKLMVSGERYNRQHARGGFVPPTGSLAPGARRQGRVAPPAAVACGQP

SEQ ID NO: 219182 - protein, 429 aa, unidentified
MKQKSNSLTKGDRVGKTTKARGPVQRDAKEVMAELVVKLSQKLEPQSTRKSEEDPRKAGMPGPNRDRLTVGVDLGDKWSNFCILGLDGEKLTEGELRTTPQDFAEFFQAMAGARVVMEVGTHSAWARDVVARSGHEVLVANPRQMEGPKQRKRKNDRVDAHKLARVGRMDPQSLFAIEHRSVEVRQDLVTLRARHAVVAVRKDLINTVRGLVKSMGTRLPKCSTESFAKKVEGALPTEVRDALLPLVRLVEALSSSIKGYDERIEKLATEKYPHTKLLRQVKGVGPLASLAYVLTLQDPQRFVKSRDVGPYLGLVPKQEDSGDSQPQLRITKMGDMMVRQLLVGSAHYILGPFGPDTDLRRYGLRLSERGGKNAKKRAVVAVARKLAVLLHCLWVSGEVYEPLRHALPKATRKKAERPRAAEASGRAAA

SEQ ID NO: 219183 - protein, 349 aa, unidentified
MDYRVYCGVDFHARQQTICSLTTEDGVMSTHELKHQNKAELKAFYSQFSGPVLVGLEASGYSPWFEQLLESLGHEVWLGDATEIRRRARRRQKNDRRDAELILDLLIHNEFPRIHRPTATSREILRMLRYRHKLIKMRTIIKNSLQALSIQSGLSLRARLFTHAGLEQVRATAMSPVMQYQRDQWLQSLEPLNQRILEAANWLQQQAAGDERIERLRTHPGIGLLTGLGLVHTLAPVGRFSNQRKVAAYVGFDPKERSSGEKKRYSGISKAGSRVLRFLLVEAAQTACKGDPELKRFYLRLLHRHGKPKAKVAVARKLLIRSYILLRDGIDYAEFNRRAVAARLAREVT

SEQ ID NO: 219184 - protein, 343 aa, unidentified
MEAVTTIGLDIAKSVFQVHGVDGHGKVVVRRQLKRRYVLAFFKKLSPCLVGIEACATSHHWSRELQALGHTVRLMPPAYVKPYLKRQKNDAADAEAICEAVVRPNMRFVETKTAEQQSCLMLHRTRHLFVRQQNAVINSIRAHLAELGIVAPVGRNGVEELLDIVADPDDDRVPEVARDCVAALGAQLRMLKAQILEFDRRIMAWHRSNEASKRLDEIPGVGPALATALVASVADPRAFRSGRDFSAWIGLVPKQNSSGGKEKLGGITKRGDRYLRSLFTAGALAVIRYAKMHGTKHRPWLTALLARRPTKVAAVALANKIARMAWAMMSNGERYREPAALAR

SEQ ID NO: 219185 - protein, 345 aa, unidentified
MDMKVLGVDLGKSVFHLIGMDEHGKIVLRKRYSRSQLFKFLANTPACVIGMEASCGCHNIGRTLSTFGHDVRLIPAQFVKPFVKSQKNDYRDAEAIAEAVQRPTMRFVPIKTEEQLDIQAVHRVRERLLAQRTSLVNQLRAFFLERGLMVRTGRAYLLRALPEVLARAEEIVSPRMFRLMQSIVQQWRNLESQIGDLEEEIQRVAQADPACQRLQTVPGVGPLAATAIVAAVGNGAAFQKGREFSAWLGLVPRQCSTGGQTKLRGISKRGNEYLRRLFIHGARSVCLHVNRTRHVWGEWITKLKNRKPSNIATVALANKLARIAWSVLNRNEVYRGQVCSLEVIA

SEQ ID NO: 219186 - protein, 451 aa, unidentified
MTKKKMELDIINPNCAGIDIGSKSHFVAVGQALEDVKEFGVYADDLTAICLHLKEYGITSVAMESTGNYWQNLYVELEKHDMEVTLCNGKFTKHAKGKKTAVKDCRWIQKLHALGLLTGSFLPDETTEQLRTYCRQRTNWIDLAAEASHKMQKYLRLLNFRLDVVVKDICGLTGLAIIADICKGNPDPEKLSMHRNGNCKKSQEEIAKALKGNNRTDFLFGLNQEYDSYLFFQKKIAACDTQINAFLKTQINSNPDKKKFKTDEKIHKRINKNSIKGIDLNQAAYQYFGGVDLMKIEGLSHSTILTIMSEVGPEGFTKFDSSKQFTSWLRLAPNNKISGGKILSNKIPKGSNRLKIALRHAANAIGNLKDTHLADFFKRVAYRKGRATAVSATARKLAVIIWNMISKGVQYKAPTEYLFLDQKRKNNVIQKIKKNIAKLEIKPEDLGFVTV

SEQ ID NO: 219187 - protein, 377 aa, unidentified
MEKLIRIGMDTSKSVFVLHGVDAAEQPLLRKKLRRQQVLEFFGKLAPTRVGLEACGAAHHWARALAALGHETVLLPPQYVKAYVKRGKNDAADAAAICEAMSRPAMRFVPVKTAEQQAALMLAGMRDRLIRRRTQLSNAIRGYAAEFGLIAAKGLDKIEPLLARIAADATLPGLAQDLFAAHGKEYAQLKLQIATIEARLMAWHKHNELSRRLVEVPTIGPIGASLLAMKVTDPHVFRSGRDFSAWIGLTPKDHSTAGKTRLGVITRAGDETLRSILVVGATAVIQQVRRGRGHPSPWLADLLKRKPPKLAAVALANKTARVVWKLMVSGERYNPARDLARAAVARAGRGATLRAGFAARPALQSCNTREATAMTKA

SEQ ID NO: 219188 - protein, 422 aa, unidentified
MNEQQANGYSVYVGIDWADSKHDVCMQPKFSDEREFAVIRHRAEAIDAWAKDLHQRHGGCIAVAVELTKGPIVSALQKYDFIDIFPVNPITLAKYREAFQPSRAKDDPTDAELAVDMLLRHPEHFKVLKPQSAEMRALATLVEQRRCLVNERIRITNRLRSALKQYYPQVLEWFDHIDTPLFCAFVKRWPTLTQAKRARSNTLKRFFHEHHLYRDGVVDSRRQAINAASPLTSDEAVIVPYRMQALVLVGQLELMLEAIHQFDDEIEQLASQHPDYALFQPLPGAGPSLTPRLMVAFGEQRERFSSAGDVQKLSGIAPVTERSGQKHWVHWRLQCPTFMRQTFVEWAAQTINKSYWAGVYYRQQREKGATYQAAVRSLAFKWIRILYRCWQTGVAYDESRYLKALERRGSPLVRSQKIPESA

SEQ ID NO: 219189 - protein, 418 aa, unidentified
MEVMYDVSAGIDVHRDTVVVSIRKRTEHGREVVETRTFATFHDSLLEMAAWLEEHEVPIVGLESTGVYWKPVVRVMQLRSRKQVIWLVNPAEVKKVPGRKTDVTDSQWLSKLVMHGLVSPSFLPGLELEELRKLTRFRTKLVSEQSSYKNRLLKELESSGIKLASVCSDVFGKSGRAMLAALLEGKRTPAEIADLAVGALRSKIPTLERAVSGSFSGATQFVLKQILERMDQLQRDLASIDEQIQQRLQRYAPDVERLRSVPGLDHITIAAILAEAGPDMSVFRGAEQLAAWSGLSPGSNESAGKHKAAPTRKGDKYLRTALVQAAWSAVRTRGAFWAQKFRQLIVRLGPKKTIVAIARRMLVAVFYMLRDSTPYRPPAPATPTPDKTKRLVRRLTAQIEALGFRVTLESAGVAAPAT

SEQ ID NO: 219190 - protein, 430 aa, unidentified
MKSNTQNAKIEAITEKTLVLGIDVGSEMHYARAFDYRGIEYSKKPFKFSNTEAGFVTFKEWILDLKERHEKDKVIPGMEPIGHYWFNLGKFLQDNEMKPVLVNPHHVKKSKELDDNNPTKNDRKDPKVIAGLVREGRYMIPYLPDGVYADLRTASNIRFQLQAELTRIQNRISRWFNIYFPEYKTVYGKPDAKSGMLILKAAPLPEDILTLGIDGVNQIWRDAKLRAVGKARAKTLIEAAEHSVGSKEGAVSEKMEIRILLEDYESRNTRLQEVMVLIEELVRKIPMTEKLLEIKGVGIRTVSGFLAEVGDISRFNNPKELQKLAGLALVENSLGKHKGETTISRRGRKRLIYLLFEVAMSLVSKNQEFRELHNYYTTRRLNPLKKMQSLMAIAAKLIRVFYAMLTKGVDYDPKKMVSDIKKPAVYLQAA

SEQ ID NO: 219191 - protein, 341 aa, unidentified
MSNASIISIDLAKRVFHVHGAASDGSVLFRKKLSRGQLLAFIASQPPCFVAMEACATAHDWGREIEALGHRVRLVPPAYVKPFVKRQKNDMADAEAIAEAASRPTMRFVAVKTKEQQARAMIFRTRDILVRQRVDLINALRGHLAEHGVVAPQGATHVRKLSVAVNDEASDLPTTVREMATVYLEQIDLLAAQIAELEKRIRAEAAHAETTKRLQTMPGVGPVTAVAIESFAPAMTTFRRGRDFAAWLGLVPRQNSTGGKQKLGPVSKMGQRDIRRLLIIGAMSVVRAASHRGAPDGSWLARMLAKKPRMLVAVALANKMARGIWAMMTKGETYRDPAVAA

SEQ ID NO: 219192 - protein, 429 aa, unidentified
MNYTQNEKLLQVGEENLIIGIDVGSKKHYARAFDWRGIEYSKKAFAFSNDVDGFAGFLEWISAIQKKTGKETVIPGMEPTGHYWFDLALFLRDNGMKPVLVNPLHVKRSKELDDYLPSKNDMKDPKTIAKLIIEGRYAFPYLPEGIYAEIRNASNMRFQIEAELTRNKNRIQRWFAIYFPEYTEVYGKFDAISSMMILRQAALPCDIISLGVEKINQIWREAKLRAVGKKRAQTLVEAAKRSIGHTEGLDTARMEMSLLLEDYDRLQNRLKKITELIEKLVRQVPYAEKLLQIKGIGMKTVSGFIAEVGDISRFTDAKQIQKLAGQAIVENSSGKHNGKSRISKRGRKRLRYLLFEAALSLTATNPEFREIHRYYTSRETNPLKKKQSLTVLSNKLIRVFYTILKNGIDYDPNKLTSDIRRPENVSEAA

SEQ ID NO: 219193 - protein, 262 aa, unidentified
MFDVYGSKSGHNQFKNDASGFKSFLKSLPKESLVIMEATGYYHYRLAQFLFKQSVLVSVVNPLSVKRFIQMKLAKVKTDKSDAKAICEYGQINEVPLYTALTDVQSECLQLFRLMDSFIKKRTATKNKLHGEEVLGIPSSWVYRSLKRDRKHLDKEILGIETKLLSLVKQDQQVQLTLLTNIPGIGLKTALFMIVITDGFEKFENSKQLCSYAGITPTIRESGSSVRGRGRISKVGNRKMRNLLFLCSFTACKHNKRVSRCL

SEQ ID NO: 219194 - protein, 409 aa, unidentified
MERIVERAAGLDVHKDVIVAEVHLPGGRADQGRFLTTTPGLVVLRDWLLARGVTRVGMESTGVYWKAPYYMLEDAMQVWLLNARHMRNIPGRKTDVADASWICQLIEFGLVRPSFVPPAPIRELRNLTRYRKAQIEERTREAQRLDKILQDAGVKLSSVASDILGVSGRAMLAGLVSGTTDAEVLADLALGQMRHKIPALRAALTSRFSTHHAVIVSAILAKLEFLDELIAGLTTEIEVVIGPFSHQVELLDTIPGVSLRTAQGLLAEIGADMAVFNTASRLASWAGVCPGHHESAGRARSGKTRKGPKWLGIYLHDAAMATIRTKNTYLGAQYNRLRPRLGHAKALVAVEHSILVAIFHMLDRDQPYHDLGADYFARRNDPARRARRLISQLETLGYSVHAEPPPTAA

SEQ ID NO: 219195 - protein, 419 aa, unidentified
MADETVSWFAGVDWGSERHQVCLLDAAGQVVGERAFRHGGAGLAALCDWLVSVAGEPERVAVAIEVPHGPVVDALLDRGFAVHAINPKQLERLRDRVSLAGAKDDRRDARVAAGGLRTDPHLFRPVEAGDPAVIALREWSRLAEELQHERVRLGNRIRQQLWRYYPQLLEVSDDVTAEWVLDLWTLAPTPAKAARLRETTLARLLQEHRIRRLDAERALGILRQPAIAVAEGVTEAAVLHLRSLVARLRLANREFYQAERKLDERCTNLRDNTSTPKSGGPCDAAVLSSLPGIGPVTLAILLTEAAGPIKRRDYAALRTLSGVAPGTKRSGKSCLVTMRYAAQIRLRNAVFHWARVAVLNDPTCGRRYAALRARGHSYGRALRGVADRLLGVACVLLQRQALFDPAHDKRAASQPRATS

SEQ ID NO: 219196 - protein, 452 aa, unidentified
MAKLQKNEDIGKLKVQHSRCGGIDVGATLMQVCISVEDREHGSNRSFGTDTQSLRDIVNWLLGHGITHVAMEATGVYWIPLFNMLVKNGIEAVLLNAADVKNYTARKTDVNDAAWLMTLMSYDLVKPSFQIDELSRALRNCTRHRMSLVSTCSDCIRRMQKTMELMNIKLTEVISDIAGPTGIRIIEAILAGNTSPRDLAALASDRCKSSKEDIAGALEGTWEDELIFILGQHYRQYLLYREQTMQLDSVIEGKLKLLVERILKMNDGEVRTVIRSKKGTPHMKNRISFDIEALSVQIWGVNLMRIEGVSGITMLSLMGELGCNFVGSFKDAAHFCSWCNLSPCHKITGGKIISSKMKKRVNPVGLTLRNCAQTLANSKSPLGDYYRRMRSKGGGKYAVCATAHKIAAIIYTMVRNQQEYDPSKVSVNDRQWLEKRIKHHEKLLKKLKSMAS

SEQ ID NO: 219197 - protein, 350 aa, unidentified
MIIIGADYHPGFQQIAYVDSETGELQERRLEHREEAEKFYRELAAQQRKVRVGMEASGHARWFERLLSELQFELWIGDAAEIRTKRVRKQKTDRQDAQLILKLMLEDRFPQIWVPSWENRDLRQLLWHRHRMVQARTRIMNQLQAVALNEGLRSKKRLWREAGREQLAAIRLAPWATRRRQDLLELLDRLNPTIGELTKAVEEEAEKCPEAQRLMTHPGVGPLTALAFVLVIGTAERFGCGKQIASYLGLVPEEDSSGERRRLGHISKQGNSLLRFLLVEAAQVTVRSNQQWRSKFFHLAMRRGRKIAKVAMARRLAVRLYWMWRKKWNYEQLTKFGSHAGQPGNPHGVQ

SEQ ID NO: 219198 - protein, 426 aa, unidentified
MERYVGLDVSLKLTSICIVDRTGKVEREGVVTSDPEAIATFIKLHAPQVVRIGLETGATSTWLWTELNKLGLPVICIDARHAKAVLKMQINKSDRNDAAGIARIMQCGWYKEVCVKDLDSHATKALLVSRALLVKIKRDIENQIRGLLKNLGRVIGRAKMNMFAVRAAQLAEDRSELFAAVDPLLKAREAVEQQIVDLDRKVLRLARNNAQVRRFMTAPGIGPVTALCFLATIDDPARFKRSRSVGAYTGLTTRRYASGEIDWTGRISKCGDKMLRSYLYEAANVLLTRVATWSALKAWGTQLDLPLEMLQIREDTTMNQQTMKYAIAVALFGAATLASVLPSGAAPISPSTTLPTQAASSSAVTEVYYRRHYRGRGYYGAPGAAIGLGILGAAAGAAAYGAYGPGYAPDYYGGPYPYRRQYYAPY

SEQ ID NO: 219199 - protein, 409 aa, unidentified
MLKIVYPICCGIDVHKTFIIAVIAITDNQGITQYYKRRFSTYTHSLNELKKWLEAYSCFHVCMESTGKYWIPIYNVLEDEMDICLAHPKYVKAIRGKKTDKKDAQWIADLYKHDLVSGSFIPPAKIRQLRDLFRYYMKLTYMQTSEKNRYQNSLTWSNIQIASVVSDVFGKSSQKIIQHLLDNPNEEIDLPALIHRRMKASIEQFELAIDGEISDEQAEKLRVIKAHYDAITFCKNDLQKLITELGKEFEHERKLIQTVPGFQNEFSALRVIAEIGTDMSKFPTAKHLSSWAGVCPACDESANKKHSTKISKGGHYLKPLLVQVANAVVRSDKYPEFKNKYLQLKKRRGHKKAIIAIARKLLVAIYHVLKNDEVYNADLYHYQEYVSPKKTLTVEQAVRLAINHGYQVI

SEQ ID NO: 219200 - protein, 309 aa, unidentified
MTNIICGVDVSSTHLDARIGPKGPSARFANSPEGVAALAEFCKSRAVALVAMEATGGYEKQPFGLLWAHDLPCAILNPRMVRRFAEAMGVLEKTDRIDAGVIAWCAEARGVAPTKPASQTQQTLAALVLRLRQLTDLRTAQINQRQLVKHEGVLAGSAELIALIKKQVRALEVEIAALIAKDPLWRALDEAFRSIKGVADRTVARLMAETPEIGLISNKAIGKLVGLAPLANDSGKSVGRRAVRGGRASVRAILFVVADVVRRYDPDFADFHRRLQGKPKKVIRVAIAHKLLVRLNAKARDVRKQLAPA

SEQ ID NO: 219201 - protein, 314 aa, unidentified
MGKPGVWVGVDVSKDQLEVALRPSGAQFSLPNDERALRMLVKRLLPLNCARIVVEATGGYETPLVAALQAAALPIVLVNPRWVRSFAKGFGQLAKTDQIDARVLALYAERAELKVRQLPDEQTLELRALCARREDLLDMIVAEENRLEHAPKRLAREIRSHVNYLRKRIKQLNREIDGAVRGSQVWRAKADLLDTVPGVGPVLRAALLAWLPELGTLNRGEAAALLGVAPFNHDSGAMRGRRAIGGGRGPLRRALYCTTSAAIIWNPPLRSYYEHLIVNGKVHKVAMVATMRRLLLMLNAMIKTNTPWRSPCPA

SEQ ID NO: 219202 - protein, 392 aa, unidentified
MYIIGIDIGKNHHEASFVSPEGKQIGHSLRFATTHKGADSLMSFIFNNIGNSSCIFDMEATGHYWYPIYSFLKARGYTIYVINPIQSDSLRKMYIRQTKNDSIDSFLIAEVIRFGQFTTTSMADENILAMRQLCRYRDSVISSRTEIKLRISTIMEQIFPEYEKQFSSLWLSTSMGILEKYLTPENIENAPIDELFEIIKDKSHNKLTMKKAISIREAAADTFGIKIAQDAFSFQFKQLIDRMNFLDKQIEALDCQILEYYEKFDCYLHTIPGIGMIAAATILAEIGDINRFKSSSALVAFAGIDPTVRQSGEFSSTHNHMSKRGSPYLRHAIFLVATTCSFHNSPLNAYYKKKRDQGKHHLTATGAVARKLTTVIYAVLRDSKPYEPKSFC

SEQ ID NO: 219203 - protein, 344 aa, unidentified
MITIGIDPHKSSHTAVAVDASGHQLAQRRFVVNAGTVRQLMRWCEKWPARRFAVEGAKGLGRSLAQQLAAAGEHVVDVPSTLSARARLLATGGDRKTDAADALHVAQVALFRHDLRKVEAEDQSTILRLLTERHDDLVNERTRIINRLHAVLRDLLPGGAPTRLSAEKAAALMKGLRPATATDCCRRDLARDLLADLRRVDRQVRHNEAQMRDALAVARTALTALPGLGTVLAAKLLGHVGDVTRFPTEHHFASYTGTAPLDASSGRNARHRLNTGGNRALNCVLHIIAVCQIRDGGRGQDYYLRKITEGKTPAEARRALKRRLSNVVYRTLKRDRHTTLAAAS

SEQ ID NO: 219204 - protein, 340 aa, unidentified
MVHVGVDLDKRSSQIAVLTEDGEIRQQRLPNDPTQLEKFFAELPPHTPIAIEASGTWWWLVDLLEHLGHDPILSHPKQTKAIAAARLKNDRVDAERLALLLRGELLPTVWIPSAALREARELIRHRIQLVWLRGVIRNRLQAMLARRNLQPTSGKSWLTQRGQRELQQLPLTDTPRRIREDCGTLLPMLDTQIRRLDTELVARWGRDPRVQRLTTIPGIGPFIAIVLVLELGDIQRFASAKRVASYVGLTPRVRGSAGRVRAGHITKEGNRLLRWVLVLAATQAVRRPGPLRTWFHAVKKRRGKKVARVALARRLAEIVFHVWKQECDYFTVVRHGVVRG

SEQ ID NO: 219205 - protein, 366 aa, unidentified
MTNTNCIFVGCDLHEKTLVNRISVNREPAEKRTVGNTVSGRRKLIAMLKQKAKEWGGARIVFVYEASGQGFILCDQLRAAGIDCHVLAPTKIERSSKQKRNKNDDRDADRLLDIVRGHELAGTKLPSVWVPDLQTRDDRETVRTRQDLGEKQTGLKTQIQTLMKRHGMEKPEHVRGSWTKSWWQWLKAVSEIKEQGEGFRTALASLLRQLEFTVEEIQRLDGAVEQLCEKPHLKPIVDKLDAEEGVGRLTAAAYATEVGDFDRFRRRQQIGAYWGVTPASNESGELTDRKGHITRQGSPRMRRILCQAAWSRVRHNKLERETYQRLVERNPKRKKIALVAAMRRLSIRLWHVGRQAQREMKDLTTN

SEQ ID NO: 219206 - protein, 376 aa, unidentified
MSDYTRFVGLDVHKDTVAVYAVASDGVEGATSVIANDADVIAKVMRRIAKEAGGSSAVHCYYEAGPCGYTIYRQLQRMGISCDVVAPSLTPVRPGERVKTDRRDARKLGRMGRAGELTAVWVPDAGHEALRDLVRAREDAQQDLLRARHRLSKLLLRHGKRPAAGVQAWSRAYEQWLDALSFEQVAQTIVMEEYRQQIREARDAVARLEGQMEVIVLGSPLRGMLESLQALKGISFITAATLAAEIGDITRFEHPRQMMSYAGLTPSEDSSGETVRHGKITKMGNAHVRRVLVEAAWHYRHTPGVGKVLERRQKGQSAQVKSISWKAQVRLHKRYRWLMAHGKAKTRAVVAVARELVGFVWEIAWAAKGQGAAQAS

SEQ ID NO: 219207 - protein, 443 aa, unidentified
MSRGRALTRGDRRRNERLVRLRSIVRRDYAIVAVDLASAKQAAVVTDHDSIVLGRRMFTGDAWMIDEILDWAEPIAAAAGFAGVVLGCEPTGHRWKPLLDRARARERELVCVNPMLVHRGREEEDFTRDRSDFKDATIIAKRVAELRCYVPYVQEGHWCRLRHLGARRNDQLVAAGSARQRLHDLLECAWPAVLSAASDPLDAITWRAAMKVSTNPDEIAAMAFEDFAVAVRAELPRWGGVRRNLRILRAIFDAAQAPGGVATERAAACERAAYALDDWHYSLCQLADVETRMIEVLDALELTQLVTTIDGLSAVGAAAILSETGDPARFDCARTWAKHAGLCPRANESGAFHGATTVSRRGRPALRTAAWRAVWGALRHNKIYADRYTHLTTRADNPLRDGQARAAIAAALLRQLFVVVTRRIAWDPAIAAGTREGVAPHAA

SEQ ID NO: 219208 - protein, 444 aa, unidentified
MIRKVMEAIYQIVGGLDVHEETVVACRRRLISDGQAELEIETFRTTSAGLRELLDWLKAWGVTHVAMESTGVYWIPVWNVLEGQFKLVLENAQHLKKVPGRKDDQIDAEWIAQCMQCGLLRGSFVPGAEVRQWRQLTRHRTKLVDQRTSVVNRIHSVLEQGNIKLSNVATDIMGVSGRAMIAAMSKGESDPARLAALAKGRLKAKYEDLTEALDGQLNENQRWMLKRLLEQVGALEKEIEVYSERIGEQMLPYRRQLERLDTIGGVAQRSAENILAEIGPNMDQFPTDDDLVSWGALCPGKNESGGKQRSSRTPKGNKWLKRTLTEAAWAATLERDSYLAALYRRLAPRRGKKRAIIAVARTILQSAWHILKKDVDYKELGGDYFEHLNEEKSTKYFVKRLEKFGYEVVLKPKQAEKARVEPKPKKIKKAVVERKPKKAPEATT

SEQ ID NO: 219209 - protein, 343 aa, unidentified
MQTITTLGLDIAKSVFQVHGVDADGRVVVRRQLKRRYVLAFFQKLPPCLVGIEACASAHHWSRELQALGHTAKLMPPAYVKPYVKRHKNDAADAEAICEAVARANMRFVATKTPEQQSCLTLHRTRHLLMRQQTSVINAIRSHLAEFGIVAPVGRNGVEQLLGVVADSYDRRLPEIARACVAALGAQLRVLRVQILEFDRMIRAWHRSSEASRRLDQVPGVGPVLATALVASVADPKAFRSGRDFSAWIGLVPKQNSSGGKERLGNISKRGDRYLRSLFTTGALAVIRYAKIHGTKHRPWLTSLLARRPTKVAAIALANKLARMAWAMMAKGERYKEPAALAA

SEQ ID NO: 219210 - protein, 391 aa, unidentified
MKQVTTIGLDLAKAVFQVHGVDASGVVTLRRAVRRRQVLSFFAKLPPCLVGMEACATAHYWGREIAKLGHDVRLIPPAYAKAYVRRNKNDPADAEAICEAVSRPSMRFVAFKTEVQQAAAGIHKVREMLIKQRTMLINALRGLMAEFGIVVAEGPHHVGELVAILADPADRRIPTPLYEGLLAIVETLRGLERRIEIVEKQIVGWGRGNQTCRHLITIPGYGPILSSAMAAFTVDPAAFGSGRHFSASLGLVPRQDGTGGKVKLGPISKRGNGYLRRLLVNGAMSVLCSKRGKEDPWLVKLLETKERKVVACALANKMARIGWAVMMRQEDFRGRTIIRAPTCASLTLCSPPSRPLRARLRRWPSLRSELVLTAAARGATPEPGRDEETVL

SEQ ID NO: 219211 - protein, 354 aa, unidentified
MNTTQNSTKSKIVKVIGVDLAKDHCDVIGYDENGKICLRLDGCSYAKLREILSNLPQAVVLMEACKGSMFHARSIADLGHEVRLVKGADVKALRNINHKNDLRDAAYIAKLYFVPGTTYVYIKSQQQQSLQFLQNEYKSLQELRIQAGNQIHAGLEEFGCPVRKSSKFIKTRMVAHLEKHAGLIPEDVMASFKRRREIWLNLLQQEEEAKRRLEQVAATDANAKRIMTVPCVGPQTAVGLLVHVGVDFGRFKNSRQFAASLGLVPKQNSTGGNNTLNHITKCGPKRLRSNLVQCAQLVLMYAEKWKGNFGDWVRKMRDSGKKHGVIVCAIAAKLARIIYRLMKDKVDYTPVLSC

SEQ ID NO: 219212 - protein, 341 aa, unidentified
MRKTLYCGVDLHSNNALYVITDEKDKQLLHKRLPNELPVVLKTLAAYRPRLKVVAVESTYNWYWLVDGLMDHEYPVVLAHPSEMEQYDGIKEADDLTDAAFLARLARLNVLPTGYIYPKEDRPVRDLLRRRMLVVQHRTGVILSLENMAQRQTGQKIGWRTLRKLQEPDRAELLGDHDCLAFVTAEQVEMIEQLSEKIKRFEQKVLEHAQLRPAYACLQTLPVVGTILALTIMLETGDLGRFQTVGDYTSYCRCVRATHSSNGKKKAHNNAKNGNPYLAWAFVEAVHHALRVCPQAKSFYDKKRAKRNGALATKALAAKWSKAAYYMMKRRENFDLTRVFG

SEQ ID NO: 219213 - protein, 331 aa, unidentified
MDITTIGIYIAKRNFQIHGVNKNGKTVLKKKLMREQILTFMANLPKCLVGIEACGGTNYWAREISKLGHKVKLMAPQFVKPYVKTNKNDRADAEAICEAVERPNMRFVPAKSIEQQDILSIHRVRERLVKNRTALANEVRGLLLEFGFIIPQGINKVIDKLNEILVSNELSAISRQTFNNLKEEFITNDNRVKELEKRLKLLASQCDVYKRLITIPGIGLITATALTASIGNTNCFRNGRQLSVWLGLVPRQHSSGGKEKLLGISKKGDVYLRTLLIQGARSVFNAKLRYTTVEQQNKKDYSRFTSWMFSLAERSCHNKTVVAIANNASLG

SEQ ID NO: 219214 - protein, 451 aa, unidentified
MKGHKATMEPVGEVHPNAAGLDIGSREIWACVPADRDREWVRRFGTFTPDLHHLVDWLLSCGVDTVAMESTGVYWIPVFELLEARGLQAYLVNARHLKNVPGRKSDYQDCQWIQKLHRLGLLANSFRPDTEMCRLRAYLRHRAQLIQHRAPHILHMQKALQQMNIQLPHVVTDLTGTTGQAILRAIVAGERDAVKLAQLRHPACHSSEETIAKALTGDWKAEQLFVLRQSLELYDFYTAQIAACDAEIQRQFSAMKPRWTPTGPFPQPKPKRRHRHSPAVDVQTAAIQLTGVDLVAVDGLSAALVQTILSEIGTDMSKWPTVKHFASWLGLAPHNAISAGKVLHSQTLPTKNRAGQAFRQAATTMARSPSAFGAYYRRKRAQAGPQFAQVATAHKIARTVYYLLKYHVQYQDMGAETYEQQHRQREVAILRKKAAKLGFSLVSPQLAQPVT

SEQ ID NO: 219215 - protein, 370 aa, unidentified
MLYLAIDQHSKQITVCVRNQDGDTVLSRQVSTRPEKIEAFLQQLTEMDPNFMAILEVCGFNDWLIERLRNWKCQEVVLIHPEKPSKRKTDRRDARKLADLLWLNRERLAANEPVHGLRRVYMVTQRERENRQLTALRKTLGQRRTRTLNKIHRIINCHNLIWDYPTKSFQTQAGRRWLEKVELPEFDRLEMDMLLKEWTTWNEQIAQVDEKIVERANHREPGEIVSAAQILMTAPGVSHYSALALSSRIGPIERFPRPRSLANYFGLTPGCRNTGKATHRLGSITKEGSTIARFILGQLVLHFLKQDPQMRSWYRRIKKRRGSKIARVAVMRRITTVFWHMLTYQEAYSIGGPPPRLRQLNPLGTGSDAA

SEQ ID NO: 219216 - protein, 315 aa, unidentified
MDERARSIVGIDVSKDRLDVHVLPQGEHFTLARDEAGLKALTKRLAKQALQVVALEATGGLEGPVVAELHAAGLPVRVVNPRQVRDLARGLGMLAKTDAIDAAMIARFAETAKLVGASVPDAQALHLAALVARRRQLVGMATAERNRLQQTIDKRIQRSIQRLLRSIEAELDGVDRDIDGAIKNSPLWCGLADLLDQQPGIGDITACTLVAQLPELGRVTGKKISSLVGIAPFNRDSGRMRGKRTIWGGRASIRSALYMATLSAVRCDPVLKEFYQRLIARGKPPKVALVACMRKLLVHLNALAARYYAQIEQTA

SEQ ID NO: 219217 - protein, 389 aa, unidentified
MKRLFCGIDVAKYEHVVSIYDPSTGEYILDSLHFENNEKGYKSLLSGLLKLKRKNDLVIGFESTGHYHMALFSFLSGKKYRCFLINPYMTSRFRSVSLRDAKNDNIDSRAIAQFLSFEYERLSEEEFVNNELKELSLQRSFLMIDSSKMKIKLKSYLDRVFPELESIADINTAALRAILREYPCASDIARTRIDKLKNMAYKASKGKYPSAKIERIKEAAAVSVGYYSKAIGLNISQCIETLELKERQIEKIESSIVNHPLVIKSPLKQLKGINDIEIGYIMSAIISISRFTSAKKLVAYAGLDPKIRQSGTWQAPRTRMSKRGNRLLRYALIWTAYNMSRHEGPIKRYYELKRSQGKSHYNALGHCAAKLCRYIFWILSNPDKQFTYQ

SEQ ID NO: 219218 - protein, 402 aa, unidentified
MPGVRHMVGGTVRREVRTFKTTTKDLMALSEWLSAEGCTHIAMEATGIYWKPVWHVLGDGEFELVLANAAHVKNVPGRKTDVNDATWLADLMAHGLIRGSFVPDAHTQELRALLRTCKQFVRERSSHIQRLQKTLEDANIKLDSALSDVIGLSGRAMIEALIAGESDPDTLAGLAHRRVKAPPEELREALRGRVTNHHRFLLQLHLQQVDAIDAAISEIDREVDANVEPFRAAITILITIPGVSDLSARVIMAEIGNDMSRFPTEGHLISCAGLCPKNDESPTEPARGLKAHGKRRSTQMRKGAPWLKTTLIQCAWAGARKKASYLQAQFHRLRSRRGVEKAIGAVAASILTAAYHMLAHGTLYHDLGPDHFDRTAKATQTRRLIARLHNLGYAVQITPLAP

SEQ ID NO: 219219 - protein, 355 aa, unidentified
MNDAKYIGLDVHQATISAAVRDSDGKLVLEAILETKAETMLQFIHGLRGSLHVTFEEGTSADWLYTLLKPHVTEVLVCDPRKNALLKVGNKGDRIDARKLSELLRANLLRAVFHDDTGLRTLREMARSYLTITKDITRVMRRLKAIYRSWAIPCGGQQVYSPRHRAEWLGKITEAGVRRRAELYYQQLDALRVLHQQAKKELLAEGRKHKTVKLLRQIPSIGPIRSVLLVAILQTPHRFRTKRQLWSYSGLALETRNSGEYRIEGGQLKRSKKAFAVRGLNKNHNHDVKNIFKGAAIRATTVAGPFQKFYEALVAKGMKPAMARLTLARKIAAITLIVWKKGVRFDAEHLKQQAA

SEQ ID NO: 219220 - protein, 514 aa, unidentified
MSEGTAVPPFSRLSPRLLRKHSAWHIRHIPLTQNFHPQPLAPARKADWVHAHYARFRSPYAAQDKPFASGFTNPDPNGGDIMLKINYMSTLFVGIDVSSKTNAVYAMDFEENKYISSSFGNNQPGADKLVNMIAECMQKHKNLDTLLIVLESTSVYSVHISNFLSASEVLMPYRPYVFCVNPKATSNYRKSYIGMEKTDPTDAYLIADFGRVGRTKKLEPWRGGQFIALKRLTRHRMHLSECITREKTYMVSNLYLKFSELQLLEGDDRPFGSLYGATSSAVLTEFLSPQEIIDMPEEDLLAFLAEKSRNRISDISKTSELLRKAARDSYRLDKCMYEPLNISLASSFNCIHAYQKEIRLIEQAIGKCINGMNPNALTILRSIPGIGPVWASGILSEIGDIAAFHSSDALAKYAGLYWPKGDSGDFTSEDNQMSKAGNPYLRYYLGEAANSVRKHIPEYADFYARKYAEVTKHQHKRALALTSRKFVRLVFGLLVKNQLYTGEKLDTEYNIKTN

SEQ ID NO: 219221 - protein, 424 aa, unidentified
MHLTAISSARTSAIVSCDVSAYGLNLACRDLSLPGAAAEWEIPNRTEPITATLRSIVEQAIERGITELMVVVEPTGRYHKLLLRIARSLGIQTALVDAGHVRKMRSVIFGDEGKTDQRDPYVIEAVATQGRLIEDRHHAEVYELLRHWGVLYHQAENALIEAKSRVHAAITMLFPDFDFSTDFLYGPSGQAIVRCFGLDPHALAALSVSRIYERLRKHSSIRRSSVTRLLVQARQTISAIAKSRITDLDAHELALAWEDFELAERRRSCARRELETLYDEARSTDPHLPNPLGSPISKIALARMVGEAGPLSGYSGWRPLLRMAGMNLRERKSGTFVGQTKIAKRGRPLLRSIMTQMALPLVRRDRLFGSYYHQKIGVQKMPGNKAMTAVGRKLIKMIWGWYRSGAEFDPTRVFCCEGQHRIAA

SEQ ID NO: 219222 - protein, 344 aa, unidentified
MNITTIGIDLAKNVFQVHGVDARGKAVLKRQLRRDQMASFFANLPACVIGMEACASAHHWARKLQGLGHTVCLMAPQFVKPYVKTNKNDIADAEAICEAVARPSMRFVPVKSVEQQAVLSLHRVRQGFVKARTAQANQIRGLLGEFGLVMPRGIAHVAKRVPELIDKASEQLPATLRELIARLLCHLRELDRQVGELEAQIRAWHRNSPMSQRVAQIPGIGPLGASALVASIADARSFANGRQTSAWLGLVPRQNSSGGKSKLLGMSKRGDTYLRTLLVHGARSAILAAQRKTKVDPWLASLLERRHPNIAAVALANKNVRTVWALLAHDREFRPDYVPVPPAA

SEQ ID NO: 219223 - protein, 367 aa, unidentified
MTVTIVDVARPVPGGVDAHLEGNVALGLVTGGVDTHLDLNVAAALDGIGGLLAVAEFPTTSAGHRELLGWLSGFGPVARVGVEGTGSYGAGLARFLQAAGVAVVEVDRPNRQARRRSGKSDPLDAVEAARAALSGRARGAAKSRDGNVEAIRALVVAKRSARSAKIQTLNQIRHLSFTAPEQLRQRLAGVSRHQLAARAAALRPGSQEGADPVVAATKTALRLLGRRVLALDEEKARIDALLTGLVTQTAPQLLAVFGVGVDTAAALLVTAGDNPGRLRSEAAWAHLCGTAPIPASSGKVTRYRLNRGGDRQANRALWGIVITRLRNDPRTKAYMDRRLGEGRSKPEVIRILKRYVAREVYHHLPRT

SEQ ID NO: 219224 - protein, 389 aa, unidentified
MYIVGIDIAKRKHEAAVIDGEGTVIIKPFSFTNNCSGYNRLLAMLAKAKLPLDEVSFAMEATGHYWLALFTRLQKEGFRVQVINPVQTNSIRSFYIRQAKTDPRDALLIAEVIRFGHFSESTLHPENIYELRELCRGRHAIVSMQADVKRKVVALLDQVFPEYETAFTNMFSDTSMAILQTCPTPKELSEMPLEELCHLIEVSSHKRFRMAKAQELQALARNSFGFAMAGDVFSTMIRLYAKHLDFLKQQVREMDRKIAEIMDTLDTPITTITGIGPTLGAYILSEIGDISRFSSAAKLAAYAGIDPTMRQSGEYNGVRNRMSKRGSPYLRHAIWLAASSAVLHDPALKFYFQKKRDEGKPYMASVGHACRKMVSIIYAVMRDNKAYTP

SEQ ID NO: 219225 - protein, 459 aa, unidentified
MGNARARKIPAQLVEDEDYQLRHERVAGIDIAKAKADVCTRLPPAREGGRRASRVEEVPARAADILALAGRLLADGVQLAVMEATSDYWRIWYYLLEGAGLSVQLVNPSHARQLAGRPKTDRLDAQWIARLAEMGLLRPSFVPPPEIRALRDLSRTRLQLVRDRTREWQRLEKLLEGALVKLSSALSSLARTKTARVILEAVAGGERDPKVLAAMADGHVKAGRAGIEQALDGMQLGSHHPLLIRLHLDRTARLDQAIAALEDEIEAALAAVPAAWGTDASGEAGPAAGRGPDAAALPAAERLAEIPGVSLKLAMAIIAETGLDMTRFPTAAHLASWAGLAPAARQSGPRNRKPAKGQGDAYLKGYCTQAATGAARTATFLGERLRRLSRRIGGNRARTAVGRSVLVIIWHLLSNPEARYTDLGPGWHARQGDRDRKIRAHLRQLQALGLHVEITEAAA

SEQ ID NO: 219226 - protein, 403 aa, unidentified
MEQVIIGVDPHKLSATIEVVDNQERMLGSGRFTTDQAGYKAMRAYAKTWPDRVWAVEGANGVGRPLAQRLLEAGEHVVDVPAKLAARIRLFDTGHNRKTDALDAHSIAIVAVRTKTLRVLQVDGELEALRMLTDRREALTRRRVQTVDRLQALLAELLPGQAKRDITTGQGKAMLASVRPRDIAGKTRRRIASDELAELVAVEAKIKKATAELKTIVLARGSTLMELHGVGPVVAARILADVGDVSRFADRNRFASWTGTAPLDASSGEQNRHRLSRAGNRRMNHMIHIAAVTQLRLDTDGRGYYRRKRAEGKKSLEALRCLKRRISDVIYRQLIDDARRSAKTDASASPGGHCGASRKSSAVDLPPHIDTSDQPLPGPAEPTLQPAARRRKTPTENTLSAAS

SEQ ID NO: 219227 - protein, 322 aa, unidentified
MVWTAPRLDNGLDGPRWYVRPSPTKARRVRDEDYDSGIDLAKDIFRVHGCDARGRVVVSKSLTRQELRAFMAKLPPCLVGMEACHTAHYWAHELQKFGHQVKLMAPKFIRPYVKNNKNDTRDAEAICEAVTRPTMRFVPIKSRAQLDVQAVHRVRQQVVRERAALANQLRGFLAEHGIVIRKGFAAVKHAVPDIIEDSDNALSGLMRELMHDLHERFKLAEERLHRYDVRVAQLVQQDERCQRLAELPGVGPLTATAVVASVGNAREFRSGRELAALFGLVPRHRASGRRTIMLPIGRRCDHYLRTLMVQGARASLRYIERR

SEQ ID NO: 219228 - protein, 337 aa, unidentified
MKFCGIDLHSNNSVVVVTDETDRVLVSRRCPNQLTPILSLLEPHRAELVGVVVESTYNWYWLVDGLKAAGFEVKLAHPVAMKRYDGLKHSDDKDDATFLAHLLRLGILPTGYIHPPRERALRDLARKRIQLVRSRTQHILSVENIMARQFGQRLSCNEVKGLSVTSVDRLGLPTDVALAMKANVAIVQALQIQIDFLEERLLHEAYLRPEFSLLKTMPGIGEVLATVIMLETGNIERFADVGHFASYARCVKSAYYSNGKKKGEGNAKNGNAYLIWAYIEAANFARRFSEDAKRFFEKKKAKTNAVVATKALAHKLARASYHILKEKQPFDARRCFA

SEQ ID NO: 219229 - protein, 357 aa, unidentified
MTTQEKQRTLFVGIDVHKDTHTAVGVSPYGEKLFEITVGNYKNDFKMLEEKVKEHTGVLSPYIGLEDVRGYGERLAEYLYERYPVYHVPSILVDRQRQNATHPEKSDSLDAFGVAKVMMNSIDSLLAYTISQESEKAKQLKEISIDREDLVLERTRLKNQVHTLLYRIYNTEYQTKYKNPFTLKALGFWLKSKPKCDPYLLKAMKRKVRRILDIHTEVFDLEKDMEVLLDAGEYTIQTASGCGLVVASTIIGEIGDIDRFTSPGALSKYAGCSPRERSSGKKVRHVKSRSGNRRLNCAFHRMALSQISRMGNDKARTYFKKKINEGKSKNQALVCLKRHMVNIIWMMLKHKTVYRNA

SEQ ID NO: 219230 - protein, 356 aa, unidentified
MSRDLKYIGMDVHKEAVVIAVLNGTGKQVMESIVETEASSILQFIHGLRGELHVTWEEGTWAAWLYDLLKPHVHQVLVCDPRRNALLKEGNKSDRIDARKLADLLRTGMLRPVYHGEHGLRTLRELGRSYETISKDLNRVMNRIKALYRGWSIPCGGTQVYAPRYREEWLRKIEHIGVRRRAELLYQQLDGLQTLRRTLRPELLAESRKHKAAKLLRQIPCIGPIRAARLLALMQTPHRFRSKRQLWTYSGLGIETRDSAQYRFVHGQLQRAKKPQQIRGLNRNHNHEMKEIFKGAATRASCGVGPLRDFYVTLLDKGMKPEMARLTVARKIAAIALILWKKEERFDAQQLKTQAA

SEQ ID NO: 219231 - protein, 312 aa, unidentified
MDAMVVGIDVSKDRLDVAVRPTGESFAFKRTAAGIDDLVARLKDRSPALVAIEATGGFEAVVAAGLAGAGLPVVVVNPAQVRAFARALGKRAKTDPIDAVVIAHFAEATKPQLRQIPDEMTRFLAELVARRRQIVDMIAAEGQRAGRMSDHRLTRSIGRLRKALEKELDELDRLIDDHMRGSAVWVETEKLLVSVPGVGKTIARTLIAELPELGSLDRRQIAALVGLAPWTRQSGQWRGKSFIGGGRKSVRSSLFVGAMVAARYNPQLKRFRDRLVAAGKPKLLALVAVARKLITILNAILRDRRPWQPLAA

SEQ ID NO: 219232 - protein, 350 aa, unidentified
MMDITRCGLDIAKQIFQVHLVNERGAVKGRKTLPRARVLEYFAQLPPCLIGMEACGGAHYWARELSKLGHTVKLMAAQFVIPYRKRGKNDVNDAEAICEAVGRPNMHFVAVKTEEQQAVLMVHRARSLVMANRTALSNQIRGVLGEFGLVMAKGVARLRAQLPQILEDAENNLPALAREVLAGLLEQFHELDQRIQHYDGQIRELAQQSDPARRLMRLESIGPMTATAIVAGMGDPHVFKSGRNYAASLGLAPRQDSSGGKTRLGPITKQGDRYLRTLLVHGARAYLRVVDKKTDQKAAWAQRLKERRHVNVAIVALANKMARTIWALMAHGRAYDRGWGSSAVTAPATT

SEQ ID NO: 219233 - protein, 344 aa, unidentified
MEYFAGIDVSLRSCALCIVDGKGNVLLERELPCEVSDIAECLRAFPYPIERVGFEAGTMSQHLFFGLTKVGFDVVCMEARQVNAALSAMRNKTDKNDARGIAQVLRTGWFSPVHMKSREAHGVRALLSTRKALLKKTMDLANEVRGLLKVFGIRLPMTVKHGSFDGVVRPLIEMDEVLVHALVPLLDARVALYEHFLELDGRVKRAASQDEVCMRMMTVPGVGPIASLTFKAAVDDPTRFKRSRTVGAHFGLTPRRYQSGEHDNPGRISKAGDRDVRATLYAAANALLMRTMAGSQIKSWGMRLVRTKGRRRAVVAVARKLAVLLHRMWTDGTEFRQENVGGMA

SEQ ID NO: 219234 - protein, 320 aa, unidentified
MMAQNDRVVVGIDVAKDKVDACIRALSLRQTFPSTAQGRRKLISWLCKHKVTVAVMEASGGYERDWAKALRGAGIEVRIVDPKRVRNFARSAGRLAKNDAIDAEMIGWFAETFGEAKGQAYDAAREKLVQIVHARQGLLELQTSLQNRGEHAAPEVVQKMQGRLLKKIARELAGLEAAIAAMIKATAHFAELAEIIESVPGLGGITAAGMIAAMPELGQVSDQAISALLGVAPYDDDSGKRRGERQIKGGRRKVRNLFYMACLGAATRHNPVLKAFYRRLLAKGKEKKVALVACMRKLIVILNTMIARGEKWDATRYALS

SEQ ID NO: 219235 - protein, 415 aa, unidentified
MTDHRQWYGAVDWASESHQVWLDDDSGRKLGEKAFKHSGEGLAEMAAWLMTTSGATDAAQIHIAIEVPHGPVVETLLERGFKVHAINPKQMDRFRDRFTLAGAKDDSRDCQVMSSALRTDPHCFRPLAIADPVVIELREWSRITEELSAERNRLTNRFRDQLWRYFPAMLDLEPDLGAEWLLDLWETVPAPGKAARIREATIAKLLKRHRIRRLDAAQVLGILRQPPMTVAAGTAEAAGAHIATIIVRIRLINRQLKRAHHQLDALTAHLMPSQEAEPGQQKQHDVEILASLPGVGRIVLATLLAEGFDALQRRDYAALRSLTGVAPVTKRSGKSCIVVRRLAYHHRLANAVYHWARVAVQHDPKSRAKYAALRSRGHSHGRALRSVAERLLNVACAMLKTGTTFDASIKAKQSP

SEQ ID NO: 219236 - protein, 404 aa, unidentified
MFSIPNSVILEQAGSEGFCGAAQPRKKNRARRPITDRATLGASDAVAQRDRDRPGIVSPNSRQSRTRRRADSSSHSQGRDGSTVQDCAVTWIGVDVAKQSLDAAWMSADGPQRQSAANSCPGFQSLVDSLPPSTQARVVVEATGGYERALVTALIEAGYRVSVVNPRQVRDFAKALGILAKTDRIDALVLARFGEQVQPRLLEEDPTQRAELQQLVARRRQLIDLRTMESNRAQQITARAAQKSIRHVLKLLEKEVDQLEAEIARLLGSDDDWRAKIEVLSSVPGVAKVTSATLVAVVPELGRLNRQAIAALVGLAPFNDDSGRHRGTRRIAGGRSAVRQVLYMATLSARRCNPVIHAFAQRLAAQGKKPKVIIAACMRKLLVILNSMLKNNTPWKTSPVPITT

SEQ ID NO: 219237 - protein, 326 aa, unidentified
MSNILGIDVSKDKLDLVLLNEKGKFHKVISNDPAGFKTLDQWLISRHIDRVHVCLEATGQYGDEVSEYLYGQGHDVSVVNPARIKRYGESKLHRNKTDKADADLIAEFCLKEKPALWEPLSPDLKHLRALVRRLIDLQANYQQEENRLSSGEKDAWVIQDLSGHAEYLKARIQATEEEIQNFINQTPGLKAKQDLLVSIPGVGKKSSARLLAELGEISGFENAPQLAAYAGLNPKGFSSGSSVHKKTRISKQGRSELRACLYMPAIVAMTHNPVVRALKERLQKKQLPTMAIVVACMRKLLHIVYGVLKSQMPFDPDYDRQFNYSA

SEQ ID NO: 219238 - protein, 385 aa, unidentified
MGTAVGKLAKRSGARFPTATGDRSSGPRSNKTVGELDRRRFHEISPNSRKSRSGAPGRASSHSQGRDIVMDVAFKSVVGIDIAKRTLDVHVLPERTSLKQQNDSKGRGQLREKLPPPGECLIVVEATGGYERALVAELIDAGYQVTVVNPRQVRDFAKACGTLAKTDRVDAAVVALFGQRMGELRIQAKIPEKQLELQDLVARRRQLVELRTAEMNRKEHVGSKFVKKSLQESVDALNKQIRRFEKRIAALVQSDDDWKQKLEIVQSAPGIGPGTSATLIAEVPELGQLSRRKISALVGLAPFNRDSGEFRGRRAIRGGRSSVRCSLYMATLSARRSNPVIRAFAERLKALGKKPKVIITACMRKLLVILNTMVKNKTHWNPATT

SEQ ID NO: 219239 - protein, 330 aa, unidentified
MHRSVVGIIDADGGECGWVRIDNDPEALVRECRKAGRGAPVAIEATYGWYWAVDALQAAKFEVHLAHPYGMKAMRSRKRVKTDPRDAYELANLLRLGSLPEAYIAPPELRELRELVRHRQQLVKTSTAVKAGVRALLAKHGIRLAVTDLDGDAATEILAALQLPGTYAIRLAAQRRLMLMLAQEIDACEHELADRLRHHPGYCKLLGLKGIGPVLAAIFVAEIGDITRFDTAAALCCWAGITPRHYESDRTVRRGHISKEGCKLVRWAAVEAIQRNCEPAVKQVKDDIIARRGTGARNIAKTAAARRMLEAVYYTLHDGQARFLTRAEAA

SEQ ID NO: 219240 - protein, 355 aa, unidentified
MQSNKISFKGQNIYVGIDVHLKTWHVTTLTESGYKYSFAQHADAKELFDRLNKKFPEAHFKSAYEAGFCGFSVHYALTGLGFENVVVHAADIPTTGKEKALKTDAVDSEKIAWSLKRDELKGIYIKDKRYMDDTNLIRLRQRFIIDLSRQKNRTKHLLYTQGVTYPERFRKNGTHWSRNFMKWLRDEVVLLSDEKRTLMLLCDQVEHIRKDILAVTREIRRLSTTDKYKENYSLLTTVPGFGIVTSMSMLTEFDNNLMRFPNERKFVAILGLIPTCHNSGEKKVSGEKIHRGNKQLGPLIIEASWIAIQRDYKLGCYYTNCCQSMKPQKAIIKVARKLACKAYAVMKTKKPYVLS

SEQ ID NO: 219241 - protein, 343 aa, unidentified
MKITTVGVDIAKTVLQVHGVDERGAPVLRKQLKRGQVLSLFANLTPCVIGMEACRGAHHWARQLQKLGHTVRLMAPQFVKPYVKTNKNDMADAEAICEAVSRPTMRFVPIKNGEQQAVLALHRARQGFVRARTAQANQIRGLLEEYGIIIPQGIRQISKRLAEILEDGENDLPGLFRRLLQRLGEHLKQLDLQVSELDSQILLWHRQHEGSCRLAQIPGIGPLTASALVASIGDAKSFQNSRQLAAWMGLVPRQHSSGGKTLLLSISKRGDGYLRTLLIHGARSVLRVAERKADYGTSWIAGLVKRRHPNIAAVALANKNARIVWAMLRHERNYDARYQATAA

SEQ ID NO: 219242 - protein, 423 aa, unidentified
MDKNDDSRLQVFRQMKQEIRGSEDYLLVGIDVAKDHHDAFFGSARGKTLCKKLVFDTTREGFEKLCLYANSLRGRHAFKKIAFGLEPTADYHKPLGEYLIRQGHHVVFVAGTAVKKNRELLDGRWDKHDAKDAANVADLVGQGKCLFYEFPSPDLRELRSLLSLKRKLKKSEQSYRVRIRNHLVAQYFPELDAYVTCSEGPAVITWCLDPKELSSLPFEEFARMVSSRNGGLKREARLKEIYEKAADSIGCAVHPSVAFEAKTLLETLQQLHATILETDTRIAEVCGGFEEYRYLLSIPGFGPDISAKVLGAIGNPHRFQNHRQVLKTAGLDLSADRSGKRTDVTPVISKRGKADLRYSLYQAALVAPNKNPSFMRYFAAKLEGRQKERGITTKMRVKLAAKMLVIAWTLMKKKEVFDPGRMK

SEQ ID NO: 219243 - protein, 361 aa, unidentified
MPGTMTYVGFDVHARSTHAAAIDVMTGELTRMRFGAGVQAPVDWITTLSGPVRACYEAGPTGYGLYRAAVAAGVGIEVIAPGLTPRGKSDRMKTDRKDSELLARCLIAGSLTPIVVPSMHVEAARELTRAHDACRRDLMNARHRVSKMLLRHGRVYPEPSTWTQKHRRWLAAQQFREPMSELTWADLIACVDGLTARKKTLAERIGELATDPEWWPTVARLRAFRAVDTLTALAVHLELGADWQRFEKAHRVGSWLGLTPSRSQSGEHDYHGSITKTGSQLARRLLVEAAWHYGREPRVGATLANRQEGQPDHILQISNRCQQRLHHLYTSMKARGKHHNVTTVAVARELSCFLWAAATAP

SEQ ID NO: 219244 - protein, 348 aa, unidentified
MLIIGCDYHPGFQQIAFVDTETGELGESRLTHTEEAEQFYRTLKERRVRVGMEASGHARWFERLLTELQYELWIGDAAEIRTKRVRKQKTDRQDAQLLLKLLMEDRFPRIWVPDAENRDLRQLLWHRHRLVQMRTRIMNQLHVVALNEGVRRKKALWRPAGRSELESLVLAPWALRRRRDLLDLFDQLTPKIRDLTRALEEEVEKRPIARRLMTHPGVGVLTALAFELVIGTPERFGCGKQIASYVGLVPSEESSGDRRRLGHISKQGNALLRFLLVEAAQVTARSQPQWRSKFFHLALRRGRKIAKVAMARKLAVHLYWMWRQGRDYGPFEKLGSHAGQPGNLHGVQ

SEQ ID NO: 219245 - protein, 346 aa, unidentified
MEKIAYLGMDLHARNFTLGQMNENGSFKGSIDLPTSEQNIMIALNSVKAKRKYLTIEQGPLTYWAAQVASPCVDQVIPCDPRASALIYKNPYKRDKVDTRNLCRLLRLGELNHVYQPENDERAVFKAAAQHYLDLRNQLIRLKQKIKAMYRHWGIIDVFTDTVYSKSGRDRYLEQIRKTPIRNQLLRLYHLMDQTDQMRKTALKALKTLGRNYPEIKQFMKIPGIADIHAHLFDAFIQTPHRFAKISRLWKYCRLSITDRSSDGNPLGYQRLDQAGIGELKALSYRSFVAAMRGDNEVSRFYHQSLQRTHSRKHARLNTQRKILAVMYTIWKKGLAYRPELFARSA

SEQ ID NO: 219246 - protein, 365 aa, unidentified
MNFIGADLHKKSITLCVMDERLKILARKTVPCGQPDQIVESFRQFLPFKVVVEATASYLWFVELLEPLAEEIVLANPKKLRVIAESTKKTDRLDAQVLAEFLARDMIPRAYMPTPRQRQHRALVRHRQYLRGRMTSVRCKIRHVLADYNADRKDLFSARCGKSYFKQVALSDADGFVLKQLWSEWEDHQARLLATTRKIKAFIAKAPAREKEARAILKSAPGVGFVTAEVVLSEIGDVSRFGNAKKICAYAGLVPAVRQTGGKRSKDLHITKQGSGLLRWALVESAWRLVKSSPKWSALYSRLRKRCGSKRAIVAVARKLLCVLYAMLKTSTPYKIIPAATPAEPPEPTRKRLVRVSTAAQAVTP

SEQ ID NO: 219247 - protein, 341 aa, unidentified
MSLIKAAGIDLAKLVFSIHGVDAHDKCKLRKTIKRNKLLAEVAKLPPCIIAMEACSGAHYWAREFTKLGHDVRIMASKFVIPYRQNEKNDANDAEAICEAATRPKTRFVSIKSEEQQAVLCLHRIRQGAIKDRTARINRLRGLLSEFGIIIPKGRYLLQNAISGILEDAENSLPFLARELLSDLWQSIKALNEEILKYDRKLYALANQMKDAKRLMSIPGIGEITATAVVATVNDAKHFETSRSFAAWIGLVPRQYSTGGVVRLGRISKRGEKHIRTSLIHGARAVIANCKNKTDRTSLWVKDLVERRGFKRATVALAAKNARLIWALLHSEKEYQVDYVK

SEQ ID NO: 219248 - protein, 349 aa, unidentified
MSQNLNSAVAVIGIDIGKNSFHVVGLDDRGAIVLRQKWSRGQIEARLANMPPCLIGMEACVGAHHLSRKLKALGHDARLMPAKYVRPYSKGQKNDFRDAEAIAEAVQRPTMKFVATKTAEQLDLQALHRVRERLVSQRTGIINQIRAFLLERGVAVRRGLRFLRAELPRMLATPPEVLSPRMVRVISDLAEDWRRLDERIDQLSNEIAVLARQDAGCERLMSVPGIGPIISSAMVAAIGTGDAFAKGRDFAAWLGLVPKQMSTGDRTILGKISKRGNRYLRVLFVQAAWVVLIKPRSWERHGLKHWLEAARKRLHRNVLAIALANKLARIAWGVLAGSRAFEASKLQAA

SEQ ID NO: 219249 - protein, 458 aa, unidentified
MMEQALAQRNCSLSRKADKCRQALTITHPNSAGIDIGSASHYVAVPPDRDDEPVREFASFTADLHRLADWLAACGVDTVAMESTGVYWIPLYELLDARGFTVLLVNARHVKNVSGRKSDVLDCQWLQQLMNYGLLRGAFRPADEVCALRALARQREMLLKSQARHVQHMQKALTQMNLQLANVISDVAGETGQKILRAIIAGERDGHVLAALKDTRIRASNEQIAKSLQGNWRAEHLFALKQALASFDFYATQLAECDHEIEQQLQRLHVHRGECAKGRKRGRTRNAPKFDLRAHLFKLCGVDLTRIDGIDVTTALAVISEVGADMSKFPSVKHFTSWLGLCPGTKITGGKLLSGKTMRVANRAAQALRLAAAALRSSHSALGAYFRRLCSRMDKPKAVTAAAHKLARLIYTMLTKGEEYTDQGQDYYEERYRERVLRQLSKRAQKLGMKLVVSEQPA

SEQ ID NO: 219250 - protein, 408 aa, unidentified
MNPLYVGIDVSSKNNVIYLMLPNGDKHSSFSLANSHDGSTQLVKRIFTAMTSNNIDSVLIGLEATSVYGDNLVYFLKEDTTLASFDRKIHVLNPKQVNKFKESYNDLPKNDYIDAFVIADCLRFGRINKEVYMDDYRYKALQNLTRARYFAVTNLTKEKQRFINVLFKKYSTMTQEKVFSDTFSTTALAVYEKFESAETLAKMDLQELTAFIMEKGKNRFPDPDAVAKALQKAARSSYRLPKTVNDSVNQVLAISITSIRALESQIKAFDKAITKQMELLPNVLISIPGIGPVLSAGIMAEIGDINRFQNQAALAKYAGLAWQQHQSGDFEAQTTRMIHSGNRFLKYYLCEAAFSLVRCDKEYNRFYHLKYKEVNRFQHKRALALTARKFVRLVFALLKDNRLYRPAE

SEQ ID NO: 219251 - protein, 313 aa, unidentified
MAKEIFVGIDISKDHLDVHVLPDNVEFSCTRDEKGLRILVKSLKEMSPVLIVLEATGGYQNFVAAGLGAALLPFSVVNPARIRYFARAIGKLAKTDALDAYVIARYAEAIKPAPQALPGEEQTTMKELVARRRQLVKMLTAEKNHLKTVSTGSLRARIESFLVTIDQEIRAINEDLDAVIRSRPDWSEKDQLLQSVPGVGPNTSRTLLSDLPELGTLNRQKIASLVGIAPMNRDSGQMRGKRMITGGRPSVRNMLYMATVASLRSNPKIASFYRRLREAGKPAKVAMVAAMRKLLVMLNTILKSKTAFMEVMT

SEQ ID NO: 219252 - protein, 335 aa, unidentified
MKHYAGLDLSMESTQVCIIDEKGRKLASEKVESTAEAIAVLLERFSPIERAVIETGRMSPVICLGLRQLNVKLVCIDARQAYQSLKAMRANKTDHHDAAGLAQLARTGFYKEVHVKSPAAHGVRSVISARSHLVDARLRLDNMIRGLCATFGHRLGSGKGKAFLEGITKAVHIAGLGDAIASLLSVRTELVEQIKEMDRRLRVIASQSQACEILMSIPGVGVQTSVAFAAAIDEAGRFRQSRNAGAYFGLVPRRHQSGELDWTGRITKQGDGTVRKLLYEAANSILTRSGERFALKTWAMRIAKRRGLNKARVALARRLAVIMHAMLRDGTLFQV

SEQ ID NO: 219253 - protein, 345 aa, unidentified
MNKVSVVGLDLAKNVFQVHGVDEAGGVVLRKQLKRSQMQRFFARLSPCLVGMEACGGAHYWAGVLAEQGHTVRLMAPAFVKPYLKSNKNDRNDAEAICEAVQRPTMRFVAAKRPEQQSVLHLHHGRQLLVRQRVALSNHMRGILLEYGIILPQGVKAVSRRLPALLEDGENALPMLTRHLLATLKEQHDQLVERIKFLETQLKAWHGNDAPSQRLEGIPGVGVLTATALTAQVGDGQSFRNGRQLAAYLGLVPRQASSGGNDRLLGISKRGDGYLRSLLIHGARAVIHHVRRRLKAGQPGGNPWVEQLLKRCHINEVAVALANKMARIAWVLLARGGTYRAMRAA

SEQ ID NO: 219254 - protein, 439 aa, unidentified
MSTPYLPVLDPTAAAIDVGSEQLHVSIAGGPPRVFGTMTGDLHALRDYLLAQGVRSVAMEATGIYWLCPYEVLEKARLEVVVVNGKYVKNLPGRKTDMSDCQWQSTLHAHGLLKPGFVPPEHIRRLQDYLRLRSDHIILAGSHEQHMQKALDRMNLKIHDVLSDLTGVSGLKMIEAILAGERNPVALLALCDPQVQKKKASRLRQALEGTWKTEHLFALRQAYELWQFYQKKIAECDQAIENVLKELAGPEDPNNPAPPSTKRGGVNAPEIAGLHGLLFRLCGGKDPTTLPGVADYVWLQLIGEVGTDLGKNWKSEKHFTAWLGLAPGSRQSGKRRGSQKRGRNRAGRLFCVIARSVGRGVDKALGGFYRRLKGRRGGLVANLALARKLAELFWRLMVHGIAYVEKGLKKYEEKVAQTEQRLLQKLARKYNLVLQPAAA

SEQ ID NO: 219255 - protein, 533 aa, unidentified
MEAYVGLDVHSKRSVFVIEAADGRVVARGDIPTTPAGFRRLREQHALAAETPVALETGTVAFYAARELARVGLRPVVIDAHEVRLKAHRPRQKSDRRDAFELCEGLRRDQYRAIVHVPPAPIGALRETLSRRRHFVAVRVAEVNAVKRLLRAAGLGPRSTSLRTTPAWERLLAALVAEPVLHTYVTQHYALWRCAQDQVAALEGTLGAQPAAIAATAARLQTVPGVGPIVALTTVAVVSQAHRFPSAKHAASYAGLVPATHQSGERDTHGHITKRGSVAWRTLLCEAAHHARRPDHPLHPYFARVCARQGYKLAVVAVAHRLCRILFAMMRDGAGFDVRQLALEEGPFRRTTVQRYRLTRARARRARGGVPARCHDERARIPMPPLNGEHVTPKRLMSCELRFSSGAVLPALQRGAVTPTPNGRLVREGRVGRRTQSPPEPRAGAGRSSPPHSRMRVSRAPPRFALGCHTRADQARTLPRSSLTARLHGRTFTIPWPFSGDWRPTPLQPWLLPVHCEWYRALACASRAPNTAQ

SEQ ID NO: 219256 - protein, 410 aa, unidentified
MEVIVERPAALDVHKAQVTACVRLPAGRAGRAQEVAEFATTVRGLLTLHDWLSAHHVTEVAMEATGVYWKPVWAILEDDFELLLVNARHVKQVPGRKTDVSDAAWLCQLLEAGLLKASFVPPRPVRALRNLTRYRKAQIRERQREANRLHKVLEDTGIKLGCVASNVLGVSGRAMLEALVAGTTDPEVLADLARGRLRAKLPALREALEGRFNAQHALLVGAILAHLDFLDEQIELLSEAIGEALAPFAAEVELLCSIPGVQRRTAENVLAEIGLDMTRFPSAGHLASWAGQCPGNHESAGKRRSGRTRKGSKWLNEALTEAAMAATRTNGSYLQALYRRLRPRLGHGRALGAVKHSMLCACWHMLSTGELYRDPGGDYFTRRDPERQTKRLVRQLEALGHTVILEEAAA

SEQ ID NO: 219257 - protein, 350 aa, unidentified
MQTIYIGVDFHARQQTICYLTTDSGELLFHQLKHEDKALVRAFYAQFSGHVIVGLEASGYSPWFERLLEELGCEVWLGHATEIRRRARWRHKNDRRDAELILDLMVHNEFPRLYLPPLQSREVLRMLRYRQKLIKMRTIGKNSLQALALQSGLAKGPHLFTKTGLQELRSATMSPAMQWQREQWLQLLEPLNERLLETMRWLQQQSQADQRISRLRTHPGVGLLTALCLVHSLEPVRRFANTRKVTAYAGLDPVERSSAERQRFLGISKGGSRVLRFLLVEAAHTAIRKDADLKRFYQRLAQRHGRPKAKVAVSRKLLIRTYIMLRDEIDYAEFQRRAVAARPVLPAHGL

SEQ ID NO: 219258 - protein, 402 aa, unidentified
MYFVGIDWADLHHDVAVLDEKGQELKYFTVPHKREGLEQLKQKLLSLDPEPENFACLVETKNGLLVQFLLEAGFPVYPLNPKVVDYRRKPSGAKSDPIDARLLANIGRSDLSQLKRLKPDTELISELKMLTRDQDGLIQEATRLTNKLIACLKEYYPAALEFFSKPTLPVALEFFKLYPTPDLVREATVPEIAAFLKAHKHPRPNQTAVSIWQKAHEPQLQASAPVVRAKCRLLLALVGQLELVKKQIAAYDEEITRLFQLHSDSRIFASLPGAAGRLAPRLLAEWGDDRERYENAAVVQALAGTSPVLFQSGKYRFARQRKSCVKPFRRAMHLFAFQSIKQVCWAREYYDLKRSQGKTHHEALRALANIWVRIIFAMWRSRTCYDEATFISARARHLNRAA

SEQ ID NO: 219259 - protein, 370 aa, unidentified
MTFIGIDLHTNRFTCCYRDGKPASGVQDGKRVETFDLTALGLAQFYRTLSAETYVLLEATITTFSFVRLIQPMVKEAIVANTYELKQISLGRNKTDKIDADKLCRIVKMQVLSGETTISPVTVPPAEIQDLRGLFSTYRLLKKQTTQLKNRIHSLLKEKLHGFTQEQIFGKSSRNMLRAMEGDPVLSFQLGLLFDTLEGQEAGIAVLEDKIREQAAPFMREIEILTSMKGISVFIAIAVIADIITADRFKDSKAFTSYLRSAPRVESSNTAKGNKGTNKMGRKLSATLITQILNHALDASPKLARWYDRLTQYKKAGSVRTGLRRRVLAEIYQMLKKGEYHYARDQKNHEAKMSQYRTFLKKRKILLEIA

SEQ ID NO: 219260 - protein, 425 aa, unidentified
MHSISNKKINQVTDQTLVVGMDIAKKKHYACFVDERGRVLKKPFPVLQSKEGLEWLYQCIVEAMKEFGKTEVIVGIEPTGHYWLNLAYFLDEKGIPLVMTNPMHVKRSKELDDNLPTKHDAKDALVIARLVKDGRFSYPRILKGMEAELRVGATFRSKLVEEQGAVRNQMIRWLDRYFPEFTQVFPSFGKMALAVLEYTPFPSDLAGKELEEVLALYRQSEGLQSPQRPKAKKLIELAQHSIGVTEGQQMARIEIATLVRRYRQLEKEIEALTEQLIELVQTFVEYEWLKTVPGVGDATIVELLSEIGSFSHYQDPRQLIKLAGLTLREHSSGQHKGQKRISKRGRKRLRALLFRVMMPMIRHNEAFRQLHDYYTTRPENPLRKKQSIVVLCGKLLKVLHAMCTKHQAFDAKRMMQDIFGLETAA

SEQ ID NO: 219261 - protein, 391 aa, unidentified
MPMYFVGIDISKYKHDCCIISAADQQIISKFTITNDKDGFEQLLTALNSLSNPEDIKIVFESTAHYALNLELFLENANHSFMEINPVLIKDFKKSQTLRRTKTDSIDCELIARWLMTVEYKPHSKGFYHAYSLKSLTRLRDRLVRQRSFYLVKITNVLDHTFPEFKPFFHERLSKTALYLLENYGSAEKIARMNSASYEKLRSISRGKFSPQQFIRLKELAANTVGVNNSIFDVELNSLLTLYKSLVDEIKTLESEINRLVDEVHPHYMSIPGIGPISAAIIYAEYGDISNFSSPNQMLAFAGIEPSVHESGTEAYNGKMVKHGSSQLRYVLINCCLPLIRFDVTFATYYARKRSENKPHRVAITHVAKKLVRVIYALESQDIDFDPKKLR

SEQ ID NO: 219262 - protein, 402 aa, unidentified
MNAVGIDVSKGKSMVAIMRPFGEIVSAPFEIKHTASDIHSLVELINSVEGESRIVMEHTGRYYEVLAHQLSKANLFVSAINPKLIKDFDNDSLRKVKSDKADSVKIARYALDKWQNLKQYNVMDELRNQLKTMNRQFGFYMKHKTAMKNNLIGILDQTYPGVNTYFDSPARSDGSQKWVDFASTYWHVDCVRKMSLNAFIDHYQNWCKRKKYNFSQSKAEEIYGKAKELVPVLPKDAITKLIIKQAVDQLNSASTTVESLRTLMNETASKLPEYPVVMAMKGVGTSLGSQLMAEIGDVSRFTHKGAITAFAGVDPGVNESGTYEQKSVPTSKRGSADLRKTLFQVMDVLIKMMPQDDPVYQFLDKKRSQGKPYYVYMTAGANKFIRIYYGRVKEYLASLPES

SEQ ID NO: 219263 - protein, 331 aa, unidentified
MMDIYYAGIDVSARTLDSALALPDVPVRQGHFAHTPSGHRQRIKWLTKGGRSVRVCLEATGLYRLGVALALHEHRHCEVMVVNPKAIKHYAQARQQRAKTDVLDAQLMLDYGQRLPFVPWQPPAPEILHLQAITRRISQLKVESTRERNRLHADAYRTGMTDLIKRDIQVNIRHLERRRARLEAEGQALVLAAPSLCAPFQRLLSIPGIGETSALRLLAELAVLPAEMKPPQWVAHAGLDPRPHESGSSVLSPRRITKAGNKYLRAALYMPALTAIRHQVNIKAFYDKLVAAGKKPRQAITAVMRKLLHAIGGVWKYDQNFDGQKFYKIAA

SEQ ID NO: 219264 - protein, 368 aa, unidentified
MAPYYVGLDVHSRQSVFVIEDAAGQVVGQGEVPTTPEGLQQLQTQHRLPAGTPVALETGTVAFFVARHLRRLGLEPVVVDAQEGRLKAHRPTQKSDRRDAYELCEGLRRDIYRILVHVPPPAVSALRDTLSRRRHFVRLQTAEINAVKRLLRAAGLGRLSRALRTEVGWGKLLAAVAPQPDLRAFGEHHRAAWRCAGDQVAALEHALGAQQRAFARDLERLETAPGVGPIVAATTLAVFSEVTRFPSAKHAASYAGLVPSTYQSGTRDAHGRITKRGSAELRAMLCEAAQHARRPTHPLHPYFTKLCAKRGYKMAVIAVAHRLARILFAMLRDGTDFDVHRLGIAVGPFTRTTVDAYRLKRAPRAHRA

SEQ ID NO: 219265 - protein, 360 aa, unidentified
MSNERMSVGLDVHARSVVGAALDGVTGEVHRRRLTPDSGEILSWVQSLPGPVRVAYEAGPTGFGLARFLTAAGVPCLVAAPSKLQRPTGDRVKTDARDALHLARLLKLGEIVEVTVPSVAQESARDLVRAREDARADLMRTRHRLSKLLLRQGIVYSDGQPWTGRHDLWLRGQTFPETGRRVAFDSAYEAMLFTVARRDRLDAAITELAMNSEFTDVVHRLGCLRGVSTLTGFGLAVEIGDWHRFTGATIGAYLGLVPTEHSSGGSRSQGSITKTGNTHARRLLVEAAWHHRRDYRSPGATMRTRWEQAPPAARARGHDGNRRLHHRWQVFNERKKKPVIANVAIARELAGWCWSLAVLQ

SEQ ID NO: 219266 - protein, 394 aa, unidentified
MEVRMENTPSAGVNNDPVHCFVAIELSKSSWVVGFQTPLSKQTSQYQLKACDAKPLLELIERVRIRIGRQLGRPVEVMSCYEAGYDGFWLHRVLKAHGIHNHVLDPASLQVNRRARRPKTDRIDADRLVRALIRHLRGEPEACSVVRVPSPEQEDARRLHRERGRLIAERVGHVNRIKGLCASQGIYDYEPMRKDRLQRLEKLHTGDGRPLAPRLKAEIVREIKRLECLLEMIATVETERDAILESGKSRHLNADKIKMLARLKAIGPEFSTTIVGEVFYREFANRRQLGSYVGLASSPFCSGSLGRDQGISKAGNAKARAMMIELAWSWLRYQPDSALSRWFRERVGNLKGRPRRIAIVAMARKLLVALWRYLQTGVIPTGANLKGLNRLKQA

SEQ ID NO: 219267 - protein, 388 aa, unidentified
MHVVAAQSEAAIAIRTDLCAIFVSLELSRSTWLLTSLSPGAGEKMSKHSVSAGDTAGLFSRFVELQQKARTRTGRTFPIITIQEAGLDGFWIHRLLQGEGIESWVVDPASVLTSRRRRRAKTDKIDGETLVRTLLAYKRGEPRVCAMVKAPTPEEEDRRRICRERKTLTAERVRHVNRIKGLLFAQGVGDYEPLRRNRRGRLEELATGDGRPLPEHLKAQISRELDRLEVILAQLKAVGSERDAMLEPAKEGPPTPASLLAQLKGIGPEFAAVLWSEGLFRSFNNRRQVAAYAGLAPTPWQSGSVAHEQGVSKAGNPRLRTTMIQLAWLWLRHQPGSALSIWFRERVQRNGGRSKKTAIVAMARKLLVALWKYAVHGILIDGSTAKAA

SEQ ID NO: 219268 - protein, 352 aa, unidentified
MSSSDVFSSPLDASGFAYVVGIDVGSQACVYTVLQPDKRIIVKPTEVANRDTGFVQVHASLSHLGVPPQRILIGLEATSRSSENWYQFLAAQGYVLCLLHPRQTHQFAQQRGLRAKTDRLDAATIARVLLSGEARPGSVPDELIATYRELERLHSQLTDDGARYQNQIQALLVVLFPEFVQVFADPCRPTALALLKGYPSARALVKAGVEAVAATLREVAPRRYGRKTAQQLVALATQSSASGLATDARALSLKILCDQLQHTLANLAQVEHELDQVLDRDTGATGLKSTPEFGRNTVAVLRAELGDVTRFQRVDQVVAYAGLDLEVKQSGKWKGEVKLSKRPRSAQRAANQ

SEQ ID NO: 219269 - protein, 349 aa, unidentified
MSQPLSNTVAVIGIDIGKNSIHVVGQDDRGAIVLRQKWSRGQAEARLANLPPCLVGMEACVGAHHLSRKLRVLGHDARLMPAKYVRPYSKGQKNDFRDAEAIAEAVQRSTMKFVATKTADQLDLQALHRVRERLVSQRTGIINQIRAFLLERGVAVRQGLRFLRVELPRILTTPPDVLSPRMVRVIEGLAEDWRRLDERIDHLSGEITTLARQDVGCERLMSVPGVGPIISSAMVAAIGTGDVFAKGRDFAAWLGLVPKQSSTGGRTILGKISKRGNRYLRVLFVQAAWVVLIKPQSWERHGLKSWIEAAKKRLHHNVLAIALANKLARIAWSVLARGRAFEASKLATV

SEQ ID NO: 219270 - protein, 330 aa, unidentified
MAHIGIDVSKNKLDCMWVRDLEAGKVKPKVFPNRQDQYPELLRWLQRNTGEAPETLQVYLEATGIYHEPLAYWLHEQGVRVYVLNPAQVRFHAQGMGVRNKTDRKDSMMLARYGIERAPRRWQPEPPEVRELKRLLSRLEALEQDIRREENRLEKAQFSEDTLAQASIDNVLQALREEYRRLQQQIDDHFDAHDHLKRDRALLESIPGIGRVLSASMAATLRSRAFTSARQAAAFHGLVPVLQESGTSVQRPPRLAKAGSGRLRKTLYMAAVVASRHNPDVRHQYHRLLRRGKAKMAAIGAAMRKLLHIAFGVLKSQTPYQPRNDTPCTS

SEQ ID NO: 219271 - protein, 348 aa, unidentified
MLADQVDYVVGVDPHRDSHALAIVHVLSGAVVFEATVAASSQGYQEALQLVDAHAAGRRAFAVEGSGSFGAGLTRFLTGHGERVLEVSRLRRERRSGGKTDALDAIRAARSVLGLERPATPRAGGERQALQALVAAREGAVSAKCAGLAQLRDLLITTPEPLRSELRPLTQAPLLRRLAATRPETRHDPELRGSMLALRSVARRVLQLQAEERELGRQIEALTRKLAPQLLDQPGVGPHAAAQLVLSWSHHGRIRSEAAFARLAGAAPIPASSGQTVRYRLDRSGDRKLNRALHLILVTRKRTHPPTRAYIERRIQEGKTRREANRCLKRYLARSLYRLLEHGPPIAT

SEQ ID NO: 219272 - protein, 419 aa, unidentified
MSFKILKFKCCGLDVHKTWIYACIGITDSNNRTEYKQARFSSFTKGLNELCDWLAKYNCTDVCMESTGKYWIPVFNILEQHNLWVTLSHPKYTKPMKGNKTDRKDAKWICDLYMCGMVKPSFIPPADIRELRDLVRYRYKLTCMITGEKNRAQNCLTVSNLKLDDVFSDVFGKSSRSITEQILQHPGEKFDVAPFVHGRCKTPIEEIQAAVDGAISKEQAVKLRQCLDHIDELNKHISELEQEILRLSDKYEAALNLIRTVPGFDKNPMTAVQILSEIGGDMSVFPTAKHLVSWAGCCPRNDQSNQKIKSTRISRAGSYFKPVLVQVANALIKSKKHLEFTNRYKRIKARRGHKKAIIAICRMILTAIWHILSDLKPYTPEGFLESHPVKEGKVLSSSQALNFFKQRGYIIKDEPLSVS

SEQ ID NO: 219273 - protein, 315 aa, unidentified
MSHPATPSRFIGCDVGKTAIVVFDAASGRTSALANTPEVLSRFAASLEATCFVVCEATGGYERDLLAALIAAGVPACRADARKVKAFIRSFGTLGKSDAIDAAALARYGRDRFAELPLWSAREPERDRLQALVLARRDLVKDRLAYANRRAAPAAAPVHPYLEALVESFDAQIKAIEADINALCAACEPIAKAVNVLIAIPGVGQKTAAALIALMPELGSLPRRQAAALAGLAPHPNQSGQTDAYRRTRGGRPEVKRVLFMAAISAAKHHPTLSAFYKRLLNAGKKPLVAITAIMRKLVVIANAKLRTANALQLS

SEQ ID NO: 219274 - protein, 382 aa, unidentified
MRSVNGMVRPCSCPASDKLARGTKTRSTPCLQQHRPIAAIGIDIGKNSFHVVGQDTRGQIVLRQKWSRHQVEARFANMPPCLIGMEACVGAHHLSRRLKALGHDARLMPAKYVRPYSKGQKNDFRDAEAIAEAVQRPTMKFVATKTADQLDLQALHRVRERLVSQRTGIVNQIRAFLLERGIAVRQGQRFLRAELPRILATPPDVLSPRMLRMIEDLAGDWRRLDERVEGLSNEIEAIARQDTGCERLMSVPGIGPMISSAMVAAIGAGDVFTKGRDFAAWLGLVPKQLSTGDRTILGKISRRGNRYLRVLFVQAAWVVLIKPKIWERHGLKPWIEAARKRLHHNVLAIALANKLARIAWSVLARGRAFEARKMDQAANQSA

SEQ ID NO: 219275 - protein, 417 aa, unidentified
MAVVDVVHPRCAGVDVSKRDAKVCVRVAGVGRAGATSTVTTWGAVTNRVLALREHLIAAQVTLVVMEATGDYWKPFYYLLEDGPFEVMLVNARHVKNLPGRKTDVSDAAWLAQLGAHGLVRGSFVPPEPIRQLRDLTRTRTTLVRERAREIQRLEKLLEDAGIKLSSVASDITGVSSRAMLEALIAGRRDPVELAELARRRLRVKIPDLTEALTGRFSEHHAFLARLHLDLIDQHTRAVAELTGRIEVVIAPFRAVRDLIVTIPGISTGVADVIIAETGADMTRFPTAGHLASWAGTCPGSNESAGRVKSTKTRPGNPYLKGALGVAAMAAAHGNGTYLSARYRRIAARRGPVKAIVAVEHAMLTAIWHMLTNGTGYTDPGGDFYTRHNPDKTKNRAIDQLHQLGYTVTLTPLPAAG

SEQ ID NO: 219276 - protein, 318 aa, unidentified
MTHFTTLTAGIDTAKDKLDIAVHGQTHTFNVKNNLEGWKILASELTKAGVTRVGIEATGGYERGVVRHLQAEGFIVLVMQPLQVKAYARLDLRRAKNDSIDATLIAACASAIDPPTAEPDPRLDALVDHLTFIEQIEEDIIRFKTRLEHIHDPRLRDSVTDDIARLERRRATELRQIEAALREHADLGRRFDLVLSVPGIGVRTAIALILRLPELGKVSREQAAALAGLAPFDHDSGKSKGERHIAGGRSRLRRSLYAAALPASFRWNPALKALYAGLTKAGKPYITALAACARKLLIFANTVVARGTPWEDRTATAA

SEQ ID NO: 219277 - protein, 328 aa, unidentified
MFFIGIDVSKAKLDCSLLLDVATAKRRAKSVTNSKAGVDDLLAWCVKQQATPDRLHAILEGTGVYHEQAALALSDAGVTVSIVNPAQVKDFGRSLGVRTKTDGVDSLVLARYGALLNPKSWTPPTPEARTLQALLSRREAIAQDLQRERNRLEKAQATDTPALIHQSLLDSITFLETQLAKLQIDIDDHIDQHPELKADRTLLISIPGVGPQVSNHLLAVMHNHHFQSAEQLAAYLGLVPVDRQSGSSIQGRPRLSKAGPARIRAILYMATVVGVQYNPHLKALYLRLQARGKTKMSALGGAMRKLVHLCFGVLKTREPYRADYALQS

SEQ ID NO: 219278 - protein, 447 aa, unidentified
MNKVAKKTKTEKVRSISMAMVNPNAAGIDIGDGFHVVAVPADRDVDNVRSFGAFTEDLEKIALWLKQCEIKSVAMESTGIYWKNLFMVLVQHGLAVELVNAKQTRNVTGKKNDESDAQWIQKLHSCGLLKSCFLPDDHTETLRTLVRHRRSLTQDGSRYVLRMQKSMELMNIKVHTVISDITGKTGTAIIKAIIGGERDPKNFLPLIDSRIKASKEEILKSLQANWRTEHLFLIKQCYNLYQNIQTQIQLCDQQIEKVLQSMPQQKEIPTQKSVKRKKSKNQPRFNTTDYLHRIHGVDVTQIFGISEIGSLEILSETGTDLSKWDNENKFVSWLNLCPNNKITGGKLISSQLLKKKPNTAAQAFRMAANAVQSSNHWLGDYFRRMRSKGGQKYAIVATARKLAIIYYKMVRFKESFNPFDIDTYREKYRLAKIKYLERTLERLRQVA

SEQ ID NO: 219279 - protein, 453 aa, unidentified
MEPSTSHATAEPDWPLVSPDAAGLDIGASEIWACVPPGRATPAVRAFATFTPDLEALADWLQACGVHTVAMESTGVYWVPVFELLEARGLEVYLVNAAHIKNVPGRKSDVQDCQWIQRLHSYGFLRASFRPEADMVVLRSYLRQRGMLIEHRAAHVQHMQKALQLMNVQLARVLSDITGSTGMQIIRAMVRGERDPKVLASYRHGRCQHSAAEIAKALTGHYRAEHVFALKQALALYDAYTEQLQACDAEIARQYAAIRPRFDPDDPDQPLGPDPKPETHSKNAPQGDIRRQLFQVLGVDLTAVAGVDEATAQVLVSEIGTDMSKWRTEKHFCSWLGLAPHNDITGGRVVHSRTLPTHNRAAQVLRMAAQSAGRGKSALGAFYRRLRARVGPEQATTATAHKIARIVYHMIKHRQPYRLVSAAEYDEQHHQRELKSLQRRAAKLGMVLAPSPA

SEQ ID NO: 219280 - protein, 419 aa, unidentified
MSFKILKFKCCGLDVHKTWIYACIGITDSNNRTEYKQARFSSFTKGLNELCDWLAKYNCTDVCMESTGKYWIPVFNILEQHNLWVTLSHPKYTKPMKGNKTDRKDAKWICDLYMCGMVKPSFIPPADIRELRDLVRYRYKLTCMITGEKNRAQNCLTVSNLKLDDVFSDVFGKSSRSITEQILKHPGETFDVTPFVDGRCKTPIEEIQAAVDGAISKEQAVKLRQCLDHIDELNKHISELEQEILRLSDKYEAALNLIRTVPGFDKNPMTAVQILSEIGGDMSVFPTAKHLVSWAGCCPRNDQSNQKIKSTRISRAGSYFKPVLVQVANALIKSKKHLEFTNRYKRIKARRGHKKAIIAICRMILTAIWHILSDLKPYTPEGFLESHPVKEGKVLSSSQALNFFKQRGYIIKDEPLSVS

SEQ ID NO: 219281 - protein, 347 aa, unidentified
MTTLEAVRGVTGGVDTHRDVHVAAALNPLGGLLGSESFSTDPAGYKALLKWLRSFGDVTKIGVEGTGSYGAGLARHLRRVGVTVIEVDRPNREERRRSGKSDPLDAVEAARAALSGRATGSPKSRDGAVEAIRVLVVAKRSARQARSKALIQMRHLGFSAPEELRGRLKGLSVTALVAEGVKFRPTRSTDTVTAATKASLSSLAHRIGCLDDELAELDERIEALLVATVPELLDRFGVGPDTAAALVLTAGDNPERLHSEAAWAHLCGVSPIPTGSGQKSGKVRHHQGGDRQANSALWRIVMVRIAHDPDTRAYFDRRVKEGRTKHEVIRILKRYVAREVYKYLPRG

SEQ ID NO: 219282 - protein, 334 aa, unidentified
MEKITTVGIDLAKRVFALHGVDGAGRVGLRKTVRREQLVETVAALPPCLIGMEACSGAHEWARRFQELGHTVRLMAPVFVAPYRKSGKNDGNDAEAICEAVARPNMRFVPIKSTEQQAVLSLHRVRQGWIEERTATINRLRAVLTEFGVVLPNRAQHVRRGARAAAEALPELARRAVEDLRAHLGVLDERIAAYDRELEAQARASEAAQRLMCIRGIGALTAVAMVATVGCARDFRSGRQFAAWLGLTPRQHSSGGKPRLGHISRRGDAYLRCLLVQGARSVLLTAMRHSDRLSRWALSVQARRGYHKALVAIAAKNARIAWALLSKNQTLRAA

SEQ ID NO: 219283 - protein, 338 aa, unidentified
MKLYGGIDLHSTNSVVALTDEQDRVVYQRRLSNDLPLILSELQPYQRLIEGLVVESTYNWYWLVDGLMEAGYRLHLANTSAIKQYEGLKYADDNTDARWLAKLLRLGLLPEGYIYPKEQRPVRDLLRKRSQLVHQHTDNLLSVQNLMARNRGHSLNANQVKRLQYAEVNRLLKDEHLALAVNSTLVVMHSQAEMIDLLEKAAKKRIKLRPEFKLLLTVSGIGEILGLTIMLETGEIQRFKRVGNYASYCRCVDSKRMSNGKKKGKGNRKNGNKFLAWAFVEAANFAVRYNPQIKRYYQRKRARTNGIVAIKTVAHKLARACYYILRDQVAFEVDKAFT

SEQ ID NO: 219284 - protein, 354 aa, unidentified
MMIMTLGIDLGKNNCSVAGLDESGTIVLRRRMQPKTILSFASKLAPCTIAMEACCGAHYLGRLLAGQGHAVRLMSPEYVRPYVKAQKNDDRDAEAIAEAATRPTMRFVELKSQEQLDVQSLHRVRSRLVGARTTLTNQLRAILLERGTVVPQGRRKLEQAVDASLADPDFMAGNRIRRLLAEMREEWIDLDRRISALDQEFVELARDDAATRRLASIPGIGVLNATALVAAVGDGSAFGRARDLGAWLGIVPRQYSTGGKPRLLGISKRGNKYLRTLLIHGARAALPSLARSQTPLGAWLRGLLARRHRNTVVVALANKLARIAWATLRRGVTFEARQGFANNLKQSVGGTDAA

SEQ ID NO: 219285 - protein, 348 aa, unidentified
MTLVGCDLHSRKQQVAVLDTTTGEVAEQELAHDGDAVERFYRALTPPVTIGIETTSYTQWFHALMHRLGHTVLVGEAAKIRAMVVRKTKTDRRDARHLLDLLKHDRFPTVWIPDPGTRDLRALVAHRVRLVRMRTMVKNGLQAIALNQRLALRSKLWSQRGLAQLRALPLPPHTTRRRDDSLELLAWITSRVHQLDARIVAAAENDSHARLLLTHPGVGPLTALTTVLVLGPVKRFPDGQHVVSYVGLAPAINASAGKQRLGRITKQGNALLRWVLGQAAPLAARADDDLRRRYFSILHRRGRPKAKVALARKLLVRLYIMLRDQIDYEEFRRRGCATRHHQPMASIM

SEQ ID NO: 219286 - protein, 322 aa, unidentified
MNPKNYGGIDVAKKNFVIGIYGQDKTKTEANTPKGHAKAVEYLQKHNVDLVVLESTGGLEVPLANALHAADIRVVIANPQRTHQYAESFSLGKTDHLDAKMLADYAQALDSRKMADDMCYAPPSEEALALEALVKRRSQLVEMRKMEKNRLEQTHASQKASVVAMIKHLGELIAALDKEIDQSNRGGFNGKGEILSEMKGVGRITCATLLSMLPELGKVPHKRAALLVGVVPPPRQSGEKEKKSGCVGGRMVVRNALYMAALTATRSEPKIKAFYEKLMSRGKAFKVALNACMHKLLRILNARMRDYLASLKETEESELQGA

SEQ ID NO: 219287 - protein, 370 aa, unidentified
MLRFHATNDEGGSQMFYGIDLHSDSITIAAMGEEGETSRVFRYHLGTEAFEKFVERLTANDYMIVEASTNTFWFYEKVRYRVGRCIIIDPRKIQGNDGVKVKTDKRDALQLVRLLRYVILTGATVPEVYIPEKPVQEIRQLFTTYYLYKRQMVMTKNRIHSLLKQEGYTVPKKSLDVAKTWDIIARFKLSVSAKIQIQQLYEQIESIRKGKELIKQEILKRGVIFQEEIELLTSIKGISVFMAIGIMADIVDINRFPSAKKLCAYLRTAPTISSSNKMTRIGSINKNSRKLTISLLIESVEHFRSVEKINRFYTGKKKGKGAGKARVAVVRKIIVAIYYILKKRQYYYYRSEEMHCRKLKEYENFLKKVA

SEQ ID NO: 219288 - protein, 345 aa, unidentified
MKITTVGIDLAKNVFQVHAVDERGRAVLRKQLRRDQLTAFFVNLPPCLIGMEACASAHHWARTLQKFGHTVRLMAPQFVKPYVKTNKNDVADAEAICEAVGRPNMRFVPIKSVEQQAVLSLHRVRQGFVRARTAQGNQIRGLLGELGLIIPKGIVNVTKRVPTVLEAAGEEVPAAFRQLIERLTKHLKELDRQVDELEAQIKAWHRGSELSCKLEKIPGIGPLGASALVASIADANSFDNGRQLSAWLGLVPRQDSSGGKPKLLGISKRGDVYLRTLLIHGARSAILAAQRKSVNTNVWLAKLLDRRHPNIAAVALANKNARTVWALLAHGREFRADYAPEVSAA

SEQ ID NO: 219289 - protein, 407 aa, unidentified
MDLLKTVFGIDVSSRKSNVCIMVNGQKVNDYAISNDMVGFNRLLGDLKQVTKPQIIFEATGVYSRRLQAFLDMHELRYVMMNPLEAKRKTKDDLHQNKTDKLDALYLAKLQSEHPQRLAYVQNKEYQELMANNRIYEQASHDLISNKNRLHKAVQLTFPEIEHLMVNPRGKNYWSIALRFPHPDIVLETKEADIIDFLKGLSGIGKKRANDIAQSLIRLAKVACPAVKKNSAHIRGLKMAINNILSAEEECQTALQEMAKLAPKRDLEILTSIPGIGENTALRIISELGDIRRFNNPSQLNAFVGVDPQVYESGNLTAHLSISKRGTAIGRKVLYLAINQIQSAKKAGNPCHIADYYEKRKRSSETASHKKAAIASIHKLLRTIFALIKNDQLYSYDVAKHNQRLLS

SEQ ID NO: 219290 - protein, 341 aa, unidentified
MKVTTVGIDLAKNVFQVHGVNEHGKGVLKKQLKRQQVMEFFANMPACLIGMEACGGAHHWARKLQALGHTVRLMAPQFVKPYVKTNKNDAADAEAICEAVARPNMRFVMIKNAEQQAVLALHRVRQGFVKARTAQGNQIRGLLAEFGLIVPQGIAHVTGRVPELIEDASNDLPGSFRLLVQRLLDQLKELDRQVSEIEAQIVAWHRDDELSSKLAKVPGIGPITASALAATVGDAKNFGNGRQLAAWLGLVPKQNSSGGKNVLLGISKRGDTYLRTLLIHGARAVINAAQRRKVQIDGWLGAIIQRRHKNVAAVALANKNARIVWALLRHDREFRADYAAV

SEQ ID NO: 219291 - protein, 344 aa, unidentified
MNRLIERCAMLDIHKSQITACVRVPDDAGGRRQEIREFRTTTAGLITLADWLRSWSVTVVGMESTGVYWRAVFYLLEDEFECQLFNARHLRHVPGRKSDVRDAEWGCQLLEHGLVRPSFVPPRPQRELRDLVRYRKAKIQERTREVQRVEKTLQDAGIKLSSVASEVLGVSARKMLDALVSGTHDPDVLAELARGTLRKKIPALREALQARFTGHHALLIGQMLAQIDFLDETIATLSERIAELTRPFSRELELLDTIPGIDQRAAEMLLAEIGPDMSRFPTEHHLASWAGMCPGQRESGGKKHGAPVGLGVSVIGGGGLRCGCSRGRRGRSAGWRSGSRSCGG

SEQ ID NO: 219292 - protein, 415 aa, unidentified
MGHKIAAIDLHKKVLMVVVMREQAGERAEKLERRRFGTTTPELAQLAAWLRVLGVQEAVMESTAQYWKPVWGELEGKLPTLHLAQAFSNRARRGRKDDFRDAERLLRRLVANELVLSFVPQPEQRNLRTLTRMQVHLTYDRGRLHNQVECLLEEMRIKLSRGRSDLFGVTGRRILGALAEGETDPQKLAAWADHRLKCTGKELVAALTGKVQPRHQRLLGLYLQRLQLIDDQIDELQHLIAEALQADQEAVQRLAEVPGFGADSAQQMIAEVGAEAATFPSAQEMASWVGTSPGQNRSAEENHSTRSAKGNRYARRLLTEAANAAVQTKGSHWQVVFRRLLPRLGYAQAVWAVAHRLCRLVWKILHDKVRYVEQGLQRDPKARANRARTLARALRQLGYKVELTPLTPAPAPTSP

SEQ ID NO: 219293 - protein, 387 aa, unidentified
MPQPNDLSRSLVALDQDSTIIAVVELSQSSWLVGGVVPGIERQPRKKLEPSPERLLALLHRWRDEAVRAGRIITRIALAFEAGRDGFWLARWLEARGVEAHVIHPSSVAVSREHRRAKTDRLDTELLKRVFLGWLRGERGHCSMVRVPTIAEEDAKRPNRERECLVRERTRLVNRMKGALARLGIRNFKPTLRQATERLATLYTPEGWPLPPNVSAELERDIARLGLVIGQIKQLEEARQQRLEEEPESGRHAMVRRLVRVVGIGIETADMLVNEVLSRPLRDRRAVARYAGLTGAPDESGTKRREQGLAKAGNARVRRGMIPLAWRFLRFQQNSALARWYQARTADRRGATRKTMIVALARKLLIALWRFATSGEALEGVILRPAS

SEQ ID NO: 219294 - protein, 360 aa, unidentified
MISVGIDVHKKRCQACLKDEKGKLIQELTIPNSIEGAEQLARLLEGYGEAKIALESTGNLWVRIYDTLNQYGAPFKLVLANPYKTRIIAEAKIKNDRMDARVLADLVRADLVAESYVPTPDIREQRALLRQRRSLVEDTVAVKNRIHNQLDKYDLRPQYSDLFGKQGREWLRNLQLPPTERIILDVNLKQLQSLEESIQTLTIRIAQEAINRPDVKLLMGFAGIDYYSAMLLINEMGPITRFPSAKKLVSYAGLAPGIRQSADHTVHGRITRDGNKYIRWILIEAAQNASRFDPKLRPFYLRVSARRGHQKAITAVARKMLVSIYHVLKHQEEYHGQRDELLERKINRLQRTVDTSLQAK

SEQ ID NO: 219295 - protein, 386 aa, unidentified
MRKNDLSRSLVAFDQDSTLVAVVELSLKRWVVAGLVPGVAREPLKKLEADADTLLKLLHRWRDEAVKVGKTISRIVVAFEAGRDGFWLARWLRQRQIEAYVIHPSSIPVSREHRRTKTDRIDTQLLMRSFLGWLRGERKHCSMAAIPSAAEEDGRRPNREHQRLTEEAGALISRMKSTLVRFGIRKFNVKLVKACERIEALRGPEGAPLPPNTLGEMQRDMARLRLVREQMKIIEKTRQQKLIKAPRQGTNPMVLMLARVIGIGIETADMLVHEVLMRNLRDRRAVARYAGITGAPDESGDKRREKGLSRAGNARVRRGLVQLAWRWLTFQKDSALARWYRQRTASARGDIRKTMIVALARKLLIALWRYLTVGEVPQGVVLRPAQ

SEQ ID NO: 219296 - protein, 336 aa, unidentified
MNEATWFLGIDVAKRKLDIALLVTDKIKSKVFDNNTSGHAALTRWLIERGAIQSHTHICLEATGPYSEALAIALVDAGWHLSVVNPARIKGFAQGELARNKTDRADASMLARFCAAMRPGFWTPPSSEWRELRGWVDRLQALKDMHQQERNRLEAHLASGQAALVTAVQTHLDWLTKHIAQLERDIDDHIDRHPELKRDAELLHSIPGIGNTTIAKVLAYAGDVRRFASAKALAAFIGVTPRQRLSGTSVKGRSMMSRTGHADLRRALYMPGLVARWHNPLLKVFGDRLSAAGLAPKAVVGAVMRKLAHLIYGVIKSGQPFDPKFSTARLDFQDGI

SEQ ID NO: 219297 - protein, 387 aa, unidentified
MARKRTLSTLDTSIAYEAVGLDLAKEDTAIAAFGPDHEGPYLIDRMPYDKLYELLADMAPTLVAMEPCSGAHQIAEQIQELGHEVMMISGRHVQAWVKDHCNGQKTDLNDAFAILNLAYDRWLTPIRGKTREECRLLALQASYRQLKGQRTKTMVHVKATLHAWGFPIRAGSFNQKVLHELIDTNREAFGDEVVETLHLMINRVRDLDHDIATVLKLLTEATKRDPRASLLRSIPGFGILTMSRWCAVIGDIARFDSPKQTMAFVGLVPNNRITGHHTETSSGREARGQGRMSKRGDKMLRSLCILGAGALCLMVRNDRLPDCPFVASIKERLASPRPWFKVLVYVAAKLVRIATALLKYGETFSYEKAGISKAVLKQWELEQAKAA

SEQ ID NO: 219298 - protein, 406 aa, unidentified
MKQIVSVGIDVSKGKSTVCAMIHPNTIIKESFEVLHTVEEMSMLADYIGSLDGEIRIVMESTGHYHLPVAQFLYQKGFFICVENAYIIRQFSRIMLHGAKTDPLDAKKLAKYGLAYWSELKPYKFHPSCYTELSLLSKQYQTYIKLLIAAKQNVIHLMDEMLPGFKEALDTASSVQFSKVKYVDFAKEFYHVDMIKTMGKEIFRENYKQWCKEKGYRFQSEKADELFHLAEDGIPTLPTEFPSTRLCMEVATEQVSQLGYALEQILSQMQNLAKTLPEYQTIRQMGGMGEKLCVRFIADIGDVRRFHNGKALVAYAGIDAPPYQSGQYTGTKRRISKRGNSALRKTGYEVMKSLKSHPPKTDTRVYDFIIKKENEGKSKKQAKIAGLNKFLQIYYVRVMEIYKNIA

SEQ ID NO: 219299 - protein, 313 aa, unidentified
MIITPRCVGIDVSKHHLDIFDEGIGVSERIANTPHAITELVARWRCDALVVFEATGVYDLELRAALRAADIRFARINPARARDFARASGQLAKTDPIDARMLAAFARAMRPATEQVSTPARNALARLAKRRDQLVLMRAQEKNRRSEAGDRAMVERICRLIEVLDHEIAEIEADISALITAEPEIADDAQLMRSLPGVGPVACMQLIAQMPELGHVGPKQAAALAGLAPFNVDSGAYRGKRKIGGGRKRVRNALYMAALNAVRRADRFKAFYAKLRQAGKPAKLALMAVARKLLTILNAIMRDRKAYIPAQQS

SEQ ID NO: 219300 - protein, 376 aa, unidentified
MSKVLFVGLDVHAETIAVAVAEMGGEMRSSGVIPNRLESIRKLVHKLGPVQHLRACYEAGPTGYVLYWQLTQLGVACEVIAPSLVPTKAGDRVKTDRRDAEKLARCHRAGELTAVWVPDAAHEALRDLVRAREAAKKDQLKARHRLGKFLLRHGCRPEGIKAWTKQHREWIKSHVHFDQPALEATLTDYLEEVDHVWERIVKLEKAIDEAIRQAPPEIRAVIEALQALRGVAQTTAASIVSELGSLSRFPSPRQLMGYSGLVAREHSSGNRVQRGGITKTGNGHLRRVLVEAAWAYQHRPNVIGFLARRQKSLAISEEAKKIAWKAQQRLHKRYKAMDARGKNKNQIVTAIGRELLGFIWAIAIETEKQHRLAKTA

SEQ ID NO: 219301 - protein, 337 aa, unidentified
MEITTVGLDIAKRVFQLHGVDAAGKAVLRRKLQRSEVLAFFKALPSCLVGIEACGTAHYWAREIRELGHEVRLMPPSYVAAYVKRGKTDASDAAAICEAVTRPTMRFVPIQTAEQQAVLMLHRSRNLLVRQRTMLVNALRGHMAELGIIAPQGIARVADLTAVLLGEDTTNVPALAREALRGLAAELEALDRRVKEIEVAIVAWHKDNEASHRLATIPGVGPITASAIVATITDPFQFHSARHLAAWIGLVPRQHSSGGKQRQGGISKQGDRYLRRLRWSGIRETNPQPRLAGSKACSNAGPHDSSRWHRLTKRRGSYGLCSCMEKPIACRQQSQVA

SEQ ID NO: 219302 - protein, 422 aa, unidentified
MNNFYPVVGVDVAKEFCFYCVLSPDGKKYLEPFKAFNTKKGLDFVLNKLEKVEKAFNRKPAIVLESTGHYSPRLVHFFCKNGFEVFLVNPLQSHSIKNSYIRKVKNDKVDAEELAKLYFVCDLRKYHPSKNSIENLKIFSRAFSNLSEQRVTIVNQLISAVDQVFPGFTEVFSTVSSKTAIELLVNYSSPDELLNATEEDVVSLIRSCSRRSLEYAEKKYKLLVKCAKDAKDTGVDLAALYEIVRIYAQNLMYIDNKLQELEKLIKECAITIPEVDLISSIPGFGKKLSAIIASEIGDISRFDNAKQLVAYCGIDPSVKQSGNFTGTKNKFTKRGSPYIRKALYIAAIISVRKAPNGKCVNPVIYDYYQEKIKSKSRKQALGAVMNKLVRIIFSVLKNNRSFVLITPEEQVALYRSKIRKVA

SEQ ID NO: 219303 - protein, 401 aa, unidentified
MTVVGIDVSKGKSMVDAMKPGGGLVAAPYEVRHSDIELSRLALDVLCMEPDTRVVMEATGRYHEPVAALLHSEGIFVSILNPLLIKQSGAGSLRKVKSDPKDALKIAKYGLDNWSTLREYTPTEAIRQQLKLCERQCDLYSKNLISLSDKTFPGVNELFSSPEKADGHLKWVDFYRTFWHCDCINRMSPDAFGERYKKWCKKKGYHFSADATDALYAASCGLYTTLPRDNNAKLLVTVAADQLIALRENQSKLEAEMLNLCKQLPEYETVMAMYGVGKSTGPHLMAELGDIRRFPHRSSIVAFAGVDPGVVGSGKMQLSSVATSKRGSPQLRKALFQVVSTYVKRKPENEAVYQFYAKKRDEGKPFFVCTTAAANKFLRIYYARVKECLNAAESAVQTEEG

SEQ ID NO: 219304 - protein, 347 aa, unidentified
MIHIAIDQSKKCSYVVAMNDHNKIYWDDKMPNTREAFKVLQSALPPDEPVHSVLEAGWNWGILYDLLEELELNPILANPVKMRTIAETFVKTDKIDAWAHLKILKAGLTPVVHVPVKEVRNQKNLLRQRMWLVKFKTMIKNRIHTVLDRNHLTTPDQTDLFGTHGRAWMNGLALGHPDQELLTADLELFDDVQSHIKETEKWIDSTLKPNPNIPILQSLPGVGKILAALMALEIDTAERFPSASKLCAYSGLVNSTYSSADKTRHGGLIPACNRHLRYAFIEAAWTAVRVSPYFQAYFKRLKFRIGGRDAIGAVARKLCEITFFCLRQKRPYVEKPYRFQAPRRLAA

SEQ ID NO: 219305 - protein, 429 aa, unidentified
MTSRQNNKNELILVAIDVAKHSHEVLILWPDGHQKGYRVANSFEDFAKLTALLKSQGVPVRAALEPTADYHRCIANWLLQHGVDVHLVSSLACSRVREALFNSWDKNDRKDAKVILYLLEQGVSEPFHDPLLQGFMHLQEISNTYHQIGLARTRCQHSLINHYLPLFFPEFEKYFHSSRTEWFCRFLEKFPTPLCITSISKEDFLTQAWNLVGRKVAKERFLEEVYELAQKSVGLPIMENCPELYGFRIQLQRHLQLTAQRNDLEKLSIGILTNNPDYHRLQTIPGIGPILALIILAESGDLRRFAHHRQYLSFCGFNLSGSQSGQSKSRYRISKRGNARLRYAFWLAATVAIRQRENSFRRKYETYIAQDRNNADLKRKAYCAIAIKVARVAHSLIKNAMDYRGYHDIEIPGGRTCSMGRWTLSGQIP

SEQ ID NO: 219306 - protein, 307 aa, unidentified
MYIGIDVSKDRLDVHIRPTGEAFSVTRDETGLGELVTRLGVAEPALIVLEATGGFETIVATTLAAEGLPLAVINPRQIRAFAQACGQLAKTDALDAAIIARFAEAVQPQPRAVPDEAARALGELLARRRQIIGMTVAERNRRRQLTQPRLVKTVDRVLATLQKQLSAVETDIDTAIRDTPAWREKEERLTSAPAIGPKIARTLIADLPELGTLSRRQISALVGVAPFSHDSGQRRGRRAIAGSRPGVRAALYMAVLVTIRRKLPLATTYQRLRAAGKPAKVAIVATMRKLLVILNAIMRDNTAWRAA

SEQ ID NO: 219307 - protein, 331 aa, unidentified
MKFEEVIGIDVSKNTLDACIHSMQIFTRLPNTKKGYSKLFSWVAKSTGCSLEKALFCFEHTGMYSYALACYMSENQANYIMVPGLEIKRSLGIQRGKNDQIDANKIAQYAYHRREEVSLYQLPEKSMNKIRQLLSLREKLVKQRAGYEATLKDLSDFIDCSENRLLFSIPRKLIKELNRHIESTEKEIDSVLEENPDIMNNYRLITSITGIGRQTALQLIVVTNNFLSFNDHRKLASYAGVAPFPYTSGTSIKGRTKVSSLANMRLKSLLSACAISAIRHDPEMKVYYNRRTEIGKHKMNSINAVRNKLLARVFAVIKRGTPYVALCQYAA

SEQ ID NO: 219308 - protein, 330 aa, unidentified
MKTFFVGIDVSKSWLDLVVCDEDQNQVEQPMNITNDLKEIKEFCEGLSSRFPDVKLWFCLEHTGNYGLLLSQVLEELKLTYSIVPPLEIKQSIGMTRGKNDQVDARRIAEYASRHAKKLVPTSLPNEKLLKIKSHLTYRDQLIKVRQQFKNSRKSHLVSNKSYDIKAIISDLDAKIEGLNQDIKAIDTTIEEFIKSCSKLNKNYKKIQAVKGVGPVIAVYMILYTNNFTSFNNPRKFNCFAGLAPFQYSSGSSVRGKTKTSQLRNRIMKKLLFNGANTAAMHDPELKAYYRRKMAEGKHHLSVTNAIACKLVYRMFAVVKREEPFVNLVR

SEQ ID NO: 219309 - protein, 415 aa, unidentified
MEVVHPRCAGIDISKRDAKVCVRAQGTGRARAKSTVTTWGAVTNRILALRDHLVAEEVTLVVMEATSDYWKPFYYLLEDAPFEVMLVNARHVKGIPGRKTDVSDAAWLAELGAHGLVRGSFVPPEPVRQLRDLTRTRTAITRERGREVQRLEKLLEDAGIKLSSVASDITGVSGRAMLEALIARDRGPAGLADLAKRRMRSKIPELTEALTGRFAEHHGFLARLHLDLIDSHSRAIEELNGRIEEAVQPFRATRDLIVTVPGISTIVADVIIAETGGDMSRFPSAGHLASWAGTCPGSNESAGRVKSTNTRPGNPYLKGALGVAAMSVARSKNTYFAAKFRRVASRRGPVKALVALEHAMLVAIWNMCSTGAYYADPAEDFFTRLHPDRARDRALEQLHRMGYAVTLEPLPAQAG

SEQ ID NO: 219310 - protein, 336 aa, unidentified
MTNATATDRKPTGLFAGVDVAKDKLDLKLTGDRPVVTVCNDAAGIATLVEIFRAAPPTLIVVEATGGLERPLLDALLEAGLAVARVNPGQVRHFARALGLLAKTDGIDAGVLEHYARLLSPRILQKRPQKHAELEALVTCRRQLLHVRTEQSNRLGQTRSDPARQAIEAVLTTLGEQVDSLDAQIHKLIESDDDLGDVDKLLRSVPGVGPVLSSTLLCEMAELGTLDRRQAASLLGVAPFNRDSGRFKGKRATRGGRASVRGVMYMSAVCAIRHNPILRSFAQRLRAAGKLPKVVIVAAMRKLVSILNAMVRDNLSWEQLDLVKKYNLSNVAAHTA

SEQ ID NO: 219311 - protein, 337 aa, unidentified
MKQINKNEIYNHYIALDWSKDNFALAVMRSNSKEPKVIVCPPDLKLLKEKLKSLTGKKILTIEETTSTHWLYVELKEKVNRILICDPYRNKLLSDGPKNDKIDAKNLCLLLRNGSLKEVFHTSDKSYEIRKLVSCYDDFVKASVRIKNQRSAMFLSEGKDHKKEKVLEESAIKKFVTEKQNQTRAQLDEIREEFELMFKKIIKENKTVGQLAKVSGIAHILAVTIFAIVIDGTRFATKYKYYAYAGLVYYQKESGDRNYGKRKIRHNVKLKSCYKIAANAAIGGNNDIREYYEYLIENKYSIQDARNEIARYIAKVTYAIMKNGTDYRPYQWRESKK

SEQ ID NO: 219312 - protein, 407 aa, unidentified
MAAVMIGVDPHKGSHTAVAIGAAEEPLGELGVRASAAQAERLMTWAAAWPERTWAVEGARGLGSLLAQQLVAAGEPVLDVQPKLGARVRPLTAGDTNKNDPNDARSVAIAALRSPARREVRPDDHAAVLKVWSKRHRDLGRTRTQVACRLHAALCELIPGGISKDITAAQAARVLDSITPSGAVAVARCELAAEFTGDLRRVDAQMRDTRQKLAVAVRASGTTTTQIFGVGPVIAATVIGYVADVSRFASRDHFAAYNGTAPIEVSSGNRKIYRLSRRGNRRLNHAIHMAAITQIRYRHSDGRAYYDRKLAEGKTHKEALRSLKRRISDAIFARLQADARQATAAADTEGPGGQPGNDSVASAAGSHHEHRLFGQATPGPQSTLRPRPDPQTGKTSPRAKRKAGRTS

SEQ ID NO: 219313 - protein, 392 aa, unidentified
MYVGIDWAAESHDVCVVDTAGTIQGRATVAHSRDGFEELVGHLRRWAKHGEVLVGIERPEGRLVDRILEAGYPIVLIPTYAMKDLRRRYAVGGAKSDPGDSYVIADVVRTDGHRLRRLEPLSPETRALRSVVRARDDLVDQRVALSNQIRACLEAYWPGAAVIFADVASEICLAFLERYPTPEAAARLSDVRLQSFLKKAGYSGRRSPAELLERLRAAPEGIRGVEAEARADAVRAMVRVMRSLLRSIKDLDRAVVAHLGEHPDAEVFTSLPRSGQINAAQMLAEWGDCREAYPDPDSVAMLGGLCPVTHASGKHRDVSFRWACNKRLRVALTAFADNSRHASPWAADIYRRAIAVRILARAWVRVIWRCWQDRKPYNPALHRAATHLEEAA

SEQ ID NO: 219314 - protein, 391 aa, unidentified
MTMYFVGIDISKYKHDCCIISAANQKVVSKFTFKNDKSGFEQLNLILNSLSTPEDIKIGFESTAHYALNLELFLENAHHSFMEVNPVLIKDFKKSQTLRRTKTDSIDCELIARWLMTVEYKPHSKGFYHAYSLKSLTRLRDRLIRQRSFYLVKITNVLDHTFPEFKPFFNERLSKTALYLLENYGSAEKMARMNSVSYEKLRSISRGKFSPQQFIALKELASNTVGVNNSIFDVELNSLLTLYKTLVTEINTLEKEINLLIEEVHPHYLSVPGIGPISAAIIYSEYGDISNFDNPGQMLAFAGIEPGINESGTESHGGRMVKRGSSQLRYALINCCLPLIRFDMTFATYYAKKRAEGKPHRVAITHVAKKLIRVIYALERQDTDFCVQKLR

SEQ ID NO: 219315 - protein, 331 aa, unidentified
MKIKQTIGIDISKLTFDVRIHSNQCYCIFDNTPKGFKELIKWVDKNNPISKEQTLFILEHTGIYSEEIALFFTKKDISFSLIPGLEIKKSLGISRGKDDKVDATKIALYGHRLRDEIKPTKIPSLAINKVKRLLTLRERIVKQRAGHKSTFTEQKRIYLRKENKLLFEIQEKIIKYLTKQIKSIELEMKQIIEANQELNQQYKLVVSVKGIGNQTALFMIVTTNSFTKFKTWRKYASYCGIAPFPNTSGTSIRGRTKVSNLANKKLKSLFDLCAKSAIQNNPEMKRYYHKRVEQGKNKMSTINIIRCKLMARVFAAINRQTPYVNTLKFVV

SEQ ID NO: 219316 - protein, 339 aa, unidentified
MEHVAIDLGARKSQICVRSADGQILEERRWPTKDLDTYLAARPTSRVIVETCAEAFCVADAARKLGHETRVVPATLVKTLGVGARRLKTDLRDARALSEVSSRIDLPSVHIPRTESRDRKTMCGMREALIGARTKIINTVRGWLRSRGRRIERGGKASLRQRVEVAWEGQLPSYVDRQLKLIEVLNTQIAEADAEMKSWATADETCTRLMTVPGVGPLTALRFVAALDDVTRFESAHQVESYLGLVPGESSSSERQQRLSITKAGPRALRWVLVQAAWALHLRCRRPEAIPLQLWAHRIEQRRGRRTAIIALARKLAGILFALWRDGSVYEGSRGAKMI

SEQ ID NO: 219317 - protein, 399 aa, unidentified
MTNQDHRVGGIDSHKDTIHVAVITAIGQPVTDREFPTTVAGYRRAVAWLIEHGPLSAVGVEGTCSYGIGITTELLAAGIRVVEVNRTRAAEKRKQGKTDPLDAYRAARSVLSGEASTEPKNPSIEPLRALTIARRSAVKSQQAAWRQIGSLLVTTRPALRDRFRDLPETKLIATLRDCRPDQIHDVDDADTLYALRTLARRYLALQDEITALEERMLRRATRANPALMAIKGVGPAVGAQLLITAGDNPDRLRTSASFAALCGTAPIPLSSGRTDKHRLSRGGDRQANAALHHIVTVRMSYDQRTRAYRDTRLANGWTTKEVFRALKRAVAREIFHALAGHTLAPDYSDLRPARHAKNLTLTAAAQHLGVWPARIGELELGRRPNDELATRYRAWLAAA

SEQ ID NO: 219318 - protein, 340 aa, unidentified
MEKRYIGIDLHRNHFTCCVRLNNGRSYLSQWRLEDLPRFVKKLRPSDELAVEITGNTRLFVDAVASQVGRIAVVDTNQFRVISRSVKKTDANDARLLALYLSKDLLPEVRMKDKQHGQLASLTQTRETLVKLRTALKNKVNNILSARGINLPKEALSSEKKLNEILALPFDELVQIELRIIVEQIRSLNKSIVELEKTIAEEASKLEGHKNLISIKGIGKITSAILLSVIGDISDFPDESRLASYFGIVPRVANSNETERSGHIHKRGTKLGRTALIQSALIAANHSPYLKNFYARVKVRRGAGKAIIALARKFLGIIYRTLKNKWVFEDFTTFTLAEAA

SEQ ID NO: 219319 - protein, 418 aa, unidentified
MWFVGIDWSHQKLDYELRDAAGRVVSSGDVRSTAEGLADLFVKLDRHAPPEQIAIAFEAVNLAWVQALCDRGYTLYPLNPKMVKAFRETLSAAGDKSDSIDRSVLARLLATLHTQFKPWRPDAPEIVALRIACQDRLRLVEERTAKVNELQAILKAVYPAVLGLFGKLSSRVALQFLRQFPTQQQMHSLTPKRLASWLRRQHYTAIGRLEEMQAVLGQASIEVPAHLQQARAPRIGYLAASLLELDDEIKRHERIIEQAFDALPEARLYRSLPGAGPALAPALAACFGRDPQRFASAESARAFLGTAPVTWQSGRWRVVAFRRACWKFGRRTLHMFAGTSLADCAWAKAFYRQQRASGHRHHESLRAVAHKWVKIILAMRKTGEPYDESRFLDSRRHNPVTSSPANPGIAVLAQGSLT

SEQ ID NO: 219320 - protein, 370 aa, unidentified
MKPTYFLGIDAAKHKMRATLSNRSEHVLFEKDLSVEATGLRQLLAAIKRQVNDPEQLLVLIEATGLLHLNWSAALTKAGYAVAVINPLIARRLYTLQNSIRDNKSDPIDARGLCTIGLLHGEKLLVHYRFSLRPEQFTLQRAQSVRKALRSALTNLKKTYQSLMDLSFPELGGLLQLDGVGIRQLLIQAPTPAAIAGKRLSTLENNWMVRPKAAALKALAADSMADPDLAAASGPALVALLQSVAAMEGRLHALDQQIAKLACTSVDPQTKALIETIPGFGPVNAAKTLAWLPTEILHSGSNRKVAARLQAFMGNDPRLRQSGQWKGHTKMSKRGVEPSSNRPLAPLITIRSYGPTTSANAPKAKRTRSL

SEQ ID NO: 219321 - protein, 353 aa, unidentified
MRTYYVGMDVHGASIVIVVLNGAGKVVEQVIVQTSAERVRGYLKQLRGKVYVTFEEGTQAQWLYDVVRPLVTEVVVCDPRHNKLLQSGNKSDRVDAQKLAELLRLGSLKAVYHGDHRVRTLKELVRTYDCLVSDTTRVMNRLKAIYRGRGIACPGHDIYRQDRRMQWLAQLRESGAKQRAGFLYQQLAALKPLRHEAKQLLVKEARRHPAYRWLMSVPQLGAVSVAQLIGIVGTPHRFRSKHQFWTYVGLAVVTRSTADYEVVAGVLRRSSRPVATRGLNRNHNHVLKRVFKNAASSACHRGPFAAGYEARVAQGMAPSLARLTIARQLAATTLAIWKHGEHFNPARREKQAA

SEQ ID NO: 219322 - protein, 408 aa, unidentified
MGRAAEVVAPSSSIRTDGGCPVVQVNDLSRSLAAFDPISTLVVVVEMSKASWLVSSVVPGVERQPLKKLEPDATALLRLIERWRNEAVRVGRPISRIALAYEAGRDGFWLARWLIARGIEAHVIHSASVAVSRERKRAKTDRLDAAMLMRVFLGWLRGERGHCGMVAIPTMEEEDARRPTRERESLVNERSRIINRMKSALARLGIRGFKPHLRKAPERLAGLRTAEGTGLPANIIEEFRRDMARLALVREQISSIEKTRAERLERAPDTGPHAMVRLLARVIGIGIETADMLVREILSRKLRDRRALARYAGLTGSPDESGLKSREKGLAKAGNARVRRGLIQLAWRFLMFQKDSALARWYRTRTEGPSGARKTTMIVALARKLLIALWRLVTTGEVPDGVELRTAA

SEQ ID NO: 219323 - protein, 414 aa, unidentified
MKKRTYRTKNVNKINWDKVTEQLSGEAAVFAIDVAKEKQYALLTNADNSVSELIWWNHPEQTHEVLTALEGLACPLDVVMESTGTYGDALRYQFRLSGFRIYQMNAKRVSDAQEIFDGVPSMHDAKSATVITRLHAEGLSKPWVELTDEERNMNALRREYDMHHAQYQRNQNRLEAFLSRHWPEVGKFLDLDSVTLESLLIAYGSPEHIAADAEDAAKKMRGWGRSLLSDEKIESVIKSAHHSLGQPCTDIEIRYLQALAEEMRHSRLQQKRAKNALEGFIERDDELKELSNLLGMITTAILLSCHLDPRKHDCARSFQKALGLNLKEKSSGRHVGQLKISKRGSSTARSYLYFAALRLIKNNPVAKAWYLNKVDPRAKNKTVIAVMRKLVKALWYVGRGERFDANKLFTLAKA

SEQ ID NO: 219324 - protein, 369 aa, unidentified
MNKFSKYVGLDVHQETIAVAVADTAGELRYMGEIVNTPEAIAKLVAQIKRGTGRLSFCYEAGPCGYTICRQLLELKQDCQVVAPSLIPKKPGERVKTDRRDALSLARLHRAGELSPVWIPDEAQEALRDLTRAREDMKHLQRQAKQRLLSFLSRHGHRYAGRSRWTQAHWRWLEGIKFARPEQQIVLQEYIDTVQACGSRVASLDREVETAAHASPVWPVIEALMALRGICLLAAVTVVAELGDLARFAGAPELMAYLGLVPSEHSSGKRERRGAITKTGNSHVRRVLVEAAWTYRHPARKTAILQRRAERTPPEVQEIAWSAQKRLCQRFRNLMARGKLKNQVCTAIARELVGFIWAIGQHVAPLSRA

SEQ ID NO: 219325 - protein, 397 aa, unidentified
MYIVGIDIAKRKHEAAVIDGEGAVIIKPFSFTNNCSGYNRLLAMLTKAKLPLDEVSFAMEATGHYWLALFTRLQKEGFRVQVINPVQTNSIRNFYIRQAKTDPRDALLIAEVIRFGHFSESTLHPENIYELRELCRGRHAIVSMQADVKRKVVALLDQVFPEYETAFTNLFGDTSMAILQTCPTPKELSEMCLEELCHLIEVSSHKRFRMAKAQELQALARNSFGFAMAGDVFSTMIRLYAKHLDFLKQQVREMDRKIAEIMETLDTPITTITGIGPTLGAYILSEIGDISRFSSAAKLAAYAGIDPTMRQSGEYNGVRNRMSKRGSPYLRHAIWLAASSAVLHDPALKLYFQKKRDEGKPYMASVGHACRKMVSIIYAVMRDNKAYTPCIPNEISA

SEQ ID NO: 219326 - protein, 298 aa, unidentified
MAIRPFGENLEVPNREDGIADLVKRLRFLEPVLVVMEATAGYETPVAVAIYRAGIPVVVSNPRLVRSFARATGRLAKTDKIDAGVIAHFAELIRPEPRRLADPDEERLGQLVKRRKQLLRMIVMEKNRVAKGPFEMRKDVQRHLDWLAKELERIDQTLNDFIQSSPLWSAKNELLQSVPGIGKVGAQAIMSDLPELGKLNRKQVAALVGVAPMNRDSGSYKGRRSIWGGRANIRTILYMVAVVASRCNPVIREFYKRLCDAGKPKKVALTACIRRLLAILNAMMRNGTRWGEFKPAVT

SEQ ID NO: 219327 - protein, 416 aa, unidentified
MEIYPNTRAIQRYIALDIHREYVLAGGMNASQEWELSPHKIEMGKFREWARKNLSGTDAVVIETTTNVWDIYDIVQPLVGHAVVAHAGAVRQIAEARVKTDREDVKRLIRLLIAGIVPEVWVPPQHVRELRGLVAYRQQLVKTGSMIRNRLHSLLHRHNLCLPEEGLADREWWTQQEKISALEKLQIRQELSMLQQIETHKAEVDHELGRQSLGETWGKAAVRLMQLPGMGIVVAMTVLSAIGDIHRFESADKLVGYSGLGAGVHDSGKEHIEKRITKSGRKELRWAMVEAAWRAVRMSPYWKEQYEKFLKRMRRPNQAIVVVARKLLVAVWHVLSKDETDEHATEEDLAYKMLLWSWSLSEEARQGLTHKQFAKYALMRLGVQTDLTRFVRGKVPRRIASREEVLVRMAELGLNG

SEQ ID NO: 219328 - protein, 400 aa, unidentified
MISVGVDVSKGKSTVCILKPYGEVVSSPFEIHHVEKDMEDLDNLLSKLDGEIRIVMEATGIYHLPVVTFLHDKGYFVSVVNPFAMKKYAKDNSIRGAKTDRLDSIMIANYGIEKWFKLQRYEGTEETYAELKLLGRRYRYYMELHVKALQELTHVLDYVLPGIKKMFNSWNEANGKDKLSDFVERFWHFDLITSMSLEKFTEEYIAWAKEKKYHRSRSKAEAVYELASSGIPTLSSSTPSTKMLVQEAVSVLRAVDSSLSLILTRMQELAKSLPEYSVVRKMGGVGNVLAVKLIAEIGDVRKLHNAKALIAWAGIDPPPYESGQFIGSKRRITKRGSSTLRKVGYEVMRVLKSHSAPKDDAVYNYILKKESEGKSKKHAKIAGLNKFLRIYYARVMEVYQ

SEQ ID NO: 219329 - protein, 338 aa, unidentified
MTYYAGIDVSLEYASVCVIDAEGQRVREGKVLSEPEALMNWLASVGVGLTRIGLEAGPLSQWLYAGLRQAGQPVELLETRHVRRAFEIMPVKTDRKDARGIADLMRLGWFRPVHCKSIDAQETRAVLTARKLVQKQVLEVESSLRGILRGFGLKVGKTTPVRFEARVKELVAEYPSVERIATSLLAARAVLRREFNGFERQVRAMARNDTRARLLMSTPGVGTIVALTYAAAIDDPCRFKSSKTVGAQFGLTPRRYQSGETDYSGRISKLGDSSVRAALYEAAHAILTKPLKGCTALKSWAMKIARRAGMNKAKVALARKLAIIMHRMLVDGTTFQSA

SEQ ID NO: 219330 - protein, 356 aa, unidentified
MNKRSKLNFSGQPIYIGLDVHKKSWSVSIFTEQGEYKSFSQTPKTETLMKYLQHHFPDGEYLSVYEAGYCGFWIHDQLREKGIQNIVANPADIPTQDKERRNKRDRVDCRKLARGLRSGDIKGIYIPPRWKLEDRSLIRTRLSMGRKQGRCKNQIKSMLLFYGVDIPEQREMGHWSRRFIRWIEGIRMQRASGDVALKIHVEELCHLRQIIAKLNRAILALSRTEEYQGWVSLLRTVPGISTLTAMIVLLELGEINRFPSLDQLCTYVGLIPDIQGSGEKEHVGGMTQRGHSYLRWLLVEASWVAVRKDPAMMEAFNEYCKRMKKSKAIIRIARKLLNRIRYVLKNQAEYVPSVIE

SEQ ID NO: 219331 - protein, 339 aa, unidentified
MKYTPVGVDIAKHLIQVHFINEHTGEVVDKQVRRQDFMTFFSNREPCLIGMEACGGSQYWARELTKLGHKVRLMQGRLVKAFVMGNKNDVMDARAIWMAVQQPGKEIAVKTEEQQSVLVLHRSRRQLVKFRTAQINALHGTLLEFGETIHKGRAAMDRELPAALERLKAKLPPYLINVLEDQYNRLSELDTQIDGLEKQLISVARQNETCKRLMEIPGVGPLIATAAVATMGEASAFKSGREFAAYVGLVPKQTGSGGKVRLLGISKRGDTYLRTLFIHGARAASLIAKEPGPWITELKKRRPTGVAIVAMANKLARTVWAIAAHGREYDKNHVSIRPY

SEQ ID NO: 219332 - protein, 338 aa, unidentified
MKQFVGIDLHKDVSQMAVLRESKSPSQLRFANDVMTAEQVLKKLPKGSKVALEAMGSWWWMVELAQKTGHEVFLSHPKQTKAIASARLKSDKVDALMLAKLLKADLLPTVWIPPEKQRHVRELLTHRARLVRQRTAVINELRAVYAKRNIDPQAKLQRAQPQVSGAEDLSGYGPRIVGEDVELLGFINRQIGGLDKELIKIALDDAQSKRLMTIPGVGAVSAVAVSCWIGEIARFSNAKKLASYFGLAPGVRQSAETERHGHITKEGNRMVRSLVIQAALVHTRAGKAPSRKHSLGVLKRRGKQIARVAAANKILGAIFHMMRERIDYQEFLRRSGAQ

SEQ ID NO: 219333 - protein, 378 aa, unidentified
MKTVLQSKDNVFNPVLYMAFELSDKKWKLAFGNGKRTRMKTIAAGDWTALLAEIERAKSKLNCPADAHVVSCYEAGRDGFWIHRALQAEGIESHVVDSASIEVSRRKKQAKTDRIDAGALLRLLVRYCNGDKAALHPVRVPTVEEEDRRRLNREREYLLKERGAHSARIKSLLVAHGIRLARLSELPRLLPTAKAAVIGYALPADLKAELEREYERYVLVDQQVKALEQLQHARAASADSAAIQMVQQLRNLKGVGWQSSWGLSTEFFSWRQFKNAKQVGACAGLTPTPYDSGDSTREQGISKAGNKRIRKLMVELAWLWLRYQPHSALSQWFEQRFGSGGKRMRRIGIVALARKLLVALWRYLEHGALPQGAVLKAE

SEQ ID NO: 219334 - protein, 360 aa, unidentified
MIVQGTSVGLDVHALSVVAHAIDEETGKIARARLCPDHREVLGWLHQLRGPVRVTYEAGPTGFGLARAINNSAGMECLVAAPSKLQRPAGDRIKTDAKDAAHLARLLRLGEITAVTVPAPEIEAVRDLVRARDDARADLMRVRHRLSKLLLRQGIVYSGGTPWTCVHESWLRKQRFADRHLKAAFDHSFDAVLAATAARNRLDEQILDVAASARFADPVNRLGCLRGISALTGLALTVEIGDWSRFTGSSIGAYVGLVPSEFSSGTSRVQGSITKAGNTHVRRLLIEAAWHHRKSYSTSGPSLRARWAKVDPALRARGHAGNRRLYGRWQGFTERKKNPLVANVAVARELSGWCWSLATM

SEQ ID NO: 219335 - protein, 371 aa, unidentified
MQLPSPVRLLGIDLGITSDHTAVVVDDAGSICARRRARSTVASLAALEAAALATAALGTQLVVVIEPTGPAWLPVAVFFGRRGHTVLRVTSAKAADLRRLLARHAKSNSIDAETLARLPLVAPTGLTAVEFGSPARASLDRRVRAVARLTAEIGRRKTRIRTLAQQLVPTIGVALSDDGLNHTDLAVLERYADPRALLAAGPARLTRLIVTTSRGQLGQVKTQALRTAAAEAVALWEGDSAIAIQDLAAEVASEVRLVRAAEAERARHEHARDAAMVHVDPAGLAASLPGLGPIGTTQLVATMGRPGRFPNGGAFKAFTGLTPRANQTGQTDPKHQPMTRPAPGRCAASWSSPPTPPASSTPSSPPSTTPR

SEQ ID NO: 219336 - protein, 341 aa, unidentified
MTKLNFGVDVSEKALDLAYWDESKKRAIFQGKFPNTKQGFQTIASRIEKISKDIGNGDVSVLVVMEPSGGYEQPFAHFAYDRQWEVSLPNPYRVKLWGMATGVRAKTDKNDAKTLAHYARMQDPLQWRPLPIEVEQLNHLLRRLETTEGMLRQEKNRWHSAESRVNPHKQATRLHKQAIAFMERQILQFQKAIKEHLNAHPHLKEQKKLLLTVSGVGERNVLYILVMMHRWGSLTEGKGDIKGLVAYVGLDPKTYESGSSVRKRASISRQGNRQFRARLYMSALGGVGGNNPLRAFYQRLVGRDKPKKVALVASARKIVIWSWMVFSTNTPFDVTRFECSH

SEQ ID NO: 219337 - protein, 387 aa, unidentified
MSLPNDLSRSLVPFEQESTLVAVIELSQASWLIAGVVPGVERQPLKKIEPDEEALLRLLHRWRDEAIQKGRTITRIAVALEAGRDGFWLARWLRKHGIEAHVIHSGSVAVSREHRRAKTDRLDTAMLIRVFLGWLRGERGHCAMVAVPSIEEEDAKRPSRERENLVGERTRIINRLKAVLARLGIRGFNPKLRKAPQRLDSLRTPEGFPIPPNTLDEMRRDFARLALLREQIKAIEQARLERLQQAPQTGPNAMIRMLASIPGVGLETADMLVQEVLSRNLRDRRAVGRFVGLTGAPDESGAKRREKGLSKAGNARVRRGMIQLAWRFVRFHKDSALAVWFRSRTEGPSGGRKTKMIVALARKLIIALWRMVNTGEVPHGVVLRQPA

SEQ ID NO: 219338 - protein, 396 aa, unidentified
MKTVCGLDVHKSIILMCILKEKGEILIQEFSTLTCDIESMRDLMKEHKVDEVAMESTGIYWIPIWRILQGHFKLKLVNPYFIKQLPGRKSDVKDAQWIATALQKELIRGSYIPEKHIQELRQYERRYVRLCEQSTRIEQEMDRQLHRCNIQITNYASKIGSVSVVNVIKGIINGETTPEELEKHIHGRIKGKHKEKITAALTGVISISDRFLFKQNYQEYELILKQQEDCLFEMAEHCNKYFSKELELLCTIPGVQKLSAMIIIAELGVNLKAFSSAAALTGWAGIRPRNDESAKKIKSHKITKGNKYLRRILVQCAWAITRKKDCWLRIKYEQLCVRKSSKKALIAISRKLLVVIWHVITKQEAYQEYVPKIKPEKRQKQLEYYKRKIQSIENNE

SEQ ID NO: 219339 - protein, 408 aa, unidentified
MNPLYVGIDVSSKSNVVYFMLPDGSKHSNFSVANSHTGSSQLVKRILSAMTSCSLDTVLIGLEATSVYGDNLVYFLREDAALARFNSKIHVLNPKQISKFKEAYNDLPKNDLIDSFVIADCLRFGRINKEVYIGDYRYKALQNLTRARYFAVSNLIKEKQRFMNILFKKYSTMTQEKVFSDTFSTTALAVYDEFESAEALSDMDLHELTAFIMEKGKNRFPNPDAVAKAIQKAARSSYRLPKTVNDSVNQVLSISITSIKALEAQIKEFDKAIAAQMELLPNVLISIPGIGPVFSAGIMAEIGDINRFHNQAQLAKYAGLAWKQHQSGDFEAQTTRLINSGNRFLKYYLCEAAFSLVRCDKEYSDFYHLKYKEVNRYQHKRALALTARKFVRLVFRLLKDNRLYTSAE

SEQ ID NO: 219340 - protein, 348 aa, unidentified
MTLTTIGLDVAKLVFQVHGVDENSRAALKRKLHRHEVVTFFEELPRCTVFLEACGASHYWARLLTALGHEVKLIAPEAVKPFAKKGKKNDAVDAAALCVAGSRPEIQFVPIKSVAQQAVLALHTARSLLVKQQTMLANAIRGLASEFGLVVPQGLHRLEELMVQVTAEASFPAVGRQALIVLHAQLQAAAERIVMLEEQIVVHARQNASARRLATIPGIGPITASLIAATVGDNITAFTSARHFAAWLGLVPRQHSTGGKPRLGRITKAGNTEIRRLLVLGATSMVRRAETWNSAAGIWLRGVLARRPVRLTTVALANKMARIAWALLTRNDVYRAQGRSKVAAGAAA

SEQ ID NO: 219341 - protein, 345 aa, unidentified
MTIVEDRRAITGGVDTHAEVHVAAALDPIGGLLGVAEFPVTPAGYARLLGWLGGFGTVALVGIEGTGSYGAGLARHVTAAGIRVVEVDRSDRQDRRRQGKSDPLDAISAARAAQSGRACGAPKGRDGAVEAIRALMVVRRSARSERTQTVNQARSLIVTGPDDLRARFAAHTVAALVSELAGLRPRPGSTVGYATRIALRELGRRAEFLDAQLGRLDELIVPLVTARAPGLLALHGVGPDTAALLLIAAGDHPERLRSEAAWAHLCAAAPIPASSGKVTRHRLNPGGNREANHALWRIVITRMSAHAPTRAYVERRTAEGLSKTEIIRCLKRYVAREVYRHLRTA

SEQ ID NO: 219342 - protein, 324 aa, unidentified
MSKCKEFFGIDISKDVFDVVDFQENHHQFKNDHSGFKEFGKLLDENSHCVMEATGCYYQKLATWLYSRSINVSVVNPLSVKRFIQMRLRTSKTDKLDAQMIRRYGEAEQPELWSPPSKLIIEATELHKLIELLVKQRAALKNKLHGLKSKGITRCPVVTSVRRQIRNQGNEIADLELKLESVIKKYQPDLLTRLCSIPGIGKRTAIFLIVLTHGFEKFETSRQLISYFGLNPIIRESGSSVRGKSRISKTGNTHVRNLLFMCAFTACKHNKSCREIYQRITAKGKSKKLALIAVANKLLKQSLAIAKSGLYYDENYRSVYVNLG

SEQ ID NO: 219343 - protein, 375 aa, unidentified
MPMMPHSRSRFIGLDVHRASIAVAIAEEEGAPNSYGTIANDPSAMRKLITRLGGPDVRLRVAYEAGPTGYTLHRQLTSIGIECIVVAPSLIPKRPGDKVKTDRRDALKLARLLRSGDLTAVWVPDEAHEALRNLVRARADAKADQLRAKHRLSKFLLRQGCWPPVGTKNWSQRYMQWLRRLEFEHGPDQVVFADYLAEVTAAGERIKRLEAALQQCAQSSSQVAVIRALQAFRGIGFLSAVTIVAEAGDLRRFRTAPQLMAYAGTVPSESSSGSKHHRGAITKTGNSLLRHVFGEAAHHARHAPRVAGALKQRQADLPPEIVELAWRAQLRLHTRYRQLGSRIGRPKALTAVARELAGFIWAAGQLLQEEVPAAA

SEQ ID NO: 219344 - protein, 618 aa, unidentified
MNSSATFSPSVIGADVHKKNIVCCARRLVDNEWQESIETFGTTKRELLRMGEWCNQFSPSFVLLESTGVYWMSPYKYLERAGLQVYIVNPRSVKGMIGNKTDTKDAAWLAQKGNEGSFKPSYIPSEEWRRLRDLSRNIIMLTQEYTRLKNREIKMFTAMGFRLESVFTDSFGVNASRAKDAILAGKSPLKVLACVDLKRIKANQEILLEAFDGDLDDDHVRVIATNRRIMDVIEAEVTQNKNYILTEVEKREPQLFDLFQTIPGIDEYHAATLVIEFGGSAFIRAFAKVERFASWLGMNPGLRESGGKRKPCRSGHGNWAARRCLCEAAHAGSHANGSTIQSRYHAQRARIGVKKAVISAAHYIAKMTYIVAKRQHPYVDPSIDYEAAAFDRAFTRYVKKAIQYKEKWSVNVENRETGERYQSPDTATGVTPTSTRNGNVTSRTNSASSQSTASNEATATEGRSASTRRTRRRAARSTETSADSQSSASSEATETEESHATAQEARNTAASADAQTAASNEATATEGTSESTRRTRRRASRSNEASADSQSAPSREATATAESHATAQEARNTAASTDAQTAASHEATAAEGTSASTRRNGEAQRGVRRPLPALSQYL

SEQ ID NO: 219345 - protein, 354 aa, unidentified
MELNASLVPNLTIGLDLGDKMSCVCAVNAEGKVTERLMISTTAAGVEAFFAGKNPCRVVMEVGTHSPWISRLIAGLGHEVFVANPSAMYGKRRRKKRNDPMDAEFLARQGRADPELLHAIQHRGVETQKHLAMLRARDSLVGARTKLINHVRGSVKSWGGRIPRISSEAFATKAGAHIPEELLPVLEPLLEVITDLTRRIRAYDRLIAKVTDEHYPEANRLQQIKGVGPVTALAFVLLVEDPTRFKRSRDAGAYFGLVPQLDESSDSKPQLHITKSGDAMGRRLLVSAARYILGPFGPDCDLRRHGQQIALRGGKNAKKRAAVAVARKLAVLMHRLWLDDLDYDPDYLAKRRAA

SEQ ID NO: 219346 - protein, 313 aa, unidentified
MSEIQVVVGIDIAKDSVEVSTLGAPGPEGGYGNDPEGHSALIAQVPAGALVVMEATGGYEAALACALQAAGLAVAVVNPKRARDFAKGVGALAKTDRIDARVLAEFGQVLKRKPELQRHLKPAVDEQVQDLAAWVTRRRQLLGMLLSERQRLALSRPKVRPSIEAMIESIRRQLDQIERQMQTHVGRHHQELDRLLRSAGGIGRVVSATLIGALPELGRLRGAQIGALVGVVPMARDSGQTKGRRWIQGGRFEVRRTLYMATLTAIRCNPVVRAYYLRLLAGGKVKKVAIVACMHKLLRILNAMVRDQQPFHA

SEQ ID NO: 219347 - protein, 608 aa, unidentified
MLPRHRHTHQNQATHAADPAQANPSTYVDASVTAIGVGIDTSRYGHYVAFLDANLQTAAGELEVVESAAGYGRLRQRLADLVAKHGRVHFHVRLDAAGLYADNLLAFLDQLQIDNAQFTLSCGDTQRNKNYRVAVYGHQKSDPIEARACARYALTERPKPNPPLSAELRRLRQVAGRLQAVVRQRTRLINQLHQLLARTFPELAMLVKDIAVGWCLELLSRYPTAGLLAQASDADLQAIAYLPHPRVGELLARARDSVAGLDGAVAEELVRDQVRQLRDASARQKRLENLLVAAYRDLPAANYLDTIKGFGEVTAAILTAFILDIKRFATPGQLVAYFGVLPIEASSGFERDGTPRGPRRYVMSPRGNDLVRRYLWLAALSALQFNPACRALYARVRAKHPDQPAIAVGHVMRKLLHLAFAVWQTGQPFDPQHYPWDTPAHIAPRTAVNECKDAHDSMRNETQAAGHKPDEPARSVVTAACSASVADARPSGDGASSGMWIDFAHLKAQLSLARLLDHLGLTSRLRGTGPQRRCACPIHRGDGRGRTFSVNLADNVYQCFEASCASKGDVIDLWSAWHRQSLREAALDLVRTFSLEPAPTNATEKRHG

SEQ ID NO: 219348 - protein, 402 aa, unidentified
MIDTSSVGVFLGLDVGKSTHHGHGLTPAGKKVFDKPLPNSEPKLRAVFEKLAAKFGTVLVVVDQPASIGALPLTVARDAGCQVAYLPGLAMRRIADLYPGEAKTDAKDAAVIADAARTMPHTLRSLELTDEITAELTVLVGFDQDLAAEATRTSNRIRGLLTQFHPSLERVLGPRLDHQAVTWLLERYGSPAALRKAGRRRLVELIRPKAPRMAARLIDDVFDALDEQSVVVPGTGTLDVVIPSLARSLAAVHEQRRALEAQINSLLEAHPLSPVLTSLPGVGVRTAAVLLVIVGDGSSFPSAAHLASYAGLAPATKQSGTSIHGEHAPRSGNRQLKRAMFLSAFAALHDPVSRTYYDRCRARGKTHTQALLRLARQRVSVLFAMLRDGTFYEPRTPEAVAA

SEQ ID NO: 219349 - protein, 322 aa, unidentified
MLSMNKSTLFFGIDISKDSFDVYSDKMGYSSYSNTKDGFKAFLKVLNRTSHCVMEATGCYHHKLAMFLHEKGIIVSVVNPLVIKRFIQMKLRRLKTDKSDAFMIYSYASEQSVEEWQPEKEYIERGKELLSLIQTYLRQATALKNKLHASESKGQTKGVIISSMKRQLRNLKRERQFLEQELESLIKTHEAKLFTRLNSIPGIGKKTAVLMMVSTSNFNGFNSYKQVSSYLGLAPNERSSGSSIRGKSRISKTGDGLLRNHLFMCSFTASVYNPQCKALFDRIVAKGKSKKLALIAVCNKLIKQAFAIARSGLPYDPNYAIK

SEQ ID NO: 219350 - protein, 448 aa, unidentified
MKRTKKMQENGHRISGKTIIGIDPAKNKHQAIILRPDGSICGRSFAFETNHRGFTETLPQRIQQRLATPEETEVVYAIEGSCALWQNLAFHLSEQGQEVVLISPLATYHARPSITGDFSRTDQKDAELIARLAQQGSYREMPGHSDHERAMHRMAICYDKLRKSRQRHYARLRALVERLFPEFLSVLTLDTKTARYLLREALLPGEFLALEPGRTVLGMARASRHQHGQATLLHLQELARHSVGQTRGPAEGKVEHLAAETWLAVIELIEAQIKALTEALVEAACEHPCFASIKSLRGISDLMAALFIAELRDPGLFRHWKQIEKMAGLNLYVSDSGQYRSRRRISHLGNSRLRWLLYQMASETSKYVPEVRCKYLTRRLKHGGSRTKHLVACIPQLLQLLMALMREGRCYEQRPESLAQMQHLETRYQAVQRSKGKRRAQGTRQKAA

SEQ ID NO: 219351 - protein, 347 aa, unidentified
MRFYTKQHQFYCGIDLHARTMYLCVLNQDGEILVHRNMPAGPDPFLKAIAPYREDLVVCVECIFTWYWLADLCAREGLPFVLGHALYMKAIHGGKAKNDKIDAQKIAVLLRGGMLPQAYVYPAEMRATRDLLRRRLHLTRKRAELLAHIQNTNSQYNLPEIGKKLAYKANRDGVVERFSDPAVQKSVEVDLALIGYYDQWLSDVELTIVQTAKQHDAHTLYRLQSVPGIGKILSLVLLYEIHDIRRFPRVQDFVSYCRLVKCARESAGKRYGTLGAKIGNAYLKWAFSEAAVLFLRNNPVGQKYLTRLEKKHGKGKALTVLAHKLARAVYYILRRDTVFDMDKFLHG

SEQ ID NO: 219352 - protein, 411 aa, unidentified
MPKIVHQICCGIDVHKSFVVACIATTDEKLVTTYKHKRFSTFTGDLRRLAAWLSEHDCRDVCMESTGKYWIPVYNILEPTCRIVLAHPKYAKAIKGKKTDKRDAKWIADIFKHDLINGSFIPPADIRQLRDLVRYSVKLTSYTTSEKNRAQNCFTVSNIKLDDVFSDVFGKSASAITSRLLESSEPFDVAPFVDSRCKTPIEKIQAAVDGVMCVNQAEKLRIIRSHMANLELCKANLESEILTVAKKYLPQINLVSTVPGIQTFSAIAIIGEIGVDMSVFETSRHLCSWAGLAPQNDQSAGKKKTTRISRAGAYIKPLLVQCALAAIKSNKHPEIKHRYQAIKKRRGHKKALIALARMLLTAIYNIIKKSEPYNADLYRQTNKPPVQREVSVEQAIFILQRQGYLVTPATT

SEQ ID NO: 219353 - protein, 325 aa, unidentified
MYAGIDIHKSFCQAILMTEDGRVVKEEKVETSQEGLRKFFQGVTNVKIAIESTCIWEPVYECLSELGHDVRLAHPLKTKAIGYAKIKTDKIDAKTLADLLRADLLPESYVPDKPIRNLRNLCRERKNIVGERTKWKNRISAELGRRGIKKKVRDLYTKEGKRWLFSLGIPKIERILSIIDVLDDKINEIDKVLKKIYEKNDEIKILTSIPGVGVYSACLIYAEIGDIRRFPHSEKLCSYAGLVPSTHQSGVYTKHGRITKEGSRYLRWILTECVQIHVAKYDTKLTRFYRRLVSRIGKQKAIIATARKLTKIIYCILTSKEEFRG

SEQ ID NO: 219354 - protein, 416 aa, unidentified
MSVEVVVMYVLFDRVAGIDVGKATVTVCVRTPGTGRKRASETRTFRTMTRSLVVMADWLEECGVTLAAMESTATYWKPIFYCLEERMECWLLNAAHMKAVPGRKTDVRDAEWIAQLLEHGLVSPSFVPPPEVRTLRNLTRYRLKLMGDRTRDAGWLEKLLEDASIKLSVVASNITGTSSREMLAALVAGERDAAVMADMAHSTLRRKIPDLTEALTGRFDDHHAAIVGQLLTKLEQTEAGLGRIDAELEIRMVPFARQLELLRTIPGVGLVTAQVFIAETGADMSKFGSPERLAAWVGLAPAIHESAGKRTPAGSRRGNKFLTSMLVEAANSASRTKNTYLASQFKRIASRRGHGRAAVAVAHSMLVSAYWMLVRDEPYQDLGPDWLSKRNDEAHARRLVAQLERLGHTVVLDPVA

SEQ ID NO: 219355 - protein, 435 aa, unidentified
MIRYVGLDVHKDVVQACLIDEQGRRLEGHRLPCTKECLEAFARERLSPTDHVALEATTNTWAVVALLRPHVARIVVGNPLRTRVIAEAKVKTDKVDAAVLAQLLRCDYLPSVWQPDEDTQRLRELSSHRTGLVADQTRLKNRVRSLLAQRLIVPPLPTLFGVTGRQWLREATLTSADRLVIDGFLRLLDQLEVEQVGVEKALAELSYPKEEVRLLMTLPGVGAAAAQALVAALGDWRRFPDGDAAASYLGLTPSVRQSANSCHYGRITKAGNPQARWLLTQAAQQVALHPGPLGVFFRRLKAKKNHNVAVVATARKLVVIAHLMLKNKEPYRYALPETTRGKLADLRVLATGERRKKSGPLREPMQRREPGVRARKTPALNEVYAAEALPVAKELTELAVGERKALDAMGVSAYAARVQTRQVRLEKRRSLQKTG

SEQ ID NO: 219356 - protein, 369 aa, unidentified
MDRVSFVGLDVHKASISVSVAEEGRDGAVSFVGTIPNTPASLTKLAKRLGKDGRRLEFCYEAGCCGYVIHRHLTGLGHGCAVVATSLIPQKPGARIKTDRRDAAKLAILHRSGHLTAVWVPDENHEAMRDLTRARIDASMQLMRARQQLLAFLLRHGRSYETGKHWTHRHRSWLAGQTFDQPAHQIVFQDYVEAVWTAQDRRDQLIQRITAMAKDWSMGPLVEALRALRGLDFVSAATFVAAIGDIGRFDNARQLMSYLGLVPSEQSSGDRVRRGGITKTGNREARRMLIEAAWSYRYPPRVAKDKAEIIARLPKPVRDIAWKAQLRLCQRYRALGTGGKRPTVVVAAIARELCGFVWAIGREVQPAAP

SEQ ID NO: 219357 - protein, 456 aa, unidentified
MSKLSKPKEGDMEARRMVGMSKVNPNAAGVDIGAHEIVVCVTGKEDAQLVRTFGSYTADLKAIGEWLREYGVTSVAMESTGVYWIPLFEELEQQEFRCHLISSRSLRRVPGRKSDVLDCQWIQTLHAYGLLESSFRPEADLVALRTLLRHRAQLIQHRSPHILHMQKALLQMNIQLSQALSDVTGSTGQTIIRAIVDGERDPYKLAQLRNYRCKKDETEITKALTGTWREEHLFILKQALELYDFYTKQIEACDAEIERTYGLIRPDWAHEELSPLPSNKRHSHSKNAPKEVEVRKHLKRICGVDLTAVHGVSASLAQTIVIEVGTDMSKFPNEKHFCSWLGLAPKNDISGGKVLQSRTLKTRNRAGQAFRMAAGSVMRADCMFGVHYRRQKSRLGPAQAAVATAHLIARVVYRMLKYKVEYEPLSAAEYERHYQDQQLKYLKKKAAKFGLQLVPT

SEQ ID NO: 219358 - protein, 382 aa, unidentified
MVIDADGKRLLSQRVANDEAALLELINAITALADGGELTWAIDLNAGGAALLIALLIGAEQRLLYIPGRTVHHASGGYRGEGKTDAKDAAVIADQARMRRDLQPLRPEDDIAVELRILTSRRTDLVTDRTRAINRLRAQLLEYFPALERAFDYRASKAALILLSGYQTPDGLRHAGAARLAAWLRKRKARNADAVAAAAIEAAKSQHTVVPGQQPAAAMVARLAEEVMTLDTEIGDTDAMIEERFRRHRHAEIILSMPGFGVILGAEFLAATGGDIAAFGNTDRLAAVAGLAPVPRDSGRISGNLKRPRRYNRRLLRACYLASHIAIRTDTASRIYYDRKRAEGKRHTQAVLALGRRRLNVMWAMLRDHKPYQPTAPNTAAA

SEQ ID NO: 219359 - protein, 399 aa, unidentified
MVSVGIDISKGKSTVCLMKPYGEIVAGPMEISHTDSELKMLVKLIKSMNDEVKIVMEATGIYHLPILSFMKDQKLFVSVINPYKMKQFRNQGLRRVKTDKADSVAIAQYGLSNWYSLNNYTDSDDRYRELSLLSRQYRHYMEIHISALLGLTHLLDFAMPGIKQQLGTWHPENGKDKLSDFVEQYWHYDIITKKSEHQFVESYLKWAKKKGYHCNRDKAAKIYSLAKEGIPTLPADQTTKMLVIQAVEVLRRVDETLNTILARMDEIAKSLPEYPVVRAMGGVGDVLAPRLIADIGDVRRFHSGKALIAYAGIDAPPYQSGSFIGSNRSISKRGSPLIRKTGYEVMRSLKSHNMPEDDAVYNFILKKEAEGKPNKVAKIAGLNKFLRIYYARVMEVYNN

SEQ ID NO: 219360 - protein, 399 aa, unidentified
MRPQLWVGIDVGKTNHHACAVDDAGKVVWAQKLTNEQRAIEQLIDRAHKAAERVRWAIDLTSPMALILITVLLGAEQSVVYVPGRVVNTMTHGFRGEGKTDAKDARVIAETARLRSDLSKVTLPDELVVELTQLTGYRTDLMADWVRGINRLRGLLGSIFPMLEAAFDYSTRTPLILVTGLCTPSEIRAAGIDGVKAHLVEHKAWPAAIAKTAATAVALANEQELALAGEAGTAALVKRLARKLLELDHEIKDIDKAITERFRDHPYARIIESLPGFGPGLGAEFLVVTGGSLASFATPGRLAAYAGLVPVPKDSGRITGNLRRPKRYNRRLRRVFYLAALSSIRSNGPSRQFYDRKRGERLIHSQALLALARRLVDVLWALLRDDREFTPHAPGTAAA

SEQ ID NO: 219361 - protein, 415 aa, unidentified
MEKYRHKIYVGIDVHRQEHTVTIIPHTLLDHSQVSWKETKFFSIKNNSTEFERLDAAIREHILCPEEAAIAVDHTGGHYSEPLVYFLQKKGYDVYYLEPKAVKSARERLLDEENKSDTIDAAGAAYLLYLRDTHGLSFRISAIIPELGSKASVLNSLVLQRQQYDKLATQFTNRLHQFLIAVFPEGEAKYFNKLLKITPYYPTPEDILASQDLKGIGNVSHKDKESIKALAAQTVGVPGKVYRDLIRDLSEQRIEAIAKREAVTDLIEKEVTAHPYESILLSFPYFGSTAAATIISVVKDISRWPNKRKLKKAMGVYSTLKQSGTSIGKGKMGKEGSRHARRVLFQVVFRCIRNSTPDNDFKDYYLRQVVQGKPRLKAVVSTMGKLAEIVYHCLSMGEFYQNQAKYLTRRDSKPS

SEQ ID NO: 219362 - protein, 311 aa, unidentified
MEHSRFVGIDISKDHLDVHVRPTGDSFRVRDDDAGLVTLVAHLRPLAPVVLVLEATGGYEVTVAATLASAALPVAVVNPRQVRDFARATGQLAKTDTLDARVLALFAEAVRPAARPVPDAQAAALGELIARRRQLVDMLGAEHNRRRLLRDRRLQRHLEAHIAWLEEALRRLDHDLTTLIRSTPVWRETDDLLRSVPGIGPVTAGTLIADLPELGRLDRRRIAALAGLAPIARDSGAFRGRRMIMGSRAPIRRVLYLATLTAITHNPVIRAFHQRLVAAGRPGKVALTAAMRKLLTILNAMLRDRRPWHPA

SEQ ID NO: 219363 - protein, 346 aa, unidentified
MLADQLDYVIGVDPHRDAHALAIVDVRTGGVVFEATAVGDGEGYACVLRLVYQYAPGRRAFAIEGTGSFGAGLTRFLVGHEERVLEVGRLRRERQSGKSDALDAIRAARSVLGQTRPARPRAGGEREALRALTAAREGAVTARRAGLCQLRGLLVSAPEPLRAELRSLTRAQLLRRLAAVRPGRCQDPELRGTLLALRALARRVTALTVEERELAREIETLTRKLAPQLLDQPGVGPLAAAQVLISWSHRGRITSEAAFARLAGCAPIPASSGQTVRYRLDRSGDRRLNRALHMIPVTRRRAHAPTIAYINRRIQEGKSRREATRCLKRYLARNLYRLLENAPMAT

SEQ ID NO: 219364 - protein, 385 aa, unidentified
MKRNDLSRALVAFDQDSTIVAVVELSLKTWLVSGLVPGVMRQPLKKQPADPERLLALLHRWREEAVKAGHAISRIAVAFEAGRDGFWLARWLRARGIEAYVIHASSLAVSREHRRAKTDRLDTETLMRAFLGWLRGEVRHCQMAAIPTLAQEDAKRPSREHESLVAERTRITNRMTAILVWLGLPKVNIKLRKAAEQLAGLRTPEGEPVPPNTLAELHRGLARLAVIRAQIKAIEEARLERLKAAPAQGTHPMMLMLAKVLGLGIETADMLVHEVLARGLRDERAVARYGGLTGAPDESGSKRREQGLAKAGNGRVRRSMLQLAWRWLMFQHDSALAQWYRSRTADGRRDTRKTMIIALARKLLIALWRYVTTGELPQGVVLKAA

SEQ ID NO: 219365 - protein, 353 aa, unidentified
MEHKYVGLDVHQSSTVAVVQDEKGKSVMESILATEAEAIRDFLKGLRGTIHVTFEEGTQAAWLYEIVKPVVAEVIVCNPRRNKLLAVGNKADRVDAQKLAELLRCGQLKPVYHGTPGVRLLKELVHSYDSLVSDTTRVMNRVKAIYRGRAISCAGRDVYYQRNREQWLEKLTEPGVRQRARLLYQQLDTLRGLRREARKAMLKESRRHLAFPILKEIPVLGPIRIAQILAKVASPHRFRTKRQFWAYCGLAVVTRSSADYQFREGKAEKRKRAPMTRGLNPNFNHRLKYVFKSAAVDGIHQAPFEGYYARLLVKGIRPELARLTLARKIAAVTLTLWKRGEPFDELKVSEQAA

SEQ ID NO: 219366 - protein, 406 aa, unidentified
MPDDDYALYVGIDWASQHHQVCLVDPTGRRRDERQIPHSGPGLAALADYLSTVVNEPPRVAVAIEVPRGAIVDTLLERGFPVFALTPKKLDRFRDRHTVAGAKDDRRDAFVLADALRTDRRAFRRLDVEAPTVIQLREMSRLHADLVDEHGRLANRLRDQLWRFYPQALALCPAANEPWLWELLQHAPTPAQGQRLTRSALAALLARHRIRRLTADQLVEALRTPALRVAPGAAAAAGEHIAVLLPRLTLVHEQRRHCEGRLDALLAAAGEAETVEHRDVTILRSLPGVGRVVAATMLAEASRPLAARDYQTVRAHAGAAPVTRQSGKARHVVMRRSCNPRLRTVVFNWARNSIRLDGRCRAHYDRLRQRHGHARALRGVADRLLGVLIAMLKTGTLYDPQRRQAA

SEQ ID NO: 219367 - protein, 354 aa, unidentified
MLAELLDAVVGVDTHRDTHQVEIALPNGAPIAVTTISNDTTGYAELLAWIVDHAPGPRLAVSIEGTRSYGVGLARAAAAAGLVVLECEQPHRKARRGKGKSDPIDAHLAVLTALRLDADRLPTPRADGDREALRILLSARQELTTASTAQTNRLRALLLGGDDTDRQLARAALTETRLAGLARRRPPREASREQAVRHAEIRRLALALREAARALKANRAQLQTIVNDVVPGLIERRGIGPVSAAQAIVSFSHPGRCRNDAAFAALGGASPLPASSGRTVRHRLNRGGDRALNRALHTIAATRMRSCPTTQAYVARRTAEGKNPREIRRCLKRYIARQLYRTLATAMTPAAETS

SEQ ID NO: 219368 - protein, 318 aa, unidentified
MGDEKLFVGIDVGKYDVEIALSDEGEVSRFKNDDDGIGGVLGLLKGRNVGLVVLEATGGYERQILASLLGAGIPAVAVNPRQVRDFAKALGKLEKTDAVDARVLSRFAASVRPPVPPRVSAELELVQDWLTRRRQLIEMLVAEKNRTQHAKHGVLKDIRAHIDWLKKRIRDSEKDLREILSSAPEWDAEVELVDSIKGLGRITALTLVAGVPELGTLNRKKIAKLVGVAPLARDSGTLRGKRTCWGGRADVRACLYMAALVASRFNDTIRSFYRRLLAAGKPKKLALVACMRKLLTILNARVRDHRAAALAARPAALA

SEQ ID NO: 219369 - protein, 359 aa, unidentified
MQQESKKNYVGIDLGKRKLDAIRIDHNGSFERRNFSTDMTGRNMLIKWLKPNDKVALETGNLAFLIAEMIQNKKIEVYVLNAGQLQLIYNSLKKTDKEDSLKLARLVQRIPVEELPVVRIPDEYEKQARALLTNQEYWVTSRTRAYNYLHSLLCNNGITTVTKKELKNADFRKAIINSLDKNYKKLAESVEEEVILADKKLDDIEDQIIELLKEKKEETKIVMSVCGIGKVTALAILGYIGTDCNRFKHVKQVAYYAGLVPRVDQSGTLDKRLGIIKGGSHHLKRLIVQGAWSVIRSKNGGILKAKYEELIKRKPKGKAIIAIARKMIELVYTLLKKREYCNYMPLLELNKKLAVNKIF

SEQ ID NO: 219370 - protein, 321 aa, unidentified
MESLVAIGIDVHKEKFALVAILLVLGAQDQILGEIEVGSDYKEILAFIESIKQKALPGQTYSFVCGYEAGCLGYVLYHQLTAAGVRCVIMAPTTMLSEQGKRIKTDRRDARLIAKCLCCNGYHPVYIPTAEDEDVRDYLRMRDDHQGALKKLKQQINAFVLRHGCSYVGTKWTARHIGWLMDLQNKLDEMQAETLKEYMLSYAEQKDKIERFDEKIEEIARMDRYSKLVSKLVCFLGVKTHTALSLIVETGDFMRFAKGNIFAASLGLAPGEHSSGSGVHRLGITKAGNTHLRTLLIEAASGICKGAIGHKPEFSFSPFLN

SEQ ID NO: 219371 - protein, 355 aa, unidentified
MISTKYIGMDVHKESISIAVRNAAGKVVMECVIETKASMILQVISGLRGDLQVTFEEGTSAAWLYDLLKPHVTKLLVCDPRKNKSMREGNQSDKIDARGLAELLRLDHLTPVYHGEHGLRTLKELVRTYLTVTKDLTRVMSRVKAIYRSWAIPCSGKQVYARRHRAEWLGKINEPGVHRRAEFYYQQLDALRVVRQEVRRDLLAESKKQKVWKRLCEIPSIGPIRAAVLLGILQTPHRFRTKRPLWNYGGLAIEMHSSADHRKVNGQLQRCRKNVLVRGLNRNCNHDLKNLFKGAAAVACSKPGPFQEFYTALVAKGMRPEMARLTLARKIATIVLIVWKRGVCFDAQYLKPQTA

SEQ ID NO: 219372 - protein, 368 aa, unidentified
MEITTIGIDLAKSVFAVSGADRRGKVVLRRQLRRAQVLEFMSKLGPCVVGIEACGGAHHWARAIGKLGHEVRLLSPALVRPYRSGPNKHDRNDADAICEAVRRPQMRYVAVKSVAQQDQLALHRVRAQLLKQRIAQSNLIRALLHERGVVARLGAAGLRQALTQALQAENSELSGAMGELLLELSGGLRELERRIAALTRRIERAAQDDERCARLMEVPGVGPLISSALVATVGNAREFKRGRELSAYLGLTPRQHSSGGKTVMLGISKHGDRYLRTLLIHGARALLYRQRRGRAHPRAAWAARLVARRGPNVAAVALANHNARVLWALLSRGDGYRPPTSSFPSRPSAGAVIKRAREGKLLLATQRA

SEQ ID NO: 219373 - protein, 405 aa, unidentified
MTDIEQHESVEVFVGVDVGKGTHHAVALDRKGRRLLDSALPNDEAKLRALIGKLKEHGKVLLVVDQPATVGALPVAVAGAEGVLVAYLPGLAMRRIADLHAGEAKTDARDAYIIAEAARSMPHTLRSLKIADAQVAELTMLCGFDEDLAAQITATSNRIRGLLTQIHPALERVVGPHLDHPAMLDLLERYPSPAQLASLSQKQLATRLLKLAPRMGKTWATEVVQALAEQTVVVAGTQAASIVLPRLALQLTALRKQREEVAKEVERLVLAHPLHPVLTSMPGVGVRTAARLLVDVATRVFVSAAHLAAYAGLAPVTRRSGSSIRGELPSRRGNKQLKRAMFLSAFAALRDPISRAYYTRKITQGKRHNRALIALARRRCDVLFAMLRDGTLYRPPCPKILLTTT

SEQ ID NO: 219374 - protein, 426 aa, unidentified
MKEKIDYLSTLFVGIDIASRIHVISALDFNQDFFIKMKPVQNTQEGAALLESMIVDVLKVNHQFKYVVIAMESTGFYGVHLANYLSASDLLAPFSVRVYCLNPKEVKNYKKSFNDIGKNDGIDSFVIADFARVGRISIKPWRGSQYLALQRLTRHRMHITECISREKTYMLNNIFLKFSEYALLRDGEHPFSNKYGAAAEAILTEFTTNEDIVNSSVEDLVAFINTKSRGRIADPEETAKIVQAAARNSYRLDKCLYEPLTISIASSFNCISSFEKELKAIDKAILQTVQGLNPEEYTVLNSIPGIGKVYSAGILAEIGSVRAFQNANALAKYCGIVWNDNDSGDFEAEDKRMSKAGNSYLRYYIIEATGSVIRHCPEYERFYQKKYAETRNHQHKRALALTSRKFIRLLYGLLDKSQLYSPEKSR

SEQ ID NO: 219375 - protein, 341 aa, unidentified
MEIDILGIDLAKQVFRLHGADRRGRVLHRAKVSRGSLFESVRTLKPRLVVMEACSSAHHWARRFQSLGTEVRLISPQYVAPFVKTNKNDRNDAEAIVEAASRPTMRFVPVKSVEQQDIQAAHRMRAILLRHRTALINQMRGLLGERGFAISRSPEEFKRAVPELLRANADELTSFCRTLLTELLVHLRAIEERIHFIEISIHSFMKRSALCAKIAQIPGIGPITATAIVAAVGDARQFRNGRHLAAWLGLVPRQYSSGGRSRLYHISRRGDTYLRTLLIHGARAVLRFVKTKTDVRSVWLQQLIARRGYNCTAVALANHNARVIQALLSSDASYVARGITA

SEQ ID NO: 219376 - protein, 340 aa, unidentified
MTITTVGIDLAKNVFAVHCVDQHGKTVLVKPKVSRAALPELIASLPPCVIGMEACSGAHYWARLFRQYGHEPRLMAAKFVSPYRMAGKSGKNDAADAQAICEAVRRPHMRFVPVKDESQQAMQCLHRIRQGFIEEKTATYNRLRGLISEFGVIAPQSTDALRHMVSEQKSSLPLQVQQCVNDLLEHIDRIEDNITEYDRILSRMAKTDHRSQRLMELKGIGPTTACALVASIGNAHDFKNGRQLAAWLGLTPSQYSSGGKSKLGRITKAGDSYLRTLLVQGARSVLIGAEKRTDLFSRWVCSLVDRRGYWHAVVAIAAKNARLCWASLHYGDDFRLYSAS

SEQ ID NO: 219377 - protein, 451 aa, unidentified
MRIRRPRPPRPAARPYVNPHAAGLDIGSEEIWACVPEDRDPQPVRSFGTFTPDLSTLAAWLQACQIEAVAMESTGVYWIPVYEILEARGFQVHLVNARHLKHVPGRKSDVKDCQWIQYLHTCGLLSGSFRPEAEMCALRAYLRHRAMLLDYRAAHIQHMQKALQQMNVQLPQVLTDITGTTGLAIIRAIVAGERDPVHLARFRDPRCAHSTEDIAKALTGHYRPEHVFALQQALALYDVYTAQMRACDAEIAQQFQAITPVWDDDLPPLDRQDKALSHSKNAPAYDARSLLYQLTGADLVAIPGLHASTVQTVIAEIGLDMGKWPNEKAFCAWLGLAPRHEISGGKVLRRSTLKTRSRAGQALRLAAQAAGRSQSGLGAFYRRMRARLGPKSAIVATAHKIARIIYHLLTHRTAFRDLSPEAYHQRSRAREIAAMRKKAARLGLTLVESQA

SEQ ID NO: 219378 - protein, 331 aa, unidentified
MGNVTTVGIDLAKNVFSLHGVDASGVVVLRKTVSRARLMEIVAQQPACLIGLEACSGAHEWARRFKELGHSVKLMAPRFVAPYRKNGKNDGNDAEAICEAVSRPSMRFVPFKTLEQQAVLCLHRVRQGFVEERTATINRLRGLLAEFGVVLPQKAAEVRRRATEWLEQLPPRAACAIRDLREHLRVLDERVREYERSIEAHARDHEQAKLVQQRLGIGPMSASAIVASVGDLREFKNGRQFSAWLGLVPRQHSTGGKQRLGHITGRGDPYLRTLLVMGARSVLQRASGRSDPLSRWALAVRERRGYHRACIAVAAKNARVVWAMLNQHASA

SEQ ID NO: 219379 - protein, 326 aa, unidentified
MGEVSTIGLDIAKSVFQVHGVDVDGAVVIRKRISRAKVFEFFAALPSCLVGIEACPSAHHWSRRLQALGHTVRLMPPSYVKAYLKRSKNDANDAAAICEAVTRPSMRFVPTKSEQQQSALMLHRSRQLLVRQRTMLSNAIRGHMAELGIISAKGRNGTAELLEVIANAEDDRIPAAARLSLDALARQYANITAEIRAIEKHIHAWHRSCEESRRLEEVPGIGPIVATALIAEVGDWKAFSSGRNLAAWIGLVPKQHSTGGKERLGGISKQGNRYLRWLSSPAPWRSSGMHGNTVRSDCGSRVSWSADRSRLLPSRLPIRSRAWPGP

SEQ ID NO: 219380 - protein, 359 aa, unidentified
MHTQYTHADFAGQVLNIGLDVGLKHWDAAFYLGQAYHKTVPFPPDPSALMRYAQRTFPGATVYVVYEAGYFGFWIHEAFVKLGAACMVVNPADVPTADKERRFKTNRIDAEKLGRSLANGDIHGIYVPGHRAQQDRSLVRMRSTFVRKQTRVKCQIKAYLRYYHIEHNEELSDRYWSRAYIRWLESVSLEFDSATEAFKMLLKELLDLRADIAQLTKCIHRLALEDYYRADVLLLTAIPGISVTAAMIFLSEVITITRFKGLDPLASYFGLVPGQNSTGETETDTGLTPRRNAALRYMLIESAWIAQREDPALLLAFAEYCKRMPKNVAIVHIARKLLNRMRYILIHHEPYVTGVLANG

SEQ ID NO: 219381 - protein, 347 aa, unidentified
MKFYTTQHPYYCGIDLHARSLYVCILDAAGETILHREIKALPEPLLDILAPYIGNVVVGVECMHCWYWVSDLCAEHGIDFILGHALYMKAIHGGKAKNDRIDSYKIAHLIRGGNFPQAYVYPPEMRSARDLLRRRTRIVRHGADLKAHVKNTTSQYNLPPNNLNLRYPNAREAMRDRFDDQFVQRNVDLDLNIIAFYNQELSSIECFIEKHAKHHNGNDYHILTSFPGIGRILALTILYEVGHIERFNTVQDFASYSRLIKCKAESAGKSYGTQGNKIGNAHLKWAFGEIAVLYLRGNDKAKSYLLKLQKRMSKAKALSALAHKIGRCVYYMLKNQKVFNEERFLTC

SEQ ID NO: 219382 - protein, 348 aa, unidentified
MSTRYARSRQYVGIDLHRRRSVIVRMSGPGEVLDCVQIDNSVAALVAEVGKAGKGAEVAVEATYGWYWAVDALSDAGFDVHLAHPRGIASMQDRRPKTDQLDARELADLLRIGRLAQAWIAPPETRQLRELVRYRHKLVRSRSAVKASVHAVLGKCGVIPELADVFGPVGAKLLDGLDLPEPYASRLASQRRVMAVLTAEITKLDTEIAHRLADDPAYRALLGINGIGPVTAAIFVAEIGDVHRFGSPDQLACWAGLTTRVDSSDRHRREGHVSKQGSRLLRWAAVEACQRIREPYLVDKRRAIMARRGKKAQPIATVATARHLLRVVYYTMRDGQARCLTAALPAPA

SEQ ID NO: 219383 - protein, 353 aa, unidentified
MAIVADQYDFVIGVDTHAASHTLALITASTGVVRQQAQFPVSPAGLRRAVGWIQRHTQEAPALIVIDGAGSYGATFTKQLVAAGLTVAEAPDVPASTRRRRGKSDAVDAVAIAQAARGLDVNHLCWPRAAGDRTALRVLTAAREQMSGERTRAVNALTALLRTVDLGIDARRALTTTTIATVAAWRTRSDNDTLAICRAEATRLARRIRALDAELAANHTALHQTVTAQAPQLLALPGVGAVVAATLLLAWSHPGRVRSEAAFAALAGASPLPASSGNTTRYRLNRGGDRRLNRALYTVALVRMGHDARTRDYVTRRTSEGRTKREIMRSLKRYISRQLFRTLNGANPPITST

SEQ ID NO: 219384 - protein, 398 aa, unidentified
MTERPYSVFVGLDVGKGEHHACALDRDGARLHDKLLPQDETRIRELLARLSEHGPVLVVVDQPASIGALAVAVARHAGIDVGYLPGLAMRRIADLHPGQAKTDARDAYIIAEAARSMPHALRRVDVGEEALADLEVIVGFDDDLAGEVTRLANRIRGLLTQVHPALERVLSPIVQRPVTLDLLVRFGGPEGLRAAGRRRLLAVAKPRAPRSYERLVDQVQAALTEQTVTVPGTRAAELVLPQLASTLAGLLAQRDGAAAQIETILDAHPLSQVLTSMPGVGVRTAARILIDVGDGSAFPTSGHLAAYAGLAPVTRRSGSSIRGEHPARSGNKRLKRAMFLSAFAALHDPDSRTYYARKRAQGKKHNAALICLARRRVDVLHAMLRNGTLYQAKTPTAA

SEQ ID NO: 219385 - protein, 343 aa, unidentified
MEESQAVVVGVDTHKDSHSAALVDELGGLVASTDVGANQRGYVQLLDWARSRSSHRTWVVEGTGSYGAGLASFLAGCGEVVYEGDRPQRRKHGAGGKSDQLDAIKVAREALAREHHALPRQRGNREAIRVLLSTREGVVTAYRQALNQLYALVVTAPEPIHERLIRLKGEQLVNACLRLHCTAGDIETSVTTRVLRRIAHRIRSLQVEAADYESQLEVLVAETVPALLSEPGVGAITAAQLLVSWSHAGRIRNENAFAAMAGVAPVPASSGRVVRYRLNRQGDRRLNRALHVVAVCRSGFHTATKNYIARRTAEGKSSREIRRCLKRYLARRFFRLLQGLDTP

SEQ ID NO: 219386 - protein, 399 aa, unidentified
MEQIRVGIDVGSREHCVGIASADGEILDEFRIAHTRAGFEEFFDRVGGWSSRLGCSVAVAMEGYNGHARPLDREILRRGWRLYNVNNLKLARYKEIFPGPAKTDRLDVVKILELFRLRETLPMAKDVLQEVLEVPCVNERLKRLTRRRRQLVEEKVRVVNRLHSDLQAVCPGLVGITGRVDNLWFLRFLVSRRDLRQLARMRRSSLLKIEGVGRRYAEAIVRWQAEAEFSGEVDYVGPMIISDARRVLGLLEEISGLEVQIVELSRGSEIASLLRTIPGFGRITSAELAGEIGVLERFEREGSLALYLGMCPVSHESGRYRGSRSPRQVNWRAKLAMMTAVARHLEQVAESRAYYERKRSEGKRHNQAVRSLGRHLVRVIWAMLRDRRHYWLREEVCSS

SEQ ID NO: 219387 - protein, 345 aa, unidentified
MNKISVIGLDLAKNVFQVHGVDGEGEVVVRKQLKRSQVRRFFTNVEPCLVGMEACGGAHYWSRELARLGHTVRMMAPVFVKPYLKSNKNDRKDAEAICEAVQRPSMRFVQPKTPEQQCVLHLHRARRLLVRQRVALGNHLRGILSEYGIVLPQGVKALSWRLPGLLEDAENDLPMLTRDLLAECKEEYDQLMERIERVEGRIKAWHATNRVSQRLASIPGIGVLTASALVATVGEGQDFSNGRQLAAYLGLVPRQASSGGKVRLLGISKRGDGYLRGLLIQGARNVIYHIRRRLRAGQPGGNAWVEQLLQRSHPNAVAVALANKMARIAWVLLVRNQTWCPASPV

SEQ ID NO: 219388 - protein, 383 aa, unidentified
MSKMIWVGLDVHKNSTTAAILEDDAREGEVIRLSADLNELRKLFRRLGVRGEVRACYEASAVGFVVHRVLSRDGFSCQVIAPSLIPTRPGDRRKTDRRDALALARLYRSGHLTPVQVPDEEQEAVRALVRTRFALLLQAKKCKQRIHSQLLRQGLVFRDGKSYWTKKHRVWLAQVRRQAQGAAATVLQTELELLEYLETQIRSLDAEIEHHAECPPYQSVVEALECLRGVKTLTAMTLATEIGDIQRFRSPRALMAWVGLVPSENSSGDRERRGPITKTGNAHLRRVLVEAGHNHRVKAGSNLILERRRQGQAPEIVGIAVKAQHRLSKRYWHLALKKHHNVAVVAVARELCGFIWAIMRAATIEPGGAETLSKDHVPAKIGG

SEQ ID NO: 219389 - protein, 380 aa, unidentified
MQTITLYIGLDVHKDSIAIAVAEPGPKGEIRLFGTITNDIDRLEKALRRIRKAHPGAQLEVAYEAGPCGFVIARRLKQLKIPCLVAAPSLIPKQPGSPFKTDKRDARAIARLLRAGELTAVYIPEPTDEAIRDLCRARTDAVDDQRRCRHRLKGFLLRHGYRYQGKANWSQPHMRYLRELVLPHPAMKTILEEYLQGIDAAHERVQRVETSMLALLETWRLKSAVEALMAFRGFQLVAAMITVSELGDIHRFAHPRQLMTYLGLVPTESSSGPHQRQGGISRCGNSHQRWLLTECAEHYALPPKISKELSRRQEGQPRTVRDLSWKAQNRLHLRFNRLLARRLQRNKAKVAIARELCGFLWALLRTQECYRQPAAAQPPK

SEQ ID NO: 219390 - protein, 424 aa, unidentified
MKLTYQTCCGVDVHKSFLVATIIKTTGGIEPSYQKMRFSTFNNSILEFKHWLLDNDCRDICMESTGKYWIPVFNFLEDDINVTIANPKWVKAVKGNKDDTKDSKWIGDLFRLGLVKGSYIPCKKVRILREYTRYRYKLVSCRSSEKNRYQNALTVCNVALDSVVSDIFGKSSTSIIDYLLEQSGTSINHEEIASKLLRSLKSKEDAVIHSIEGYQMTDAQKYRMRLVRAHMDYITAAINDVDSEIESLIASDPDYENAVELLCTIPGVKYDSAITIISEIGIDMSQFCSSKRLCCWAGLTPGSNESAGKKKSVRITRAGVYLKPALVQCAHAAVKSDKSPYYKKKYESLVKRRGKKRAIIAIARMILTAIYQMLSTGEQWNPSDLYKVDMPEALLEKQKQKAIKQAQKLLIREGLLPPTEPIAS

SEQ ID NO: 219391 - protein, 359 aa, unidentified
MQRNKISFKGQKIYIGIDVHAKTWEVCVLTESGYKERHPQQASAKTLFDFLKKHFPDGEYHAVYESGFSGFATYYALKEYGIDCVVTHAADVPTTQYEEVMKTDKVDAAKLARSLRAGDIRPIYIREKENIDDRSVIRIRKTIQKQLSGYKARVKHLLHCNGVEIPEQFARPGTHWSRAFIKWLKEDVVLLSSSRLSLDLLVKQVETIRQTLLDATRAVRRLARTDRYGSNCELLMSIPGIGVSVAMCILTEIYDVKRFRNENQFASYLGLIPTCHNSGEKTASGEKTFRGNRHLGPMVIEAAWIAVYRDYGLGLAYARYKQSMKPQEAIVKIARKMSNIIFSVLKNSRKYEPYRWDKE

SEQ ID NO: 219392 - protein, 338 aa, unidentified
MKEQFYAGFDIHKKSIAICVKNQMGETIQEKSIRANPIAVARWVENAPKPFAAAMEATLFTGWVYDELCRYSDDVRVGNSVMLSYISKSKNKSDKVDAKKLADLLRVDLIPQVYMLPRYARDIREFLRYRNWLVRQSVRYKNKISGLLMMNGIEYNASKLHNKGYFYDFLDSLNNEKKLVELLRLSRSQLEILKEFERRTKKLLYKQPGIKERVELLTSVPGVGEITALTWALEIWDPHRFSSSEKAKSYCGLTPSQKESAGKEKRMPISKQRNKHIQWVVVEASKIAVHRVKEPELVQIYQKVAERKNRNAATMAVARKLVEWLLAVDKRKTPFRAR

SEQ ID NO: 219393 - protein, 343 aa, unidentified
MEKKRWLGVDLHRNGFTCCMRLENGRSYLSQWKLEDLDRFIQKLRSSDEVAVEVTGNTRLFYQAVARRVKRVVVVDVHQFRVIAHSVKKTDPNDARNLALYLEKDLLPEVRMKDPQRAQIASLTQTRDTLVKLRTALKNKVNNLVSSQGINLSKESLASEKGLAAVLKFRFEVLVEVELKVIVEQIRSLNHSIAQLEEIISREGQKLEGHSNLTSIKGIGKLSGSILLSIIGDVKDFAEEGKLAAYFGIVPRISHSNETEHSGRITKRGTKLGRTTLVQCALIAQRYSPYLKSYYEKIKKRRGTGKAIIALARKFLGIIYRTLKYKWVFADFPNFVLAQETTG

SEQ ID NO: 219394 - protein, 343 aa, unidentified
MKITLIGLDLAQSSIQVCLRDERGQITKNRGMSPAKAKELLANTPPTTVAMEACGSAHWWGRLAQRHGHEVRLLPPQHVKAFRRIHKSDGHDALAIVEAALRPNLHPVPVKSVAQQDLGLLVQLRDHLVRERTAKANQIRGFAREYGLVFPKGIRDLIAGITRLSLDTPDYSPLTVQLLAEMTRDLVRHCQRVEEVEAMLLEQVKRHPAFERLQAIPGIGPVIAASLVAKVGQAQQFDNGRQMAAWVGLVPRQNGTGGHTQLGRITKAGDRYLRCQLIHGARTVLRWLDRQHPLLRRWLEALRTRRGHNRAIVALANKITRLAYRALRSEEAFDMRKAFAAAT

SEQ ID NO: 219395 - protein, 380 aa, unidentified
MQQASQSVCARSIGQTNRLKAERRLATLYVGLDVHQKRSSLCILNEEGKTVKQEQVLGRWPKLIERLGQIDQPMSVCYEASCGYGYLYDQIRRLSSHVAVAHPGHLRLIFRSKKKHDRVDAAKIAKLLYLGEVPAVHVPGIDVRSWRKLIEFRQKLLGKRTAVKNQMRAILRGNGIECVRWPWTKKGLKTLKTLPIPTEGERLAMELACEELEELSDKIKRVEKELAKIAAGHPGVQLLMTIPGVGIRTAEAFVAYVDDVKRFARNRQVGCYFGLVPCLDSSAGKDRFGHITRDGPSTVRKMLCEAAWIGIRCDAGLRARFERIVNNDPDRKKIAIVAMAHHLCRVMAAMLRTGEAWRDQGEAWRDQAVPKIEGRPSAGG

SEQ ID NO: 219396 - protein, 477 aa, unidentified
MKQTKSSPCARAIPAHGGQLSRKERRELARQVQSEQVTLQIVHSNAAGIDVGKNTHYVAVPPDRDAESVRYFDSCTDGLQQMVAWLKKCGITSVALQSTGVYWIALYDLLQEADFEVYLVNARYTKSLPGRKSDVQESQWLMKLHTYGLLPNSFRPPQEIRWLRSYWRQRQNHVRSAASCIHRMDKVLTEMNVRLSSAVTDLSGATGLAIIQAIVDGERDPHELAAYRDPRVKATQEEIARQLHGNWQADLLFRLKQELQGYRFYQTLIAECDRELAQLLRAFPDRSAGVALPEETRKNRRKKKRGNSPQFDLRQLLYLMSGVDLARIDGIDVITAMTVVAEAGYDMSPWPTADHFVSWLRLAPDNRISGDKIIGKGRTPTQNRLSQALKMAASSLKASKTYLGAQFRRLRARRGPAIAVKAMAAKLARLVYNMLRHGMEYVDRGTEFYEQQQRERRLHALAKNAAQLGFQLVPTVS

SEQ ID NO: 219397 - protein, 393 aa, unidentified
MLIVGIDIAKRSHEACLINEAGTMVGKTFSFSNSHAGVDLLLKQIRKHNPDSQPVVFGMEATGHYWLALYSRLVQEGFMVCVINPIQSDSLRNFYIRQTKTDQVDSFLVAEVIRFGHFSQTILAEPDLIALRQLCRYRFFLVDQTSDVKRKVVCLLDQVFPEYETLFSDLFGTSSRQMLAEFSSPEEFLAVDTEKLALLLQKASHGHFGMPQAQRIQQAARHSFGVKLGSNALTFELRQLVAQIDFLESQLAELGEQISRLYDQFACTLHTIPGIGKVLAAVILSEIGDIHRFAAPEKLVAFTGMDPSLKQSGEFTGTQSHMSKRGSPYLRRAIWLAAFPASQCNPVLTAFYQKKRSEGKAHGTALGAVSRKLIYTIFALLKSGQSYDPNLAR

SEQ ID NO: 219398 - protein, 362 aa, unidentified
MRIIGCDLHARQQTLAMLDTATGEVVHKTLPHEGNSVREFYSRLPGPVRVGIEATGSMKWFLQLMEELGIDCQVGHPATIRAAEPRRQKHDQRDAELLLKLLVENRFPSIWQPSQELLDLRGLLLHRHQWVRLRTRIQNALQAIALANGLRRGSSLWSQSGQDAIASLPLATHTAHRRSELQAMYARFEAEIEQLNQQVLEQAGQRPTARLLMTHPGVGPITALATDVFLGDPKRFRDSKALASYIGIIPREHSSGGRQRLGGLSKQGNPLLRFLWCEAAAHAVRRDPELRRFYRRKLVQKGLGKARVAAARKLGIRLWIMLRDQIDYHEFCRRGQMQQRSGDACAGMPRGRYGAKSHRLID

SEQ ID NO: 219399 - protein, 350 aa, unidentified
MTIVGCDYHPGFQQIVFVDTKTGEWKEQRLEHREPAEKFYRELASGREKMRVGMEASGHARWFERLLAELDIELWIGDAAAIRAKRGRRKPKTDRQDAQHILQLMRKDDFPQIWVPSWENRDLRQLLWHRHRMVQARTRMVNQLQAVALNEGLRCKKRLWREKGRKQLEAIRLAPWASRRREDLLQLLDGLNPKISELTQAIQQEVEKSVEARRLMTHPGVGPITALAFVLIIGRAERFQCGKQIAAYLGLVPLEDSSGERRRLGHITKQGSSMLRFLLVESAQMAARSIPQWRNQYFHLAMRRGRKIAKVALARKLAIRLFWMMRRAWDYEQMTKFGSHAGQPASCNGV

SEQ ID NO: 219400 - protein, 317 aa, unidentified
MTTPNDAYVGIDVGKTWLDVALWGNNAVWRVSNDDEGVAEIMARVTALGLQLIAVEATGGYEQLVVQTMLLNSLPVAVVNPTRVRALSKATGKLAKTDVIDARLIAEYAFKIQPEALAPKEAQEIRLNALVTRREQLVEMRTAEQNRLGTVHNSMQVDIREHIEWMNARIQELEVEINGLVDNLPKWRKQAERLDSIPGVGKITAVTVLAEMPELGQLNRQKIAALAGLAPFNRDSGQKRGKRRIFGGRKGIRRVLYMACLSATKYNPVIRSLYLRLTKKGKLFKVAITACMRKMLTIMNAMTRDQVNWRPPEPIPN

SEQ ID NO: 219401 - protein, 351 aa, unidentified
MRKIAYLGMDVHSNHCVLGDMDARGNFRGAQTFCTSEQNIIKALQDVKATKKYLTLEEGNLAYWVAQVAAPYVTEVIPCDPKENALIYKGSNKNDKVDTKKLCRLLRLGELKRVYHPETDERAIFKAAAQHYIDLRDQQISLKQKIKAMYRHWGVIDVAGEAVYSPKKRDNYLCQIKHLAIRNEISRLYYLMDQTESMQERALKAMKQLGRKYPEIKQFQKMPGIGEILAHIFDAFIQTPHRFPDKHKLWRYSRLGVTDRSSDGKPLGFKRLDRSGISELKSLTYQAWMSALRSDNEVKRFYKNSLQRTFSRVHARLNTQRKIIATMYGMWKRGEPYNPNLFLDSPQSDAV

SEQ ID NO: 219402 - protein, 410 aa, unidentified
MRIIALDVHRSFAQVAILENGKLRDAGKIDLERGRLLQFARKLKSDDEIVIEATGNTTAIVRLLSPFVGRVVIANPILVRAIAWAKVKTDKIDAAVLAKLHASGFLPEVWMPDEETETRRRVVAERTQLVSQLTRLKNRIQSILHANLIPPCKGVLFSKRGRAWLEAQPLSEDQRRVVLRHAGELDRLGAELAEVDKSLAQKALDEPLVKCLMTITGVNAIVAMSLLAAIGDIHRFSSPQKLVSYFGLNPRVRQSGDKPAYHGRITKQGRAHARSMLVEAAWVISGAPGPLRAFFIRIRDKRGKHVAAVATARKLAVIVWHMMSKDEDFIWDRPALLQWKLRKLELKAGHPSRRGGKQKGSAADYRKKSVRDAEREMIGNAEEEYRRFVATWKTRPPKGRPGAANEVRRS

SEQ ID NO: 219403 - protein, 451 aa, unidentified
MQNRNVKMEVVNPNAAGIDVGSRSHFAAIGQGAGDIKEFGVYNEDLQQLTKWFADNEIKTVAMESTGTYWQHLYITLQAAGFQVILCNGKFTKNIKGKKTDVKDAQWIQKLHTIGLLTGSFLPDQATEQLRTYCRHRTNLLQQSSDTTRKMQKYLRLLNLRLDVVVKDVTGVTGLAIIDAICKGEKNPEKLACLRHGNCKKSEEEIAKALQSNGRKDYLFGLKQEYQLYVNFQEKMKECDVEIEKLLNEQINNDDERRQHFIDKKVYKKVNKNTPKNLDINLLSYQYFGGVDLLAIEGVSHATALALMSEVGNGIHKFETAKQFASWLRLAPNNKISGGKMLSSRIPKGSNRLKIALRNAANAIGNLKDTALANFFKRIAFRKGRPAAISATARKLAVIIWNMIVKSVPYKQETTYEFLDQKRKRKVQEMKKLIHKFDITTNELGLHISGL

SEQ ID NO: 219404 - protein, 322 aa, unidentified
MSQPNQICVGIDVAKGSLDICVGTGKASFTVINSTDGFEQIIKALKSVSVSLILMEATGGLEAPVAYHLQAEGYEIAVVNPRQARDFCRAMGYLAKTDSIDARALAQMADVINNHPERERFILALPDNQRQVLTALVARRRQLVGMLVAERNRLHTTHPAVMKSVECLICALNGELELIDIEIKEHVQKHFIDLSALLRSVKGVGPTTIAILLADVPELGNLTRREICALVGVAPVNRDSGKMRGRRSIFGGRASVRTALYMATLCAVRFNPALKTFYTRLVLAGKPKKVALVASMRKLLTIINAMIKKGEEWDNTFHNLAC

SEQ ID NO: 219405 - protein, 323 aa, unidentified
MKRSIYIGIDVAKAKLDVAVKVTEFGEQPGMPKAAHKEWIVHNTDAGVAKLVKRIVELAPDRIAMEATGGYEQRVFQALRDAGMPAAIVQPQHVKDFGKAMSIKHKTDRIDALVLAYFAEIRRPEIVPQPTANQKRIAELRGLRNDLIETRVAYNNRTENCSPEMKARLEAFVAIIETQVDALDKEMAAALKASPEDAQKAALLRSVPGIGPVNAAALVGELPELGKLDRRRIASLVGVAPMAKDSGNTRGKRFITGGRQALRATLHMAVVSMRRCNPVICAFANRLEAAGKPGHTIMTACVRKLLVILNAMIHSGKPWTLSP

SEQ ID NO: 219406 - protein, 419 aa, unidentified
MLTARWFVGIDWASEAHEVCVLDREGQVCDRRSVPHTATALQAFVDALLERAHGDASAVAIGIEVPRGGLVELCVERGFGVYAINPKQLDRFRDRFTAAGAKDDRRDAHVIGDSLRTDPQAFRRVRLDHPLVIQLREWSRVDEDLAGDLTRLTNQLRDLVYRIAPGLLPLCPAADERWLWTLWRNAPTPADQRRLSLRGVDRLLRDHRVRRLEAAQVREVLQHPSVYTAPGVVEAVAAHIQLLLPRVELLAAQRRDAEKQLERLLDALEAQEPAAGDQREHSDVAIVRSMPGIGTRVAARMLAEASQPLVDRAYHVLRTTMGVAPVTKQSGRRRTVSMRYACNARLRDAAYHWARTGAQKDPPSRAYYAQLRARGHSHGRALRSVADRLLRVLITLLNRRQLFDPTHRQPAPVAVAAGA

SEQ ID NO: 219407 - protein, 382 aa, unidentified
MDTSGNWSRIIGLDLSKATFKGCILYGEGFVRRKNFSGEMRRDESGYVLINNTIQTGDIVLMEAGSSSFSLARYLQKNSKASDVVVLNPAHLRIIWDSQKKNDKADAMKIACIARDMRPEAWPRVTVPSEKEQSERSVIMHWIFLRKQETMLCNRFFALFNSLGYPEIDKSRLKKDPDFRVQTINDLLSFSELAFTDAIMLEEQITIVQRQLSFMEDRLRSICMDHPQQALAWLSIPGIGLVNAATLIAYIGDGSRFSKPDQLMNYAGMVPKQNQSGTVDIKGKITKRGCSAIRRSIVQGAQVLIQLPPTCDITKFAYRKKKECPFNGKVAVAVANRMLRTGLALLHHNDLYRPMIKDGFDRLERKLAGNKLQALVPYLTSN

SEQ ID NO: 219408 - protein, 354 aa, unidentified
MNRRHFIGVDCHCQFCEIAVVDAAGKVVRRDRRDTTIPALLELLEAVPKPRSLVIEEGPLAGWLWRNLRPAVEDMVVSEPRRNRLIAQDGDKDDDLDAEKLAQLLRGGFVKPVHQVASLERAVFKQQVALYHHRVRQRVREGLRLTSLFRQHGVMIREKDYAAAAGRPDLLARLPADQTLRDLVTLLWPAYDDLVAREEEWRRQLIAAAKGQEVVQRFQALPGVGPIRAATLYAYLDTPWRFRGKAALWKYLGVGLQRRRSGNGPEYLGVPAQAHRLLKGTILGAARSAVASGDNPFADLYGRWLENGLSSKLARRNVARALAATLWGLWKNGSAYRPEWVGVALAAQPAAELS

SEQ ID NO: 219409 - protein, 391 aa, unidentified
MVCVGIDVAKDKHDCCILDSDGTIRADCITIPNNMDGFKQLLQTIRDCTKKSDKIKVGLEATGHYSYNILGFLLDNDLAVYVMNPLHTNLYRKSLSLRKTKTDRVDAKTIATMLLSDVDLKSYTDTAYHNEELKSLTRYRFDKVRERAKLKQSVSRLVTILFPELEKLVPSLHIASVYALLSEYPGAKQISEIHLTKLTNLLATASKGRYGKDKAIQIRDAARTSIGSVMPAKFLELKHTIKLIRELTSEIDEIEVSIQKIMDELNPPILSIPGVGIQSAAMILAEIGDFSNFESPDKILAYAGCSPSTYQSGKLTNCYAHMEKRGSRYLRYALYNATKYVCHWNPVFAEYLAKKRAEGKHYNVALSHATKKLVRLIYALQKSGKAYLVAA

SEQ ID NO: 219410 - protein, 460 aa, unidentified
MLKIENTSEYNKTTDWQVSKNLIEQREVSTMKSNTQNAKIEAITEKTLVLGIDVGSETHYARAFDYRGIEYSKKPFKFSNTEAGFVTFKEWILDLKERHEKDKVIPGMEPTGHYWFNLGKFLQDNEMKPVLVNPHHVKKSKELDDNNPTKNDRKDPKVIAGLVREGRYMIPYLPDGVYADLRTASNIRFQLQAELTRIQNRINRWFNIYFPEYKTVYGKPDAKSGILILKEAPLPEDILTLGIDGVNQIWRDAKLRAVGKARAKTLIEAAEHSVGSKEGAVSARMEIRMLLEDYESRNIRLQEVMGLIEGLVNQIPMAEKLLEIKGVGIKTVSGFLAEVGDIRRFNDPKELQKLAGLALVENSSGKHKGKTTISRRGRKRLRYLLFEVAMSLVAKNPEFRELHNYYTTRRLNPLKKMQSLMAIAAKLLRVFYAILTKGVGYDPKKMVNDIRRPAAYAQAA

SEQ ID NO: 219411 - protein, 377 aa, unidentified
MGTTRQALINDTSVVLMLYMALELSARKWKVALADGQRAASQHTLEAGDVGGLLKLIEKAKKRCGLQGRLKVKSCYEAGRDGFWLHRWLLEQGIENVVVDSSSIEVNRRARRAKSDGLDAVKLYEMLVRHVGGDKRMWRVVRVPSVQQEDERRVHRELERLKRERTAHVNRMRSLAVLHNVRLQRVGGRGWSERLEQLKGQLPGALWAEIERESVREKLVCEQIVALEQERKEQLQAMLEQGGPLVALLKLRAIGVQTAWVLVRELFGWRHFNNRRELAACVGLNPSPYDSGASQREQGISKAGNRRVRALVVEIGWYWLRYQPHSALSEWFNRRFGAGGKRMRRIGIVALARRLLIALWRYVEHGVVPAGAQLKKA

SEQ ID NO: 219412 - protein, 356 aa, unidentified
MNSTKYIGMDVHKEATTIAVMNPAGKLVMESIVETKAATIVQFLEGLRGEMYVTLEEGTWAAWLYDLLKPHVTKVVVCNPRKNALLKAGNKSDRIDARKLAELLRGGLLSAVYHGETGLRTLKELSRSYLAISKDLARTMNRVKALYRSWSIPCGGASVYAPRHRAEWLSKITEPGVRRRAELFYQQLDGLQKLRQEARRDLLAESRKHGATSLLQRIPYIGPIRAALLIALMQTPHRFRTKRQLWAYSGLALETHSSGEYHYVQGQLQRSKRPVALRGLNRNHNHDLKSIFKGAATKAGSAKGAFHDFYTALLTKGMKPTMARLTLARKIAAITLLVWKKGVCFDAQQLKRQVSV

SEQ ID NO: 219413 - protein, 444 aa, unidentified
MVCSGMILIREVADAPVIMGISKPADLKSPCGEVKIVNPLFVGIDVSSRSNVAYLMKPDGSKHSSFSVQNNLGGAKLLSERIVSALNSMRLSDVVIGLEATSIYGNNLVYALREDGSLGQFQRKIHVLNPKQVKKFKEAYPDLPKNDFVDAFVIADHLRFGRIAKEVYMDDYRYQALRTLTRARFDVIQNLTREKQRFANYLFLKCSGIAQEKGIQNTSATTIALMEHFETVDDLANADLDELTDFIAQVGRGRFADPDVVAKVIQTAAKGSYRLPKTVNDTVNQAMSVSIASMRALKEQAKVLDKAIEQQFEIIPNTLTSIPGIGKVYSAGIIAEIGDIHRFASQASVAKFAGLVWKQHQSGEFEAEHSRMIKSGNRYLRYYLLEAANSVRRCDSEFRRYYDLKFNEVNKYQHKRALALTARKLVRLVFRLLKDNRLYIPPEN

SEQ ID NO: 219414 - protein, 474 aa, unidentified
MARTRNKPASPPVPGDAGAEVTDEPVQVISRAAAIDVAKGSGMVCLRLPHESRAGRRTQKVWEVTATFAAVVALMDHLVCQGVERLVLESTSDYWRIWYYLAEAAGLEVWLVNARDVKHLPGRSKSDRLDCVWLCKLNEWGMLRRSFVPPEPVRDLRALTRLRANLTHDRVRHQNRIEKILEDALLKVSSVISDLMGGSGRRFLQALVDGERSPAALAALGDYRLHASKAELQEALTGRFRDIHGFEIGMLLKLIDDLSAKITELDERIEAQLENVPGLGGVCTSCGQPGPDGPCTGCGEPVLGVIARLDEITGIGRGAAQVIVAELGTDMTQFPTPGHAASWAKLTPRAIQSGATSKAGRTGKGNPYLRGATGVAVMTAARTETFLGARYRRHARRRGKQKAIVAGCRTIIEIAWRVIAGPGFRYIELGPDYHDQLDPGRKTRDKIRQLEKLNPGMTVTLTPRPEPGGQAPAA

SEQ ID NO: 219415 - protein, 338 aa, unidentified
MKLYAGIDLHSSNNFLGIIDEEGKQLYSRRLKNSLEEVLRELLPYKEFVDSIVIESTYNWYWLVDGLMKDGYKIHLANPSAMVQYSGLKHTDDKSDTFWLAEMNRLGIIPTGYIYPREERSVRDMLRRRFLFVKQRTAHILSLKSMVARETGLMMSADRIQKLGSAEIEYLFSDQYLRTIALNNLTAIDVLGNTASEIEKEVLSHCKLRDEFKHLLTIPGVGKILAMMIMLEVGDIRRFKDAGNYSSYCRCVKSEKISNNKKKGENNRKNGNKYLSWAYMEAANYAIRYCPEAGAFYQRKMAKKNKIVARKALANKLARASYYIMRDGIEFNKDKLFS

SEQ ID NO: 219416 - protein, 340 aa, unidentified
MKRTIIGIDLAKNVFEVYVEDGSGAVVERKRLSRKKLLPWLANRPPALVGMEACGGAHYWARELTKLGHDVRMIAPQYVKPWVQTNKSDAADARAICRAVQEPGMRFVGMASEAQQAVQALHRVRSRHMGNRTALVNQIRGILLEYGVAIPKGVASVRKMLPLLLAEERWAPLLQQFLTDQQAELRYWDAKIEAVTAQIKRENATQPICHRLEQARGIGPLGASALWGKTAGQSYQNGRHFAATLGLVPKHTGTGGKVRLGGISKRGDRYLRQLLIHGARAVVRQVGEKPDCLSCWIRRLVARRGMNKAIVALANKNARMAFALIHGEQPYDVTKMCGTA

SEQ ID NO: 219417 - protein, 325 aa, unidentified
MPSIPSVVSVGVDIAKDKFDAAFLYEGNQSSVDTFENNAVGIKKFVSRLQKQKTACAVPCVLESTGLYHLNMALRVHQAGYKVSVINPLITKKYQQSSIRNAKTDTIDALRLAEIGVKEAKLPVFSGNIQGIEAKKLVCYMGKLEEIKRQLRASRHFVEMTQDITGLDIDLDHTEEAISELDEQIEVLREKIRELAPKEAKELSDNIYGLGREKMAIILAMLGDKEFKNRDQLVAFVGLDVMPRQSGTWRGKGRLSKRGNPYLRKVLYQVAWGLKQNNPVYQAEYERLRAKGTNYVTTLIILSRKFLRFLYAYYWKKTAYPQLTR

SEQ ID NO: 219418 - protein, 298 aa, unidentified
MEHHAGIDVSLELSSVCVVDGRGKIVREAKVASEPDALVSFFKGLGLPVKLIGLEAGPLSQWLHAGLMRAGFEAVLLETRHVKAALSAMTVKTDRKDARGLAQLIRMGWFRPVHAKSIGSQEIRALLVARKQLLGRLLDVELSIRGILRGFGLKVGQVTRKTFEARIRELVTGHTMLERIAEAMLSARATLQAQYEKLHKAMLAFVREDAVCRRLMTVPGVGPVVAVTFKSGVDDPNRITKSKAVGALFGLTPKKYQSGEKDVTGGITRTGDEMVRTALYEAANVLLSRITRFSKLKR

SEQ ID NO: 219419 - protein, 338 aa, unidentified
MNIARIGIDLAKQVFQIHGVDRTEKVLVRRQLRRSQMLDYFSKLTPCLIGMEACGSAHYWARELGKLGHEVRLMAPQFVKPYVKSGKNDANDAEAICEAVGRPNMRFVAIKTAEQQVVQAEHRIRARLIKSRTALSNEIRGLLAEFGIVVETSIGRLRKALPELLEDSENGLPGSFRVLLAGLGEELRALDDSITAFDAGIARRAREDDRIRRLLEVEGIGPITASALVAAVGNGTQFNSGRDMSAWLGLTPRQYSSGGKNRLGGISKRGDKYMRMLLIHGARAALNAAKNKEDGRSRWVKSLATRRNKNIATVALANKNARIAWSILSRGESYRKAA

SEQ ID NO: 219420 - protein, 416 aa, unidentified
MQVLYPCCCGLDIHKKFVVACALTTADDGQVQKVTRTFSTMTDDLLTMLDWLANVGCTHVAMESTSSYWRPVYNLLEGQVTLLVANAYHIKAVPGRKTDVKDAEWIADLLRHGLIRGSFIPSPEQRHLRDLTRYRTHLVEERARLTNRLQAVLEDANVKLASVVTDVRGVSARAILEALLAGETDPTLLAELARGRLRTKREELARAVVGRFTGHHAFLLTEHLSHLDYLEEALERVSAEIAARLREDVAAVELLDTVPGISVRSAEVLLAELGTDLSRFPDAQHLASWAGMCPGNAESGGKRLSGKTRKGNPALRQALIQIAHVASKTKDTYLAAQYRRIAARRGKKRALVALGHTILVIVYHILTRREPYHELGVAYFDRLERQRVEQRLVRRLERLGYTVSLQPPAPEPVLAA

SEQ ID NO: 219421 - protein, 420 aa, unidentified
MKEESIEFAAYIGLDWADRTHVIRLRCAGSQAVEQREVTHTPEALAAWVSELQQRFGGRPVAVALEQSRGAVVHALMSYDFVVLYPVNPKSLAKYREAFRVGGAKDDPDDAQLLLELLTLHHDKLRAWVPDDELTRTLVLLVQYRRQLIDERTSLTNRLTSLLKGYYPQALRWAGGLATQQAGEFLRHWPTLADIQRAPATTLRKFYLAHGCRKAKLIEQRLQEIKLAQPLTRDLAVITASVSMVQAIVNQLRALITAVAQMEKQITELFGQHPDHDLFESFPGAGPVLAPRLLTAMGADRQRFSAAREVQQFSGIAPVTERSGQSCWVHWRRACPKFVRQSFHEYAARSIRWSPWAKAFYEQQRQKGNGHHAAVRSLAYRWIRIVYRCWQQRGLYSEVTYQQALIRRHSPLAKLLPAQH

SEQ ID NO: 219422 - protein, 348 aa, unidentified
MSQSSPNYVGIDVHKSSSSICVMSPDGTVIFETTCATEPGRLITVLKTVADPKDVVLEETTIADFLYRELRPHVHRAVVCDPRHNAYISEDENLNDQTAAYKLAYLLRLNCIKPVHHPLSDARAEFKRVVLFRNDAASELAASRNRLKALFTSCLIPCEGTAIYAKKYREDWLTRLPKSGPRFRAQELYRRIDDGVAEVARIDSEVTRQARQFPEIKLFRQLPAIGLVRAATWFAIIDTPERFVNRGHLWAYCGIGLASRRSAGHQGPEHLNHNGNPALKNLLKSAAVAAINKGDHNRFQRQYEQSIAERREPALARLTVARSMATTMCTMWLTGEDYQDDYQPKPLR

SEQ ID NO: 219423 - protein, 411 aa, unidentified
MQYFIRKEGMPMLSIGIDVSKGKSTVCGMKPGGEIVYAPFEVQHTREGMSELVLLLHNSGEEVRAVLESTGSYHCPVVAALLENGIFVSVVNSLRMKRFCSQSIRKVKTDRIDAMQIALYGLAYWQELQPTKLPEDTYRELQLLARQYYQMTSMLIKAKVDFNALCDQVLPGMQELMNDHAGRHKLSDFVLRYHHTTHILEMGETRFRKDYCKWAEKKGYRNCERMAVLIFATAQNGIPVLPNAPSTQIVITEAIRVLHTVEASRDAILTQMQALAKTLLEYSLVREMPCIGDTLAPRLIAEIGDVRRFHSKRALIAYAGIDAPPYQSGKFCANNRHISKRGNRYLRKTGYEVMQSYVMHKPANDPIFTFIEKKRGEGKSGKLAMVAGLNKFLRVYYGKVTELYRSLPAIE

SEQ ID NO: 219424 - protein, 370 aa, unidentified
MAESTTLFVGLDVHKDSISVAHAAENRPGPPHFVGAIGTRQRDLDQLIRRLHGKAAHLVFAYEAGPCGYVLHRYLTGKGLDCRVVAPSLIPKRPGDKVKNDRRDAVEIARLLRSGDLTGVYVPSVEDEAVRDLCRARDAARVTLKAAKLRLKSFLLRLGLNYTGRADWNDAHRRYLAKVVYPTPAQQIVFQEFIRAVDEQVERLRRLEDELLELAPQWRLWPVVEALQALRGVQWVVALTVVAELGDLTRFTNPRQLAAFVGLIPSEYSSGDKRRQGSITKTGNTRARRALVEGAWAYRYPAKISPHIRKRIEGLPKIAQDIGWKAQVRLCKRFRRLTSRGKHANVAVTAIARELLAFMWAIAKEVPITA

SEQ ID NO: 219425 - protein, 416 aa, unidentified
MYYVGIDWADENHQVFITDDSAQRLSAFSIKNSRSGVEELFERIRYFVKDQKQALFALETSKGLLIDSILDAGYTVYPINPKSVDRYRDRYKVSGHKSDDFDAMVLANILRTDRHNYRPILPDSPITRELKILTRECCSLIRLKTMLSNQLTSCLKDYYPVALELFCKLDQPITLLFLKNFPTYQQAKQVSLPQWGKFLSKHHYRVGVKKKANEIYLKLQEPQFNVEPFLANAKARYTLALVEQLQLLLSQIKSFENKIEQLLKQHTDSEIFLSLPGAGITLAARMVSEFGDNRERYKKVSSVQAEAGTAPITESSGNWKFVHFRSACRKSFRNTMHQFAFCSIKESPWAKQRYQQYVASGKKHTQSIRCLANAWLEIIFPMWKNYMPYSEQRHLLKYVKEQKPVNYSRNLNYLSV

SEQ ID NO: 219426 - protein, 354 aa, unidentified
MHKAGRRRCRVGGPGGKIHPEETKVKQPIHAGIDVSAATLDVAIERGRGAVWTGSFENTAAGHQRLIRALSKQGRVVRVCLEATGVYHLDAALAMRERGIEVMVANPRATKDFARAQMQRSKTDQTDARSLLEFVRRMEFQVWEPPPREILELRALSRHLAALATMRAQEKNRRHAIDQVAGLGDPVREAIEEHIEYLDGAIRELQAKALEVVASSPVLEVAFAHLVSVKGIAAASAVAILAELAVLPQDMSAREWVAHAGLDPRRHESGTSVKGPVRISKVGNRHLRRALYMPTIVAVQHEPRIKALYEKLLLRGKKPMQANVAVMRKLLHAIHGMLRNDQHFDGERFFATEA

SEQ ID NO: 219427 - protein, 257 aa, unidentified
MCQYVGLDVSVKEVSICVVNGAGTVLARGTVQTDPDQIAEFLDQNAPDAERVVLESGIMAIWLTRELSRREVPIICIDARLAHKALSGRINKTDRGDAEGLAHLARTGRFTPVHVRSEASERRSDLAQRLMTVPGVAPVVALSCIATLDDQARFKRATDVGAFLGLTPRRYQSGDTDWSGRISKCGDRDLRRLLYAAGFTLISQVRRSSPLRSWAVRLSERKGIKHAAVAAARKLAVIMLRIWRDGTTFHATKEVKA

SEQ ID NO: 219428 - protein, 349 aa, unidentified
MNEKYVAMDVHKASVAIGVRDAAGKYIMESIVETKAITLLEFVKGLSGTIHLTFEEGTQSAWLYDLLKPHVAECVVCNPRKNKLLEEGNKGDRIDVQKLSQLFQAGLLRPVYHGDHGTRALKELAHCYESLLRDRTRVKNRLKAIYRGRGISCEGEGVYNPTNRDWWLAQLRERGVRQRADSLFMQLENLNAMVAEAQRQMLAESRKHKAAAILRSLSTLGPISVALIIATYDTPHRFRTKRQFWTYCGFAVVTRSSSDHYFEKGELRKRQKPALTRGLNRNYNRRLKCVFKSAATSGSRQGPFKPFYEQLLARGLKPDLAKLTLARRISAIALAMWKKGERFDPQKLK

SEQ ID NO: 219429 - protein, 360 aa, unidentified
MEVGQEVVLHPVVGGVDTHKDLHVAAVVDELDRVLGTRCFATTRQGYRQMLAWMRSFGQLRCIGVEATGTYGAGLLRSMQNAGVEVLEVTAPDKPDRRKHGKNDDLDAQNAAHAAFAGKRTVTPRSRDGMIESLRVLKACRKTAVVARRIALQMIQNTIVCAPDGLREALRQMTRMQLVRTLAAWRPDLTDYRNVDSAYRISLKSLGRRYVELHDEIADLDVMIAAIVDELAPNLVARNSIGHARAAQLLLTAGDNPERLHSEAGFAALCGVSPVPASSGKTTRHRLNRGGDRAANSALHIIAIGRLRTDPRTKAYMAKRVAEGHSKLEVIRCLKRYIAREVFTLISQRQKEINQARITA

SEQ ID NO: 219430 - protein, 347 aa, unidentified
MRFYNRQHRHYCGIDLHVKTMYVCILDAAGQVLVHRNVKSTPEAFLEIVAPYRDDLVVAAECMFTWYWLADLCAAESLVFVLGHALAMKAIHGGKAKNDKIDSHKIASLLRGGLLPQAYVYPAGMRSTRDLMRRRLHLVRKRGELLAHIQNTRAQYNLPAFERRLAYPANRDGISAHFADPSVRKSIEVDLALIDQYDTLVEDLELTILREAKRHDADAFHRLRSVPGIGKVLALTILYEIHDVTRFDRVQEFASYARLVKCVHQSAGKKLGTGGAKMGNVHLKWAFSEAAVLFLRHTKDGKKILAGIEKKHGKGKALSILAHKIGRAVFYMLSRGTVFSMEKFLAA

SEQ ID NO: 219431 - protein, 407 aa, unidentified
MEVLHRRCAGLDVHKTTVVACVRVAEGKKVRREVREFATTSRALYALAEWLTGCGCTHAAMESTGVYWKPVWHMLEDRLELVLANATEVRNVPGRKSDTSDATWLADLLAHGLIRSSFVPPEPIAELRDLTRTRKQLVRERARHTQRVQKVLEDANLKLSSVVTDILGLSGRAVLEAVIRGETDPQELTALTNSRLKASREEVAEALYGRVTGHHRFMLRLHLNQIDGVDRAIAAVDARTQELLEPFRSTVEHLMTMPGVGPTVAAVLVAEIGTDMSRFKTPGHLVSWAGLCPRLDQSAGKPRSTRTRHGHWLKTTLVQAAWAAVRKKDNYLHAQYLRIKRRRGAKKAIIAVAASMLTAAYHMIRDDADYLDLGGDYFQRYDRDKVARRLVQRLHELGFRVDVREAA

SEQ ID NO: 219432 - protein, 416 aa, unidentified
MNREGEALLLLVGDDWAEDHHDVEVQDETGRRLGKGRLPEGIAGISRLHAMIGQHVGDDDEPVEVVVGIETERGPWVQALLAAGYQVYAINPLQVARYRERHSVSGAKSDPGDAHTLADMVRTDRHQLRPVAGDSDLAEAIKVVTRAHKTLIWERTRHTLRLRRALLDFFPAAVAAFEDLDAPDTLELLGVAPDPVTAAGLDGEQITAALRRARRRGIPDKVAKIQEVLRAPQLAQPPVVAGAYAVTVQAQVAILTTFNTQIKLMEQQVGAHFGRHPDGEVYLSQPGLGGILGARVLAEFGDDKARYSDARARKNYAGTSPITRASGKKKIVLARYVHNDRLVDALGQQAFAALKASPGARAYYDLQRARGTGHRAALRQLGNRLVGILHGCLKTGTLYDEHTAWAYHQQDQQLAA

SEQ ID NO: 219433 - protein, 414 aa, unidentified
MEIQKNKVCGADIHKKFLVATILSRDGVIITNRFGMTIDDLLKFKSWVVDNGCEQVAVESTGSYWLPIHSILEGSIDLIVANAYKIKHTPGRKTDASDSEWIAELCLNGMIEPSRIFPKEDRELRRLTRAREGYVNDMTREKNRIHHCLESCGIKLSSVLSDIFGKSGRYLLNSLLEGIDIEKIVEGIPVKKIRMKADQIKEAIKGSLDTTQIILIRGSLEQIESLQRRIDELDKEIRGRMASKKEDLKIAMSIPGIGFTSAATILSEIGDFRDFDKPEQLAAWAGLVPSVYQSADKLITGSITKHGSRHIRRILVEVAHTIARTNKSKLKRFFLKVKSKKGSKVAAVALARKILCILYHLLANREMYQDEAIKKIKSSGIDRSSLTELSLEEMISYLVKAGYEVRKGSSNSGG

SEQ ID NO: 219434 - protein, 387 aa, unidentified
MTVAAHQLEAPTAIRTDLSAIFVSLELSRSKWLITSLSPGRVAKMSKHMVAGGDVAGMLAHFVELKRKAQVRIGTCFPIIVIQEAGLDGFWIHRVLEGEGIESHVVDPASIATSRRRRRAKTDKIDGEALVRALLAYKRGEPRVCAMVRAPTPIEEDRRRLCRERKALTNEKIRHVNRIKGLLFSQGVAGYKPLRRDRRRQLEALRTGDGRPLPAHLKKQISRELDRLELLLQQIKTVEAERDAMLAAAQAVSPAPAMLRDLKGIGAELAAVLWTEGLSRQFDNRRQLAAYAGLAPTPWQSGTIDHEQGVSKSGNPRLRTTLIELAWLWLHHQPHSALSLWFKDRINQNSGRLKKKAIVALARKLLVALWKYVDAGVAIEGAVMKTS

SEQ ID NO: 219435 - protein, 407 aa, unidentified
MEVLYPRCAGLDVHAETVVACVRVASGPTVRYEHRTVSTTTRGLLDLARWLATHEVTHVAMEATGVYWKPVWHVLEDQFTLILANAMHIRNIPGRKSDKNDATWIADLLAMGLIRSSFVPPAPIQELRDLTRTRTQLVREIRRHTQRLQKTLEDANVKLTEVISDILGTTGRAMLQALVAGETDPERLAGLAHYRIEASHEQLVEALHGRVTAHHRFMLALHLQQIGSLETAVRDLEARIEEMLRPFRAAIDLLLTMPGLKATAASVIVAEIGTDMTHFPTAGHLLSWAGLCPRLDESAGKRRSTRTRQGTPWLKTTLVQVAWAAARTKRSYFHGQFLRLKSRRGPKKAILAVAASMLTDIYVMLRDGVFFEDLGDQYFAQRDKARLTNRLLKRLRDLGVEVEIKAA

SEQ ID NO: 219436 - protein, 342 aa, unidentified
MNLPVRIGMDTSKSVFQLHGVDENEVVVVRRQFRRAEMIRYFERLPPVLVAIESCGSSHHWARLLQSFGHEVKLIPPQYVKAYVKRGKNDAADAEALCEAVTRPSMRFVPVKSKERQAACMLMTVREPLVSVKSQLSNAFRSYAAEFGIVGPAGRQNVTALIKRVLEDDSLPEMARDLFRLQAEEYAAVQARLAKIEAKLMKWHREDDVSRRIATIPGVGPIGSSMLSMKAPPPETFRSGRDFAAWLGLTPKDHSTGGRQRHGGITKAGDSALRSTLIVGATALLRHIRKGRHKPTPWLASLLERKPPKLVAVALANKFARIAWRLMISGGVYNRPIAAMPV

SEQ ID NO: 219437 - protein, 370 aa, unidentified
MAQSTPLFVGLDVHKDSIAVAHAAGGSTEPPVFVGAIGTRQADLEHLLRRLHGKTGALTFAYEAGPSGYGLYRYLTGKGLPCQVVAPSLIPKKPGDRVKTDRRDAVELARLLRSGDLTPVYVPSVEDEAVRDLCRARDAARVTGKDAKLRLKAFLLRLGRHYVGRANWNDAHRRYLAKVVCPTPAQQIVFQESVRAVDEQIDRLQRLEAELVERAPAWRLYPVVQAMQALRGVQFLVAITIVAELGDLTRFDNPRQLAAFVGLIPSEYSSGGSRRQGGITKAGNGRARRMLIEAAWAYRHPAKVSLHIQQRIDHLPKPLQDLGWKAQVRLCKRFRRLVARGKHPNVAVTAVARELIAFMWAIAKAVPLQA

SEQ ID NO: 219438 - protein, 467 aa, unidentified
MSKQNRPGEPMWQGHGQEIEADGIAVLQRNVAGMDVGSKSHWVCAPTLDGTGREVKEFGATTPELERLGQWLQERKVESIAMESTGVYWIAPHEILERQGLKVLLVCTRTLAQVPGRKKTDRIDCKWIQRLHSCGLLGGSFRPAELVCMVRTLVRDQSNLMAERGDWIRRIQKSLDQMNVRVHRAVSDIEGATGMAIIRAIVDGQRDPAKLAELRDPGCRKSTAEIAEQLSGHWRQDHLFSLQQSLKMYDAIGERIQAYEQEILRQLGNLQPAENQDKQAPRLKNSNKAKMIRQRGEEPMRQALFRMSGVDLAGIDAVGVGVAQVILTEYGPDLSRFPTEKHFISHVTLAPKQGVTGGKPLKKKKRGSASSRVAAALRSAALSLRHSQTALGAYFRHTANRRGADVAAFATARKLATHIYRLLRWGQAYVDVGAEVYESCYRAARVHRLRTNAAQLGYELIQKTAAV

SEQ ID NO: 219439 - protein, 387 aa, unidentified
MAQQLDDLSRSPTPLDQGSTIITVIEMSQATWLVAGIVPGIERHPLKKIEPSEVELLCLLMRWRAEAMKKGRTITRIVVAFEAGRDGFWLARWLRVRDIESYVIHPTSVAVSREHRRAKTDRLDTGLLKRVFIGWLRGEPDHCHMAAIPTLAEEDAKRPNREREGLVRERTRLVNRMKSCLVRFGVRTFKPTLRNAPDRLATLHTPEGVPLPPNTLLELRRDMARLRFVMDQIKEVEAARAQGLKQAPQEKTHAMVNLLARILGIGIDTADMLVHEVLARNLRDRRAVARYAGLTGSPDESGSRRREKGLAKAGSARVRRGMIQLAWRFLLFQKESALAQWYRARTADARGGTRKTMIVALARKLLIALWRMLTTGEVPAGVVLRAA

SEQ ID NO: 219440 - protein, 479 aa, unidentified
MNLKTKKRKNQVVINNSVINVVSDEELNQRIDSINTEMKAATWRDLEINRKFGKNEKLSFISDDTLIVGCDIGSETHYIRVIDSRGRELSREAFSFSNTAEGFQAAKEWVINIAARHNKKQIVLGIEPTGHYWFCIASWMIANGISVVQVNPYAVKQTKELEDNSQDKNDRKDPKLIANLVKDGNYGMPYLPEDIYAELRHLSMFRDQLNEDRIRAINRLHREMKIYFPEYMEAFGKLDSVFAQEVIKNAPFPKDIVSKGIEGLKEIWHNAKLRGRGYNRAEQIFNCAEKSVGINEGTDAGREAVKWFANSIIELEAELEKVESTLREKCLKIPYAENILEIEGIGANILSGILAEMGDIARFDDVKEIQKLSGLGIVACSSGKHKGESKISHRGRKRLRYWLFLAAKSAVAHSEAFISLHEYYTSRSDNPLKKMQSLVVISCKLLRVIFTILRTGQKYDPDKMLRDIKRPEAVKAIAA

SEQ ID NO: 219441 - protein, 318 aa, unidentified
MKNAIKFEQVIERGCGIDVHKKVLVATIRGTEIKEETREFSSFTEDIESLRDWLRSHNITHVAMESTGVYWKPVYNILEEYFEILLVNARNVKNVPGRKTDKSDSKWLTKLLLSGLLEGSFIPPKKTRELRDLTRYRRKIVGQVSSEKNRLQKILEDANIKLSSVVSNMSGATARKIISSMLKGEEDIEELVKLRHGKLKASEADLAKSLRGYLSEHHKFMLTTINNSIVEKQKLIESLDKRITEHLKSSEQTLSRELLQSIPGVGKDAAASILAEIGDKMEQFPSERHLASWAGMSPGNNESAGKKKVVALPTEINT

SEQ ID NO: 219442 - protein, 340 aa, unidentified
MKLYTAFDLHANNSYAAIIDQEGHKVAGKKLINDPQVVLEFLKPHQKDIMGIVVESTFNWYWLVDNLMDCGYKVHLANTTAIQKYNGLKHSGDKEDAFWLAELLRLNILPEGHIYPKEERPIRDLLRKRSHLVRLRTSLILSLQNIVDRNCGKRIKVKDIKKRKEDLVAPFFEGNDDLSLTGKISKEAIDFFTAKILTVENFVEDKLELKKPYQYLLSIPGIGKILGLTIMLETAPVERFEKVGNYVSYCRKVSTRWTSNDKTKGKGNKKNGNKYLAWAFSEAAEFSRRYDEKAKAFYNRKMQKTNFMVAHNALAHKLARAAYHIMKDQVPFMPDKLFSS

SEQ ID NO: 219443 - protein, 405 aa, unidentified
MEVMHDRCAGIDVHKKVAVVCAIVEGRREARKFGTVTVELERMREWLVERRVSHVAMESTGSFWKPVFNLLEESGIEVLVVNAAHIKAVPGRKTDMNDAQWIAELLRHGLVRGSFIPDREQRELRELARYRRSLIHERSREVARLQKVLEGANIKLSSVASNVVGVSGRAMVEALVAGENDAEALASLARGRLRDKHDELVQALQGFMGTHQRFMLAEQLHHIDELDARVERLSEEIERRLRPFQTQLFALDGIVGLGRRGAEELVAETGVDMSRFATHKHFAAWAKVAPGNNESAGKRRSGRTGRGNPWLRATLVEAARAAARSKNSYLAAQYHRIAARRGGKRAAMAVAHSILVIAYHILKYGTAYSDLGVDYFDRRAKHAIASRAKHRLEALGYRVIIEQAA

SEQ ID NO: 219444 - protein, 335 aa, unidentified
MAVDQNGRQLAQKTLLATKAGHLEALQWAARWSQRKWALEDCRHVSRRFEADLLAAGELVVRVPSKLTGGARKVARTSGKSDPIDTLAVARAALREPDLPVAKLEGAGREVRLLLDHREDLVGERTRIQNRLRWHLHELEPEAVIPARMLSRYHTLAELEGRLRSQHGVVVEIAIELVVRIRELTRCINRLEADIAGRVSGLAPTLMQLTGCGALCAAKVVGEAAGVSRFRSKAAFAMNNGTAPVPASSGNQMRHRLNRGGNRQLNAAMHRIAVTQLSRPGPAKDYVARRLANGNTKTEAVRALKRRISDEVYRRLLHDERAVLASPSGSVEVAA

SEQ ID NO: 219445 - protein, 336 aa, unidentified
MQMYICVIDSSGEIHHHRNHPTTPDELSLIIHRFGTDIVIGVECMFSWYWVADFCEEHRIPFALGHALYMKAIHSGKTKNDRIDAMKIASMLRGGMFPLAHAYPKAKRATRDLLRRRQFFVHHRAALLSHITNTNTQYNNIPIKANLLRASNREGIEDRFDSEAVRQSITADKYLLDHYHRVILDIESTVMRHAKADDAHALSLLRSIPGIGPVLALTILYEIGDIERFPKVGNFISYARLVKCSHESAGKRSKGGHNKIGNAHLKWAFSEAAVLLIRERDEAKRLHQSLSAKYGRAKSLSIIAQKLGRLVFHILKHRQTFDAERFFGTRIAEPVI

SEQ ID NO: 219446 - protein, 341 aa, unidentified
MGEVSTIGLDIAKSVFQVHGVDEAGSVVIRKRVSRAKMLECFGGLPRCLVGIEACPSAHHWGRELQTLGHQVRLIPPSYVKAYLKRSKNDANDAAAICEAVTRPSMRFVPIKTKEQQSVLMLHRTRQLLVRQRTMISNALRGHLAELGIVSAKGHNGTAELLRIIADRRVSPAVCGILEVLARQYGAIGIEIASIDKNIMVLHRACEASRRLAEIPGIGPISATALVAEIGDWNAFGSGRSLAAWIGLVPKQHSTGGKERLGRISKQGNRYLRWLLVVGAMAVIRYARKHGTGKRPWLGRLMERRPTKVAAVALANKIARMAWAIMVRNERYKEPKLLLAV

SEQ ID NO: 219447 - protein, 356 aa, unidentified
MSVYLGVDFHARTQTVCWCDQADGLVHQRTLDHQHDDVRGFYTQFAVPAVVGLEATGYARWFHRLLESLGHRLLVGDAYVIRKCALRRQKNDRRDAELLLDLLLHGDFPAVHIPPMASQAVLRLLRYRQRLVEIQTKLRNGTQALALNHQLRLGPKLWSKQGQQQLLALELDDTDVLQREHSLELLTQIHTRIRTIEKELTLRADQDTRVRLLRTHPGVGLLTSLVVVHALQPVTRFDRARRVAAYCGLDPCETSSGETVRMGHISKQGNRLLRHLLVEAAHRAVHCKADSDLRNFYFRLIERKKNAAVAITAVARKLVLRLYRMLRENIDYTEFRRRGREARRARKTASPVVGGC

SEQ ID NO: 219448 - protein, 419 aa, unidentified
MSFKILKNNCCGLDVHKTWIYACIGITDSNGRTEYKQARFSSFTKGLQELCDWLVKYNCNDVCMESTGKYWIPVFNILEKNNLWVTLSHPKYTKPQKGNKTDRKDAKWICDLYMCGMVKPSFIPPADIRQLRDLVRYRFKLTCMITGEKNRAQNCLTVSNFKLDDVFSDVFGKSSRSITEQILQHPGETFDVAPFVDGRCKTPIEEIQAAVDGAISMEQAVKLRQCLNHIDELEKHQAEIEREIFRLSDKYESILNLIRTVPGFDKNPLTAIQVLSEIGGDMSVFPTAKNLVSWAGCCPRNDQSNHKIKSTRISRAGSYFKPVLVQVANALIKSKKHPEFTTRYRRIKARRGHKKAIIAICRMILTAIWHILTDLKPYTPEGFLESRPVNASKVLTTSQALNLLKQRGYVIKDDTVPVT

SEQ ID NO: 219449 - protein, 342 aa, unidentified
MAIIGAFDVHRRQVTYDVLDTVSGQVHRGQVRPACRATLRQFLARYARETDVSFAVEGCTGWRFIVEELERAGFAAHLADPAATADVRGPKRRAKTDRTDTRQLRQQLVEGRLPESWISPMLVREIRAKLECYHDLREEHTAWVQRIHATLFHHGVPVFEHALSTVEGRARLEAGEGLSPAARQTMGVALRVADSLQTELDALYRELGRFARRQPGCKALAAQYGVGPITAVAIWAFMGDTRRFSSSAQAVRHTGLDVTVYSSDGKRSPGHLSRQGPPVLRWALYEAACSAARATSPDLDYYHDTKERIDHKRAAISVARKIARRSHHILRNLGDTAWQDAA

SEQ ID NO: 219450 - protein, 426 aa, unidentified
MNNDIPTEYAALIGLDWGWESHAIALAPAGEATQTSTLKHSAESLHQWLDQLETAYTGRPVAVAVEASKGAVVAALLERPWITVYPIHPATSTRQRCAFRPSGAKDDTPDALVLLFILQHHRDRLRPLQPDDEATRTLAHLVEARRKAVDRRSLLANQLKSTLKNYFPQALDLVGEDLAIPMALDFLDRWPRLTDVQASKDITLRNFYHRHNVRRAELIQSRIDQRRSARLLTRDPAIIEVSVRIVRMLVAELRVLAEHISEFETAIEEAFAEHPEKSFFRELPGAGPVMAPRLLAAFGTARDVFPEPGSMQRYFGVAPVTEKSGGRCWIHWRWNAPSFLRQTLVEWAGQTVVFCPWAKAYYEHQRTKRTGHHAILRALAFKWLRILWRCWQSRVDYDQEKYLQQLEKRRSPIAARARQLASEMAA

SEQ ID NO: 219451 - protein, 359 aa, unidentified
MTATLTWVGLDVHARSTHAAAIERESGELRRARFGAGSEEVVAWLRTLPQPVHACYEAGPTGYALYRVCSEAGIHIDVVAPTKTPRAAADRIKSDRKDAELLVRCLLAGSLSPVCVPSAQVEAARDLARAREQVRADLARVRHRVSKLLLRYGRVYEAGGTWTQAHRRWLSGQRFPESASELAYADYLAAVDGLVARRAALDERLSRIACEGEWWPTVARLRCFRGLETLSALALTLEVGDFARFRRSAELAAWPGLVPSLHQSGETERRGSITKTGSGYARRLLVEAAWHYRREPRLGATLAARHEGQPDHVLQIAWRAQHRLYRLHQRLRQRGKPGNVCVVAVARELSCFLWAAAIA

SEQ ID NO: 219452 - protein, 441 aa, unidentified
MADRGSTTRGMAIVPRGGHQVKKKVRIVGFDCAEDEHAAVLLDVSGEFERRVDVINERGQIQESLAELMLAVGSSAQLVVVVESKRSHGRIVADVAVELGCEVWQVNTVALNHFRDLEGQPRKDDEWDAYLAARMVYLRMGGCRVAIETTEEERVLSRLTRTYSRLIEDRKRQVARLRAVFLELAPEMLHSSWEGPQPGSKAMLYLLERWPGFEGLERAQIRSIEKILHKCRYGSKAPHVAKLIRKMARGIFVPTEERSAITMELDFLVRQIRFCNESADQVYTEITHRVKHHPVGEKLLEMHGNGPVITGILVSELLPVARTSTEPKSATYAGVTPLSRRSGKSLNKDQLTQGVNKRVLHGLYTASVVAIKNSAVDRAYYQKKLRDYAGHPKPHVAAFIALSRQRHKLVYKLMTTDARYNKEILIATHLARLEQERSAAA

SEQ ID NO: 219453 - protein, 385 aa, unidentified
MKPNSQMTLGEFFRQCVGIDISKNKFTACLYMYDRASDVGCCTKSIDFDNTKSGFNQMVKWSRKEAVKGYPLTFLMEPTGVYYERLAYHLHKIGQTVYVVLPNKARKFCESEGIKTKTDAMDARCLALMGCASRKLKPWSPPAAIYRELRQMTRFHADLCVIRRSVANRMEALDHMEGVSKTVRKHCEKLIEEIDTLTEKNDKDIMKKVAEDKELLARVKRIATARGLGATTIVCVIAETEGFHLIENRKQLASYAGLDVKAKQSGKEDPKHRISKEGNAHIRAALYMPALVAVRHNRQIREAYGRICQKHPKEKMIGVAAAMRRLLMLIYTLWKNGGEYDETRDKTHTPKKKELEPEYGPEDCIGTDKESIDWNAMDENGEPPF

SEQ ID NO: 219454 - protein, 350 aa, unidentified
MNVNQYIGFDVHKKSVSYCVKIADGIIVEEGKLRATHEALRQWAEKRQESWRGAMEATLFSGWIYDALKPFAAELQVGHPAMMKAIGASNKKNDKLDARKIADLVRCDLLPACYVAPAEIRELRRLLRYRNLVVRQAVRMKNRMSGLLMEVGAEYNKQQLHGKQYFMELLDTLAEAPDSVKDLLQLSRGAMEMFETTQQQLLVRLKRDQLLSKRVTLLESIRGVGEVTALTWALEVGDPHRFSSVAHAVSYCGLTSALVSSADKQQRGPISKQRNAHLQTVLIEAAKLAPRWNPQLAAVHARELERGNRNRATLAVARKLVAYLLAVDKSGQAFQVRNQPAAAMAEGKVA

SEQ ID NO: 219455 - protein, 347 aa, unidentified
MRFYTKQHPLYCGIDLHARTMYVCILDQAGETLVHRNMTATPEALLKAIAPYREQVVVAAECMFTWYWLADLCAEHGIPFVLGHALYMKAIHGGKAKNDKIDAQKIAVLLRGGMLPQAYVYPAEMRATRDLLRRRMHLARKRGELLAHVQNTNSQYNLPAIGKKIAYKANRDGVAERFADPAVQKSIEVDLALITYYDALLRDVELTIVKTAKHHDANTLYLLQTVPGIGKILSLVLLYEIHDIERFPRVQDFASYCRLVKCARESAGKRSGTSGAKIGNAHLKWAFSEAAVLFLRDNPAGQKLLTRLEKKHSKGKALTILAHKLARAVYYMLKRQTAFDLETFLHA

SEQ ID NO: 219456 - protein, 375 aa, unidentified
MQEKVRFLGLDVHAETIAVAVAEPDGEVRSLGTIPNRAESIRKMIRKLGPAEKLRACYEAGPTGYVVYWQLAELGVQCEVVAPTLVPVKAGDRVKTDRRDAEKLARCYRSGDLTAVWVPDEGSEALRDLVRAREAAKQDQMRARHRLSKFLLRSGQRPPTGVRPWTRPYLIWVAQLRFAQLAQESTRQDYLHEVEHMRARVTRLEQAITEAVKLASPALQQVINDLQALRGIADISAVTIAAELGQVSRFSSARELMGYCGAVPSEDSSGKRIRRGGITKTGNAHLRRIVGEAAWSYRRPPCIWYGLRRRQESISEEAKEIAWKAQHRLHKRYMKLGAAGKPRGKIITAVARELLGFIWAIGIRAETIASQQAAA

SEQ ID NO: 219457 - protein, 412 aa, unidentified
MRIIYKRCCGLDVHKKVIVACLLVLDANGELHKEVKKFGTMTEDLLTLLDWLQAAGCTHVAMESTGVYWKPIYNILEGHLEVVVVNAQHLKGVPGRKTDVLDAEWLAECFQLGLLKASFIPPAPVRELRDLTRYRTSLIRERARTANRLQKVLEDANIKLAGVVTDIQGVSAWAMLEAIVAGTTDPEALADLAKGLLRKKRAQLVAALSGRVKPHHRFLIAEQLSQIEYLEEAIQRISTEVAERLRPFESKVKQLDSIPGISQQIAEVLLAEMGWDMSRFPTDKNLASWAGMCPGNNESAGKRRNGKTRKGSRWLRHALIEAAHGAARTKNKYLKTQYHRVAAHRGKKKALVAVGHSILIISYHLLTRGQEYSDLGANYFDERDRSAVQRRCVKRLEKLGYSVQLQQTTLAA

SEQ ID NO: 219458 - protein, 400 aa, unidentified
MRSIGMDVHRSFAQVAVLDQGKVMEEFRVELDYDAVLGFGQTLQKDDEVILEATGNTSAIVRLLTPFVAKVVIANPLQVKAIAHARVKTDKVDARILAQLHAAGFLPEVWAADDDTLNLRRLVSERAALVRSVRRVKSRVQAVLHANLVPKYSGHLFGNGGRDWLSKAPLPKAERDLLGRHLDELDWLKGKLEKLDGAMARIALNDTRTRKLMTIAGVNSVVATAVIAAIGDISRFPTPDRLASYFGLTPRVRQSGDRGAIHGRISKQGNAIARTMLIEAAWSAASVPGPLRAFFLRIKDRKGLNVAAVATARKIANLIWQLLTKEAPYRWARPAFVAMKMRKLELRAGAPKAHGPAGPARDYWIKEIRHREMELVAQAEAAYAAMVEAWRDRPPKPQKG

SEQ ID NO: 219459 - protein, 352 aa, unidentified
MIVLGADTHKRSHSIAAVAATTGELLDELTVQVGQRGFDALLRWARALDGERVWALEDCRHVSGSFERFLIGRGERVLRIPTHLSAGARKSARQRGKSDPIDAIGVARVALQEGLESFPVAHLDGPELDLRLLVDHRERLVRQRVALNSTLQWHLHDLWPELELPGSSLFYDRWAPRVARRLARAEQTMRVRIARDELRRIRELSQAIKALEREIASLVAAIAPQLLSEPGFGPLTAAKLVGEIAGAQRFATPAKLARAAGVAPIPASSGNTQRQRLDQGGNRQINAALHRVIVTRARCHPATRDYIARRQAEGKSTREAIRCLKRYLARTVWRLLQPSHPFQGTPPSPSTS

SEQ ID NO: 219460 - protein, 431 aa, unidentified
MKNRTNQNLEEITAGTLIVGVDVAKSEQWARFVDYRGVEIGKAFLFENNRKGFESIVTRICEICNIKSIRYPVKSVLIGLEPTGHYWKALANYLINAGYRVVGVNPFHTKKSKELDDNSPTKSDKKDAITIARLTKDGRFFEPYLPQEEYGELRVLSNARVSVIKRTSAVKNTITAVLDEYFPEIWTVFKYPLKGKASRQVLRSCPFPTCILALSENELLVEIKKAVKKSVGLKKVRELMCAAEDSIGVRNGLDAAKMRMGWLLDELELADKQLQEIEQAMEAALLRTGYAKQILGIKGIGIVTAASFLGEVGDPLRFQNSRQIANYAGYNLVEDSSGKNKSGTCISKRGRKQLRNILYQMAFNMVGNNAEMKALYQYLTTRTNNPLKRKQAFVVVSKKIITVIYSLLKKQETYNPEFVLGTVRKEMIKAA

SEQ ID NO: 219461 - protein, 310 aa, unidentified
MNQTPPTHIGIDVSKAILDVHIPGQPHFRVNRDRAGLDDLFARLTGIPSPHIVCESTAGYQRALVDAAFTRGVPISVVMPVRVRQLGNSMGLMAKTDRIDAALLARFGEVNRPAATISPDPDCVALRQLLEARDLLIQATIDHNNRLELAEGFLRATLQKMLRSTARQLEGVEKQIAGLLKTSPILAAKSARLRELKGVGPVLATTLLAFLPELGAIPAKAAAALAGVAPHPKDSGTAQGRRTIRGGRPAIRKVLYMAAVSATRSNPVLKAFYLRLREAGKPAKLALTAVMRKMLSVLNKLLAEPQFTLA

SEQ ID NO: 219462 - protein, 359 aa, unidentified
MNVVKQNLGIDVDSKELKVSFQQLMDDQSKKVKGSRTFKNNLKGFEYLEEWLKKKMSSDLVLNITMEATGVYYENLAYHFSEKENFKVHVVLPNTSKAYLKSLNLKSKTDEIDAKGLGQMGIERNLKTWMPMTSQMRTIRKIVRERIRLVKEKTMVSNQLHAESASYKPNAKSLVRYKERIDFLKQQIKSIKKELVQIVKQDENLRQRIDHVCTIKGVRFITAIGVIAEYKGFVLFSNRNQVVSFAGYDVTKNESGTSVRGKTKISKKGNSHVRQMLYMSAMSAARLDDHHREYYARIVNKTGIKMKGNVAIQRKLLLLIYTLFKNNKHYDPEHYLKTQQIVAPENDGIIRKRTEEILL

SEQ ID NO: 219463 - protein, 371 aa, unidentified
MKSNNTFIGMDVHKNSINIAIASKGRKGQVRHYGKIEGTLSALDKVVRKLVSKDDPLHFVYEAGPCGYQIYRHLTAQGFDCSVVAPSRVPKQSGNRIKNDRRDALMLARLHRAGELTSVYVPLAEDEAMRDLTRAREDAKGNEKKSKQRLRAFLLRSGHRYSGRSPWSRAYMRWLSDIKMPHQSQQIVLQEYIDTLSECKARVQRLTEQIRHLLPQWQLFPVVQALQSLRGVSLIVAATTVAEVGDLKRFQNPAELMSYLGLVPSEHSSGENTRRGSITKTGNGHVRRVLVEAAWAYRYRARVSRALLKRQENLPQHIRDIAWKAQLRLCSRYRHLWAKGKAKQVVVTAIARELCGFMWAIANETQGPAAL

SEQ ID NO: 219464 - protein, 460 aa, unidentified
MNRKKWKSKIDRTMPVVHPNAAAIDIGATMHMAAVRADRAPEPVRSFGTFTADLHRLVDWFAECGVETVVMESTSVYWIPIFELLDARGFTVFLVNARDAKHVPGRKTDVSDAQWLQRLHSFGLLRASFRPKGQIAELRAYVRQRERLLEYAASHIQHMQKALTEMNLQLHHVVADITGATGLRIIRAILAGERDPEVLACLRHYSCHSSAETIAKALTGSYRPEHLFALDQALALYDAYHEKASACDVRIEAVLKELRIHRGRDHGSAPPVSRRRNRTDQANALAFDVRAALFGLLGKDVTTIDGLGPYLSLKLIAECGDDLTSWPSAKHFTSWLGLAPSNKVSGGKMLSSRTRRSGGRAAALLRLAAVTVGRTDTALGAFYRRLSSRIGKAKAVTATARKIAVLFYNAVRHGMDYVDPGASSYEIRYRTRVINNLHRRAKAFGFVLQPLEPKAGAAVS

SEQ ID NO: 219465 - protein, 358 aa, unidentified
MNSKAFIPRDYDVFAGLDVDKKSISVTFTNHQGFIRSLRVPYSAEHLVNHVRKHFPDQKVAFAYEAGPTGYGLYDGIVAQDYPCLIASPSMIPKAPGQRVKTNRLDSRGISENLRGGQLKSIHVPAVLYRELRHLTQLRDTFVSAMVAMKQRIKSLLLMEGLEFPPAPAGSQWSFMVKAKLRKLPCSSTVRFELDQLLDSLEFNEKQIVKTTQQIRRLCQNDAELSQCIKYVMSVSGIGQIVASQLLARIGDWRELKNVRQLGAFLGLVPTENSTGERTDRGSITHSGDPRLRSKLIQAAWSAIRKDGELREFFRAVCQSHARPVASRVAIVAVARKLTVLISVVLMEQRPYVVRKKV

SEQ ID NO: 219466 - protein, 354 aa, unidentified
MAIVGGFDVHRGQITFDYLDTETGEVTTGQVRPATRQTLRSWLGRFAGLTDVAFAVEGCTGWRFVVEELVRAGVEAHLAEPAETATLRGRKKRAKTDRTDARLMRELLRQQRLPESWIPPAAVREVRTQARLDVALLAERRAWRQRIHAQLFHQGAPAIAKLLTAEGQAALAQAALSPAGREVVDTALAAIESLTALLDPLRARLQATGARQPGCRALTAHYGIGPLCGTIIWAELGDCRRFARADQAVRFAGLDVTVRSSDSRRAPGRLARQGAPALRWALYEAAKSASHATAPDHPYYLAARDRLDGKLATLSVARKLARRCYHTLRDLGDDAWPTTANQAAPASTAESAAA

SEQ ID NO: 219467 - protein, 512 aa, unidentified
MTFVYFVLEKWLGSDPVEKANTLEWPGLPKVWVFCPPEGAGVLPAKTIFQKEKKEMRQRGKRTKGIEEAHPFAGMSQVNENAAGVDIGAEEIVVCVAGDDNTQIVKAFGNYTVDLQSIGQWLKEHNVKTVAMESTGVYWIPLFEVLENMGFDCLLISSRSLRRVPGRKSDIQDAQWIQTLHSYGLLESSFRPQADLVALRTLLRHRAQLLEHRAPHILHMQKFMLQMNVQLSQALSDITGDTGIAIIRAIVAGERDADNLAAFRDRNCKKSAEEIGRALTGTWRAEHLFVLKQSLEMYDFYTQQVAACDAEIDRMYALTRPDWEEGELKPPSKKKRNSHSKNAPKNQEEIRKHLKRISGVDISAVDGVGVMVAQTVIVESGTDMRKFPSDKHFSSWLGLAPKHEISGAKVLKNRTLKTKNRAGQAFRMAAQSVKRSDCVFGMMFRRFRSRMDNRQATVATAHAIARVVYRMLKYKVEYEEIDVTEYEKQYEEQQIKYMKKKAAKLGFQLVPA

SEQ ID NO: 219468 - protein, 451 aa, unidentified
MISKHRTKKSKSRSAEFLQKPHGVIHPRVQKVGPEHFGIVSVDCAKARSKWMLADFYGTALIPPTEVAHNRIELEATVARIRAALSQFGLLDCLLAIERTGRYHHAVKNAFAKADLETRLVHPFATKQFRQPADPDNKTDDNDLKAIHLAAVNGFALLENTPSEAWRQLHLCIRHRRDLVRKCSALACQIREHLDAALPGYAACFDKLWDSNVAFRLVRQFGSAQAMLEQGVAGLAQFLRQHKIRFQERTLQTVRVWAQSAAAPDLAADLHHQIALAYEDDRQRKNQEIIALERAIAHRLAQTPYILLLSFPGINVVSAADFAGEMGPISNYANARAITGRAGLFPSRYQSDRVDHANGRLVRRANRALRAAILGIADNLMLCNSHFRTLASHWKAIGKDPRHTHVKVAARFCRIAFHMVAGQQVYHHPSQKERGYILDKLLAFHTEHKTP

SEQ ID NO: 219469 - protein, 420 aa, unidentified
MPSHPSDFVAVIGLDWADKKHDICLLETGQQTPEYSVLAHDPVAIDAWAGRLKERFGGRPVAVCVELARGPIVSALLEYNFFVIFPINPAMLAKYRRAFSPSRAKDDPKDAFLALDLFRHHFDRLSPLRRERPAMRALQCLVQGRRSLVEDRCRLINRVTFALKEYFPQVIAWFRDKHTDVFIDFVSRWPTLEAAKRAHRDTVIDFFHDHNVRGRKTAERRVDAIKAARSLTSDLAVIEPNRLMAESLLAQIAALSKAINRFDDEIATRAAELPDFKIFAALPGAGAALAPRLLAAFGENRDRFPDAASVQKCTGIAPVVERSGNKSWTHWRFIGPTFLRQTFVEWVGESVPHSFWAKAFYQSRKAKGVPHHVILRALAFKWIRIIWRCWYDRQPYDEARYLLSLQKRHSPIIANAAQSS

SEQ ID NO: 219470 - protein, 315 aa, unidentified
MAMPVSVVKPIVGVDVAKDELVIYQAELDLLESIPNDKTAIKKWLKALPAPVDLAIESTNTYHLAFADMAHEAGCTIYMVGGYELSHYRKGVKVRAKTDALDAKLLARYLKNEYEELHPWTPPSPLYRRLLSLFRRRAALVQARVGLVQSWANEPLLKSAFAEQVASMQRLETLVEKMISDQLKEAGLLADLKRCTKVEGIGFLTGARLIATFQRGDFRNADAFIAFLGMDLRVSQSGQKDGRRSLTKRGDPEARRLLHNAAMSASRTSAWKAFYEEQRARGFSTTQALVILARKLARVVFALLKGQSEYQPKAG

SEQ ID NO: 219471 - protein, 338 aa, unidentified
MSLYGGIDLHSRISWLVILDGALKLVRQVKLTNDLREFLRVLEPYRAELAGLVVESTPNWYWLVDGLHDAGYRMHLANTYAAQQYSGLKYTDDRHDARWLAHLLALGILPEGYIYPAHERPVRDLLRRRGFLVQKRTSMVLSLQGAFGCHTGHRVSSDTVKKWTAAEIEEQFDNPLVARGLTCLLEPINAMSSQIRMLEKEVLAQAKLRDEFALLKTIWGIGPILALTVMLEVGDIKRFETVGNFASYCRLVKTDRFSAGKRKGAGNAKNGNPYLSWAFSEAAHFAIRYHDTARRFYQRKRSQTNGIVAVRALAHKLARASYHVMRNQVEFNPQRLFA

SEQ ID NO: 219472 - protein, 356 aa, unidentified
MSVYLGVDFHARTQTVCWCDTSDGVIHQRTLDHEHDDVRGFYTQFAVPAVVGLEATGYARWFHRLLEALGHRLLVGDAYVIRKCALRRQKNDRRDAELLLDLLLHGDFPAVHIPPIASQAVLRLLRYRQRLVEIQTKLRNGVQALALNHQLRLGPKLWSKQGQQQLLALALDNTDVLQREHSLELLQQIRTRIRAIEKELTSRAEQDARVRLLRTHPGVGLLTSLVVVHTLEPVTRFDRARRVAAYCGLDPCESSSGETVRMGHISKQGNRLLRHLLVEAAQRAVHSKADADLRNFYFRLIERKKNAAVSITAVARKLVLRLYRMLRENIDYTEFRRRGREARCARKSASPPSGDC

SEQ ID NO: 219473 - protein, 427 aa, unidentified
MSYRIAGIDVHKRMLAVVVADVAVDGEYVFERRLIGTAPDQLRLLAAWFVECAVEEVVMESTAQYWRPVWDTLERWWQPTRRVRADAGPTSGALHLAQAQSNQGLRGRKKDFPDAERLVKRLVAHELILSFVPDVTQRLWRTVTRRKYQLTCNRVQLQNRLECLLEEMHIKVSSFVADLLGPSARRMLRAVANGDTDPAIVAALGSSRLHATPEQLRDALGACADLDPVYRRLLAMALDELEVIETHSRQLDEELAGLLRVHQDAVQRLAAVPGLGVDSGQQIIAEVGPTAATFATAKRLASWVGACPGHDESAGVNHSHRSPKGNRQMRRLLNQAANAAVKTKGSIFELVYRRLVIRLGHAQAIGAIAHRLCRLVWKILHHGVIYEERGPAVTKARAQRRAAKMIRELRSLGYRIESVPPHASAPA

SEQ ID NO: 219474 - protein, 403 aa, unidentified
MNNVAGIDVSKGKSMVSVLRPFGEVVAKPFSIGHTGSELKELADYLKSLDGETRVVMEHTGRYYEPVARFLHEEGVFVSAVNPKLIKDYGNNTLRKVKTDKADARKIARYGLDNWAELRQHTPMDTIRMQLKTLNRQQSLYAKTKTMMKNNLIALLDQTYPGVNALFDSPVREDGSQKWVDFATAFWHVDCVRNMSLTAFAERYRKWCKRHGYNFSQSKAVEVHTGAQDLIAMLPKDALTKTMVRQAIDALNAISASMERLKAEMQALAAQLPEYPVVMAMHGVGDSLGPQLMAELGDVTRFTHRNAITAFAGVDPGADQSGTHEAKSTRVSKSGAPELRRALFLVMDCLLKTQPQDDPVYRFMDKKRAEGKPYLVYMTAGANKFLRIYYGRVKEYLASLEGN

SEQ ID NO: 219475 - protein, 375 aa, unidentified
MQEYIMVGCDLHDRTMLLKIARGREEAKKRSFSNDAGGRAAMIAYLQAEAEAAGEAKVLFAYEASGQGFGLYDELTAAGFECRVLAPTKMPPSPKQKKNKTDERDAQRVLEVVRGHVLAGNALPSVWIPDPQTRDDRELVRARLDASRKLTRLKAQVQTLLKRNGATRPAGVGQGWSSRFQTWLGGLSKKNSRSVLGPGARVALRTLLNQMDAIEDEITELDQTVKQLSRSERYAPRVEALRRIKGVGLLTAMVFLAEMGDLKRFSNRRQVAAYLGLIPSSHESGEADDRKGHITHQGPGRVRGVLCQATWVCLNNDPLLRELYERLQAKNPKKKKIALVAAMRRLAVIMWHRGLEAQAGAHKKTGQKRRRTAAA

SEQ ID NO: 219476 - protein, 338 aa, unidentified
MVYGAIDLHMRYSQIRIIDDTGVVLRDQRVVTSRERLVRAFEGWGPMRILVETGTESEWVAQTLEAAGHAVVVADPNYGPMYGDLQRRVKTDRRDVAALAEANRRGWYRAAHRTSAAQRGTRQVLRARRQIVQMRTGAVALIRSLLKQDGYRLRSCGAERVPARLAELPLPATLRAIVAPLAQMIETATTKIATLDALLAARAAADPLVQRLQTVPGVGLVVALTFRAHVDDVRRFQHAGQVSAAIGLVPREDSSAERRQRGHITKRGPRELRSLLIQAAWACWRSKQSAQLRAWAEQLAARRGRRIAVVALARRLSRVLYALWRDGTTFDVTKPAAA

SEQ ID NO: 219477 - protein, 383 aa, unidentified
MQPTRKGHFTPAEDILAVALELSSGAWKMAFQDGKHETPAIRTVCSEIACKRLIEVVQEIAKIKKKWGLSADVRTVVLYEAGQDGFWIQRALSKIGYETLICDPGSIPVERHARRAKTDRLDAIKLVLCLRAWLRGEHDRMHVIRIPKVEDEAQRQLSRDRGELVKERGQHRDRMRKLLRTVGCWESVEGDVGKRLKQGEYRCQDGAKLPAEMYARLERECERLALVEQQLAHLEEELAQQLPEGTQQRIDSLQRLKAVGAVGATRLVLELFWRRFDNRRQVGACVGLVPQPYDSGESRIDQGISKQGNRRVRSLLIEMAWFWLRYQPTSAIAKWYVQRTSGSGQNKRGKRSAIVAVARRLVIALWRYLEQGVIPEGAILKIH

SEQ ID NO: 219478 - protein, 378 aa, unidentified
MLSENIIHIAIELSVSSWLVAARLSGADKSRLHRITGGDTTALLALIAELRARASAKLGQAVEVACCFEAGRDGFWLHRLLTAHGIAAYVLEPTSILVNRRARRAKTDRLDAEGMLRVLAAWLAGDGQICSMVRVPTPKEEDAKRPHREREHLVQTKLRLENRIKALLFTQGIRSRPSLRSWERDMAELRTGDGRALPPLLRTELDRLRRQLVLILELIRELEAEQAAAIEAAADDAMVQKIVGLQRIRGIGPNIAAVLVREVLYRSFANRRQLASYVGITPMPHQSGGMDRDRNISRAGNPRARTTLIQLAWLWLRYQPGSTLALWFRERVGALQGRARRIAIVGMARKLLIALWRYVETGVIPDGVEITMPEAATA

SEQ ID NO: 219479 - protein, 429 aa, unidentified
MNSTQNKKIEQVKETTMIVGIDVGSETHYFRAFNWRGIELTRKPVPFSNSMEGFNSFYHTITELMQKNNLEEAMVGIEPTGHYWFDLGQFMGEKNIKFVMVNPHHVHKTKELDDNSPSKNDRKDPRVIAGLVKDGRYFYSYMPTGVYAELRNASNRRFVLVEELTRAKNRLQKWIAVYFPEYKGIYTHIDAKGGLLVLKQASTPEEIVKLGVDGIIKIWKDAKLRGNGRKKAMLILNAAMNSIGLKSGLTEAKMEIQDLIEDYELQTKRLERVNDLIKELCRQIEHVDKLLEIKGIGITTVAGFIAEVGDITRFDNTKELQKLAGLELVANSSGKHNGKTKISKRGRKRLRYLLFEAAISVVGKNEEFREIHRYYTTREKNPLKKMQSLIAVACKLIRVFHAILTKGIRYDASKMLGDIRHPGTQQKAA

SEQ ID NO: 219480 - protein, 343 aa, unidentified
MVVHYIGADVHSNNVELGIERNGQIVARHAVPMSVRAIRQILDEVPGVKHLTFEEGPLAGWLYRNLKDHVDTLVVCDPRRNRLIACDGDKDDRIDAAKLAALLRGGYLREVYHSDDPERVALKRWVALYHDQVKDATRAINKIRGCCRLYGQRVPRRALHEPEIRAAWRATLEPDLVEQVELLWMGYAVKGRQVRRARAQLVRRARAYPILAHWSALPGVGLIRATTLFAYLDTPWRFQRKNQLCKYCGVGLERTTSGQDRYGRDRPARLRLAWAVNRQLKNVIVGAAVSAIRSRDNRFRRQYEKMIQAGAVARNARHAVARKMLTVMWGMWKTARPFDAGLG

SEQ ID NO: 219481 - protein, 339 aa, unidentified
MPQTYVGLDVSDKTTHICAVDVDGKVIWRGVCATDPAALATTLAKHCRDVVRVVLETGSLSAFLYHGLIERGVPAICICARHAKGVLSARVNKSDAHDAEGLAHLARTGWFKAVHIKDTATHLDRAGLKVRDQLIKAHHAMLNQLRGLLKLFGLRLGKVTTPGKRTERLETLFGQKPELRAILGPLVGGLVALEKQIKLSSRGLDTRADADPVCRRLMSVPGVGPITALRYKTSIEDPARFNRGDDAGAYAGLVPRRSQSGERDVNGRISKAGDRGLRAALYEAANSLLSRVKRPCALQTWGKGLIVKKGAKRARVAVARKLAILLHTLWRTDTSFKWA

SEQ ID NO: 219482 - protein, 372 aa, unidentified
MNNTTVYVGMDVHKESFTLCAYTLEEEKGSYSRRTPADYKEVLKYLEFLRTVYGNDTIFVCGYEAGCLSYTLYHQLTDHHVNCVILAPTTMLEQRGRKRIKTDKRDAEIIGKCLAQHNYSPVHVPTASDEEVKEFLRMRDDHKLALIKVKHQIQAFCLRHNYRYDGNSHWTAAHINWLKSLTPEALYKEILDEYLLTYTTLSNKLERLDKRIEELAAKPEYKEAVKKLCCFIGVKTHTALSVIVEVGDFKRFASAEKFASYIGLVPGENSSGDGQTRLGITKAGNRHVRMLLTEASQCYSRGQIGYKSKALKARQDGNTPQVIAYADKANERLRRRYYKMVLSKCKKHNVAKTAIARELACFMWGMMTDNIA

SEQ ID NO: 219483 - protein, 311 aa, unidentified
MAMRSKLTALGVDVAKDWLDIFDGETVVRMDNNAKAIRAFLKSLTHSIPIAVEPTNVYHELFVRLALAASHRVYLVDAYRVSRYREAVGLRVKTDGVDAKLLFRYLNAEMAHLRPYQPPPKAVKRLMTLLRVRAKLTQSKTALKQSLAGVGELAQTRKALLTHINQAIKLIDNKLISCISHSGYINDYRRCQTIKGIGPINAAALVAFYHRGEFRKADAFVSFMGLDVRVRESGRFKGQRKLTKKGNPEIRRLLFNAARAGARTEQWKPYYDSLRERGLTTTAAAVAIARKMAKLAFALMRDQTEYQIKMA

SEQ ID NO: 219484 - protein, 460 aa, unidentified
MINASIERCAGIDVGKKFLSVTIMIGPLAGEPRVEKRRFGTIRAELIRLREWFQKEGITHAVMESTGSYWKPVWNELEEAVRVYIANPIEVKIRKGHKTDDKDGWWLAHLLRHAMIHPSFIPSRAVRDLRDLTRYRKKLVGNGTAEKNRVHKILEDANVKLGDVLEDIFGVSGQLMLDALLKGEESPRKIAQHAQRRAKSKIPEIVKSLEGHQMSDHHRRMINHHLEHMKMLEEQIAKLDREIEEQIKKAGMEEQWEMIQSVPGVQQTSAAAILAEIGPDMTVFPDKGHISSWAGVCPGNNQSAGKSKGAQTRKGNKFVKAALTECAWGAARKKGCFLKDKYWKVKTKSKGKDGPAIVAVAHTLLILVYHVLASGVAYCERGLPIDERQKERAINHHLRRLGKLGVDVGNRSVPKGASAPQVPRVLCAKPESKTAKKRGRKSPSTEGTTKRKTRSRSESK

SEQ ID NO: 219485 - protein, 419 aa, unidentified
MAKTIINDMDVAYECCCGIDVHKDLIVCCLLTGRDKSETKEFGTLTKDLQAMTEWLKESGCQMVAMESTGSYWKPLYNIFEIESMAAMVVNAQHMKTIPGRKTDVNDAQWIALLLRHGLLEASFIPDREQREFRELTRYRDSRVAERAREKNRLQKFLEGANIKLSSHVSQITGMSAISLLELVLNGEDLTIERIEEVRHGGCKSSAEMFLDALTGVITPLQRELLAQVLQTIKEQSVQIERIEALIKAHTTQAYDEAAQALLPITGIGKTSAESIIAEIGIDMDRFPTAGHLCAWAGAAPGNNESAGKKKKGKGRKGNKTLKKTLTQCAVNAIRNPNSFSHAQYQRLVVRLGKKKAIGAVAHSLLIAIYHVLSGKQYVDLGSEYYHQFNREKKIKSHLKQLERLGWKPESPAEANQVA

SEQ ID NO: 219486 - protein, 348 aa, unidentified
MNATPKSVVGVDTAKSVFQLYTVDKETGEVINQQIKRAQFLQWFANRAPCLVGMEACGGSQHWARKLQELGHEVKLMSGKMVKAFVCGNKNDAADARAIYMAAQQPEVKAIAVKSEGQQAVLAMHRIRQQLVKVRTAQMNELRGLLAEYGEVFGKGRKAFDAGVKTALERLAERLPAPLIDTLRDQWNELGRLDERIAHIEKSLLAWLRQDRAAKAISAIPGVGLLTATAAVATMGQAKAFRSGREFAAWIGLVPAQTGSGGKVRLLGMSKRGDTYLRTLLIHGARAVIQHTKLPSPWLQQISQRRPPNVVIVALANKIARTIWAVLAHERAYDKGHVSQRPLAAQEA

SEQ ID NO: 219487 - protein, 317 aa, unidentified
MPSTAMFVGVDIAKADFVVACRPAGTSWTALNNAPGITDTVARVRALAPTLIVVEATGGYETPLVAALATAGLSVVVANPRQVRDFAKSTGQLAKTDRLDAQLLALFAERVRPTPRPLPDVVVQQLNALMTRRRQLLDMLTAEGNRLEHAAAPIRREITRHIRWLERRVTAVDRDLDDTIQKSPVWRAKENLLRTVPGIGPVVSRTLLADLPELGRLNRKQIAALVGVAPLARDSGTLRGKRTVWGGRAPVRAVLYMGALVATRRNPVLRAFYRRLVEAGKPKKVALIACMRKLLTILNAMMRSNTAWEQISQPENS

SEQ ID NO: 219488 - protein, 430 aa, unidentified
MKSNTQNAKIEAITEKTLVLGIDVGSEMHYARAFDYRGIEYSKKPFKFSNTEAGFATFKEWILDLKERHEKDKVVPGMEPTGHYWFNLGKFLQDNEMKPVLVNPHHVKKSKELDDNNPTKNDRKDPKVIAGLVREGRYMIPYLPEGVYADLRTASNIRFQLQAELTRIQNRISRWFNIYFPEYKTVYGKPDAKSGMLILKAAPLPEDILTLGIDGVNQIWRDAKLRAVGKARAKTLIEAAEHSVGSKEGAVSARMEIRMLLEDYESRNIRLQEVMALIEGLVKQIPMAEKLLEIKGVGIKTVSGFLAEVGDISRFNTPKELQKLAGLALVESSSGKHKGETTISRRGRKRLRYLLFEVAMSLVAKNPEFRELHNYYTTRRLNPLKKMQSLMAIAAKLIRVFYAMLTKGVDYDPKKMASDIKRPAVYLQAA

SEQ ID NO: 219489 - protein, 346 aa, unidentified
MSYSTTVGVDLAKNVIQISVVSGRGKELSNRSLTRRKFAEFLGKQKPALVAFESCATAHYWARAAERHGHEARIIPAKAVAPFRQGHKTDSNDALAVAEAARRPNIKVAPMKTTEQQGLQAIHRSRELLIQECTALSNHLRGILLEFGVAIPQGFASLLRTLPEVLEDGDNELPDLYRPTLHRMYTRLLELREDIEAMTEEVTRLVKEHPVCNKLTALEGIGPIGALLLYATMGSGKAFSGSREFAAYLGLAPRQFSSGGKTNIVGLSKKVGNSRLRSVLILGARAYTYRMKEPKGSKDKWLHAIVERNGVSRAAIALANKNVRTAWAMVTQGTDYQRRPQLEMAA

SEQ ID NO: 219490 - protein, 353 aa, unidentified
MKTYYVGMDVHRASIVMVVLNGAGKVVMQSVIETGAERVRGFLKQLRGKVYVTFEEGTQANWLHDVVRPLVTEVVVCDPRHNKLLQSGNKNDRVDAQKLAELLRNGALKAVYHGDNGVRTLKELVRSYDCLVSDTTRVMNRLKAIYRGRAIGCAGHDIYRQDRREQWLEKLTERGAKQRTSFLYQQLAALKPLRHEAKRIMVKEARRQTAYLWLMSVPQFGSVSVAQLLAIVGTPHRFRSKRQFWTYIGLAVVTRTTADHEVVNGVLRRSKRPVSTRGLNRNHNHLLKRMFKNAAKGACASGPFKAAYELRVTQGMVPSLARLTVARQLAAITLAIWKRGEQFNPERMKQQAA

SEQ ID NO: 219491 - protein, 357 aa, unidentified
MVGGGIKVSLRLGFNRQETEMKYSGIDLHSNNCVVTVTEEEDRVLAEKRLPNDLTKIVGLLMPWREDLAGVVVESTFNWYWLVDGLKAAGFTVHLANTTAIKKYDGLKHSGDEADARYLAHLLRLGILPTGTILPPEHRAVRDLARKRMQLVRSRTSHILAVENITARQSGARITCNQVKRLTPALIDDMAFPEDVIVAVKANVAVITTLSAQIDLLEKRLLANMKERSEYRLLTSVPGIGQVLATTILLETGPIERFAGAGNFASYARCVDSVHTSNGKKKGEGNTKNGNKYLAWAFVEAANFAMRFNAEAKRFYERKKARTNNAVAIKALAHKLARACFHMLKERKSFDVTRCFA

SEQ ID NO: 219492 - protein, 367 aa, unidentified
MTVTIVDAVRPVTGGGEMHADLGAAPCLVTGGVDTHLDLNVAAALDGIGGLLAVAEFPATLAGHRALLGWLSGFGPVARVGVEGTGSYGAGLSRFLRAAGVAVVEVDRPNRQARRRSGKSDPLDAVEAARAALSGRARGAAKSRDGNVEAIRALVVAKRSARSAKIQALNQIRHLSFTAPEQLRQRLAGVSRHHLAARAAALRPATGAGADPVVAATKTALRILGRRVLALDEEKARIDALLTGLVTQTAPQLLAVFGVGVDTAAALLVTAGDNPGRLRSEAAWAHLCGTAPIPASSGKVTRYRLSRGGDRQANCALWGIVITRLRNDPRTQAYMARRLAEGRSKPEVIRVLKRYVAREVYHRLPRP

SEQ ID NO: 219493 - protein, 334 aa, unidentified
MEQITTVGIDLAKNVFSLHGVDGAGKTVLRRTVRRDRLLETVAGLSPCLIGMEACSGAHEWGRRFEQYGHTVRLMAPKFVAPYRKSDKNDGNDAEAVCEAVSRPSMRFVPVKSTEQQALLTLHRVRQGFVIERTALINRLRGLLSEFGVVLPLRSVTVRRQAAAAAEALPELARSAIADLLEQLRGLDTRIDAYDAQIHQQAKLSESARRLMRIRGIGATTALAIVATVGNAREFKNGRQFAAWIGLVPGQYSTGGKARLGHISKRGDAYLRNLLVQGARSVLQTASAHQDRLSRWALELQARRGYYRTLVAIANKNARIAWAVLAKDEPLKMN

SEQ ID NO: 219494 - protein, 419 aa, unidentified
MSFKILKNNCCGLDVHKTWIYACIGITDSNGRTEYKQARFSSFTKGLNELCDWLAKYNCTDVCMESTGKYWIPVFNILEQHNLWVTLSHPKYTKPMKGNKTDRKDAKWICDLYMCGMVKPSFIPPADIRELRDLVRYRYKLTCMITGEKNRAQNCLTVSNLKLDDVFSDVFGKSSRSITEQILQHPGEKFDVAPFVHRLCKTPIEEIQAAVDGAISKEQAIKLRQCLDHIDELNKHISEVEQEILCLSDKYEAALNLIRTVPGFNKNPMTAIQVLSEIGCDMSVFPTDKHLVSWAGCCPRNDKSDRKIKSTRISRAGSYFKPVLVQVANALIKSKKHPEFITRYKRIKVRRGHKKAIIAICRMILTAIWHILSDLKPYTPEGFLESRPVKKEKILTTSQALNLLKLRGYVIKDDPLPTS

SEQ ID NO: 219495 - protein, 370 aa, unidentified
MRCYQGQHPFYCGIDLHARTMHVCILDQAGQTVFDKGIPCRPEALLRAIQPYRDHLVIGAECMFAWYWVADLCVAQDIAFVLGHALYMKAIHGGKAKNDRIDAGKIARLLRGGTFPLAYAYPKGMRETRDLLRRRTYLVRKRAELLTHLQILNAQYNLAPFPKKLACAANRTEMNVAERFADPSVQKSAAINLALIDRLDELIGDLELYLVRTAKVDDIQTFYRLRSIPGVGKVLALILLYETHDIGRFDTAGQFLSYARLVRCAHESGGKKLGTGGKKIGNAHLRWAFAEAACLFLRSSERAKKWKQKQAAQRGEGKALAILAARLGRAVYHMLRKGEAFDEDRFWSGARRTRTGSSSLSRKEARDAGH

SEQ ID NO: 219496 - protein, 332 aa, unidentified
MYYVGIDLHKRDLVIAVEDERGPVGKPRRFACRDEAAIVAHLSALRPFRAVIEASASYRWLYDRLKPLGEVILAHPLRLRASIARPAKTDKLDAALLAHLLRMGQIPEAYAPPAAYQELRELTRARARLSRSATEAKNHLHGLLAARNIHPPYRNPFGVRGRRWMRSLELGVVGNLERDELIGRLEHYDAQRDRLDGALEESAASFPQIESLQDIRGIGTYTALLVVAEIGEPERFSEPGQVASYAGLATRVYQSGGHDYHGHITRQGSPWLRWVLVQAAMKAIGRDRRLANFYERVRKRSSRHIARVAVARKLAEICWIRLRRWHRERAAA

SEQ ID NO: 219497 - protein, 397 aa, unidentified
MYIVGIDIAKRKHEAAVIDGEGTVIIKPFSFTNNCSGYNRLLAMLAKAKLPLDEVSFAMEATGHYWLALFTRLQKEGFRVQVINPVQTNSIRSFYIRQAKTDPRDALLIAEVIRFGHFSESTLHPENIYELRELCRGRHAIVSMQADVKRKVVALLDQVFPEYETAFTNLFGDTSMAILQTCPTPKELSEMPLEELCHLIEVPSHKRFRMAKAQELQALARNSFGFAMAGDVFSTMIRLYAKHLVFLKQQVQEMDRKIAEIMDTLDTLITTITGIGPTLGAYILSEIGDISRFSSAAKLAAYAGIDPTMRQSGEYNGVRNRMSKRGSPYLRHAIWLAASSAVLHDPALKLYFQKKRDEGKPYMASVGHACRKMVSIIYAVMRDNKAYTPYIPNEISA

SEQ ID NO: 219498 - protein, 342 aa, unidentified
MEIAVLGIDLGKNSCSVAGLDASGRVVLRRRLHRDGVVKLAAGLPSCVMAMEACCGAHHLGRVLQGQNHQVRLMSPEYVRPYVKAQKNDDRDAEAIAEAATRPTMRFVELKSEAQLDMQSLHRARDRLVGERTALINQMRAILLERGITVPQGRRKLELHLDTLLQAEQVSLSPRTRRLVEDQRAEWRELDRRIQAFDEEFALQARTEESARLLTTIPGIGPLNATALVAAIGKAETFARGRDLAAWMGLVPKQMTTGGKPKLLGISKRGNEYLRKMLIHGARAALPTLSKGETPLGGWLRGLLARAHVNTVVVALAAKLARIICAVLRSGQKFGMQAATAS

SEQ ID NO: 219499 - protein, 426 aa, unidentified
MHYTQEEKIEQVTESTLVVGVDIGSQKQYARAFDWRGREISRKAFTFADCGSGYTLFSTWIYEMQARLGLDKVIVGVEPTGHYWFGLAQYLESTQIQLVLVNPLHVKQSKELDDGSQTKNDNKDPKVIAKLVIEGRYTFPYRPKGVYADLRNVWNVREAISKDLTVCKNKLKRWIKVYFPEYVNVFKDPDAKSSLLLLEHVALPEDIVSLGAEGVNKIWRDAKIRGVGMKRATTLVAAAKDSIGQKEGADGARTDLKFLLEDYALKRRQFEDVKAKIELLCDKIPETKRLLAIKGIGLTTVAGFFAEAGDIRRFDSPKEIIKLAGLNLRENSSGKHKGQTTITRRGRARLRKVIFKGVIPLLASNEEFKQLHEYYTTRKQNPLKKKQSVVAVGCKLVRVFWGVTRSGKAYDGQKMLKDIHRQLPAA

SEQ ID NO: 219500 - protein, 354 aa, unidentified
MQQNTVIGVDLAKASFQVHKATIAGRMIKSLKLSRAKFSEFLAKEEKSTIFMEACGSANFWARKAKKYGHQVRLIAPQYVTPYRKRHKTDAADAAAIVEAGTREHMNFVPIKTTEQQDLQSLRRIRQLEVETRTALMNQIRGLLAEYGIAINKGHSALREALIECGIEGKGEDLVHDLTPKMRQLLEGLKARLRTIDERVIEFDKELERAAQADDRCKRIMTIPGVGPVTATAIISQVGDAREFKSARQLAAWMGLTPKQHSTGGKVTTLGISKAGNKDLRTLLIHGGRAVMMNPGKKKDKRSEWAVSLKERVGMNKAAVAMAHKNVRTIYALLRNGTEFKDNYKPRLPNCKVA

SEQ ID NO: 219501 - protein, 394 aa, unidentified
MFYLGIDIGKNTHVASMIGEDGKPVFRAFSFSNTTDGGESLLAKLSDIAPVELVIGLEATGHYWLAVYSYLRDRGYKLHVINPIQTDGWRKGVEIRRRKTDVIDSVLIAELIRYGDFIEAKLSEEAVLSLKNLTRFRSYLADSIGDLKRKVICVLDQVFPEYQSVFSNVFGKTSKEILLQFSSPAELEDVSADTLAELLAALSRKKLGYEVAEKLSAAASKSFGVTFCRDSFTFQLRMLIEQIKYIESQVKDTETEIEVIMTNLTSPITTIPGIGKTTGAVILGEIGSIERFDNPAKLVAFAGIDATVLQSGEFEGTNNRMSKRGSPYLRRALYQASLIAATGRNPDPILRAFYLKKISEGKHHSTSIGAVSRKLCYIVFSVLKENRPFEVRIP

SEQ ID NO: 219502 - protein, 339 aa, unidentified
MQLYSGLDLHSTNTYIGVLDTDFKRVFKKRVSNNLDFILQTLQPFKEQLKGIVVESTYNWYWLVDGLMDAGYDCVHLANPSAIKQYEGLKHSDDQHDAFFLAQLLILGILPQGYIYPKKDRPVRDLARKRMFLVKHKTAHLLSLQSLIARCCGQRFSANQIRQLSEEKLRQLLKEEHLRLCAQANLDSIVFLKQQIHRLEAVIKKKLKLSKEFKNLLTVPGIGQILAMTIMLEVGDIGRFAKVGNFTSYCRCAPTQRLSDGKSKGSGNRKNGNRYLSWAFSEAAHIGRRYNTAFRRYYDRKAAQTNTIVARRALSNKLARICYYIMRDQVEFRSELISH

SEQ ID NO: 219503 - protein, 262 aa, unidentified
MSASCFIGVDVSKAALDVAETLEKRVWRGDNDEAGIDRLVADLRMLKPKCVAMEATGGYERSLAKALWEAGVPAAIVNPRQVRDFARAGGLLAKTDRIDAQVLSRFAEVMRPRVLQSDDTAREELSALEARRRQLTEMVTAEKNWLRPAQPKVARGIRQHLGWLEKEVKKLDKEIEALMRSNAQWRIKYEILRTAPGVGPVLSATIVADLPELGQVDRRSIAALVGVAPLNRDSGTLRGRRTVWGGRTTVRNVLFNGDSSCH

SEQ ID NO: 219504 - protein, 428 aa, unidentified
MLGVGIDWAEEFHLVALGRPGEGVIDVARVEHDPRSLDALIARLVALEPDPAEVRVVLETSSGMLVERLVEAGFTVVPVNPDLIARRRGPARKKDDAGDARIACLLALDRFERLRPMVAHGDEAAELRAIARDDERAVRDERRLLNRLRADLIATFPAALTIAGDDMGAPTFLRLLERWPTANALAEASRDDLLALARAGHHGWPDRFADRVQTALAAQQFVARDWLVRAKADTIRLAAIQLLALGAQRRAWERRMGELLIGAPRSGRDLPKDNDRGPAVPGGEIYLSFPGLGDRLAARVAGEIGDIANFVSPNALQCYAGKAPVTRRSGKSELVIAHRLPATAICATPFNSGRSAACAARAGPASSTPPNGPAARVTTPPYAPWATAGSKSSGTAYNADCATTKPPTSPTATAPSTEPQHDELTYRG

SEQ ID NO: 219505 - protein, 326 aa, unidentified
MKEKGIMGTKEIYVGIDVSKESLDIATDSSNQRWSFANNDEGIAQVLSCLEKLNPTLVVLEATGGIEMPVAATLAVAGIPIAVVNPRQVRDFARATGRLAKTDSIDAKVLALFAAAVRPQVRPLPDANEQELGDILSRRRQLVEMITAERNRLRSARSKAVRTHVQAHITWLETELANIDSDLKRIIRESPIWREKDDLLKSVPGVGQVLSTTLLADLPELGTLNRRQIASLVGVAPFNRDSGKLRGKRMIWGGRAAVRTVLYMSTLVATRHNPVIRVFYQRLCAAGKAKKVALTACMRKLLTILNAMLKHGTPWHYVDSQILETF

SEQ ID NO: 219506 - protein, 361 aa, unidentified
MNTITRVGIDLAKYLIQVHAVDGAGKVVTNRAVKREKFLLWCADLPAGCLIAMEACSGAHHWSRKLIERGFDARIIPGSSVAPYRIQGRSGKNDANDAAAICEAASRPHMNFVPPKTLAQQGMLCVHRLREGLKEERTSCINRIRGLLAEFGVILPQSPEVLRRHLSDIVEDASNDIAGVARLVLQRAQEHWRELDGHIKWCDQRIADHQKNDEQVQRAAELMGVGSITASAVVATVGDFRQFRNGAQFAAWLGLTPKQHSSGGKTSLGSITKRGSVYLRTLLIQGAKAIALTRQYDNPIFLWAQKLRERAGWQKAVVALANKNARILWAVMTREKRYDAHHVSNIPLPALVTAPALVSAM

SEQ ID NO: 219507 - protein, 343 aa, unidentified
MEYFAGIDVSLEASSVCLVDSAGKIIRETKVASEPDALIEHLTSLGFALKRIGLEAGPLSQWLYEGLTRAGFDVVLLETRHVKAALSAMIIKTDRKDARGIAQLLRMGWYRSVHSKSPGSQDVRALLTGRKLLQAKLRDVELSIRGILRGYGSKVGEVSRGRFEERILELVDGHPVLETVIGAMLHARHTLWNEFTKMHREMLKIVRQDLVCQRLMTTPGVGALVAITYRSAVDDPGRFAKSQTVGAYFGLTPKKYQSGETDLDGGISRVGDTMVRTALYEAAHIMLTRATRFSALKRWAVDVAKRRGMKRAKVALARKLATVLHRLWVDETEFRWGKEASAA

SEQ ID NO: 219508 - protein, 392 aa, unidentified
MLFVGIDIAKRNHEASVIAQDGSVVRKAMRFANSQAGYNKFMDMVRSLKEPVVFGMEATGHYWLTLYTHLRNDGFTVHVINPIQSDALRGMYIRKTKTDSVDSVIIADVIRFGRYCETSVEPGDLQAMRELCRQRFYIIDMASDLKRKVIALLDQVFPEYEKLFSDTFGASSMEILSQYTTPEEMLSVSSQQLAEILEKASRGRLGAEKAVEIQNAARNSFGIVMASSSFSLIIRQYIEQIRSLEASVDVFDTEIARLLSGFDTQLTTITGVGPTLAAVILSEIGGDIRRFSSPAKLAAYAGVDPTVKQSGDFSGSRMKMSKRGSPYLRRAIWLASTVAAFKDPAIHALYERKRAEGKDHMTVIGHVCRKMISIIFAVLRDNTPYVPAAISD

SEQ ID NO: 219509 - protein, 334 aa, unidentified
MWHIGIDLHRQFIVMAAVRDNGEVMEPVKISCREPEAILDAIRPLGPFRAVIEASGTYRWLYDLLHPHGTVLLAHPLYLRAMVQRRSKTDKLDAQLLANLLRINQIPLAYAPPQPYQRLRDLTRCRARLTRDRAEAKIKLRDLLARTNLQSPYKTPFGPRGRAWFRVYDFGPIESLVRDELLARLDHYDRQIAIFDEQLTQVQADFPQADTLTDIHGIGVYSALLIIGELGEIDRFRSAKQVGAYAGLTSRVNQSGGHCYRGSITRQGSPWLRWILVEAAMKTVRKDAALKNFYTRIRKRSGAKIARVAAARKLAEICWKRLRRWEDEHVEESA

SEQ ID NO: 219510 - protein, 340 aa, unidentified
MYYIGLDVHKKTISYCTKRVDGQVHAEGNLDSTRLALDAWLPGLPQPWTGALEATIFTGWIYDYLKPHAHVLKVAHPAMLRAIAAAKKKNDQVDARMIADLLRCNLLPVCYMAPSEFRERRRTLRYRNLLVRQNVQMKNRTAGLLMETGVPYNKQKLHGKAYFAQLRKSPEVPDCIQPLLKIGRESIERIAKLDRALLKALLGDPVLLKRVERLMTIPCIGPVTALTWVLEVGEVSRFSSVKDAVSYCGLCSAERSSAGIQKRLPISKQRNKHLQTVLIEAAKLSQHFNDDLTAVHEKALAKGNKNRATIAVARKIVAYLLAVDRREKPFLEGEESAEAA

SEQ ID NO: 219511 - protein, 349 aa, unidentified
METAYDGRQVVGMDLHRRRSVLVRMTEDGRRLGTARITNSPAELRKAIARAGKSPMVVLEATYGWYRAADTLAAAGAEVHLAHPLGVKAFTYRRVKNDERDAADLADLLRMGRLAEAWIAPAEIRELRELTRYRHKLVHLRTSCKDQVHALLAKLGVPVTCSDIFGKAGSAWLDSLALPRPYAGKAASLRQIIAVLDAEITLLTQVIADLLAGHHGYQVIQQLPGVGPVLAAVIVAEIGEVTRFKTADRLCSWAGLTPRHRESDTKVTRGRVTKQGSRMLRWALIEAVQRAGGDTVTGATRDAIIARRGKQTRNIAKVAAARKLLTLVCYGLRDGQIRCLSSTPAGQAA

SEQ ID NO: 219512 - protein, 359 aa, unidentified
MRIIGCDLHARQQTVAMLDTTTGEVVSLTLTHQGNNVREFYSALPRPVRVGIEATGSMQWFVNLMEELGIECQVGHPAKIRAAEPRKQKHDRRDADLILKLLVENRFPAIWLPTKELLDLRALLRHRHQWVRMRTRIQNALQAIALAHGLRRGPSLWSHDGQSTIASLSLAPHTAHRRSELQALYRKFESDIEQLNQRVEEQAGGRPGARLWMTHPGVGPVTALATEVFLGDPTRFADGKVLASYVGIIPREYSSGGRQRLGGLSKQGNPLLRFLWGEAGAHAVRRDLELQRFYRRKLVQKGLGKARMAVARKLGIRLWIMLRDQIDYNEFCRRRQKNGDACAGMPETRYGATSHRPVD

SEQ ID NO: 219513 - protein, 341 aa, unidentified
MDTVSLVGIDLGKHCFHLHAQDASGRMVFRKKLTRSQMFALLGNFPSCTVVMEACAGAHWIARRLQALGHEAKLISPHFVKPFRQGNKNDFADAQAICEAASRPSMRFVSPRNEAQQVVSALHRVREALVRERTGTINQIHAFLLEFGISLPRGMAVIRRLPAVLETQALPPRLVAVLERLQAHFKYLDEQIGQLEHELLTQLHEDERSERLLEIPGIGPITASVLMSELGDAHQYGSARQFAASIGLVPRQYSTGGKPTLLGISKRGDKELRRLLVQCARVIMLGIERRTDSLGTWVRSLLARRHSNVVACALANKLARIAWAILAKGTHYRSAPAALPA

SEQ ID NO: 219514 - protein, 391 aa, unidentified
MVCVGIDVAKDKHDCCILDSDGTIRADCITIPNNMDGFKQLLQTIRDCTKKSDKIKVGLEATGHYSYNILGFLLDNDLAVYVMNPLHTNLYRKSLSLRKTKTDRVDARTIATMLLSDVDLKSYTDTAYHNEELKSLTRYRFDKVRERAKLKQSVSRLVTILFPELEKLVPSLHIASVYALLSEYPGAKQISEIHLTKLTNLLVTASKGRYGKDKAIQIRDAARTSIGSVMPAKSLELKHTIKLIRELTSEIDEIEVSIQKIMDELNPPILSIPGVGIQSAAMILAEIGDFSNFESPDKILAYAGCSPSTYQSGKLTNCYAHMEKRGSRYLRYALYNATKYVCHWNPVFAEYLAKKRAEGKHYNVALSHATKKLVRLIYALQKSGKAYLVAA

SEQ ID NO: 219515 - protein, 342 aa, unidentified
MKTIVSREEFFVGLDYHQDFVQVCVMDALGKILQNSKVENDWRRIVAAVPKGGTVHAALEACCGAANLADELAERAEWSVGLSHPGYVMRMKQNPDKTDYSDARLLADLLRVGYLPKVWLAPTELRELRRFVRFRQQKVNERRNVKLRIRAILRDQRLKRDDLQANPWTKKWLAAIVSIGTLGSDTHWILQQHLADLARLDQEIRAIEERLEQRVANDAVVKKLRAEKGIGLITAATLRAEVGRFDRFQTGKQLARFCGLTPRNASSGNRQADAGLIQAGNHALRTVLIEAAHRLMFHHDRWAKLAQQLKGRGKHSCVVVAAVANRFVRWLYHQMQPEALAA

SEQ ID NO: 219516 - protein, 362 aa, unidentified
MHTITVGVDLAKQVFSVCEMDERGTVRQRHDLRREAFAAWLAQRPASTTVAMEACSGAHHWARRCESYGLQPKLMAAQFVTPFRKSRTTKNDRNDAEAIATAARQGNMRFVPVKTLDQQIRLSWHRVREGDKTESLAISNRLRGLLAEFGCVVPQSDAALRQFLADLTMQDLPAELMELLGELNHHWKQVQQRIAASDRRIEQHAKADERCRRARAIIGVGALTADALVAMVGNARAFKNGRQMAAWLGLTPSQYSSGGKSRLGGITHRGDAYLRTLLIQGARSCLQCAKAVAMEKATPEQIWIKKLSARTSFGKVLVAIANKHARQLWAILARDENYDPEAWLKHPMVQRAASKKARLQTA

SEQ ID NO: 219517 - protein, 314 aa, unidentified
MNQNIPINIGIDASKAQLDIYVRGQDVFFSVSNDANGIRAAIKQIKSYDPERVIIEATGRIELAFVVAGHKAGLPVVVSNPFYIRRFAGAVGRLAKSDQLDAQVIAHYGEAVQPRLTELKPEKARLISDLLAWRSQLLEMSTQEKNRLSILPKALHVSLKRILRHLKAEIERVEQRLDKLIDELPDWQEKRDVLMSVNGVGKVLAYTLLSDLPELGMLNRKEIAALVGVAPMNRDSGNYKGKRHIRGGRAKVRRVLFMAIMSAVQSNPKLKKKYQALKAAGKPPKVPLVACMRTLLTILNVMVRNGEKWNPEYA

SEQ ID NO: 219518 - protein, 405 aa, unidentified
MGIYVGIDWAEAHHDICVLDETGTVLTKRRIAEGLEGVGQLHALVADHAAEPNQVVIGIETDRGLLVGALLAAGYQVYAINPLAASRYRERHVTSGAKSDPGDAKVLADLVRTDRHNHRPVAGDSELAASLQVLARAHQNLIWSRQRLVNQLRNNLREYYPAALAAFGTELAHPVALGVLDAAPTPARGRALSQSKLAAILRRAGRERGVEEKATAIQAQLRAPQLAAPTLVGEAYGKSVASTVRILRGINAELARLEEELAPSFEKHPDAEIYRSLPGLGIVLGARVLSEFGDDRTRFAHPKARKNYAGSSPITKASGKSRVVLARLARNRRLADACHWWAFCALTASAGARTYYHALRQRGKTHHQALRALANRLVGILHGCLDHRQTYREEIAWPRSLPVAA

SEQ ID NO: 219519 - protein, 320 aa, unidentified
MTSRGAEKMKNDTIGVDISKDHLDAYRLADGAARRFANDKRGHKALIAWLAETPANRVVFEPTGPYHRAVERALGASGVPFAKVNPRQARRFAEATGKLAKTDRLDAAMLARMGAVLELEARPGRSEALLELRELYVAREALVKDRTAARNRGKNLTLSLLKRQNAQRLEQIDRQIVTVEAAILGIIEADASLSDRFAILTSIPGVSNITAFALLIAMPELGALEAGQAASLAGLAPIARQSGRWTGRSFIRGGRADVRQALYMPALVAARFNPDMKAKYTQLIQTGKPAKLALTAIMRKLVVLANALLKANRPWQPKAA

SEQ ID NO: 219520 - protein, 421 aa, unidentified
MTQPSHNTFAAFIGIDWADAKHDGCLQAAGTAKRACFQLEHTPEAIDAWVPTLRTRFNGPPVAVCLELDKGPLVSALRQYDFLVLFPINPLTLARSREAFPPSRAKDDPTDAELQLALLLTQRDKLHPLTPQSATMRALTQLVEHRRRVVGDKVRITNRLTSTLKNYFPHVLQWFQDKDTSLFCDFLSRWPTLKAVQLARRSTLESLFRDHHVRSPEVIARRIQAIRAALPLTTDDGGIAPNALLVQALVAQLRVTLQAIADCDTAIAQRTQSHPDFPLFQALPGAGPVFASRLFVAFGEQRERYPSATALQKYAGIAPVTERSGKKSWVHWRLQCPKFLRQSCVEWAAASIRHSFWAQVYYQQQREKGKAHQAAVRALAFTRIRILYRCWQERTPYDEATYLQALPRRGSSLIQNLAKAS

SEQ ID NO: 219521 - protein, 390 aa, unidentified
MQVIDDRPEAASAIHTNLGAIFVSLELSQSTWLITSLSPGGGEKMSKHVVHGGDIAGLLERFARLQEKARARTGRTFPIIVIHEAGLDGFWIDRVLKNEGIESHVVDPASVATSRRRRRAKTDKIDGEALVRTLLAYKRGEPRVCAMVKAPTPEEEDRRRLCRERKVLITERVKHVNRLKGLLFSQGVCGYEPLRRNRRRRLDELRTGDGRPLPKHLKAQISRELDRLELLLEQIKVVETERDALLAAQQIAAPTSAAMLLAIKGIGPDFAAILWSEGLFRHFDNRRQIASYAGLAPTPWKSGSIDREQGVSKAGNPRLRTTLIQLAWLWLRHQPQSALALWFEERVVRNGGRLKKVTIVALARKLLVALWKYVTAGVVIEGAVMKGASR

SEQ ID NO: 219522 - protein, 329 aa, unidentified
MVYVGIDVHRKRSQVAVLDEAGTQLSNRNYENSSGDLRAVLDELEPGTGVAFEAAYGWGWLADLLEECELEAHLAHPSACKAIAHARLKNDKVDARILAQLLRTDFLPEAWIAPKEIRDLRSLLRHRGSLVRVRTSLKNRIHAVVADEGLKVEVGTLWSAEGETWLARVAMRPMHREIVDDCCGLLDALATPIRRLDAEIRDQAEPDPRVEALRSLYGVGLITSMTLVAEIGEISRFPTARKLCAWAGLTPSVHNSDVKVRHGHITKAGPAAVRAVLTEATYQARHVAPFAKYFEEVAKRRGKRIATVALSRKILARCFHILKSLEEPA

SEQ ID NO: 219523 - protein, 467 aa, unidentified
MVCFNPSTKLIRVRPAELIVAMPQGMSTRRKFVSYFAPLVGRGSDEECVSREVGTDMQVVHERCCGLDVHKKTVVACILITLANGEVQRHIRTFSTMTAGLLALSDWLESLAVTVIAMESTGIYWRPVFNLLEEGRSVILVNAQHMKAIPGRKTDIKDSEWLADLLRHGLLKASFIPPAPIRELRDLTRYRKSLVQERAREVNRVHKVLETANVKLSSVATDVLGKSGRDMLSALIEGTTDAQILADLARGKLRKQLPQLQQALDGRVQAHHRLLLKHILAHIIFLEETLEQLQQEIEQHLGPLEEAMTLLMSIPGIAALAAAAILAEVGDDMTRFPSAKHLASWAGVCPGNKQSGGKRLSGKTTQGNATLRAMLAEVVWVISHMKDTYLSAQYHRLARRLGKKKAVVAVSHSLLVIIYHVLSTKQPYSDLGADYFEQRDSTRLTQRSVRQLEALGYTVTLVPKEVA

SEQ ID NO: 219524 - protein, 437 aa, unidentified
MKNRAKERLEAISITTLIVGIDIAKTIHWARFTDYRGMEVGKVVSFNCDRQGFETIVAKIEEIRKAKDSRKSIEVSRQPFEQVIIGMEPTGHYWKTLAHYLLKAEYKVVGVNPYHTKKAKELDDNSQTKSDKKDTLTIARLASGGRFFDPYLPQDVYAELRVLTNARVSAMSRLVSIKNTLTAVLDEYFPEIWTVFKKPFEGKASMQILKSCPFPAFILEMGETGVLAEIKKAAKKAVGVKKARELVEAARTSIGVSYGLVSAKMRLGLLIEELEMAEKHMTEIESAMARMLHATSYAEQILSIKGIGVVTAASFLGEVGDPLRFQNARQIANYAGYNLVEDSSGKSKSGTCISKRGRSQFRSLLYKMAFTMVGQNEEMKALHKHLTSRAKNPLKKQQSLLVIAKKIITVIYSLLKNRAVYDPALALGAVRRERMAA

SEQ ID NO: 219525 - protein, 413 aa, unidentified
MDVLHTNCAGLDVHKKTVVATVILSKERGKPLKATRTFGTMTEDLLALSDWLMSYGITHAAMESTGEYWKPIYNILEDNFEVWLVNAQHIKAVPGRKTDVKDSEWIAELLRHGLIRASFVPPKGQRELRELTRMRSSFVKERASLVNRLQKVLESANIKLASVASDVNGVSGKAILQAIIGGRSTPEQMSELAQGRLRGKRELLSRSLQGYVKPHHRFVLSELLLHIDGLDETIARFDEEIREYCRPFEEAVALLDTIPGVARRTAEVIVSEIGIDMSRFPTDNHLASWAGVAPGNNESAGKRLSGKTTKGNQALVSALTQAAHAASRVKNTYLYAQFHRLAGRRGKKKAIIAVAHSILIIAYHMIQDKEPYRDLGSDFFDKRNLQATTKRMVRRLEHLGYKVNLEVLTPLAT

SEQ ID NO: 219526 - protein, 349 aa, unidentified
MLHIGIDVHQKSSVFNVFDPAEGREGGTHRSQKAETTAEGFRKVLEPLAGRCEVVYEVGPMAQWVAALVRPYAAKLTVANPSQIPWLFRAGRKNDRIDAKKLSILSYLKQVPKVHLPPPEVSEWRGLINERRQLVSKRTRAKIQIRALLHTQALHCPHKSVWTRCGMIWLKALKLKQILKGRITRLLDELEFMIGQITALEKQLNERAETQPAVALLRTIPGIGPRSAEALVAYTDDVKRFSNRKQFGSYFGLTPTEDSSGERVRRGRISKRGPSVVRWVLVEAARCAIRCCPAFRAFAERLARGRKDRRKKAVVATARKLTAIAFGMLRSGEVFDIERLAPPQTKPAA

SEQ ID NO: 219527 - protein, 341 aa, unidentified
MSDYSYFCGIDLAKNHFSLHAVDQNGKVILHKSVTRSKLLTTIANMPLMRIGVEACGGAHYWARTLNKLGHDARIMAVKYVIPYRTKGKNDLNDAVAICEAVQRPSTRFVPVKSPEQQAILSVHRMREHWVRERTTLMNRMRALLSEFGLIIPVGRSSLMKHVPLILEDAENELPHLARTVIADAYHHLGELNQRIADTEQVFDSFAKVSTNVQRVMKVRGIGPQTATAILASIGNGSQFDKSRDFSAWLGLVPKQYSTGGKPRLGRITKHGDKYLRTLLVHGARTVIANLGDKQDKLSQWCRGVLERRGMNRAIVALAAKNARIIWSLLHNQTEYENYAA

SEQ ID NO: 219528 - protein, 338 aa, unidentified
MKLYGGIDLHSNNSVIALLDEEDRAIYRQRLGNDLGLILSKLAPHQASLEGLVVESTYNWYWLVDGLMEAGYRVHLANTAAIVQYEGLKFSNDDSDACWLAKLLRLGLLPAGYIYPKEERAVRDLLRKRSQLVRQRTANLLSVQNLLARNLGHAPGANAIKRLSPEAVDQLLPDRHLALAVQSNLAVMQALDAQITALEPVVRAEIRPRPEFQPLRTVSGIGEILGLTIVLETGAISRFDTVGDYASYCRCVGSERLSNGQRKGRGNTKNGHRYLAWAFVEAANFAVRYNAQIKRYYPRKCARSNGIVAIKTVAHKLARACYYILRDRVPFDVNKAFA

SEQ ID NO: 219529 - protein, 402 aa, unidentified
MNAVGIDVSKGKSMVTIMRPFGEIVSAPFEIKHTASDIHSLVELINSVEGESRIVMEHTGRYYEVLAHQLSEANLFVSAINPKLIKDFDNDSLRKVKSDKADAVKIARYALDKWQNLKQYSVMDELRNQLKTMNRQFGFYMKHKTAMKNNLIGILDQTYPGVNTYFDSPARSDGSQKWVDFASTYWHVDCVRKMSLNAFIDHYQNWCKRKKYNFSQSKAEEIYGKAKELVPVLPKDDITKLIIKQAVNQLNSASTTIESLRTLMNETASQLPEYPVVMAMKGVGTSLGPQLMAEIGDVSRFTHKGAITAFAGVDPGVNESGSYEQKSVPTSKRGSSDLRKTLFQVMDVLIKTHPQDDPVYQFIDKKRTQGKPYYVYMTAGANKFLRIYYGRVKEYLSSLPES

SEQ ID NO: 219530 - protein, 286 aa, unidentified
MLTIGVDAHKETHVAVAVDAAGQECGQWAGPNSAEGWAAIRAWAQGLGAERRWGIEGAWNYGRGLAQALVTAGELVHEVNARWTVKERRRARNRSKTDQRDAQAIALYVWREGTMLPPVASEDDSAVLEVLVSQRDAAVAEATRLRNQAHHLLLQCDPSYRKHVPALTTEEGIAALEQYQAPATSVLAQTRAAAVRMLGQRLRLAVAQAEDLKTQIEARARAGFSPLIQLKGINALTAGALAAILGPGRRFRTDADLALYAGVAPLEVSSAGRVRHRLNRAGNRQP

SEQ ID NO: 219531 - protein, 378 aa, unidentified
MYIAAIDIAKFHHDAIVVDDDTGAIVVEPFRFGNNDEGFKTLMQNIRPYLKGKHLIGFESTGHYGHNLTMFLLDHKLTVGIVNLLSTKTDRIDCYVIYKVLSSRDYARMSRKKLKLQEAKTLTRAYNNLMEDITLYKNRLQKCVDIAFPELNGLVTPYTKRYNAILKEFGSAKVVAKTHLGTIKKVLSIKGRGNHTKVDPHELKTLAQRSIGQNIDANNLEIEYLLGMIEFLEEKKKIYTKKIEEYARQLNSPIFSIPGIGYTTGLSILSEIGDIALFSSATKVVAFAGVDPSVYQSGEYQGNGLAISKRGSRYLRKALYQCILTVCNNSSTFKNYYNLKKSQGKTHLCAQGHCVRKLIRVIYKLLTQNIKFDETALV

SEQ ID NO: 219532 - protein, 361 aa, unidentified
MKSTTIIAFDQHAATTVAAVLLPDHRTPVLHPLSSESATILRFVERVRRQGPVRCCYEAGPCGFELRRALAAREIPCDVIAPALIPRRPGDRIKTDRRDAGHLAVLYRAGALTAIHIPTAQEEAARDLLRCREDIRADLLRARHRLSKFLLRHGRRFTGTKKAWSKRHDAWLRAQTWPLPTLEQTHRAYLRAVDEVLARLRAIETDLLALLDLEPLRPRVQRLRCFRGIDDLTALTIAAELGDPHRFATAPSTMAFVGLVPSEHSSGTKRVQGGITKTGNAHLRRVLVESAWHYRHHPFVSATLRARQRGAPASVIARAWTAQQRLYRRYQRLAVRGKPKQHIVTAVARELTGFLWAALIQ

SEQ ID NO: 219533 - protein, 368 aa, unidentified
MSKIARIGIDTSKGSFELHGVDEKEQVVLRKTLRRKQLLAFLAELEVGEIGLEACGASHHWGRELRQLDHRVVLVPPQYVKRYVARGKNDKNDAQAICEAMSRPWVRERLVPIKSLEQSAGQMLLGVRNGLIKRRTQLTNSIRGHAAEFGLVAAKGLDKIEPLLARIAAAESLPALAREMFATLGEDYAGLAIRIARIDKRLMAFHRDNQLSRRLMEVPTIGPVGACLWVTKVVDPHAFRSGRNCAAWLGLTPKDHSTAGKQRLGSITRAGDESLRATLVSGATAYLRHIRSGRITPSPWLAGLLQRKPPKLVAVALANKTARIAWKLMTSGERYDPQHRLAREGLGASQYGGLRAKPLAPPIDRDAA

SEQ ID NO: 219534 - protein, 415 aa, unidentified
MVVCRANNTSCRTEKDVAQPTLWAGIDAGKAAHHCVAINTGGQRVLSERVINDEGALLDLIRAVKELADGGSVQWAIDLNSGGAALLITLLLDDDQDLLYIPGRTVHHASGAYRGDGKSDAKDAAIIADQARMRRDLLPFRHRDKTAVDLRILCARRTDLASDRNRAINRLRAQLLEYFPALERAFDYAHRKAALILLTGYQTPDGLRRMGAPRLERWLRDRQAYNAGDLAARAIEAANLQRTTVIGQHVAAAVVARLAQTILDLNTELADVDTMIEETFQQHRLAAIIVSMPGFGSLLGAELLAATNGDLASFNTADRLAGISGLAPVPRDSGRISGNLKRPRRYDRRLLRVFYLAANNSIKTSPESRDYHDRKRSQGKRHSQAILCLARRRLNVLWAMQRDQTSYQPGMPRAA

SEQ ID NO: 219535 - protein, 412 aa, unidentified
MVETIVERPAALDVHKAQVTACVRVPADGGGREQHVAEFQTTVPDLLALRDWLAAHGVTQVAMEATGVFWKPVWAILEDEFELLLVNARHVKQVPGRKTDVSDAAWLCQLLEAGLLKASFVPPKPIRTLRNLTRYRKSQIQERQREANRLHKALEDTGIKLDCVASDILGVSGRRMLDALIAGTTDPVVLAELAKGSLRRKIPALRQSLEGRFDRHHALWIGAILNHVDFLDEQISALSEAIEEEIRPFVAAVKLLCSVPGIQQRGAECIIAEIGVDMSVFPTSKHLASWGGQCPGNDKSAGKRRSGKSRNGSKWLDYALEEAAMAAIRASENYLAAQYQRLRPRRGHKKALGAVKHSILCICWHMLATGELYNDLGGDYFHRRDPERQTKRLVKQLEALGHTVALQEAVTA

SEQ ID NO: 219536 - protein, 420 aa, unidentified
MNNPILSSLFIGIDVDSIYNVVHMMNFNQKDLNHFKVKNDLNGVTAIKDNTIETTKKYNFTNVIFVLESTSIYAFHIATFLSSNEELLIYNPKVYCINPKISCNYRASFADTNKDDFTDAKLLVDLARVGRCDKLTPWKGAQFLALQRLTRHRKHLADMLAREKNYILNNIFLKFSGLCTASSSESPFSDMYGATSTAILTEFLSPEDIINTSIEDLVIFVNDKSNNKISNPEETIKLLKQCATNSYRLDKVNLLPINLAITSSLNCIRSFENEIKAVSREIQALIKGFNNEEYICLTSIKGIGPVFAAGIISEIGSIDQFDDDDALAKYAGITWRKTQSGKFESEDNPLTKTGNKYLRHYLIEAANQVRKFVPEFNDYYNKKYNEAKPPKELRAQILTARKLIKVIYALMKNRLLYKSR

SEQ ID NO: 219537 - protein, 364 aa, unidentified
MNKCHVNTELSSLEETRCQFNGGSGAIKLGIDVHQDFYVVVMQEGGTNPKPPQRFPKQGFLRWAEQLPRRGQPVHALYEACGFGFGLQRQLSSLGIHCHVVCPQKLDEQNKRVKTDGLDAKALCLKLDRFVEGNRAALALVRVPSEAEEQARALHRQREQLVKVRKQLEAQGRSLMVNHGLEPIQQWWKPRAFAALDVPPWMKHLLSNTQPTLIGLQQKIAALSLQLQAAAEPRQPRGLGLMTSVIIDREIGDWHRFRNRRQIASYTGLCPGEYSSGKSRLQSCITKHGNPRLRAALVELAWRLVRFQPNYKPVQKWRAILAKGALNTGAARKKAIVAVARQLAVDLWRIRTGQLTPEQLDLTF

SEQ ID NO: 219538 - protein, 406 aa, unidentified
MRRTDHRAAHPRSAAHAHDTALFVALELSRSTWLIGSSTPGSERISKHQVRAADTTALLVLLKRLKARAERSCGTTVRVISIHEAGLDGFWVHRFLEANGVESHVVDAASIAVNRRSRRAKTDRIDVEKLLDTLIEWARGGRRACSMVRPPSPAEEDERRLTREREALVIERTRHVNRIKGLLATQGVFGFEPMRKSHRRQLEHLHAWDGQTLPPRLKAELARELNRLELVISQVAAVEGERDRALKAQQHPAPSISAPEATASASAQPTATEHAGRLLLRLRSIGPEFASVLSSEAFYRNFSNRREVAGYAGLVPSPWKSGGIDVEQGISKAGNARLRKTMIQMAWLWLRHQPGSTLSRWFHERIGDQRGKIRRITIVAVARKLLIALWRYVTLGLVPEGAELKA

SEQ ID NO: 219539 - protein, 343 aa, unidentified
MQSISTIGLDIAKSVFQVHGVDAAGQVVLRRQLKRRHVLAFFQKLPPCLVGIEACASSHHWSRELQALGHTVRLMPPAYVKPYVKRQKNDSTDAEAICEAVTRPNMRFVPTKTAEQQSCLMLHRARHLFIRQQTAVINSIRAYLAEFGIVAPVGRRGVEQLLEVVADKAEDRVPEVARMCLDALGGQLRALKAQILEFDRRIIAWHRSNTMSKRLDAIPGVGPALATALVASIADPKAFRSGRDFSAWVGLVPKQSSSGGKDKLGSISKQGDRYLRSLFTAGALAVIRYAKIHGTDHRPWLTRLLARRPTKVAAIALANKLARMAWAMMARNERYQEPAALAA

SEQ ID NO: 219540 - protein, 411 aa, unidentified
MARGWERVLCQDTLRMISSRRNASPFPKSFFNSEQYLEILKKQKSRIRLREKNTKKQCQTTRNEDRSKGDEMEIIKQVIGIDIAKDTFVCRIGIIFINQSIEISSSKEFENTKKGIQAFHAYAKGRKIKGIPQRYLMEATGVYYEALAYYLHAKSEFVIVILPNKTKAFAKTLAIKSKTDSIDAQILTQMGLEKILDKWAPPSDLMKTLKSLTREHLEIKSSKVQAQNRMHAKSFSFKPGKDALRRLRKEIAFYNQLIKEIESSILDLLKSDEQIWRKVENINQVKGYGIMSIAKILAETNGFALFRNHKQLASYAGLDVVLRESGHFKGKTKISKKGNSHLRMGLYMPALSATRSNPKMKAFYDRIIAKGKPKKVGIIAVARKLLVLMYFLWTKDIEYISNYNHQSIAHS

SEQ ID NO: 219541 - protein, 438 aa, unidentified
MSNKVFFNLDELFISVGIDVGADFSWMSIALPNQQFVGKPYKILHNSIDSLTTAVSKIQEAEELYSLESRIFLESTGIYHYPLFCYLRDKGFNCSVINPIITKNSTNINIRKVHNDRFDSKKAALVGLKPDLKVSLMPSDLALNCRNLCREYYDLMDNRSAYVNKLQGELRMAFPQYLGIFSKVTINTSLTLLETYTSPSAFLKADRQEIIDIIKSTARFGITYAQNKYNAIIQAATDANQFGYIIDSNIKRIRLYISFIRKYDEEINSILESLHELVDANEDSDFVKQIHLIETFKGAGFLSAVSIMGEIGDFSAFSKPKQLFAYFGLDPAVKQSGKFEGTKVQMSKRGSAIARRVIHTLTLQSISISRNREAKNPVLREYYLKKCDSKPKLVAMGAVSHKVCNMIFAILRDNKPFKIIAPQEHIKQYNSAKCDIAA

SEQ ID NO: 219542 - protein, 352 aa, unidentified
MVVAVQYRSPSLNKNVMVQIYGIDLGMSSFDVSFLSESGSVRHLSGVKNTVHGISKFLLSLPSSAVLCAEHTGVYGDLLLRLCTLNRTCLCFVPGYQIKHSLGLQRGKSDPLDACRIREYAERFYDLLRPCFYPGEEMSELQELYRTRSLLVESRKRLDTLNIGDNCKSSVSLAADHARRAVLAELNTQISGLDHEIEALIQNSSEFSRNYQILTSIVGVGPVTSCELIIKTENFRKLDTAKKCAAYAGIAPYPKESGKMKCGHKISPMGDKQLKTLLFLCARSAKEHNKEIRLYFLKKHKVEKKHFFVAMNNIANKLLRLIYSLIQKQQTYDRDYIQRDPRCVVISDTNKC

SEQ ID NO: 219543 - protein, 420 aa, unidentified
MMNSNNTYPIHPRMTRTYVGCDSHRDSHTLVFQNCFQEVLGEITIGSAPSEFPKFIKRAKKYLLPDTTFAFGFEDVSAYGRAFVKYLVEKGYLVKHVDASKVATARGQVLHKTDSYDAECAGRVLINEFDKLPDANPQDKYWILTSLVTRRNFIVKINVMAKNSLHSAIAESYPHYKKFFSRLTTDSALAFYEAYPSPHHLDNVTVEELTAFLHTASKGRLSTTKAELILTTVKRDQVAQVEYQDTKDFTVRSLVRQVKNNLSELAAIDDEIEKILAHFNYPLTSIKGIDQLTAAKLISEIGDINRFKNAKALAKYSGVSPVTFASGMTKLEMANARGNRKLNEIFYRIALTSVMPIGINKALINPIFYEYYHKKIGEGKLKNQALKCVQRRLVNIIYSVMKHQRPYENPPLGNVPVVTA

SEQ ID NO: 219544 - protein, 280 aa, unidentified
MAVTIVEAAPTVVGGVDTHLDVHMAAALDGIGGLLGVEPFPATPAGYRMLLAWMGSFGAVARVGVEGTGAYGAGLSRFLRRQGVEVIEIDRSNRQARRQHGKSDPADAIEAARAAHNGRARGLAKSRDGNVEAIRALLVAKRSARAVRIKSVNQIRQLTFTAPDALRERMRGLGTVPLMVEAASLRPRPDAGTVVYSTKVALQTLGRRAVSVDAEAARIDELLGELVADTAPSLLDVFGVGVDTAATLLVAAGDNPQRLRSEAAWAHLCGVAPIPASSGR

SEQ ID NO: 219545 - protein, 318 aa, unidentified
MNTKINQSINVGVDTGKTQLDIHIRPLDLFFSVENNDKGIKKALKTIKSHSPERIVIEATGRLEMPFVLACAEAQLPIVRANPVHIKRFSGAIGRRAKNDRLDAELIAHYGEAIKPALTVINPKNIRLMSDLVIRRNQLLSMQTMEKNRIQILPASLHPTIKPMLTTIKNQITKLEEKLVKLIEDSPEYQAKNTILQSVPGIGNIAAASIISNVPELGYITNKQAASLIGVAPTTRESGRYKGKRVIQGGRAQVRTVLYMAMMSAMQCNPVFKATYARLVAAGKPKKVAIIACVRKMVVTLNSMLRDGAMWDENTAKN

SEQ ID NO: 219546 - protein, 423 aa, unidentified
MMKLKYSICCGLDVHKNVIVATIVTTNKDGISEYKQKSFSTINSDIQKFHNWLIENNCYHVCMESTGKYWIPIFNYLESDIDVCLTHPKYVKAIKGKKTDKKDSKWIADLYKFDLVRCSFIPPKDFRQLRELSRYRFKLVCMKSSEKNRIQNCMTVSNVGIASVLSDPFGKTATEIISYLLEHTADSMDEKAVRKLIKKGAKSKSDEIIEAIKGYTIETDQAKKLELARGHLEYLDDMITQTEVELYVRIKSYYEFVEFVSTMPGMTELSSTIVLAETGVDMDIFDDAKHLCSWCGLSPANNESAGKKKSVRIAKAGDYLKPMMVQCALAAIKSKKQPYFAIKYGRIKKRRGHKKAIIAIARMMMVCIYHMVSEKKPFTPTDYEELMDPQNHVERVVLNENNVFAYLESLGYDSSKLVKRNDN

SEQ ID NO: 219547 - protein, 341 aa, unidentified
MANAALIGIDLGKQCFFLHAQDRRGNQVWRKKATRKQLYELLATCPACVVAMEACAGAHWLARKCQSFGHQPRLIAPQFVRPFVKGNKTDFADAQAICEAACRPTMRFVALKTTQQQTLLALHRVRDALVTERTATSNQIHAFLLEFGISLPASALAITRLPLLLDDPANALPPLMVALLHRLHRRHAQLAQEISELDTQIKRQVIEDDAGRRLLTIPGIGPVTASNLLAMAGDMDGFKRGRDFAASIGLVPRQHSTGGRPTLLGISKRGDKHLRRLLVQGARSVMRVIDRRHDALGRWAQELLRRRHSNVVACALANKMARIVWAILAKGGEYRAQPDIA

SEQ ID NO: 219548 - protein, 412 aa, unidentified
MHDFKKFVFVGIDPHKDQHVAIMVDHWGEVFLELSFPNQPKGFQDLLDQVETHTPKDRVAVFGIEDTGGLGRPCSQWLTLRNKLVKGVNPVMTSDRRKRWPHRAKTDKLDAAAVAKVLIENFNTLPQVTEDQYYHGLRELINRRTQLVKTRTRYKNEFHRLIHGHYPDYKQIFCDPFGSTALAFWHKYPHPSSLQEVGVKRLGSFLQKHARNMSTKKATEILSSIDKTQSVSLEARINIPIIRQLIESIQQIDRHIKEIETLIAETLEQCNLHLDTLPGVADVTVASLLARIGPIKKFSSADKLARHAGIAPEDDSSGNKKRHRRSKSGDRQLNAVIHQIALNQISISKNGTIKCPAAYEYYQRKISEGKTKLSALACLKRRLCDIIFAMMRNETRYKHPQPNINFKHSVAQ

SEQ ID NO: 219549 - protein, 354 aa, unidentified
MTVYCGVDFHARQQTVCYCDTADGEVKFNELKHNREDITAFYGGLNGEVIVAIEATGYSRWFEELILGLGHQLLFGNPTLIRRRAPRKQKNDRRDAELILTLLIKGELPIVQPHPAESGEVLRQLRYRHKLVKVRTLAKNSLHNISISAGCSLQKSMLYKGRAKLEALKLPEDLGQQRTQWLETIERQDKLVDEIESWLEKKAAGDRLVQLLQTHPGIGLISSMVIRHTLEPLTRFSTTRKVVAYVGLDPVEDSSGERKRFGSISKAGSRLLRFVLGQAGLVACRRDESLKRFYKRIAAHRNHQTAKVAVARKLLVRAFIMMRDEIDYAEFIRRGVEARSARVTQRPAVQSSHQ

SEQ ID NO: 219550 - protein, 408 aa, unidentified
MLFVGDDWAEAHHDVEIQDETGRALARRRLPEGIGGIAALHALLADQLPGDAEPDQVVVGIETDRGPWVQALLAAGYQVYAINPLSASRYRERHVTSRAKSDPRDAKVLADLVRTDRRHHRPIAGDSELAEAVKALARTHQNLIWTRQRQTNALRSTLREFYPAALVAFDDLASRDALAVLAKAPTPTAGAALRVTQVEAVLRAAGRQRNLHTRAEEISAALRTEQLSAPPLVAEAFGAAVAALVAVTAELVRQTAAVEAKLAAAFEQHPSAEILRSLPGLGPVLGARVLAEFGDDPHRYADAKARKNYAGTAPITRASGKSRVVLARVARNRRLADALYQWAFSALSSSPGARAYYDAHRARGATHHAALRALGNRLVGILHGCLRRHQPYDEARGWQQHAAVPRAA

SEQ ID NO: 219551 - protein, 347 aa, unidentified
MRFYTTQHPFYCGIDLHARTMYVCILDQAGETLLHRNMTATPEALLKAIAPSRDQVVLGAACMFTWYWLADLCADHGIPFVLGHALYMKAIHGGKAKNDKIDAHKIAVLLRGGMLPQAYVYPAEMRATRDLLRRRMHLARKRGELLAHVHNTNSQYNLPAIGKKIAYKANRDGVAERFADPAVQKSIEVDLALITYYDELLRDVELSIVKTAKHHDANTLYLLQTVPGIGKILSLVLLYDMHDVERFPRVQDVASSCRLVKCARESAGKRSGTSGAKIGNAHLKWAFSEAAVLFLRANPAAQKLLARLEQKHGKGKALTILAHTLARAVYYMLKRQTAFDLHQFLHA

SEQ ID NO: 219552 - protein, 420 aa, unidentified
MAGVVDIVYPICCGMDVHKNFLVACIAITDERSHTTHQVRRFSTFAGDLRRLADWLLENHCCDVCMESTGKYWVPVFNVLEKTCNVCLTHPKYVKAIKGKKTDKRDAKWISELFKCDLVRSSFIPPPDIRQLRDLCRYYMKLTYMCTSEKNRAQNCLTVCNFKLDAVFSDVFGLSASRIIEKLIEHGNSDFDFASLIDGRCKSTAEEVEAALEGELNFAQTEKLKFIRQHMDSLSNLKGALESLILQLASKYQPQIELLLTVPGIREPLTAIRILAEIGADMSVFETSKQLCSWAGLTPQNNESAGKKKTTRIGRAGVYLKPLLVQIALAVSKSDKHVELKSKYQILKKRRGGKKATIAIARKLLTAIWHILSKNEVYNAELYHKADKPPVNRELTPEHAFSLLRRQGYIIKDGDLAPPT

SEQ ID NO: 219553 - protein, 318 aa, unidentified
MDKDVYVGIDVSKTELVVAVRPSSESFTLAYHRAGLKQLVGRLGELKPKLVVVEATGGLQRQVVGALWTGGIAVAAVNPSWVRSYARGGGLLAKTDRIDARLLALYAQREQPVPRPPLDAETQALQELATRRDQLLEMRVAEQQRLKRSSAQVRKELRQHIAYLEGRITQIDDDIDKTVRRSEAWRRKSEVLRSFPGVGKVFCTTVLAKLPELGTLSGKAAAALVGIAPFPDDSGGRRGRRVIRGGRYPVRSKLYMCALSAIRCNPVLKQFYERLRARGKLEKVALVAVMRRIIVILNAMLKTNTIWRQASAAALEEN

SEQ ID NO: 219554 - protein, 343 aa, unidentified
MQTVTTIGLDIAKSAFQVHGVDAAGQVVIRRQLKRRYVLAFFQKLPPCLIGIEACASSHHWSRELQALGHTVRLMPPAYVKPYVKRQKNDATDAEAICEAVTRANMRFVSTKTREQQGGLVLHRTRHLFIRQQTAVINAIRAHLAEFGIVAPVGRHGVEELLNVVADPNDKRVPEIARACLSALGAQLRRIKEQILEFDRMITTWHRSSETSRRLDDCPGVGPALATALVASVADPKAFRSGRNFSAWIGLVPKQHSSGGKDRLGSISKQGDRYLRSLFVAGALAVIRYAKIHGTKHRPWLTALLARRPTKVAAIALANKIARMVWAMMAKGERYKEPVALTA

SEQ ID NO: 219555 - protein, 354 aa, unidentified
MQKDTRDTVGLDTGDKNSVTFVIDPDGEKSEQASIRTTKTGIHRYFANREPCVVVLEAGTHSPWISEQLEGYGHEVLVANPRMLPLIYRSNDKDDQNDAERLARLARVDRSLLKPLKHRSSAFQETLSVIKGRDVLVRARTRLVTFCRGIVKATGTRLSTCQAASFHKLRDEVPESRRQAVEAVMTCLEVITQQIKILEKSIETECLDNHPDALPLMQPHGVGPITALAYVTSIEDPHRFKKNRDIASYIGLRPRRAKSSESDPQLRITKAGNSYLRRLLVGSAQRILGPFGEDSDLRTWGLRLCQRGGKNAKKRAVVAVARKLAVLLLALWKTQAKYIPTRTEKEPLVQSTAA

SEQ ID NO: 219556 - protein, 401 aa, unidentified
MNAVGIDVSKGKSTVAIMRPYGEIVASPFEINHTEDDFKKLVSQIQKLHGESRIIMEYTGRYYEPLANYLYNAGLHVSVVNAILIHDYSNSSIRRVKTDKKDSIKIANYGLDRWLDLPDYMPEDELRQALKVYNRQCSQYAKLKVVLVNNLIALSDQTFPGIDSLFGKTPRQDGHQKLIDFIKSYWHKDCIIKKSFKSFDNSYKKWCSKNGYHYQSNKTIDIYQLAYEAVASMPYNANTELIITETANELISLVDTLERLRIEMNRIASQLPEYPVVLSLHGVGTTLGPQLIAEIGDVRRFHNRKALIAYAGIDSSPYQSGTIDIKSRGISKRGSATLRKTLFTVMDCILRHKHTDEPVYQFLDKKRAEGKHYYVYMIAGCNKFLRIYYARVSEYLNSLEK

SEQ ID NO: 219557 - protein, 353 aa, unidentified
MEEVTIIGIDLAKNVFQLHGAAADGRPVFRKKLTRLQFQRFMAAQPPRIVAMEACPGSHYWAREMAALGHTVKVISPQYVTPYVKRQKNDAADAEAIAEAATRPHMRFVEPKSAEQQARAVVFRVRQKAIAQRIELVNALRSHLYEFGYIAPVGLQHLPKLVAVLEDETSDLPGPARIACRGILRQIESLGGEIAALDAQIAELSKESRWARLLQTMPGVGPITAMAIEAFAPPMETFRRGRDFAAWLGLVPRQSSSGGKARLGKVSKAGQHDIRRLLVIGAMAAMVGACRRGIPEDTWLGKLMLRKPRILVAIALANKMARRIWAMLTKGESYRDPALAGVTPPPDSRISGM

SEQ ID NO: 219558 - protein, 354 aa, unidentified
MSEKLNTTVAVMGIDIGKNSFHVIGLDARGAIALRQKWSRGQVETRLANMPPCLIGMEACVGAHHLSRRLKTLGHDARLMPAKYVRPYSKGQKNDFRDGEAIAEAVQRPTMKFIATKTAEQLDLQALHRVRERLVSQRTGIINQIRAFLLERGVAVRQGLRFLRAGLPQILATRTDVLSPRMVHVIEARAGDWRRLDERIEGLSADIETLVQHDPACQRLMTVPGIGPIISSAMVAAIGRGEVFSKGRDFGAWLGLVPKQTSTGDRTILGRISKRGNRYLRVLFVQAAWVVLIRPKSWERYGLKPWIEAAKKRLHRNVLAIALANKLARIAWSVLAHGRNFEVRKIDEAAAQSV

SEQ ID NO: 219559 - protein, 474 aa, unidentified
MARTRSRPASPPVPGDAGAEVTDEPVQVISRAAAIDVAKGSGMVCMRLPHESRAGRRTQKVWEVTATFASVVALMDHLVCQGVERLVLESTSDYWRIWCYLAEAAGLEVWLVNARDVKHLPGRSKSDRLDCVWLCKLNEWGMLRRSFVPPEPVRDLRALTRLRANLTHDRVRHQNRTGKILEDALLKVSSVISDLMGGSGRRFLQALADAGRSPAALAALGDYRLHASKAELKEALTGRFREIHGFEIGMLLELIDDLSAKITELDERIEAQLENVPGLGGVCTSCGQPGPDGPCTGCGEPVLGVIARLDEITGIGRGAAQVIVAELGTDMTQFPTPGHAASWAKLTPRAIQSGATSKAGRTGKGSPYLRGATGVAVMTAARTETFLGARYRRHARRRGKQKAIVAGCRTIIEIAWRIIADPGFRYIELGPDYHDQLDPRRKTRDKVRQLEKLNPGMTVTLTPRPEPGGQAPAA

SEQ ID NO: 219560 - protein, 261 aa, unidentified
MERYIGMDVHAASCTLAVISDKGRKLRDFVVETNGQALVEAIRMIPGHKHLVFEEGLQSAWLYETLNPHVDDTVVVGITTSRGQKSDKSDAYGLAEKRRIGNLAKSVFKAPRQFTRLRELSRVHMTLVSDTVRVQSRLKSLYRSRGILVAGANVYGVRHREEWQSQLPSSIQTRATRLYDHLDFLLDQKKQAEADLLREAKKRTIFGILETAPGFGPIRTARLIPIVITPHRFRTRRQFWSYCGLGIVTRSSSDWVQTAEG

SEQ ID NO: 219561 - protein, 356 aa, unidentified
MEYIAFDAHKHYTVASVERPTGEVVREIRLSHQRGTIREFLAQWTPGSPVAVETVGNWYWLVDEIEEAGMTPRLVHARKAKLMSGMINKTDKLDVRGLNRLQRTGTLPTVWVPPAEVRDQRDLPRTRMVLVRTRTRFKNRIHATLAKYALTVTDVSDLFGKQGRALLTGKLAQLPPHTRFATDHLLEQLEVLNKQIAEFEDRMREVFQKTPALEWLMSLPGVGFILGMVILLEVGDVRRFPDAEHLAAYAGTTPRVSASGGKIRFGRLRPDVNHYLKFAYAEAAEVICRHRAHWPQRHVSQLYTRVCHRKNHAKAIAAVARHLAEATYWMLMKEEPYQEPKRRPERVHEGVSAAHP

SEQ ID NO: 219562 - protein, 359 aa, unidentified
MEAQVKKIDFTGQNIYAGFDVHKKSWKVTIMAEDTFYKTFTQPPNPEVLYNYLKSNFPGGNYHSAYEAGFCGFWIHDKLTSFGVRSIVVNPADIPTTDKERVQKEDKRDSRKIARSLSSGTLIPIYTPTIQTQRDRSLLRTRTMLVKDMTRYKNRIKSFLFFYGINIDDVFTQSKTHWSNRFMSWLESLEFDVESGKEALHLLISEFKNLRSSILKVTQQIRALSQTPTYKEQVTLLKSIPGIGLLTAMTILTELETIDRFSNLDKMCGYIGLVPSTKSSGEKEKNGDLTSRGHGVLRSAIIESSWTAIRNDPSLMKSYLTYLQRMDSNKAIIKIAKKLLSRIRFVLTNKVAYQRFIEQ

SEQ ID NO: 219563 - protein, 394 aa, unidentified
MKLVGIDVGKNSHHFCVMDKETGELNVTPSSFPNNKEGFDFLINSLKPYSKKSILIGMEDTGHYHVALLKFLLSNGYTVALINPKTTDLTRKMEGGITKNDKLDTITICDVLDTPERKKQYRITKVDRFDLYEQRQLTRHHHNLKEELNVYCNRLQKSIDLVFPEFNTLFSSKYGVVYMNLLKTFGSAEAIASTDIRTIRKCFEIKGRGGRISLTAEKLKECAKNSIGISSEVETIQIKHLVRQITLIKEQIAEIDKKIEEFSITNNSPILSIPGISHFSGTSILAELGDIGNYSKPSQIIKFAGVAPYHYESSQYNAQHTGITKKGSKYLRKTLYQIILTVINNNPVFKKYYLLKISQGKGHRCAQGHCIRKLLRIIYHLLETGQSFDPALLR

SEQ ID NO: 219564 - protein, 414 aa, unidentified
MKLYVGIDVSSKELEACFMGSDGEKLQTLTVANNLQGASHLRDRIVAAADKHAVTEIHIGLEATSVYSWHPAMYLHEDPALKARKAKVFTINPKLVNKFKEAYPDMDKTDRVDAWVIADRLRFGRLTTTIVMQEQYVALQRLTRMRFHLVHSLTREKQYFLQNLFYKCNAFTTEVESSVFGHAILEMLSEKYSLDDIAAMDVADLADYLRDKGRNRFPDPDNVARCIQKAARASYRLSKVVEDSIDLVLGTSIQTIRSIQTQLKDLDKAIERILDGIPGAKCLRSIPGIDKVYAAGILAELGDIDRFHDQAAVAKYAGLTWRKNQSGAFEAEDTKRIRSGNRFLRYYLVEAANSVKNRDPEFGEYYRKKYAEVPKHQHKRALVLTARKLVRLVDALLRNDQLYTPRRKVTTAKD

SEQ ID NO: 219565 - protein, 338 aa, unidentified
MPLYGGIDLHANNSVVVLLNEQDQVIYQHRFANHLPEILEGLALHQADIQGIVVESTYNWYWLVDGLMEAGYRVHLANPTAIQQYSGLKYTDDHSDARWLAHLLRLGVLPEGYIYPKAERAVRDVLRKRAHLVRQQTAHVLSLQNIIVRNTGVRLSAKRIHALTLEEIERLLPVPEHVLAVTSSVVVVHCLAQQIKTLEKMVQQRLKHTSAYAQLQTVDGIGPILAQTIVLETGDMRRFPTVGNYASYCRCVGSTKISNGKRKGQGNIKNGNPYLEWAYMEAAQFAIRFSPTVQRFYQRKQAKSHLMIARKAVAHKLARACYYIMRDLVPFDVHKAFG

SEQ ID NO: 219566 - protein, 435 aa, unidentified
MVQRGRQASYRRHCEEHLRRRFHGGWIAAKSEARLRLLKPLNLETTMLLDHPADGPTAIRTHIGAIFVSLELSRSNWLVTSLSPGKGEKMSKHSVTAGRVAELLTLFAELKRKAMVRTGQSYPIITIQEAGLDGFWLHRVLQQEGIESHVVDPASIAMPRRRRRAKTDKLDGEALLRALLAYKRGEPRVCAMVVAPSPDEEDRRRLCRERATLIEERIRHVNRIKGLLFSQGICDYAPLRRDRRARLAALRTGDGRELPSHLRAQIGRELDRIELLLGQIKAVEAERDALLAAARKPASKGAMPDPVTTLLALKGLGANFTAALWSEAFYRQFANRRQVAAYAGLAATPWQSGGVRHEQGVSKAGNPRLRTTMIQLAWLWIRHQPQSALTRWFKERSPQGRKRAIVALARKLLVALWKYVAHGVVIEGAVMKPAA

SEQ ID NO: 219567 - protein, 385 aa, unidentified
MRDKTFVPREYDVFAGLDVDKKSIAATFSSHQGFIRSLSMPYKVEDLLNHVRNHFADQKVAFAYEAGPTGYGLYDGLAAQGYRCLIAAPSMIPRAPGQRVKTNRLDSKALSESLRGGQLKSIHVPSPLYRQLRHLTQLRDTMMSEAVGMKQRIKSLLLFEGITFPPAPAGSQWSFIVKAKLRKLPCSNTVRFKLDQLLDSLEFAEKQVFKSTKEIRRFCQTDPELSQCIKYMMTVSGIGWIVASQLLARIGDWRELENIRQLGGFLGLVPMEHSTGDKTDRGPITHTGDGRLRSKLIQAAWSAIRKDGELREFFRSVCQRHPRKVASRVAIVAVARKLSVRISVVLMQQRPYEVREKVHSAPLTQEETSPQGTTRRQAEPGEETP

SEQ ID NO: 219568 - protein, 348 aa, unidentified
MNNVHYIGFDVHKKSISYCVKTAAGEIVEEGTIAAQRNVLRAWAAARRQPWRGALEATLFSGWIYDTLKAYSGGLEMAHPAKMKAISSGKKKSDTIDARTIADLLRCNLLPACYVAPARIRELRRLLRYRSLVVSEAVRMKNKMAGLLMETGAEYVKEKLHGKKYFATLLEELEEVPESVIDLLRLSRGALEMFESTQRRLIQELLADAELRERVERLRSIPAVGEITALTWALEIGDPERFGSAGEAMSYCGLTAALKSSAGKQQRGPISKQRNHWLQTTLIEAAKLAPRWNPQLAALHARELERGHRNRATLAVARKLVSYLLAVDKSGLPFQVRSPSQEPTQKAA

SEQ ID NO: 219569 - protein, 596 aa, unidentified
MLSSQGPTAQPATSPPARIGVGIDTSRYGHYAAFLRDDLQPACAELQFAESAQGYAQLRHRLGLLAGRHHAVCFAIRLDAAGQYADNLLHFLHQLARHPQQQTCAWPNSTITLSSGDPHRNKNYRAALFGGKKSDPVEARAAARFALSERPTPTPALAAPLRALRQVAARLQATVRQRTRLINQLHHLLALAFPELALLVKDLALGWVLELVHRYPTAALLANAKADDLACIPYLHDRHIAGLLEQARGSIASLSGPTTEELVRDQVRQLRDASARQQRLEGLLVTAYRALPKANHLDSIPGIGAVTAAVLTAFTLDIERFETPGKLVAYFGVLPVEVSSGVDRDGQPRGPRRYIMSRRGNDLVRRYLWMAALSAVRCNPAVRPLYRRVVAKHPDHKAVAIGHAMRKLLHLAFAVWKSDRPFDGRHHPWEGPPAALAATAEAGETPAPQPRKSQAAGHKPEASPAEEVVTAACAGTVAAAEPVGEGTFINFAHLKQQLSLAQVLEHLGLSGRLRGSGPQRRCACPIHRGDGRGRTFSVNLPDNVFCCFEARCGQQGDVIDLWAALHHLDLRAAALDLVRTFDLEPAPARPTEKRDG

SEQ ID NO: 219570 - protein, 419 aa, unidentified
MSNSTLSKKLASVKPGTLLAGVDLALDGNVTVVLSERAERLDRFRFPNDQDGYNYFLRRIEALRERQQAPGLLVGMEPTNYFWKLLAAYLEEQEVPYRLVNPYTLKKHREGDQLDRSKDDWRDAFMVGDLLRTGKYTETRLLHGQYAELRQYVTLYTRLERDIRRQKNLIRNTAGQLFPELPRAFKDFTGATAMAMLRHHATAIEVQQMSQERFIAGVRADFQAQRLQVSKLRRAHELAARSVGLKDGVQALQQALWLHIESLEVLQRQRDDTCTALVDCFVAMPEAPYLLSVHGLGVITAATILAEIGDPSHYTSARQLIKLAGTQPVFNASGRKTRSKTPMSHKGRPRLRTALFFAVMRLVQVDETFARTYQRLRQREENPLTKMQALGALMNKLLRILWALIQKRTLYDPAFEPEN

SEQ ID NO: 219571 - protein, 344 aa, unidentified
MQIAVLGIDLGKNSCSVVGLDSTGAVIKRRRMRPENLVAFTEKLPACIVAMEACCGAHHLGRTMSSQGHQVRLMSPEYVRPYVKAQKNDDRDAEAIAEAATRPTMRFVELKSESQLDVQTLHRARDRLVGERTALINQLRAVLLERGVTIPQGRRKLEQHLDAMMASDDDHSLSPRVRRLIDDMRAEWLELDRRIAAFDDEFAAYARSDADARRLATIPGIGVLNATALLAAIGDGQTFARGRDLAAWLGLVPRQVTTGGKPRLVGITKRGNKYLRKLLIHGARAALPSLATSATPLGGWLRALMQRVHKNAAVVALANKLARIVWVVLRRGEEFNAAAVTATA

SEQ ID NO: 219572 - protein, 435 aa, unidentified
MEKIKENVAGIDIGAREVFVYVEGQGVKSFLTFTEDMEALKKYLISNGIKEVAMEATGVYWSILYEILEEAGIDVWLVDGRETSQVPGRKTDIKDCQWIQELHSCGLLKRCFVVRDDIKELRSYQRLRQDHIQSASMHINHMYKALIQMNIRLKETISQIHGVSGLKVIEAILKGERDNNVLLHLCDARIIKNKKSEVLKALNGKYTKAGLFALQQAYDAFNFYQKQIAQCDQEIEKIIHHMGNNSNDKDLSQKRKPIRHNKPEVKNLGANLLDIFEGKDATVISGITDYTWMQLLSETGVDLTRWHTQKHFTSWLGLAPGQHWSGKKKKNRRKQGRPKAGQIFREIAQSLINSKDVALGAYGRKLRAKKGTGKAIKAMARKLAEIYWKVMVKGMEYVENGVKKYEEQLLQKKRQSFIRLAKELNYQFVINEPVG

SEQ ID NO: 219573 - protein, 391 aa, unidentified
MVCVGIDVAKDKHDCCILDSDGMVRADCFTIPNNMDGFKQLLQTIRNCTKKSDKIKVGLEATGHYSYNILGFLLDNDLAVYVMNPLHTNLYRKSLSLRKTKTDRVDARTIATMLLSDVDLKSYTDTAYHNEELKSLTRYRFDKVRERAKLKQSVSRLVTILFPELEKLVPSLHIASVYSLISEYPGAKQVSEVHLTKLTNLLTTASKGRYGKDKAIQIRDAAKTSIGSVMPAKSLELKHTIKLIKELTSEIDEIEDSIQQIMDELHPPILSIPGVGIQSAAMILAEIGDFSNFESPDKILAYAGCSPSTYQSGKLTNCYAHMEKRGSRYLRYALYNATKYVCQWNPVFAEYLAKKRAEGKHYNVALSHATKKLVRLIYALQKSGKAYLVAA

SEQ ID NO: 219574 - protein, 345 aa, unidentified
MLAEDVDVVIGVDAHTDTHSAAVVSRVGMALAQTTVAANGAGAGTLVVWAEQQAPGLRRVWVVDGTRSHGLGLTRHLKAAGETVIEAPRVKGAARRRGGKSDALDAVHVARQVLASQHPAEPRCDGDREALRLLYVCRRHYSDTRTATVNLFKSLILTADEDLRDRLRGLSTDQQIKRVQNMTPPAEADTLTRVRLEHLIALAAQIADLDRRLADNLRELRTLVAAMCPALLDQPGVGPVTAAIALTAWSHKGRLRSEAAYASLAGVNPIPASSGRTVRHRLNRGGDRTLNSAIHIIATSRRRSHQPTRDYVARRTKEGRTSKEITRCLKRYIARQLFKIMEATP

SEQ ID NO: 219575 - protein, 418 aa, unidentified
MNEEGNTRGTGRYVALDIHKHYCVIAGVDREGRVLLQAVRVEHADLEEWLKKNLRASDHVVIESTTNAWHIYDLLAPLAERVVVANPIKVKQIACARVKTDIRDTLILARLLAANLVPDVWVPPVHVRQLRQLLSQRRQLVETHTQIVNRMHSVAHRHHLKHERGKRFNEKTTAWQKDKVLSAVEQFQLELEMENLAYMEKQIERISQEVRKMCHQKPWADSMTYLMQLPGFGVITAMTVLAAIGEIQRFETPRQLASYSGLTPGLEQSGTKNRGKGMTKEGRRELRWALVEAAQMAVKSDPLLKRRFQELQKRMHRNQAIVAVARRLLELVWYVLTRRQPYRHFSHERIAYKYLTWAWQLDDEARDGLTRQQFTRYYLMRLGIGQDLTRIVLDPKHPRKIASEAELLALRPELQHLE

SEQ ID NO: 219576 - protein, 415 aa, unidentified
MTTLFVGIDVSQNAADVCFLDREERDLGRLKIANDLPGAEQLVCRITSVAKQRQLTTVVIGLEATGMLGWHLRTYLSQVPDLQPLNPKVYVFNAKVVAGFKKAYPDLPKTDAVDAWVIADRLRFGRLPRPHEEGERFEALQRLTRARYHLVHDLVREKNRFLSTLFLKFSAFVQQEPVKRTFGTTALAILTEFATAEEVANQSLEQLTQLIMDRSRNRYENPQEVAAAVQKAARASYRLPKAMADPVNQVLACQINVIRAMEQQIRELDVAIERLLSTVPQTLHSVKGLGPVFIAGIIAEIGNIERFPNEAALAKYTGLYWSKYQSGNFQAEDTRMTRKGNTYLRYYLVEAANSLRMHDAEFRRYYTLKKAETKTHAHKRALVLTARKLIRLVDCLLRSNRLYKPPQGRLHTGGR

SEQ ID NO: 219577 - protein, 351 aa, unidentified
MVIVGTDVHKRTHTFVAVNEAGAKLGEKVVPATTAGHHTALQWARSQFGQDLLWGVEDCRNLSARLERDLLSAGQRVVRVAPKLMAQTRACARTRGKSDPIDALAVAHAVLRYPDLPVAAHDEVSRELKLLVDRREDLVAQRTSTINRLLGRIHELDPARTPKRGALDRAKTRAELGNWLDTLHGLLAELARDELDDITRLTDTVNALAARIGQHVHDVAPELLALQGCGELTAAKLVGETAGVKRFKNEAAFARHSGTAPIPVWSGNTAGRVRLTRSGNRQLNAALYRIALTQIRIANSPGQLYYRKRLAHGDSSTEALRCLKRRLARTVYHRLHTDEQTRLNDPHPAAA

SEQ ID NO: 219578 - protein, 413 aa, unidentified
MTEENFAWFAGIDWGSERHQACLVDAQGRIVGEREFPHGGKGLADLCDWLLSMCGAADTVAVGIEVPHGPVVDTLIDRGFVVHAINPKQLDRLRDRHSVAGAKDDRRDAYVVGDGVRTDRRLFRRVHVTDPRLIELRAWSRLAEELTEERVRLSNRVHHELWRYYPQILKIADGDVAATWVLDLWDLAPTPARAHRLRAAPVEKLLKHHHIRRIDADTVLRNLQEPAIRVGKGVAEAASVHLRSLFTRLRVVNRELRQADAKLDALCAAIGETDADSGEGLQRQDVMILRSMPGIGRINLATLLCEGSGPLSRRDYPALRTLCGAAPVTKRSGKSHIVIMRYASHARLRNVVYHWARVATQHDPKSRERYAALRRRGKSHGRALRGVADRLLGLACVLLQRQTPFDPNFAQAK

SEQ ID NO: 219579 - protein, 403 aa, unidentified
MNNVAGIDVSKGKSMVSVLRPFGEVVAKPFSIGHTGSELKELADYLKSLDGETRVVMEHTGRYYEPVARFLHEEGVFVSAVNPKLIKDYGNNTLRKVKTDKADARKIARYGLDNWAELRQHTPMDTIRMQLKTLNRQQSLYSKTKTMMKNNLIALLDQTYPGVNALFDSPVREDGSQKWVDFATTFWHVDCVRNMSLTAFAERYRKWCKRHGYNFSQSKAVEVHAGAQDLIAMLPRDALTKTMVRQAIDALNAISASLERLKAEMQALAAQLPEYPVVMTMHGVGDSLGPQLMAELGDVTRFTHRNAITAFAGVDPGADQSGTHEAKSTRVSKSGPPELRRALFLVMDCLLKTQPQDDPVYRFMDKKRAEGKPYLVYMTAGANKFLRIYYGRVKEYLAQLENS

SEQ ID NO: 219580 - protein, 418 aa, unidentified
MLFIGDDWAEAHHDIEIQDEAGRRLVRRRLPEGMAGIAVLHELIGQHASDGVEGEDVDEVDDPGQVVVGIETDRGPWVAALLAAGYQVYAINPMSVARYRQRHTTSGAKSDPGDAKVLADLVRTDRQHHRPIAGDSQLAGAVKVLARAHQGLCWMRGRQVNMLRSTLREFYPGALEAFGELAHLDALAVLEVAPTPARGRGLSRAKIASALRRAGRQRNIEARAEQIQTALRRPQLEQPPIIAEAFGATVSAYVALLAGSISQIQALEGQLETCFGQHPAAEILLSQPGLGTILGARVLAEFGDDPHRYASPKARKNYAGTAPITRASGTRRVVLARVATNKRLRDALHLQAFAALNSSPGARAYYDARRADGHTHHQALRAVSNRLVGILHGCLRHGLLYHEPTAWPHHQQRDQAAA

SEQ ID NO: 219581 - protein, 401 aa, unidentified
MRRKEQAQPHLKAVPMLLQESLYIGVDIGKHQHVAGFVSKTLLQRHERFEACPALAFEQSREGFRALIDRIRELVPLEQAYILLESTGHYHRALVQYLQELDLPVYIMPVQKRPAGMIKTDKRDALGLANHLYNQLELGVQLSDKTHLVRRLLPAREAAVQLKGWIRHRYELMHESTQRKNKLTAICDELFPEFTWVLKDPNGVAALALREHFPTPHAMVTAPLTMLAQHRVSHHPSVQQLVELQRLASQTIGTEDAVRQRGLVLEQQQLIRELRMLQEHVQQLDVEIVKLVERSREGQILTSMGIGPIQAAAIMAAIGNVLNFENGAALKAYFGWAPKREQSGTTLDYDQLAHTGTRTMKQTMFLVVANAIQRKDCEWAKLYERLVPRMCSYDERKMQRF

SEQ ID NO: 219582 - protein, 409 aa, unidentified
MDQLIERCCGLDVHRDTVVACVRGPGPNGRRQHEVRTFGTTAVELLALRDWLEAHAVTDVAMESTGVYWKPVFYVLEEAFTCLLVNAAHIKQVPGRKTDVKDCMWIAQCLEHGLLRGSFVPPAPIRELRDLTRHRKVLIQERTRAANRLHKLLEDAGIKLASVATNILGVSGRAMLEALVHGTTDPAVLADLARGKLRKKLPALRQALAGRFRPHHAFLVGQLLAHVDYLDEAITTMSEEVEGRLAPFAAQLTQLDTIPGINTRTAEVIIAELGVDMSCFPSDRHLASWAGICPGNNESAGKHQSGKTRKGNRWLRMTLIEAAGAAIRTKDSALGARYRRVMRHRGHKKAVVAVAHAMLRAVYHLLAEGTTYREPGADYYDRHHTHRVTRRAIQFLERQGYRVVLEPAA

SEQ ID NO: 219583 - protein, 301 aa, unidentified
MSSLATHYVGVDVAQASHALCGTTASEVRNTHPALAAWIRTLPANTHLVCEATGRHHHVLQLAAAAQGIALSVLNPRQVRDFARSVGRLEKTDAIDARLLQRIGQLLQPKPTPLPSATVRQLQDLLVVRQALVEEQVAWHNRQALLSPAAARLCTKRLRTLAKELAEVENQIAQLLALPEAAPLMDRVQTLCLVCGIGERTAWVLLAGLSELGTCNRRQIAKLVGLAPLNHDSGRFRGRAPVRRALYLAAVVAARHNEHLRHFYQRLRAAGKPPKVAYVAVARKLLLFLNRILSDAPPLPA

SEQ ID NO: 219584 - protein, 443 aa, unidentified
MTGNKGTRPRAPVSDRPAEVLLAEVSLPRNREGASVFIGIDWAAQTHAVCVLDQAGKRVTAFEIAHTADGFDQLTARLGRLGTPAELAVAIERPDGRLVDHLLEAGHPVVAVSPNAIKAWRDAEVLSGAKSDTADAHVIAEYLRLCHHRLRVLAPFSAQTRALRAVVRTRTDLVDQRVAASNQLAACLEAFWPGALAIFADIESEIALAFLERYPTPQSAAHLGEARMRAFCVKHGDCGRRSAAALLARLRQAPPGVADGPEAEARRDATLAMVGVLRALNIAIKDLDRSVVAHLGEHPDEPIFTSLPRSGQINAAQVLAEWGDCRQAYDAPDAPDAVAALAGAAPVTKQSGKHHAVHFRWACNKRFRTAITTFADNSRHASPWAAKVDADARARGCDHPHAVRILARAWIRVIWRCWIDQVPYDPAKHGAAQKLTEMAASAA

SEQ ID NO: 219585 - protein, 347 aa, unidentified
MTYFTGIDVSLRSVSICVVDDRGEVCREAKVAAHVDVIVEWLPAFSPELKSVGLEAGALSQYLTYGLQAAGFEVICLEARQVKNTLDAMRNKTDRNDARGIAQILRTGWYSRVHIKSLHSHRVRALLASRKAILAKCVDLENELRGLLRVFGIRLAPRVGHGSFDAQVRSTFADDEMLSCALVPLLDARTVLYKTYLKLDNAVKALTKADPLFVRLMSIPGVGPVTALTFKSAVDDPARFKSSRNVAAHFGLTPKRYQSGEMDNPGHISRAGDADVRSALYVAAHSLLTRNAQWSSLKAWGMRLAKTRGHRRAVIAVARKLAVILHRMWVDGTEFRWGSQEPVAVKA

SEQ ID NO: 219586 - protein, 486 aa, unidentified
MEHKARMPTEPGPRLGVFVRAVIIEDHVDDLADRDFGLDGVEEPDELLMPVSLHAATDNLAFQHVERGEQRGGAVPLVDAMGRAARACDLGAATTAGRCPMRQANDLSRSLAAFDQPTTLIAVIEMSQSSWLVAGIVPGLERHPLKKLAVDEGSLLRLLQRWRDQAIRAGCRIERITVAFEAGRDGFWLARWLRAHDIEGYVIHPTSVAVSREHRRAKTDQLDTELLKRAFLGWLRGEADHCNMAAIPTIEEEDGRRPHRERESLVAERTRIVNRMKGCLARLGIRGFKPTLQRAPKLLSTLRTPEGTPLPPNALAEMGRDLARLHFVEGQISEIETARLERLEQAPTEKSHAMVRLLARVIGVGIETADMLVREILSRNLRDRRALARYAGLTGAPDESGSKRREKGLARAGNARVRRGMIQLAWRFLMFQKESALAQWYRSRTVDARQGTRKSLIVAMARKLLIELWRFVTTGETLLGVKMRPA

SEQ ID NO: 219587 - protein, 347 aa, unidentified
MRFYTKPHQFYCGIDLHARSMYVCIVNHDGEILVHRNMKAAPEPFLKAVAPYRDGLVVAVECLFTWYWLADLCAQEGIPFVLGHALYMKAIHGGKAKNDKIDSRKIAALLRGGMLPQAYVYPAAMRATRDLLRRRIHLMRKRADLLAHVQNTNSQYNLPEIGKKIAYKANRDGVAERFADPAVQKSIELDLALITYYDQLLTALELSIVKSAKQHDANTFYRLRSVPGVGKILALVLLYEIHDIHRFPRVQDFVSYARLVKCAKESAGKRYGTSGKKIGNAHLKWAFSEAAVLFLRHNPAGQKFLAKLERKHGKGKALTILAHKLGRAVYYMLKRQTVFDMETFLHS

SEQ ID NO: 219588 - protein, 408 aa, unidentified
MTVVGIDVSKGKSMVAAMKPGGELVAAPYEVRHSDIELSHLALDVLCMEPDTRVVMEATGRYHEPVAALLHSEGIFVSILNPLLIKQSGAGSLRKVKSDPKDALKIAKYGLDNWSTLREYTPMEAIRQQLKLCARQCDLYNKNIVMLTNNLISLSDKTFPRVNELFSSPEKADGHLKWVDFYRSFWHCDCINRMSPDAFEERYKKWCKRKGYHFSTDAADALYAASCGSYTTLPRDNNAKLLVTVAADQLIALRENQSKLEAEMLNLCKQLPEYETVMAMYGVGKSTGPHLMAELGDVRRFPHRSSIVAFAGVDPGVVGSGKMQLSSVTTSKRGSPQLRKALFQVVSTYVKCKPENEAVYQFCAKKRDEGKPFFVCTTAAANKFLRIYYARVKECLNAAESATQVEEG

SEQ ID NO: 219589 - protein, 414 aa, unidentified
MLKIVYPICCGMDVHKSFVVACIASTNEQGVTTYKSKRFSTFTGDLHQCADWLSENNCKDVRMESTRKYWIPVYNILESTCNIVLAHPKYVKAIRGKKTDKRDAKWIADIFKHDLVAGSFIPPADIRQLRDLVRYRWKLTNFTTGEKNRAQNCLTVSNFKLDDVFSDVFGKAASAITDRILENPAEKITDVSCFRTKGMKATNEQVLAAVDGEMCEEQAEKLRIIRSHMDNLELCKANLESLILTTAEKYLPQLGLVMTVPGIQSFAAIGIISEIGVDMSVFPTSKHLCSWAGLMPQNNESAGKKKTTRISRAGAYIKPLLVQCALSAIRAKQFPEIRNRYLALRKRRGHKKAIIAIARMLLTAIYNMLKKNEPYNPELYRKDDRTPAHREVSVEEAIFILQRQGYLVAAPSTT

SEQ ID NO: 219590 - protein, 371 aa, unidentified
MENCTRYVGLDDSKDSIDVAVASEGRDGEIRSYGSIPNTPEALKKLVRCLGRPKELYFAYEAGPCGYGTYRDLLALGANCIVAAPSMTPRRAGERIKTDRRDALALARMHRAGELHPVWVPGEETEAMRDLTRAREDAKYVQTKARQRLGSFLLRHGRRYPGRSHWTKTHLKWLAGERFAQPSQQICLDEYVEAIRQASDRVQRLEAQVRELVSTWSLGPVVSAMTAHRGVSLVVAATVCAELGDLTRFDRARDLMGFVGLVPSLHATGRTRRVGAITKTGNGHVRRVLVEAAWSYRHPARRTAHMQKKLEGQPEEIQAISWKTQVRLCGRHRRMIARGKHPNKVTVAIARELMAFLWATARMVEPMSPAA

SEQ ID NO: 219591 - protein, 348 aa, unidentified
MAMTIVGKTRPVTGGVDTHLDVHVAAALDANGGLLGVESFPAERSGYAALHTWLTSFGELTRVGVEGTGAYGVGLARHLWAAGVEVIEVDRPSCQERRRAGKSDTLDAVEAARAALSGRAGGRAKTKVGDVEAIRALLVAKRSARSSRIMTRNQLRHLCFTAPDELRERLARLSRAELITQAAALRPRPKRDPVMYATKLSMAILARRVIALNDEIDRLDTHIAEFVRRAAPALLDLHGVGADTAAILLAAAGDNPERIRSEAAWAHLCGVAPLPASSGKTTRHRLNPGGNRQANHALWRIAFTRMSSDKRTRVYVERRVAEGLTKPEIIRVLKRYIARETYRHLPRD

SEQ ID NO: 219592 - protein, 364 aa, unidentified
MLANRTSVGLDVHARSVVACGLDGQTGQLYERRLTPDHGEILAWIRSLPGPVVVVTYEAGPTGFGLARFLTGHGIEVLVAAPSKLQRPSGDRIKTDRRDARHLARLLHLGEIIAVTVPGVEQEAARDLVRAREDVRGDLMRARHRLSKLLLRHGIVYYGGKPSTASHDLWLRAQRRQPVFTLPGLGLAFDTGYDTVLATVARRDRLDAAIAAMAADSVFTPVVSRLGCLRGVSTLTAFGLAVEIGDWHRLTGRSIGAYLGLVPTESSSGQTRSRGSITKTGNGHARRLLIEAAWHHRPPYRVGADLRRRLDRADPAARDRGQRANRRLHARWAGFDARHKLPVIANTAIARELAGWCWSLAVLD

SEQ ID NO: 219593 - protein, 276 aa, unidentified
MMIIGVDYHPSFQAVAFLMEETGECGEQELNHSDGQAERFYRDLKQRGICVRVGLEASGYSRWFERLLAELGFEVWIGDPAEIKAKRVKKLKYDRYDARLLRRLMLENNFPQIWVPSPENRDLRQLLWHRHRLVQMRTRIMNQLQALAMNEGYRWKKKLFSEQGRAQLEKLALAPRASRRRQELLELLDRIHPTIEELTAAVEQEAQKRPDVLRLMTHPGVGPLTALAYVLIIGTPERFHCGKQIGTYVGMIPCEDSSAGKQRLGHRPPANLLHVS

SEQ ID NO: 219594 - protein, 360 aa, unidentified
MRTWLVAGIVPGLERHPLKKLYQPDAAALFLLLQRWREEATKAGRTIKRIAVAFEAGRDGFWLARWLRKVGIEAYVIHPSSVSVSREHRRAKSDRLDTAQLKRAFHGWLRGDSDHCRMAEIPTLEQEDAKRPNREHESLVSERTRVINRMKACMVRLGIRGFNPKLRKAPELLAGLRTPEGQPVPPNMQAELKHQMERLQLIRKQIIDVEKARFARLHVAPRTEPHAQVRLLCRVVGIGIETADMLVHEVLWRKLRDRRAVARYAGLTGAPDQSGEKSYEKGLAKAGNARVRRGMIQLAWRFIRFQPDSALAKWFYARTADGRKKTRKTMIVALARKLLIALWRLVTTGEVPTGVMLRAA

SEQ ID NO: 219595 - protein, 414 aa, unidentified
MNFINQEVFQMNAVGIDVSKGKSTVAILRPMGKVVQTPVDVPHDTVSLERLAYQILSLGENTRVVMEATGRYHEPVAMELHDRGIFVSVVNPLAIHGYCSGGTVRKVKNDQKDSLKIAKFALDHWVDLREYTPMDAVRQQLKIFSRQYNLYMKSRVALQSNLISLTDKVFPGVNEIFTSPERSDGHLKWVDFVTTFWHCECISLVSENAFTERYKKWCKRMGYKFSAAKVSDIYIDSLGHIVTLPKNNNTKLLIQTAAKELTAMNELLAVVKAEMIRLAKELPEYETVHAMFGVGELLAAQLMAEIGDIRNYPRRSSLVGFAGVDPEVNQSGKMNSESNPSTKRGSPHLRKTLFQLMTVYLRLSPADEAVYQFLDKKRSEGKPYYVYMTAGANKFLRIYYATVKAYLESLEHTA

SEQ ID NO: 219596 - protein, 411 aa, unidentified
MQVLYGRCAGLDVHQKTVVACVLSSTETGTATQEVRTFGTMTRDLEALSAWLVAAQVEQVALESTGVYWWPVFTILEEAGLAVTLVNPRHTKGLPGHKTDVGDAVWLADLLRHGLVRASFIPPAEIRALRELTRYRATQVRARAKEVQHLLKTLESANIKLGAVATDPVGVSGWQMLTAIAAGEDNPATLAQMAKAGRRAKLDALEQAFISRVQPHHRVLIRLSLDLLRFLERTIEQLDGEVQRAMVPFAAQQAALLSVPGIRDVAAAAIVAEIGVQMEQFPTEGHLSSWAGLCPGNKQSGGKRLSSTTTKGNVWLRRILGEVAWAAIHQRRSIFRARYYRLKPRLGAQQALVAIMHQLLKVIYHILKTGEPYRELGADYYEKRDATRVAHRLTTRLERLGYTVTLSPPAA

SEQ ID NO: 219597 - protein, 398 aa, unidentified
MTESSDYESVLVFIGVDVGKDTHHAVAINRSGKRLFDKALPNDENKLRSLISDLKQHGQILLVVDQPATIGALPVAVARSEGVLVGYLPGLAMRRIAALHAGEAKTDARDAAIIAEAARTLPHALRTLKLADEQIAELSMLCGFDDDLAAQTTQASNRIRGLLTQIHPALERVLGPRLEHPAVLDLLQRYPSPEKLASLGEKKLAAQLCKLAPRLGKRLAADIAQALAEQTVVVPGTNAAAVVLPRLALQLITLRKQRDEVALEVEQRVLAHPLYPVLTSMPGVGVRTAARLLTEVACRAFASAAHLAAYAGLAPVTRRSGSSIRGEHPSRRGNKALKRALFLSAFAALRDPLSRAYYTRKMSQGKRHNQALIALARRRCDVLFAMMRDGTFYTPQGS

SEQ ID NO: 219598 - protein, 310 aa, unidentified
MDAIYVGIDVSKDRLDVHVRPSREAFVVARDGKGLEELIERLQALSPRLIAIEATGGFETIAAAAIAGATLPLAIVNPAQVRHFAQAVGKRAKTDPIDAEVIARFAEAVKPEPRPLPDEQARLLAELVARRRQIIEMIVAERQREKRAENVRVRKSLARTIKTLEKELPEIDGDIDTLVRGSPAWREKEDLLVSFPGVSNILARTFLAELPELGRLTRREIASLAGLAPYTRQSGRWKGKSMIGGGRAALRAALYMAALSASRCNRPLKVFYQRLLSAGKPKMVALIAVARKVLTILNAMVRDKKEWQIA

SEQ ID NO: 219599 - protein, 287 aa, unidentified
MAYYTGIDVSLRSVSICVVDDKGEVCLEAKVAAEIDAIVERLRRFSSEVKSVGFEAGTLTQYLTYGLQAAGFEVICLEARQVSVTLAAMRNKTDRNDARGLAQILRTGWYSRVHVKSLQSHQVRALLASRKAILTKCVDLENELRGLLKVFGIRLPSRVGHGSFDAELRETVCSDEMLACALVPLLDARTVLYKTYLKLDNAVKGLVRVDPICRRLMSIPGVGPVTALTFKAVVDDPNRFKSSRAVAAHFGLTPRRFQSGELATRDISPERAMPMFALRSTSPLTRS

SEQ ID NO: 219600 - protein, 360 aa, unidentified
MNDGNRATPMVTAGLDLGDKYSYLCLIDTDTGKVLEEGRLRTTPEALRRRFCSEQRMSVAIEVGTHSPWVSRVLKECDHEVLVANPRKTRLIYGQGRKTDKLDAEKLGRLARVDPKLLSPLEHRGEASQAHLALIRSREVVVRSRAQLINHVRGTVKSFGARLPKCSTASFHKKVAACIPEELQPALEPLLETIASLSTRIGHYDRELEELAQEHYPETKLLRQVQGVGTLTALSFVLTLEDPGRFEESRQVGAYLGLVPGKDQSGERDPQRRISREGDEMLRRLLVGSAHYILGPFAQDSDLRGHGLKIAGSTAAKDARKRAVVAVARKLSVLLHRLWISGEVYEPLYNARRQPKGLAA

SEQ ID NO: 219601 - protein, 359 aa, unidentified
MLNDTVWFPKITIGLDLGDRKSHTCEVDQGSRVIRTAAVPTTRSAVEAYFGGRERCRVVMEAGTHSPWISRQIAELGHEVVVANPTELYGGRRRKKRNDRTDAESLARQGRADVKLLHPVQHRSAKAQAHLELIRARDQLVRVRTKLINHVRGAVKAIGGRVTICSAEVFAGRAADQIPSELRIVLEPMLAVITDVTQRIKAMDRQVEQIALEYPATMRLQQPKGVGALTALAFVLLIEDPKRFKQSRDVGPYFGLVPRLDESSDSTPQLGITKAGDELGRRLLVSAAQYMLGPFGPECDLRRFGSAIAARGGKNAKKRAVVAVARKLAVLLHRLWVTEAAYDPDRQSKRGCVAHAELV

SEQ ID NO: 219602 - protein, 344 aa, unidentified
MKRYKYFIGIDVSKLTLDFAIMNVEQLIYHKKIANDDTAIASMLVELKEINGFKLSNSVFGMEHTGIYSNKILSILERKKANIVYENPTHIKNSLGNLRGKNDKLDSIRIATYLKKLKDDLRLWQGKRKIIQELASLVALRDRLARTKRALKTPLKEDHLFISTKFAAQNEKFSSRTIDALEADINLLDHTIKLLCFSDPKVKRMMDIITSIPCVGHFTALQMIITSNEFETISSPKQFAAYAGLAPYPKQSGTGLQSRSRVSNIANKKMKTLLHTCAMLSNRFVPEMQAYFKRKTEIEGKPKMLVFNAIRSKLVLRVFSCIKQNRLYTKDYDYNSEKLTQEIT

SEQ ID NO: 219603 - protein, 310 aa, unidentified
MERLFVGIDVSKDRLAVYVRPTGERLAVASDEAGITQLLGRLQALQPRVIVLEATGGYEARVAAALAHAGLPVAVVNPRQIRDFARATGQLAKSDGLDAAVLAHFGEAVSPPVRPLPDAQALALAELVTRRRQLVEMLTAELNRQQQARQRLVQTRLQRHVTWLRAAIAELEEDITRLIRSSPVWREKENVLTSAPGIGDVTAHALIAELPELGRLSRRRIASLAGLAPFIRESGRWKGRRMIRGGRAHVRRALYMATVVAIRYNPPIGDIYRRLIGAGRPKKLALIAAMRKLLTVLNAMLRDGRQWQTA

SEQ ID NO: 219604 - protein, 348 aa, unidentified
MAYFVGLDVSVKETSVCVVDDTGKVILEQKIPTEPADIITLLSSLGATFDRIGIEAGPLSQWLVNALTAVELPVICVETRHMKALLTAQQINKTDRNDARGIAQMMRVGLFKPVHVKTLAAQEQRMLLTSRKLLQRKLLDVESDLRGTLRNFGLKVGVVSRSRYEVRISELVESFPRLAAIVGPLLAVRRVMRQQLAVLHKMLLDTVRGDPVCRRLMTAPGVGAVVALTYRATVDQPQRFVHSRAVGAHVGLTPKRYQSGEIDYDGGVSKCGDALLRTMLYEAAHSLLTHSGKWSWLKAWGIRVAQRRGIRRAIVAVARRLAVVLHRMWVDGSEFRWKKDSAAAPAVA

SEQ ID NO: 219605 - protein, 288 aa, unidentified
MNTVIRVGIDLAKYLIQVHAVDASGKVVTNRALKRGKFLLWCADLPAGCVIAMEACSGAHHCSRKLIDRGFDARIIPGSSVAPYRIQGRTGKNDANDAAAVCEAASRPHMNFVPPKTLAQQGMLCVHRLREGLKEERTACINRIRGLLAEFGVVLPQSPEILRRHLIDIVEDASNDIAGVARLVLQRAHEHWRELNAHIKWCDQRITDHQKLDEQVQRAAELMGVGSITASALVATVGDFRQFRNGAQFAAWLGLTPKQHSSGGKTSLGSITKRGSVYLRTLLIQGAP

SEQ ID NO: 219606 - protein, 358 aa, unidentified
MYIGVDTHKKTHLLVAIDAQGQMHATLTVANTPQGWVTALEWAGDYRGACRWGIENSGSLGKGFAQFLLADGETDVREVSPQRTAQYRRRGRTQDKTDAADALAIARLISAEGEQLPLVQADDLSTELRLLSDHRDNLVAERTRLINQLHAQMLQIDPCYMERSGVLTTATGVRYCHALVLPHADGVLRTRLLIVRQLAGQILGLREEIETIETALRQRVQETGTPLLQLCGVGTLVAARLIGELGCTPRIHSAAALAALAGIAPVEVSSGGRHGHRLNRGGNRQLNKAFHVIALSQLRREPLAQAYYAKKRAEGKTARAAMRCLKRRLVDVLYRLLPKSEDRNHLREGQGLPIEAAA

SEQ ID NO: 219607 - protein, 378 aa, unidentified
MRNVRFIGLDVHAETIAVAVAEPSGEVRSLGTIPNRPESVARLVKKLGKPEQLRACYEAGPTGYVLYWQLSELGVKCVVVAPTLIPVKAGDRVKTDRRDAEKLARCYRGGDLTAVWVPDAAHEALRDLVRARLAAKRDQLRARNRLSKFLLRHGRRPPEGTKAWTAKHLLWIKTQRFEQAAQQVTLEDYRHEVEHASERIVRLERSIDASIETLPVKMRAVVEALQSLRGIAQISAVSIMAELGEVSRFAGARQLMGYSGAVPWEDSSGSRVHRGSISKAGNAHLRRIVVEAAWSYRHRPGIGYALKVRQRNCSAKVCEMAWKAQHRLHQRYARLTARGKSKQHAVTAVARELLGFIWAIGVEVERNQIKEKEQRRAA

SEQ ID NO: 219608 - protein, 379 aa, unidentified
MKNITTYVGVDAHKKDLFIAMLIGDQTTPVTWTVPNEPNAVRRMVRKLEREAPGPVRVCYEAGPCGYALQRQMTTPRVSCQVIAPALIPRKPGERIKTNRRDARKLAELLRAGLLTEVRPPTLEEEAVRDLCRARDDAREDFQRSRHRLGKLLLRRGLHFSGRNWTRAHRRWIESLEWAQPAERVVVDDYLLAIDQLEARLTELDVRLTDIAQSEPYRERVGWLRCFRGIDTLTAILILAELHDFRRFHSPRALMAYLGLVPGEDSTGEKHRRGRITRTGNALVRRLLVETAWHYQHRPGVGVALTRRRKGQPGRVIAIADKAQQRLCRRFRRLMEQHKPAPKIAVAIARELAGFLWAALQPAPVPAVNNTTRTRHRAA

SEQ ID NO: 219609 - protein, 343 aa, unidentified
MPHYVGLDVSQKTTAICVVDEQGRRLWRGVCATDPEPISARISKYAGVDAKVGVETGSMTPWLVHGLRGAGLNVQCLDARRVKAALQMQLNKTDENDAEGLAQIMRTGWYRAVHVKSLDAHRARALLGARAQLVGMTTRLSNMIRGVLKTFGLLPGAGRGLRFDRKVEALLEGAPEIALVVRPLLATWRQLREQIAVFDKAVLQQVRADPICRLLMTVPGIGALSSLMYVSTVENPSRFSRSRAVGAHLGLTPRRYQSGETDRSGHISRCGDGLARTLMYEAAIVILHRVKRPLHLKDWAEAIERRSGSGKARVALARKLSVILHSVWRSGEPFRWSAPVMAA

SEQ ID NO: 219610 - protein, 389 aa, unidentified
MKIFVGIDIAKLNHFAAAISSDGEILLEPFKFTNDADGFQLLVSKLESFDKNSIIIGLESTAHYGDNLVRYLVAEFYQVCVLNPIKTCQMRKNNVRKTKTDKVDTFVIAKTLMMQDDLRFITFFDLDMMDLKALGRFRQKTIKQRTRLKIQLTTYVDQVFPEIQYFFKSGLHQHAVYALLKEAPSPKEIASMHMTHLANLLKVNSHGHFTKELAKELRVLAQKSVGANDSAISIQITQTIQQIELLDSQLEKIEAEMTDIMKFNDSVIMTIPGIGYINGGMILGEIGDIHRFSNPNKLLAFAGLDPSVYQSGNFQAKTTRMSKRGSRVLRYALVNAAWNVVRNNATFKAYYDAKRAEGRSHYNALGHCAGKLVRVIWKLLTDEVEFNLE

SEQ ID NO: 219611 - protein, 329 aa, unidentified
MSNLLKKVIGVDVGSKFLTLSFLDDEKGEQVLNLPNNERSILSFLSKISPSDYCFVIEATGNYSSRLLHFSIGKGFESSLINCMSVKHFARMKNIITKTDAEDAKLIRNYGEMFRPEFYIPKTQDIEYLDQEIKLLNDLEEEKRRYAVKLKALRFHPVVNPSTEKHYEKRLKQLEKEIKEVEARLPQLQDEEFTETKNLLQSVSGIGEKTSLQLMTATSGFKNFHSSKSLVKYFGLAPRIYQSGKKSYSPGKCRTSKAYIRSILYVCSWTAIKHNQKCKELYLRLLEKGKAKKLALIAVCNKLLRICFSVVKNKTPFQQDFQNKLKIST

SEQ ID NO: 219612 - protein, 402 aa, unidentified
MGENIIDYDSVDVFVGVDVGKGEHHAVALDKTGTRLFDKALPNDEKKLRELIGGLKQHGTVLFVVDQPNTIGALPVTVAYDEGVAVGYLPGLAMRRIADLHAGEAKTDARDAAIIAEAARTMPHALRSLNLVDEQANELSALCGFDDDLATQITAASNRIRGFLTQIHPALERVLGPHLDHRAVVDLLQRYPSPAALRAAGETRLANRLVKLAPRLGPRLATEIVQALAEQTVVVPGTSAAATVLPKLAEQLSTLRRQRDEIALEVERLLEAHPLYQVLTSMPGVGVRTAARLITELSGKDFASAGHLAAYAGLAPVTRRSGSSIRGEHSSRRGNKTLKRALYLSAFAALGDPTSRAYYERKKAQGKRHNQALIALARRRCDVLFAMMRDGTLYQEPVANAA

SEQ ID NO: 219613 - protein, 326 aa, unidentified
MALYCGIDLHSNNHVVVVIDEADRRVYERRLGNDLALTLGALEPYRKELAGVAVESTFNWYWLVDGLQAAGYPMRLVNTTAVQQYAGLKYTDDRYDAYWLAHLMRLGLLPTGYIYPKEQRGIRDLLRRRMQLVQTASKQLISLQSQIWRRTGEKISSPRLKRPDFVVDLPGAAERLSAETTLKVYRAIQDELELLESVLLQVVKPRPDYQVLTSMTGVGVILGMTIALETGDIRRFPEVGNYASYCRCVKSEKLSNGKKKYLSWAFSEAAHFAVRYEPLARRFFERKQRKTNGIVAIRALAHKLARAAYYMLRDQVPFDAEKLFAN

SEQ ID NO: 219614 - protein, 342 aa, unidentified
MTIAVLGIDLGKNSCSLVGLDAGGRVVLRRRMRRETVIAFGAKLTPCVVAMEACCGAHHMGRALAAQGHTVRLMSPEYVRPYVKAHKNDDRDAEAIAEAATRPTMRFVALKSEAQLDMQTLHRVRDRLVGERTALMNQIRSILLERGHVVPQGRAKLAGFLTSLLEAEEGVILTPRMQALVADVRERWQLLDQRIAALDAEFAEQARTDEAARRLTTIPGIGALNATALVAAIGDVATFARGRDLAAWLGLVPRQVTTGGRPKLVGITKRGSKYLRKMLIQGARATMPTLRQSDTRLGQWLRGLLARAHANTAVVALAAKMARIVWALLRHERVYEATAVAA

SEQ ID NO: 219615 - protein, 482 aa, unidentified
MKAKPPEKIQKATNPSTRAHWNEMNRKQRRETMRQIQSEDISLEVVHPDAAGIDIGNESHYVAVPPSRDNQPVRCFGCTTAELKAMADWLKQCGIRTVAMQSTGVYWIAVYDILEQAGLEVYLVNARETKNLPGRKSDVQESQWLMKLHTYGLLRNSFRPSQEIRTMRTYWRQRNDLVQSAGRHVQRMQKALTQMNIQLANVLSDVSGVTGQAIIKAILGGQRDPHKLAEFRNPRVRASEEEIARSLEGHWQEDLLFVLQQEQDGYEFCQKQMVECDRQLNHYLEQREDRSQGAPLPEEKRKGRRKKKSGNKPQFDLRTGLFRMSGTDLTRIDSIDVMTATTILSEAGWDMSKWETEDHFVSWLRLCPDNRISGNRVIGKGRLPTNNRVTIALKMAASSLRLSDTYLGAQFRRFRTRLGAPVAIKAMAAKLARLVYRMLRYGMQYVDKGAATYQEQHRQLQIKQLKWKAATLGYQLIGVPAA

SEQ ID NO: 219616 - protein, 352 aa, unidentified
MKYYIGCDAHKKYSVFSVVNESGKAAAPERVEHDKELYQKYLKCLPPESPIAIESVGNWYWMIEAMEQAGHQPILVNPRKAKLLMGQINKTDKLDARGLAMLNLNGSLPEVWIPPAELRDQRELSRMRMSLVGVRTQFKNRIHATLSKYAIEINEVSDIFGKRGRLLLNEAIKELPPETRNSVDEQLKLLDQVSGQIEQIEKHIREVVKDTPMMQLIKSLPGVGDILAIVIALEIGDVNRFSSAEHLASYSGTVPRVSSSGGKTHYGRVRPDVNHYLKWAYIEAANCINLHQDQHAGRHVVELLKRIQKHKGYPKAAVAVGRHLSEATYCMLKRNEPYHEPNLRKTVLSSQG

SEQ ID NO: 219617 - protein, 445 aa, unidentified
MGRRCIGLDVHREFAQVAVWEDGLVRQAGRIALSDEALRIFADSLGPEDEVAIEATCNTQAIVRLIEPHVARVVVSNPQKTRAIAEAKVKTDKVDAEVLAQLLAADYLPSVWIADQATQAMRRQVARRAHIVRQRTRLKNRVQAILHRNLIPRCPAADLFGIKGRCWLSAQPLPPDEALAVDALLRQLDFHAQELRIIDAELGRVALSSSEVKRLMTIPGVDATVALSIVAAVGDFRRFRRPEQLVSYLGLNPRVKQSGGQPASHGRITKQGRAHARGMLVEAAWSAAKTPARCARSMSASAAGAGCRSPWSRPRGSSAVLCWTMIERGEDYAFARPSLTDKKLRALELRAGMPSRQGQKGKAAAYSLKEIRQRERELAEQGEQAYRQLVADWHAKRPTRPKPEPGVAAANGTRLNRPSVGQAARQASVPEPALRSGVDHALSKA

SEQ ID NO: 219618 - protein, 403 aa, unidentified
MNNVAGIDVSKGKSMVSVLRPFGEVVAKPFSVGHTGSELKELADYLKSLDGETRVVMEHTGRYYEPVARFLHEEGIFVSAVNPKLIKDYGNNTLRKVKTDKADSRKIARYGLDNWAELRQHTPMDTIRMQLKTLNRQQSLYTKTKTMMKNNLIALLDQTYPGVNTLFDSPVREDGSQKWVDFATAFWHVDCVRNMSLTAFAERYRKWCKRHGYNFSQSKAVEVHAGAQDLIAMLPRDALTKTMVRQAIDALNAVSASLERLKAEMQALAAQLPEYPVVMAMYGVGDSLGPQLMAELGDVTRFTHRNAITAFAGVDPGADQSGTHEAKSTRVSKSGPPELRRALFLVMDCLLKTQPQDDPVYRFMDKKRAEGKPYLVYMTAGANKFLRIYYGRVKEYLASLEGN

SEQ ID NO: 219619 - protein, 326 aa, unidentified
MEHELHYIGIDTAKEKLDVDVLRPDGRHRTKKFANTTKGHDELVSWLKGHKIDHAHICIEATGTYMEPVAECLYDAGYIVSVINPALGKAFAQSEGLRNKTDTVDARMLAEFCRQKRPAAWEAPHPLERALRALVVRHQALTDMHTQDLNRTETAREVQRPSIDAHLLWLEAELKRLEKQIKDLTDDDPDMKHRRKLLESIPGIGEKTSAVLLAYIGLKDRFAHARQFAAFAGLTPRRYESGSSVRGASRMSKAGHVSLRRALYMPAMVATSKTEWGRAFRDRLAANGKKGKVILGAMMRKLAQVAYGVLKSGVPFDASRHNPVAA

SEQ ID NO: 219620 - protein, 429 aa, unidentified
MNYNTQNAKIASITEKTLIVGIDVGSETHYARAFNWRNYEYSKKPFAFSNDEAGFASFKAWMNDMAEKHGMETIIPGMEPTGHYWLNLGAYLQEQGMKPVHVNPHHVKKSKELDDNNPSKNDRKDPKTIAGLVNEGRFSYPYIPTGIYAEIRNLSNLRIQTQEEITRIKNRMARWFSIYFPEIKDVYRNPDAVSGLMVIKQAPMPCDIRELGVEGVNKIWRDARLKGAGIKRATTLVTAAEHSIGNTEAPRSARKEIRNLLEDYEGYKKRMDELMEEIEKTLSEIPYIDKLMEINGIGIKTVSCFIAEVGDIGRFDNPKQVQKLAGYAIVADSSGKHNGESRISHRGRKRLRYALYEAAISVIGKNKEFKEIHSYYRTREKNPLKKMQSVIAVACKLIRIFYTILTKGVDYDSQKMLNDIVRPEIQLAA

SEQ ID NO: 219621 - protein, 428 aa, unidentified
MDKSDLSRIGWFRQFKKEIRGSAEYLIVGIDIAKEKHHGFFGTANGKTLLKRLIFDNSREGFEKLEVQVAALQVRYGLSRVVYGMEPTANYHKPLGEYLIGKGHEVVMVGGEAVSKNRGTLDNRWDKHDTKDAANVADLVSQGKILFYESVNGGVRELRVLLALKRRLKRQEQAYAVRIRNGLLAQYFPEMDGDYEQGKADCLGVVKWCLAPSRIAEMGFEEFMGWVTSRRLVRSQENRLRGIWEKAPGSIGCEAGEAVAFEAGTSVDQLRQTREVLKVTAEKIEAICQRFPEYESLRSIPGFGPDVSSKVLGAIGDPFRFNAHRQVLKLAGLDLGADRSGKDSQKATPRISKKGKADLRYALFQAAHIASTRNTAWMAYHTRQLQGREKEKGIYYKRMVKLAAKLLVIAWTLMKNKEVFDPSYLNQK

SEQ ID NO: 219622 - protein, 338 aa, unidentified
MKTYAGIDLHSSNNFTAVIGNQDQRLYGKRLPNRLDTVLAALEPFKETLDGIVVESTFNWYWLVDGLQAQGYKLHLANPSAIKQYEGLKHTDDKWDSFWLAHMLRLNILPEGYIYPKDKRPVRDLLRRRLLFVRHRTAHILSLQSMISRNLGTNMSCRAIKRLEQGDAEILFHQPYLVLAAKSNIAVIHFLKERIKLIEKAVKAHITLRNEFSYLLTVPGIGDILALTIMVEVGDIHRFPTVGDYSSYCRCVKSERLSNGKKKDENNRKNGNRYLSWAYVEAAHFAIRFSPYAQAFYQRKMAKSNRVVAIKALGNKLARASYYIMRDQVPYDPERLFQ

SEQ ID NO: 219623 - protein, 360 aa, unidentified
MKLSNVESVAWLGLDAHAKFSLLAWMDDQGNRREHWRFPTCESQLVKHLQRVGAQVKHLALEECGLGRWLAQVAKPHVTDVVVCDPRENHHISRHHHKCDEEDGYGLAHLRRLGALKKVWQPTSDERAVFKSAAQAYLDAVARQTALKLQLKAHYRQWGVIPQGSLVYGAERGRYLARVRQEGVRTQLQLLYEALDSALKVESAARRQMAQSGKSIPEINWLQSVPGVGSIGAHIFVAYIQEPSRFETFHQLCRYCRLAIRDRSSDGKPLGFERLDRCGHGVLKAITYRAWLRAMKAKQGAVYEFYQASLLRTGNTVHARLNTQRKILQSLWVLWREKRQFDPKTFLGTEAQPTAKAKCG

SEQ ID NO: 219624 - protein, 411 aa, unidentified
MQRVIGMDIHRTFAEVVFWEAGRLRPGGRVDMTRSGLEGFGRSLSKEDEVVVEATGNAMAVVRVLSPYVARVIVANPLQVKAIAHAHVKTDKIDAGVLASLRAAGFLPEVWLPDADTELRRRLVARRNQVVRHRTRIKNEVHSILQAHLIPPCPHADLFGRLGRSWLGRQELPVDERAAIERHLRELDRLGEDLELLDREIAERVIEDQSVKRLLTITGVNIIVAAGLVAAIGDIRRFSSPQKLVSYVGLNPRVRQSGLGLAQHGRISKRGRSHARAMLVEAAWAASKAPGPLRSFFLRIRARRGHQVAAVAVARKLAVLCWHLLTKDADYQWARPALVANKIRAMQLQAGQPARKGNKRGAAYAYNIKELRDREIDVVRHAEHAYEQFVSRWQPRGPGKRRTGAGNEERR

SEQ ID NO: 219625 - protein, 354 aa, unidentified
MPRKVNQLEAVATLGIDIGKNTFHLVGFDRKGAVALRQKLSRSQVEARLANIPPCLIGMEACVGAHHLSRQLKAHGHDARLMPGRYVRPYSKGPKNDFRDAEAIAEAVLRPTMKFVGIKTVQQLDLQGLHRVRERLVCQRTSVINQIRSFLLERGIAVRQGLRALRTEIPIILAMTDKLSPRMIHMLEDLCTDWRYFDERIDAVSNEIETLSQQDDGARRLMTVPGIGPIISTATVAAIGSGDVFAKGRDFGAWLGLVPRQMSTGGRTVLGPISKRGNRYLRMLFVQAARAVLLRPQSWERHGLKSWIEAAARRLNRFKLAIALANKLARIAWGVLHGGRNFEIRSTKPAPHAA

SEQ ID NO: 219626 - protein, 350 aa, unidentified
MEFFVGLDVSLDETHICVVDEGGRIIKETRAASAPDAIGKAIRHKGRRIEHVGLEAGNLSQWLYEGLVKEGFSVSVMEARHVRAAFAAMRVKTDRHDARGIAQLVRLGWFKRVHVKSLDAQETRALLTARGFLVEKVTATENSLRAALRNFGLKLGSVTRKTWEARARELADGNPVLEGLVEAMLRVRTLLLDELASIDGQLTALAKSDPITRLLMTSPGVGVIVALTFRSAVDNPDRFPRSRDVGAWAGLTPRRWQSGKTDIAGRITKAGDLRVRVMLFEAAASILGRARFMSPLKAWGLRIAKRTSMKKAIVAVSRKLATILLAMWKSGTAYWAAGRPPASAQDFATA

SEQ ID NO: 219627 - protein, 386 aa, unidentified
MPKPNDLSRSFKAFEQDSTLVAIIEMSLTSWLVGGILPGIERHPLKKLDVDEEALLQLLHRWRDEAINAGRKITRIVLAFEAGRDGFWLARWLRARNIEAYVIHPNSVAVSREHRRVKTDRLDTELLKRVFLGWLRGESDHCSMAAIPTLGEEDARRPNRERENLLGERTRIVNRVKACLVRFGVRNFKPTLRKAPERLEALRTPEGGPLPPNSFAELRRDMVRLRFVMGQIKEIEETRLQRLENTPNEGSHAMVRLLARVIGVGIETADMLVHEILSRNLRDQRAVARYAGLTGSPDESGKRRREKGLARAGNARVRRGMIQLAWRFLMFQKESALAQWYRSVTNEARGAIRKTMIVALARKLLIALWRMVRTGEIPQGVALRTA

SEQ ID NO: 219628 - protein, 369 aa, unidentified
MEHMLYVGLDTDSKHIDVALAEPLPQGEVRYWGCIANEPASVDRLIRRLRKNGRELVVCYEAGPCGYGLYRQLNGQPGIACQVVAPSLTPRRPGDRVKTNRRDCLSLAKLLRAQELTAIWVPDAAHEAMRDLVRARSAAKGDLNRCRQRIGGFLLRQGIRYGAGKTWSKRHRVWLGQLAFAEAAHALMFAELLDALDQAQARHARLIEHIRELVPGWSLAWLVDAIQALRGYRLINAATVIAEIGDPRRFSSPRPLMAFVGAVPSEHSTGDSIRRGGITKTGNGRARKALIEAAWTYSRPSKAAPRTTHHAPAVRAIADKARHRLSGRYRRLLARGKLPQVAVTAIARESLGFIWAIAHAAAPDATRQG

SEQ ID NO: 219629 - protein, 394 aa, unidentified
MHKDAHCAVVIDCWMNKLGEVNFENRPSRFPAFVEDVRKICGIKEIVFGLEDTRGFGRNLAAYLVGRKFEVKHVNPAYTSAVRLANPIIYKDDSYDAYCVARVLRDMVDTLQDAKHEDIFWTIRQIVKRRDLIVKSNVMNKNQLHSQLAYSYPSYRKFFAIIDSKSALCFWENYPSPEYIWNTTPEEIYHTIKPVHQALKIQRIHEIISMIERDGDTRKDYQPERDFIVRNIVKDIRHNKELIAEIDGELRKLIPLTGYKLHTMPGIDLVTEAQIISEIGDINRFPDSDKLARFMGLAPVQFSSAGKGKDQRCRNGNRALNAIFHFLAIQMVAVSASGKPRHPVFREYFEQKVKEGKNKPQALVCVARRLVRIIYGMMKTRTEYRPYEKTDDKN

SEQ ID NO: 219630 - protein, 352 aa, unidentified
MKFQRVREEESEMNATTFSVDLASQVFQVHGYDRQQQRVSKKRLSRSRFQAWCEALPAGTRVVMEATGSAHHWGRVLQARGVRVKLLPPQHVKAMLIGNKTDANDADAIFEASWRPKVKPVPVKSAAQQAILAEHRRREGLIRDRTRTLNQMRGLLREFGILIGARNGPFRRQVAGVLEDAENGLPWRLRTLLAEAREDLLHLDGQLGKIDARLELLARQDPLCRRLQAIEGIGPVSATALAASLGEGRRFSRARQFAASLGLVPREHSSGTQHRLGSITKRGNGYLRYLLVHGARSVIRTAGHKTDPRSRWLQSLEARAGHNKTTVALANKNARIVWAVFQSGQPYRPACA

SEQ ID NO: 219631 - protein, 384 aa, unidentified
MDGEALQVAVDVGCRRHHAAGFEDFFRRIEAQRRDDQQPVWVAMEGCNGYARPLDQQVRARGYRLLNINNLKLARFKELFPGPAKTDALDTHRMLELLRVQAHVPLAKRIVQEVRGVPLANAKLQRLTRRRRQLIAEKVRIVNRMQAELHAACPGLLAITRSASSRWFLGLLACRDDLRQLARLRSTTLRTIPRVGVKHAAIIAAWQRAAYFSEDVEWVGSMIIADARRILALLQEIQQLEKQITATAPASQLYQRMTSVPGFGLVSCAELAGEIGDHRRFDGEASLALYLGATSLDNTSGQQQGTKTARQVNRRAKAALMNAVDHHRRGAVPASRVYYEKKRAQGKTHNQAIRALARHMVRVLWSMFVHDRDYELRENPSHAT

SEQ ID NO: 219632 - protein, 413 aa, unidentified
MDLLHDRCAGLDVSKKDVKACVRSPGARANQRHAEVRTFATTTNTLLELRDWLIEQGVTLIAMEATGDYWRPPFYVLEDDLNVILVNPAHAKGLPGRKSDVTDSMWLAQLAECGLLKASFVPPAPIRQLRDLTRYRTTLSREHTREAARLEKELEDSGIKISSVATDILGVSGRAMLEALIAGERDPQVLAQMAKGRMRTKINALTQALVGRFGQHHAFLCRMHLDRLDALEEDIAKLSTRIEQALEPFRETLARLDTIPGVGPDVAEVIIAETGADMSRFPTPGHLASWAGVAPGLNQSGERHKPAHTRHGDHWLTGALGVAAMAANRTKDTTFLGARYRRLARRIGKLKALVAIEHSILTAVWHVLSENTDYHDLGGDYHAKRDPQRVLRRITRDANRLGYTVRFDPIQAA

SEQ ID NO: 219633 - protein, 425 aa, unidentified
MNFKQNQKINQVTENTLVVGIDIAKRKHFACFVDDRGRVLQKSFPVLQSSDGFQCFYQRILTAMKEYEKTEVIVGIEPTGHYWLNLAYFLEERGIPLVMTNPLHVKKSKELDDNLPTKHDRKDALVIARLIKDGRFSYPRILKDMEAELRVGSTFRGKLTEELSAVKNMIIRWLDRYFPEFTQIFPSFGKMAMAVLECTPFPSDLQQKQADEVLSLYRKIEGLKSPQRPKAVRLIEVAAYSIGVTEGREMARIEIATLVRRYHQLEQDIERITQHLVELVKTSVEYEWLSTVPGLGDTTIVDLLAEIGSFSYYEDPRQLIKLAGLTLRESSSGQHKGQKRISKRGRRKLRALLFRVMMPMIRHNEAFRKLHEYYTNRQVNPLRKKQSIVVLCGKLLKVLHGISTKHKAFDAQRMMKDIPSLAEAI

SEQ ID NO: 219634 - protein, 439 aa, unidentified
MKPTYYVGLDVHKETISIAYALGGSRDDATYHGQCGGSVAAAVKALQKLAEKLKIEIRDLKVCYEAGPTGFVLARQLIKKGVDCVLMSPSKTERKPGDKIKTDKRDACNIARLFRNGDITQVRIPPVLDEAVRDVCRARTDATDDLTRAKQRLNAFLLRNGFNYTGKSKWTAAHMRYLRELTMPSDPQRIVLEESIQAIESCENRIERLVTKMKQILETWEWKPIVQAVMAFKGFQEVAAMTLISELGDLRRFDHPRKLMAFLGLVPSEASSGGKKRQGAITKCGNSHSRWMLVECAQHFRKAPRISPALTTRQEGQSEQVKALSWRMQNRLYNRYVKLKARGKTETKIIVAIARELSAFLWELQNKLKLPVPGVSPTAAVGGVSGTDHGAAAPNPAELRQLDPICFPLNPQGDFSPPVPQGSGGKRLKKPLLAKGMTL

SEQ ID NO: 219635 - protein, 410 aa, unidentified
METIKDRVAGLDVHRDRVVACARIVEGTRVRTVKQSFSTMRAGVTEAGEWLNSLGVTLAVLESTGVYWKPVYYGLEHRVAELWLVNAMHVKRVPGRKTDVSDVEWLADVAAHGMVRASFVPPPPIRELRELTRYRKTQVDARTREIQRLEKVLQDAGIKLSSVASGTWSKSAQAMIEAMIAGERDPEVLAEMSLSRMRAKKTALAEALVGDFGAHHGVVARQIIDHIAFLDSSIDELTDQITQRMVRFEGAITLLCQIPGWGRKTAEVFIAETGGDMTVFPTPAQLASWSGMAPGTHESAGKRRPAASIRGNRWLGRALIEAARAAARTKGTYLAAQYRRIAARRGPNRASVAVAHTMVVSAWHMLTTGETYRELGADYFTRRHDPERRARHLTNQLRQLGYEVTVTQAA

SEQ ID NO: 219636 - protein, 407 aa, unidentified
MSLDHPREEPTAIRTNLGAIFVSLELSRSTWLITSLSPGSGEKLSKHSVPAGDIAALLMRFCELEQKALARTGKTFPVIVIQEAGLDGFWIHRALQSEGIESYVVDPASIATSRRRRRAKTDRIDGEALVRALLAYKRGEPRVCAMVRAPTPEDEDSRRLCRERKTLTIERVQHVNPRRMRSIRPVIKGLLFSQGVSGYEPLRRNRRQRLDELKTGDGRPLPPHFKAQIGRELDRLELLLGQIKAVETERDALLAPTAKNDEAPAPQAQTSARNRLAMLMQLKAIGPEFAAVLWSEGLIRSFTNRKQVAAYAGLAPTPWQSGSVALEQGVSKSGNARLRSTMIELAWMWVRHQPHSALTRWFNERVKRNGGRLRKTTIVALARKLLVALWKYVNAGVVIEGAVLKRG

SEQ ID NO: 219637 - protein, 327 aa, unidentified
MNSLNIFATKIFNMEKAIEKVIEYPQIVEVGCGLDVHKDIIVGTIRRGNQRFETREFGADTSSLTSLRDWCKQAGVTHIAMESTGIYWKPVFNILEEDFKIMLVNARHVKNVPGHKTDKKDSAWLSKLLLSGLLKASFIPPQDIRELRDLVRYKKKLIGQIASEKNRIIKVLEDCNIKLSSVLSDVSGSVGTKIIDALISGERDVDLLMSFYHGKIKVSREDFRKALTGRITPHHIRMLQFHKKHIEDTESLIETVDEEIDKAAAAYSVEIDLLQTIDGIGKDGAITIISEIGVDMSNFPNEHHLASWAGVSPGNNESGGKKKMPKP

SEQ ID NO: 219638 - protein, 399 aa, unidentified
MDNITYVGLDVHKATVCVAIAEGGRGGEVRQVGVFENRPDILCKLAARLDKGNRRLSFCYEAGPCGYGLQRLLTSRGHDCIVVAPSLIPMKSGDRVKTDRRDAMMLAKLHRAGELTAVWVPDAAHEAMRDLVRARATAGRVLAKARQHLQGFLLRHERIYRGPRAWTLAYRRWLTTVRLDHPAQQIVLQDYIHAVEDAEARRDRLTRQIEELLPSWSMAPVVEALQAMRGVGLVVAVTVAAEVGDFRRFANARQLMAYLGLVPSEHSSGAAIRRGGITKAGNALARRVLIEGAWTYRMKARVSRKLHDRLEPLSTEIRDIAWKAQVRLCARYRRLAALGKPSVVATTAIAREMVGFIWAIARRVQSAVEDQRTHSAHAEAPMLTAAAKPCGFAAALGRR

SEQ ID NO: 219639 - protein, 342 aa, unidentified
MKDMMIGVDLAKNVFQVHGALRAGEVQFRKKLTRKQFPAFMAKQDPCLVIFEACGGAHYWACEMEALGHEVKLIAPQYARPFVKRQKNDAADAEAIVIAARQPEMRFVAPKTVEQQSRAAVFRGRERLVHQRTADVNALRGLLYEHGHVFPAGIRHLDRMTALVKDETTDLPALIREECQDLLAQIAEKTARITARTAKLKTLAVQSDRARRLQTMPGVGPLTVVAVEAFGPDMAQFKTGRDFAAWLGLVPKQHTSGGKQRLGRMTKAGQADIRRLLIIGAMSRLGWLGQRTITEGSWLSRMLARKPKMLVAIVLANKMARQVWAMLTKNEDYKDPALAVAA

SEQ ID NO: 219640 - protein, 320 aa, unidentified
MSASSVVVGIDVAKAHVDVSVLGTQFDAQRFDNQAEGHSALTAALQPLDVALVVMEATGGYETELACALQAAGLAVAVVNPRQARDFAKSMGRLAKTDAVDARMLAEFAAVLLRRDDIARFLRPLADSQQQWLAALVTRRRQLLAMLLSERQRLQITPKGLHPSIEAIVAAIKAQLDDIEHQMVGHVREHFGELDALLQSASGIGPVASATLIAELPELGRLNRREIAALVGIAPMANDSGSCKGRRRIQGGRFDVRRVLYMAALTASRRNPVIKAFYERLIAAGKLPKVALVACMRKLLTTLNAMVRTNQPWNNSLHAT

SEQ ID NO: 219641 - protein, 342 aa, unidentified
MGTLMVMGVDSHLDTVAAAVVDANGAQVALLEAKNTEVGWSELVRLCVVHEVSTVGIEGASGYGRRLAQTMVGAGLEVKEVPTRLTASTRRVDGAGKTDPGDARTIARAVARGEGNRWVDDPALETLRVLSNRRDQLVRLQTAEINQLRALLAEVDPEAAAEMPSLRSRHQFVALTSFEAAGDVHREMVAQLVRDLAEGCLARWGQINRLGRQLDELMPEAGRRIIDTIPGAGVVATAQLLAELAGTGGFATEAGMAAWAGIAPLDASSGRQQRHRLNRGGNRQANKVIHLIVTTQLKPGGEAAAYVARRMSEGKTKKEAIRAAKRYVIRRIWRTLNTTELT

SEQ ID NO: 219642 - protein, 394 aa, unidentified
MSMAIQSGKDKVVIAVDPHKASWTASAVDSSLQPLASVRVPVSRDGYQALRRFARQWPTAGWAIEGATGLGAPLTTWLRTDGIEVVDVPAKLAARVRVLSSGHGRKNDDADALSVGIAALTSPALRTAEIDAATTALRAIVEHRDDLVKTRTQTINRLHVVLTRLVPAGAKRHLSADHAAEVLRGVRPRDPAAKTLRALAMDLVSEVRQLDRQIAKAANDIQMAVSASGATLTKLHGLGVLTAGKILGRVGDVRRFRSAAAFASYTGTAPIEVSSGDVVRHRLSRAGDRQLNFCLHVMAIAQVRHNTSGRAYYLRKRSEGKSRNEAMRCLKRRLSDIVYRQLIRDADTKGGLGRTLGGGSIVSRGRLIPRTPALQTSHFPSPPPKSTTRHKPTT

SEQ ID NO: 219643 - protein, 352 aa, unidentified
MEHVYMGIDVGKKFCFFCVLNEEGERIELSQVPTLDAAAWRKLLVRFQDVELHVCFEIGTHYEWMYDLLRNFAVDVQVVNPEAFALIARSQKKTDKIDCQKLAEGLRRGDLPVVYVPEKRVREDRRLAAHIHALSRLSTSVKNRIRNLLFMARLECKYTSLERPGAIRWLKEIALPTLGHTDRLILNMLLEQLELIAAQQQQIEKTVQERLKDYSDVTLVRSIPGFGPLVSLSVLCAIAEIGRFETPDQLASYFGLCGRTYQSGASLYQGNITKRGNKHVRWLLGQAVTLLIRADPKARARYMKLRRKKRPKIARVALMRWMSTVLWRMMKSREEYRINGVAGAYRRKKEAA

SEQ ID NO: 219644 - protein, 348 aa, unidentified
MRFYTKQHKYSCGIDLHARSMYICILDEEGKTVLHKNRKATPDAFLRAIAPYREDIVVAVECMFVWYWLADLCAKEKIPFVLGHALYMKAIHGGKSKNDRIDSHKIALLLRGGTFPVAYVYPRKMRSTRDLLRRRNYLVRKRSELLAHIQNTNSQYNLPELGKKIAVKANRDGVAEHFPDPSVRKSIEVDLELLDFYDRLLNELERYIEKSAKGHNIHSWYLLRSIPGVGKILSLVLLYEIHDIRRFPRVQDFVSYCRLVKCPRESAGKRFGTKNSKIGNVHLKWAFSEAACFFIRVNEQAQHYHSRLVSKHGKGKALSILAHKIGRAVYFMLKRKEPFSMETFFAQA

SEQ ID NO: 219645 - protein, 341 aa, unidentified
MNQVVTIGLDIAKSVFQLHGVDGDGAVVLRKRLTRSRMLPFFEKQTPCIVGLEACGSAHYWARELSRFGHDVRLIPPSYVKPYVKRQKNDAADAEAICEAVMRPSMRFVPIKAAEQQGMMVAHRTRSILTRQRTQLSNAIRGHMAEFGFVAPVGRNGLEILISVINDTADERVPSAARTSLLILVTQLRLVNEQILESDRCIIASARSTEVGRRLMGIPGVGPVLASALVATIADPKSFSSGRNLAAWIGLVPRQNSSGGKERLSGITKQGDRYLRQLLVVGAVAVIRYAQRNGARRPWLVQLLARRTPKVAAVALANKNARMVWAIMTSSERYREPLAVQ

SEQ ID NO: 219646 - protein, 429 aa, unidentified
MPILQSTQEPAVLVAIDIAKSRHEVLMEAPGWKSRKRLVLLNTAVEFRRFADYLHTLRHPVRIVFEATGNYHRPLAHFLMSEGFHLSLAPSLAVARTREAMHNSWDKNDPKDAQVLLHLLKTDVIQHYHDPLANHVHDLQELSMTHAQVSLEKTRTQHRLLTHYLPLYFPEIERYYCSSRSEWLLDLLYAFPTPASITRLPMDEFVKQAWPVAGRKVAKQRLLEDIYRTAQSSIGLPVSEDSEAVSMFRVVLSELKHLCQLRHQLEERAEHHLNDSSDFQRLQKIPGIGPILALTILAEAGDLRRFHHHRQFLKFCGLDLSTQQSGQFRGTTKLSKHGNARLRCAFWMAATVAVRQTENSFRDKFERYLRKNPTSTDRKRMAYVAVAAKMARVVYGVIKSGTDYRCFHEVAAPSGRADSVRAVEATRTS

SEQ ID NO: 219647 - protein, 350 aa, unidentified
MNINHYIGFDVHKKSISYCVKTADGKIIEEGKLRATHRVLREWAQKRAEPWHGALEATLFSSWIYDALKPFAAELQMGNPSMMKAIGAAKKKNDQLDARKIADLVRCNLLPVCYVAPPEMRDLRRLLRYRNLVVGQSVQMKNRMSGLLMEVGAEYNKQRLHGAKYFSELLDQLEEVPESVKDLLRLSRGALETFAATQRQLLDRLQKEPVLVKRVKLLKSIAGVGEVTALTWALEVCDPRRFSSIGDAVSYCGLTSALNASADKQQRGPISKQRNAHLQTVLIEAAKLAPRWNKQLAELHERELKRGNRNRATLAVARKLVAYLLAVDKSGKPFEVRRPVASEGKVSQVA

SEQ ID NO: 219648 - protein, 370 aa, unidentified
MRHHNEAFIGIDTSKLRNAVAIAEGGRDGEVRYLGEIPNTEAAIRKLVAKLAAKYGRLTFCYEAGPTGYGLYRLIRSLGHDCMVAAPSLIPKKPGERVKTNRRDGLSVARLLRAGELTAVWVPDERHEAMRDLSRARLAAHKDLRGKRQQLISMMLRLGKIYPGTKTWGPAHMNWLMAQKLEHREQRIAFEELMEGIRQESERVERLEEAIRDAVPEWSLAEVVTAVQAMRGIDLIAAVAVLAEIGDLSRFRNPRELMGYLGLVPSESSTGDTVKRGGITKAGNGRARRVLIESAWSYRHPPRVSRKKQAKVAAAPKAAREIAWKAQVRLCRRYRSLERKGKPRTVIATAIARELSAFIWAINREVMASR

SEQ ID NO: 219649 - protein, 281 aa, unidentified
MKKYLVTVGIDVSKLKLDVRFVVEPANTEHPHIIVANNEKGIKTILTFLKKQKIQPADALFCFENTGLYSMPLAIFLSKHQLDYWDIAAVEIKRSKGIARGKSDKTDAKDIAYYAITHSHKLKLCKIPEQDILKLQLLYSERDKLLKAIHIMQTSAEANEFLPKEIVRTIMAVNNRTLTQLKTSLKQIDNRIISIVNDNKTISACFQLATSVPGIGKQSAVYLIIKTRCFTRFDNWRKLACYAGIAPFEYFSGSSIRGKTKVSHLADKKNEIIIKYGCIKC

SEQ ID NO: 219650 - protein, 256 aa, unidentified
MYQLGIDISKTKFDACLLLEDKAPHKTFGNSYDWFQELLCWLREHKTNAVHACMEGTGRLWEPLADFLHAEKFVVSVVNPARIKGFAQSDMRRSKTDKIDAKIIARFSRAQTPMAWVPPPPEIKAIRDMQRYVEELTEHRTQEKNRLQSGVLDERVHRSIGQHIEYLDNEIETLETEILELIHRYPKLRRDYDLLTSIIGVGQTAAVTFLGELSAASHFASSRELEVFCGITPRLLRSLDEEYGRFFVPPLKKGSR

SEQ ID NO: 219651 - protein, 349 aa, unidentified
MTDQRLSYVGQNVYVGVDVHKDTYTVTCIHNKRIVKTATVQADPASLAASLPRWFQGAKLSSVYEAGFSAFVLHRSLTKAGITNIVVNPASVAVAANDKVKTDRRDSKKLAFDLADGRLRGIYVPTEEEELARLLPRTRAQIVEHRATIARQIKAKLHQFGLIAPSCRRLISNRYLREIAAWSLPPELQASLTLLAEQWRFATRQLIEMRRLLREQAQAQEAIDKVYRSVPGIGEVVARTLATELGDMTRFANERALFSYTGLTPSEHSSGTSVRRGHISRQGSSRVRHLLIETAWRALPRDAVLKEMFDRIAATRGKKRAIVAIARRLTGRMRACFRQGTTYAVGTYA

SEQ ID NO: 219652 - protein, 441 aa, unidentified
MAMRKRDEEGVFPNAAGIDVGASSHWVAVPRHAREDSVREFGAMTDDLNAMADWLLACGVDTVALESTGVYWIPVYEVLEQRGLKVWLVDARQMKYVPGRKSDVQDCQWLQKLMSLGFLRAAWRPEGEVCVVRAVARQREVLLTEQASWVQRMQKSLVQMNIQLTEVLTDVMGMSGQAIIRAIVAGERDPKALARHRNSRVKASAEQITKALTGNWRDEHLFVLRQALAMYDDIARHLSECDTKLQALLTELGQAKLDLGKAPRAGSKSRADFDVRQTLANWAGVDLTRINGLGLTAVMKILSEIGPDLSRFANVKHFCSWLGLCPGTKISGGKVLSAKTKRSVNRVRQALKMAAMSLSHSDSALGAFYRRLCSRMDKPRANTAVAHKLARMVYFMLTRGEGFADQGQQRYEEQQHQRSVAALKRRAAALGFDINPTSAPA

SEQ ID NO: 219653 - protein, 322 aa, unidentified
MSLPKPLCVGIDVSKATLDIAASSVIEQFSVGNDADGFDSIIAELRTREVALVLMEATGGLEAAVASTLQVEGFEIAVVNPRQARDFARAMGYLAKTDRIDARALAQMAEVINRHPERNRFIRALPDAERQVLNAMVVRRRQLIAMLVAERNRLYPAHPQSRKSINIIMKTLDNELARIDEGMNNHIRNHFKELSERLSSIKGVGTMTVAALLAEAPELGRLSRRGISALVGVAPVNRDSGTMRGRRTIFGGRAGVRTALYMAALVATRFNPVIKAFYMRLVSVGKPKKVALVACMRKLLTILNAMLRKNEEWNESYHHVAP

SEQ ID NO: 219654 - protein, 316 aa, unidentified
MSEPVYVGIDVAKNSFEVAVTSESQTLNLSNDEAGHGELCQLLVPLAPRLVLLEATGGYERDLALALAAAGLRVSVINPRQARDYARCVGKLAKTDRIDAQVLRGFAAMLDAQGHAPRALADEQQRELTALVTRRRQLVAMLVAERQRLAVAHPRAKRSIVQIMDAIAQQLHDVDGELKTHIQAYHADLARLLTSVKGVGPTTASTLLAQLPEIGKLNRKQITSLVGLAPMNRDSGSLRGQRHIFGGRADVRRVLFVAALVGTRFNPTLKAFYARLLAAGKPKKVALVACMHKLLVILNAIARTKSPWSNEIAGVA

SEQ ID NO: 219655 - protein, 348 aa, unidentified
MRFYTKTHKHYCGIDLHARKMFLCILNGSGEVLLHRNIATSPESFLQAVAPFRDDLVVGVECMFAWYWLADLCSREGIEFILGHALFMKAVHGGKAKNDKIDSHKIAVLLRGGSFPVAYVYPPEMRATRDLLRRRNYLVHKRAELLAHIQCTAIQYNLPAIAVDLTYKGNRKEVDQHFPDPQVRKIVQVDLAMIDAYDDVLKVLELDIEKTAKRQDWHALMLLRSIRGVGHILGLVMLYEIHDIERFQTVQDFASYCRLVKCIHESNSKKKGTGGAKIGNAHLKWAFSEAAALFVRHNPSAKKMVDDLIKLHGKGKALTILAHKLARAIYYMLKKNVPFNLEKFLATA

SEQ ID NO: 219656 - protein, 338 aa, unidentified
MNKFNHFVGIDISKKTFDAAIIVGSNTDSIKHQAFKQNAEGFTEFLDWLAYYKVTNDDVLICMEHTGLYTYGLIDFLEAASLNVWVEMPLRIKRSMGLQRGGDDKAAAIQIALYAYRYKDQVSLWKPEQKIVLQLRQFSAQRDRLKLALNQLLIPLREIADSNNDEAILKVQLKLQAPVIKAIEKSIASIETQIDNLIAAEPAIQATIARVSSIKGVGKQTAIHVFIYTKGFTTFSSGKQLASYCGVVPFTKTSGTSVRYKTQVSPFANKHLKKLLHLCAMAAIQHNDELRCYYNRKIEEGKNKMSVINAVRNKLVQRIFAVVRDERNYVENYQYQRA

SEQ ID NO: 219657 - protein, 325 aa, unidentified
MQSETNYTGIDISKSSFDVATARQGKYEFNKFSNDGQGFGSLLKVLPASSHVVMEASGPYYLQLACYLAGHDIAVSVVNPLVVRRFCQMRMSRAKTDKKDAMMIAEYGKTEKPGLWQVPKQHVITLQQMEALMAGLNKERTALGNQLESFTHGGMVEKQLKTMIAQELEHKDGLIKKLSKAMETLAGEHYAEMLLDLESIPGMGRKTAMALIVLSGGFERFDDYRKLSSYIGICPRIFESGTSVKGKARICKMGMSRVRAMLYVCSWSAKRYNKPCKELYDRLVTKGKAKKQALIAVANKLLKQAFAMATQQTKYNENYSNIICN

SEQ ID NO: 219658 - protein, 411 aa, unidentified
MEALYPCVAGLDVHQRIIVACRRRLLGTSQAESEVEKFGTSTRELKRLAAWLGEWGVKQVAMESTGVLWHPVWNVLCEEFELKLVNAQHLKKVPGRKSDVTDAEWLAQCLQYGLLRGSFVPSTQVREWRDLTRQRTKLLDQRTSVVNRIHKTLEGCNIKLSTVASDIFGVSGRAMLKALSEGTQDAEKLASLAQGRLQASHEELVASLEGQVSAHQQWLLQRMLKQVEFLESEIEHYDQRLAELMRPFEAALERLDTIDGVGRRTAEVLLAELGSEMSQFPDDEALTKWAGMCPGNHESAGKQKHGRTAKGNKWLRRALVSAAHAASRTKNTYLSARFARLARGGKKRAAVAVGRTILVAAYHILKDEVDYRDLGGDYFEKRTEAQTTRRLVKQLERFGYEVELHRLPDAA

SEQ ID NO: 219659 - protein, 341 aa, unidentified
MNQVSTVGLDLAKHLFQLHGADSAGAVVFRKRLRRGQLLAFLATLPPCTVAMEACGSAHYWGREIAKLGHTVKLIAPAYVKPFVKRQKNDMADAEAICEAAQRPTMRFVALKSANQQAAAVVFRTRDLLVRQRTQAINALRGHLAEFGVIASKGLVHTSKLIAALEDPASDLPQAARGILAVLVEELRSLDERVAVLDREIARHAKENAVARRLMTVPGIGAVTAAALTALAPPADTFRRGRDFAAWLGLTPVQRSSGGKERLGKTSKMGERALRRLLIIGASAVARWAARKGVPAGSWLGRMLARKPPMLVRVALANKMARIVWALLAKGGVYRAPGAAV

SEQ ID NO: 219660 - protein, 347 aa, unidentified
MDKISTIGLDIAKNVFQVHGVDAAGHAVLCRQLKRNELLKFFRKLSPCVVGMEACASAHYWGREIAALGHDVRLMPPTAVKPYVKRGKKNDQADAAGCYEAVCRPSMKFVPIKTPEQQAILMQHRARRLLVQQRTRLSNAIRAHIAEFGVVAAKGNAGFAALLAFLANEQDEHLPAAIRPILAPLVEQWRSAGEQIVVLERQIAAWHKSDNDSQRVATIPHFGPIIASAFVATVSDPTRFENGRQCSAWLGMVPSQHSTGGKTCLGPITKAGDRYLRQLLVLGATGLIRRVKADPTISPWIAGLLKRMPAKKAALAVANKLARTAWAVLVSGETYKAPSTDEIAAAA

SEQ ID NO: 219661 - protein, 339 aa, unidentified
MTEFKLIAMDTSKHVFTLHGLDAGGRTVLRLELTRAKVEAFFEKLLPTEVVLEACGGSHHWGRRLAALGHSVRLLPPQYVKPFVKRGKNDRIDAEAIAEAALRPNINPVPVKSAETQAQTMVLSVRELLVKQRTQLVNALRGHATEFGLIAAKGPCNVARLLENIAADPAVPACAQAMFVELGEAIAAVSARVKELDRELGRQHRSNPISQHLAEVPGIGPVGALTLALTIDPKQFRSARHFAAWLGLTPKEHSTGGKQRLGGISRQGNERLRQLLVLGATSVVKVANPGRKNTSTWLLELLARKPRKLVAVALANKMARIVWAMMTSGEAYRPQPVAA

SEQ ID NO: 219662 - protein, 411 aa, unidentified
MVNKSCGLDIHKCFLIATILSRSGEKKQERFQRNEDGILALRNWVLSEKCDVVACESTSDFWVPIYDTLIKHLPVIVGNARDMKAFTHKKTDKVDSEFIAKLALNNMIQSSRVFPKNHRGFRSNIRLRHELVQKRTDIKNEAHSILAPEMFNLKDVLTDIFGKNGRNILSGITSGKSIDEIIGCLSPYVRKKSSQIREILNKEISQNAIFRLQICLELIKHLDGEIESLEKEIFSYAYRNYKREMEILMSVPGIGELGAATLVAEIGNFKDFSSGDKLASWLGVVPNVYQSADKFYNGRITKRGSKEARWILTQIAQSASRKKNSKLKEFFNRKKKSIGHSKSIIALARKIVTIIWHLVTNDEMYEDGTGYQKGEIQKKKIVDIEPFSIDESIKIISGIIAIVKKKEGESM

SEQ ID NO: 219663 - protein, 371 aa, unidentified
MMHNNNNIQGSSQEYFIGLDVHKKNWTVCIRNSGLFLRKFSMNPSPVELYNFLKKNYPGGTYYTVYEAGYCGYWIDRELRKLGINNIIVSPSDIPTSSRDKYEKTDPRDARNLAVHLQNKIIKGIYIPDDLQLHLRSLSRLRCQLIKQQTRLKNQIKAYLYFYGISLPENSVMLHWTGKFIEHLRSLQFNHLTGKQQLEIYITSLLKVREEILNTMRLLRNTLKENHLDQIILRLCTVPGIGFTTAVTLFTELIDIKRFSSFDRLVSFVGLSPSKRKSADKEKTLGISFHYNKYLRSMLVESAWIAVRKDPSLTNLYGQYIRRMSKQEAVIRIAKKLLSRIRYVWLNNKDYKDQNSYKEQKKIKLRKIKIS

SEQ ID NO: 219664 - protein, 407 aa, unidentified
MEMLHSRCAGLDVHKDLVVASARMVEEGVIRRESARFGTSTRELLRLQEWLLSRRVTHVAMESTGVYWKPVWHILEGSVELVLGNARAMRNVPGRKSDQSDAAWIADLLAHGLIKSSFVPPERIQALRDLTRTRTQMMHERGRQVQRLQKVLEDANIKLASVLSDITGVSGRKMLVALANGATDARAMAKLADPRVKAPEQEIVQALEGCVTAHHRFMISFHLRHIDELDALVVSLEGRIEEELAPFRHVIEHLITMPGVKEDAAAAIVAEIGVDMSVFPTAGHLAVWAGVSPGLNETGGKKKPARTKKQRWLKAKMTQCAWAAVKKRDSYLCAKYHRIRARRGKQKAIVAVAATMLHAIYHMIQNDVDYQDLGPDHFNRFDRERAAKRLRRRLEKLGYSVEMRKAA

SEQ ID NO: 219665 - protein, 291 aa, unidentified
MQQQRQYVGIDLHRRRSVIVRMTEDGEVLETARIINDPVAMSLELAKAGPDPEVALEACYGWYWAADLLEANGASVHLVHPLGLHWDSRRVKNDERDATELAHRLRRRDLPESWIAPPEVRELRELVRYRAKLTALRTSAKAQVHAVMAKCGVVPAVPDMFTAKGQVLLDEMPIDGPYRYRVDSLRQLLERFEAELVVVEKQLHDCLSRHAGFKAIQAVHGVGPITGAIFVAEIGDVTRFASARHLCSWAGLTPTHRESDTKVQRGHITKQGSNLVRWAAVEAVTRYHGGR

SEQ ID NO: 219666 - protein, 369 aa, unidentified
MAVPHSDGVNGVRTGRPQASRRDRCGVFAAIDVSLELSSVCVVDGTGKIICEKKVASEPEALVAWFNDTGLEFTRIGLEAGPLSQWLHAGLTAAGLSAILIETRHVKAALKAMTVKTDRNDARGMAQLMRMGWFRPVHVKTVPAQEIRALLTGRKLLLGKLRDVELGIRGLLRGFGLKVGRVSKGRYEARIRGLTAGHPMLEPVAAAMLQARMSLRAEYGKLHRMLLGTVRADATCRRLMTVPGVGPVVAMSYKTAVDDPARFRKSRELGPYFGLTPSKYQSGEVDWTGRISKVGDAMVRTALFEAANVMLSRVTRFSTLKAWALRVAKLRGMKRAKVALARKLAVVLHRMWVDGTDFRWRKMSAAVAA

SEQ ID NO: 219667 - protein, 427 aa, unidentified
MKSNTQNKKIEAITEKTLVIGIDVGSETHYARAFDYRGIEFSKKPFKFSNSEAGFEMFKAWILDIKEKHEKDKVVPGMEPTGHYWFNLGKFLQDNEMKPVLVNPHHVKKSKELDDNNPTKNNRKDPKVIAGLVKEGRYMIPYLPDGIYADLRTASNMRFQIQSELTRVQNRISRWFNIYFPEYKTVYGKPDAISGMMILKKAPLPEDILTLGVEGVNQIWRDAKIRAVGKKRAQTLVEAARHSVGTKEGATAARIEIRMLLEDYESRNNRLQEVMFLIEELVKQIPMAEKLMEIKGVGIKTVSGFLAEVGDITRFSSPKELQKLAGLALVENSSGKHKGQTTISRRGRKRLRYLLFEVAMSLVGKNPEFGTLHHYYTTRKVNPLKKMQSLMAVATKLIRVFYAMLTKGVEYDSAKMLGDIKRPAVYM

SEQ ID NO: 219668 - protein, 343 aa, unidentified
MQAVTTIGLDIAKSVFQVHGIDAEGNVIVRRQLKRRHILTFFQKLPLCLVGIEACASSHHWSREIKALGHTVRLMPPAYVKPYVKRQKNDATDAEAICEAVRRPTMRFVETKTPEQQSCLTLHRTRHLFIRQQTAVINAIRAHLAEFGIVASVGRQGVDKLLDIVADARDTRLPEVARACLAALGNQLRMLKAQILNFDRMITAWHRSNETSKRLDALPGVGPALATALVASVADPKAFRSGRDFSAWVGLVPKQNSSGGKQKLGSISKQGDRYLRSLFTAGALAVIRYAKIHGTGHRPWLTALLARRPTKIAAIALANKIARMAWAMMARGERYREPVALAA

SEQ ID NO: 219669 - protein, 464 aa, unidentified
MQDLRTLPAAEPEFAAYVGIDWADKEHACSLLAGGGKVVEKTKIKQDPETLAAWAASLAARFEGRPVAVCLEQARGPLFYALQQFNHLVLYPMHPAASARYRSVMLPSGSKDDPKDAGLLLDFLLRHRERLQPYQPDTELTRKLRLLVEHRRNLVDERTAATNRIQAALKVYFPQILGWFDEIDAPMVAAFLQRWPTLEVLQKEEPEALRKFFHQHRCRSSKRIDERLEQIGRARPAITDAAVIEPSRMLVETQLGVVAALQQGIAKLENAIQQTAAAHPDYAIFESFPGAGPALAPRLLAAFGSLRDLFDCADQMLSYSGIAPVVSRSGNTKWVHFRWACPKFLRQTFHEFAAASIQQCSWAREFYDQQKLKNKGHHAALRALAFKWIRILYRCWKKHELYTEDTYLRSRLHRASAVEDQSSKTTPKIRLPQPVAPTQAHVQNTVEYQWKCSIGFWTVGSTEA

SEQ ID NO: 219670 - protein, 340 aa, unidentified
MAEVNMIGIDLAKNVFQLHGATADGQVVFRKKLSRSGLLAFLEKQPRCVVAMEACGGAHHWGRRIGAQGHEVRLMAPRYVKPFVKRQKNDQADAEAIVDAASRKNMRFVAVKDEDRQAKAMRHNVRGQMIRQRTALINSLRGHLAEFGIVVPKGKAHVAKLGAVVAEPDAGLPPLVVDLARSQLEMIEDLDRRIRELDRAVRQEARTDEVIRRLTTIPGLGPIIGTAMRALGPSPESFRRGRDFAASLGLVPKQHSTGGQTRLGRLSKEGQKELRRLLITGSMAVVRHAKRKGTDDPWLARQIATKPAIAVAIALANKMARIAWALMVHGGVYRAPATAS

SEQ ID NO: 219671 - protein, 412 aa, unidentified
METLVERGCGLDVHQATVVACLLIVRKDGKVQKQIRTFGTTTRELVSLREWLLSEGCSHVAMESTGVYWKPVYAILEGEGTFKIVVANAQHVKKVPGRKTDVKDAEWIAELLCHGLLRSSFVPPKAIRELRDLTRYRRKLVESQVAERNRLLKLLESANIKLASVAADVFGLSGQLMLRALIEGKASPHEMSELAKGRMRAKIPELEPALERKLEEHHRFLLRLQLQRLEAGEKDLAVLEQRIQEKLKPYEAQLALLDEIPGVDWAVAAAIIAELGVDLSVFQNVLQAASWAGVSPGNHESAGKRKSSRIPKGNVYLKTALVEAATAATKAKGTYLRDKFYRLKARRGYKRAIVAVAHKILVAIYHILSHQVCYNELGDLYLDKLNRHTLTRNLVHRLERLGYTVTLEQKAA

SEQ ID NO: 219672 - protein, 333 aa, unidentified
MVALFAGLDVSQKMTSICIVNVKGKVIFETDAETAPAAIAEALKPYKRQLKSVGQEAGNAAPWLETELKRAKFPMVCLDPLRASLSLKAKLNKTDTNDARGLAQLLASGIFVRAHVKSVDAIRIRAALVLREAIVAKERDLTSALRMSERRLVVDEVSRKRSVLRSESRDAVRMAKGCVRSAIANLQSERAKLDKMVASLAKGHDICQRLMTIPGVGPITALTFVAAIDDPTRFKSSRHVGAYFGLTPRRYQSGEVSKSGGISHRGDSSMRKALFIAATSLVARSGTDCSLRRWGRKLASAKGAKVAYIAVARKLAVLMHHLWLTGQEFDRHR

SEQ ID NO: 219673 - protein, 405 aa, unidentified
MRFIGLDVHLDFCEVAICEAGRVRSGGRVPTSPEGLAVLADSLAPDDHVALEATGNALAIARRLEPCVARVVVATRTELRAITEAKVKTDRRDARTLARLLAAGLLGGCWLPDEQTRALRRRLARRAQLVRQRTRSKNEVHAVLMRTLKGRPPMSDAFGRGGRRWLAELELPGDERETVDGCLRQIDFLDAEIAILERGIAEHALRSDAIKRLMTVPGVSLMTAATFIAAVGDIRRFEDPRKLVSYLGLDPKVRQSGIGAARHGRISKQGAAPVRQMLAEAAFVAVSTAGPMRAFYDRVRARRGSQIAIVAVARKLVVLFWHLLTQEQDYAFQRPSLTRKKLRAIELRAGAQRHPGRRDLATKNAYSQRAERARERELSEHAEVAYRRLVADWTATAPARSPAAT

SEQ ID NO: 219674 - protein, 362 aa, unidentified
MPEGMRWVGLDVHARETACAVFDGATGEAESRGFVGRPHELLEWLAGLGEPLRAVYEAGPTGYGLARRAGELGLDVRVCAPGHIARKPGGRVKTDKRDALRLARLLAAGDLTLVAVPPVEHERVRDLVRCREDVRGDLMRVRHRVSKFLLRRELYFPGPGGAWTGRHRDWLSSLRFDDRASELCFADYQHAHDVLLARRDGLDRALAEIARDCPWSAPVARLRCLRGVDTLTALGLCAEVSDFGRFPGPQAVAAYLGLVPSESSSGARRRQGAITKAGSGHARRLLVEAAHHYTRPPRISDGLRSRQQGQPAWVIETAWRCQRRLFGRWQRLRVERGKRGGIVIVAMARELAGFCWELAVGE

SEQ ID NO: 219675 - protein, 371 aa, unidentified
MDESSKTLYVGLDVHKDSIAVAYAAEDRGAEVVSLGAIGTRQCDIDKLIRRLESKGAALVFVYEAGPCGYGLYRYLTGKGFACHVVAPSLIPRKAGDRVKTDRRDAMTLARLMRSGDLSAIYVPGVEDEALRGLSRGRDDAMQDLKRRKRRLKSFLLRQDIRYEGRATWNPAHLRWLSEVVCPTPPQQIVFQEYLRAVSEQHERRQRMEHELHEAVQGWRLYPMVQAIQALRGVELTSAVIVMTELGDLTRFENPRQLMSYLGLTPSEYSSGARRHQGGITKAGNSHARRALVEGAWAYRYPAKVSRHLQLRLEKLPAEVQAIGWKAQVRLCRRYRQLTARGKHVNQVVVAIAREMAAFAWAIARLVPLAS

SEQ ID NO: 219676 - protein, 371 aa, unidentified
MSVKKIVYVGLDVDDTAFHGMGLVLETGECFEFKCKPDHGVLRKKLNELFKDQYTIRLCYEACYIGYSLCRFLRNHGIHCDVIAPSLIPVKSGTRVKTDRLDAAKLAEYYARDLLTPIYIPDETDEEVRDILRSRNFLVRQRKMLKTHILSACKRYDISFQDETGHKTNWSDLHISWLKDRAKSLNRPVCRIDIEMLLAQYTSLTESIEKLDAAILQVAESERYKKAKDTLNTFRGIDTLSAMTIIAEIGDIRRFAHPRQLTSYIGLDVAEYSSGGKERKKGITKTGNKHVRTILTESCQTASRPPILSKRIKRSRASQPQAVVDIADRCMNRLHKKATRMLYAGKHKNKIKTACAREMLGFIWEALRLAA

SEQ ID NO: 219677 - protein, 367 aa, unidentified
MKKHSKNSQKVERKKQWKERPAMVVGLDLGDRHSHYWMLNVEGDMVEEGKIPSTEKALSKHFEGQPRQRIAMECGTHSPWVSRLLERWGHQVIVANARQIPALTASESRNDRNDAEKLAELAYSDPELLKPIQHRSVERQRDLNLIQVRDTLVRARTMIINSVRGLVKSAGGRLPKCEASAFATQVKTEIPAELKEAATPLLEQTQMLTVQILSLEKQIEKLAEKYPEIVTLRTVPGVGPLIASAYVLTLDRPEVFSNSRQAGAFLGLRPRQKDSGNSHPQCRISKNGNRYLRRLLVQGAHYVLGRFGKDSALRRWGLQLATSGGKRGKKRAVVAVARKLAVLLHRLWKTGENYQAFPESDTVRLSA

SEQ ID NO: 219678 - protein, 355 aa, unidentified
MTIVANTFTYVIGADTHSRTHTLTVVDARTGASADTSTFPTTPAGLSRAVAWIGRRTGGLADVLVAIEGVGSYGARLARACQDAGYRVVESFPTPARQRRGLGKSDAIDAELIARSVLGTDADRLRDPRQDAGIRAALRVLVAGRELLNSDRTRSINALTALLRTVDLDIDARRPLTKAQLATIASWRHRQEDLATATARREAIRIARRVTTCDQDLADNRDEITALVAASDAATLLEQPGIGAINAAVIIVAWSHPGRVHSEAAFAVLAGVSPVPASSGNTTRHRLNRGGDRRLNRALSSIALTRMSHHAPTRAYVERRRAQGRTTKEIRRSLKRYIARQLYRNLTAQNGLDRT

SEQ ID NO: 219679 - protein, 429 aa, unidentified
MDYPPVAGIDVGKNFSEMCILSPNNEIYHRIKIYHDSIDSIQKAIGLLQKAEKDFAIRPVVVLESTGHYHKILFHYLSDSGFEVSIINPIQFDSIKNIGIRKVKNDKFDAHKIALLYRFSFIKTTVVPDDVIDCLKSLCRQYYKLGDELTTYKNRLIGIIDQVMLNFTDVFQNVYSKTALAVLDRYPSPEQILKANKKTLISLIEKTSKKGLAWSTEKYELLVLKAKEFKDLSISNPGNLAILKVNISMVRTLQEAQKNILDAINEIILADSLKDDPVLAPIINLLCSIPGIGVLTAATILAEVGDFSAFSSPNKLVAFFGIDPSVNQSGEFTGTRNKMSKRGSRLLRRVIFTTALANVRSKRNGDKTNPVLYEFYQKKCINKPKKVALGAVMRKLVNIIFAVMRDKKPFELRTPEEHKELLLNRSLVA

SEQ ID NO: 219680 - protein, 457 aa, unidentified
MTSRKPHTQKRRRLTTIHAGAAGLDVGATFHVVAVPPDRADESVQTFRSFTGDLHRLADWLKEVGVTTVAMESTGVYWIPVFEILEARGFEVLLVNARDVKNVPGRKTDVNDAQWLQQLHEHGLLRGSFRPHERVVRLRALLRHREGLVDQAAAHVQRMQKALMQMNVQLHHVVTDITGVTGMKIVRAIVGGIHDPGILAQHRDVRCKQSEETIREALTGNYRPEHVFALRHALDAYDFFHAKMTECDMEIERVLGDLNNDRQAPESPLPPVRHARGRNEPAFDVRKSLYTLLGADLSQIHGLGAYSVLRLVAECGDDMRKWPSAKHFTSWLTLCPGNKISGGRVLSSKTRRSSNRAAALLRIAAVNVGRTQTAIGAFYRRLAARIGKAKAVTATARKLAVLFYNALRFGLRYADPGASYYEERYKERVIYNLQRRAKQMGFVLIRPPEAAPAGGVS

SEQ ID NO: 219681 - protein, 353 aa, unidentified
MSSIAHTRPFVVGVDTHARSHVYAILTATGEVIETHEFPTNGAGINRAIDSAGRRTGGDLSTLWVIEGAASYGAPLTAAVTGYQVAEAPRMGRHLGHGVGKSDPLDAQRIAAAVLPLDDSQLRTPRLGDGVRAALRVLVAARESMTGERTRCTNALTALLRVNDLGIDARKPLNGPQIREVSRWRTRSEHLAISIARAEAVRLAKRIRDLDDELTTNLAQLTELIRVSEAAPLLDEMDFGPVSLAICLTAWSHAGRIHTEAAFASMAGVNPIPASAGNTIRHRLNRGGDRRLNHAHHMVALSRMIHDDETRAYVEKRRAEGRTTKEIRRSIKRYLARRVYRVLNTTQPATSPA

SEQ ID NO: 219682 - protein, 372 aa, unidentified
MNTSITYVAMDVHKKQHEVAWVNPKTGEVQVFTVANTKAELAKMVKRIRKEVSGQIHVCYEAGVCGFVLQRQLQGLGCVCKVIAPSLVLHKRGDRVKTDRRDAKKLLSQFMAGQLTEVHAPDAAQEADRELTRCRYGAQQDLLRARQQLNSLLIRHGYIYGDGDLWTDKHEQWLDSLQIDQSTLLTVFEEYRSQVGHCLKRVESLDKQLGQLAGSERYRSAVSALRCFRGIETLTAITVLTEIFEFGRFESPRALMAYLGVVPSEQSSGQTRRTGGITKTGNWRVRRILTEVGWHYRYGNRVSYALKKRRKDQPAWAVDLAERASARLYKRYWHLVQAGKASPTAVMAVVRELVGFIWAMLRQVQENEGKAA

SEQ ID NO: 219683 - protein, 341 aa, unidentified
MSNIIYFIGLDIACNDFAASIYQSPEKPIITKEAILNNQDGFNMLISWLKEHNINNVNSIICMESTGVYSKAVTNYLAADGFNVCVEAPLKVKRAFDPVGHKTDAVDSKQIAEYAYRYRDELRLWKPKDEILEKVRQLLSARERFTKQSTAIQNASKAYEKEPIKVALIIKSHKQALKQLKKHIADIDKELDKHIHQNPAIFQNTNTLKGIPGYGMLLSANLMVITDNFENIKDHKRLSAFIGIVPYQHQSGTSINKKARIRHFGPQTTRKLLRLAAQSVATHNKGFRQYYLRKQAEGKAKTLVLNNIANKLIKIACAMMRENKSYIKEHRSIHPMCLKTA

SEQ ID NO: 219684 - protein, 383 aa, unidentified
MEVLHQRCAGLDVHKATVVGCLRVQEHGRVRHEVRRWGTTTAELLALGDWLRQAGCTHVAMEATGVYWKPVWHILEGELDLLLANPAHIRNVPGRKSDVNDATWIADLLAHGLIRASLVPPGPIQALRDLTRTRKQPMREIGQHKQRIQKVLEDANVKLASVVSDVFGESGRRMLKALSAGETDPSQLAALRDGRLTASRETLAAALHGKVTAHHRFLLSQHLGTIAHLEQTVAAFERQIEAVAAPFNPAVACLVTIPGISVTAAHVIIAEIGVDMSRFATAAHLRSWAGLCPQLNESAGKVMSRRLRHGAPWLKTVLVQCAWAATRNKNNYLHAQFVRLRARRGHTKGHYRGRRFDPDHGLLSAAGSGGVSRSRVALLRPHG

SEQ ID NO: 219685 - protein, 412 aa, unidentified
MEPIYTSCCGLDVHKRSVKACVRSLDNTGRVHQEVRTFGTMTRDIVELSKWLSDEEVTHVAMESTGVYWKPIYNIMEGEFTLLLVNARHVKNVPGRKTDVKDCQWLAQLLQCGLLKGSFVPKKAQREFRDLTRHRTQLTNERSAVANRIHKVFEDANIKLGAVATDILGKSGRDMIDALIKGDMSSEAMADLARRQLRGKIPQLCLALEGNVTDHHRFVLKQLTEHLDYLESQIETFSQRIEELSRPFREAIDATAQLPGFKIHGAQNVIAEIGCDMDQFPSDGHLCSWAGISSGNNETGGKRKSGKTTKGSRWLRAALVQAAWAASNKKGSYFQARYRRLAPRRGKKRALVAIAHSLLVSIFHVLKDNVEYKDLGADFFDKLNSKRLVPYLVKRLKNLGYNVVLVPSEIAV

SEQ ID NO: 219686 - protein, 312 aa, unidentified
MYHIEEEVVYMGVDIAKAYLDAAIGNEKRRFGNDALGHRQLINWIKQMPASVQVICEPSGGYERALVRALVGAQLKISLVPANRVRQFARAAGILAKTDRIDAKLLCAFGQAMQPGTISASELEQEHLRELESQRRHLTHLLVMEQNRAARMSDAFVCKLSRRLLTQIKKQIEQLDLLIQEQIKASPELCTKAQKLTAISGVGARTAALLLAQMPELGQLNRRQVAALVGVAPFNRDSGRMRGKRAIYGGRRPVRHGLYMAALVAARHNPILRGFYLRLRAGGKPAKVALTATMRKLLIVLNSALKPDPNYA

SEQ ID NO: 219687 - protein, 449 aa, unidentified
MADPQKILEPMQVIYPNAAGLDIGRTEIMVAIPPDRAGETVRGFGTYTPDLKELANWLAESRVTHVAMESTGVYWIPIYELLEERGFEVIVVNARHIKTPPGRKSDVKDCQWIQRLHSYGMLSGSFRPEADMCTLRAYLRHRDNLIEDRSKHILYMQKALAQMNIQLGQVLSDLTGKTGLDILRAIVAGEHNPVVLAKLRNGRCRSSEADLIKALTGHYRKEHLFVLKQALDMFDTFSERLQECDQEIERLLEEIKPELPADYPPLPPDPKPGSHCKNAPDYDARRSMYQLAGVDLTAIPGLNENLVQKILAEVGLDMQRFPSAKNFCSWLGLAPHNAISGGRVLYSHTIRGANRAGQAFRMAAQAVSRGKTAYGEFYRRIRARSGPKEAIVATAHKIARTFYYMLKHGQPYRETDLETYLRAQRERDVRRLQAKAAKLGFSLQPSAVP

SEQ ID NO: 219688 - protein, 415 aa, unidentified
MSLFVGIDVSSSDFKVRILDERGNEPVKRLRALNDQPGCEQVARYLFDACAQVNVDRLVIGLEATSVYSWPLQMFLAEDHSLAPLQPQIYSFNPKVVANFKKAYVDLPKNDWIDAWVIAERLRFGRLPEGSQVDFRYLPLQRLTRFRCHLIEMISREKNYFLTNLFLKFSTLAQGAVFSNTFGATSESLTLEFFSPEEVAAPPLDELIDFLMEKGKRHFEDPETKARELKEAARKAHRLRGSLLQPINLILATSIETIHTLEKQVKKIDKAIEAEIRHFPNTLITIPGIGPVLSAGIIAEIGDIRRFPNEGALAKFIGLTWRTHQSGDFTADDTPLTRTGNTYLRSYIIQAANLVRQKEPEYKVFYQRKFSESKTHHHRRALVLTARKLVRMVDALLRSNQIYRPHGNRGNANQA

SEQ ID NO: 219689 - protein, 375 aa, unidentified
MADGAIPDSTPFIERISDMNATERNVENIVAIDLGKFNSAVCIFKKSTFKSNFRTIETSGQDFHDLFVELEPDVVLIEAGSSAGWVADLLRTLKIPFEVANTNHEAWKWNKSKKKTDKRDAKKLAMMYAYGGLPTVHMPTKAVRQKRSLVNYRQSIVKRVTQSKNVIRALLQTIDVKMLSGKNAWSQKGIGYLGSMAKPFDEIDDMEQLWRSQLHTEIQILKDMTDKLKVVTKKLDKLALADKKIELVQTIPGVGPRVAEAVVAIIDDPGRFKSAKHISSYAGLVPEKHDSGQTKRNGRITGHGSGMLRALLVQVSWLGLKNKWIRDIYDRIRRGTKSRSKIAIVAVARHILVRCWAMLRDNATWRGSVEMAVKN

SEQ ID NO: 219690 - protein, 354 aa, unidentified
MAEGSPVAPGAFKPDCEQGAPSVGPFIPNGRMGRESSPYQQGREKDQMFVGIDVSKDRLDVHVRPGDQAFAVERDHAGIERLVAQLRELMPRLVVLEATGGFETVVAAALGAAGLPLAVVNPRQIRAFAKACGRLAKTDALDAAVIAHFAEAVHPEPRGIPDEATRALGELVTRRGQIITMMVAERNRRRQLTQARLIKTVDRILATLQAQLSDIESAIDETIRGTPAWREKEELLTSTPAIGPKIARTLIADLPELGALTRRKISALVGVAPFNRDSGKRKGLRAIAGGRSRVRTALYMAVLVTIRRKLPLAATYHRLRAAGKPAKVAIVATMRKLLVILNAMMRDQTAWHGA

SEQ ID NO: 219691 - protein, 316 aa, unidentified
MSETILGIDVAKKKLDACLIAGDKVLMKKFDNNIKGIKLLEGWLRSLKIERVHACLESTGSYSEAAAEFLHEHGHRVSMVNPLRINAFARSDLKRNKTDQADARTIAEFCIAKDPEDWHPLPPEIKQLQDLTRRIASLERILASERNRLDVAPGSVRASLKRVIAGLEKEIGDLQRLIKDHIDNNPDLKRQSDLLRTIPGIGEKTARLLLGEIEFRQFSSARALAAYAGVTPRRSQSGTSLNRTRLSKLGNGRIRKALYFPAIVAVKCNQIVKLFARRLSRNGKTPMQVVGAAMRKLLHIAYGVIKNNRPFDPNPA

SEQ ID NO: 219692 - protein, 418 aa, unidentified
MSRVDSNAVLSVVHHHCCGLDIHKDKVSAAVITTHEDGTAEESISEFGTFTDDLYRLKDWVCEQGCHVVAMESTGVYWRPVHNVLEDSCQVILVNARHVKHLPGRKTDVSDSRWLAGLLRHGLLRGSFIPEKHVRQWRDLARLRKTFVESLADYKRRVHKLLECANIKIDSVASDLFGVTGRNLMDLLVSGEEITLDAVLRCTRGRLKGKEEELFKSIRGFFTEHHRFQLESIRTLIESVEAQIRRVHERLGTLLSDRREKVGRLMDVPGISDVSAHAILSEIGDTMDQFETAASLASWAGLCPGNNESAGKRHSGRSPVKSGHVKTIMIEVAWGAIRKKGSYYREKYYSLRARKGARKAIVAVAHRILKAVFHVLKFDRPYHELGDAYLIQLNNKARLHSLHKQAARLGYTLVPAEG

SEQ ID NO: 219693 - protein, 461 aa, unidentified
MSRKAPAGKQQKSVRRTVDWKALEIVHPDAAGIDVGGSEHWVAVSPERDAEPVRSFGCFTADVREMAEWLVEKGVRSVAMQSTGVYWMPVFEVLEQHGLEVFLVNARHTKNLPGRKSDIQECQWLLKLHAFGLLNNSFQPTDEIRVARSLWRQRGNLIAAASSAIQRMQKVLTEMNVQLSTVLSDLSGVSGMKIIGAILAGERDPWKLTALARAEVKARPADIARSLEGNWREELLFILRQEVELYEVYQHKIADCDRQLRHHLESFGSKMDPSSHPIGPKPKGKKGSKNAPQFDLRSELYRITGIDWAQINGIDVLTAQTVITEAGVDLKAFPSEKQFASWLGLCPTNETSGGKVLKRRSRKVVNRAATAFRNAASTLLRSQSYLGAQYRCLRTRLGAPKAITAMARKLACLFYRLIKHGQQYVDKGTEYYEARYREQQIRALTKRAQKLGIQLVIPDAA

SEQ ID NO: 219694 - protein, 342 aa, unidentified
MDHFAGLDVSVKETSVCIVDETGRIVREVKVASEPQALLPVLKNPAYHFRRIGLEAGPLSQWLYSALAEAELPVVCVETRHMQAVLKAQINKTDRNDARGMAQMMRVGLYRPVHVKTLRSQKLRMLLTHRRLLQSKAIAIENDLRGTLRNFGLKVGIAGTVKFEARIKELVENVPELAALVEPLLVVRRVLREQLVILHRRLLAIVRDDEVCRRLMTTPGVGPVVALTYRATVDVPARFRKSKSVGAVFGLTCAKYQSGEIDWSGRISRCGDEMMRVMLYEAAQSMLYSKKWSWLKAWAMQIARRRGLKKAIVALARRLAVIMHRIWVDGTEFRWTRDVATA

SEQ ID NO: 219695 - protein, 365 aa, unidentified
MNAQTTSVDYNNAVYIGIDVHRYQHTAVAANRFEEEMGELTFPNTPDGVAAFVAWSKNIAEANLTRIIGVEGTNGNGRLLRNAVVPVYPDVYEINPIYTKQRRDHGTRGNKSDPVDARLMIEVLTRKLDELPKVTKQDNSAWMQALGEFVAFHDDLTRSQTRLKNQLHRLFYDIDPTGETSRSRTFSGKRLTGWLARTARSQEAIHQNTKRLILRSKIHELLNLEKTRSKTDIRINQLLTQENGNLLTMPGIGTITAAKIIASVKGISRFGNIRQFIKYAGIAPIERSSGKTRKHKQAKGGNRQLNTAIYTIALTQMRCEPKAKVYFQKKIAEGKTKKHALRCLMKRIACIVYGMMKNGETYRGS

SEQ ID NO: 219696 - protein, 345 aa, unidentified
MKHFAGLDVSLDETAVCVGDEAGTMVREARVPSEPEALVGFFQGSGLVLERIGLEACSLSAWLHESLVAAGLPAVCIETRRAKAAMGAMPNKTDRNDARGLAQIIRTGWYRVVHVKSPACRSWRALLAARRLVLNKMRDVENGLRALLREAGLKLGTRARKEFAARVRELTAADPVLSVLAEPLLTIIAAMARELAQLTRRVLDIVRDEPVCRRLMGVPGVGPLTALAFRATIDRPERFRHSRDVGAHLGLTPKRYQSGETDMQGNISRCGDELARTALYEAAHSLLIRSRKWSTLRAWGMQVAKRRGMARARIAVARKLAAILHRMWADGTEFRWGKDDAAVAA

SEQ ID NO: 219697 - protein, 463 aa, unidentified
MSKPIIVGADVSKGYADFFAIDSDKKVVAELFQLDDNKAGHAKLHDQFQSLRKTFKSNRILFAIESSGGLEDNWLRMVKQPALCDFVEGYRLNPKVTHHEYRVQHRNSISDKVSCMTIAHHVAKNLEDYNPGEVVVDAAFAPARNLIRHIVSLDQDCTGHKNSLQQILYQYMPSLLPLLPKAWSKYFLNILLHYGSKRSIQLAASHGFKKIPRVPEGKAQAIHTALRDGIDVKETPEMIVSIIRSKARQILALQEEIASLEKMLCQMAPVKEENVELLCSINGMGRVPATILLCYIEDVDRFDEAKSMAAFFGVQPRIKVSGDGKVKIGMSKQGNGLVRRTLYLLAFRTLGYEPYLKSIYAKCRQQGMVHDAALGVLMHKLTRVIYGMLKSGTAFDPGVDQLNQIDPRAEEESDASKQPVKEDPKRRFQAKTPDAPLSNRQRRKRKKDQESQAATVAESAGST

SEQ ID NO: 219698 - protein, 341 aa, unidentified
MKKILKEVVGVDVDQKKLVVSLGRLHEDLEQEIYAHKVFDNNATGFPALLSWVSNLADPGVETCFVMEATGVYHESFAYFLDKNSKVVSIVLPNKISNYFRTLEIKTITDKSSSEAIASFGLSRKLSRWKKPDPTFKKLKQLSREREQLIVERTLVKNQLHAENAEAEPLKASLQRMERRITLLTKQEKEILQEMKLLIASNEKINAQVKLACTIPGVGILTSAIVLAETNGFEHVKNKRQLVSYAGLDVREKQSGTSVKGKPRISKRGNRYLRKAMYLPALAAIRSNEQHRDIFARLVGRHGIKMKAAVAIQRKILELIYVLIKNNTVYNEHHLKLVHAA

SEQ ID NO: 219699 - protein, 425 aa, unidentified
MNYKQNEKINQVKESTLVVGIDIGSTTQYARAFDWRGIELGKVFTFSNSREGFESFKAWMQHLQDKYKKLDAIVGIEPTGHYWFDLGAYLEDEGILLVMVNPYAVKQTKELDDNSQSKNDRKDPKVIAKLVTEGRYSAPYTPDGVYADLRIMVANRKRLIREMTQIKNRFARWFAIYFPEYTDVFGDYEAQSSMLLLKKVCTPEAIVELGAEKINQIWRDAKLRAVGMKRATTLCETAKRSIGLKKGSSAAQYEMKLLLEDYEYKKAQLDAVMEEIEKLCRKIPESEQMLAIKGIGVITVAGFLAEVGDVRRFESPRQIQKLAGLSLRENSSGKHKGQTTISKRGRSNLRAVLFNAAIPLIATNPEFKSLHEYYTTRANNPLKKKQSVIAISCKLIRVFYAILANGVTYDAQKMLSDIHRQPQAA

SEQ ID NO: 219700 - protein, 390 aa, unidentified
MIYVGIDVAKDKHDCCILDAEGRKLYPVFTISNDKVGFDELFSRIEEVTSDKTEIKVGLEATGHYSNNLLASLVDKGFPTVVINPLHTNLYRKGLSLRKTKTDKVDASSIAMMLMTDRTLKPYSETSYHNEELKSLTRYRFDKIHERSKLKTSLARLVNILFPELEKLVPTLHQNSVYTLLEELPGADYIAGCHLTHLKKLLEASSKGRYGRDKAIEIRNAAIDSIGTPMDAKSMELRHTIHLIWMLSEEIEEIEVSIKSIMDETQSPIMTIPGISYRMGAMILAEVGDFARFDNADKILAYAGLSPSTYQSGQLDSSHSHMEKRGSRYLRYALFNATKFVCKWDESFGIYLGRKISEGKHYNVAVSHAAKKLIRTIYRMELTGQAYSPS

SEQ ID NO: 219701 - protein, 350 aa, unidentified
MLIIGCDFHSRFQQIAMLDPQTGEMIERRLEHENGEARKFYAGLATLARVGMEATGYAQWFERMLAEQGHQLWVGDAAEIRAAMVRKQKTDSRDACHILDLLLRDKFPRIWIPSTEERDVRQLLRHRYKLVCMRTSLKNQLHAMAMGQGICRKKKLWTAVGRKELEGLSLGPWASRRRQQLLEMLDQFEPVIDELDRAVIQEAEKRPAAVRLMTQPGVGPVTALAFVLTIGPVSRFQRSKQVVSYLGLNPTEESSGGRQRLGSISKQGNSMLRFLLVEAAQTASIYDPELRRDYQRLKFRRGSGVAKVAIARKLAVRLYGKLREAAQPVPPAPMQGSPAVSVVGESLSCF

SEQ ID NO: 219702 - protein, 348 aa, unidentified
MSQSKQYVGLDVSLKETSICVIDDVGKIVWRGRTESTPEAIGSAVKQHAPYAVRIGLESGQLSSWLFHGLKVAGLPVICIDARHAKAALSLKVNKTDANDAFGLAQIMRVGWYREVTVKGLDCQAVRALLVARAQIVSQITTTKNCVRGILKTFGRVLPKGLRSQFSGRVRAAIDGDPILGAIIEPTLRVLEAMRAQLLVYNKAVIQRARGDDTARQLMSAPGVGTVVALAYMTGVEDPARFKRSSSVAAYFGMTPRRYQSGEVDHAGRISKCGDGMVRGLLFESAKVLLSRSARPSALKTWGEALAKRIGPKKATMAVARKLAVILHRMWTTGTMFQWNAEAASPAA

SEQ ID NO: 219703 - protein, 330 aa, unidentified
MEREYIGIDLHKQFFQACAVTPTGIRVWEQRFPRTDGGLVLFRERCTSMTAIAVEATGPTWAFVDALRPSGATVCVVDPRKTRLKAGYAAKTDRLDARRLADALRRESVVSIYVPPPAVRELREVCRGRHQVVRLRARIAQMIRALLLRSGVSDVPVTRVFSARGLAWLSQVQLPSEAGASLERWRRVLLAVQAEATVAEAMVKARATADAIARALDDLVGIGPVLALTLRAEIGDIARFPRGAALASYAGLVPRVDASADRYWSGRITREGSPWLRWALVHTAIHAIRRQDGLGRWARQLAMRKGVYKARVALARRLCDEVVTVWPRCA

SEQ ID NO: 219704 - protein, 357 aa, unidentified
MSVYVGIDVHRKRSQVAVINEGGEVLANRNVPNGTQPVLGVIGGLPPGTPVAFEAAFGWGWLVELLEGYGFAPHLVHPLQCKAIASARLKNDKVDAAILAQLLRADLLPEAWIAPPPVRQLRALLRHRAQLVRLRTLLRNRIHAILADHGHDRPGGCWSGPGRAWLASLELPAVSRELIDDDLALIDALQVPIDRLDWEVYQQARRDPRVKVLTQLPGVGPYTALVLLAEIGEVSRFSSARKLASWAGLTPNVRGSDRVAHYGHISKQGSAWLRWILCEAAQTAKRHPDFAAGYQAIAQRRGKKIATTAVARKLLTRAYHLLADAANGGTPTSPEGRQAPGELAFLHEPAPRPRSMT

SEQ ID NO: 219705 - protein, 417 aa, unidentified
MTTEQKGVLSMKVVYRCCCGIDVHKKLIVACLDKSGKQELREFGTTTGEIRILADWLTQAGCQMIAMESTGVYWKPLYNLFELMGLPAMVVNASHMKALPGRKTDVKDAEWIADLLRHGLLKGSFIPDREQRELREISRYRKSLIEERSREILRLQKILEGANIKLDSVVTNINGKSARNLLDSIIANETLDSEKVAQMVNSRLHFKLEQITQSIDGITTPLQRRLIAQILDHIDDMTKRIGDMDDIIKDYMEQYENAINAIDDLPGVARRSAEVIIAEIGKDMERFPSAAHLCSWAGVSPGNHQSAGKRGSGRTTKGNKTLKTILTQCAKVASHSKESFFSAQYQRIAARRGKNRATIAVAHSMLIAIYHVLKTGVVFKDLGSDYYNSFNREHKIKSYLKRLQTLGWEPEPVTISA

SEQ ID NO: 219706 - protein, 459 aa, unidentified
MNKRSTIKDGTSKTSEASEQIAVWVGLDWADKEHSVSVYEVGSGKSEGYRLKHTAEALQDWLSRLRTQYSGSKVGVVLEQSRGPVLYALMSCEFIVLYPVNPQSLANYRKAFQTSGTKNDPGDAQLLSEMVRKHADRFRAWVADDADTRSLQLLVEGRRKLVNQMTRLTNRLTSHLKNYYPQALELAGEFNTRQACDFLKRWPTLEALQQARSATLRKFYLSYGRPTTSGVNERLEQIKQAMPLTGDRAVVLAGSMMVQALVAQIRPLIIEVEKYDDEIHRLFQQHPDREVFESFTGAGRVLAPRLLAAMGADRDRWQSAAEIQQLSGVAPVTEQSGRQHWVHRRWACPKFLLQTFHEFAKQTIAWCDWSKAYYDQQRERGKGHHAAVRSLAFKWIRIVFRCWKDRVAYDENLYLRGLERRGSKLAARAQLVKQSKELRRRQRSAHSVEELSPNPQIGS

SEQ ID NO: 219707 - protein, 387 aa, unidentified
MTGPSQVSRFIPGDYHIFAGLDVDKRSIAMTFSDHKTLLKSLRLPYSSAQLLNYVRKHFPQQRVAFVYEAGPTGFGLYDDITAEGHPCLVVAPSMVPTAPGQRVKTNRLDSRKLSIGLRGGELRSIHVPSGSYRELRHLVQLRDTYVRQLTATKLRIKSLLLYEGIPFPEAPATNQWSARVVHELEALPCGETVRFKLDQLIGTLYFHFNMAATTQKQIRRFCQKDPELRQSISLLMSLPGIGWIVAAHTVARLGDWREIENVRSIAGFLGLVSSEHSTGDKVNRGSITRAGDSRLRNKLIQSAWVAIGKDPELRAFYRRIFERHPKKVAARKAIVAVARKLTTRMYAVLKQQRPYVIRPDISTAPLTTEETVGPRVRLDAAQSDQP

SEQ ID NO: 219708 - protein, 347 aa, unidentified
MLHVGLDLSRTRLDVHVMDEAGAPLAVTTAAPDAGGLASLAHRVDEFGGPVAAAIESMNGARFVHDQLELHGWRVEIADTVKVKGFAPLACKTDKIDAWVLAELSRRDLVPSIWLPTPGIRAERERARWRLHLVRHRTALKNRIHATLLTFGHPCPVSDLFGAAGRRLLDSLALPEPWAADVVAALRLIDLLDGEIDDCEATLRRLGAEHAYVPLLMTAPGIGWVLGYTIAAEIGDIGRFATPKKLVGYTGLCPSVDQSGGHDWRGELAKNGPKYLRWALIEAATHAARHPVYAERYQRTKTRLGKQRGAKVARVDIARKLAEAIWWMLNTTKPFAPAGAPQRALAA

SEQ ID NO: 219709 - protein, 337 aa, unidentified
MNIKVIGIDLAKNIFQIHGVDEKGKHVLSKRISRNQLASFIAQLPPCLIGMEACSSSNYWARKFREYGHEVKLMSPQYVKPYVKTNKNDANDAAGICEAVSRPSMRFVPIKSIEQQDIQCLHRIRSGLIQERTALVNQLRGLLAEYGIVVAQGITKLKKQLPEILDDTDNQLSSLMRSTLIDMYNYLIQKNEQIDNITVKIMEVCKQSEVCQRLVKVEGIGPMIATAFVAAVGDAKNFKNGRHLAAWLGLVPRQASSGNKRVLLGISKRGDRYLRSLLIQGASAVIRCIKGKTDARSLWLEQLIKRSNKFKANVALANKNARILWALMAHGTEYRGA

SEQ ID NO: 219710 - protein, 484 aa, unidentified
MIKSVGIDLAGAGEHKVRCLDERAQMCDGFGFETTRAGLAKFEERVFSGGSNPVIVFEPTGLAWLLVAVYLKSKHPDSRLVRVQAQKVVALRKYLNRSSKSDKVDSLTLAKMPFIDPEKLEEIYFPPAKLYAIHRLARQRKRLENDIAGRKKRIGSIMDGYFPGLRSAFSDPWSAQARAFLRSRVNPLAVVQRGEKALHTFLTKTRKHCKLDPSEESHAVYVACRETAALYKASGPVGTVDDDFFSALQDEINRELRLLEIEEAESAAIARRIERLYQELHPSDNLRTIPGVGPHTAPVFLATVGDPARFRSQASFANYCGIVPGANQSSEMEAKGLRMTKAGPTIMRWALFQAGGIGRAHDPQLAWTYYREMVHNGKNHMQAMGAVMSHLSARILAVLREDKPYQIRDIDGRPVSREEAREIVLSKYQVPEEIRKERRRFNTPDITKPRRKRREMAVPRVHEAAAAPQPVVPKHLPKTSLTES

SEQ ID NO: 219711 - protein, 344 aa, unidentified
MDDFSDFAYTVGIDIAKSVFQVYSLDRTTGEIANVQVKRADLLDYFRLKGKCLIGMEACGSSQYWARKMTDLGHVVRLMAPHRVKPYVSGQKSDKADAEGIHRALINHVPAISVRGGIERDLHSLMAMRSMLVKRETSLINHVRGLLLEYGKDIPKSKAKLYDMAHGAINELEGSVSQALVAEFRSTVDDIRHIKDRITAITAEAVALAKQTKNAAYFTSIPGVGAITMCYLCFLLSDPSVYKSARQFAAFLGLAPKHTGTGGNTVITHIPVRCNKALRALLVECAQSVARRKVKSAWVLSILKDKPKKVALIAIANRIARQCWAVASKSQFYREMPVAQPQAS

SEQ ID NO: 219712 - protein, 318 aa, unidentified
MSGSVVVGIDVSKAEFCVAVDPSGETWMSATTPAAMDVLVERLRAVTPQLVVLEATGGYELPLAGACASAGLPVAIVNPRQVRAFAHALGRSAKTDAIDAAVLALFGARVRPEPRAVPDAATQALAALVTRRRQLLEMLGAERQRLAQARPAGPVTRNLRTHIRWLERRLAEVDDDIGSAIQASPVWRVHEDLLRTVPGIGPTTARTLLAELPELGRLDRRAIAALVGVAPFNCDSGQQRGYRRIAGGRASVRASLYMAALTASRRNPTLAAFYQRLRAHGKPPKVALVAVMRKLLTILNAILKQCAPWNPSAQIVNA

SEQ ID NO: 219713 - protein, 385 aa, unidentified
MSKLNHTDASAAAEYATVHLAFELSKANWHLGVILPRSQKLSRFRIDGGDLAALSAHLAEWRAKAGAAGKPVRIVSCYEAGYDGHWLHRWLTNQGVINYEIDPASIQVNRRARRPKTDRIDLEQLMSTLLRYLRGEPRVCSMVRVPSPEDEDRRRVSRERDRLLKERSGHTNRITGLLHAQGIRDAKPLARGFIASLDSIRTGDGRPLPPRLKEEIVREHQRLCLVHQQLIALEKKSLAERRAPARGSIEEKINQLVDLRGIGAVGGRKLMHEVFYRSFDNRRQVGSFVGLTNSAYDSGTSHRDQGISKAGNRRARTLAVELAWLWLRYQPESELSRWFHARVGHIKGRIRRIAIVALARKLMVALWRYVTTGLVPTGAVCRQSI

SEQ ID NO: 219714 - protein, 402 aa, unidentified
MRFSVGIDWASAAHAVCILDQTGRVHWQGAVPHTADGLADLLARLRRFRRRGSLRVALERPSGLLVDTLLDAGLEVVPIHPNALKASRPRYSAAGAKSDPGDAFILADLLRTDGHRFRPLHPPSDDTRALRALVRGRDDLVAQRIALANQLRALLERFWPGAAAIFADVDSPIALAFLARYPTPDSAARLGEQRLARFLGQHAYCGRRPVAELLARLRRAPTSQVGAAEADASGDVVRALIAVLSPLVAHLQQLSAAIAAALAQHPDGPLVQSLPRSGAVNAAQILAELGDDRARFPTDEQFAAEAGLAPVTHASGQHRAVVFRWACNKRLRRAVTTFADNSRHASRWAALVYQRARARGCRHQHAIRILARAWARILWRCWQDRTPYHVGRHRAAQALAAA

SEQ ID NO: 219715 - protein, 394 aa, unidentified
MILVGIDIGKNKHTFSIINKSSGEILLSPSDFSNNLEGFLFLIQKLNNYTKSELLIGMEDTGHYHFALLKYLLDRRYTVALINPTTTDLTRKLQGGITKNDHLDSLTIWDVISSNHRNKPYRVTKLNRFDLYEQKQLTRHHHNLKEELNTYKNRLQKCIDIVFPEFNSLFHSKYGIVYMNILKAFSSAKAIANADIRSIRKCFEFKGKGKRISLSAEQLKLIAKSSIGIPSVAEEIQIRHLVSQIELLEKQLSEIDKRIEEFSLKNNSPILTIPGISHFSGTSIISELGDICNYTKASQIIKFAGVAPYHYESSQFTAQHTAITKKGSKYLRKTLYQIILPVISNNEVFYAYYTKKLNEGKGHRCAQDHCIRKLLRVIYHLLSTRQPFNPKLLV

SEQ ID NO: 219716 - protein, 704 aa, unidentified
MTNEYGVFLGLDVGKSDHHAVAFNPAGKRLHDAALPNTEPGLRKLFDKLGRHGRILAVVDQPASIGALPVAVARSCGHQIAYLPGLVMRRLADLHPGTAKTDARDAFVIADAARTLPHTLRRVDAGDDTLAELEVLVGYDDDLAGEVTRVSNRIRGLLTQIHPPLERVLGPKVQHHAILEVLSRCGGPAGLRKAGRSKLAEIVMPRAPRMGARLVEQIFTALDAQTVVVPGTTAAETILPRLADSVRELLKQRDQIAFQVEEILDAHPLAEVLISMPGVGIRTAARILLEVGDVTSFPTSAHLAAYAGLAPVTRRSGTSIRGEHPPKGGNKQLKRAIFLSAFAALSDPLSRAYYDRKRRGQKTQRRAHLPRPPPGRRPPRHAPHPQPVPAQTSRKARPRRLTKPIGTPRVVPTDQLVVHAAVSAFLGRYRGQTRVHTESDLCVLLRWCTNQDLGPLAAARVDIERYVRWLQDVRRYQPSTVSRRLSVVVGFYRVCVIDAILEHSPADYVRRPTVPAESPTLGLGHLQFEALITTARKSPNPNGFALVALLGLLGLRIFEACGSNIADLGEEHGHRVLRVRGKGGKVVLVPLPPAVARAIDQAVDERTSGPILRNHHGRRMDRHVATRRLKHLVTAAGIRMPRMHPHMLRHTFVTTMLGAGVSLRDVQIAARHADPRTTMRYDRARKNLDRHPNYILAAYMASGT

SEQ ID NO: 219717 - protein, 375 aa, unidentified
MSKIRFIGLDVHAGTIAVAVAEPNGEVRSLGVIANCLPAIRKLVARLSPTKQLKACYEAGPTGYVLYWQLTQLGVSCEVIAPSLVPAKAGDRVKTDRRDAEKLARCYRNGDLTAVWVPDAAHEALRDLVRAREDARQDQHRARQRLGKFLLRHGVQPPADIKKKWTAKYMTWLHDHVHFQQPALAATLTDYVYEVDHAGERIARLETAIDEAIASAPEQIRNVIAALQALRGVAQMTAVTIVAETGSLSRFQNPRQLMSYSGLVSREYSSGNRIQRGGITKTGNAHLRRVLVEAAWAYQHKPWVGGFLLKRQRGLDQKIKDIAWKAQWRLCTRYKKLAANGKNKPQIVTAIARELLGFAWAIAVETEPQPQPQAA

SEQ ID NO: 219718 - protein, 309 aa, unidentified
MEHFVGIDVAKDRLDVHLRLSGESFTVIRDGEGLVELVDRLRRLAPRLVVMEATGGYETIVASAVAAAHLPLAVVNPRQIRDFARATGKLAKTDAIDAAAIAHFAEAIRPPARPIAGPEAQALGELVARRRQVIEMMVAERNRRRRATQRRVVRAIDRHLELLQTELSELDGDIDGAIRDSPAWQADADLLASVPGIGPATLRTLIAELPELGRLDRRKIAALVGVAPINRDSGTMRGRRSIAGGRPAVRTALFMAALVASRKNPIIAPYYAKLRAAGKTAKQALTACIRKLVVILNAILRDRKPWQPA

SEQ ID NO: 219719 - protein, 392 aa, unidentified
MYIVGIDIGKNHHEASIVSPEGKQIGRSLRFATTHKGADSLMSFIFKNIGNSPCVFGMEATGHYWYPIYSFLKAKGYTIYVINPIQSDSLRKMYIRQTKNDSIDSFLIAEVIRFGQFGTTSMADENILAMRQLCRYRDSVISSRTEIKLRIGTIMEQIFPEYEKQFSSLWVSTSMGILEKYLTPENIENAPIDELFEIIKDKSHNRLTRAKAISIKEAAADTFGIKIAQDAFSFQLKQLIDRMNFLDKLIEALDCQILEYYEKFDCYLHTIPGIGIIGAATILAEIGDISRFKNSSSLIAFAGIDPTVRQSGEFNSTHNHMSKRGSPYLRHAIFLAATTCSFHNSPLNAYYKKKRDQGKHHLTATGAVARKLTTVIYAVLRDSKPYEPKKFC

SEQ ID NO: 219720 - protein, 316 aa, unidentified
MTETEVFVGIDVSKARLDVAVLPKETTWSTTNDDEGIAGLVVKLQEQAPSLILLEATGGLERRVLAKLVGAGLPAMAINPRNVRDFAKSLGKLAKTDRIDAIILARFAQAIRPPLRPIADEQTQELQAQLTRRRQLVEMIVAEKNRLFATDTNKVRKLIKAHIEYLQKELSINEYDLDQTIKQTPIWLEKVDLLESTPGVGRATASTLVALLPELGTLGRKQIAALVGVAPFNRDSGTLRGRRTIWGGRGAVRAALYMAALVGARHNPAIRALYRRLKAAGKPSKVALVACMRKLLTILNAILRDRSPWRTQEISA

SEQ ID NO: 219721 - protein, 364 aa, unidentified
MEQNLLETLPPPAFESLPQTQPKQQIKEHIWQWFGLDVSKDSFTAAYYSGLPDTKNSEVVSFESSRKGVKKFLSWRKKHTFSDYPSAIVMESTGYYSRNLTDIFLKLDSSIHVSICNARSVSYYIKSHAENKTDQSDARFISRYGYDFQPLSVKIKSRDEKLLKEFVSERMKVVKMMTMLTNKSHSLEYAETKAINKGIIDFLNKKKQELDKKIVEVSKLSVEMDNEIALIDSVPGIGRVSASVIYAELGSLKQYTRLQLSGMSGLFPKISQSGTSMNKSKLAKSGSSNLRQILYMDSIKAIEIIPSLRELRKRLLARENSRKMTAMCACMRKLLLIAKGVVDSGIPYDPSFQQKKGEVSQKTA

SEQ ID NO: 219722 - protein, 461 aa, unidentified
MSKRKKSRKSKNQIFEQIHSNAAGIDIGADTHFVAVPPGRDPEGKDVRSFPTFTADLYALANWLKGCGIDKVAMESTGVYWIPLFEVLESQGFEVLLVNPKHFKNVPGRKTDVLDCQWLQQLHTFGLLQGSFRPDAQICELRAYLRQRATLISDAARYIQHMQKAMEQMNIKLTRVISDITGDTGMRIIRAIVDGERNPQKLANLRDPRCKNDVNVIAKALNGNWKKEHLFSLQQALELFDFHQKQISECDLQIQKHLKNFDDRSNGGSLPSGGKKNNASHPMNFDSRSFLFKVTGVDLTRVNGIDAPTAIGIISEIGLDMTRFPTVKNFASWLGLCPGSKITGGKLISSKTKSSANRAAYYFRMAAYSLQRSKSAFSAFFRRKKAQAGAPKAITATAHKIARTIYFMLKYGTEYKDVGQDYYEQRYRQRVINNLKRRAKQFGLTLVNNAALEPLMADLPN

SEQ ID NO: 219723 - protein, 347 aa, unidentified
MVHAGLDLSRHRLDVQLVDEEGGRLGCLAIGPDADGLRSLARQVEALCGQPVRAAIESMNGARFVHDQLELAGWDVEIADAAKVKGLAPLACKTDRIDAWVLAELSRRDLVPAIWLPDPEVRAERERARWRLHLVRHRTSLKNRVHGTLIAFGHPCPVSDLFGSRGRELLDGMALPEPWRGTVEAALRLIDDLDRQVDEAERELQDLGVEHRYVPLLLTVPGISWVLAYTIASEIGDIGRFSSPTKLCGYTGLCPRVYQSGEKDRRGPLAKNGPRYLRWALIEAAHVAARSPIYRDRYQATRRRLGKQRGPKVASVELARKLAEAIWYMLTRNQPFAPVGATRTLAA

SEQ ID NO: 219724 - protein, 485 aa, unidentified
MNPKHRRCCGIDVHKSSVTVCVLASAGQPQLGVKKRKCRTFTRDLRQLRGWLKNCQVTEIAMEATGQYWRAVWNVLEGEFEKLILVNPQHIKGLNGHKTDPKDAQWIAELLDSGKLRGSWVPPRPIRELRDLTRQRVNVMEDLNRAKNRIEQLCQTGNSKVSSVATDLFGVSGRKMLKAIVAGQHDAGWMADYARGTLRSKKDQLELALEGTFSSEQRWLLDKELRQVEWLESQVEVLEQEIERRVAPFQEPMRRLMTIPGIDRKTAWTIVAEIGVDMSVFGDARHLVSWAGVCPGNRESGGKRLSGRVRKANRYLKRVLCQAAWAASHTKQTYLSAFYRRLCLRKGAPKAVMALAHHILTVVFHILDRGDEYVELGGDYYDRQNKQRTVTRLVKRLMRLGYYVDLQSVPPNPVRTPPPMPVPKQAYEEAEPEPTELSSAPTAGAGKRKRGRPCKCAERGIICKHQTAPPAISLIQNASSPGEFS

SEQ ID NO: 219725 - protein, 341 aa, unidentified
MLNQNVIAIDLAKDVLQVCHISVDGELLRNVPMSRQKMKEFLANTKPSIVAMEGCNGCHYWGRYAEQFGHEARIINPKKVKRYLEGHKTDKNDALAIANAVIQIGLKYSPPKRIEQQTLQTLESNRRFLTRMGVTLGQHIRGTLLGYGIAKARGEKGLKAIIEDLDNSELNIPAPIKSVILRFWEEYKHLKAELKELEKQKNAITRQLEPCNRLMEIEGVGEATASLLYATLGDGSQFKNGRQASAFVGVTPKQHSSGGKALILGIDKCGGVKELRSLLYLGAMSYVGRMPDEPKTQKDAWLAKIIDRIGFRKACIALANKTVRTAWAMLRYETNYKPVLI

SEQ ID NO: 219726 - protein, 350 aa, unidentified
MSRYIGLDVHMTSCTMLILGPSGKKLGCHVVETNANLLVDLLKAIPRPRHLCFEEGTQSAWLYETLSPHVDETVVTVKRDRRGSKDDQRDALELADKLRTNSIEVRVYKEVGRYGRLRELSKVHQMQVRDSVRVQNRILALYRSRGIATEDSLYNPTQREEWIAKLPARMQTAADSLLRQYDVVEPLRRESEKTMVAEARKSLVSKLLATVPGLGPIRVAHLLSIVVSPHRFRTRRQLWEYSGLGVVMRSSSDWVQGDDGRWRKDQVQQTRGLNRHHNHELKSIFKGAATTVIGQARKSCPIYQHYESMLHNKTKPNLAKLTIARQIAAITLALWKKEEKYDPAKLPQPS

SEQ ID NO: 219727 - protein, 342 aa, unidentified
MKITTIGIGLAKSVFQIHGVDEQGKVVVRKRLRRPQVLTYFAQHTACLVGMEACGGAHYWARKLQAQGHTVKLMAPQFVKPYVKANKTDAADAEAICEAVTRPSMRFVPIKNADQQAILSLHRARQGFVRARTAQANQIRGLLAEYGITLAQGISHVANRLPEIIEDAENELPGLFRALLQRLVVHLKELNCQVQELEDQIEAWHRSNGASQKLAGIPGIGPLTASALSASIGDAKTFRNGRELAAWLGLVPRQHSSGGKPLLLGISKRGDAYLRTLMIHGARSVVRVAERKSTPTDRWSTDLLERRHMNVVAVARANKNARIVWALLAHDRDYRVDYVSAA

SEQ ID NO: 219728 - protein, 358 aa, unidentified
MVTGPKHQKEKRSMEHFAGLDVSVNETSVCIVDDTGRIVREAKVASEPEALLAALKNRAYHFKRIGLEAGPLSQWLFSALAEAGLPVICVETRHMKAVLKAQINKTDRNDARGIAQMMRAGLYRPVHVKTLRSQKLRMLLTHRKLLQSKAIAIENDLRGTLRNFGLKVGVVGKVKFEARIHELVENLPDLAVLVEPMLTVRRVLREQIVILHRRVLAIVRDDEVCRRLMTTPGVGPVVALTYRATVDVPARFRKSKSVGAVFGLTCAKYQSGELDWSGRISRCGDEMMRSMLYEAAQSMLVHSKKWSWLKAWAMQIARRRGMKKAIVALARRLAVIMHRIWVDGTEFRWTREQAAAAA

SEQ ID NO: 219729 - protein, 412 aa, unidentified
MEVLHPRCAGLDVHKETVVACVRIASGGEVSRAVRTFETTTARLIELAEWLEANGCTHAAMEATGVYWKPVWQVLAAGGFELVLANAAHVKNVPGRKTDVNDATWLAELLAHGLIRASFVPGPEIQELRGLLRTRKQLVREKASHVQRLQKTLEEANIKLESVLSDVMGRSGRAMIQALIAGETDPAKLAALAHPKVRAPQARLREALRGRVKRHHRFLLDLHLQQIDALDAGIAAIDREVDAGLASFRDAVKQLSTIPGVSQLSAQVILSEIGIDMSRFATAAHLRSWAGLCPRNDESAGKRRSTRLRTGAPWLKATLVQCGWAAARTKATYLNAQFVRLRTRRGPKKAVCAVAASILTAAYHMLKDGTFYQDLGATHFDRRRPDAQARRLIKRLADLGFSVQLKPVVAVS

SEQ ID NO: 219730 - protein, 343 aa, unidentified
MQAITTMGLDIAKSVFQVHGVDAEGYVVIRRQLKRRYVLAFFQKLPPCLVGIEACASSHHWSRELQALGHNVRLMPPAYVKPYVKRQKNDTTDAEAICEAVTRPTMRFVATKTPEQQSCLMLHRTRHLFIRQQTAVINAIRAHLAEFGIVAPVGRNGVEQLLGVVADSNDKLLPEVARACVAALGAQLRMQKAQILEFDRMIRAWHRSSEASRRLDEIPGVGPVLATALVGSVADPKAFRSGRDFSAWIGLVPKQHSSGGKDKLGSISKQGDRYLRSLFTAGALAVIRYAKIHGTKHRPWLTALLARRPTKVAAIALANKIARMAWAMMARGERYKEPVALAA

SEQ ID NO: 219731 - protein, 410 aa, unidentified
MEIIMNIHSSPHLHVAVDIGSREHYVAIGLPEGEILDEFSISHTPAGFQSFFSRIEQQERLYSLPVDVAMEGYNGWARPLDAQVQRHGYQLYNVNNLKLARFKEIFPAPAKSDSIDARKILELFQLQNHLPLAKGVLQSVLPVPDANQHLKRLSRRRRQLTNEKIALQNRIQPDLQAVCPTLLDITHSVDNQWFLHFLTCRDDLEKLLRLQNKSLLAIKGIGKSYLSLICDWQKQAEFSDEIKEVGPMIQEDARRLLALITSIKMLEAKIDHQTQDSEYAQHINSIPGFGLVCSAELAGEIGTLERFPKQSSFSMYIGMSPLDNKSGAYEGTKAPKHVNTRARKAMMTAVCRHMACVPESRAYYDKKRSEGKTHNKAIRALGRHISRVIWSMLRHDRDYLEPKLKKPIND

SEQ ID NO: 219732 - protein, 322 aa, unidentified
MTPPDIYVGIDVAKDQLQVALRPGGEAWSVTNDRAGVRELVKRLATSKLALVVLEATAGMEMPVAAALAGAGLPVVAVNPRNAREFARATGRLAKTDVIDAHVLAQFGEAVRPPLRPLPDAATQELNALVTRRHQLVEMLTAEKNRLAAAATRPVRAGIQEHIRWLEKRLADIDRDLADAIRQTPVWREKDELFRSVQGVGPVLSTTLLAGLPELGTLGRKQIAALVGVAPLNRDSGRYRGKRMVWGGRARVREALYMGTLVATRFNPAIRAFYQRLLAAGKPKKVALTACMRKLLTILNAMARHETPWQTMHLTLARQDGC

SEQ ID NO: 219733 - protein, 361 aa, unidentified
MKEKKVRIQSSRVRAPKQIIGIDIGDRISRVCVLSGDCVIVREEPLPTTPEAFRERFDGLGRCRTVIEAGAHSPWISRLLEELGHEVIVANTRQVRLIYESDSKNDRVDARTLARLARVDPGLLRPIHHRTVEAQSDLAVLRARDVLVSGRTKLINNIRGTLKAFGYRFPRVSASSVGMRLRESIPDMLKTALLPMLEHVGHLSAVIYAYDKTIVKLGKTKYPATQLIQQIPGVGSLTGLAFVLTIDDPHRFERSRDVGSYLGLRPRQSDSGQCKPQLSITKAGNGYLRRLLVGCAQYILGHFGVDSDLRRWGYALMSRGGKNAKKRAIVAVARKLAVLMHSLWVSGTVYDPLRHVRAEAA

SEQ ID NO: 219734 - protein, 322 aa, unidentified
MERKEYEVKKNKEYVGVDVSKETLDMVAYFTGEMHSFSNDKAGITKAVAWLNKVKPAITVMEATGGLEIPLHVALQEAKLPVAVINPRQTRDFAKSMGILAKTDKVDAKVLARYAEAVKPEVRPLPDEEARHLDTLITRRLQLVEMITAEGNRLMSTRNKAIRQRIQVHLIWLKEELADINKSISQTIKQNPVWHEKDRMMQSVPGVGPVLSATLIGALPELGCLNRKQIAALVGVAPLNRDSGKHRGERHVWGGRSCVRTPLYMATLTAVRYNPVLSNFYNHLLAAGKAKKVALTACMRKLLIMLNVILKHNSTWSWNYSA

SEQ ID NO: 219735 - protein, 458 aa, unidentified
MRRNKSTDRDRRTMAVVHPNAAAIDVGATMHMAAVNADRTPEPVRSFGTFTTDLHRLVDWLSECGVDTVVMESTSVYWIPIFELLDARGFAVSLVNARDAKHVPGRKTDVSDAQWLQRLHSFGLLRASFRPKGQIAELRAYLRQRERLLEYGASHIQHMQKALTEMNVQLHHVVTDITGATGLRIIRAILGGERNPAVLARMRDSRCHASVETIEKALAGNYRPEHLFALEQALALYDTYQQKASACDTRIEAVLKELSIRRGRQAGPLPSPRWYRSRQQNSLLFDVRAALFALLGKDLTQINGLGPYLALKLIAECGDDLSAWPSAKHFTSWLCLAPSNKISGGKVLSSRTRPSGSRAAALLRLAAATVGRTDTALGAFYRRLSARIGKAKAVTATARKIAVLFYNAVQHGMEYVDPGASSYETRYRARVIDNLHRRAKAFGFVLQPIEPTATIAVS

SEQ ID NO: 219736 - protein, 342 aa, unidentified
MDRLSPVTRIRKVGFTMENELHFIGIDVAKAKLDVDILRPDGRHRCKKFDNTPSGHEALVRWLRGHDVNRARVCMESTSTYMEDAAAHLSDAGYTVSVINPALSKAFAQSEGLRSKTDKVDARMLAHFCREKRPPAWEAPHPTERALKALVLRHQALTEMQTQEKNRRETAPEVQLTSIDILLGCLSAELARIEKQIKDLTDNDPDMKQRRKLLNSIPGIGEKTAAVLLAYTGLKLKFGTGRQFAAYAGLTPVQHESGSSVMRASRMSKAGPVHLRKALYMPALSALYHTAWGKAFRKRLEGNGKRAKVIIGAMMRKLAQVAYGVLKSGKAFDASQHELLIA

SEQ ID NO: 219737 - protein, 355 aa, unidentified
MFYSGIDLHKNMSFITTINDDGVVIKQEKLPNDDYAILNYFFSIGKQHKTVVESTSNWYWLCDLLNDHGIEIVLAHAKYLKAISYAKVKTDKVDSHILAQLLRMNMIPVAHQIAPSNRGLRDLMRTRLRFVYKKTSCLNSIHRLLDKYNLSIPDNRQLHDMSTLDTLSGLDNDPEFSFQLESLIEQIRLLDKQINNLEKLLHPKLIPNPDIQRLLWIPGIGKILAFTIYLEIDGIERFPDVKKYYSYCRLVPGADNSNKKQKHKSGNKDGNRYLKMAFSEASSKAVQYYKEIKQYHQSKARKKHICIAWSLVSKEIAKICYHVLKEKEDFDNTFKNKQLSRTKSMQWPRLASPDA

SEQ ID NO: 219738 - protein, 341 aa, unidentified
MNIITVGIDLAKNVFAVHGVDDNGKPVLVKPKVSRADLLPLIAQLPPCLIGMEACSGAHHWARLFRQHGHTVKLMAPKFVAPYRMTGRRGKNDAADAAAICEAVTRPAMLFVPIKEEHQQIILCLHRTRQGFVEERTASYNRLRGLIAEFGIVLPQKVACLRREIGAHLEDLPGYANRCVADLLTHADRLDERIAEYDRAIAQAARDDERSKRLMKLPGIGPTTASALLASMGSGHDFNSGRQVAAWIGLVPGQYSSGGKARLGRITKAGDNYLRSLLVMGARAVLNSLGDKQDRFSRWARSLQERRGYWRAVIAIAAKNARLAWAVLRYGEDFKLEPGTV

SEQ ID NO: 219739 - protein, 328 aa, unidentified
MRGTTPLGIDIAKATFDVALASDRRLAQATFANDATGYAALERWLVKQGAGPVQACMEATGRYGERLAEVLFEQGHTVSVVNPARIKKYAESQLQRHKTDARDALVILDFCRTQPLPLWRPLAEAQRQLQEMVRYHDSLQELRQREANRLTSGIRSPEVIGPIQQHLAYLDRQIAALAAQIQQQLDQNDSLDHKRALLSTIPGIGRLTAARLLAELPDIATFTSAKQLAAYAGLTPSQHVSGSSIHRRPRLSKMGRSSLRKYLFMPALAALRYNPVIKALRQRLLARGKPRMLIVGAAMRKLLHIVYGVLKSGRPFDPTRAQIALQSP

SEQ ID NO: 219740 - protein, 400 aa, unidentified
MRTVFGIDVSKASSEVAILVNGERVHGYTMPNDIIGFSRLMEDLKTVSNPEIIFEATGVYSRRLQAFLEENSYDYTRLNPLEAKKQLDGLRVRKTDKIDAEKLASSQFVLNRKPTYVQEEVYQNLHDLSRFYQNLTEDIVRTKNRLHKVLQVAFPEIENLLSTPTGEQYWNLVSIFPTKHWVLELSEVELKEAIRNSTSKRISENRVGNLTEKLVGLAKQSYAGISKTSPMVEEVKYDAQELIRLTNRREQVLQQLIALAEPLPEYKILLSIPGIAETTATSIIGELGDIRRFKSANQINAFIGIDLKHYESGDFLGQEHITKRGNPYARKILYKCIHNIASASHTNPCHIADFYEKRKRQSQTTSTKPHTIASIHRLIRTMYYLIMHNKLYDYTLAKSH

SEQ ID NO: 219741 - protein, 356 aa, unidentified
MAEGTWVGLDVHARKTVAGVLDAVSGELRSFQAPVLAAETVDWLRGFPGPVRVAYEAGPTGYGLARACAAAGIVCTVAAPSKIPRATGDRVKTDRRDAERLARLLRLGELVAVRVPEPHEEAARDLVRAREDVRGELMRARHRLSKLLLRHGLVYEERAWTLAHDAWLRRQRFGSRPLALAFDEAYAAVLQAKTRRDTLDLAIAELAGEPPFAATVGRLCCLRGVSTLTALALTVELGDWTRFRPQSLGPFLGLVPSEDSTGERRRLGSITKTGNTHARRLLVEAAWQQQRPLRESATLTRRRQGQPAPVRARADQSARRLHARWQALERRGKRRTVVAVAVARELAGHCWALATM

SEQ ID NO: 219742 - protein, 424 aa, unidentified
MAVVTIGVDPHKGSHTAVAINAAEQPLGQLRVRASAVQAERLLEWAQAWPERAWAVEGAGGTGHLLAQQLLAAGEQVLDVPPKLAARVRLLATGNINKNDPNDARSVAVAALRSANVRQARQDDHATVLKVWSKRYEDLGRVRTQVACRLHQVLCELVPGGVAREITAGQAGQILASITPAGAVDAARWELAAELTEDLRGVDIQIRETRKKAAAAVRASGTSLTGLFGVGSIIAAAVIGDVRVVSRFPDRDHFAAYNGTAPIEVSSGGRKIYRLSRRGNRRLNHAIHMAAVTQIRYRHSQGHAYFAKKLAEGKTRKEALRALKRQISDAIFACLQADARRAAAAPAKSPGGQPGNHSASRAASSHPDHRLFGQATPGPATHPTTPAADPAPASFPALLPSRASGRPGPGPGKARPRSGAPRRP

SEQ ID NO: 219743 - protein, 465 aa, unidentified
MQEKRHIGLDLGVKSKSKIYLIDQAGKKVRAEFSIWTTPQGLDYMMQQALKGTSKEAGLDLTMEPTNIAWFKVAVYLRRKYPEVKIYRIKSEKVQDLRKFYRKHTKTDSLDAKTLAKMPVVDSDSLQEVYIRPRDILALNTRCKQRARLVENATAKKNSISDQIELGFPHLVDCFSSKFTTPFIRFCGKYANPFKVKRSGKEKLLKILIKLGFRKDLSSLAENIYQRAGEACILLGDEDSIIDYEDFQDRIRSEFRIFKALEKEIDKVTEKEQDLYEKCYPRKSLNSIPGIADVSGAVIASTIGDPFRFSSGRSLVGYMGYYPKEDSSGLSSKKGLRMTKAGPNIAKGSLYLTAETARLIDPQMGKIYYRQMVECGNPHTKAVCRVVRALIPRILRTMKEDQDYVICDLEGNPISKKEGRRIVKEQFFVPEEVRQRLSNRKRMPLNKKGRTKPQYKKRQSLNSSD

SEQ ID NO: 219744 - protein, 333 aa, unidentified
MVEGTKGSHHKEGSTKMSKHTMMCAGIDTGKCKLDVALDQSPDRLQVDNDGEGHAELVTWLRKRRVERIGIEASGGYEQAVVSALRRNGFVVVVFQPAQVRAYAKYQLQRAKNDKIDAALIATCTAEAKKIHPPPDPRLAPFAGLLTIIEQLTDDVARYKTRREMSRDEEARRFWSEEIARLKRLVRERLKQLVTAIRQHRDLAHRLDLIASVDGVGLRTAVAILVRMPEIGRITRGQAAALVGVAPYDADSGGHVGSRHVEGGRERLRESLYTAALPAAFHWNPELIAIYRRLRAAGKPHKLALIACTRKLIIFVNTVVARDTPWVPRAAIT

SEQ ID NO: 219745 - protein, 438 aa, unidentified
MSMTFARLLDPCLEDEDDPFRHYDYRGEPLEDRLYLPCGIDPHKKVCHAAFVHPLPHRQEILSHRQVQNQHLPDALWLVEEGQRLAVSFQATPLYIFEASGPYWRPYRLFLHQFGLPTATVSGRQTKRAGGTGTRKTRNDLQSAFLVAKVFKQGESHASRIPPEPLATLREYTRLHLFFVQQSVAIQNRMFDLRYQIHPGFDDLFSKPVMPTTLALAQEELVHPVKLLQADPERLTQMIHQASNGKLGAPRAEAILRSARHTFYMPYAPAAQSFNLKLMAQAHEYISHHLLPPLQDRILECLDQIPFPQHLTEIPYFGPIVTATFLAELGSPFWFRTVDSVVAWFGLDPSVSESADHTTGISHLTRRGTKYGRRIMWLVARNWSRYVSQGNRMFRKERDENKLSYDGAICVIAAKLVRMAFAMARDGSHFHMSKAFPN

SEQ ID NO: 219746 - protein, 371 aa, unidentified
MSKVRFVGLDVHAETIAVAVAEPDGAVRSVGVIPNRPESIRKLLKKLGPADQLRVCYEAGPTGYVVYWQLTGLGVKCDVVAPTLVPTKAGDRVKTDRRDALKLARSYRAGDLTAVWVPDAAHEALRDLVRAREAAKKDQLRARHRLGKFLLRHGRRPPTGMKAWTQAHLAWVKSAVRFEHAPQEATLLDYLHEVDHVAARLVRLEAAIDAAITTAPIRMRAVIEALQALRGIARLSAATIVSEVGDLSRFAKPRQLMGYSGAVAREDSSGERTRRGGITKTGNAHLRRIVVEAAWAYRHRPALGPALRHRQASVSAEVQAIAWKAQHRLHTRYRALTARGKCKQNVVTAIGRELLGFIWAIGVCVESTRVA

SEQ ID NO: 219747 - protein, 347 aa, unidentified
MNKISRMGMDTSKQIFQLHGVDEMERVVLRGKLRRREVLKFFGKLEPTAVGIEACGSSHYWARELTRLGHEVKLIAPQLVKPYVKRGKNDAADAEALCEAMSRPTMRFVPVKSAESQAALMLAGLRDRLVRNRTQLANAIRGYAAEFGLVAAKGKAKIEPLLSRLQTDDAVPALARELFAEHAKEYAQLEARLAVIDAKLMAWHRANAVSRNLARIPGVGPVIASLLVMKTPDPHAFRSGRHFAAWLGLTPKDHSTAGKLRLGVITRAGDEVLRSLLVVGATAVVWQVRRGTGRRSSPWLVELLKRKPPKLAAVALANKIARVAWKLMATGEIYDANRALPATLAAA

SEQ ID NO: 219748 - protein, 462 aa, unidentified
MTVPKTKGSRTKATPLPTSLPAIRPLVAGLDVGSSEHWICGPARADGQPNVRGFGTTTDQLQALADWLAEQGVESVAMESTSVYWIPIYELLESRGIEALLVNARQLHNVPGRKTDVTDCQWLQLLHSCGLLRGSFRPSEAITRLRALQRQLANLVAERTRCVQWMQKALDQMNVQVHRAVTDLTGTTGLAIVRAIVGGERDPARLALHRDYRCRKSAAEIARYLTGTWRDEHLFNLTSALRLFDALEAEIAAYDAQLLTAVESLQPPDRQADPVPPHPNPAKEKAIKARGEQQARTTLWRFAGVDLTRIDGISAGAAQVVLTEVGPDLAAFPSEDQFVSWLRLCPRTPISGGKPLKKRRNGLGANRIAGVLRMAATSLQRSKTALGAAFRRIARHKGGAVAVFATARQLAQLIYRMLRSGHDYVDIGEQAYDQRFLVRRFAALTESARSLGYTLVPTAATE

SEQ ID NO: 219749 - protein, 344 aa, unidentified
MSQVATIGLDIAKNVFHAHGADERGAMVFSRKLTRSKLLDFFAGQAPCVVALEACGGAHHWARELQAMGHEVRLIPPAYVKPFVKRNKNDAIDAEAICEAAQRPGMRFVAVKSEEQQAAGLVFRTRDLVVRQRTQLINAIRGHLAEYGWVAPRGTAHMTMLADLLEDEDMISTLPEAARPMFKLMVELLADLDKQIAVLDREIARRAKEDEAARRLMTIPGIGPIAATAILALAPPIETFRKGRDFAAWLGLAPRQHSTGGKQRLGSISKMGERTIRRLLIIGGSSMVRQACRFGAPAGSWLERMLARKPRMLVSVALANKMARMVWALLTRKEDYRAPTAVAA

SEQ ID NO: 219750 - protein, 442 aa, unidentified
MQTSSRDLESVSMIKAQSAKLTPYLAVPQNGEPHRSYEGGASSYAAGRPKLEDLVMLQTVASVKPSAVDYERTLVLAIESSNKSWVLAAQVPGLPYTKVKCTVNPKAEGLLAAIAGYRSRAAATGRSIERVIAVYEAGWSGFWLARWLMRRGVEVYVIQPSSVPVDRRMRRAKSDGIDAELLLRTLLAWLRGEPRVCSMVPVPDEADEDARRCVRERTELISERIGLSNRIGAVLATLGVSDYNPLLRNRNRRLAELRTGLGEPLPRNAHAKIERLLARLELVLAQIAELERERDAVVETEASDKASKMIQQLTSLRGIGVQSATVLVREAFVRCFANGKALGSYAGLASSPYSSGGIDREQGIGKAGNRRVRTVMVELAWLWTRYQPAAAQVCWFRDRVRSTGRRVRKIMVVALARKLLIALWRFIIDGVVPEGAVLKAAT

SEQ ID NO: 219751 - protein, 453 aa, unidentified
MASHPSREATPPPIVPITPTRSRVAGVDLANGEHWVCIDPDLDPQPIRRFGTFTRDIAAMIAWLRSHGITSVAMEATGPYWFQVYRELTAAGIEAVLVDPRQTRNPRNRKTDMLDCQHIWQMHAHSLLSAAFVPDHAVQALRTHLRFRQDRERRSCEAITAVHDALARMNIKLSLVLSDLGSATGQRVITAILGGERDATVLAALRDPHCQKPPEQFIKALEGTWRAEDLFLLKHAHADYRAQLAAIADADQSINALLPSLYAKPPQEVAIVRKRSTHKTRFSFEAQAAAAGLVGVDLAAIEGIAPHTVLNFLGEIGFSVAPWTSSKAFCSWLGLCPNPRRSGGRTSGHARTTANRAASILKAAAHGLTNKDSPMGRRFAIRAKRKGRSAAIKDAAHRYARIIYAMMATKTPFDPTRLTPRLSPRQQQRRIEHLQERAKELGMALVPAQSPAA

SEQ ID NO: 219752 - protein, 341 aa, unidentified
MKRFIGIDLHKNQFTVCYRDEKENEELRKYAMSQLDDFKKTLCSEYEIGLEATGNSSHFRDEVKEFVSAVRVVNPSQFKVISSSAKKTDKQDAALLALYLSKGLFPEVRVMDSERARLKSLLGTRDRLTKLRTALKNKIHNVLNAHGIVSKRESLSSRKGLAKVLDHELDDLSKFELRILVDQINHLNEGIDKINQELKDPGNQLPGHKNLTSIKGIGDVSANVLLPVIGDINDFPDAKKLSAYFGIVPRVHQSNEVEHHGRITKRGSKIGRTTLVQCTLIAIRYSSYLRGYYDRLKAKKGSGKAIIATSRKLLGIIYDTLKNDIIWEDFPNGVIQSSRSS

SEQ ID NO: 219753 - protein, 364 aa, unidentified
MNTVVGLDVHSKDIVFYAKDQEGKMFCKGQVETSIKGMRELLDLYQIPAGSRMGMESGTQAFFVARHLEKLGYVPVIIHAQEVQKKKARPKQKDDMRDAKEICNGLQSDMYQQLVHVPAAKYQKLRSLLSSRRHFVNSRSNEVRSAKHAIRSAGLKHIYRGMTTSVAWMNLIKRLDDAEEPELARRTEGHFAVWQVNHEQVEKLNKKIKELLTEHPEVKETVKMLKTVPGVGEVVALTVVAILAEIKRFKTAKQASSYAGLVTETNHSADKKKYGHITKEGSPELRTMLVEAAQHANKPHHALNPFFRKLCAKRGYKVAVVACAHRLCRIMYAMLRDKQEYNATRVRPAKKPVEKTRSYILRRA

SEQ ID NO: 219754 - protein, 340 aa, unidentified
MNITRLSIDLAKDVFQLYGVDGKQKCVLTKRITSRAKLIEFVSRLKTCEIYMEACGSSNYWARTFQGYGHTVKLISPQYVKPYIQRNKNDYRDAQGIMEASFWAGTPYVTPKTVEQQDIQSLLRIRSNYIEIRTTVSNQLRGLMKEYGVFVAAGYQKLKQALPGIFDRSTENGLTPQMKELIEGQYDMLLIFDEKIDKLDIQIEQISNQNEVCQRLQKIEGIGPITALAIIALVGNGQGFKNGRHFSAYLGLVPRQHSSGQKEKLLGISKRGDVYLRELLIHGGRSVVMHCSKKSDARSIWVNRIKETGGMNKAAVAVANKNARIVMAMLLSGENYQMAA

SEQ ID NO: 219755 - protein, 340 aa, unidentified
MDNIGLDLHQRETQLCILTAEGEVVEQRIRTSRERFSEVLGERGAARILLEASTESEWVAQHLESLGHEVIVADPNFAPMYATRSRRVKTDRRDARTLAEACRLGAYRPVHRVSLQRRHLRAELAVREVLIRTRTRYVQVIRALVRRDGLRVPSCEPEHIGAKVAALPLAPRTSTELAPLVALLEPLSAQIAAADRRLAALAAADPVVTRLQTAPGIGPLTAVAFVATLDVVGRFATAHQVAAYLGLTPRERSSGEQQHRGRISKTGDQRMRWLLVEAGWRLLRSTQPAAAPLRAWAERIAARRGGSIAVVALARRLAGILYAMWRDETEYRAAAIKAVA

SEQ ID NO: 219756 - protein, 359 aa, unidentified
MSNGSTEQMKMTAGMDLGDKYSHLCLIDQQSGELIEESRLRTTPEAMRRRFDSERSLHIAIEVGTHSPWLSRLLTECGHEVLIANPRKTRLIYGERRKTDKLDAEKLARLARADPELLYPVEHRGCDSQAHLAVVHSREALVRSRTQMINHVRRTVKSFGYRLPKCSTGSFHKKIPGQLPSGIPEVLGPIVETVGSLTEKIKEYDRRIEELAAERYPETELLRQVSGVGSLTALTFVLTLEDPQRFAESRSVGAYLGLAPGTDQSGEQDPQKRISGEGDELLRRLLVSSAHYILGPFAPDSDLRRHGEKIAERGGKNAKKRAVVAVARKLSVLLHRLWVSGRSTNRCTMPGVLGFRERR

SEQ ID NO: 219757 - protein, 358 aa, unidentified
MHRNSAQGAGQIIGQMGGLQVIGLDIAKSVFQLHSVDMATGEIVNLQLKRAKVLEHFANRAPCVIGIEACGGAHHWARELTAQGHTVRLIHAKAVRPFVSGNKTDATDARAIWLAVQQPGTKFVGMKTLAQQATLTLHRQREMLMKMKVMQINALRGLLYEFGATFARGRNALFSEIEATLESLANSMPQYVADSLREQVQRIKQLGADIKAVEVRLTAVLRTDTDMRRVAQIPGVGLLTATAAIATMGQAKAFKSAREFCAWLGLVPKQRGTGGRVNLLGISKRGDTYLRTLLIHGARSVLTHAKEPGPWLEQLKGRRPANVVIVAQAAKMARTIWAVTARQQDYQRGYQSIRRQAA

SEQ ID NO: 219758 - protein, 331 aa, unidentified
MDEVKRFVGIDVAKAALDVFIGSAGAAFSVANDEVGIQELLRQLKPADFVILEATGGLEMPVASALAAAGIAVVIVNPRQVRDFARATGRLAKTDRLDAEVLARFGQAVRPEARPLANEQAQALEALVTRRRQLVEMLTAEKNRRARAPKILHRSIDEHIRWLEKRLAGFDDELAEMIRDTPLWRERDELLRSVPGVGKVLSSTLLAHLPELGALNRKQIAALAGLAPFNRDSGSLHGSRCIWGGRAQVRRVLYMAVVAAVRSNPVIKNFYTQLRARGKYPKSALTACMRKLLVILNTMLHNKTHWQTPALASSTSALSSFLGAVPEHGCC

SEQ ID NO: 219759 - protein, 325 aa, unidentified
MEQYIGLDVSLKDTAISIRQGGTRIWRGKCASDPKLLADVIRKQAPQAKRVVFETGPLATWFYHALTAEGVPAICIEARHAQKILNETLNKTDANDADGLAQLAEAGFYKVVRVKTFDAMLTRTLVGIRNQIVGISIQLSNQIRGVMKTFGLIVPKGKGRVFDGNVRELLDGNDDLARIILPLLEAWRDIRKHAASLDRHLLATARQSKAAQLLMTIPGIGAITALSFAAAIEDPGNFKRSRSVGAWLGLTARRYQSGEVDFDGHISRRGDNHLRSLLYEAAMVMLTRTSFRNDSNLKDWGLKLRERLGIKRAAVAVARKLAVTC

SEQ ID NO: 219760 - protein, 358 aa, unidentified
MNRTAGVGAGQIIGMVGGWQVVGLDIAKSVFQLHMVDMVTGEIVNKQLKRAKVLEHFANKAPCLIGIEACGGAHHWARGFKALGHEVRLIHAKAVRPFVSGNKTDATDARAIWLAVQQPGTKFVGVKTLEQQATLVLHRQRELLMKMKAMQSNALRGLLYEFGATFARGKNALFGEIEAALEALVNDIPQYVADSLREQVQRIKQLSADIKAIELRLAQRLRSDVDMKRVAKIPGVGLLTATAAIATMGEAQAFKSGREFCAWLGLVPKQSGTGGKVKLLGISKRGDTYLRTLLIHGARSVLTHAKEPGPWLEQIKTRRPANVVIVAQAAKMARTIWAVVAKQQDYQRGYQSVRPQVA

SEQ ID NO: 219761 - protein, 350 aa, unidentified
MWIIGCDIHSRYQQIAAVDMETGEMIERRLNHQADEVQNFYASLPAGARVGIEATCPAPWFERILERCGHELWIGDPATIRRSTVRKQKTDARDAQHLLDLLRTDRFPRIWVPAAAERDLRQLLVHRHKLVCWRTQVWNQLRALARGQGLLLRGCSWTTRGRQSLEALALDPWAARRRQELLHLLDHLNAQIDPLTRQIEQEAKCRPEAVALMQQPGVGPQVSLAFVLTLGRARRFPRGKQVVSYLGLNPTEHSSGGHQKLGHISKQGNRMLRWLLVEAAWTAARKDDELRRCFKRLAFRRGRKIAVVAVARKLAVKLYWRLRNFQEQISVASAPMQGSSGRGLVHTPTL

SEQ ID NO: 219762 - protein, 355 aa, unidentified
MDTTKYVGMDVHTEAITIAVVNSAGKIVMESTLETKANTILEFFQGLRGNVQVTFEEGTWAAWLYDLLKPHVTTVVVCNPRKNALLKDGNKGDKIDARKLAKLLHLNNLKPVYHGENGIRTLKELSRSYLTISKDLGRVMNRLKALYRSWGIPCKGQQVYAPRHHSEWLNKITEAGVRRRAEYLYQQLDALQPLRQQVRRDLLAESRKQPATKLLRKIPCIGPIRAALLIALIQTPHRFRTKRQLWNYSGLGIETHDSAQYRFVRGELQRSKRPQQLRGLNKNHNHDLKNIFKSAATMATISAGPFHDFYEALLVKGRKPTMARLTLARKIAAITLIVWKKEVSFDGKHLKPQAA

SEQ ID NO: 219763 - protein, 410 aa, unidentified
MERVIERCCGLDVHKKTVVACVRVPGRTSGREQQVRTFGTTTAELLALRDWLGGYGVTHVAMESTGVYWKPIFYVLEDAFTCVLANAAQIAQVPGRKTDVKDCAWIAQLLEHGLVRGSFVPPVPIRELRDLTRYRAALIGEHTRETNRLQKVLEDAGIKLASVASDVLGVSGRAMLDALTQGTRDPDVLADLARGALRRKLPALRQALAGRFRPHHAFLVSQVLAHLDYLDEVIETLSTHLDEVMAPFAEEVSRLDTIPGVNKRTAEVLIAEIGVDMSVFPTAGHLASWAGLCPGNNESAGKHRSGKTRKGNRWLRGALIQAALAGGTRATKGAFAARYRRVMRHRGHKKAVVAVAHAMLVAAYHLLARQTTYHEPGADYYERRHAERVRHRAVQLLERQGYRVILEPAA

SEQ ID NO: 219764 - protein, 350 aa, unidentified
MRRPKDKLIAGLDLHSNNVMIGLINQDGKRVTHGKLGCELKEVVAFLKPYKAQLQSMAVESTFNWYWLVDGLRAQGYPIDLANPARIAQYSGIKHADDKDDAFHLADLQRLNILPKSHVYDPELRPVRDLLRRRTNLVHQRTALLLSFKSLHARTTGQPLDLSDAKKMEPKEASKLYEHPANQLIAQVQVEHIQAFDKSVSRIEAAVLKCAREIPLYEKLLTIPGIGKILGLTITMEVGDVKRFKTDGDFASYCRMVDAKRLSNGKAKGDNNQKCGNKYLAWAFVEAANFSRRYDEHCRRWYDRKAAKTSKVLATKALGCKLAKAAWHVMAGQADYDAARMFPELATSKK

SEQ ID NO: 219765 - protein, 383 aa, unidentified
MNSMTGAGGLITGGVDAHTDTHDAAALDEQGRLLGVRTFATTPDGNRALLAWLERFGRVGVIGVESTGSYAAGLVRYLRSRDIDVVEVNRPHAHTRRRRGKSDPIDAEMAARQALAGHATAVPKRTDGIVEAIRHLRLARDSAVKARTAAFNQLTEIVVTTPDELRQHLDQRKSTRGKAALCARLRPDLERLHEPQHAAKLALRSLARRVAELDREIAALDQRLAPLVATAAPRTTQLLAVSTGHTGQLLITAGENIERLHSDGAFAALCGASPIPVSSGRRDRYRINHGSDRDANRTLHMIAVCRLRYCQRTRAYAQRRLAEGKTKREIIRCLKRYIARELFHTLSADLADLDRPAPSRAAPAIAVSINCGAGPIGRNRRRA

SEQ ID NO: 219766 - protein, 536 aa, unidentified
MHEQSSTGRTYTRDAYADISLAVMHKLAERPAPARRHSSSRKLVNNCAAGDNFAGGRPAPARTRSRVCNPKRIDGRLPVEPEALAPTSNRKTPQEGHHISLVDSRAKRRKNQRQQRHTMNDSQQWKQYPGFGAVDWASEKHSVIVVDQAGKVIEDFEIEHSALGWKKFREKLQAYGSIPFAIETSQGAAVEQLLEAGMIVYPLNPKSAQAYRDRKAPSGVKDDRLDAWSFADALRVDGQGWKALRPEEPLIKELRLVCRDEVSLIEQRTALILQLRHALAEYYPAALEAFKDWTSVSAWMFVQRFPSPELLAKAGKRQWQKFLHARRLWGSDQGPRRMEIFAHATELSGSAPTANAKSLLALSLVQMLFVLEKQLAVYRQRIEALFARHPDHDLFGSLPGAGSKIAPRLLAEIGDERDRFEGDAQNLQCLGGTAPVTMHSGKYRHCHRRWACNKHLRHAIHLFAEKSLSRCAWAQIYYEYHRKKNRSHSDALRRLGHRWLKIIYKMWVDRTPYDPELHHRNQLQHGSWIFQLKACE

SEQ ID NO: 219767 - protein, 400 aa, unidentified
MVCVGWDWASRRHAVAVLDEGGRLVDRWAVEHSQAGITDALRRLARHGTPADLPVAIERADGLVVERLLEAGHPVVPIDPRAFKAARPRWGAAGAKSDPGDAAKLADYLRTDGHRLRRLRPPDAATRQLQALVRVRADHVAARVAATNQLAALLEAHWPGGAALFARLDSVIALAFLERYPTPEAAARLGDARLAAFLRRHAYSGRRPAAELLERLRAAPVAGAGLDPTALAACVRAQVGLVRALRATIADLDRALAAALPAHPKAALLAPLPRVGTVNLAQLLAAVGPVLERAPDVEHAAAEVGAVPVTKASGQSRAVCFRWAANARARQALSTFADNSRHASAWAADLYGQARARGKHHPHAVRIVMRAWLRVIWACWHTGTRYDPARHGAERRLAVA

SEQ ID NO: 219768 - protein, 336 aa, unidentified
MALYCGIDLHSTNHLVVIIDDEDRRVLEKRLVNDVSITVNTLTPYRDQLAGIAIESTFNWYWLVDGLQDAGFVPCLANPAAIKQYEGLKYTDDPYDAFFLAHLMRLGILPTGHIYPREQRGVRDVLRRRLSMVRMASRLLLAVQSQIWRSTGINISNNCIRRPDFELPLPPGPVCEGAAAQWRLFQQTQVEIHGLEKLALDLYQGEEYYQLLQTVKGIGVILGLTIGLETGSIQRFKKAGNYASYCRVVKSERISNGKKKGQNNRKAGNKYLSWAFHEAAHFARRYEPKVQRFYERKRQKKGNNIVAIRAVAHKLARAVFHMLKKNEPFDVDRAFG

SEQ ID NO: 219769 - protein, 344 aa, unidentified
MLYVGMDISSKSFVVHAVDERKKVVLKTEIAPSRESLRWLVGQLGPQPKLFVFEAGNQLKWVADTLRKQEGVSLHVVHPNEVKWISSSSGKTDKVDAKKLAELARGDLLPRKVHLVEGEARELRELISARTQLMQKRVSMLNTLRGYLKQEGVRLGEKFFARADWKDRLEKTRLSRTLKTVLRVFRPSIEALVASERELNQKISEIQNTKTKLLETIPSIGVLSSRTIVAALDDVRRFDNRKAVAKYGALTPTIYQSGEVVQLGRINRNGRHEVRRVLLQCAHLLPRMKSPAAKPLRLFYERIERRQGKKKALVALARKLLTVAYGVLKSELPYDPLKLLPQAA

SEQ ID NO: 219770 - protein, 316 aa, unidentified
MTEEVYVGIDVSKAELVVAVRPSGERMTLGNDRAGIKRLVGRLDELKPKLVVVEATGGLQRQVVAALWMAGIAVAAVNPSWVRNFAKGRGVRAKTDRKDAELLALYAQRERPEPRPPADAETQALQELVMRREQLLEMLVAEKQRLHRASGTMRKELRHHIAYLEGRIKELEQDIDKTVRRSEAWRRKSEIVRSVPGFGPRFSAMVLAKVPELGTLNRKQIGALVGVAPMPDDSGSRHGRRVIAGGRFEVRNKLYMCALVAARSNPVLKQFYARLVARGKPKKLALAAVMRKLIVTLNAMFKTNSLWRPPCPDLSV

SEQ ID NO: 219771 - protein, 346 aa, unidentified
MATSADRPDYLLFVGVDIAAATFTATWSQDVQSTPRPMTFKQTPAGFAAFQQQLHQTGIAPGATLIVMEATGSYWITLAVTLHQAGYVMSVVNPAQVHDYVKSLPRKGKTDALDATYLTQFAFERRPAPWTPPPAIYHELRQRLAARDVLLEMRKLAYNHRHALQQWPIVVESVRTQLDESIADLNRRMTQLEAELAALLQDGAWAESARLVLSITGMGMLTTAWVLVTTLNFTIAPTPESLAAYAGLAPLPRDSGSSVRGRRQIGHGGNRRLRTALYLATLSAARHNPVIRTFYQRLCAAGKPKNVARCAAARKLLQLAWAVVKQQRPFAPAYQAKLHAEPRAGA

SEQ ID NO: 219772 - protein, 368 aa, unidentified
MKQVTTYVGIDAHKKDLFIAMLVGQQKTPVTWQLANEPQAVRRLVRKLERDAPGPVSVFYEAGPCGYALQRQVTTSRVSCDVVAPTLIPRKPGERVKTNRRDARKLVELGRAGLLTAVQPPTLEDEAVRDLARARDDAREDLQRCRHRLGKLLLRRGLHYAGRNWTRAHRQWVDGLVWTHAAERAVVDTYLLAIDQTEARLLELDARLAEMADRAPYREPVGWLRCFRGIDTLTAMLILAELHDFRRFASAPALMAYLGLVPGEDSSGEKHRRGRITRTGNALVRRLLVETAWHYQHRPSVGVALTRRRKGQPGRVIAIADKAQQRLCRRFRKMAAEHKPAPKIAVAIARELAGFLWAALQPAPVSVT

SEQ ID NO: 219773 - protein, 344 aa, unidentified
MEGSPDTYRLFVGVDVAAQTVTAAWQPSRGGPGPPHTVDQTPAGHAALQRQLRTAGIPPAETLVVLEATGSYWVALAVALHEAGYRVAVINPLQAHHFAKAHLRRAKTDDLDAQALAQLAAALRPAPWTPPPAVYHEVRQRLVARDGLLAMRTQARNQRHALLQWPVVVAAVRQHLDAVIGDLDTRIADLTAEIAAVLKEGAWAESLACLTSAPGIGLVTAAWLLVATLDFSLGGGPAAVTAYAGLAPIPRESGRSVRGRPSIGHGGNARLRTALYMATLSAALHNPIIKPFYDRLRAAGKPVKVARCAAARKLLHLAWALATKRQRFDPVKQQQHTASPNLAA

SEQ ID NO: 219774 - protein, 358 aa, unidentified
MNKIKNNKFDFTGQPIYVGLDVHKKSWSVSISTEHGQYKSFSQPPEVEKLVHYLHQHFPGAQYASAYEAGYCGFWIHDRLKEKGVGCLVVNPADVPTKNKERRMKRDPIDCRKLSRSLRNGELEGIYVPPRGKVEDRSLIRTRLNMVRKQTRCKNQIKSMLLFYGVVIPEKREMGHWSRRFIRWIEGIRMERASGDTALQIHLEELCHLRQIIAKLNRAVLVLSRTEEYRSWVLLLRTVPGISTLTAMILLTEISEITRFPSIDELTSYVGLIPDTQGSGEKEHVGGVTQRSHSQLRWMLIEASWKAVQKDPALMMAFNQYCKRMRKTKAIVKIARKLLNRIRYVLKNRSEYVPAVLE

SEQ ID NO: 219775 - protein, 361 aa, unidentified
MIYSVGIDVHRGRHRAYCLDEKAQACDTFSFQTTPEGLATLEQRVFRNGSNPVIVFEPAGLSWLMVAAYLRSRRPDCRLVKAKGQKVAALRRYLRTSAKSDRIDALTLAKMPFIDPERLDELYLAPAETHALLRLARQRKRLEDQITSHKKRIGSIIDGYLPGVRQAFSHSWSIRARAFFHSRINLFKVVREGEDALCRFLAQAKPGDREAKVESYLVYRACQNALALVELCQAARSLDEEFYIDLQDEIDRELRLMEAAEAEIEALDRRIEELYLRLHPSDNLRTIPGVGEHTAPVFVACIGDPARFPNQSAFANWTGVVPGAKQSAETESKGLRMTKAGPAIMKWALYQAGQIGRQWDP

SEQ ID NO: 219776 - protein, 317 aa, unidentified
MEQTDHYVGIDVAKANLDVAVLPADECWTSPNNEAGIAEVVKRLKRHRLALVVVEATGGLEMPVVVELAAAKLPVVVINPRQARDFAKATGKLAKTDTLDARVLAQFGQAIQPEVRPLKDAQHQALAALLTRRRQLVTMLTAEKNRLGAAPKSPVRKDIKAHITWLEKRLKAVNNDLDKHIKRSPMWRAKNDILQSTPGVGPVLSVTLLADLPELGHLNRRQIAALVGVAPLNRDSGTFRGKRSVWGGRASIRTALYMATLSATRFNPVIKTFYQRLLGAGKTHKVAMTACMRKLLTILNVMVKNDTPWHHKTATTT

SEQ ID NO: 219777 - protein, 344 aa, unidentified
MVYVGLDVHKEFCQAAVIDDSGRVLSNERFSSTRDELNEFLDRFEDAKFVLESTGIWEFIYEGIERRGFDVELAHPLKVRAIAEAKVKTDKVDAETLAQLLRANLIPRSWVPSRNVRDLRQLVRQRAYLVQQSTSLKNRIHAGLLRRGVRRPEKLKEPFSFKSIDWMRSLGIPTVDSCLNCLENVQAQIEDINTQLLDEYNRRPDAQLISTIPGIGFYSALLILAEIDDIRRFPHPENLCAYAGLVPTVRQSASSVHYGAISKDGSSYLRWMLTEAVHTHTRCEPDSRLSRFHAKVARRRGKQKAIVATARKLLLIIYWMLRTKEPYHCQGFNPVFPPARTSAT

SEQ ID NO: 219778 - protein, 402 aa, unidentified
MNAVGIDVSKGKSMVAIMRPFGEIVSAPFEIKHTASDINSLVELINSVEGESRIVMEHTGRYYEVLAHQLSEANLFVSAINPKLIKDFDNDSLRKVKSDKADAVKIARYALDKWQNLKQYSVMDELRNQLKTMNRQFGFYMKHKTAMKNNLIGILDQTYPDVNTYFDSPARSDGSQKWVDFASTYWHVDCVRKMSINAFIDHYENWCKRKKYNFSKSKAEEIYGKAKELVPVLPKDDITKLIIKQAVDQLNSASITVESLRTLMNETASKLPEYPVVMAMKGVGTSLGPQLMAEIGDVSRFTHKGAITAFAGVDPGVNESGSYEQKSVPTSKRGSSDLRKTLFQVMDVLIKTHPQDDPVYQFLDKKRAQKKPYYVYMTAGANKFLRIYYGRVKEYLASLPES

SEQ ID NO: 219779 - protein, 397 aa, unidentified
MARSHYETSEGCAGLADAEPHSQGTTMQEISKVFVGLDISKLKISVALAEEGRQGEVRFLGDIDNTPDAMKRLVRKLSGKYLQLLFCYEAGPTGYGLHRQITALGHDCSVIAPSLIPKRSGEHVKTNRRDSLTLARLHRAGELTTIWVPDLGHEAIRDLVRAREAAMEDLREKRQQLQSFLLRHGRLYPGLRSWTLVHARWLSSLIFEHPAQYLVLREYRQAIEDAEARLKRLTQQVADVVSTWSMAPVVEAYQAMRGVAFLTAVTFVAEIGDVRRFETPRQLMAYLGLVPSERSTGEQVRRGSITKAGNPRARRVLIEGAWTYRYPARLSRPLQVRQESLPDVVRAIAWKAQVRLCARYRRLMAAGKRQTLITTAIAREMAAFLWAIGHEVQPCSA

SEQ ID NO: 219780 - protein, 349 aa, unidentified
MNEYAGIDVSLEACAVCVVDEEGRVVKEAKVASEPEALVAFFLRLRTPPKRIGLEAGPLSQWLYRGLGAAGLNAVLMETRQVKDAFKSRPVKTDRKDARGLAQLVRMGWLKAVHCKSPEAQERRALLSARALLRTKRHDVEMSLRGLLRGFGLKVGKTTPKTFPGRVRELAAQQDKGGNAALSIATEALLAAREALEKEFAALDKRLRGQARADARVRLLMTAPGVGALVALGYVSAIDDPSRLISSRNAGAYFGLTPRRYQSGETDRTGRISKCGDHETRALLYEAAHVILTRPVKGGALKSWGLRLVRRIGLKKATVAVARKLAVILHRMLADGTEFDMTKGAAAAA

SEQ ID NO: 219781 - protein, 335 aa, unidentified
MQIYGIDLAKEKFDVSFFDLTSKKVSNHPSHKVVKNNFKSIGRFLETLPSDAVLVAEHTGVYGDTLLKCCMDSNVKIAFVGGYVIHRYRATPDRAKTDVLDCALLRDFGERYPDKLKYKTFPEEALYELRQLARHREMLVEQRKQLITADKSEDCRPIRSLAVKRSMDRIKEMLDTEIAETEKEMLKVINGHESIHHNYELVKSVDGVGLITAVELLVKTENFTKITTARQYAAYAGTAPYEKSSGKMDKGTHISKIGNRRSKTLLYICAESARLHNKEIKLYYERRTLIDKKPRHYVLNAIANKLLRIIFTLVEKGEYYDANFIRQDPRVVKYN

SEQ ID NO: 219782 - protein, 337 aa, unidentified
MGMDQHRAQISAEWIETVTGEISRARVAPADRAGVRKFLTRFEGQGLEVALEATTGWRFVVEELQRAGAEVHLAESAEASALKGRKQRAKTDWADARHLRELLLIGRLPESWIAPAHLLDLRARVRCRHTLVEQRTEWQRRMHSVLYHHGCPNTRKLLTRANREWIAGLELPTAAREQLTIALEMIDAIDLQAGPLDVSLRAYARKQPGCRTLIDQIYGIGELTSVTILAELGDTRRFQNSRDAVRYSGLDITVHQSDTRRSPGHLSRQGPSALRWALYEAAQAARRPSSPDRQYYLNTAERIGGNRACIAIARKLLKRSYHLLRGLGETALDPVAP

SEQ ID NO: 219783 - protein, 386 aa, unidentified
MHHPTTLPVSEQTCSREACATLFVSLELSRSTWVATSLALGSRKMSKHTLVGGDARKLLDLLARLKSRAEQRIAAPVKVVAIQEAGLDGFWIHRLLEANGVESHVVDPASIAVPRRHRRAKTDAIDGETLLRTLMAWQRGEPRVCAMTVPPTPSEEDRRRVSRERATLLRERIRHTNRIRGLLFGQGITNYNPLHKNRRKGLEELQTGDGHPVPVQLKAEILREIDRLELVLRQINEVEAERDEMLRPGQARSPVALLMRLKGIGPEFAAVLYLEGLFRHFENRRQLAAYAGLAPSPWKSGSVDHEQGISKAGNPRLRTTMIELAWMWVRYQPASALSCWFRQRVGSERGRIRRISIVALARKLLIALSRYINHGEIPAGAVVKPV

SEQ ID NO: 219784 - protein, 312 aa, unidentified
METKYVGIDVSKLALDFDCLPASAAQQFANDAAGIMGLVALLQDSGVERIVVEATGGYETAVVSALAVAKLPVVVVNPKQVRDFAKAMSHFAKTDKLDAKVLALFGERMRPPLRTLANEAQRALADLLNRRLQLVTMRAQEKARLAMVPAVARKDIEEHITWLDKRIAKLETTLSDRLKKSPVWCHKAELLDSVPGVGNITTFSLLADLPELGTLNRQAISALVGLAPFPDDSGTRQGQRYVRGGRAEVRCVLYMATLSAKKYNPPIKAMFDRLTQAGKPFKLAMTACMRKLLTILNAMLKKNEAWKIQPAT

SEQ ID NO: 219785 - protein, 324 aa, unidentified
MATQKNEVSFEEVVARGCGLDVHKKEIVATVSGTDIKKETRTFQSTTRSLTQLKEWLLELGVTHVAMESTGVYWKPVMNILEPGGFAIMVVNARHIKYVPGHKTDKKDSAWICKLLRAGLLKGSFVPSREQRDLRDLTRYRRKLVQQQAAEHNRLIRIFEDANLKLSSVFSNIRGKTCTAVIDAVIAGETDPQKLSELCIHPRLKHSQEEIALAVEGHFTEHHKFMIRAIRKSIKNIESEIDVLDKEIDRRMQPLQGRIEQLCEVPGMQQTSVKELLAEIGVDMEVFPSAGHLLSWAGLAPGNNESAGKKKVHTPTTETRPRRQ

SEQ ID NO: 219786 - protein, 332 aa, unidentified
MGPEYFIGIDISKVTLDICIVNVKGDQIAAYKTANTESSIADILGVLATNHKATPQNICFCAEDMGLFGSFLSKVLAAGKYKICFESPLRIKKSIGIQRGKNDAIDALRIARYACANFNSLRFRTVPRKCIVDLKELSTVRKRLLKTRKLLSQSKKTEDYYLQGETSLTGSSLYSNTLVAIKNDLQAIEKRILSLIESDVKLARLVKIITSVPRIGTVTAVQILIATNEFEWISCPKKFASYCGVAPFQLKSGTSLNARARVSRLANRDLKSLIHMAAIGYAKKGRSDFLAKYYRRKIQEGKRPMTVVNAIRNKLVHRIFSCIKADSLFVDI

SEQ ID NO: 219787 - protein, 340 aa, unidentified
MRELYVGIDLHSNNSVIGIIDETDKQHYYKRLPNSPDVILAELEPFKQKIVGIVVESTFNWYWLVDLLMDNAYKLHLANPAAIQQYKGLKHTDDKHDAFWLAHLLRLGILPEGYIYPKEERPIRDLLRKRMHLVQLRNSVINSLQAILYRNCGSKLSGGKIKAKNENHVLASLPEQEDLQLCGAVSKDTIDYLTDQIIRIEKLVQEKIALKTRFKNLQTMPGVGKILALTIMLEAGNIDRFAKVGNFTSYCRKVPTNRISNNKSKGKGNKKNGNKYLSWAFAEAAELGRRFDPQVRAFYNRKAARTNRMVAHSTLAHKMCRAAFFIMRDNVTFDHNKLFA

SEQ ID NO: 219788 - protein, 454 aa, unidentified
MALSFINDDGEQAMAARKQEVAVFPNAAGIDVGATSHWVAVPPHLADGPVREFGPMTTDLNALADWLLACGVDTVALESTGVYWIPVYEVLEQRGLKVWLVDARQLKYVPGRKSDIQDCQWLQKLMSLGLLRAAWRPDGEVCVVRAVARQREVLLTEQASWVQRMQKALVQMNLQLTEVLTDVMGVTGQAIIRAIVAGERDAVVLAQHRNRRVKASKDEVIKALSGNWREEHLFVLGQSLAMYDDIARHLAGCDAKLQALLAERSRGGVELGKPPRAGSRTRAVFDLRQTLADWAGVDLTRINGLDVTSVMKILSELGPDLSRFANVKHFCSWLGLCPATKISGGKVMSASTKHSANRVRQALKVAAMNLSRSQSALGAFYRRLCTRMDKPRANTAAAHKLARLVYFMLTRGEAFVDQGQQRYEEQQRERSVAALKRRAAALGFQVAPATPTAA

SEQ ID NO: 219789 - protein, 391 aa, unidentified
MVCVGIDVAKDKHDCCILDSDGMVRADCFTIPNNMDGFKQLLQTIRNCTKKSDKIKVGLEATGHYSYNILGFLLDNGLPTYVINPLHTNLYRKSLSLRKTKTDRVDARTIATMLLSDVDLKSYTDTAYHNEELKSLTRYRFDKVRERAKLKQSVSRLVTILFPELEKLVTSLHIASVYALLSEYPGAKQISEIHLTKLTNLLATASKGRYEKEKAIQIREAARTSIGSVMSAKSLELKHTIKLIKELTSEIDEIEDSIQQIMDELHPPILSIPGMGVHSAAMILAEIGDFSNFDSPDKVLAYAGCSPSTYQSGKLTNCYAHMEKRGSRYLRYALYNATKYVCHWNPVFAEYLAKKRSEGKHYNVALSHAMKKLVRLIYALQKSGKAYLTAA

SEQ ID NO: 219790 - protein, 420 aa, unidentified
MYVAIQRKGGSRMDVFHERCAGLDVHKEVIYVCALIGRGSGYQKFKFKIGTFHHQLVEMRQKLLELGVTHVLMESTGVYWMPVYDALEGFVEIVVGNAQHIMNVPGRKTDESDAEWLAKLLRCGLVKPSFVPAKEFRELRQVTRYRRAVVQARASEQNRVEKHLQIAGVKLSSVASRVFGVSGTDMLNHIAQGTTEPEELAGLARGRLRKKMPLLMNAFAGSISEHTQNLIALQMEQMNRLECTIAEAELKIEEKVKPYAEVLARLDTVPGINLCSATDILAEIGTDMSAWKTHRQIAAMAGLCPGNYISAGKRLKNRSRQGNPYLKSILVQAACSAVNMNGSYYQAKYKRLKQRRGHKRAIVAIAHAMLVAIYHMLKKGESYQELGEKFVSDQDNGRRKDDLVKQLQKLGYAVSLTQSA

SEQ ID NO: 219791 - protein, 411 aa, unidentified
MKHPKMRYTYVGIDSHKETHTAVFIDCFFEKLGEIVFDNLPSKYEDFLNDADKMRQDDTELLFGLEDTGSFGRTLTIFLTDKLRKVRHVNSVLVARERKNQNITQKTDSIDAECAARVLLSKFGELPSADPNDKYWILRTLVVRRDQTVTSNVRCKMILHDLLTQHYPNYRKFFVYTFLKTPLAFFKKYPSPKNLKNVTKEELTEFFYIESNGVFGMDKAWERAEYILDSLEDTAVEHQEIRDEAVRSVIRQIEFNIAELERMEVSMTVYLDSFGCTLTSMTGIDVVSACQIMSCIGDVRRFPTPAKLARYSGIAPVTYASGKKDLQFANQRGKRELNSLFYMLAVRLTSPTGPNNKILNQFFYDYFHRKMAEGKTKRQAFKCVERRLVNIIWTMLTNNEEYVNPPVMDKP

SEQ ID NO: 219792 - protein, 403 aa, unidentified
MNNVAGIDVSKGKSMVSVLRPFGEVVAKPFSIGHTGSELKELADYLKSLDGETRVVMEHTGRYYEPVARFLHDEGVFVSAVNPKLIKDYGNNTLRKVKTDKADSRKIARYGIDNWAELRQHTPMDTIRMQLKTLNRQQSLYTKTKTMMKNNLIALLDQTYPGVNALFDSPVREDGSQKWVDFATTFWHVDCVRNMSLTAFAERYRKWCKRHGYNFSQSKAVEVHTGAQDLIAMLPKDALTKTMVRQAIDALNAVSASLERLKAEMQALAAQLPEYPVVMAMHGVGDSLGPQLMAELGDVTRFTHRNAITAFAGVDPGADQSGTHEAKSTRVSKSGPPELRRALFLVMDCLLKTQPQDDPVYRFMDKKRAEGKPYLVYMTAGANKFLRIYYGRVKEYLASLEGN

SEQ ID NO: 219793 - protein, 409 aa, unidentified
MPTTLLVGIDVSSCENKVRFLDSSGTSLSKFTIPNNLPGASKLSQSIANIMNSHKLESLVIGLEATSVYGEPLIHFLKQDAGVMSFNPHIHILNAKQVSAFKKSYPDLPKTDDVDAFIIADHLRFGRINKEVYMDEKTVALKKLTRARYYCANNLTREKNHFLNHLFLKFSALTQEKVFSDKFGATSMAIIEEFFSVDEIAYTSIEELAEFIDNKSRGKFECPEDIAKMVQKAARSSYRLPKTVADSVNQVLAISYNTIKTLKDQLKLFDNAIEEIMKTIPHTLTSVKGIGPVYAAGIIAEIGDINRFKNQAALAKYAGICWTKYQSGKYTADNTHMILSGNRYLKYYFMEAANLVRMHEPEYKRFYDLKYRETPKTPHKRALALTARKLVRLVDALLRSNRLYIPPKV

SEQ ID NO: 219794 - protein, 389 aa, unidentified
MPCYTKQHKSYCGIDLHARSMYVCVLNQDGDIVMHRNMQARPDTFLRTVAPYRDDLVVAVECVFTWYGLADLCAQEGMPFVLGHALSMKAIHGGKAKNDTIDAHKIAVLLRGGMLPQAYVYPAEMRATRDLLRRRMSLSRTRAELLAHIQNTNSQYNVPEIGKKLASKANRAGVAERFPDPAVQKSLEVDLALIGSDDHLRSDVELPSVTAAKQHDAQTLYLLQTVPGIGTILRLVLLYELHDIQRFPRVQDFVSSCRLVKWAKASAGKRDGTSGSKIGNAYLQWAFSEAAVLLLRDHPAGQTYLARLEKKHGTGTALTMLAQKLGRAVSSMLRRDTGCDRDNFLHGEGSGAGEPAASLGHYGTSRVTVLCNDASTASTNAQEHIGALS

SEQ ID NO: 219795 - protein, 346 aa, unidentified
MRLGACFARAHCPKLEPLLEHGDLPVTGARILTSMSQNISILHIGLDVAKLSLQLHLAGRFHALANDPKGHRQLLKLLRPYPGAHVICEATGGYEQPVVQALQAADIPVSIVEAARVRYFARAQGQRAKTDPIDAAVLTDYGTAFKPAPTSGLSTQQQQLAAVAQRRRQLIHTRTMETNRADHYTDPLCVRQHRQFLKLLEKQIDQCDQAITTLIATDADLAQKARRLEAIAGVGPVVAATVLAEMPELGKLNPQTAAALAGVAPYNRDSGELKGVRHISGGRRTVRCALYMATLSAVRHDRILKAFYTRLRAAGKKPLVAMTACMRKLVVLMNHLLKNENFQLAS

SEQ ID NO: 219796 - protein, 371 aa, unidentified
MKKDSTTKFIGLDVHSKTISVAIADEGREGEVRHYGTIENTFEAIDKVIKKLTATGVELKFIYEAGPCGFALYRYLTGNGFTCIVISPAMIPRRKNVRIKNDRRDAMTLARLYRAGELTGIYVPEPEDEAIRDLARTRDDARVAERKAKQRLNSFLLRHNLIYPGKTKWNRTYFNWLGSVGMKYPAQKIALQEYIGTVNECTGRVARLSEQIGLAVEEWRMAPMVKALQALRGVSLICATVTVAELGDLSRFQNPKELMAYLGLVPSEHSSGETIRRGGITKTGNGHARRVLVEGAWTYKHHARVTPPLIKRQRDLPKSICDISWKAQLRLCARYRKMVARKKPNNVVVIAIARELAAFMWAIAQEVRAAA

SEQ ID NO: 219797 - protein, 480 aa, unidentified
MPYRIAGIDVHKKMLAVAVADVEVEAEWRFERRQFGTSPSQLRALAEWLAEWEVEEVVMESTAQYWRPVWETLERQWQPTRRTRTQAGPTAGALHLAQAQSNHGPRGRKKDFPDAERLVKRLVAQELTLSFVPDVTQRLWRTVTRRKYQLTCNRVQLRNRLECLLEEAHIKVSSLVSDLLGLSGRRMLRAVASGETDPATVAALGSPRLHATPDQLRDALGACIDLDPVYRRLLAMTLDELEVIDAHSRQLDEELARLLRIHQDAVERLAAMPGLGVDSAQQIIAEVGPTARTFATGKRLASWVGACPGHDESAGVNHSHRSPNGNRQMRRLLNQAANAAVKTKGSIFELMYRRLVVRLGHAQAIGAVAHRLCRLVWKILHDGVAYEERGPAVTKQRAHRRAAKMIRELRNLGYRVEPVCEGARFLLAPEPGPTRVPAESLALPAAEWLAALFAVACHCRRFGFCCAIASVPWHHYPCGL

SEQ ID NO: 219798 - protein, 432 aa, unidentified
MTQKNLTRIAQLRQMKSEIRGSNDYMIVGIDIAKESHLAFFGTPNGKRLSKRLSFKNDEKGFSKLLLQVETIRIKNGIEKVLYGLEPTANYHKPLAEYLILKGNSTVLVDNWAAKNNRSLLDGRWDKNDAKDSANVADLLSQGKCLYYDYPSDSINKLRGLLSLRRKLKKQEHSFFMRIRNHLVTQFFPEMDKFFNKLPEECCSIVKHCLDPKKIDSMDFSLFFDRVTTRRKSLSQVNYLKKIYDLAGQSIGCKVTEASELEGSLLVESLRHIQGSTKKVEKEMETLCKQIPEYYFVLSIPGFGPIISAMVLGAIGDPNRFKSGKAVLKLAGLDLSASRSGKYSMYANASISKKGKAELRYGLYHAANIASSRVKDFIIYFNLKVDPRKKEKGIKTKMRVKLSGKMLIIAWTLMKKKVKFDSNFLVLEKDSI

SEQ ID NO: 219799 - protein, 339 aa, unidentified
MGIVCGCDIHRTQVTFDWVDVVSGETRRGRLAPSTRAGFRDWLIQFAGREMDLVVEGCTGWRFIAEECQAAGVRVHVADPAEAAYRVRGHKGRAKTDKLDARGLRELFEQGRVPESWVPPPQVLEIRTKIRLYHDVMADRAAWLQRIHATLFHLGANQEKELLRGDRTRLHVSAALSPAAVAAIESMLRVIDALDGEISRLRAELVAFGRRQPGCLALQREYGIGKLLSVIVWCELGDTRRFRSSAAAVRHTGLDITVLSSNGKRMRPHLARQGPALLRWALFEAGRCASRPTSPDHDYYTRIADRLGKKRAALSVGRKLARRCHHRLRALGDDALVEV

SEQ ID NO: 219800 - protein, 346 aa, unidentified
MDEVLYAGVDAHRTATHITIMDENGKVLARKRVPSSSDELHKLFANYQEPIKAVVEATYNWGPVYDWLDEIVDEVVLAHPTKVRAIADARIKTDTIDSQTLAHLLRADLIPTAYAPSKETRAIKRVLRQRMFFVRVQTMVKNRIHALLTQHAIALPDVTDLYGKAGLAWLHQLSLPDPDGQLLRDDLSLLATLRERIIGTDRLIAQLAEGDEIVIWLASLPGIGPFFAMLLRYEVDDMTRFRSAKKFAHYTGLIPSTYASNTRVYHGPLTKQGNRWLRWAFIEAVGPALRASSSLRQYYDRIKARRGAHDARVCTARKLAELAWIVWTERRCYEDRPAPFSAKATS

SEQ ID NO: 219801 - protein, 425 aa, unidentified
MVSHRYGGYAPQHIKNQRGDTTKRIFIGIDVSKDKFDVGVKDEQNRTVLMGKTYPMNRIGLDQFKEEMDKVISELKAIPVYGLEASGIYHLPLYEYLRGFDVDLHLLNPLEIKKKDQRKVRKTKTDKLDAVFIAEALMLRHLEHHQYRPSGKVAELREYCRIRNRLMEKSKVCKIQARRDLDILCRGYDKIFTDLFSQSSLAVIKKAIRKTRLFDVSKEDLITCLSSSKQDREWCEKKAEEILDVFKNSVISKDECNAYVTELHLTLQQYEVIKDQIARVEKTIERFVTANHSNIRTIPGIGPVTAGIIISEIGDIHRFKRPEQIVAFAGLDPSVYESGRSKRIGHISKRGPPILRSALYQAAFIGARSNPVLAEYYSRLKGKGKHHNVCVIAVARKLLLIIYSVWKNNKEFYVPERIDKSSISS

SEQ ID NO: 219802 - protein, 387 aa, unidentified
MQQKLNDLSRSLTPLDPDGTLITVIEMSQSSWLVAGIVPGVERQPLKKLAVDESSLLNLLNRWRVEAEKAGRKIERIAVAFEAGRDGFWLARWLRAGGIEAYVIHASSVAVSREHRRAKTDRLDTELLKRAFIGWLRGERDHCKMVAIPTTKDEDAKRPNRERESLIGEQTRIVNRMKAALIRLGIRGFNPKLKKAAGRLEDLRTPDGEPIPPNTLAELRRDMERRRLISDQIRQIEDARLERIEQAPGDGPHAMVRLLARVIGVGIETADMLVQEVLARNMRDRRAVARYAGLTGSPDESGTKRREKGLARSGNARVRRGMIQLAWRFLMFQKESALAQWFRARTETARGTRKTMIVALARKLLIALWRLVREGVVPDGVVLRPAQ

SEQ ID NO: 219803 - protein, 353 aa, unidentified
MEYYVGCDSHRRYSVFLVMDEKGQATKPVRVEHDRRKLREFLQSLPPRSKVAIESSGGWYWLVDEIEAAGLRPQLAHAYDAKQRMAGRNKTDKFDARGLALELLTGTLPVIWIPPAHVRDLRAVMRTRLALRAQSTQVKNRVSAAINRYGLKEPNEDRDLFAERWRSSLNRYIQSLPSATQQATKQELALLDEINNHVAELEKQIDKQVGPLKEMRPLRTVPGIGRILAATILLEVGNVDRFPSAAHMASYAGLVPVVHSSGGKTWQGRVPKNANLCLKWAFVEAANCIVAHQHRFNGTHVLELYQRLKAAKGHGKAAVAVARHLAEASWWVLSKQQPYSEPKRARISSSTHG

SEQ ID NO: 219804 - protein, 337 aa, unidentified
MSVYVGIDVHRKRSQVAVVTEDGTVQLNKNTVNGTEPLLRLIGDLPPGTPVAFEAAFGWGWLVQLLEDYGFDPHLVHPLRCKAIASARLKNDKVDAAILAQLLRADLLPEAWIAPAEVRQLRALLRHRASLVRLGTQQRNRIHAVAADHGYDRSASYWTGPGRGWLAELDLPAASREIVTDCLAVIDGLAPVIDRIDAQLRLHAKADPRVKVLTTLPGVGQFTALVMVAEIGDITRFGSARKLASWAGLTPTVRGSDLTVRHGHISKQGSAWLRWVLNQAAQTAKRSPEFAASYAAIAKRRGKKIATIAIARKLLTRAYHLLADMQATDASTPLQRP

SEQ ID NO: 219805 - protein, 357 aa, unidentified
MGKLIGNSGVVTRVGLDLGKNAFQVHAVDAKGEIVIARKLARGRLVAFFAKLPPCLVAMEACGSAHHWGRQIAALGHEVRLIPPAHVKPYVRRNKSDAADAAAICEAARRPGQRFVPLRSIDNQAALMRHRARELLVGQRTALLNALRGHMAEIGLVAPQGAQHAYELKRLAADGFDENGEIVVPDCVRGALSRLVDQIDALDEAILAIDQELAASVKADATAKRLTTVPGVGPVTASAIVATIQDMSAFASGRDFAAFLGLTPRQSSTGGKPRLGRITKMGDRYLRKLLVGGACAVLGRRRGHKDALRVWASALLDRKTVKYKFKLTAVALANKLARVVYVLMTRGGEYDGRPLAA

SEQ ID NO: 219806 - protein, 361 aa, unidentified
MIVGRTHVGLDVHAHAVVGAAVDAETGELFRRRMGSDPAEVLAWLRSLPGPVAAAYEAGPTGFTLARALEAAGVRCLVLAPSKLQRPVGERVKTDARDALHIARLLRLDEVVPVMIPSESQEAARDLVRAREDARRDLMSARHRLGKLLLRRGLVYPGKGAWARAHHQWLRQQKFDQSALQTAFDSAFEVVIQVLDRRDRLDEAILLMAADSEFTPVVNRLACLRGVSTLTAFGLAVEIGDWSRLDGRRIGSYLGLVPTEHSSGQSRSQGGLTRTGNSHARRLLIEAAWHHRPAYQPTSPTMRGRWELASLAARERGHQGNLRLHRRWKKFQERGKRNVIANAAIARELAGWCWSLAVMKD

SEQ ID NO: 219807 - protein, 317 aa, unidentified
MAEVTFPQLIQRACGIDVHLKVVVATIDGAGIQRETRSFKTFTSSLNELKEWLLSNGVTHVGMESTGVYWKPVYKVLEDSIPNVWIVNARHIKNVPGHKTDKMDSEWICKLLLAGLLKPSYIPPKEQRQLRDLTRYRNKLIQQIASEKNRMMRILEDCNIKLSSVVSNTSGTTATSLIDMLCEGKVLTLDDINSVYHGKLSASPEELLEACTGFVEEHHIYLLQMIRKDIDQTQTLVDDLSERIKRLLSKYENLLELLREIPGFSPKVVEDLVSEIGLDMSHFPSEKHLSSWAGLSPGNNESAGKKKAHESLTETNR

SEQ ID NO: 219808 - protein, 394 aa, unidentified
MILAGIDIGKDSHFFSLVRKEDGEVLAQPRKFANTSEGFKTLTDSFIPYDKESILIGMEDTGHYHFVLLKYLLDRKFNVALINPTATDFTRKANGSISKNDRLDTLTICDVLSSNKPKKPYRISKYSSFDLYEQRGLTRHHHNLKEEINVYTNRLQKCIDIVFPEYNSLFPSKYGRVYISVLKTYGSAANIAKADIRSLRKCFEYKGKGKRISLTAEKLKEAAKASIGIDSACEVIQIRHLIEQIELLNKQIKEIDKKIEEYSLANDSPILSIPGISHFSGTSILAELGDINNYNKAAQIIKRAGVAPLVYESSKYQAKHTAITKSGSKYLRKTLYQIILPVIRYNPVFQKYYDLKISQGKSHRCACGHCVRKLLRIIFHLLKTNQKFDPALLR

SEQ ID NO: 219809 - protein, 388 aa, unidentified
MFYLGIDIGKFSSVATLIDEKGTIVDKSLKFPNSTDGANRLLELIDSYVFDSSNLIIAMESTGHYWLSVFSFLSEKDFNICIINPIQIKSFRKSFTIRKVKNDFVDSILIANYLRIFGSNNFSLPNENLIALKQLCRHRHFLVGNISDLKRKAIAVLDRVFPEYQKIFADTFGTTSLELLSNCPTPEDIVNIDTQKLYDILSKVSRGRINYDKVSDIQNIAKNSFGIKFALPSFTFELKQLIAQIQFMESQLKDLENEINSLYETFNCYLTTIPGISNTLAAIILSEIGDINRFSSPTKLVAFAGIDPSINQSGEFTGSENLMSKRGSPFLRRALFLAAFSAENSNTTLNDYYQKKIKEGKHHYVATRCRCSKTFICYLWCFERTPTF

SEQ ID NO: 219810 - protein, 283 aa, unidentified
MYIGIDVSKDSFVAAYPAKSGYTTQTFKNDTKGVRQFIKSLPEESHCVMEATGNYSMLLLYLLQQAGFPVSMENPQKIKHFSRAMMSVTKTDEIDAKLIAMYGEKMNPAPYKIPSESILLLKQKRTVLRQLKKHLAATLNLQQSLAVLPKQDPTSKTAVEQTIKFLRKQISKMEEEITNLSNKEFKRQMDLLTSIKGIGNTLASALIVATGGFTYFTSAKQISRFLGLCPTYQQSGTSVNIKGHINRNGDTHLRGQLYVAAMASLRCNTTCKEMYDRLRAVLS

SEQ ID NO: 219811 - protein, 355 aa, unidentified
MTSTQYIGMDVHKESISIAVRNTVGKVVMECVIETKASTILQFIDGLRGDVQVTFEEGTWAAWLHDLLKPHVTKLVVCDPRRNALLQEGNQNDRVDARKLAELLHNNQLRSVYHGDHGLRTLKELVRSYLTITQDLSRVMTRVKAIYRSWAIPCSGKQVYAPHHRAEWLAKINEPGVRRRAEFYYQQLDALRGLRQEVRRDLLAESKKHQAWKRLCGIPSIGPIRAAVLLGILQTPHRFRTKRQLWTYGGVGIQTSSSADHRVVKGQLERKKKQVEIRGLNRNYNHDLKNIFKGAAIVAASKPGPFAEFYAELLTKGLRPEMARLTLARKIATIVLIVWKRGVCFDAQHLKPQTA

SEQ ID NO: 219812 - protein, 332 aa, unidentified
MMDLQGTIIDEFTFTNNYDGIASLASRLTMDDRVVMESTGSVWTNLYNHLDDAHIPVVLANPLKTKAIASARIKSDEIDARILAHLLRTDLIPESYVPTKEIREVRALIRHRTSIVKIRTMVKNKVHAIVDRNGVEHDELFSDLFGKAGMQWLRTIQLPSLDRLMLDNHLDHLESLKRQIHAVDQEILAKASRDEDVRLLLSMTGVDIFTALLVRSEIGNISRFPEYKKLISWAGLAPSLHQSGSIEYHGSITKQGSKMLRWVMVEAARVAVNHDEKMRAFYARVKYRRGDQKAIVATASKMLKIIWFMLARREPYLSRNQRRYEEKLNTIE

SEQ ID NO: 219813 - protein, 427 aa, unidentified
MATSFANQDTQNQYAAFVAIDWADEKHAFSLQVAGQSKKETGTLEQKPEVIGPWINKLRERFGGRQVAVAVEQSRGALIHALLSYDFIVIYPLHPVTVAKFREAFKSSGAKSDPLDTEQILQILTKHLELLRPLNPDTQETRLLARLVEDRRKTVDLRTSQIEALGACLKEYYPQAIEVLSGNLSTRLAVDFLKKWPSFEAFQQTKESTLKRFFYGHNVRSPEAIKKVLTAAKSATALTTDPAIVESGSRLAQMYAQLIQTLNQFIQNYEERIAKLFRAHPEAHLFDQLPGAGPAMAPRLLAFFGTDRARYETANNVHSFTGVGPVTRSSGSTKSVYMRRACPKFDRQTFHEFARLSVVKCQWAANYVEYYTTKGKKYHSIIRALAFKWIRILYRCWQNRTPYNDNQYMATLAKRGSIFATLHVKKS

SEQ ID NO: 219814 - protein, 326 aa, unidentified
MERRLLQRQLVFARMSQNTPIYYVGLDVAKLSLELHLHSRFYPLANTRAGGVKLLKLLRAVPGAHVICEATGGYERAIVALLQAAQIPVTVLNPARVRHFARAKGLLAKTDRLDAAVLTAYGQAFTPKATPPISPAQRELADLIARRLQLVQLLSIEKNRFHQMAGAKVRRLAAQLHRQLEKQIEKIEALIAGLLLEEKVLQQKAERLAQISGVGSTTAVAMVAQLPELGELNRREVAALSGLAPLNRDSGQWRGQRFIGGGRTVVRRLLYMAAVSASRCNPILKTFYQRLRAAGKPAKVALTAVMRKLVILMNHSLKYPHFPLAN

SEQ ID NO: 219815 - protein, 388 aa, unidentified
MLLDHPSDGLTAIRTHIGAIFVSLELSRSNWLVTSLSPGKGEKMSKHSIAAGNVAELLTLFAELKCKTEFRTGQSYPIITIQEAGLDGFWLHRVLQQNGIESHVVDPASIATPRRRRRAKTDRLDGEALLRALLAYKRGEPRVCAMVVAPSPEEEDRRRICRERQSLIAERITHVNRIKGLLFAQGISGYEPLRRDRRARLEALRTGDGRQLPVHLKTQIGRELDRTELLLEQIKSVEVERDALLAAGRPADKKAAPDPVAMLLALKGLGANFAAVLWSEAFYRQFSNRRQIAAYAGLAATPWQSGGIRHEQGVSKAGNPRLRTTMIQLAWLWIRHQPQSALTRWFKERSPQGRKRVIVALARKLLVALWKYVTQGVVIEGAVMKPAA

SEQ ID NO: 219816 - protein, 355 aa, unidentified
MRDIIRIGMDTSKSVFQLHGVDAAEAVVLRKKLSRKAMIDFFEGLAPTEIGLEACGGSHHWARLLGSFGHTVKLLPPQHVKAYVKRSKNDARDAEALCEAMSRPTMRVVPVKSVDAQAGLMLLKVRARLVADRTQTAHAIRGHAAEFGLTAPKGLAHIRPLVARIMEDAGVPELARTLFGELLERFDDQDRRIRHKDAQLAAWHRSDAASRRLTRIPGIGEVGAVMLSLKTPDPQGFRSGRQFAAWLGLTPKDHSTAGKQRFGAITRAGDEALRAVLVSGAMAVIQQKSRGKGRPWPWLEALLAHKSTKLAAVALANKIARIAWKLMVSGEPFDPERALRACPVGDDTGTLSPAH

SEQ ID NO: 219817 - protein, 347 aa, unidentified
MKDVSTIGLDLAKHVFQVHGANAEGSPVFNRKLRRGEVLHFFEKLPPCLVGMEACGTAHYWAREIAALGHEVRLIPPAYVKPFVKRGKTDAADAEAIGEAVTRKTMRFVPVKTARQQAATMVLKTRALLVRQRTQAVNALRAHLAELGIIAAVGMAKVAALVAIVRDDTDARLPPAARFALMAVVDQIDALAGQIDRLERSIVTEAKRDEDMRRLTTIPGVGAITAATIKSLVPDPGGFKSGRHFAAWLGLAPRPHSSGGKERLGRISKMGNPELRTLLVIGATSVLRIARNDARARPWLTALLARRPFKVVAVALANKMARIIWALLNRGGIYRCPETLAITAVAV

SEQ ID NO: 219818 - protein, 322 aa, unidentified
MDKNTKFIGIDISKDTFDIWSEDLGHLKFQNKLPGFKRFIKSIPDDAWCVMEYSGSYYQQFAVFLFNKGINVSVINPLVIKRFIQMKLQHNKTDKSDAKMIALYAQNQSIMKWEPKPEYLQECKALHSTISLYLKQSTALKNMLHSFKSKNQKGKVVMSLKRQIKQIQKEIILLENHIEKIIKENEPKLLTNLTSISGIGKKTALLLISSTNAFSAFENHKQLSAYFGLAPAERTSGTSIKGRSRITKRGNPIVRNHLFMCSFTACEHNVQCKALYKRIVDKGKSKKLALIAVCNKLLKQAFAVAKSGIPYDPYYKSSFITQ

SEQ ID NO: 219819 - protein, 407 aa, unidentified
MNDSGKRYIGLDVHKHYLIALGVDEELHVVLPARRVELSNLESWMKKILTRQDEVVLEMTTNTWQLYDELVEYAGSVTVVHAPHVALITRSQVMNDKIASSILARLLAKGLLVGIWVPPQEVRELRGLVAQRQKMTRLATQAKNRLHAVIQRHHLKVPEGNPFGKSNNDWWQALQLGKLEKMNLQSDLETLQFAEKQEGRLQEEMTGIAAENEEIGRLLHIPGFGVITAVTIYAAIGDIKRFAEAKKLVGYAGLGARVHDSGLTTRTGKITKAGRRDLRVALVEAAHIAANTHPHWKAELARLQPRLGYNKAIVAIARKLLVTVWYVLAHKVADRYAEPEKVSKKMLHFAYEVGKINRAGKSAAQFTRERMDILGLGSELTSIPWGTKKPIPLPPSKLKKESDVPNR

SEQ ID NO: 219820 - protein, 410 aa, unidentified
MEPILKSCAGMDVHEKKVDVCIAHGPFDKPPKFEIRTFSTMTSDLEEITTWLKKYEVTTIGMESTGIYWKPIFNVMEGEFEIVLANAQRLKAIPRKKTDIIDCKRIANLLRYGLVPNSFIPPKEIRELRDLNRTRRKLVGMMTSEKNRLVKVLESANIKLSSVVTKIYGVSSLAMIRSLLEKDKLSREEISLMAKGKLKKKVDLLEKALNGKITDHHRFLLGVHLENIDHLAKQIKRMDEEIERKMVPFQKESKMIQTIPGISDVNASAILAEIGVNMSQFPDEAHLSSWAGVCPGNNESAGKKKSGKTQKGNSFLKGALTESAWAASKTKGSSYSAIYHNIVRRRGKKRALVALAHRMLIDIYYVLRTGEPYQEIGAKAVYERTSKRRELSMIRSLERAGYSVAKAATA

SEQ ID NO: 219821 - protein, 427 aa, unidentified
MDNVKYQPTLCVGADVHLDEIVLRAVDKALGHEVRDRFHVTNNLPGAQQAAATIAATATELGYRRIEIACEATGMLWIPFHRYLSTAPPLQPFELELVCFNPKLVAKFKDGLVLRSPKDDDRDAFDVAARLRFGELPISYVPSDFWQGLRRLTRYRYRLSKALSQEKMRFQSLAFLKCSDWKRVKAFSDTFGATSVALLTEFTVAELQEMTHDQLVDLITHRGHGRFTDPPATARAIREALRTSYPIDPRMDEMVTATLAVGWDHIRYLERSMKRLDQLIARHIDLVPNPIITIKGLGAVITAGILAEIVDVLRFAEEKHLAQYMGLSWRKSSSGGFVSENTRLTKVGNVYLRYYFILGANLLRQNNLEYKAYYWRKYQEVSKYQHKRALVLTARKLVRLVHALLTKNEPYVRPQTTGQEQEDDRLQ

SEQ ID NO: 219822 - protein, 411 aa, unidentified
MQPILESCCGLDVHKSMVMACIAYGPLDKPPKYEIRKFSTMTSDIRELKDWLKKYNVTAVAMESTGIYWKPIFNILEDGFEIVLANAQHIKNVPGRKTDIRDCQWIAQLFRNGLIAGSFIPPRDIRELRDLTRTRRKLVEEMASEKNRVQKVLEDANIKLSSVVSKVFGVSSLKMIGVLLEKEELSAEEIAALAKGKLKKKVDQLVKALDGNVTDHHRFLLKEHLAHIDFLLEQIKDFDEEIRKKLRPYETKFKDIQSVTGVKDVSAASVIAEIGVDMSKFPDEAHLSSWAAVCPGNNESAGKKKSGRTRRGNNYLKATLTESAWAASRKKGTALSAIYHSIARRRGKKRALVAVGHRILIEIYRVLKTGKPYQDVGADIANERRSKNREHAMIRDLERRGYVVSKVMASI

SEQ ID NO: 219823 - protein, 343 aa, unidentified
MECYVGLDVSLKQTSICVVSRTGSVVREGVVDSDPDAIAAFVRSKAPGAIRVGLETGPTATWLWTELKRLGLPVICIDARHAQAVLKMQINKSDRNDAAGIARIMQTGWFKEVRVKDLDSHSVRALLASRALLVKIKRDLENRIRGLLKNVGLVIGRAKFNVFAVRAEELIEDRPELIAVVGPLLKARKAIEQQTDDLDRKVLKLARYDAQVRRFMTVPGVGPITALCFKATIDDPTRFKRSRSVGAYVGLTTRRHASGEIDWTGRISKRGDAMLRSYLFEAAGVLLTRVPKWSALKAWGMRLAKRNGLRKATVAVARKLAVILHRMWVEGTEFNWSKKEVAA

SEQ ID NO: 219824 - protein, 400 aa, unidentified
MDDIDDVGVFLGLDVGKSAHHGHGLTPAGKKVFDKQLPNSEPKLRAVFDKLAAKFGTVLVIVDQPASIGALPLTVARDVGCKVAYLPGLSMRRIADLYPGEAKTDAKDAAVIADAARTMPHTLRSLELTDKITAELTVLVGFDQDLAAEATRTSNRIRGLLTQFHPSLERVLGPRLDHPAVTWLLERYGSPASLRKAGRRRLVEVIRPKAPRMAARLIDEVFDALDEQTVVVPGTGTLDVVIPSLARSLTAVHEQRRALETQIGQLLEAHPLSKVLTSLPGVGVRTAAALLVTVGDGTSFPTAAHLASYAGLAPTTKSSGTSIHGEHAPRGGNRQLKRAMFLSAFAALHDPASRSYYDRCRSRGKTHTQALLRLARQRINVLFAMLRDGTFYEPRTPRLA

SEQ ID NO: 219825 - protein, 489 aa, unidentified
MSRASQQQQGKKDATLNAKALKRKARGSHRPQGEGHQRRSQLRITNRDAAGIDIGSQVHYVAVPEERAERAVRSFGAYTAQLDEIAHWLKECAVKTVAMESTGIYWIPLYQKLEEAGFEVLLVDARQAKHVPGRKSDVQDCQWLQQLHTYGLLRAAFRPEDWVCRLRTLQRHRKSLVEYAAMWVQHMQKALNEMNLHLHHVLSDISGCSGLAILDAILAGERDPRKLASLADYRVKKSQAQIEAALTGDYRPELLFVLNQSLQDYRQIQQQIAQCDLSIEKQLAQMADCTNPSQNSGPRQQGPESAGGKRGKIKPKDGLEVSLAGHLKRILGIDLTTIPGLNVLAILTLISEIGTNMSKWRNEKAFVSWLGLSPNNKISGQRVLSSRTRKVVNRAATTLRLAAMVLGHTNTPLGSFYRRKRAQLGAPKAITATARKLGCLIYRLIKNGEGYQEPDLHVYELKYKDQILNSLRKRANSFGFDLVEVPKAA

SEQ ID NO: 219826 - protein, 346 aa, unidentified
MEHYVGLDVSLKLTSICIVDRTGKVEREGVVASDPEAIATFVKLHAPHVVRIGLETGATSTWLWTELNKMGLPVICIDARHAKAALKMQINKSDRNDAVGIARIMQCGWYKEVCVKDLDSHATKALLVSRALLVKIKRDIENQIRGLLKNLGLVIGRAKMNMFAVRAAQLAKDRSELLAAVDPLLKAREAVEQQILDLDRKVLRLARNNAQVRRFMTAPGIGPVTALCFLATIDDPARFKRSRSVGAYAGLTTRRYASGEIDWTGRISKCGDKMLRSYLYEAANVLLTRVAKWSALKAWGVKLAKRSGLRKAKVAVARKLAVILHRMWIEGTEFKWSSKEAADQPA

SEQ ID NO: 219827 - protein, 435 aa, unidentified
MGACMAPMRGKCIMHEERRWFVGIDWASQEHVVTLCDGQGKKMGQRKFAHGGTGISDMIAWLLKASGGEPGQIHVAIETPHGPIVEALLERGFNVYAVNPKQLDRFRDRFTVSGAKDDSLDAYVLADSLRTDMQLFRKLIIVDPLIIELREWSRIDEQLKVERVRLANRLRDQLWRYYPQMLDLTDDLGADWFLNLWEAAPTPEKAARVREATVARILKSHRIRRFDAAHVISELRKPALSVAQGTAEAATGHIGVVVAQLRLINRQLSDAGLQLDRLCKKLAEPAAGNDGENVSGQRQEHRDVTILDSLPGVGRTVLVTMLAEAPDALQRRNYHALRNLCGSAPVTRRSGKSCMVMRRRACNRRLSNAVFHWAQTATQRDPTSKAKYEALRARGHGHARALRSVVDRLLYVACAMLENRTLFDPSYAEKKAAAG

SEQ ID NO: 219828 - protein, 327 aa, unidentified
MRNITKTSSDETRSKRSFVGVDVAKDELVIYIDSETRHITCPNRAKDLRRVGRQLKKLDPALITFEASGGYETLAAVTFSELELPIAIVFPLRVRQFAFGIGIIAKTDEIDAQIIAYYGKTAGIEPRPLQSKELRSLHGLTTRRSQLLEVRIAEQNRLGTAPASIRRDIKEHIAFINRRIASIEAEIRTQIKQSETWHHVDQLLRSAPGVGPVLSSTLITELPELGILDNKQISALVGVAPFPRESGKLKGKRVCKGGRNSVRRVLYMATLSAMRYNPVIKDFYAKLLGGGKLPKVALIACARKLLVILNSMMKSNSNWQPTPINVA

SEQ ID NO: 219829 - protein, 310 aa, unidentified
MGIGEGAFVGIDVSKKHLDVAVDGSKGVVRRENDAAGCSALADELSGSALVVVEATGGYELEIVRALQRAGAPVAVVNPRRIRDFARASGRLAKTDRIDAEVIARFGGAMRPSQTPRIEDGRMALLELVVRRRQLIEMIVAEDNRLEHAGGPVAAMIKEHVASLKDQLASVDTSIALAVRADEASARRKAILESVPGVGQTTAAVIIAELPELGTIDDKKIAALVGVAPVAHDSGTLRGQRRIAGGRGSVRCALYMAALSAVRCNPALKAFHRRLRDNGKRPKVALVAAMRKLIILLNTLVRRDQLWTPA

SEQ ID NO: 219830 - protein, 293 aa, unidentified
MYPAGEKRSDANNAEGIEKLVAFLVEETPALVVLEATGGLETAFATAACAAGLPVAVVNPRQVRDFAKATGMLAKTDTLDAAVIARFAEAIKPQARPLRDEAATELVGMVARRRQLVLMRTQEKNRLAAASAKQKDDIKAHIKWLDERIGNLDTGLTVALRQSEAWCVKEDLLESVPGVGLITSATLLSLLPELGTLNRGEVAALGGVAPFNRDSGLYRGKRMIWGGRADVRSVLYMATLAAIRFNETIKAFHKRLIEHGKPAKVAIVACMRKLLTILNSMIKNKQSWNQHIA

SEQ ID NO: 219831 - protein, 339 aa, unidentified
MAAYAGIDLHSNNNYLGIINEQDQRLFKKRMPNDLRKILQVLAPFRDELQGIAIESTFNWYWLVDGLQERGYRVHLANPSAIQQYEGLKHSDDKWDSFWLAHLLRLNILPEGYVYPKAERAVRDLFRRRMLLVQQRTSHILSLQSMLARNLGIQMSGNTIKRLVEADAERLFKERHLVLAAANSISVMHALKERIRLIERAVYEQGALREEFTPLLTSPGIGKILGLTIMFEVGDINRFPQVGNYASYCRCVKSERLSNGKKKGSGNSKNGNKYLSWAYVEAAHHARRTCLSAQRFYQRKAAQTNTVAAVKALAHKLCRASYYVMRDGIPFDEARLFRR

SEQ ID NO: 219832 - protein, 344 aa, unidentified
MKITRVGFDIAKRVFQVHGVSEHGVVQARKTLAREKVLMYFAQLPPCLIGMEACGGAHYWARELSKLGHTVKLMAAQFVIPYRKRGKNDANDAEAICEAVGRPNMHFVAVKTEEQQAVLMVHRARSLVMANRTAQVNQIRGLLGEFGLIVPKGVAHLRRQLPQILEDAENGLPALAREVLAALLEQFRELDQRIGQYDCKLRELAQQSEPSRRLLQVESIGPMTATAIVASMGDPHVFKSARNYAASLGLTPRQHSSGGKSRLGQITKQGDRYLRTLLVHGARAYLRIVDKKTDAKSAWARRLKERRHVNVAAVALAAKHARIAWAMLAKGTEYRSVEVEEAAA

SEQ ID NO: 219833 - protein, 343 aa, unidentified
MENVMLAVGIDISKDEFHACLKEKTESGTVKIKGTHSFSNDIQGFEKLAAWVLKREKQGTQVSYIMEATGTYYENLAFYLHDKGERVFVVLPNKIKHFAKSMNIKTKTDKVDSGIIAQVGIERKLAIWKPMSANFKQLRDLSREMLSLKKEKARAMCQLHAMNYAHDKTPSVLKIKESLIDFYSQTINQIETEIVKLINADTELKPRIERIMKVKGLGMITIVAVICETNGFELFNNIRQVVSFAGLDVQMNESGTFKGKTRISKKGNTRIRQCLFMPALSASVHNEKIKDLYERIKERNPDIKKKGVIAAMRKLLIIIFVLWKNGEEYNPQHVWGINANDIG

SEQ ID NO: 219834 - protein, 388 aa, unidentified
MNIVLPATAEQTAIRTQLGAIFVSLELSRSTWLVTSLSPGGGEKMSKHSVPAGDIAGLRERFSSLTEKACARMGKTVPIIVIQEAGLDGFWIHRALVSQGIESWVVDPASIATSRRRRRAKTDKIDGEALVRALLAYKRGEPRVCAMVRVPTPEEEDRRRLGRERKTLVGERTEHVNRIKGLLFSQGIPGYEPMRRDRRAKLDELRTGDGRPLPPHLKALLGRELDRLELLMQQIKAVEADRDALVVPERDGNQAPSQVAMLLALRGIGPEFANVLYSEGLFRQFGNRRQVAAYCGLAPTPWQSGSIDREQGVSKAGNPRLRFTMIELAWLWTRHQPDSALSQWFRERVKLDGRRKPTIVALARKLLVALWKYVTAGVAIEGAVMKAA

SEQ ID NO: 219835 - protein, 353 aa, unidentified
MAKRFWAGLDVGVETTSLCVIDEDGEVLHEAVCATNVKSVHQELNFLRRRRCARIALESGNGMFLARGLRTLGYTVDIYETRQLSGFLRVRRVKTDAGDANGIAQAGRIGATLVSKVHLKSLECQSLTAQLRMRRHVIGTRTRAVNLLCRQLEQFGGRVSRSTRSPQLRPLVEEEIRTLFGRSSTPLVADLKRLLAHCLNLMAQEKAIDRDLGIMARSNEVCRRLMQIPGVGPICALTFYAAVSEPERFRRSADIGSYLGLTPRLYQSGLTRRSGRISKMGNKDARSLLFTASTRFMTHSPRDSAIYAWAKDVELRRGKFKSRVALARKLAGVMIAMWKTGEPYRPLPAAPTL

SEQ ID NO: 219836 - protein, 336 aa, unidentified
MFALISSLRARVARRLDAAIGVVCCFEAGRDGFWLHRLLTAHGVANYVLEPTSILINRRARRAKTDRLDAIGMLRVLAAYLRGDRQSCSMVRVPTPEDEDAKRIHRERENLVQEKLRIENRIEALLFTQGIRKRPSLRSWERDLAVLRTGDGREMPRHLRAELDRLRRRLVTILELIREVEAERDEVVTTNPEHQTSRKIVALCRIRGLGENFAGVLTREVFYRSFDNRRQIASYVGITPMPYQSGSMDRDRRISRAGNPRARTTMIQLAWLWLRYQPGSELAEWFRKRVGTLAGRTRRIAIVAMARKLLIALWRYVETGVLPAGAEIRPESVAAA

SEQ ID NO: 219837 - protein, 415 aa, unidentified
MDVVHERCAGIDISKADVKVCVRMPGPGRRRRREVRTFSTMTKDLLAMRDWLLAERVTVVGMEATGAYWKPVFYLLEHDVECWLLNARHMKAVPGRKTDVKDAEWIAELVEHGLVRPSFVPPEPIRQLRDLTRYRTEVVRDRTREIQRLEKFLEDAGIKLSVVVSDLTGKSARAMLEALVAGERDPSVLAELALGSMRGKRPLLAEALTGRFTAHHAFLVRAMLDRIDAATTMEDRLSQQIDQQVRPFRRQLDLIATIPGANTRAAQVILAEIGADPSRFPTAGDLASWAGMCPGNNQSGASTKPGRTRHGDPWLKAVLGQVAVSAARGKGTYLAARYRRIATRRRKKRALVAVGHSVLIAVWIMLTRDVEYHDLGADHFIERLGTHGKARHTRRLIDQLNQLGYQVTLQPAQTA

SEQ ID NO: 219838 - protein, 375 aa, unidentified
MKKIIFVGLDVDDKAFHGCGLHDERSQEKMLDFKTKPSIGALMQRLGNFQKDGFEVRVCYEATYLGFSLARDLKSKGIHCDVISPASIPTRASKTVKTDKVDSRELAKFYKNGLLSIVYVPEEKQEQVRDILRSRFFISGQLKGLKRHILATCRRVGLNYKASSPAKNPAYFTHSHMQWMETEINKGLSEELQFNLKMLLSQFRQIGIQLSHYDTEIERMSQAAEYQRKVEALRCYRGIDVLGAMTFIAEIGDVKRFKHPRQLTSYAGMDLREYSSGGRERRYSISKMGNARIRTTAVEACQSANKIPQVSRSLKWRRESCRPEFIDIADRCMKRLHKKSTRLLYAGKPVNKIKVACAREMLGFVWESLRVASAA

SEQ ID NO: 219839 - protein, 297 aa, unidentified
MTYVGIDVSKATFIVAYSSAKSSKTKTFKNTTKGVHEFIQTLSANEHHCVLEATGNYSSLLVYLLSRANITVSLENPLKIKNFARVMLSVTKTDETDARLIALYGQRMQPAPYKLRSDAILTLKQKRTVIRQLKKQLIATRNLKGSMEALPFFDPKCKKAIEKTIVFLEKQTKGLEEELAALAQSEYKKQIDLLTSIKGIGVTLAAALIMATGGFTYFDNAKQLTRYLGLSPTYQQSGTSVNVKGHINRNGDSSLRGQLYIAAMASLRCNAECKACFDRLRSNGKPGKVAVVAGGHL

SEQ ID NO: 219840 - protein, 347 aa, unidentified
MTIVGCDLHTRKQQVAVVHTDTGEVEEHELLHSDNAVEQFYSALPRPVTVGIESTGYALWFHELMQRLGHTLLVGEAAKIRAMVVRKTKTDRRDAQHLLDLLKHERFPTVWIPDPATRDLRALVTHRVRLVRMRTMVKNGLQAIALNRRLALGSKLWSQRGRAQLAALDLAPHTALRRGDSLELLTWLETHIAGLDARIADAAYAHPGARLLLTHPGVGALTALTTVLVLGPTARFPGSKHVVSYVGLAPAVSASADTCHLGQITKQGSALLRWVLGQAAPLAARADDDLHRLYRTLLHRRGRPKARVAVARKLLVRLFIMVRDQIDYAEFRRRGRIPRSDLHPSPA

SEQ ID NO: 219841 - protein, 346 aa, unidentified
MTRPSTAAVATLGIDIGKNVFHLIGLNKRGAITLRQRLSRRQLEARLTNMPPCLVGMEACVGAHHLGRQLRALGHDVRLMAAKYVRPYSKGQKNDYRDAEAIAEAVQRPTMKFVAIKTVEQLDLQALHRVRERLVSQRTGIINQIRAFLLERGIAVRQGPRPLRSELPLILTMDKLSSRMLHVIEALAADWRRLDERIEALSSEIAALAEDDASCQRLMTVPGIGPIISSATVAAIGMGDLFSKGRDFGAWLGLVPKQMSTGGRPLLGRISKRGNRYLRVLFVQAARVVLRLRPETWERHGLKRWIEAAATRMHHNKLAIALANKLARIAWSVLHHGRDFQMSKLR

SEQ ID NO: 219842 - protein, 369 aa, unidentified
MQKGITHVALDDSKNSIVAGILRPKATEPELRQFPNEAKHLRRFFTRLQGEGPVTSCYEAGPSGYDLYRQLTALGVPCQVMAPALTPRKPGERIKTNRRDAAKLVRLFRAGELTPIRVPDEAQEAVRDLLRCREDVQEDLLRWRHRLLKFLARHGRVYREGRNWTGRHWAWRRGQRFADPVLARTCQEYRFTVEQLLARRAELEREIAAIAEQEPYRTPVGWLRCFRGFDTLGALTVLIEIGDFPRFGHPRALMAYLGLVPSEYSTGEDARRGSITKAGNCHARRVLVEAAWHYRHPPRLGRALTRRTQGQPQAVRAQAWKAQQRLHRRYRHLVGHGKRPPVAVVAVARELVGFLWAALTRAEPVALAA

SEQ ID NO: 219843 - protein, 423 aa, unidentified
MMKLKYSICCGLDVHKNVIVATIVITNADGISEYKQKSFSTFNSDIRKFHSWLIENNCYHVCMESTGKYWIPIFNYLENDIEVCLTHPKYVKAIKGKKTDKKDSKWIANLYKFDLVRCSFIPPKDFRQLREIARYRFKLVCMKSSEKNRIQNCMTVSNVGIASVLSDPFGKTATEIMSYLLTHTSDSIDEKAVRRLIKKGAKAKSDEIIEAIRGYNIESDQAKKLELARSHLEYLDGMITQSEVELYVRMKPYYKFVELVSTMPGMTELSSTIVLAETGVDMSIFDDAKHLCSWCGLSPTNNESAGKKKSVRISKAGDYLKPMMVQCALAAIKSKKQTYFAIKYGRVKKRRGHKKAIIAIARMMIVCIYHMVSEEKPFNPIDYEELMSPKNQIERVILNENNVFAYLESLGYDSSKLVKRNDN

SEQ ID NO: 219844 - protein, 358 aa, unidentified
MNYTQNQKIEQVTESTLVLGVDIGSSEHYVRAFDYRERELTRKVFRFSTDINGFNSFYDWVTQICIKHGKNEAMIGCEPTGHYWYTFYQFVKDYGMKLAFVNPASVKKAKELDDNSPKKTDLKDPKTIAKLVIDGRYSFPYVPEGIYAEIREVTSSRDRIMKELNVASNRIQRWLKIYFPEYLTVYKKFDTTTGMMILEEVPLPTMVTALGVDNIIKIWREHKVRGKGASFNRAKTLVDAAHDSVGKSGGQGAVMEIQMLLEDYKVKKQQLEMVTSVMEELIMQIPNAEKMLSVDGVGLVTVAGFISEVGDISRFKNQKQIQKYAGFELVENSSGKHKGRTTIENMKVPGTLRNQFIK

SEQ ID NO: 219845 - protein, 355 aa, unidentified
MNSEKYIGLDVHQATISVAVMDCRGKVVMESILETKAATLLEFLAGLRGTLSVTFEEGTWAAWLYDLLKPHVQKLVVCNPRKTALLKHGNKSDRIDARKLADLLRLNDLEPVYHGETGVRMLRELARSYLTLVKDLTRVMNRLKAMYRSWAIPCAGRDVYYTRHRAEWLSKIREAGVRRRAEHLYQQLDMLQHLRQQARRELLAESRKHATTAKLRQIPSLGPIRAALAVALIQTPHRFRTKRQLWAYSGLALETRTSGEYCYVRGQLRRSKKQISIRGLNKDHNHDLKGLFKAAATRASVQPGPFQDFYQRSLAKGIKPTMVRLTLARKIAAITLTLWKKGENFDVEKLKSQAA

SEQ ID NO: 219846 - protein, 405 aa, unidentified
MIFVGNDWASDHHDVCVMDEHGTTLAARRLPENAAGVTAMHELIARFAHDPTEVVIGIETDHGMWVAALVAAGYQVFAINPLSVSRYRDRHHVGGTKSDKADAKTLADLVRTDRHNHRLVAADTVAAEAITVMARTHQNLVWARSAQQNVLRAQLGAYYPAAVDAFGDDLAHKDCLAVLRRAPTPRQGAALTVAAIRSALKKGGRQRNIDHRAREIQQALRGGGHLNAPEALTAAYAATVTATVGMLAALTTQIDQLETTMAQSFRAHPDAEIYLSMPGVGDITGARMLGEFGDDPERYATAKSRRNYAGTSPRTIASGKGHVVLARHIRNTRLNAAAMCMAQGALTGSPGARAYYDSLKDQKKSHTQALRAVANRLVGILHGCLAHRTLYNEHTAWGHRTHLAA

SEQ ID NO: 219847 - protein, 390 aa, unidentified
MGPSTAHRWHVKGAGKWLSSPALMKNTIVHHEGATSLEVVATRVKPGVAVIKIGLDVHARVYVAVVQYDHLLPKAARRLSPSDFVPWVETLLGRGHSVHVVYEACGFGFTLYRQLRAAGAHCYVIAPQELDEQSSRVKTDPRDATTLCQRLSRYLEGNTRELAVIRVPSEEEEQARHVSRQRGQLVHHRQKLEAQGRSLLISHALQAPAHWWKEQTWNRLGKHLPEWVTMHLEVARPALLSLQEQIESLTSQLEAAAPPHIPAGVGKLTTVMLTREICDWHRFKNRRAISSYTGLCPGERSSGSKRVPGSVTKRGNPRVRAALVECAWRMVRFQPQYPPVQKRLAVLAKGSRALGAVRKKAIVAVARRLAVDLWRVHTGQRTPAELGLTI

SEQ ID NO: 219848 - protein, 351 aa, unidentified
MVVVGTDVHKRSHTFVAVDEVGRKLGEKVVVATTAGHLKALSWARTEFGTDVLWGIEDCRNLSARLERDLLAAGQSVVRVAPKLMAQARASARTRGKSDPIDALAVAHAVLRNPGLPVAAHDETSRELKLLVDRREDLVGQRTSTINRLRQRVHELDPAAEPKPASLHREGPRAQLRQWLDTQRGLLAELAGDELTEITRLTETIDALAARIGDRVRRVGPALLALPGCGELTAAKLIAETAGVTRFKSQAAFARHSGVAPIPVWSGNTAGRVRLTRSGNRQLNAALHRIAITQIRLTNSAGHAYYRKRLDTGNSTKEALRCLKRQLARVVYRHLHTDYATPHQDHQPTAA

SEQ ID NO: 219849 - protein, 414 aa, unidentified
METVYRCVAGIDVHKSMLAAVVRRERNGETEYEKRQFGATRREIEHWAAWLQERQVQEVVMESTAQYGRPVWYGLEPHFRLHLCHPLRVQAPRGRKWDFRDAQRLADRWDSGDLEESFIPAAEQRSWRWLTRRRVQLNRMITLVRNHVEGLLEQGGIKLTSVVTDAFGVSGWAMLQRLAKGETDVDALAAEARGRLRKKGPALQEALAGRLEPIYQRLLKQNLEPVELLQKHIEEIQRELSLAMQTHTATLVRLTKIPGVDVAAAQELLAEIGPRAAAFPTAERFASWVGVCPGSKQSAGVCYSSRSAKGNCYLRRLLCQTAWAATHARDTFFGGLFARLVPRLGSRAAAWAVAHRIAKVVWLVLHENVEYRETGRASLKPAILARKFRRLLHELARAGLDAKTLLEQCAPATP

SEQ ID NO: 219850 - protein, 401 aa, unidentified
MVSDFKKGRYNLMKIFVGIDIAKLNHFAAAISSDGEILLEPFKFTNDADGFQLLVSKLESFDKNSIIIGLESTAHYGDNLVRYLVAEFYQVCVLNPIKTCQMRKNNVRKTKTDKVDTFVIAKTLMMQDDLRFITFFDLDMMDLKALGRFRQKTIKQRTRLKIQLTTYVDQVFPEIQYFFKSGLHQNAVYALLKEAPSPKEIASMHMTHLANLLKVNSHGHFTKELAKELRVLAQKSVGANDSAISIQITQTIQQIELLDSQLEKIEAEMTDIMKFNDSVIMTIPGIGYINGGMILGEIGDIHRFSNPNKLLAFAGLDPSVYQSGNFQAKTTRMSKRGSRVLRYALVNAAWNVVRNNATFKAYYDAKRAEGRSHYNALGHCSGKLVRVIWKMLTDNVEFNLK

SEQ ID NO: 219851 - protein, 316 aa, unidentified
MAMHVSKSIVGVDVAKFELVIYEPDQDLLTSITNDKPAIKRWLKTLPRPTAIAVEATNVYHIDLIELAYEAGLDVYIIDGYQLSNYRKSVGVRSKTDASDARLLARYLKNEGEDLRPWTPPPAVYGKLQSLLRRRASLVQAKTSLTQSWANDASLKAVFATFLKSVERLDLLVQKKLKDVLREAGLLEEVARCQAIEGIGFLTATALVMAYNRGDFKSGDSFIAFLGMDLRVSDSGQKNGRRSLTKRGCSEVRRLLHNAAMSACRSSAWKGFYNEHLSSGKATTQVLVMLGRKLARIAFSLMKNQSDYQPKRGILA

SEQ ID NO: 219852 - protein, 358 aa, unidentified
MTTTATVTAAGPILAIDLGKYKCVACTDDRATAAADFRTLDTSRAELARLVERARPAVVVVEACSLAGWVSDLCGELGVPCKVANTAAEAWKFKHAKRKTDRDDALRLAQLCALGQLPEVVTPPKAVREWRALIAHRQALVTQRVAAQNRVRSILVGQGLPAPRGARAWTAAGLAGIAQLARPLAQCGPDELWRGLLDLALTAYRQAEALAAQAEARLDALGKADARVGLLDTMPGLGPRTAEAVVAHLGDPRRFRSGKQVAAYGGLVPRQYQSGEEDRRGRITKRGPALLRKLLVQCAWAMLRYNPWARAVYDRLSRGKARKKQAVVALARRVLVRCWAMLRDGAAWRPDPATAAPA

SEQ ID NO: 219853 - protein, 315 aa, unidentified
MAKHTTICAGIDTGKRKLDAAIEGNHEQLQVDNTPEGHAILLIWLRRHRVKRVGIEASGGYEQPVVTELRRKRFVVVVFQPAQVRAYAKFHSQRAKNDKIDAALIAICTAAVRKIHAAPDPRLLPFAEQLTMIDQIGEDIARLKNRIESCRDVEINKLWHEDIVRLEQREKASLKALVASIRKHPDLAKRLALINSVDGIGLPTAVAILVRLPEIGRITREQAVALAGLAPYDDDSGDQVGVRHIEGGRKRLRRALYTASLAASFRWNQQLIQLYQRLTAAGKEHKRALVACARKMLIFANTVVARGTPWRDCPP

SEQ ID NO: 219854 - protein, 428 aa, unidentified
MNETELISVNKFRQLKKEIQGSETHLIVGIDVAKERHHAFLGTAAGKTLVKKLIFENSASGFSELLARVEAVRAQNGLSDIVFGLEPTSNYHKPLGRYLISKGCHVVLVGGKAVKNNRELLDERWDKHDTKDAANIADLVSRGKCFYYDMPSREIEELRDLHSLRTRLKKEEHSLNLRIRNNLLAKHFPELDSFYSACEKETLAIVRWFLNPQQIAAMPFDEFFKRVAPNARGIGQKLRLQKIHRLSHESIGCPVDSAVQLQAGLLVEKIKQVREQIVQVEQVIQQLCVQFPSYEYLLSIPGFGPYVASKVLATIADPRRFDTAKQVIRTAGYDLCADRSGKSSDQAVPVISKKGNSQLRYALYQAAMVASSRHRFFMAYFARMLQGRERERGIRTKMRVKLAAKMLVIAWTLMKRGESFNPEYLNVR

SEQ ID NO: 219855 - protein, 342 aa, unidentified
MEHYAGIDVSLECSSVCVVDAKGKIVREAKVASEPQALVDWFGSLGFGLERIGLEAGPLSQWLFAGMKRASLAVELLETRHVRKAFGAMPVKSDRNDARGIAQLMRLGWFRPVHCKSMSAQETRSLLTARKLVQSKLHDVENSLRGILRGFGLKVGKTTGQKFAGRIEELVTGHPHLQTIAKALLAVRAVLRAEFAAFEKQTRRMVQSDMQARLLTSVPAVGPIVALTYASAIDDPTRFKSSKQAGAHFGLTPKKHQSGETDYTGRISKIGDASVRTALYEAANVMLTKPVKGCSQLKSWAMRIKRRAGTNKAKVALARRLAVIMHRMLADGTPFNAAAAAA

SEQ ID NO: 219856 - protein, 428 aa, unidentified
MTGKQTVQPEPKFVAFVGIDWADQKHVWSWQKADSTQREAGELEHRPEAVEAWVGELCRRFGYGPIAVAVEQVKGALVYMLRKYDCLHLYPVPSTMSAGMRQALYPSGAKDDPRDADVLLELLLLHRDKLRRLTPDNEATRRVQNLVEERRMLVEEKTAQLNRLTGNLKVYFPQMLKWFAKLDSKLVCDFLERWPSLEELQKVPSAELKKFFRHRRGRHGQLTEWRMAEIRQAMPAIGDRGVIEAKRTVVQVIAQLLRALLEGIATLDRKIAEAAEAHPDFFIFQSLPGAGDALAPRLLAALGSQRDRYASADEVQKYSGIAPVTESSGKKKWVHFRWACSKFLRQTFHEWAGHSIAQSVWARAYYYQQRERGKEHHAAVRALAFKWIRIVFRCWQDRVAYDENRYLMALAKRGSHLASAFAAATASM

SEQ ID NO: 219857 - protein, 384 aa, unidentified
MRRAKKRGPGPSHLLITPDSAGNVVGIDPHKQTLTATIADPRGGILASEHFRVSGDGHRALEAWALQFGLVARWGVEGACSWGRHTAMFLCGRGYDVRDVCANRTPRHDRARQRGKSDVLDSERIARETLAHPLLPKAFKRAGPDQGPDEHHQLLALWHNRRRSILTSRQHLLNEAEHLLCELPLQLRDELPDSKAVRPRLTALADRNRRRRYDAPTRLRLALLDRYTAQIAALDREEKTVVSELRALVHTSGSTLAELCGLETRSVAELLVEVGDPRRFTEGGFARFNGAAPLPASTAEGPGEPVRHRYNPGGNRRINAVLHRMAVTQLRCEPRAQAIFANARARGHTKKEARRILKRHLSDVIYRRMIRDQAAQLAQPLLAA

SEQ ID NO: 219858 - protein, 480 aa, unidentified
MEATQQQKQKKGVKRPVQRGWHEMNRKQRREMTRRIQAEDLSLEVMHPEAAGIDIGNESHYAAVPSSRDSQPVRCFGCTTGELRKMAAWLKQCGIRTVALQSTGVYWIPVYEVLEEAGLEVFLVNARDTKNLPGRKSDVQESPWLMKLHAYGLLRNSFRPPQEIRTMRTYWRQRNDLVQSAGRHIQRIQKALTQMNIQWANVLSDVSGMTGQAIIKAILAGERDPWKLAGFRDKRVKATEEEIARGLEGNWQDDLLFLLKQEQDSYEFCQKQIAECDARLEQYLQQRPDRSHGANLPEEKRKGRLQKKAKNPQFDLRTHLFRMTGADLTQIDGIDVRTAATVISEVGWDMSKRENEDHFVSWLRLCPDNRTSGDKIIGKGRLPTNNRLTVALRMAASTLRESDTYLGAQFRRLRSRLEGPVAVKAMAAKLARLVYRMLRYGMQFVDRGALFYEARHRQHQINFLRRKAVKLGFQLVACAN

SEQ ID NO: 219859 - protein, 337 aa, unidentified
MTQTLYAGIDVSKDKLDIAITQDGKQIISTATFENAYSGYKKLFTWTKKHSKSFAKIHLCIEATGNYHEEITEYLQEQIKTIVSVINPFQSKSFAKSRLLRTKNDKVDAALLACYCAISQPEETIKTSDEVKKLRKLVRCLNIRIKERAREKTRLHSNKDADVADVLKGTIQFHSQSIAHIEKKIKEHVKKFPKLNEQVKLLKSINGIGDRTAWQMLAELHIEDGKSLNTKAQVAHAGLAPREFQSGSSVHGKPRICKIGNKRLRKALYMPAMSAIRHNKQLSEFYQRLIEKGKLKMVALVAVMRKMLVMAIAILNSGKPYDENWANKYQQTFALAS

SEQ ID NO: 219860 - protein, 448 aa, unidentified
MFIMHYKRLLTFIDGVSSYLSVGLDVGADFTWMSIALPNGSFVGKPFKIIHSDSRSRDLAVTKIKEAQETYSLKSRCFLESTGIYHIPLLCFLRDKGFDCSVINPIITKNSTNINIRKLHNDKFDSKKAALVGLNVSLKTSILPDDSVVDLRNLVRDYYYFKDLQSAVALKLTAELKVSFPAYAKTFSKVTTQSSLKLLSSYPLPADMLAASKEDIVDIIRSTARFGEAYALRKYDAIIAAAQDAAVFGRALPSNAVRIRLYIDTYQEYQKHLDALLKTLHETVEKLQDTLIYDQICLLQSLRGIGFLSAVVLIAEMGNFKLFSSPKKLYAYFGLDPAVKQSGKLNGDKVHMSKRGSSLARRVLHMAALNNVKVDKGSGTPVNPVVYDYYTRKCSGKKKPVAMGAVMHKICNIIFAMLRDNKPFEIITPEEHCRRFATEHPDKIRKAA

SEQ ID NO: 219861 - protein, 280 aa, unidentified
MRRVIGIDIHRTFGEVVFWEDGKLRRAGRIDMTRTALEGFGKSLLASDEVVIEATANSMGVSRVLTPFVARVIIANPLQVKAIAQAHVKTDKIDAGTLASLQAAGYLPQIWTPDAATERKRRSAARRYQIVRHRTRLKNEVHSILHAHLIPKCPHSDLFNARGRTWLAAQSLPEDERAAIDRHVRELDRLAEDLALLDCQIAQDAIDDPAVNRLMTITGVNLTVAAGIVAAIGNIDRFNSPQKLVSYFGLNPRVRQSGLGAAHHGRISKIGRSHARAIIH

SEQ ID NO: 219862 - protein, 343 aa, unidentified
MDHFAGLDVSVKETSVCIVDDTGKIVREVKLASEPDALLAELRNPAYRFKRIGLEAGPLSQWLLSALAEAELPVICVETRHMRAVLKAQINKTDRNDARGIAQMMRVGLYRPVHVKTLRSQKLRMLLTHRKLLQSKAIAIENDLRATLRNFGLKVGIAGKVKFEARIKELVENQPDLAVLVEPLLIVRRVLREQIGILHRRLLAVVRDDEVCRRLMTVPGVGPVVALTYRATVDVPARFRKSKAVGAVFGLTCSKYQSGEIDRSGRISRCGDEMMRVMLYEAAQSMLFHSTKWSWLKAWAMKIARHRGMKKAIVALARRLAVIMHRIWVDGTEFRWTKEVVTA

SEQ ID NO: 219863 - protein, 441 aa, unidentified
MTVSIIRYVGLDVHKRVVEACIVERAGRVVHRERFALNRQTLETFATEILRPTDHVALEATTNCWAVTDALRPHVAGVLVSNPMATKAIAQAKVKTDKVDAHVLAQLLRCDFLPEVWQPDEATRKLRELTGRRSALVGQRTMMRNRIHSVLAMRLVEGPSRLFNAEGLDWLATVPLDAQGRLLVDSDLRQLEFLQNQIDALDDELARRGQASAEVRLLMTLPGVDVATAEAMLAAWGDLKRFPDGDHAASYLGLAPSTKQSAEHCYHGPITKRGNSHARWMLVEAAQHLDTHPGPLGHFFRRLLKKKTRNVAVVAAARKLAVIGWQMLVSGEPYRYAIPRSTETKLARLRVKAGGERRRGGVPKGQKAAASQPGQAGGSRRIRPLGEVCRSEGLPQPRPLSAGETRTVKQADCEVFVAQIAAVQVVPRRSGRKLKEAATHG

SEQ ID NO: 219864 - protein, 328 aa, unidentified
MDNPLYYVGIDIAKAKFDVAIKLQNGKHKHKVFKNNLEGFQSLMQWLNTFGETFHCVMEATNIYHEALADFLFQQQITVSVINPKCSAHFTKTDNLRSKTDKIDAKMLADYADEKRHKLPIYQPISPAQRELLRKNRQLDHLKKQLAQEKTRLTMLLDSDCIASTQQMIAFIKAQIKALEKTIKQCINADNTLKNNVKLLCTIPAIGFANAVQLIAHLGDGNRFKNAKAAATFAGLTPMIKSSGKSLNTVIGISKIGQSDIRKALFCPAMNFAFGSYKNSVYRSFVLRLLECGKPKMVIITALMRKLVTIAQAVLQKQTAFNLDTFMK

SEQ ID NO: 219865 - protein, 418 aa, unidentified
MSTEIKIVYPICCGMDVHKSFIVACIAITDQYGITKHHIRRFSTFTGDLRRLAEWLASYNCKDVCMESTGKYWIPVFNILEKTCNVCLTHPKYVKAIKGKKTDKRDAKRISELFKCDLVRSSFIPPPDIRQLRDLCRYHAKLTHMNTSEKNRAQNCLTTSNFKLDDVFSDVFGKSATRILDKLFEQGNSDFDVAPLLDKRCKATVEEVTAALDGEFNVSQSEKLKLIRKHQECIAELQATLETVILRLAEQFQPQIALLMSVPGISTQLTAIRIFAEIGVDMSVFETSKHLISWAGLCPQNNESGGKKKTTRIARAGAYLKPLLVQIALNVGKSDKCPELKNKYQALKKRRGGKKAVIAIARKLLTAIWHILDKGEFYNADLYHKADKPPVNRVLTPEQAFALLRSKGYEIINPDSAA

SEQ ID NO: 219866 - protein, 318 aa, unidentified
MGEDDLMSSIFVGIDVSKDHLDVSIRPIQHRQRFTNSDEGVDELIERLKSSPPALVVMEATGRYHQLVLSRLLTAGLPAIAINPRQARDFARALGRFAKTDALDADVLAEFAEKIRPELRSISDDETQHLEALCTRRRQLVGMLSAEKNRLHSSPKTIRPAINKHIQWLEKNISQLEKDLDKQIRSSPAWREKEDLLRSCKGIGPVTTQTLLACLPELGTLTGRQISALVGVAPLNDDTGKHKGRRHIGGGRLDVRCVLYMATLAAIRHNHAIRQFHARLIAAGKAKKVAITASMRKLLTILNAVIRDKKPWEPNFAS

SEQ ID NO: 219867 - protein, 412 aa, unidentified
MTNPYNLFVGIDLGSQSHHVSVVDRDGTLLGERKFEHDGQGIQQLLTWLAELAGGASPETVAVALEAPRGAIVDALLERGYCLFSINPKQLDRFRDRYSVAGAKDDSRDAYVLGNSLRTDLSHFRRLRPDHVQIVRLRELSRASDALQEDWRRNANQLWSYLQRYFPAILKFSSAADDVWVFDLLEQTQAQSKLAAALPIEELAKLLRRRRIRRFSAEKLYRALQDRLPLAAGVEEALAEQVLLLLPRLRLLHQQRSEVDHRTDRLLVEMAQENFPEHRSVEILRSIPGVGRVFIATVFSEAGRPLLDRDYHGLRILAGAAPVTWQSGKTKIVSMRRACNDRLRDAVQNSANTHMQKDPRAKQIYARLRRKGNTHARGLRGVGDRLLELICVLLRSDQLYQLDRRQPKQDAA

SEQ ID NO: 219868 - protein, 331 aa, unidentified
MSYCIGIDVSKATINVHIKRNTQDLVFENSSKGFKSLLLKLKKIFKKEVENIIFIFEPTGSYSEALRKYCAENNIQCFIINPKQFSNYAKALGEEVKNDINDARVLSKAIELAKDGQVKVPVYNEDVEHIKELMSFYKFTKKQTVQQKNHLESLTSKDGDKFSIKELKKSIKESQAKELRIIEQVQTLIDSTDEYRLAYKNITSIKGVGQIAGIVLLHLFLKYPDANQRQITSLTGLNPIYRQSGSSIQSGYKISKSGTSLYRSIIFMSVLTAVQHDENFKVFYERLKEKGKHTTSAQIAVMRKIILTAHSLYKNNRMYDVNFNSQEASEM

SEQ ID NO: 219869 - protein, 346 aa, unidentified
MEQYVGLDVSLKLTAICIVDRTGKIEREGVVASDPETIAAFVKSHAPHVARLGLEAGATSTWLWTELNKMELPVICIDARHAKAALKMQINKSDRNDAVGIARIMQCGWYKEVRVKGLDSHAIKALLVSRALLVKIKRDIENQIRGLLKNLGLVIGRAKMNVFALRAAELAEARSELAAAVYPLLKAREAVEQQILDLDRKVLRLARNNALVRRFMTAPGVGPVTALCFLATIDDPARFKRSRSVGAYAGLTTRRYASGEVDWTGRISKCGDAMLRSYLYEAANVLPTRVAKWSTLKAWGIRLAKRSGLRKAKVAVARKLAVILHRMWIEGTEFKWSSKEAANQPA

SEQ ID NO: 219870 - protein, 431 aa, unidentified
MTERVSVVTTLLQVGIDPGPKECVGQAVDQYGVVCGKPIRFRPNREGVERLVARTIALAPEAERRFYVEASGSHWYGLVGWLRAHKEPVSLISPSYTKAQRRVSSRYAKSDARDAEALARAAFQMGERAQHPADLPEGPRLNLRLLCRHRYRLQRDATAIKLRLLGWLGFTTPGLAEWLGGDFSPADRALIARYPVVAKVVRRGKARVREFLECHAKGAVDEATLDALFELARQAYSPRDLDDALVAEQFRMELQRLALNEKLIRELDVRIAQVLPRCDPHGWARSLPGFGAVIAPILVAEAGTDLSRFANPHRFAAWAGVVGRAHGSAGRQTEGLPITKAGRGIVKAALFLAANVARQHDPHLRTVYENLRAKGKHHNQAVIAVARRLAELYWYIMTEQRPYESQPPPPPSDPTGQPLPPSGTLPPPDGG

SEQ ID NO: 219871 - protein, 411 aa, unidentified
MTRLFCGIDWAESHHDIALVDDDGDQVAKLRISDDYPGLCALLELLARHGDSPDAPIPVAIETPRGLLVAALRATGRKVYAINPLAAARYRDRGSVSRAKSDAADARILANILRTDIKAHRPLPTDSELGQAVAVLARAHQDAIWDKGQLVNRLRSHLREYFPAALLAFHGSGKLGLDSAYARAILTSAPTPAAAAKLTRGQLRALLNRAGRLRRSVDEEVERLRELFRSEQMRQLPLVEKAMGNQTTALLRQLDAACTSSDVLSNATAEAFLSHPDAQIITSMPGLSVMSGARVLAEIGDDPTRFADARAVKAYAGAAPVTRASGRSHIVVARTVKNRRLAAVGYMWAFAALRSSEPRAHYDRRRDGGERHTPALRNLFNKLLGCLYHCLRNRTLYDAEKAFPERLTLAA

SEQ ID NO: 219872 - protein, 343 aa, unidentified
MEYYVGLDVSLKQTSICVVDQTGSVVREGVVDSDPEAISVYLRSKAPDAVRVGLETGPTSTWLWTELKRLGLPVVCIDARHAKAVLKMQINKSDRNDAIGIARIMQTGWFKEVHVKDIDSHSVRALLASRALLVKIKRDLENHVRGLLKNLGLVIGRAKFNVFAVRAEELIEGRPELIAAIRPLLEARNAVGQQVSELDRKVMKLARHDAQVRRFMTAPGVGPITALAFKATIDDPARFARSRSVGAYIGLTSRRHASGEVDWTGRISKFGDAMLRSYLFEAAGVLLTRVPKWSAVKAWGVRLAKRNGLRKAKVAVARKLAVILHRMWIDGTEFNWSKKEIAA

SEQ ID NO: 219873 - protein, 340 aa, unidentified
MSEITTIGLDLAKHVFQVHGIDAQGTTVLRKRLRRGQVLAFFSRIPRCVVGLEACATAHYWGRELGALGHEVRLMPAQYVKAYIKRNKHDAADAEAICEAVGRPTMRFVPVKTAEQQATALLHRGREQLVRQRTMLVNALRAHLAEFGMVAAQGLRNVGELIAIVRDDGDTRLPDMARQVLQVLANQIEQIETAITALERQLLAWHKTNPVSQRLASIPGIGPIIATAIATTVADPKVFRSGREFAAWLGLVPRQNSTGGKTRLGGITKRGNRYLRRLLINGASANLLRSKATNADPWVIGLRRRRPSLVVAVALANKTARIAWAAMHRHENYQRVAAAA

SEQ ID NO: 219874 - protein, 324 aa, unidentified
MIDGILGIDVCKNTLDVSISSYTKVRTKSFTNSPDGWRHLLDWLIAQKIQRVHACLESTGRYSLGIACALYEADHVVSIINPAQIRDFVRTKLGRNKTDGVDASHIREYCELFKPSPWAPPSEAHRRLGELQTIRSGIIAGLTEWKNRKNSGIVDAEAQALADATILHFTSQIGAVDKAIALAIENDADLRSKRDLLLSISGVGDTLAGIVLAELPGPDVLHSSGEVVAYAGLNPRQHQSGTSVDRATRISKIGNAVLRAALYMPALSAMRYNPAIVALVTRLKSRGRLKPKQIVVAAMRKLLVLCFGVLKTGKPFDAAIAMGC

SEQ ID NO: 219875 - protein, 401 aa, unidentified
MAPPRARSWVGVDIGKTHHWVSVVDANGVALLSVKVMNDEAEILALISAVGELAEQAIWAVDIIGAPSALLLALLAQAGQSVRYASGRVVAAMSSAYTGEGKTDAKDAYVIAETARIRRDLVVIDREADLVRNLAVLTGHRADLIADRVRMINRLRDLMTSVFPSLERTFDYAACKGALVLLTGYASPPRIRRVGKTRLAAWLRQRKVRNAVGVAARAVTAARAQMTVLPGQDLAASIIAELATNILALDERLKSLDAQIAEAFNQHPQAAIIQSMPGFGPFLGASLLVGAGDLRAFLTPGHLAAAAGLVPVPNDSGRRSGNLHRPKRYSRPLRHVFYLSAQTSMMRPGPNRDYYLKKREHGRTHSQAVIALARRRVDVLWALLRENRTWVTTPPALSQAA

SEQ ID NO: 219876 - protein, 452 aa, unidentified
MSKQRNKAVSLPVIEPNAAGIDVGATEIFVAVPADRDPEPIRCFPTFTVDLERLADWLQQCRIRTVAMDSTGVYWIPLFQILEKRKIDVRLVNTHHVKNVPGRKTDVSDCQWIQHLHSVGLLRGSFRPGDEICAIRSLWRHRDNLTQLATLHLQHMQKALDQLNLQIHHVISDLDGTTGLAIMDAILAGERDPHKLAQLRHPRVRASEETIMKSLVGDYREEHLFTLRQSLKAYRYYQELIQEVDAQAKQMMQRLPSKVAEGEEPPQGSKRRARKTPWRNEPPQLREDLYRAFGVDLTEVPGVNSLTVQMLLTEIGPNLDRFPTAAAFCSWLRLCPDPKISGGQVLSSRTRRPTKNRAALALRVATQALHRSDSFLGDYFRRMKARMGTPKAMTATAHKLARIIYHMVTTQQPYDTTIFQKQEERRQHQKSARLHAQARELGFQLVPINFVP

SEQ ID NO: 219877 - protein, 422 aa, unidentified
MLEKLQDEQEIIARVAALDIGKAELVCCVRVPDPKSGSQRVQEVTTYSTMTRSLQLMADRLLDLGVTRVVMEATSDYWKPPFYLLEAHGFQTWLVNAKDVKHLPGRPKTDRLDAVWLCKVAERQMLRPSFVPPVPIRRLRDLTRYRIALVSDQGREKNRVEKLLEDAQIKLSVVASDIFGRSGRDMMTALIAGERNPQVLAQLARASMRTKIPQLEEAFVGYFTEHHRFLLAKMLTRIDALDADIADVETQIDAQIAPFAPAVARLDEIPGVGATAAAVIIAEVGVDMTRFPTPAHLASWARFAPGVKESAGRKKGTGATGHGDRYLARVLGEAAVAASRTNTFLGARYRRIARRRGKKKAVVAVGRSILVIVWYLLQDDTARFNDLGPGYYDSRINPEHKRRNHIRELEALGYHVTLQPVA

SEQ ID NO: 219878 - protein, 348 aa, unidentified
MVYFAGLDVSVKTTSVCVIDDAGKVVLEQRVPTEPADIIAVLTSLGVSFGRIGIEAGPLSQWLVNELMAADLPVICVETRHMKALLTAQQISKTNRNDARGIAQMMRVGLFKPVHVKTLVAQEQRMLLTSRKLLQRKLLDVESDLRGTLRNFGLKVGVVGGSRYEVRVRELVEGFPRLAAIVEPMLSVRQVMRQQLAVLHKMLLDTVRGDPMCRRLMTAPGVGAVVALTYRATVDQPQRFIHSRAVGAHVGLTPKRYQSGETDYEGGVSKCGDALLRTMLYEAAHALLTRGGKWSWLKAWGVRVAQRRGMRRAIVAVARRLAVVLHRMWVDGSEFRWSKDSTGVPAVA

SEQ ID NO: 219879 - protein, 429 aa, unidentified
MEEVDDAELVVERVAALDLGKAGLEACVRVPHPQRPGRRMQELRGYGTTTAQLLEMVAWLRQWRVQRVVMESTSTYWKGVYYLLEAEEFDCWLVNAREVKNVPGRAKTDRADAVWLAKVAERGMCRPSLVHPPEIRRLRDLTRYRRALVQDRTREQQRVEKLLEDAQIKISAVLSNLHGVTGRAMMDALIVGERDPRTLAQLAKGQARKKTGALEEALRGFFTDHHATILQMMLDNTDRISAQIAALDARIEEAIDPFSDQAARLAEIPGVDAVAAAELIAEIGVDMTRFPSAAHLVSWAKFCPQTHQSAGKSKAKGRGKGNPWLAGTLGRIAFANSRSDTFLGTRYRRLARRRGGQKAIVATGNSILTVVYHLLSDPDASFIDLGPGYYESRINKHRRARDLAIQLQALTDQHIVIRDGKAVITDTAA

SEQ ID NO: 219880 - protein, 429 aa, unidentified
MNFRPMAGIDVGKFFSEMAILSPSNEVIARMKIRHDSSSDVERAVKLLKKTEKDFDSRPFVVMESTGHYHKILFHSLCKAGFEVSIINPIQTDSIKNIGIRKVKNDKVDARKIALLYRFQELKTTNIPDEDIECLRSLCRQYYKLSDELTAYKNRLTGIVDQLMLNFKDVFPNIFSKAALAVLEKYPTPAHILKANRNKLIALIQKNSRRSLKWSTAKYNLLVSKAREFAPLTVHNSSNVAMLGVYISMIRTLEDNLAKVLKTIHLLIAEDMAKDMPMLALTLELLQSLPGIGLLTAATILAEIGDFSAFSKPGKLVAYFGIDPSVMQSGEFTGTRNKMSKRGSRLLRRVLFTTALANIRTKRNKEACNPVLLEFYKQKCQSKPKKVALGAVMRKIIIYIFAVLRDRKPYQLRSPQEHAQMLAAKHIAA

SEQ ID NO: 219881 - protein, 349 aa, unidentified
MQEYIAFDSHKHYTLMERMSAQTGQAVQRRIEHHPGAIRAALAGCRAGTPVAVESIGSWYWIVDEIEQAGLRALLVHPRKAKLMMGMINKTDKLDVHGLNRLQQNRTLPTVWIAPGDLRDLRELTRTRLVLTRQRNRLKNRLTSSLAKYGLCVEGFSDSFGPGARRQWPKVLARLPEQTAWTCGQLLQQLDLVCRQIADHQKRLRERIDLTPGMRRLMSLPGIGPILAPTVFLEVGDVGRFRTAERFASYAGTTPRVHASGDKTRYGKLRPDVNRYLKWAFIEAGNTVGLHARSHPARHVSQLYWRIRHRKNHPKAVGAVARHLAEAAWWVLTKNEAYRDPASCLRGKA

SEQ ID NO: 219882 - protein, 328 aa, unidentified
MPHSIKDPHRVPPPEAPCCPNGSVVGIDISKDYFDACFEGQHRRYAYSLEGIEAFMSETARLGEARFVMEATGNYFYKLALALVEAGRKSYVVNAYRVRAFGKSRLQRHKNDKADARLIDDFAVANREAMMLWQPESQTIAALRQLRTVRRQLQKTATVYENQLHALLQLPESQQSQDALQICKQMIAHCQKQLNLIGKQMQALSDDELKKNDELLDTIAGIGRESALMLLILTGNFTKFRSAKAFADYIGIAPTHYESGTSVKGRGSISKMGDARARQVLYLAAMSAVRHNVACRVFYVRLRQTGRAHKHAVVAVANKLIRQAFAVI

SEQ ID NO: 219883 - protein, 360 aa, unidentified
MKKDIKTESGLTVGVDLGDRWSRYCVLDDQGQVLEEDTVATTGRALHKLFSDRAAARVVIEVGTHSPWVQRLLQELGHETITANPRYVRLIYCSRNKNDQLDAERLARLARVDPKLLHPIQHRGGTAQADRALLRSRDALVECRTKLINHARGIVKSIGGRLPSCSTSYFHKRVREDLPNELKPALTPVLDTIGTLTLKIRRLKARIERLASKRYPETGLLRQVSGVGPLTSLSFVLTLEDPERFKHSRAVGPYLGLRPRQSQSGEQDPELRITKAGDTDLRRLLVGSAHYILGPFGPDTDLRRWGLALAARGKKNAKKRAVVAVARKLAVLLHRLWVTAEVYEPLRNNKSMIVPEAVSA

SEQ ID NO: 219884 - protein, 344 aa, unidentified
MDHFAGLDVSVKETSVCVVDDAGKIVREVKVASEPEALLAVLKSPAYHFKRIGLEAGPLSQWLYSALAEAELPVVCVETRHMQALLKAQINKTDRNDARGIAQMMRVGLYRPVHVKTLRSQKLRMLLTHRKLLQSKAIAIENDLRGTLRNFGLKVGMVGNVKFEARIKELVENLPDLAVLVEPLLVVRRVLREQFVILHRRLLAIVRDDEVCRRLITTPGVGPVVALTYRATVDVPARFRKSKAVGAVFGLTCSKYQSGEIDRSGRISRCGDEMMRVMLYEAAQSMLHSKKWSWLKAWAMQIARRRGMKKAIVALARRLAVIMHRIWVDGTEFCWTREQATAAA

SEQ ID NO: 219885 - protein, 344 aa, unidentified
MNEHIIYVGLDVHKETISVALADGSKRGEVREHGQISNTPAALTRLSSKLSRPGGVLRFCYEAGPCGYGIQRQLTAAGHDCVVVAPSLIPRKPGDRIKTDRRDAINLAKLHRAGELTPVWVPDLAHEAIRDLVRARLAAVRSLWQARQQLSGFLLRHGFHYNRPAWTQMHRRWLAGLRFEQPAHHIVLEDCMATIEAATTRRDRLTAQIETMLADWALAPVVHALQALRGMALVTAATVIAELGDITRFENPRQLMAYLGLVPSEHSSGGTRRQGGVTKAGNGTARRMLVEAAWSYRFPARISREQLLRQERLPKSIRDTAWKGQCDCVAVTANSPEPASRPPP

SEQ ID NO: 219886 - protein, 415 aa, unidentified
MVVEGEEVPVLFVGNDWAEAHHDIEIQDAEGRVLVRRRLVEGVDGLAALHGLVADQLGEEDEPDQVLVGIETDRGPWPQALIAAGYTVYPINPRQVARYRERHSTSGGKSDSKDAHVLAEIVRLDRAHHRPAAGDSEVAEAVRTAARAHQTMIWMRQRTVNQLRSTLREFYPAALVTFDDLADQDALAVLAVAPTPAQGSGLTQARVEKALRRGGRRRYVAARAAEIVAGLRAEQLPARAGLVPAYAASVAALVAVITTMVEQTQTLHEQVAADFGQHPDAEIYLSQPGLGPTLAPRVLAEFGDDPDRYADVRARKNYAGTAPITRASGKKTVVAARYVRNRRLADALHQQALCSLSGSAGARAYYDRQRDAGAGHHKALRALSNRLVGILHGCLKHRTTYNEAVAWTAPTQLAA

SEQ ID NO: 219887 - protein, 337 aa, unidentified
MTIIRVGLDTAKHVFQLHGVNESEQPVLRRRLGRKEVERFFAKLPPTAIGLEACGASHYWARVLRGLGHEVVLLPPQYIKPYVKRGKNDAIDAAAICEAMSRPGMRFVAVKSAEQQAALMLLKVRDLLVKQRTMLINAIRGHAAEFGLIAATGPVKVAELLQQAHSEAAGVPALARALLGVLSGQLEALEVKLKALEAWLMAWHKADPVSQCLATQPGIGPIGAVSFALKVTDPKGFRSGRHFAAWLGITPKEGSTGGRCRPGRISRQGDESLRRLLVLGATARIRFAKPGSASTWLVNLLARKPKKLAAVALANKMARILWAMMVRGETYRHPKEA

SEQ ID NO: 219888 - protein, 425 aa, unidentified
MLAVGIDWSEEFHLVALGRPAEGVFEVRRVEHSPRAVAALVERIAALEPDPAEVRVVIEARHGLLVERLLDAGYVVVPVNPDLIARRRGPAKKKDDAEDARIACLLALDRFERLRPLIPHGELAGELRAIARDDERATKDERRLLNRLRQDLLSVFPAALAIAGADLGAPVFLRALERWPSAEALRAVSREELVAFARSCRHGWPERFAERAAAALTADHFQPRPYLARAKADTIRLTASQLLAIGTQRRAWERRMGELLLGSPPRGRDRKPRPDEAGEGFPGGEIYLSFPGLGDRLAARVAGEIGDHPSQFESPNAFQCYAGKAPVTRRSGKSELVVSCRLAYNRHLGDAVQQWAFCSLRRSAWAREFYDQKRAQGKGHHAALRALGNRWLEVLWHCLQRSVLYNEATHVANRKRALEPLAHAA

SEQ ID NO: 219889 - protein, 421 aa, unidentified
MEAAHLQVKRRFILMDLLKTVFGIDVSSRKSNVCIMVNGQKVDDYAISNDMVGFNQLLDDLKQVTKPQIIFEATGVYSRRLQAFLDMHELRYVMMNPLEAKRKTKDDLHQNKTDKLDALYLAKLQSEHPQRLAYVQSKEYQELMANNRIYEQASHDLITNRNRLHKAIQLTFPEIEHLMVNPRGKNYWSIVLRFPHPDIVLETKEADIIDFLKGLSGIGKKRANDIMQSLIRLAKVACPAVKKDSAHIRGLEMAINNILSAEEACQTALKEMTKLAPKRDLEILTSIPGIGENTALRIISELGDIRRFNNPSQLNAFVGVDPQVYESGNLTAHLSISKRGTAIGRKVLYLAINQIQSAKKAGNPSHIADYYEKRKRSSETASHKKAAIASIHKLLRTIFALIKNDQLYSYDVAKHNQRLLS

SEQ ID NO: 219890 - protein, 412 aa, unidentified
MELLHRRCCGLDVHKETVVACLRLVSDGKVTTEVRTFQTTTADLLRLSEWLAANECTHVAMEATGVYWKPVWHILDDGEFALVLAKAAHVKNVPGRKTDVNDAMWLAELLAHGLIRASFVPDAQTQEMRNLLRTRKQLVREQSSHVLRVQKTLEDANIKLDSVLTDLMGKSGRAIIEALIAGETNPVKLAGLADRRVKASPEEFREALRGRVTKHHRFLLRLHLNQIDALDAAMATLDAQVEANLGPFRTAVELIGSIPGIKNLGAHVIVSEIGIDMSRFPSAAHLISWACICPRNDESAGKRRSNRVRKGGTWLKTTLVQCAWAAVKKKDSYLQAQFYRIKARRGPKKAIMAVVASILTAIYHMLKDGTMYKDLGRNHFDRRSSDQQKTRLVKRLADLGYAVEIKPLAATA

SEQ ID NO: 219891 - protein, 344 aa, unidentified
MNITTFGLDIAKNVMQVHWVDEQTGEVGRRALKRSQLAPFFARQAQCRIVLEACGSGHYWGRTLSALGHEVRLIHARHVRPFVRGNKNDAADAQAIWSAAQQPDMRWVPLKSEEQQAVLSLHRVRAQWIKVRTQTVNGLRGLLYEFGVLLPGGRQAGVKALGADRSEIDAKVPALMRGLIDGQLQLLRQIDERIAAIEGELQALERQLDSARRVRQIPGVGLLGATALAAVLGEDAKGYRNAREFAACLGLVPCHRGTGGKVAIGHLSKRGDPYLRTLLMHGARAVIFHAKVKSVWLEKLLARRPLNVVVAALANKMARTAWALIAHGREYQAGGFAKASSPNT

SEQ ID NO: 219892 - protein, 375 aa, unidentified
MATVRFVGLDVHAETITIAVAESGGEVRSLGTIPNRLEAVRHLVRKLGPPDQLRVCYEAGPTGYVLYWQLTGLGVPCDIVAPSLVPVKAGDRVKTDRRDAEKLARSYRAGDLTPVWVPDAAHEALRDLVRAREAAKKDQLRARHRLGKFLLRRGRQRPVHLKMAWTAGHLDWIRSLTFEAVAHRIVLADYLHEVDRVAARIAHLNHAILEAVQTAPPQMRAVIQALQALRGVAAVSAATIVAEVGQLSRFANSRQLMGYSGLVPSEYTSGPRRRMGAITKTGNAHLRRVVIEAAWAYRFGPAVRGPLRARHAGLDPAILEIAWRAQKRLHDRYRTLAATGKNKNQIITAIGRELLGFMWDIGRTTERQVPIVAIA

SEQ ID NO: 219893 - protein, 337 aa, unidentified
MDFVGIDLHKKTISLCVVDQERNVLDRRRFYCSEPERIVGFFEERGAFQAVVEATASYEWLVSLLEPLADRVVLAHPKKLRIIAESTRKSDKLDAQVLAEFLALDMIPEAYRPSKRERAHRILVRQRSYISRRVTSLRNKIRRILSNYNADREDLFTEAGLAYLSKAAVVEADRFVLDQLLEQWRMCTAHLKEMDKRLDAFAQEAPAEEGEAHAILDTIPGVGPVTIDVVLSELGNIRRFRSQKKVCAYAGLAPGQRESAGRTRGLRITKEGPRLLRWILVQAAWRLVDKTARWRSIFEGLVKRRGKKKAIVAVARRLLCVMVSMLQSGRKYRAAMV

SEQ ID NO: 219894 - protein, 462 aa, unidentified
MAERNDHETGESNRRQLQGLPVIRRNVAGVDLGSERHWVCAPTQDGSGREIASFGATTLELLRLAEWLKARQVESVAMESTGVYWIAPHEVLEAQGLQVLLVDTRQLARVPGRDKKTDPSDCEWIQRLHSCGLLRGSFRPEEAVCMLRTLVRDKANLVAESADWLRRMQKSLDQMNVRVHRAVSDIDGVTGMAILRAIAAGERDAQKLAQLRDRRCSKTEQQIAEQLTGHWREDHLFSLQQTLKMYDAVQERIAAYEQEILRQLGEMEGPRQRGQSAPPLNNANKANAIKKRGQEAKRQALYRMSGVDITQIDALGVETVEVVLSEYGPDLSRFPTEKEFVAHVTLAPRVPSSGGKPLKKKKRNSASTRVAAALRMAALSLRHSQTALGAYYRKLAQRLGGDVAVFATARKLATLIYRLLRWGQPYMDEGVEAYEKRYRQQRVKSLTAKAKDLGYELTALNT

SEQ ID NO: 219895 - protein, 350 aa, unidentified
METAYDGRQVVGMDLHRRRSVLVRMTEDGRRLGTARITNSPQELRREIARAGKAPKVVLEATYGWYWAADTLAAAGAEVHLAHPLGVKAFTYRRVKNDEKDAADLADLLRMGRLPQAWIAPAEIRELRELTRYRIKLVRARSSCKEQVHAVLAKLGIPVTCSDIFGVWGNTWLDGLSLGQPYAGKVASLRKLTSELSTEIAVLDAVIADLLAHHDGYHAIQALPGIGPVLAAVIVAEIGDIRRFSRPARLSSWAGLTPRHRESDLKVTRGHITKQGSPLLRWAVVEAIQHQPAGSPVRDVKDRIIARRGGQAKNIAKTAAARYLLTCVFYAMRDGHARSLAARTAAQDAA

SEQ ID NO: 219896 - protein, 297 aa, unidentified
MSEQYAGRQIVGMDLHRRRSVLVRMTDTGERLETVRISNDPDYLKAVMARAGEAPEVVLEAAYGWYWAADTLAELGANVHLAHPLGVKMFSYRRVKNDERDAADLADLLRMGRLPEAWIAPPATRELRGWVRHRAKLVGVRTGLKCQIHAVLAAAGVQVRMSDLFGLSGQQLLSSVRLAPESRARVDSLMRAITAVEFEIDMFARLVAGRLRADPGYTAIQAIPGVGPILAAVFVAEIGDITRFDRPQQLASWAGLTPKHHESDTTVHRGRITKMGCGGRRRGLRLRIGQSPRRSSW

SEQ ID NO: 219897 - protein, 425 aa, unidentified
MNLLILKGVPMALKIVYKICCGIDVHKTFVVACIASTNDKGVTSYESHRFSTYTSGLKTLLQWLLKRNCKDVCMESTGKYWIPVYNILENDCSIVLAHPKYVKAIRGKKTDKKDAKWIADLFKHDLVAGSFMPPADIRQLRDLMRYRFKLTCFQSSEKNRLQNCLTVSNIQLGNVVSDTFGKSAQAILDKLLENPADTSFDLEPLVYKSLKKKLPELRDAIDGYITPEQAGKLKVIKAHYESLESRKAELEELILALAAPYQQELAILQTAPGIRSDFTTIGIISEIGTNMEAFPSAKHLCSWAGLTPTNNESAGKKKSVRVSKAGCYIKPLLVQCANAVVTSKKHPEIRNRYLRLKKRRGHKKAIIAIARMLLTALYHMLKNGETYNAELYRKSDLPPVDREITVEQAIIIARNQGYKIKSATA

SEQ ID NO: 219898 - protein, 346 aa, unidentified
MAVTIVETRAITGGVDTHAGTHVAAALDPVGGLLGVQEFPVSAAGYARLLGWLGGFGTVCLAGIEGAGSYGAGLSRYVTAAGVRVVEAGRPGRQDRRRAGKSDPLDAVSAARAAQSGRARGAPKGRDGAAGAIRALMVAKRSARSERTPAINQARSLIVTGPDDLRARFARHSVAALVAELALLRPRPGDVVGYATRIALRELGRRRVPGSQLDRPGALIGPLITGHAPGLLALHGVGTDTAALLLVAAGDHPGRLRSEAAWAHPRAVAPIPASSGKTVRHRLNPGGDRQANHAMWRIVITRMSSHAPTRIYVERRTIKGLPKKEIMRCLKRYVAREVYPHLRAAG

SEQ ID NO: 219899 - protein, 407 aa, unidentified
MNEIGKRYIGLDVHKHYLIALGVNEDLQVVLPARRVELAHLEAWMKKTLTRQDEVVLEMTTNTWQLYDELVEYAGSVTVVHPPHVALITRSQVMNDKIAASILARLLAKGLLVGIWVPPQEVRELRGLVAQRQKMTRLATQAKNRLHAVIQRHHLKPPAGNPFGKSKNGWWQALPLGRLEKMNLQSDLETLQFAQKQQSRLQEEMTGFAAENEEIGRLLHLSGFGVITAVTVYAAIGDIRRFAEAKKLVGYAGLGTRVHDSGLTTRTGKITKAGRRDLRVALVEAAHVAANSHPHWKAELARLEPRLGYNKAIVAIARKLLVTVWHVLARKVADRFAESEKVSEKMLRFAYEVGKENRPGRQTAAQFARDRLDVLGIGQELTSIAWGSKKPIPLPPSGLKEKERRPK

SEQ ID NO: 219900 - protein, 366 aa, unidentified
MEAEKKSGTRYVGIDLGKRTYEVAIVGENGKVTKSNGKTYPAGRQALYRKLRAQDKVALEAGNMAFNMAKEIDKAVPGCRVYVLNASNLALIYGSMKKTDKEDALKLAHILEDCKEERLPVVPVPSDKEIHRRKLLSSYQRAQQSRNRKINQLHALFVSQGITTKVRSDLSTGDSRKEAIKELTGIEREEAEYLVEGLELCEKRMAILEKQMDESAKGDKEIEQLQSIPGVGPKTSFAFAAHVAVQRFENASQVSNYLGLVPRVYISGDTVKYGRITKRGNGYVRALLVQAAWSLVMSKKGGKLKERYKYMTEEKSISKKKAIVAIARRLAEEMYTLLRDGTRHEYRPFTPEKGKAKEIVELALSA

SEQ ID NO: 219901 - protein, 401 aa, unidentified
MLTSIMVNNSLIGKAGGGSASGAKPRAKRSAASRADTSGRREFDCVQVFKAVTKREPRRPRGISPNSRLNRRRPTRPASSHLQVREITMSEQVYVGIDVAKDTFCVAACPNVLETCLPNTPDGHRQLCQSLKPFTTALIVLEATGGYERPIAAELLNASLPVVVVNPRQVRDFARGMGQWAKTDPIDAQVLAKFAQIVKPTPKTHATPQTAELSELVRRRRQLNDLRTQESNRMGTILHPKVKKSIQKMIKTLDFQINEIDQLVREYIKTDDDFKNKDRILQSTPGVGPQTSAMLIANLPELGKLNRQEIAALAGLAPWDRSSGKYDGKAHIWGGRKDVRSVLYMAAFTASRFNPVIREFAGRLKQEGKAYKVVLTACMRKLLIILNTMIRNQTLWTPKIS

SEQ ID NO: 219902 - protein, 411 aa, unidentified
MRERGRQVFFVGVDWSEHHHDVCVLDADGRVLDTARVPDGIEGMARLHEILANHADEPDEVIIGIETDRGLLVGALVAAGYEVFAINPLSVDRYRDRHRTSGAKSDPGDAKVLADLVRTDRANHRPVAGDSELAEGLKLLARTHQSFVWERQRHVNRLRSALRESYPAALEAFGTDLASADAVAVLSMAPTPELGRRLPRSKIAAALRRAGRKRNVEARTIQIQIGLRSEQLRASASLERTYGVITSSLIGLVAGLNSQIEGLERDLHGAFEQHPDAEIILSLPGLGSTLGARVLGEFGDDRTRYVDARARRNYAGTSPITKASGTHRVVLARFARNQRLADACHRWAFSSLTASPGARALYDAQRVRGKTHNQALRALANRLVGILHRCLEHRTFYREDVAWPTRHADAA

SEQ ID NO: 219903 - protein, 400 aa, unidentified
MRAVFGIDVSKVSSEVAILVNGEKVHGYTISNDAIGFARLLGDLRTVHKPEIIFEATGVYSRRLQSFLDEHGYAYTRLNPLEAKKQLDSLRVRKTDQIDAEKLAQSQFVLNRKTTYVQEEVYQNLRDLSRFYQNLTEDIVRAKNRLHKALQVTFPELENILSIPTGEQYWNLVIAFPCKDFVLELSKDELSESIHQSTSKRISDKRVAYLAEKLIALANQSYCAVKKNSPMLEEVRYYTKELLRLSGQRQAVLDEMVELAQPLPEYDILLSIPGIAETTATSIIGELGDIRRFQSTNQINAFIGIDLRHYESGNFLAKEHITKRGNPYARKILFKCIHNIASASHTNPCHIADFYEKRKRQSQTTSTKPHTIASIHRLIRTMYYLIMHNKLYDYASTQNR

SEQ ID NO: 219904 - protein, 372 aa, unidentified
MKKKILYVGLDVHKKSIDVALANGRANGKVRSYGKIDGSLDALDKLIGKLQSKDCVLEFVYEAGPCGYPIYRHLESKGHKCCVVAPSMIPKRSGDRIKTDRRDAINLVRLYRAGELSCIYVPSEEDEAMRDLVRSRDDFKRFERKARQRLLAFLLRHGLEFAGKKNWTKTHMNWLAGLKLSHRSQQIVLQEYVDAVKDCTQRVERTTEQIRQLVPDRSRADLVKAYQALRGVSLIVAATVVAEIGDMGRFKNPKELMAYLGLVPSEHSSGSRLRRGSITKTGNSHVRRVLTEAAWTYRMRARKTTTIFKRQQGLPKSICEISWKAQTRLCTRYQRLFAKGKSKQTIIIAIARELSAFIWAIDKELQQKTTIR

SEQ ID NO: 219905 - protein, 340 aa, unidentified
MEEITRVAIDTSKSVFTLHGVDGAGRAVLRRNVRRQDLIRFFEKRAPLEVAMEACGGSHHWGRTLRALGHRVRLIPPQYVKPFVKRSKNDRNDAEAISEAASRPGMREVPVKSAEAQAEAMLLSVRELLMRQRTQLINALRGHATELGLVAAKGDKGLAELRAEVAADASLPPEAVEALSLLGGEIDRIAARLAKTDKALMARHRANAQSRRLAEIPGVGPVGALSFSLRVDASQFRSGRHFAAWLGLVPKQHTTGGKARLGRISRAGDERLRQLLVLGATAVIRHAKPGRPAASPWLLALLERKPRKLAAVALANKMARIIWAMLTRGESYRRTAPVAR

SEQ ID NO: 219906 - protein, 399 aa, unidentified
MFYCGIDIAKYKHEASAIDMSGKALSNSISFANDRQGCEKVLAIFEKSEITPDNIVIGMEATGHYWLSVYTFFIELGYTVKVINPIQSEAFRKMYIRQTKNDSKDSYIIAQIMRFGEYSATSLSEDNIIALKQLSRYRLALVDACGDCKRRVIALLDQVFPEYDKLFSDTFGKTSSELLLNCPTPEDMLAVSTRKLTNILNKASRGRFGKEKAEELKDAAKNTFGIAFAKDAFSFQIKQLMQQIIFTENQLSELEEQIANLLHETNQYITTITGIGDVLGAIIVSEIGDINRFERPNQLVAFAGLDVTVKQSGEFSGTKNRISKRGSPYLRRAIWLAAQRAAFCDPVLSEYYHSLKARGKHHLTAVGAVARKLCNIIFVILKENRPYFSTPPKKSQNLS

SEQ ID NO: 219907 - protein, 271 aa, unidentified
MSEKPACFVGIDVSKAHLDVGREGADEVERFANDEGGREQCVRRLKEWRPTLVVMEATGGLEGSLAALLVVKGVEVSIVNPRQVRDFAKATGVLAKTDAVDARVLARFAAAIRPEPRALKDEELMLLDAVLTRRRQILEMIVAERNRLAGNPPKKVARTIREHIDWLRRQLKHTNNDIDGQIRESPVWRDRVELMTTVTGVGQITAFTLLADLPELGLLDGRKISALSGVCPYNRDSGRRRGKRMIHGGRGTVRAALYMAALVASRHNPVI

SEQ ID NO: 219908 - protein, 366 aa, unidentified
MKKTSTVGAKGNMIFKGHKLTIGLDLGDRWSFYCVLDEAGKILLEQKVATTPEAMKQIFEKIPRGLMALETGTHSPWVSRLLRELGYQVIVAHAQKVQLITKSNRKDDRHDARTLARLARIDPELLGPVRHRSAQAQIHLTVIRARAELVRARTGLVNAARGLVKSYGQRLPKCGTQQVNRELAAGLKAELREVLEPLLQEVESLNERIQEYEVRMEKIAQESYPHVELLKQVKGVGTQIALTYVLTLEDPHRFAKSREVGCFLGLRPGRRNSGESQPQMHISKEGDRYLRTMLVQGAHYILGPFGADSDLRRWGLKLAARGGKNAKKRAVVAVARKLAVLLHRLWVTGEVYEPLHNSHQAMRAVA

SEQ ID NO: 219909 - protein, 336 aa, unidentified
MMYVGLDVHKLVCYGTVMTHDGEVVKRAKFSNDPEGLEEFMEGLHETQVAMEAGYCWQPLYGWLEEAGHDVRLAHPKEVKALAKKKTDKTDSETLAHLLRSDLLPESYVPPRDIRELRDRVRRRAFLVGMRTKIKNRIHAELVKRGIRLGVPPWTRQGRELLRGLGLEAVDQVQPVMVVLDRQILEISRGLKRTCGEDPRARLLTTIPGVGYYIALLIVSEIGDISRFPDSESLCSYAGLVPEVWQSGDSTHHGGVTREGSGWLRWALTQAVHAHLRRETNLTRFYRRLAGKKPMQVAVMATARKMLKVVYWMLRNNEPYHPGPGVVDPVHRHREI

SEQ ID NO: 219910 - protein, 356 aa, unidentified
MVMVLGVDVHKDTHTVVAVDEVGRADGERTVRATDTGHRQLLDWARRQVPQDRMWAVEDCRHVSTRLERALLAAGETVVRVPPKLMAGARSSARTRGKSDPIDALAIARAALREPDLPLARHDDTSRTLKLLVDHRDDLVIERTKMANRLRWHLHELDPELDIPARGLNRLNLLARLITWLAEQSRPDRLGQVLARLAAELLTDIRAATVRINALEREINTLARQAASRLMTLPGAGGLTTAKIVGETANITRFRSEACFAMHAGVAPIPASSGRTQRHRLARGGNRQLNAALHRIAITQVRITASPGQLYYQRRRAQGDTAMEALRALKRRLARVVFNLLQADTTIAINDLSTAA

SEQ ID NO: 219911 - protein, 381 aa, unidentified
MTTAVTHKTNVHTTEATLFVAFELSEKTWKLGFTIGHGQKPRERNVTARQQERVLDEISLAKHRLGLPETAPVVSCYEAGREGFWLHRFLLAHGITNHVVDSSAIEVSRRQRRAKSDGLDVRKLLSMLIRYEQGEHQVWQVVKVPSVEAEDQRHLHRDLETLKRERASTTTRIQGLLSSQGIQVSTLAKLPEQLDTLRLWDGTAIPPGLRRRVLRVYAHHTFLNEQIAAIEAERRAQLQTSSEASIDQIRQLMMLKGIGINGSWLLVMEFFGWRAFKNRREVGGLAGLTPTPYQSGESAREQGITKSGNPHVRWMITELAWSWLRFQPESALSVWFRERFGDGGKRLRRIGIVAVSRKLLIALWRFLETGVLPEGAVLKEG

SEQ ID NO: 219912 - protein, 352 aa, unidentified
MALPTLPHPQVLVTLGVDTHADSHVAVALDQAGRPLGTRTISTTPGGYAALLGWARRFGTVDRIGVEGTGSYGAGLARWLRAHGQLVIEVDRPDRAARRRQGKADHLDAHAAARAVQAGTATGQPKAGDGTVEMIRSLRLARRSAVKARTQAANQLKALLVTAPDVLRAQLRCLPPAELVTTAARLRAATKPATPTDAAKLALRSIARRWRQLTQEITALDTQLERLVAMAAPALVAVKGVGTETAAVLLVAAGDNPERLRSEAAFAHLCGVAPIPASSGKTTRHRLNRGGNREANWALYLIAVGRMAWHRPTRVYVQRRTKEGKTTAEIIRCLKRYIARELYGVLVSRPAA

SEQ ID NO: 219913 - protein, 307 aa, unidentified
MRFYTKQHPLYCGIALHARPMYLCVLHQEGEILVHRNMPAGPESFLKAVAPYRDGLVVGVECLFTWYWLADLCAREGIPFVLGPALYMKAIHGGKAKNDKIDAQKIAVLLRGGMLPQAYVYPAEMRATRDLRRRRMHLTRKRAELLTHVQQTNWQYHVPEIGKKMAYKANRAGVAERFPEPAVQKSIEVALARIDYDDHLRRDLELTMVQTAKQHDAKTLSLLQTVPGIGKILSLVLLYAMHAIARCPRVQDFVSYCRLVKCAKESAGKHYGTSGTKIGNAYLTWAFSEAAVLFLRHNPAGQKYLAR

SEQ ID NO: 219914 - protein, 387 aa, unidentified
MPQPNDLSRSLVALDQDSTIIAVVEMSQSSWLVAGVLPGVERQPRKKLEPSAERLLGLLHRWRDEAVRAGKKITRIALAFEAGRDGVWLARWLSARGVEAHVIHPSSVAVSREHRRAKTDRLDTEMLKRGFLGWLRGERGHCSMSRVPTIAEEDAKRPNRERECLVGERTRIINRMKATLARLGIRNFKPTLRKAAERLATLRTPESTPLPPNVLAELQRDMARLGFVVSQIREIEQARQKRLEQETETGPHAMVRQVARVIGIGIETADMLVHEVLSRPMRDRKAVARYAGLTGSPDESGARRREQGLARAGNARVRRGMIQLAWRFLRFQKQSALAQWYRARTADSRLGTRKTMIVALARKLLIALWRFVTTGETLEGVILRPAG

SEQ ID NO: 219915 - protein, 418 aa, unidentified
MKVVYPICCGVDVHKSFLVATIIKTEGIQPKYSKKRFSTFNNSILQFKQWLIKNNCFDACMESTGKYWVPVYNLLEDTIRVTVASPKWVKAVKGNKDDTKDSKWIGDLFRLGLVPGSYVPEKTIRILREYTRYRSKLVACKSSEKNRFQNSFTVCNVALDSVVSDMFGKSASLITDYLIKTDTFNAEYCKTLLQRSLKKKSDIVVESIDGYEISAAQKERMLMVRSHMEFVVNSLVTLDSMLDELVKPYEDFIALFCTIPGVDRQSAITIISEIGTDISQFSTSKRLCRWAGLTPGNNESAGKKKSVRITRAGVYLKPALVQVAHAAVKSKDSPYYKNKYERISKRRGKKRAIIAIARMILTAAFYMLKNGEVWNPSDLFKVDMPPVLREKQKQKAIDNAIKLLVSQGVIKLSDLPVA

SEQ ID NO: 219916 - protein, 343 aa, unidentified
MQTVTTIGFDIAKSVFQVHCVDAAGQVVIRRQLKRRHVLAFFQKLPPCLIGIEACASSHHWSRELQALGHSVRLMPPAYVKPYVKRQKNDATDAEAICEAVTRANMRFVPTKTPEQQSGLVLHRTRQLFIRQLTAVSNAIRAHLAEFGIVAPIGRNGVEELLLAVMDTNDNRVPEVARMCLAALGAQLRRFKEQILEFDRLITAWHRSNEMSKRLDDIPGVGPALATALVASVADPRAFRSGRDFSAWIGLVPKQHSSGGKDRLGSISKQGDRYLRSLFVIGALAVIRYAKIHGTKHRPWLTALLARRPTKIAAVALANKIARMAWAMMAKGERYKEPVALAA

SEQ ID NO: 219917 - protein, 427 aa, unidentified
MNYNRNKKLKQITPETLVVGIDIAKEKHVARAVDDRGYEFGKRLVFENNITGFERLLAWVSEKQQAYEKTHVILGCEPTGHYWFNLAYFAKAKEIPFVVVNPMHVKKAKELDDNSPSKTDTKDAHVIAQLITDGRYAVPNLQEGVYAELREGLKIRDQLSKDLQIITGRIDNWLDRYFPEFRRVFKDWDGKAAWYTLSHFPLPAEVTAISAEDLVREWKQVAQRGIGIKRAHTLRQAAERSIGLTVGTRMAKRALQSLLKQYEHLQESIASIDEEMEQLVKVIPGTEEMIAMKGVNVLTVATFFGEVGDIAHYEHPRQIQRLAGLSLTVHQSGKCKGQTHITKRGRRRLRKALYLVVRPLVVHNAAFKALHEYYTTRQEHPLKKQESLIALSCKLIRVFFAMAKKRYRFDGEKMLRDMPQFSIQEAA

SEQ ID NO: 219918 - protein, 429 aa, unidentified
MNISIAKAEVKTQQKLVVAMDVGKEKLTSYSPFVRDGMSLMLSDEIENRSNAIRGAFLDYRKLADMEGFSGVHVLCEPTGGYEKNLLRIARELGFSMAYVNGESVAKLHVVRQNDTGKTDELDPRIIHLAGMQGRQLAVRALPEAYEQLRTLNQIYEQEDKACVMAKNCLNHTLLELFPDLRLTPSQLFSATGSALIQEFGAHPGRIMEAGWPKFVCRMKKHVPKIKTKTLQQLSDDALVSNLHAGGPEVKDLLAGRVCELYSDWKRHQTRKETLKKQMTALYQPLPEYQRLKAISGVPDFLMARLIGETGPLDDYHSARRLLRMGGLNLRERKSGKYKGQNRISKKGRSLLRRVLFQITVLFLLKPGGLYHNYYITRRLSDKAGGTVGLKLTVAVMRHFLVAMHGIYRSTLPFSAERLFTSSAEYKAA

SEQ ID NO: 219919 - protein, 400 aa, unidentified
MNAVGIDVSKGKSMVAIMRPFGEVVATPFEIKHTEIELKKLVYILEKLPGETRIVMEHTGIYWQPIAKALHDAGLWVSVVNALLIHKYGNNSIRKGKTDKLDAVKIANYCLDHWLDLDRFTLIDPIRQELKTCHRQYDQYIKLKVNLKNNLITLLDGTFPGLNTLFKSAPRDVDGHEKWIDFAIKFWHRECVCGCTEKSFTNQYRKWCTKAGYRFNEAKAASIYAHAAAQVNTLPMSDAIKRLVILAASQLNTIIETLSVIQNEMLTLASKLPEFPVVMKMFGVGPVLGPQLIAEIGDVRRFHHKQSLVAFAGVDAPPCQSGTFESKNRHISKRGSPRLRKTLFQIMSTIIQHAPADNPVFQFLDRKRQEGKHYYVYMTAAANKFLRIYYGTVRAYLEDT

SEQ ID NO: 219920 - protein, 380 aa, unidentified
MNKIRFVGLDVHAETISVAIAEPGRCGEVRFLGTIPNRIESVKKIFKKIGSAEKLRVCYEAGPTGYALYWLLTEMGLECEVVAPTLVPVKAGDRVKTDRRDAEKLARSYRAGDLTPVWVPDAEHEALRDLMRARLAAKRDQLRAKHRLSKFLLRHGKRPEKGIRAWTKAYLNWVKTEVRFDQLAQLVTLDDYVHEVEHAQDRIDRLEQYIDDAIERMPEKMRAVVEALQALRGIAKISAATIVAELGEVSRFSKPRQLMGYSGAVSSEYSSGERTCRGSITKTGNAHLRRVVVEAAWSYRHRPCISYKLAARQKAASQQVKEIAWKAQHRLHRRYYRLLATGKTKQKVVTAVARELLGFIWDIGVTVEREHSNSKQTRAA

SEQ ID NO: 219921 - protein, 404 aa, unidentified
MYYVGIDVAKEKHYVCILDDTNEFTVKPFWIYSDVLGLRELLKRLADISLNNDDFIIGIESTGAFSENLYEYITDADYKVILLNSYQTAKYRDFSTMRKIKNDAIDAYVIAELLSSNKYKESHISSDDYHYLKVLGRLKRSLDDKIKTIKREISTVMATVNPEITLVFKNIFTKTALQIIKVYPTAVDLQKATPKKLTRLFRHIQGNNFNDEKAKYLIELSKSSIYAGRAHESRALMIKTNIKILELLSQEKLEIEAKINELIESGISKELDAPIENLKSIPGVADKTIAAILGECGDLRRFSSAKALIGYLGLYPTQYQSGNSMSVGRLAKRGIPIAKHALYMAAVSSVLHNDELRKIFRDKVSAGKSKKEALIIISKKLATIMYSIFKYNTPYNTKRVLISK

SEQ ID NO: 219922 - protein, 430 aa, unidentified
MIAAVIERCAGIDVGKKFIAVCVMTGPANGEARSEIRNFGTTVGELKQARAWITGEGCTDVIMESTGTYWKPVFNVLEGHVRVALANPQEVKARKGHKTDNKDAWWLGHLLRHAMVTPSFIPPRPQRELRDLTRRRRKLIQTASAEKNRVSKVLEDGNVKLGSVLSDVFGVSGQLMLEALLEGKADAARIASFAKARAKKKIPALMAALEEHSMTDHHRMMIGFSLEHMRFLEEQLAEIDEQIRKKIHAAGYTKQWELLRSLPAVQENAAAVLAEMGPEPAQFPSEKHLASWSGLCPGNNRSAGRSKSSHTNPGNRWLRAALTESAWAVSRMKDGHLREKFWRIASRGEPQRSRPIAVVAIGHDLLKLAYFVLQRGTPYEEKRGSAMSEDQRQRLIRHHIRRLGKLGIRLRPSSSSPGATKCIPGIAATS

SEQ ID NO: 219923 - protein, 467 aa, unidentified
MKHNQQRARSGKKSRGSISLLERIQPDAAGIDCGQNSHFVAVPTDRDPQPVREFRTFTADLHRLADWLAQCEVKTVALESTGVYWIPLYEILEQRGFEVLLVNARDVHNVRGRKSDVKDCEWLRELHSVGLLRASFRPAATIVPLRSLMRQRQTLVEEAATRIQRMQKALTEMNLKLHTVLSDLTGQTGLKIVRSILNGQRDPEQLAAHRDHHCHASHQEIVAALTGNYRAEHLFALRQNFAAYEFHLQQIAECDTAIEKLLAKLAEQQPPPSGPLSTPRRKRGSKHAPTFDIRTSLHRLTGGADLSQIHSIGPHAALQIVAEIGTDMRRWPTEKHFTSWLTLAPNNKVSGGRLLTSRTPPSANRAAVILRRCAMSLGRTSTALGAFYRRLAARTGKAKAITATARKLAVLVYRVLSGDLIYNDPGAAAYHQLNRARELKSLRKRAKLLGYQLVNHSTGEVLSIPVS

SEQ ID NO: 219924 - protein, 345 aa, unidentified
MGVDTHKDVHVAVALDELGGYLGTLSVPATKDGARRLMSWATGLGTFERAGVEGTGCYGAGLARFLRAEGIRVFEVVRPKRRDLRRAGKSDPIDAEAAARAVLAGTVVGEPKGTDGEVEMIRVLRMARRSALKARTQAANQLKALLVTAPEELREELRGLSTIKLVCRASRFRTGESLTGVMVATKFALRSVARRYRHLCEEISELDEQLGRLVAEAAPALVAVEGISTDTAASLLIAAGDNPERLTSESAFAHLCGVAPIPASSGKIVRHRLNRQGNRDANRALYVVALGRMSRDERTRTYVARRTAEGKSKKEIIRCLKRYIAREVYRILVSPLHTSTPISVP

SEQ ID NO: 219925 - protein, 389 aa, unidentified
MSQPNDLSRSLVALEQDKTLIAVIEMSQSNWLAAAIVPGVERQPLKKVDPDADVLLKLLHRWRGEAVQAGREIKRIAVAYEAGRDGIWLARWLRAHDIEAYVIHPSSVAVSREHRRAKTDRLDTELLMRAFLGWLRGEKRHCSMAAIPTIENEDARRPNRERESLVGERTRLVNRIKATLARFGLRTFKPTLRKAEEKLAGLRTAEQTSLPENTLAELRRSMARLRIVCEHIKQIEHERLRQLEATASVAKGPHAMVRLIARVIGVGIETADMLVNEILSRDLRDYKAVARYVGLTGSPDESGRKRREKGLARAGNARVRRGMIQLAWRFLMFQKDSALAQWYRERTANGRGDTRKTMIVALARKLLVALWRMVTSGEVPEGVLVRQTA

SEQ ID NO: 219926 - protein, 425 aa, unidentified
MVIVDEDERNLSVAVFCGIDWAEDHHDIALVDQDGTLLAKRRIGDDAAGFAALLQLLAEAGDNPNGPIPVAIETSHGLLVAGLRATGRPVFPINPMSVSRYRDRHSVARRKSDAGDALVLANILRTDLAAHRPLPADSELAQAIAVLARAQQNAVWARTDAHNTLRSLLRGFYPALLQAFAAKRGGLLRPEARALLAAAPTPRAAARLTVSQLRALLRRAGLQRGLDAEAARLQQVLRGDYLHHPALVEDAFGRQALALLRQLDIACANAEDLAAATAQRFAEHPDAAIITSMPGLAELTGARILAEIGDDRARFADARGLKAYAGSAPVTRASGKSTAVLHRRVKNQRLASVGYIWAFAALTASPGALAHYDRCKAAGDRHVAAQRNLFNRLLGCLHHCLHTRQTYDEATAFPTSSSTPAERAA

SEQ ID NO: 219927 - protein, 323 aa, unidentified
MQNKKAISVGIDVSKESLDVAVLFGDESNLIKPFDNSKQGLKILVGWLNQQGVTRSTPCVIESTGDFHLPSAITLTNNKFTVNVINPIITKQYQRATVRDAKTDKIDALRLARIGIMEQGLKPFIADLNGITARKLLSEISLLERMKQQYVANTNRFMKTKEALGLTVGCVSGKKLIKQLDQRITTLYREVQRLAPEQAKKFARQTPGLSERQMSVVAAALSGARFTDRDQVTAFVGLDIRKRESGTWKGRERISKRGNPFVRKILFQIGWSLKQHNPVYQDYYNKLHSEGKHYFTCILAVARKFLRFLFACYLNLNQTPTMA

SEQ ID NO: 219928 - protein, 399 aa, unidentified
MNAVGIDVSKGKSMVAVMHPFGKAVAAPFEVGHTESELKELARFLKSLPGETRVLMEYTGRYYEPIARYLHEAGVFVSVVNAILAHDYGNTIRRAKTDRKDATKLANMAIDRWLDLKEYIPEDEIRHTLKICNRQYSQYSKLKTMLKNNLIALLDQTFPDVNRLFTSPARKSDGHEKWVDFALKFWHAECVCGISVKQFKDKYERWCKRNGYHYTQAKAEEIYARACDNVGLLPMCESTKMLITQAIIQLQAIEESLATVQSEMQRLSSSLPEYDTVLSLYGVGRVLGSQLIAEIGNVCRFESKKSLIAFAGIDAPPYQSGTLNVQSRSISKRGSALLRKTLFQVMSVILQNAPADEPVYSYLDKKRSEGKPYKVYMIAAANKFLRIYYARTKLALVNT

SEQ ID NO: 219929 - protein, 321 aa, unidentified
MSLFHLGIDVAKAKLDCALRLPNGKFRSKVIANTDDGFAQLTNWLASHQATSSPVCMEATGIYWEAIAQYLVTAGLTVSVVNPAQIKAYGASRLTRSKTDAVDARLIADFCAERQPEPWQAPSQEEITLRALVLRLEALQTMRTQESHRLGVAREAVQDAIQQHLAWLDNAIQQWIKTIDEHIDQHPDLQQKRALLDSIPGIGERTSAIFLAFYADTDRFANSRQAAAFAGLDPRHYASGSSVRGKPRLSKIGHAFLRKALYMPAMVTLYKTTWGKNFKDRLAGAGKSPKLIIGAMMRKLVHVAFGVLISGKPFDPALHQA

SEQ ID NO: 219930 - protein, 356 aa, unidentified
MSHDVKYIGMDVHKEAVVIAVLNDSGKLVMETIVETKAGSIQQFIHGLRGELHVTWEEGTWAAWLYDLLQPEVQQVVVCNPRRNALLKEGSKSDKVDARKLADLLRTGMLRPVYHGENGLRTLRELARSYQTIGKDLTRVMNRLKAVYRGWGIPCGGTQVYAPRYREEWLNKLPQSGVRRRAELLYQQLDGLQTLRREVRPELLEESRKHKAAKLLRRILCIGPIRAARLIALMQTPHRFRSKRQLWTYSGLGIETHDSAQFRFVGGQLQRSKKPQQLRGLNRNHNHEMKEIFKSTATRASSGTGPFHDFYAALLAKGMKPEMARLTLARKNAAITLTLWKRGERFDAEQLKTQAA

SEQ ID NO: 219931 - protein, 306 aa, unidentified
MHSYVGIDISLNELVVHALPSEAHQVFPNTAEGLADLLAWLAPVSCQRITFEASGGYERDLLATLHQAGLPATRLSPQRPRALAQALGLKAKTDPIDARVLAIAAQLLPQEDTPPLQAQTELLREWLQLRTALVSERDSHRRRLRQMRHPQVRTQLQAWIQALQEQIDQVERQLQVSLAHCSNPLQQAPGLGPILRATLAARLPELGKLDRRKITALVGLAPYNRDSGKKAGQRRISGGRPDVRRVLYMATWAAIRAKSPLAQTYQRLVEAGKPKKLAVTACMRKYLTMLNAMKRDNAPWSPTAIP

SEQ ID NO: 219932 - protein, 406 aa, unidentified
MFYGGIDVAKYRHEICIVDESGNVILQIFVDNTRNGLDKLIHNLKRLEIEVSNVEFCLEATDHYWLSLYYHLTELGYKIHVINPIQSDALRNFYVRKTKTDRKDAHLLADIVRFGHISETKLASETVLKLQNLSRLRFEFVRQVGGLKNRVLGILDRIFPEYPQCFSNVFINTSRELLKSFTAPEDLAEADLSELTAFLNKHSRGRLGVDRAKQIQALAKGTFGINIALDTFTLELRLLVEQIEFIEEQISVIEEAIDQVMEEMRPSKDTAYRHVLETIPGIGPVLAASIIGEIGDINRFPNAKALVAYAGLDATVRSSGQFEGTRNRISKRGSPVLRHSIWLAAVSARRFNPEMKEFFEKKRSEGKHTLVATGAVARRMVHLIYSLWKDNRPFDPNYQWSPTNSR

SEQ ID NO: 219933 - protein, 421 aa, unidentified
MKVVYHNCCGVDVHKKFLVATIIKTTTSSLQPSYQKKRFSTFNNSILKFKQWLIENDCRYVCMESTGKYWIPVFKLLEDVMYVTIANPKWVKAVKGHKDDNKDSKWIGELFRHGFVKGSFIPPKPIRLLREFTRYRSKLTACRSAEKNRFQDALTVCNVALDCVVSDIFGKSSTSIIDYLLTQPDNSFTHEEISKRLFASLKNKSDQVIESIDGYQMAAPQKYRIRLIRAHVDYITSAINDIDAMINTLVAPYEDAIQLLCTIPGIERNSAITIISEIGTDMTQFPSSKQLCCWAGLTPGSNESAGKKKSVRIARAGVYLKPALVQCAHAAVRSTASPYYKMKYESILKRRGKKRAIIAIARMILTAVYQMLSTGETWNPSDLYKIDMPESLKEKQKEKAIKQAWKLLESEGKLPKSLEAS

SEQ ID NO: 219934 - protein, 434 aa, unidentified
MEQPTRFIGMDVHKDTIVVAVTAAGDVGKATPYGTFPNTAAALEKLVKRLRQAGSGPMKFCYEAGPCGYGVHRTLTRLGEDCMVVAPSMIPRKSGERQKNDERDAGSLAVLHRGGLLTAVWVPDAAHEAMRDLIRIRLAAVRAVRTARQQLSAFLLRHERIFPNGRQPWTKAHRGWLADQSFAQPAQQIVLEESIEAVRLGEQRRDRLEGYLRAQIPNWSLFPLVRNLSALRGLDTIASAGLAAAIGDPSRFASAPDFMAYVGLVPSEHSSGPKRRIGAITKTGDIHARTLLIEAAHSYRFPARVARHKLAAVDAVPEAVREIAWKAQTRLCQRYRHMMARGKLRQVVVTAIARELAGFVWSIACITSDPPAKSITVTMVSEEVCPPVPTGRSRTPPPPAAESRGRRARRPEPTRAASGLKRADGTIVHARPTG

SEQ ID NO: 219935 - protein, 400 aa, unidentified
MLSIGIDVSKGKSTVCGMKPGGEIVYAPFEVQHTREGMSELVLLLHNSGEEVRAVLESTGSYHCPVVAALLENGIFVSVVNSLRMKRFCSQSIRKVKTDRIDAMQIALYGLAYWQELQPTKLPEDTYRELQLLARQYYQMTSLLIKAKVDFNAICDQVLPGMQELMNDHAGRHKLSDFVLRYRHTTHILEMGETRFRKDYCKWAEKKGYRNHERMAALIFATAQNGIPVLPNAPSTQIVITEAIRVLHTVEASRDAILTQMQALAKTLPEYSLVREMPCIGDTLAPRLIAEIGDVRRFHSKRALIAYAGIDAPPYQSGKFCANNRHISKRGNRYLRKTGYEVMQSYVMHKPANDPIFTFIEKKRGEGKSGKLAMVAGLNKFLRIYYGKVTELYRGLPTIE

SEQ ID NO: 219936 - protein, 461 aa, unidentified
MTPKRSKSRHDRKMPMVHPNAAAIDIGATMHMAAVRADRAQEPVRSFGTFTADLHRLVDWFTECGVETVVMESTSVYWIPIFELLDARGFTVCLVNARDAKHVPGRKTDVSDAQWLQRLHSYGLLRASFRPKGQIAELRCYVRQRERLLEYAASHIQHMQKALTEMNLQLHHVVADITGATGLRMIRAILAGERDPEALAALRHYSCHSSAETIAKALTGSYRAEHLFALEQALALYDAYREKASACDVRIEAVLKELIIHRGRDHGAVPPPRRRHRTDQANALAFDVRAALFALLGKDITAIDGLGAYLSLKLIAECGDDLSSWPSAKHFTSWLGLAPSNKVSGGKMLSSRTRRSGGRAAALLRLAAVTLGRTDTALGAFYRRLSSRIGKAKAVTATARKVAVLFYNAVRHGMEYVDPGASSYETRYRTRVINNLHRRAKAFGFVLQPMEPNAGVAVSVS

SEQ ID NO: 219937 - protein, 362 aa, unidentified
MDYRIGCDAHKHYSQFAVMDDGGNLLAQRRVDHQPGAIRTFLENLPEGTPVALETVGNWYWIADEIEAAGCLPLLTHAAKAKVMMGNVNKTDKLDAKGLAKLLHLDSLPTVWLPPGEIRDERELHRTRMALSKLRTALKNRIHATLAKYGITSTEHSDIFVGTGRAWLETTLSHLPPQTERCVAQELEALDGLQNQIALLEQYIRERTALTPSIQLLKSLPGVGNILAIVIEREIGSIDRFDASGRLTSYAGLVPTVHASGGKTHFGHMRKPSNQYLKWAFIEAANVVVRHRHHPAWKVTYVCQIYDQVSQRKGHAVAVGAVARHLAEGAFWILKRQQTYRPPASRQASPKQVRGRAQLVST

SEQ ID NO: 219938 - protein, 359 aa, unidentified
MKVTTVGIDLAKNVFQIHAVDERGKVAVRKQLKRDQVAPFFAKLEPCLVGIEACASAHHWARKLQGFGHTVRLIAPQFVKPYVKANKNDAADAEAICEAVSRPSMRFVAVKTVAQQALLAMHRVRQGFIKARTAQGNQIRGLLGEYGLIIPQGIGNIAKRVPSLIEDATNELPGTFRLLIDRLLEHLKALDQQVTELEAQITVWHRENEASRRLEQIPGIGPITATALLATMGEAKNFSNGRQVAAWLGLVPRQCSTGGKATLLGMSKRGDSYLRTLLIHGARSMILALRRKTKPEGCCTSCSSDAMPTLPPSRSPTRTRASRGRYSPTIETTELTTSANRLKEENPPPDCSGNHDVMA

SEQ ID NO: 219939 - protein, 421 aa, unidentified
MRGLRAKRVRMVKEGTLIATVDIGITNNTGYCTTLDGRSTKPFSFDNTKEGFEKFWCMTIASKNRFGCDEVLVGYESTGPYAEPLVHYLANKQVKIVQVNPMHTKKMKEVNDNSPLKTDEKDPRVIADIIRLGHALSIVVPEGDAAYLRRLNNARERHVGEQTALLNQLQQLVFLIFPEFKTVLRNMKGKTAQYILKRYTLPERVGTLSKEALGEEMRKRSMGKFGIKDAESLIGLARETVGIKEGLGGIFIDIRHILMQLEAEVRFISEIEAEMGTTLERIPCSVRLLSIKGLGIVSVAGLIGEVGDFSKFSTQSEIMKLAGLDLYEISSGKRKGQRRISKRGRSLLRKILFYAAIQMIRKNGIMYEYYARLTGRGMERMRALIAVSRKLLRIIHAIVRDNRDYVGQYQTSERRVIKMAA

SEQ ID NO: 219940 - protein, 349 aa, unidentified
MTEQRRSYAGECVYVGVDVHKETYAVTCVCHKQIVKTATVQAEPTGLAASLLRWFPGATLYSAYEAGFSAFVLHRALTTAGITNIVVNPASIAVAANDKVKTDRRDSKKLAVDLADGRLRGIYIPTEEEELARLLPRTRAQLVEHRATLARQIKAKLHQFGLITPSSRRLLSHRYLREIASWTLPPELRASLKMLAEQWRFVTRQLLEMRRLLRDQAQAQEDIEKVYRSVPGIGEVVARTLATELGDMTRFANERALFSYTGLTPSEYSSGASVRRGHISRQGSSRVRHLLVETAWRALPRDGVLKEIFDRIAATRGKKRAIVAIARRLTGRIRACFRQGTTYAVGTYA

SEQ ID NO: 219941 - protein, 314 aa, unidentified
MTFHYEKCHIGIDVSKEKLDVFVLSEKKYLQFDNTTFGIKKLIKKVQSCSNPFVVMESTGGYEKPVAQALAIATLPVAVVNPRQIRDFAKALGKLAKTDRIDAKVIALFAQKVDPEVTVMGDENQQKLSEYAARRRQLIDMITMEKNRLDKASKEMKKSIQHIINLLEKELDKINESFEQSIQQNEAYARKDALLQSIKGVGSVVSAGIIADLPELGHLNAKKISALAGLAPMNHDSGKLRGKRAIRGGRSSIRRTLYMATLVATRHNATIRAFYQRLCAAGKLKKVALTACMHKLLTIMNSMIKYNQPWRLQD

SEQ ID NO: 219942 - protein, 382 aa, unidentified
MACKGAGKWLSSPALMKNTIVHDEGAAPLEVAVNKIKLSGSVIKIGLDVHARLYVAVAQYDQLLPKPARRLAPSEFVPWVRQLLRAGHVVHVVYEACGFGFGLYRELKALGVHCYVIAPRKLDEGYTRVKTDPRDATTLCQRLSRYVEGNTRELAVIRVPSEAEEQARHVSRQREQLVRHRQKLEAQGRSLLVSHSLPAPAHWWKNQTWSRLSKLLPSWICLRLEVHRPALLTLEQQISALSTELEAAAPADVPAGVGKLTTVVMTREICSWERFRNRRAISSYTGLCPGEHSSGTKRIPGSVTKRGNPRLRAALVECAWRMVRFQPNYAPVKKRLSVLAKGARATGAQRKKAIVAVARHLAVDLWRVHTGRNTAAQLGLTI

SEQ ID NO: 219943 - protein, 343 aa, unidentified
MQTITTIGFDIAKSVFQVHGVDSGGQVVIRRQLKRRYVLAFFQKLSPCLVGIEACASAHHWSRELQALGHTVRLIPPAYVKPYVKRQKNDAADAEAICEAVTRANMRFVPTKTPEQQSGLVLHRARHLFIRQQTAVINAIRAHLAEFGIVAPVGRHGVEELLNVVADPNDKRVPEMARACLLAFGAQLRGIKEQILEFDRLIRAWHRSNEMSMRLDEAPGVGPVLATALVAAVADPKSFRSGRNFSAWIGIVPKQHSSGGKNRLGNISKQGDRYLRGLFVAGALSVIRYAKIHGTKHRPWLTALLARRPTKVAAIALANKIARMVWAMMARGERYKEPVALAR

SEQ ID NO: 219944 - protein, 357 aa, unidentified
MKSKIKQLDFTGETIFTALDVHKKNWRVTIGSKEFELEHYTQNPNAKDLSRHLKKNYPGAKYMVAYEAGFCGFGIQRSLKEEGIDCIVVNAADIPTSNKEKRRKQDKIDSRKIYKRLAAGDLEAIYVPQTEMEHARSLVRERSRIVSDQTRCKNRIWSLLMFSSLSVDTDKPKQYWSRKFVESLKQLDCGSKPLREALDLAIDEYILIRQLLTKATKKVRELSNDKLFAEIQELLRSIPGIGLINAMVIHTEIQFICRFKTLDHLCSYAGIVPDSDSSGDKEKITGITHRSNNYLREAIIESSWTIVRKDPATLMLYKRYCARMDENKAIIKIARHLLNRIRFVWEKQTKYEIGIAA

SEQ ID NO: 219945 - protein, 391 aa, unidentified
MVCVGIDVAKDKHDCCILDSDGMVRADCFTIPNNMDGFKQLLQTIRNCTQKSDKIKVGLEATGHYSYNILGFLLDKDLAVYVMNPLHTNLYRKSLSLRKTKTDRVDARTIATMLLSDVDLKSYTDIAYHNEELKSLTRYRFDKVQECAKLKQSVSRLATILFPELEGLVSSIHGTSIYALLSEYPGAKQISEVHLTKLTNLLTTASKGRYGKEKAIQIREAARASIGSVMPAKSLELKHTIKLIQELASEIDEIEDSIQKIIDELNPPILSIPGMGVNSAAVILAEIGDFSNFSSPDKILAYAGCSPSTYQSGKLTNCYAHMEKRGSRYLRHALYNATKYVCYWNPVFAEYLAKKRAEGKHYNVALSHAMKKLVRLIYALQKSGKTYLTAA

SEQ ID NO: 219946 - protein, 312 aa, unidentified
MERIFVGIDIAKDQVDVHVRPTDERFQLSRDDAGLAGLVARLQPLGPRLVVLEATGGYEIPVAAVLASAGVPVAVVNPRQIRDYARATGQLAKTDALDARLMARFAEAVQPEVRPLPTPEAQALGALVTRRRQLVDMLGAERNRHHQARELRLQRRIATHIRWLTKALAEIETDLATHIRSSPIWRERDNLLRSVPGIGDITAYTLIADLPELGHLDRRKIAALVGDAPFNRESGHWRGRRMIAGGRPAVRSVLYMATLTAVRFNPAIAHFYQRLVAAGRPKKVALTAAMRKLLTILNAMLRDQRPWQPESA

SEQ ID NO: 219947 - protein, 406 aa, unidentified
MRDYIGVDWGNSEHAVWVEDEGGAKVMSRAVPHTAEAFAEWGRWVDERRAAGIELWAAIERPDGRIVDFLLDHGVLVFPLNPKALDRARDRFRMSGAKSDSFDARVAAGFLRTDHGHLQPLRPSSEAAQELKELTRDYTRQVRQQTRLLNQLTITLKEYYPRALEVCEELKSRWAQEFLRAYPTPDALQALTERQWQRWARTQRLSAERAAALWATIQRPQIAVPPHVVRGKARRLAVLLEQFVLTAGAVETYRQAVEDFFASMPTAKWAGSLPGGRSGTTVPAVWAELGDAPGRWQTAQHLQGHGGTVPVTEKSGKAHVVKFRFACNTHLRAAIHQLAFLSLRHSEWARVYYDRCRRRGHSHHHALRALAAKWLKIIFAMWTRQVPYDEQYHLASIARHQLRQPA

SEQ ID NO: 219948 - protein, 347 aa, unidentified
MVTLGADAHKRSHSLVAVDDMGRKLGAHTVPAASAGHLAALRWAQQWCRRRWAVEDCRHVTRGLERDLLSAGEVVLRVPPHAAAAGRSSLREHGKSDAIDALAVARTALREADLPEAHLDDHCREIKLLLDHREDLVGERTRIQNRLQWLLHELEPGFQVASGSLSRRPAIKRVETLLDGRHGVVAELARELTARTAQLNSRIDELEQQLAGMMPALSPGLLALPGCGVLTAAKLLGETADVRRFRSRAAFAMHNGTAPIPASSGNQQRHRLNRGGNRQLNAALHRIAVSQIRRAGRSHDYFQRRLAGGNTKREAYRALRRRLSDEVFRLMLTDQRAQVTGVQAPAA

SEQ ID NO: 219949 - protein, 371 aa, unidentified
MTSILYIGMDVHSTNYTLCAFSLNGQKAFGQTTINPDIDELLKYLTTIQERFGGKDCKLICGYEAGCLGYTLYHQLTYHKYECVILAPTTMPAPAKEIKTDKRDALKIAKCLAYGTYSPVYVPSDEDNAVKEYIRMRDDAQALLKQTKQQINALCLRHGHIFEGRSHWTPKHLKWLRSLKLDNPVVQETLAEYLVTYDQLADKMERFDKRIGEFARQDEYRERVNMLVCFKGIKVHTALSFVVEIGDFKRFPTAGQFASFLGLVPGEHSSGTSRHQSGITKAGNSHLRRILIESANCYSRVRLGRKCADLKQRQEGNPPEVIAYADRANDRLRRKYMRITTHSKANIAKAAVARELACFIWGMMNGKLAQT

SEQ ID NO: 219950 - protein, 338 aa, unidentified
MKLYGAIDLHSNNNVTVLIDEQDQVVYQKRLPNDLPLIAQQLSGYRDRLQGIVVESTYNWYWLVDGLMDQGHRVHLANTAAIQQYEGLKYTDDHSDARWLAHILRLGVLPQGYIYPKEERAVRDLLRKRSQMVRQRTANLLSLQNLITRNTGSSIRSNRIKTLDSETVDALLPNPDLALAVKANLAMIQCADGQIDILERTVTDRVKLRAEFSFLKTVPGIGQILALTIMLETGEIKRFPTVGDYASYCRCVGSQKLSNGKKKGSGNTKNGNKYLAWAFVEAANFAIRYNARIKSFYQRKKAKSHGVLAIKAVAHKLCRACYYIVRDQVPFDVAKAFA

SEQ ID NO: 219951 - protein, 393 aa, unidentified
MDEQVPRVVIGMDPHKRSVTIEVMTADESIIGGGRFGTDANGYGRLLAYARQWPQRIWAVEGCAGIGKHVADRLVADGEEVVDVPAKMSARVRIFATGQGRKTDATDAHSIALVGVRVSGLRPVVSDDQLEVLRMCVDRRRSLGEEHVRKVCQLHKLLLELIPGGAKTFLSAAQAKELLRKVRPATAAGKVRKAHAVELAQDLAKIYARTKAADKELKALVAETGSSLMDLHGIGPSGAARLLVEVGDITRFPDRNHFASWTGTAPIDASSGEHVRHRLSRGGNRQINRVLHVMAIVQLRTRTTEGRAYYDRKKADGKTSMEALRCLKRRLSDLVYKQMLDDLAGHTTTGPGGHLGNDSDSSATGSQPTAGSSDKPLPGPATTKPRTTLPAAS

SEQ ID NO: 219952 - protein, 336 aa, unidentified
MEAAQSFVGIDVSKLKLDIALLANGKVKSKVLDNSPAGHVSLLDWLAKSKVDMESMHFCMEATGVYYEALALALHEAGLKVSVVNPSCIKGFGRSENIRNKNDAIDAGLIARYCAAMKPGLWKPLPLEQRQLRAWSMRVQSLKDIRQQEENRREAHVVSGMLDVAAHVAEHVKWIDAQIAKLEKEIEDHIDRHPGLKHDSDLITSIPGIGAATVARILGHLGDIRRFKNAKAFAAFLGVTPKHQLSGTSVKGRSTICRTGSTSLRAALFMPSMVARRHNPILSQFAERLIAAGLPKKAVICAVMHKLTHLIYGVIRTGQPFDAKYLANKLAIQDGI

SEQ ID NO: 219953 - protein, 385 aa, unidentified
MTNTQYHSTIVPRDYDIFIGLDVDKKRMAVTCVDHGTLQKSLSLPYSGKQLLNYTAKHFPGQRVAFVYEAGPTGFGLHDELSAAQHPCLVVTPAMVPSAPRKRVKTNRLDSKKLALGLRGGDLQGIHVPTQSYRELRQLVQLRDTQAAQVRATKCRVKSLLLFEGIPFPEPHEKWTVAALQGLATLPCNATVRFKLDQLMEALQFHYQMAAKVQKEVRRFCNQDSELRQSVELLRTIPGVGTITATHAIARLGDWRLIKNERQIAGFLGLVSSEHSTGEKEKRGEITRIGDQRLRNKLIQCAWTAIKKDPELRAFYRRIYARHPPKVAARKAIVAVARKLTTRLYAVLKKQRPYEIRADLATAPLTVEETVGLRERLDMAQNDEL

SEQ ID NO: 219954 - protein, 412 aa, unidentified
MDEVVEFCAGLDVHRDTVVATVRFPQGRQRGSETKTFGTDTAELVALGDWLISHQVTRVGLESTGVYWKPVFYLLEDRIEQLWLLNAQHLKNVPGRKTDVVDSAWIAQLVEHGLVRPSFVPSPPIRELRDFTRHRRVLSEERTRMVQRLEKVLQDAGIKLTSVASTVLSKSARAMLEAMLAGESDPVVLAELAKGRMRSKIPALTDALRGSFRVCHHGVLVRQILAHVDFLDAQLAEIDEQITTRVATFEPIIERVQTIPGVARKCAIGMIAEIGVDMSVFATPAHLASWAGICPGNNASGGKARSGRTRHGPVALKTVLTEAAQAAARTKNTYLGARYHAIRGRRGTFKAVGAIRHDILIAYWHIVTADVGYQDLGVDWVARRRSREHQIARLAKQIEKLGAAVEITMPAA

SEQ ID NO: 219955 - protein, 343 aa, unidentified
MSEITVIGLDLAKHVFQVHGADPDGRPVLRRRLRRGQVLEFFATLSPCLIGMEACAGSHYWGRELQALGHEVRLIPPQYVKPYVKTNKNDAIDAEAISEALTRPTMRFTAVKSAEQQSVLMLHRTRELLVRQRTMLVNALRGHCGEFGIVAAQGLSRASDLIKRIEDPADTALPDLARQALQCLTSQIRAIQEQIALIEKKLLAWHSSCEASRRLAEIPGVGLITATAVVASVGNATQFRSARQFAAWLGLVPQQHSSGGKQRLGHISKRGDGYIRRLLVHGARAHLSWSRRKKQIRSDWLTGLLARRPTNVVLLAMANKTARIAWAMLSRGERYREMIAAAA

SEQ ID NO: 219956 - protein, 316 aa, unidentified
MKTNTNQNINIGVDTGKFQLDIYIRPLDIYFTVANNEKGIKEALKTIKKHTPERIIIEATGRLEMPFIMACAKADLPFVIANPIHIKRFAGAIGQRAKTDKLDAQLIAHYGEAIKPKLSTLKPDIMQDMSDLVARRNQLLVMQTMEKNRLQILPKSLAMTIKPVLTLFKHQIKNIEDKLVKLIESCPDYQAKNTILQSMKGIGKIAAASIISNLPELGYISCKQASALVGVAPMNRESGRYKGVRKIQGGRHQVRTVLYMAMMSAIQSNPVFKSHYQKLVAAGKPKKVAIIACIRKMVVILNSMLRDGVLWEAPKV

SEQ ID NO: 219957 - protein, 314 aa, unidentified
MEKITVGIDVSKDRLDVAVRPSGERFAVSRTGAGLADLVARLKVLKPNLIVLEATGGFETVVVAALAAASLPVAVANPAQIRAFAKAIGQRAKTDPIDAGVIAHFGEATGVTPRPLPDEATQQLADLVARRRQIVEMIGSEKQREKGANPRIKKSIGRLVKALERELSSVDTDIDDAVRGSPAWRDKEDLLSSVPCVGQVISRTLIAELPELGTLRHKQIAALVGVAPFTRQSGQWRGKSFIGGGRASVRTALFMGAMVARRHNPVLKAFYERLVAAGKPKKVALIAVARKLLIILNAIVRDGTPWKGTVAAVS

SEQ ID NO: 219958 - protein, 408 aa, unidentified
MQNDFQHFVGIDWGSEKHRVCLMDRAGKIIEERWVEHNGHGLTELVDWLRRQTLESPSVLAAAIEIPRGAIVETLLEHGFAVFSINPKQLDRFRDRYSPAGAKDDRRDAFVLADSLRTDMHCFHAVRLDEPAMIRLRELSRLEDEISQELNRATNRLREQLHRFFPQLLQLSESADEPWLWTLFEQAPFPARAAKLSEAKITRILDEHRIRRIRAAEVRATLKTKPLTLAPGAGEAAAEHALMLLPRLRLLHRQRTDLARRISTLLEELTAPAEGQSEHRDAAILLSLPGLGRKVAATMLSEASQAIAERDYHALRCYSGTAPITHQSGKKKVVIMRQGCNERLRNALYHWARVSVVCDPRSKKVYASMRARGHSHGRALRGMADRWLQVLISMLRNRTLYDVQRRAA

SEQ ID NO: 219959 - protein, 368 aa, unidentified
MNEHITIVGLDVHKATVVAAILPPTATRPTQTVTIENCPKAIERLVRRVAGEGRLVFVQEAGPCGYQVQRQMTEMGKKCVVVAPGLTPVRPGDRVKTDRRDAEKLARLYRAGELTEVHVPSCAEEAARDLVRIREDALEDRLRARHRLNKFLLRQGRVYRETKAWGVAHRAWLRRQRFEWQPLQQTFEGNLRAVEEAEARLESLDQQVRDLAQSGPYRMAVHYLRSLKGLETLGALTLAVETLDFGRFERAPAYMSLTGLVSSEHSSGGRERRGSITKAGNAHLRRILVEAAWSYRLKNTVSPALAERRRSCPPEVIQIARKAQDRLHRKFWRLVSRGKPSQVAAVAVARELAGFVWAIARQVPAAAT

SEQ ID NO: 219960 - protein, 337 aa, unidentified
MNPRSCDLPVLGNDVSKLTFDACLLQHDGSKAIAQFSNNAEGFARLDAWLQEHEAPKVLSGLEATGPYGVALLWHLHSRGHLTSQLNPRRIKDYGRSQGRRVKTDRTDAALIASYLKGSEALQLWEPPAQALSELQALVRRRQDLMGALQAERNRLEVSPNALIKASVKRQIKHLGSEVASMNQAIDDHLLAHGSLQKSVRPLRSIDGIGLMVAVTILAEVPATSAFARARDVAAFAGLTPGIKESGTSVRRRGRMSKEGSALLRKMLYMAALQSAKRPNNAFHKIYTAFLARGKAKMCALGAIMHKLMRVAFGVLKHQTPFVENFAKVGPKKSSHL

SEQ ID NO: 219961 - protein, 334 aa, unidentified
MEKITTVGIDLAKSVFSLHGVDGAGQVVLRRTVRRDQLVKVVAGIAPCLIGMEACSGAHEWSRRFQELGHTVRLMAPKFVAPYRKSGKNDGNDAEAICEAVTRPSMRFVPVKSLEQQALLAMHRVRQGFVVERTAIINRLRGLLCEFGVVLPLRSVTVRRQAAAAAENLPDLARRAIGDLLDELRVLDERIGGYDREIEAQAKLCEPAQRLMKIRGIGPTTALAIVATVGNAREFKNGRQFAAWIGLTPSQYSTGGKARLGHISKRGDAYLRNLLVQGARSVLNSAGMHPDRMSRWILELQPRRGYYRTLVAIANKNARIAWALLAKNETMRSA

SEQ ID NO: 219962 - protein, 357 aa, unidentified
MAYIGVDLHSDKFTAAFRDKRNEDTLKSYYIDRNEIDNFKRSLKKDDYIFIEASTPTFAFTDLLKDTVKKTIVIDPFKFRAIADSRKKTDKIDARQLAKMGKYHIEGDKKFLPEVYVVEKRIRKLRSLFTTYRLLNKEITMIKNRIHSLFKQNLKPYSKKHIFDEIMTGLEPIDLDEEYKIQVEVLFDVLSKLEEKKAEIKKKILLTGEPFLADIDILVSISGISVFVALGLISDYATIERFKNAKQFSKYLRSTPKSEESNKKARTGKTQKNGRKLSMELMLQSMNHFRRESPFIDGFYRRLKKGKGGCKARIAVTRKMFVAIYFMLKEREYYRYMNKRLHDKKILEYKRFLAKNK

SEQ ID NO: 219963 - protein, 355 aa, unidentified
MRILSLDLSKYKTVACEYEAETGRHQFATVLTTQKALHDLIVDREPDRVVIEICSIAGWVCDLVRSLGIEMQVASTNDERWQWRKVKRKNDRRDGLKLAQLSARNELDLVHVPQSEMRQWRALIAYRHHLVQRRTKIKNHVRELLLREGQLLPRHRSAWTQDGLAALEAMGKPLGEVPMDELWRGELKVELAQFKAVQKQLTEVVAKLDALGAANHNVRLLQTASGVGPRLAEAVVTMFDDPKRFRRGAAVSAYIGMVPKQWDSGETERLGKITRHGNRLVRSLLVEVAWCALRHNPWARETYQRISGGKKSRKKIAIVAVGRKLLVRCWAMLRDQSAWHWEGQSAVVTPPAPTA

SEQ ID NO: 219964 - protein, 319 aa, unidentified
MFVGVDVAKAELVVSLRPSAERFAVANDEPGIHTLLERLRPLAPQLIVLEATGGYELLCVAGLVAATLPVVVVNPRQVRDFAKATGQLAKTDRIDADLLALFAEKVRPAIRPLADAEAQELEALLARRRQLLEMLQAERNRLGQVFGQGKRPVRKSLKAHITYLERELRMTDTGLGEMVRRSPAWRERDDLLQSVPGVGRVVSLTLLAELPELGRLSRRAIAKLVGIAPLSRDSGTLRGRRFVQGGRASVRAVLYMGALVATQRNVLIRAFYLRLLKAGKPKKLALVACMRKLLTILNTMVRTRRPWCAEWNSADLVPA

SEQ ID NO: 219965 - protein, 343 aa, unidentified
MDYFAGLDVSVKDTSVCIVDGTGKIVREVKVASEPQALLAVLSNATYCFKRIGLEAGPLSQWLYGALAETGLPVICVETRHMRAVLKAQINKTDRNDARGMAQMMRVGLYRPVHVKTLRSQKLRMLLTHRKLVQSKAIALDNDLRGTLRNFGLKVGVVGTVKFEARVRELVENLPDVAELVEPLLIVRQVLREQLGILHRRLLAIVRDDDVCRRLMTIPGVGPVVALTYRATVDVPVRFRKSKSVGAVFGLTCAKYQSGEIDRTGAISRCGDEMVRTTLYEAAQILLVRSTKWSWLKAWAMQIARRRGMRRAIVALARRLAVIMHRIWVDGTEFRWTRKAAAA

SEQ ID NO: 219966 - protein, 454 aa, unidentified
MAMRKQEEEVFPNAAGIDVGASSHWVAVPRHLAEQAGCEPVREFGAMTDDLVALAQWLLSLGVDTVALESTGVYWIPVYEVLEQHGLTVWLVDARQLKYVPGRKSDVQDCQWLQKLMSLGLLRAAWRPGDDVCVVRAVARQREVLLTEQGTWVQRMQKALVQMNLQLTEVLSDVMGQTGQAIIRAIVAGERDPKVLARHRHSRVKASAEAITKALTGNWREEHLFVLGQALAMYDDIARHLVECDAKLRTLLAERSVHRVDLGKAPRAGAKARVEFDGRQALANWAGVDLTRINGLGVTVVMKLLSEIGPDLSRFATVKHFCSWLGLCPGTKISGGKVLSSGTKRSANRARQALKLAAMSLSHSDSALGAFYRRLCTRMDKPRANTAVAHKLARMVYFMLTRGEAFVDQGQQQYEAQQRQRSIAALKRRAAALGFQLHPVAVAPEPSRPQFGFS

SEQ ID NO: 219967 - protein, 348 aa, unidentified
MDHIIRIGMDTSKHVFQLHGVNAAEEPVLRRKLRRNDMVVFFERLAPTIIAIEAAGASHHWARLLRSFGHEVKLIAPQLVKPYVKRGKNDAADAEALCEAMSRPTMRFVPVKTAERQAALMLLGLRDRLVRNRTQLANAIRGYAAEFGLAAAKGIAHLAPLLARIQSDESLPGLARELFAAHAQEYAQLQAQIDEVEGKLMAWHKTNPGSRRLAQIPGIGPIGAAMLIMKTPAPEMFRSGRQFAAWIGLTPKDHSTAGKVRLGVITRAGDEGLRSTLVVGATAVIRHLRNGKGRSMLSAWVEQLLKRKPPKLAAVALANKLARIAWKLMVTGETYAAKPRPVASAGIA

SEQ ID NO: 219968 - protein, 338 aa, unidentified
MEREKHVWVGADISKETFFAAVDILDEEGGRKEVNSLPTKEFDLTEIGSDSFLKWLSESFPEYHFSIVMESTGCYSKKLSKFLHARQNDLPISILNGRQSSNYVKSLGLPHKTDKSDAQALARFGTERFPKPALAEDSDSEKLKELSRERSALLKAQAALENRSDSLFHAFTREINGHAIAALNLQIRAIEKEMERCIKANAELRHEAELMKTVPGVASTSAYGFLAELGSLKQYSSRKLSAMSGLLPHVFISGTSVNKTCLSKRGSSRVRQLLYLDCMTAVNKIPQLNSQYQNLVSRGKTKMTARCACMRKLLLIIRAVVVEDRPYEKISKKVTKTA

SEQ ID NO: 219969 - protein, 342 aa, unidentified
MNILVRIGMDTSKSVFQLHGVDENEVVVVRRQFRRAEMIRYFERLPPVLVAIESCGSSHHWARLLQSFGHEVKLIPPQYVKAYVKRGKNDAADAEALCEAVTRPSMRFVPVKSKERQAACMLMTVRERLVNVKSQLSNAFRSYAAEFGIVGPAGRQNVTALIKRVLEDTSLPEMARDLFRLQAEEYAAIEARLAKIEAKLMKWHREDDVSRRIATIPGVGPIGSSMLSMKAPPPETFRSGRDFAAWLGLTPKDHSTGGRQRHGGITKAGDSVLRSTLIVGATALLRHVRNGRHKPTPWLASLLERKPPKLVAVALANKFARIAWRLMISGGVYNRPVAVMPV

SEQ ID NO: 219970 - protein, 389 aa, unidentified
MPQANDLSRSLTALDENSTLIAVIERSQARWLVSAIVPGVERRPSKKLETSEELLLALLHRWRAEAVKAGRSINRIAVAFEAGRDGFWLARWLRARGVEAHVIHATSIAVSREHRRAKTDRLDAALLQRAFLGWLRGERGHCSMVTIPSFEEEDAKRPSRERESLVGERTRIGNRIKATLARLGIRGFKPAVRRAAERLALLRTAEGMPLPPNTLAELNRDLTRLRFVSDQIAEIEAARLERLRKEPDRYCHPMILLLARVIGVGIETADMLVQEVLSRKLRDRRAVARYGGLTGSPAESGARRREKGLARAGNARVRRGMLQLAWRFLMFQKDSALAQWYRARTTDARGATRKTMIVALARKLLIALWRLVTTGEVPHGVVLRPAAAA

SEQ ID NO: 219971 - protein, 413 aa, unidentified
MELLYPCCCGLDVHRDTVVACLIRPSTEGQRTKEIRTFGTTTGELLALVDWLAPAGCTHVAMESTGVYWRPVYNLLEGRFQLLVANAAHIKAVPGRKTDVKDAEWIADLLQHGLLRASFIPSREQRELRDLTRTRTTLRDERSAAVNRLHKVLQDANIKLAGVATDVMGVSGRAILQAILSGTTDPATLAELAKGKLRKKRDKLEQALTGRVNAHHRLLITVHLELIDSLDEAIERLSQQIAEKLRPVEGELARLDTIPGVGQHTAEVLAAEIGLDMAQFPTAGHLASWAGMCPGNHESAGKHKGGKTRRGSKWLRRALIEAACAAGRARRTYLGGQYRRLVVRRGKKRAVVAVGHSILVIAYHLLKNHDTYRDLGPTYLDERRRARAQQRAIEQLQVLGYQVTITPKEVVAA

SEQ ID NO: 219972 - protein, 363 aa, unidentified
MNFIGVDLHKKSITICVLNENLKVLARKTVFCDQTDQIVEFFRPFGPFKVVVEATASYLWFVELVEPLAEEVVLANPKKLRVIAESTKKTDRLDAQVLAEFLARDQIRRAYMPTPRQRQHRRLVRHRQYLRQRMTSVRCKIRHILSDYNADRKDLFSTQCGPAYFKEIALSDADRFVIKQLWSEWQDHQSRILALTKKIKAFIVKAPNREKETRAILKTAPGVGFVTAEVIVSEVGDVSRFRNAKAICAYAGLVPTVRQTGGKKSKDLRITKEGSGLLRWALVESAWRLVKTSPKWSAFFSQLRKRSGSKRAIVAVARKLLCVLYAMLKTSTPYKIVATETKAPKPTRRRLVRKSSPKETVTT

SEQ ID NO: 219973 - protein, 349 aa, unidentified
MASMPDAERLVTVGIDSHKDIHVAAAVDQVGRIVGTTAAPTTVRGYAQLERWARGLGPVERFGVEGTGSYAAGLARWLVGRGYRVVEVNRPDRQKRRRRGKSDPVDAEAAARAALAGEDVATPKAANGTVEMVRALRVARRSAVKARTQAANQLDSLVVTAPDELRCQLRGLAPDRLVEVAAALRPAELTCPVAATKLALRELARRHQALGAEIDRLDTELAKLAPKVAPALLARRGVGTQVAGALLITAGDNPGRLRSEAAFAMLCGSSPIQASSGKTVRHRLNRGGDRQANNALWVIATCRMACDQRTKDYVERRTKEGKSKKEIIRCLKRYIAREVYRDLRAAVAP

SEQ ID NO: 219974 - protein, 411 aa, unidentified
MHNRQNYLYVGVDLHKEHHTAVIINCWQEKLGEIQFENKPSAFSKFLLEVETYVSAGVSVVFGLEDVGGYGRELAKYLVDHEQVVKEVNPALSFLERKSHVTTQKSDSWDAECVARILINKLNQLPDAKPNDLFWSIQQLVSRRNTLVKAQSALKNQLHIQLNHHYPSYKKFFSELDGKTALAFWQQYPSPSCLEGANIKQLTAFLLDVSNNTCSVKKASDILKLVKEDGHTMKEYQETRDFLVRSIVRDIEFKKKEMKYIERELKQLVNLLDYQLETMPGIELVTASALIAEIGDVRRFPNANKLARFAGIAPVYFGSGGKGKVHKSKQGNRALHALFYNLAVQQVQVAKGSKLPRNPVFHAYYQKKLKEGKTKGQALVCIMRRLVNIVYGMMKYKTAYELPVVEEKEVV

SEQ ID NO: 219975 - protein, 424 aa, unidentified
MKVTYQTCCGVDVHKSFLVATIVKTTGGVEPSYQKKRFSTFNNSILEFKHWLLDNDCLDVCMESTGKYWVPVFNLLEDEINVVIANPKWVKAVKGNKDDTKDSKWIGDLFRLGLVKGSYIPCKKVRILRKYTRYRYKLVSYRSSEKNRYQNALTVCNVALDSVVSDIFGKSSTSIIDYLLEQSGTSINHEEIASKLLRSLKSKEDAVIESVEGYQMTDAQKYRMRLVRAHMDYITAEINDVDKMIENMISSNPDFENAVRFLCTIPGVKRDSAITIISETGTDMSQFSSSKRLCCWAGLTPGSNESAGKKKSVRITRAGVYLKPALVQCAHAAVKSDKSPYYKKKYEALVKRRGKKRAIIAIARMILTAIYQMLSTGEQWNPGDLYKIDMPVALVEKQKAKAIKQAKKLLQREGLLPPDEPLAS

SEQ ID NO: 219976 - protein, 388 aa, unidentified
MTTDHEFAVVASTTDVQKVFVAIELSKSTWVVAIQPPAVDKVSLFRIAGCEIERLFELFEQARRRAGQPIEICACYEAGYDGFWIYRALTARGVACTVLDSASIQVSRRARRVKTDRTDAESLVRVLMAIYRGEHQVAKIVQVPSPEEEDDKRLLRCRDNLLRDRIQHMNRIRGLLNLQGVRHIDPNRSNWENELVNLRTGDGRSFPRQLMNEVRREGKLLGTVVRMLKEVEAEIAGMIRDERKRRHPAQRGQNHPIARRLAEIHGVGPQTAGILATEVFYRGFKNRREVASYVGLTPTPYNSGTMVRDQGISKAGNRRARAVAVELAWIWLRNQPESKLSRWFRTRVGDSAGRVRRIAIVALARKLIVALWHFLEAGVIPEGAKTNA

SEQ ID NO: 219977 - protein, 390 aa, unidentified
MPDDAPRPAQAAIRTELGAIFVSMELSRRAWLITSLSPGGGEKMSKHSVPAGEVSELLRRFAELRRKAAARTGRDFPIIVIQEAGLDGFWIHRVLQAEGIESHVVDAASILTSRRRRRAKTDRIDGETLVRALMAFKRGEPRVCSMARAPTPQEEDRRRVCRERRTLVGERVRHVNRIKGLLFAQGVFGYEPMRKGRRERLEDLRTGDGRPLPVHLKAQIIRELDRLEVLLEQLKSVEAERDALLKPATDEATSPAVMLARLKGIGPETAAVLWSEGLFRQFDNRRQVAAYAGLAPTPWQSGSINHEQGVSKAGNPRLRTTMVELAWLWLQNQPTSALSLWFHERVRLGGRMRKTIIVALARKLLIALWRYTTAGVVIEGAVMKAAPATI

SEQ ID NO: 219978 - protein, 376 aa, unidentified
MGQVVIGMDPHKRSATIEVMAGDETVLGGGRYGTDAAGYRAMLAAGRQWPDRRWAIEGCQGIGGHIASRLLADGEQVVDVPPKLSARARVTDAHSVALVATRMAGLRPVVDDEQLAVLRLLADRRRSLGEDHTRMISQLHRLLLELIPGGAKKDLSAAQAKVLLAAVRPRDAAGKTRRRVAAELISDLERIYQRKKTADKELRELLKATGSTLTDLNGIGPSGAARLLVDAGDITRFPTRAHFASWNGTAPIDASSGDQVRHRLSRAGNRQVNRTLHIMAVVQLRNPTEGRAYYDRKVAAGKTPMEAMRCLKRRLSDIVYHQMTVDARTAKTDPGGHSGTTLQSSVTDLTPAAGSSDKPLPGSASQHPKTLSLTAS

SEQ ID NO: 219979 - protein, 423 aa, unidentified
MSKQPLELAAFIGLDWADEQHAICLQEAGTTRREPLKLDQTPEALQAWIQQLRARFGGRPVAIAVEQARGALIYALMQVDFLHLYPVNPQTLAKLRQAFYPSGAKDDPGDAELLLEVLLKHRNHLRVWVPDNVLTRSIQLLTEGRRKLVDERTALTNQLTAALKMYFPQALDWFGDLHTARACAFLQRWPSLQQLKAATTSSVRKFYRRQGYRGEDKLEQLIKNIQQAQPLTEDPAVVLASTMMVHALVKQIPSLTDSIEEYDRQIASLFKEHDDSTLFGSFPGAGPTLAPRLLAAFGSDRNRFEYAAEIQQLSGVAPVTQKSGQACWVHWRWACSKFLRQSFHEFAGQSILKSVWARAYYQQQRQRGNSHHAALRALAYKWIRIIFRCWKDRTPYDEATYFKSLQLRGSNLASALKTISTDA

SEQ ID NO: 219980 - protein, 347 aa, unidentified
MAAVMIGIDPHKGSHTAVAIGADEGPLGELRVRASAGQARRLLAWAVAWPERTWAIEGAAGLGHLLAQQLLAAGERVLDVQPKLGARVRLLAAGAVNKNDPNDARSVAVAALRSASRREVAADDHAAVLKVWAKRHRDLGRARTQVACRLHAVLCELIPGGVSKRISAALAGQLLEGITPSGAVEAARCELAAAFLDDLRRIDAQMRDAKNKLTAAVQASGTTVTEVFGAGPIVAATVIGEVRDVSRFASQDHFAAYNGTAPVEVSSGRRKIYRLSRRGNRRLNHAIHMAAVTQVSHRHSPGRAYYDRKLAEGQTPKEALRSLKRRLSDVIFARLQADAHRAAAGPR

SEQ ID NO: 219981 - protein, 341 aa, unidentified
MSITGAFDVHRRQLTFEYLDSVTGEVKRGRVVPADRPHLRAWLVRFAGWEDVQFALEGCTGWRYVAEELAAAGITPHLAEPADTAALRGRKRHAKTDKADAGHLRAHLLAGDLPECWIPPEQVLEARATVRLYKDLVDERGAWHQRLAATLFHQGVPAAVPAARPEGRAAAREAGLSPAGRQAVDTALRQIDRLTAELDPLRRQLDMYSRRQPGCAALRNAHYGIGAVTSVAIWAELGDVRRFASSDNVIRHTGLDITVHSSDTHRPPGKLSRQGPPVLRWALYEAAKSASRPASPDYGYYTATRDRRDGELATLSVARKLARRCYHTLRELGEEALAPAA

SEQ ID NO: 219982 - protein, 343 aa, unidentified
MTRFVGLDVSQKITAICIVDNAGRRLWRGQCPTVPEQISVLVRRHGGDDARIGIETGAMTPWLVHELRNLGLEVVCLDARHARAALEMQINKTDQNDAEGLAQIVRTGWYRSVHVKSFDSHRARALLGARTQLIGMTTRLSNHIRGVLKTFGLLPGAMRGLPFDRKVEALLLDRSDVALIVRPMLVAWRQLREQIAVFDKAIRALVRLNSSCRLLMSVPGIGVLSALAYVSTVEDPGRFSRSRSVGAHLGLTPRQYQSGEVDRSGRISRCGDTLARTLLYEAAVVILTRLKKASSLKDWGHAIARRSGNGKARVAVARKLSVILHSVWRSGQPFRWSEHAGAA

SEQ ID NO: 219983 - protein, 337 aa, unidentified
MLYVGIDLHRRTSRIVTMDEGGQVVSQRTVSSDRASVEDAFSRIERPAEAVFEATWGWGWLADLLEEMGVPAHMAHPLQTRAISSARVKNDAIDARTLAHLLRTNMLPESWIAPPEVREARRQVRMRVALGRIRTGVKQQVHALLGEHGIRLEHSDTFGAKGWKELEALQLPEFSRHRLDSCLRLIRSLDWEIEHADFELLTRFGTDDRVARLRAIPGIGFLTAVTVIVEVGDISRFGSAAQLCSWAGLTPREHSSAQHIKRGHISKQGSRWLRWILVEAASTNKACKGEDLRDFQQRIAKRRGKMIARIAVARRLLTLCYYALKSEDGCRAYPLLR

SEQ ID NO: 219984 - protein, 358 aa, unidentified
MPNSTVAVSRITVGLDVGDRRTHLCAVDPARSVIARESFATERCALEKVLAKFAGAKVLLEAGSQSPWMARVLRAGGYDVQVADPRRVQLISKDPRKTDRRDAELLAKMGAAMPELLGSVHHRGAAAQAHLSVVRARDLVVRMRGMAVQQVRSICKAFGLRLPATSTDAFARKVALSIPADLQAALGPILATITTLTATIRGYDRSLAKIAQAHYPEVAHLQQVDGIGPVISVAFVLSVEDPKRFARSRQVGSWLGLCPRSHASGDSNPQLRISKAGDQRLRRLLVQGAHRILGPFGADCDLRRYGLQLAARGGKAAKKRAAVAVARKLAVLLHRLWLTGAEYQPLRNAAARTVPASA

SEQ ID NO: 219985 - protein, 343 aa, unidentified
MEHFAGLDVSVKETSVCIVDDTGRIVREVKVASEPEALLQVLTNPAYRFKRVGLEAGPLSQWLSSALAEAGLPVICVEARHMRAVLKAQINKTDRNDARGIAQMMRAGLYRPVHVKTIRSQKLRMLLTHRKLLQSKAIAIENDLRATLRNFGLKVGMVGTVKFDARIKELVENLPDLAVLVEPLLIVRRVLREQVGILHRRLLAIVRDDDVCRRPMTTPSVGPVVALTYRATVDVPARFRNSKAVGAVFGLTPSKHQSGEIDRMGGISKCGDAMMRTVLFEAAQSMLTRTIKWSWLKAWGMKIAKRRGLKRAIVAVARRMAVVMHRIWVDGTEFRWTKEFVAA

SEQ ID NO: 219986 - protein, 328 aa, unidentified
MTLYLGIDISKHSFTSAIEIEGLKTKEIMSPYPNKTKGYNQLKQTVIKLTKQYKTDEVHLGVESTGGYEVTLVKWFRAHTDFKITIINPVQVKRFMQSRLIRTKTDPVDARSIASYLAINKPEATAVLPNEIEDLKALSRHLDHLIRKRANEMTYLESVRDSDVKQMVKQTIRSYDRQIEKVEKKITDHLDNHPKLKANKELLKSIPGIGETTSGILLSEINSSLDPKQQVAHAGLAPRERQSGTLRGKPQLCKTGNRRLRRALYLPTLTAIRFNPIIKTFYERLLSKGKPKMVAIGACMRKLLHIVIGVLKNQIPFNPDYHQLRFAS

SEQ ID NO: 219987 - protein, 343 aa, unidentified
MGMFAALDVSQEETAICVVRQDGTHVAEAKVPTCPDAIADWLTERTEGLERVGMETGPLTVWLWNALTERHVPIICMDARHANGVLKMMPNKTDRHDARGLAQIVRTGWFKAAQIKSHDAYVNRAMLTAREALVGMRVRLENEIRGLLKTFGIMFGKRVGGFKRRAEEIIEGELAVAPELLPIFEALMQARRDILARIAALDSRIRAVARRHATVRLLMTAPGVGPITAMAVVAAFDDASRFHRSSSAGAYLGLTPRRYESGEISRNGRVSKRGDGFARKCLFEAANAIFCRNLGGPRLRDWARAIAERTGPRKAKVALARKLAVTLHAMWRTNTPFQEAAMA

SEQ ID NO: 219988 - protein, 343 aa, unidentified
MSIVTLRIVFVGLDYHASSVQVCVMDKDGKMLVNRKCANDWRAVMAAVHERCGKEVQVQAAIESCCGAADLADELISRGWTVQLAHPGYVARMKHNPDKTDYSDARMLADLQAHGFLPRVWLAPEEVRELRRLVHHRQTLTKERKNLKLRIGATLREARQKAPGNANPWTQAWLAWLESSAELSPNARYITSRRLRRLGALQEELRQVDKRLERQTREDPLVQKLLTIKGIGLVTATTLRAEIGRFDRFRTGKQLARFCGLSPRNASSGQRQADAGLIKAGNNEMRALLMETAHRLIRCDERWTALAARLSGRGKAKSLIVAAVANRWVRWLYHQAQPSCLAA

SEQ ID NO: 219989 - protein, 406 aa, unidentified
MQVVYERCCGIDVHKKMIVACLKTGKEQEIRQYGTTTRELREMANWLQESNCQKAAMESTGNYWRPIYNVLEVLGLEVIVVNASHMKTVPGRKTDMKDAEWIADLLKHGLLKPSFIPDKEQRELRDVSRYRRSLIEERAREINRLEKNLENSNIKLSSVLVSVNGKTAKRLINGAIEETINEDTIDEMVYGSAKKKISELLIAMEGVMSPVHKKLVRAILDHIDDMTMRIKEMDDIVKGEMLKYEEAIAELDKIPGIAERSAQTIIAEIGTDMSRFPTASHLASWCGLSPGNNESAGKRKSSKTCKGNKTLKSALIQCAQAAVKKKETFFRAQYDKLVVRRGKNRAKVAVAHSMIISIWHMLKKNIPYVDLGCDYYNKFNTDKKISSYLKKLMELGWDPPVSVLVG

SEQ ID NO: 219990 - protein, 316 aa, unidentified
MSDSTPVVIGIDVAKDTLEVASSASERWQVSNDPAGQEALRDRLRGERVGLIVLEATGGYEVTVVAVLAQAGLPVVVVNPRQVRQFARSLGRLAKTDAIDAEVLVRFGVHVAPPVRPLPDEQTELLNALLTRRRQLLGMITAERNRLLLAVGPVRTDLRQHIAFLVRRLKDIDRELEGRLRDSPVWREREKLLQAVPGVGRQLLLTVCAALPELGRVPSRQLAALVGVAPYNCDSGTLRGQRHCWGGRVEVRNTLYMATLAATRCNPVIQPHYQRLLAAGKPKKVALVACMRKLLVIMNAMVRDSEPWNPQLKPVG

SEQ ID NO: 219991 - protein, 402 aa, unidentified
MIFVEKINTDRGSLSDLQGIRPILRFNPLSVCLNKHQIEIRVLRLISKVLIVFKQVNLDLLTINNKVMEFTYFIGSDVSKNELDFAVMRGNTLLFHREIANTQEAIIGFIKELYKLPGFNVSHCLFCMEHTGIYNNHLLACLYKKKANIWLEAAVQIKNSSGKLRGKNDKVDSIRIADYAYTQREKVRLWVPKREVIQQLSHLSAARTRLIEAKKMLKTPLKELDSFSTKKIAGPGACVCSHTLKAIDADLERADNKIDKLIADDPELRRLFGLVISVSGVGKVTATQILITTNEFKDISNPKQYACYAGVAPFTDDSGKIEKKARVSHMANKKVKTLLHMSALIAIQHNKDIKLYYNRKVNEEKKNKMSVINAVRNKLILRIFACVNHNSLYKNNYCNLLV

SEQ ID NO: 219992 - protein, 346 aa, unidentified
MHYIGMDCHISTLDFAVVDETGRLVKNGSVATSINNFMEFVKKVPSPRTIYMEEGTLAAWALEVCVRFRENLVITDPKENHWIGSSGQKNDPLDAVKLAQLARGGYIKEIHHPVGERRRFRELMEAYHDTVRSTTRVKNKIKAKFRQNGIQCTGDTVYSETHREKWKGKLPQDSTLLLILDGLWLQLDQLEQMEKKIVAAAKAQAKQYPEIKMFEDIPGIGFIHAATVSAILETPYRFANKRKVWMYAGLGLMKRSSAGKLYSEKLSTDYNHLLKYTIKQAAGAALQAEDNPLRRKYLDMTLLRGTAPNLAKLTIARDMLATMWAMWKKGEKYNPEIRAKAVRKQG

SEQ ID NO: 219993 - protein, 344 aa, unidentified
MKKNLFFIGLDIAKADFAASIYQTPDQPIVTKEAIPNDPKGFEMLLSWLKDHHIDKKNCRICMEATGVYSQAIAYYLLFQGFPVSVEPPLKVKRAFDPVGHKTDPVDSKQIAEYAYRFQDELTSWKPRDEILEKIRQLLSVREQFTKQKVALDNSLQAYSKQRVQVALIKKAHQETLNQLKKQIARIDKELANLIKQDPEIFQRASNLDSIPGCGMLLAAHLLVITENFTKIQNSKRLAAFIGIVPYQHQSGTSVSKRAKIRHFGPGPSRKLLRLAAQSVATHNVTFRRYYLRKLDQGKAKPLVLNNIANKLLKVACTIIRNNTRYIKEHRSIHPMYLKSLKSA

SEQ ID NO: 219994 - protein, 355 aa, unidentified
MNSIKYVGLDVHRDTISVAVLNAEGKLMMQSVIATHASAILDFFRGLRGTLHVTFEEGTHSGWLYDLLVRRVAQLVVCNPRKNALLKAGSKSDAIDARKLAELLRAGMLSAVYHGQNSTAAVKHLGRSYAALTEDTTRIMGRLKALYRSQAIACAGKKLYGSRHREEWLAQVADSGLQRRARRLYQELDVLQQLRREAKRELIQECRKHGEAKLLRTVPWLGPIRVALLIGRVQTPHRFRTKRQFWAYCGLALETRDSGEYRVVNGQIEHKKKPVFIRGLNRNHNHDLKNLFKSAATTASGSEGAFGAFYENLLKKGMRVEMARLTLARKMAAITLHVWKKGEAFDAGYVKPQAA

SEQ ID NO: 219995 - protein, 343 aa, unidentified
MQIHSVGIDLGKTTFHLVALGAAGKVIVRKKFNRKQLLAYTANVPASLIGLEACSGAHFLGRALREQGHDVRLIPAQFVKPFVKSNKNDFIDAEAIAEAVERKNMRFVPIKTDDQLDLQGIHRVRDRLICRRTAVINQLRAFLLERGMVFAHRPANLRAAMADILENAETDLTPQMRSLINMLWDEWKRVEEQIKKLDLELERISAADAGCTRIRQIPGIGPVVATAIVAAIGNGAAFHKGRDFAAWLGIVPRQYSTGGKAKLLGISKRGNIYLRKILIHGARAAVLRIKRDRAPIGPWLDALDARAPKNVVVVAMANKLARIAWAVLSSGEDYRPMGNTLAA

SEQ ID NO: 219996 - protein, 349 aa, unidentified
MTVYVAVDFHAREQTISWCDTADGEVHRTKLRHQHDDVRKFYEQFSGEVIVGFEASGYSAWYEQMLAELGHTIWLGNPAEIRRKAPRRQKNDRRDADLMLDLLLKGDFPRVQAFSEASRTVLRQLRYRHKLVKVRTIAKNSVQAIGINAGLPLRSRLLTQAGIAQLQALSLSPVLSQQRDEWLELIKLMNKQIGTVEESLQQRAKDDAAVELLRTHPGIGLLTALALRYTLEPISRFTSTRGLTAYVGFDCVEDQSSERRRMGSISKQGSRLLRFLLNEAGQTAARKDPQLKQFYKRLLHRRDKPKAKVAVARKLLVRSFIMLRDQIDYAEFVRRGVAARVARETHSPK

SEQ ID NO: 219997 - protein, 376 aa, unidentified
MSKVRFVGLDVHAETIAVAVAETGGEVRSIGVIPNKLESVRKLLHKLGPVQHLRACYEAGPTGYVLYWQLTKLGVACEVIAPSLIPAKPGDRVKTDRRDAEKLARCYRAGELTPVWVPDDDHEALRDLVRAREAAKKDQLKARHRLGKFLLRHGQRPEGLKAWTKKHLEWIKSHVRFPQAALEATLADYLEEVDHVAARIVKLEKAIDEAIQNAPPEIRAVIEALQALRGVAQTTAATIVSELGSLSRFQSPRQLMGYSGLVACEHSSGNRIQRGGITKAGNGHLRRVLVEAAWAYQHRPNVTGFLLRRQKNLALSDEAKKIAWKAQQRLHKRYLAMSARGKNKNQIVVAIGRELVGFVWAIAVAAETQHKLAAAA

SEQ ID NO: 219998 - protein, 357 aa, unidentified
MGKSNIDLSSVTRIGLDLAKNIFQVHAVDVNGGVIVARSVRRGRLLAFLGTFPRCLVAMEACSSAHHWGRAFIELGFEVRLIPPAHVKPYVRRNKNDAADAAAICEAVGRPNQRYVPVRSVNNQAQLMRHRTRELLVGQRTQLLNALRGHLAEVGVIAPQGTQNAYSLKRLLAHEADENGEIVVPECVRGALVSLCRQIDALDEEIEAIDKQIATQVKADPTARRLTSIPGIGPITASAILATVQDANTFASGREFAAFLGLTPRQNSSGGKERLGSITKMGDRYLRKLLVVGACAVLFHRKGHNDALRRWADQLVARKSGPSGFKLVAVALANKIARIVFALLTRGGDYNDRPIAA

SEQ ID NO: 219999 - protein, 357 aa, unidentified
MAERIKREIERTVGLDVGDRWSQICVLDEESGEVVEEGRVRTRAEALDRRFGVERMRVVLEVGCQSPWISRLLGGLGHEVLVANARRVALIHGSRNKSDRVDAESLARLGRYDPKLLRAVEHRSEQIQVDRALLKARDVLVRSRARLIGHVRGVAKSMGGRVRRSSAECFARHAAEDLPEALGPALAPILEQIGGLTATIRDYDRQIEQLAGERYPETALLRQVDGVGMITSLAFVLKVEDPRRFGRSRTLGPYLGLVPRRDQSGARDPQLRITKQGDPFVRRLLIQCARYILGPFGKDCALRRYGLRIAERGGKYAKKRAAVAVARKLAVLLHHLWLTAEVYEPLYNLDEEHHRAA

SEQ ID NO: 220000 - protein, 339 aa, unidentified
MELYSGMDLHSTNTYCAIMDENRKRVVERRLPNQPKVILNFLEPYRADLKGIVIESTYNWYWLVDLLQENGYRVHLANPSAIQQYSGLKHVDDRHDAFWLAELLRLGLLREGYIYPKEVRPIRDLLRKRAHLGRLRTSLLLSAQNIVLRNQAIKVESKDIKKLTTDLLTPHLQESEGLFLTGKISKELIDAFTRQIKVIETWVMKRLQPDKLFLNLLTIPGVGEILAMTILLETGCITRFPKVGNYVSYCRLVASQRTSNDKVKGKGNDRNGNKYLAWAFSEAAEHARRHYPMCRSFYNRKLNQKNATVAHCALARKLSRAAYYIQKDQVVFDETQLFS

SEQ ID NO: 220001 - protein, 289 aa, unidentified
MNTTPAVAMPAVTPAVTPAVTPAVTPAVTPAVTPAVIGLDVSKDTLDACLLLDNKRHEKQFSNDASGHRQLARWTRNLVKDTSCHFCLEATGPYSQAVAFFLVEQDGHAEQELLVSVINPARIRFFGLAQNQGNKTDKADARLIAQYCQMQSPPPWRVAAAQVRQLQEMVRRLHALSELAAQEKNRAQVPGQGKAVLASSKRMGAALEKELLRLKREVRAHVKAHEDLQRDSKLLQSIPGIGEITSWDILAEMPDVDEFDSAQSVAAYAGLAPREQRSGSRDRAAACER

SEQ ID NO: 220002 - protein, 457 aa, unidentified
MPQAKQSRNQRGLSRVHPAAAAIDIGATIHVAAVGPDRDQEPVRTFQTFTDDLHRLADWFSRCGVKTIVMESTGVYWIPIYEILEQRGFEVMVVNARDAKHVPGRKTDVSDAQWLQRLHEYGLLRASFRPQAEMAGLRSYLRQRERLLDYAAAHIQHMQKALTQMNLQLHHVVSDITGVTGMLIIRAIVAGERDPAVLASCRDARCHASVETVRQALVGNVREEHIFALTQALELYDVYQAKVAACDKQIEAILNRLTKSVPSPVNKLPPVRQRTRQPNAPAFDAREALHAILGVDLTQINGLGPYLALKLVGECGTNLEAWPSAKHFTSWLGLAPHNKISGGKVLSSKTRRTSNRAASLLRLAAVTVGRTDTALGAFYRRLSARVGKAKAVTATARKIAVLFYNTLRYGMSYVDPGAAYYEDRYRRRVLSNLQRRAKSLGFVLHQADLDDAQVGVS

SEQ ID NO: 220003 - protein, 410 aa, unidentified
MHHKLKYLYIGVDLHKRHHTAVMMTCFHEKRDEIQFENKPSAFPKFLQQVEKMAKREGLTPVFGLEDVGGYGRGLAMFLNENKYEVKSVNPALTISIRRSSPNNKKTDAWDAECVARILISNLDTLPTANPHDLYYAISQLVTRRENIVSVVTGIKLQLHQLLGYHYPSYKKFFSQVDGKTALAFWLRYPSPSCLSGVNVDELANFLYKKSNRYMSTKKAEEILSFVQQDGDTSKDYQGVNDFLVKNVVRDLIARDHQLSQIDTELVKHLALLDYKLETMHGISTVTAAELIAEIGDISRFSSADKLANFAGIAPVQHSSGNKQKSKKSKLGNRSLYDIFYNLAIRQLGVSRAKKPNHPVYHAYYERKLAEGKTKWQAIICVMRKLVNVIYSMMKNKTEYKMPVLKEQAA

SEQ ID NO: 220004 - protein, 316 aa, unidentified
MASFLGIDVSSLSLDAAVRPQGIKMHLSNDPIGFEALLESLRKLSIKRVLLEATGGYERDVMRFLQDAGYKVIRVNPRRARSFADSLGIKAKTDAIDAEVLAHYAEVIPDQPSLRVSPERALLRELLQQRDRMVQQRDDDLRRLKQVQSTAVANYLNANLKHFKAQIKRVECEIEQQIAMLNDERVAQLIKVKGIGMVTAGKLIALLPELGRVESREIASLVGVAPFNHDSGKFMGKRSISGGRFAVRRSLYMACLVAMKYNPALKARYQSLRERGKLPKVAIVACMRTFIVRLNAMLRTGTSWLDLVLPQPESTT

SEQ ID NO: 220005 - protein, 424 aa, unidentified
MKKMHQSKIDQEELIYERCAGIDVHKKTIMVCLRIGRKAQVREFGTLTCELREMAAWLKENDVEMVAMESTGSYWKPLYNVFEQERIPAMVVNAGHMKSVPGRKTDVKDAEWIAKLLSQGLLKASFIPDRGQRELRELTRFRKNQMEERARTLNRLQKMLEGANIKLSSWVSNIYGKSATQLLELIIGKEEFTAQEVESLRHVNMKASTNELYKSLEGIMTPIQRELFTHIMNVIKEQTAQIEKTESLILDYMTQAYQEAADAIEAIPGIGKISAQQIIAEIGIDMGRFPDAPHLCNWAGICPGNNESARVRKSGKTNYANKTLKSTLTQCAQAAKKNKDSFFYAQYQRLVVRRGKNRATLAVAHSLLIAIYHVLSGKLFCDLGADYYNRFNKEKKINSYVNQLSKLGVSVPDDVIRVALEKTA

SEQ ID NO: 220006 - protein, 372 aa, unidentified
MEKANTVVSFMGMDVHKESIDVTVAEEGPSGEVRHVGTIGGDLEAVAKLVRKLRRKNGELRFVYEAGPCGFEICRFLREQSLACSLVSPSQIPRRAGDRIKTDRRDSEMLARLFRAGELSAIYVPEADDEAIRDLARARADILRARQKARQQLQALLLRSGKRYPRKCVWTLAHRRWLCDLRLDHPAQKIALEEYLAIIDEATHRIERVETALAEQTSTWRMAPVIEALQALKGVRLLTAITLVTELGDLSRFDKPRQLMAFLGLVPSENSSGERVRRGGITKAGNTHARKALIEAAWAYRHPARIGRRLQMRSETLPTSIRDIAWKAQLRLTSRYRKLSARMKPPTVVITALARELAGFVWAIARLRPIGS

SEQ ID NO: 220007 - protein, 526 aa, unidentified
MCAAVRRPRPGRRSRQRGHVGKPNGVFSPRVQKVGPQHFGVVSVDCAKDRSKWMLTDFYGHVVVPPTFVEHHRTAFDQAVAAVRSAVSRHGIKDLVVAVERTGRYHRPVQSAFAAAGFDTRVVHPSVSCYFREAGAYDTKTDDTDLEGIFRAAVNGFGLQEQPWDAVYGSLQLWSRQRRDLVDKTSQLRCQILEYLNEYLPGYQRCFDDVFISKVALLIACHYAAPQAIAAAGLSALVQLCRQAHVQVHNATLMRIMGWAQDAPAPEQSASFYQQWVCNLNEDRLTKEKQIAACEQQLVALLVQTPYVRLLALSGINVVLASELAGELGPMTYYATARVITGRAGLYPRRYQSDQVDHASGTLARRGNRRLRYVLVMSADTLMRCNQYFGVLRAKWAHQGRDPRDIRVRVAGRYSRISFQMVTGKGGFRHPACQGPPAVLSKLIEFHNEPDIDPYTARTNLQRAAAQLPRAEQAREKKALHAQLDAARQSWGRGPKQLCSILPAVLEQLGGVPTNLIKSIASGETP

SEQ ID NO: 220008 - protein, 314 aa, unidentified
MSRLFVGIDVSKDRLDVAAHPDASSWSVPNDDGGVEDLVRRLGDLRPVCIVLEATGGLEMSALSGLAVAGLPAVAVNPRQTRRFAQAAGLLEKTDRIDALVLARFAEAMKPEIRPIPDAPAQELRALTVRRRQLTEMLTAEKNRRSMAPKRMVQEIDKHIAWLEKSLSRIQDELEKMIRNTPAWREKDDVLQSAQGIGPKTSAVLIAELPELGSLDRWKIAKLVGLAPMNCDSGRYRGQRHIQGGRASLRCALYMATLSAIRWNPAIRVFYQRLMAAGKLFKVAMTACMRKLLVHLNAMLRDRSRRQEKTPQTA

SEQ ID NO: 220009 - protein, 405 aa, unidentified
MTDIEQHDSVQVFVGVDVGKGAHHAVALDRKGKRLLDCALPNDETKLRALIGKLKEHGPILLVVDQPATIGALPVAVARDEGVLVAYLPGLAMRRIADLHAGEAKTDARDAYIIAEAARSLPHTLRSLKLADSQVAELTMLCGFDEDLAGQITQVSNRIRGLLTQIHPALERVLGPRLDHPAILDLLERYPSPAQLAAVSPKQLANRLVKLAPRMGKAWAAEIAQALSEQTVVVLGTQAASIVLPRLAQQLVALRIQRDEVAKEVERLVLAHPLHSVLTSMPGVGVRTAARLLIDVASRAFVSAAHLAAYAGLAPVTRRSGSSIRGELPSRRGNKQLKRAMFLSAFAALRDPVSRAYYTRKISQGKRHNQALIALARRRCDVLFAMLRDGTLYCPTPPKISLTTT

SEQ ID NO: 220010 - protein, 448 aa, unidentified
MRYVGLDVHKRIVQAHFCDQHGHRLETMRFDLNTASLQQFALQHLGSDCAVALEATTNTWAVVDVLTPHCAQITVSNPLRTKAIALSKHKSDRVDAEALAQLLRCGYLPKVWIADPHTRQERNLAARRSALVRQGALIKNRVHSILHQHLIQAPSDPFTQQGRQWLSQLQLAPHLRAEITTQLRMLDALASEQKELMALIERSAYASDAVKLLMTLPGVGVATAQALVAAIGDISRFPSADKLAAYFGLVPSVHQSAEHAYHGSITKQGNSNVRWLLVEVAHHAGRHPGPLGHQFSRLARKKGVAVARVAIARKLAILTWHLLTKSEPYRYALPAPTEYKLAQLRRSQGIRHRLGPEKGQAQLPKKSYQRVRVQRGLDSVLATEALPATTPAPAAELRILRQLGLDTLQHRLHTPVRTISPVSPAERIRKGPRSKAVDTRPSPKKLRR

SEQ ID NO: 220011 - protein, 408 aa, unidentified
MLWGERREKASSSLQQPTGCPMPQPNDLSRSLAALDENSTLIAVIEMSQSSWLVAGTVPGVERHPTKKLKPEETALLRLLHRWRGEAEKAGRNINRIAVAFEAGRDGFWLARWLRAHQVEAYVIHPNSIAVSREHRRAKTDRLDSALLKRSFLGWLRGEREHCSMAAIPSLEEEDAKRPGRERENLVGERTRIGNRIKSALVRLGIRGFKPTLRTAAQRLERLRTPEGEPVPPNTLAELRREIARLRLVAEQIREIETTRLQRLEQEPNRGAHRMVRLLAQVRGLGIETADMLANEAFSRSLRDRRAVARYGGLTGSPDESGASRREKGLARAGNARVRRGMIQLAWRFLKFQKDSALAQWYRARTVDARGSTRKALIIALARKLLIALWRLVTTGELPHGVVLHPAR

SEQ ID NO: 220012 - protein, 341 aa, unidentified
MHYVGVDLHKKTLVVAVENDRGPIGRTRRFPCRDESAIVKAFRRLRPFRAVIEASSSYRWLYDRLEPLGEVILAHPLQLKAIVAARAKTDKLDAALLARLLRADLVPEAYVPPQPYQVLREVTRTWARLGRRATLAKNQVHAVLRARNLHPPYRKVFGVKGRRWVAGQDLGIGGNLMRDELLRRLEHFERERLLLDDHLAMLADEFPQIEALLDLHGIGLYSALLIVAELGEVDRFHDARQVGAYAGLTPQVHQSGEQAWHGQITKQGSRWLRWILVQAAIKIVRKDRALGNLYRRVRRRSGKKRARVAVARKLAGICWVRLRAWHRAHATDAVAEPSLAN

SEQ ID NO: 220013 - protein, 422 aa, unidentified
MKKVTEFTKKVKGRVNNPVLTKAIWVVGIDIGKKKISCALMKKDQTILCRFNTEASIDGYKRILDRVKEKTKGRGKVVYAMEPTGHYWMVLGQFFEDHNRQYVLIHPLAVARSREVVRLNRSKTDPMDARLIGELACRGIATRTQIPKDYWATLRFLAREYMDREKDIVREKLRINSYVETTLPGFLGVFPKPLCLAGRACLRTLADFKEAIKGDFPSFEKKVRKHYTGKRLLVSRVRQVYDTLRQSDTMGLRAGRYAMFGRIINSLERLEVAEKQQETAKESLVSYYNQSEYKKYLNSVQGTTSTTNALVLGFMGNPASYDNPKTLIKLAGCDPVLNESGKYRGKTSISHRGRSLLRKAADRTAFTIEKRNVVFRNFFHNLITRQKNKLTKRQARIACINKYFRIIWVLCNHRVTFNPSLA

SEQ ID NO: 220014 - protein, 301 aa, unidentified
MKLYGGIDLHSNNSVVALLDEEERLVYRKRLANDAPGILEALAPYREAIVGLVVESTYNWYWLVDALMEAGYAVHLANTAALVQYSGLKYSDDDSDARWLAQRLRRDELPEGYIYPKAERAVRDLLRRRSRLMQQHTANLLAIQNLFARDRGRSLNANEVKRLTPETVSQLLSDPNQALAVQATLLAMRGQEGAIDLLEREALAQVRPHPAYRHLQTASGIGQVLGSTIVLETGPIARFANAGHYASYCRCVGSQRLSNGKCKGRGNTKNGNKYLAWASSFKVFTISSNISILLRFLEGLA

SEQ ID NO: 220015 - protein, 339 aa, unidentified
MELYAGLDLHSRNTYIGIMDKAFNRVFKKRVPNHLEHILQTLAPFRDQIKGFVVESTFNWYWLVDGLMDAGYSSAHLANPSAIKQYEGLKHSDDQHDAFFLAQLLILGILPQGYIYPKMDRPVRDLARKRMFLVQHKTAHILSLQSLIQRCCAMKVRANDMRHLTVKELEAWLEEEYLVLSAQANLDSINFLKQKIQGLEKAIRKKVKLKKAFHHLKTVPGIGDILALTIMLEVGDIKRFSKVGNFTSYCRCVPSRRLSDGKIKGYGNRKNGNRYLSWAFTEAAQLGRRHNERFRRYYNRKVAQANTSLATKALGNKLARICYYIMRDQIPFQEELFGQ

SEQ ID NO: 220016 - protein, 443 aa, unidentified
MKQKQNNHLHGQRGQAFANKIRGINPEQILCVSIDISKDFHLVLLHNKLGEIVMPRFDIDIFQSGYEQLCQAIETAVSDNNIQLILIGMEPTGHYYQNLACHLHTDGYNVTIINSLTVKQNRDQQMMSREKSDEIDAAAIGDLLQRGHGSPYHPPTDVYLQLQQLDRERIAELKVQTMYKNRIIGHLDRIWPGLILTKTAAKSRYKPLFATDFWSSKKWQELVRVCPDPREIAAMSPAMLIDAFHEQGFPLGVVGAHKYITYAQKTLWAEPEMTLLRRQWLERDLAFFDRSSARIDALSAQIEPLLAQTPYQILSRFKGISVDTVASFAAAVGDPAHYACAAQIFRRSGLVSGRADSGANQRQGKGKSITKTGDVYLRRALGIMAYGLILHQPVLSSYYHRLAQYKKPGVARVALLRRTVGILWATVRDQRADTLILREENRM

SEQ ID NO: 220017 - protein, 300 aa, unidentified
MSRCIPIDATAITLGVDTHKDIHVGVALDAVGRHQGTLSVPTNPAGYRKLVEWASGFGPLAHAGVEGTGSFGAGLARFLKARGIKVSEVIRAKRRDQYRFGKSDPIDAEAAARAVLTGTATGEPKDADGEVEMIRALRIARRSAVKARAQAVNQIKTILTTAPEGLKSELCALSTARLVEKTSRLRPGANPSEVETATKFALRSVARRCQRLSEEISQLDEQLDRLVAEAAPELLAVEGVGTDTAASLLIAAGDNPERLKDEAAFAHLCGAAPIPASSGKTIRHRLNRHGNRDARAGRCT

SEQ ID NO: 220018 - protein, 363 aa, unidentified
MSNTTFVGLDVHNESITAAILADGCDEPEVLKLPADLMKVRQLFCRLAEKAPVRACYEASGAGFVLQRSLAVGGFHCDVIAPSLIPRKAGDHRKTDRLDAIMLARLYRSGHLTPVHVPTEELEALRRLLRLRRSYHTQVTSAKHRISGTLRNHGHIFTGTKSAWTKKHFLWLGKLRQSLQGHLQTALSIDLEHLEYLESQIRALDAELEQAARAMPYRPKVEALCCLRGVKSLTALTLLCEIDDVTRFASPTGLMAYFGLVPSEHSSGNVERRGPITKAGNTHARRLLVEAAWNNRHRAAAELVLNRRRQGQPPAVVAIALKAQHRLHRKFIRLDQRKHRHVAITAVARELCGFVWAVLMALN

SEQ ID NO: 220019 - protein, 334 aa, unidentified
MMTQKYFIGVDVAKETLDFSLVYEGKVISHASIQNELKTIKNLLKQWSKENQFKYSETLVCMEHTGIYSYHLVQFLQQTECMICMEPAYTIKHSNGLQRGKNDKIDSARIAIFAWKNKELLKEWKAPKSIVKRLKQLMSLRKNIIKSKLSLELYTNELRGFSDKNSVKELKQSCRKSIAALKKDKEAIEHKMVSLLQTDDEVHRIYKILISVEGIGSITAILFIVTTNAFTSFTEGKKYACYAGVVPFDYSSGKSIRGRNKVSHLANKEVKTALHMGAIALCCGKGELGQFYQRKVAEGKNKMAVLNAVRNKIVLRAFSCVKNDRLYEKGRIVG

SEQ ID NO: 220020 - protein, 350 aa, unidentified
MSQKTDAIAKTIGIDTGKNTLHLIGLDPEGTIVLREKLGRGRIAARLANLPRCLIGIEAGMATHYVARELIALGHDVKQVPPAYAMAFRQGHKNDFRDAYAIAEAVQRPSTRFVPVKTDGQLDLQALHRVRSRLISERTAVINQIRSFLLERGIPVRQGLRFLRQQLPEILAKRIDVLSPRMIRIVEDLSGDWRRLDGRIECVTEEIEVLAHGTESCRQLMTIPGIGPIIASAMVAAIGNGAAFAKGRDFAAWLGLVPRQMSTGDRTILGRISKRGNRYLRTLFMQGARVILLRPANWAKHSFGPWLTAAARRLHHNVLATALANKLARIAWTVLAQGRNYEARVISGVA

SEQ ID NO: 220021 - protein, 383 aa, unidentified
MVSASTPASPPASLAETASATLFVALELSRSTWRVALHAPLTNKVSQHRLDGGDADGLLALITRKRSQAEEKLGRPVRVVCCFEAGYDGFWLHRWLYARGIENRVLDAASLLVNRRARRAKTDRLDAAGLLRTLMALERGEAQVCRVVRVPTPEQEDARRRSRERARLVVERGQHTSRIKGLLMTQGIRDFEPTRRDWPARFEALRTPDGLPLAPCLRAELLRECRRLWLVMEMIAEVEAEQKAVAEAEDGPAARLAQLRGIGLTFATVLGNEVFFRVFRNRREVGGYLGLAPSPWQSGAVRRDQGIAKAGNSRARRTAIELAWLWLRHQPESALTRWFHERVGSSKGRMRRILLVAMARKLIVSLWRYVTVGIVPEGAVLKV

SEQ ID NO: 220022 - protein, 340 aa, unidentified
MPNPAVIGLDIAKNVFQVHGADAEGRCVLRRRLRRAEVITFFARLPKALVGIEACPGGHHWARELRSLGHDVRLIPPQYVRPFVKTNKNDAADAEGICEAVVRPNMRFVPIKSVAQQAAMMLHRTRALLLRQRTQLINAVRGHLAEFGLVARRGARNIRELADLVRDTGSDKLPDTARAMLVLLLEQIREAQMRVRKTEHALEAWAKQSDACKRLMTIPGVGIMSATAIVLTMDDPKRFRSGRHFAAWLGLVPRQSSSGERQVLGGISKRGDGYVRTLLIHGARSLTRWRRESWKWLAGLLMRRPTNVAAVAIANKTARTAWAILAHGRQFQPTRRAEAA

SEQ ID NO: 220023 - protein, 342 aa, unidentified
MQAITTIGLDIAKSVFQVHGIDAEGNVLIRRQLKRRYVLAFFQKLPPCLVGIEACATSHHWSRELKALGHTVRLMPPAYVKPYVKRQKNDAADAEAICEAVTRANMRFVETKTSEQQSCLVLHRTRHLFIRQQTSVINAIRAHLAEFGIVAPVGRHGVEALLEVVADVSDKRVPEVARACLAALGAQLRMLKAQILEFDRMIMAWHRSNETSRRLDELPGVGPALATALVASVADPKAFRSGRDFSAWIGLVPKQHSSGGKDKLGSISKQGDRYLRSLFTAGALAVIRYAKIHGTQHRPWLTALLARRPTKVAAIALANKIARMAWALMAKGERYKEPVALA

SEQ ID NO: 220024 - protein, 345 aa, unidentified
MKHYAGLDVSVKVTSVCIVDEKGKICREAKVPSHPEDLVQILKDPTWRLERVGLEAGPLSQWLFSGLVEAGLPAVCIETRHTKAFLKAQVNKSDRNDARGIAQMMRVNLFKSVHVKTLASQNRRALLTARKLLQEKAIAIENDIRGLLRNFGLKVGAVGAVAFEQRIRELVAGMPDITAIMRALLEARQVLREQFMQLHRKLLSIVRDDMVCRRLMTIPGVGPVVSLAFCATIDAPARFRNSKAVGPALGLTPVLNQSGESNRVGRISLCGDGMMRTLLYEAAQVMLTRVKTWSWLKAWAMNVAKRRGQQRAIVALARRLAVIMHRMWSDGTQFRWTRDNTSAVT

SEQ ID NO: 220025 - protein, 334 aa, unidentified
MALELLAIDLGKRAFHIYGIDTDGVILSRKVSRAKLAEVVGDLGPTAIAMEACASAHYWARCWLTAGREVRLINPRFVKPFVKGSKNDAVDAEAIFEAAMRPTMRFVPVKSTDQQDLQSLHRARDRLICQRTALINHTRGLLAEYGVVLPQGPWRFMTQAPIAIASGDLSDLARAIFGELMDQLDDLDRRIQKLDAMIVTLCRTNETCRRLAKLPGVGPIIATAIVGSVNDGRQFRSGREMAAWIGLVPRQYTTGGKPRLGGIGRRANHYLRRQLIHGARAIVSRLAKHDDRQSTWLKALVARRGFNRTIVALANKTARIAWVLLSRKEEYAAP

SEQ ID NO: 220026 - protein, 401 aa, unidentified
MNAVGIDVSKGRSMVCVMRPFGEVVLEPFEVLHTAQNLRDLAGKLKALDGETRVVLEATGNYHKPVAFVLHDAGLFVSVVNPVLIHDYDNNSLRRVKTDRKDAVKIANYTLDKWTRLRQYLPEDDTRLALKNCYRQYQQAVAVRTMLKNNLISSLDLTFPDANKLFTSPAKNNGCEKWVDFIGDFWHSECVSSFSKDAFAKKYLKWCQKNEYQFTRLKSDEIYACAVSAASLPKCPTSRLLIQQQVAQLKAVSKSVAVFQQEMFRLSQQLPEFDTVMEMYGVGPSLGPQLMAEIGDVRRFSSKKSLIAFAGIEPQPNDSGKIVGNDSGISKVGSAVLRRTLFLIMSVILQTRPQDEPVYSFMEKKRSEGKPYKVYMMASANKFLRIYYARVKAVMDSTSSN

SEQ ID NO: 220027 - protein, 429 aa, unidentified
MNYNTQNAKIASITEKTLIVGIDVGSETHYARAFDWRNYEYSKKPFAFNNDEAGFAAFKAWMEDMADKHGKEAVIPGMEPTGHYWLNLGAYLQEQGMKPVHVNPHHVKKSKELDDNNPNKNDRKDPKTIAGLVNEGRFSYPYIPTGIYAEIRNLSNLRIQTQEELTRIKNRIARWFSIYFPEIKDVYKNPDAVSGMMVIKKAPLPCDIKELGVDGVNQVWRDAKLKGAGLKRARTLVSAAEHSIGSTEAPGSARIEIRNLLNDYEVYKNRMDDLMREIEAKLSEIPYIDKLMEINGIGLKTVSCFIAEVGDIRRFDNPKQLQKLAGYAIVADSSGKHNGESRISHRGRKRLRYALYEAAISVIGKNKEFREIHDYYRTRKQNPLKKMQSVIAIACKLIRIFYTILTKGVDYDGQKMLNDIVRPETIMAA

SEQ ID NO: 220028 - protein, 402 aa, unidentified
MNAVGIDISKGKSMVSVLRPLGVVVAKPFEVGHTASELHTLADYLKSLDGETKIILEHTGRYYEPVAQALHDAGIFVSAVNPKLIKDYGNNSLRKVKTDKSDSRKIARYGLDNWTELRQYTPVDTIRNQLKTMNRQFDLYTQTKVSMKNNLISLLDQTYPGVNTLFKSPAREDGSQKWVHFAESFWHLDCVRSLSLAAFTERYRKFCKRHGYNFSSVKAAEIHAGADEHAVLPKSPLTKLLIQQALDQLKTISKTVEILRAEMDRLAAQLPEYPVFMEMSGVGKSLDPQLMAEISDVTRFAHKGAVAAFAGVDPGANQSGSYEAKRTSSSKRGSPRLRKTLFLAMSALLETKPFDDAVYQFLDKKRAEGKPYYVYMTAGANKFLRVYYGRIKEYLALLESSE

SEQ ID NO: 220029 - protein, 417 aa, unidentified
MKNDYAALVALDWGDKTHAFARQSTGADRIERGAIEATAEALHAWLEQLRETCGGRPVALAIEAGRNALLHALLEHPWLTVYPVHPATSARFRKAFTPSGAKDDGPDAVVILTLLRVHRDQLQPLTLDTPATRELAALVAARRSAVDQRTCLSNQLGSVLKRYYPQALTLAGDDLAKPLALAFLRRFPELTAVQKVRPATLSAFYREHNVRAAERIAARLELAARARPLIQDRAVIAPALLEVALLVDLLEVHARHIAGLEARIAEVFAAHPRAALFAALPGAGPALAPRLLVAFGDNLQRYPNAQSLQKYAGVAPVREKSGGTSWTHWRWAAPKFVRQSFVEWAGQTVVHCDWAHAYYRQQRRAGKAHHAILRALAFKWIRVLWRCWHDQTPYNEQHYLAALRHHGSSLPAALQNT

SEQ ID NO: 220030 - protein, 344 aa, unidentified
MGAIIRVGVDLAKNVFHIHAVDENETTVWQGKYARNTWLKAVMKRVPFTAIIGMEACGSSHYWARELIKAGYTVKLVAAQFVKPYVKTNKNDKVDAEAICEAINRPNMRFVSVKTSEQQDIQSMHRVREELIAQRTARVNQIRGLTAEYGIIAPVGISNLRKHIPCWLEDAENSLSFQFRELLQLLYEDLISLDERIDKVTDKIKLNLSGNPIAQRLMKIIGIGPLVCSALLIDLGDGMSFKRGRDFSASLGLVPRQHSTGGRERLLGISKRGNGYLRKLLVHGARAAFRYVKDKTDALSLWIKKLSITKHPNVAIIALANKLARISWAIVAKNVEYDASRAAA

SEQ ID NO: 220031 - protein, 343 aa, unidentified
MLDVAIIGLDLAKSVFQIHGVDRAGAVTVRRMLRRAQVLDFFRKLPACLVGLEACASAHFWAREITACGHDVRMIPPIYVKAYVKRGKTDAADAAAICEAVGRPTMRFVPIKTVEQQAACMVLKTRDLLVRQRSQVANAFRAHMSEIGVIASAGMVNIEKLAEMVRNPATALPDLARRSLLELVEQLDDLGKRIGRLDEDIRAGLKTDEAAIRLTSIPGVGPLIAATIRATVPNPSGFLRGRDFAAWLGLTPRLLSSGGKEKLGAISKQGNRRLRTLLIVGATSILKQAKRGVPLPRWLTALLARKPYKVAAVALANKMARIIWALLAKGGTYIRPEPIQVPG

SEQ ID NO: 220032 - protein, 343 aa, unidentified
MEAYAGKQFVGIDLHRRRTVIVRTTEAGEVLEAVRIVNDVQRLASVMARAGDCPEVVLEATYGWYWAVDALQAGGANVHLAHPLGVKAFEYRRVKNDFRDAQDLADLLRMGRLPEAWIAPPPTRELRELVRHRAKLVGLRSHCKAEVHAVLAKCGVQVLMSDLFGVAGTELLDGLDLPAPYAARIASLRRVMDDLDFEINAFAGIIRGRMAQEPGYTAVQNIPGIGPTLGAVLVAEIGDITRFASASKLTCWAGLTPKHHESDTHVRRGRITKQGSRLVRWAAIESVKTISKTSEVGVLRERVADRRGRNIGSVAAARLQLEFVFYALRDGHVRALEHLPRVA

SEQ ID NO: 220033 - protein, 330 aa, unidentified
MENFKCVLGVDVSKLTLDICCAEQQLHIKIENCSKGFSDFRKWSKANKIDLQKTFVVMEFTGGYEYRFIQFCESMSVAYCRISGLEIKRSMGMTRGKSDKVDSYRIGQYGEEKIKKLEQAKPLDNNVLQLKQLLSFRKRLVRETAGLSATVKERKHIYELNQKDPIIKVAGEKIKTNQKYVKLIEEEITTLIAANSAMLFNYRILRSIKGIGPINAWMTIAYTENFVSFTDARKYAVFVGVVPFEHTSGTSVNGRKRISQMANKELKQELNQAAKAAITHDTELRSYAERKLKNKHYKIILNNVKFKLILRMFSLVKRGELYVENYKKAA

SEQ ID NO: 220034 - protein, 400 aa, unidentified
MRKPRQSEPRQCKPQQRKADDLSRCLMPLIADQTLIAVVELSLSGWLVAGVVPGVERQPLKKLKPELDRLLELLGRWGNEAERSGRKIARTVVAYEAGRDGFWLARSLKAYGIEAHVIHPASVAVSREHRRAKTDRLDTELLKRAFIGWLRGERDHCRMVAIPTFHEEDAKRPSRERECLVAEQSRLINRMKSTLVRLGIRGFNPKLKCAMRRLEELRTPEGEPLPPNTLAGLRRDLERRAFVCEQIQKIEAERVARLERAPEARPTLMVRLLGRVIGIGVETADLLVHEILLRSMRDRRAVGRYAGLTGSPQRSGSLNREKGLARSGNPRVRRTMVQLAWRFLLHQKDSALAQWFHERTKNARRTRKTIIVALARKLLVALWRLVHEGIIPEGIVMRPA

SEQ ID NO: 220035 - protein, 435 aa, unidentified
MEEVTDEPLYRNRVCGIDIGKAGLVATIRVPSDKDPARRAAETRSFGTTRREVLALADWLRSWQVPAVVMEATGDYWKGPFYRLEAEGFDCVLADAKQVRHLPGRPKRDPSDSRWLAACFERGAVTSCFVATPEFRVIRLHTRYRRDLTEERTREKQRAEKLLESAAVKLSSVVTDLHGVTGRDIMNHLIAGDRNPKALAQLARARARRKIAELEAALEGAEFFTPEHAALLATMLERIDQLNTRIGGLTEVIERLLAPYEEQLAQAESMPGWGRRSAQDAIAETGTDMSRFPTGAHLASWAGRTPLDNSSGKRKGRSRSKKGNRYLAAVTGETAVAAGKTQTREGARYRRLARRRGKAKAQVALGNTQLKVYHALLSRPGTRYADLGPDYYERQASTRRQIAHHVGKLGALGFEVTLCRLPEPAQGGSDSTHAA

SEQ ID NO: 220036 - protein, 345 aa, unidentified
MKNTIVGVDLAKEVIQVCIYTNKKVTSNKEVAHHEFLSWLFTTKPTTLVFEACGTSNYWQQKAIEAGHEAHLISAKLVSTVRQNQKTDKYDALAIVQAAQLPDIHFITGKSKEQQQLQSILRLRELAIKQKTALNNQLKALLLELNIRVSTRNGGLSGTIKAVLEDAENGLSSEFRAALDAAFTCFLSLVDSIASYDECLEKSVQEHKDCQRLFKLEGVGIINAVNLYIALGCTELGVFNKGKDASACIGLTPIQYSSGGITKMGSIGKYVKNSLLRSQLITGALAAVSQIVKRPAKTKKEAWVQGLVERKGKKCAAVALANKTVRTAYAMLTQETEYKAEMLTV

SEQ ID NO: 220037 - protein, 353 aa, unidentified
MGMVVALDVHRNQITFKALDRDTGEVSRGRIAPAARVDVRAWLGQFAGRQAEFALEGTTGWRFVVEEIERAGHTAHLADPAETAAKRGRKRRAKTDNADCDLQLRLLLAGELPESWIPPAHILELRTLVRLRKTLIDQRTAWQQRIHAQLFHQGVPAGLRLRTEAGRQALAKAELSPAGRELVALGLRMLDTFDLELAPLDRQLRAFARRQPGCRALIERLYGVGPVSATAILAELGDARRFSSSDDAVRHAGLDITVYQSDQKRAPGHLSHEGPELLRWALFEAAQSAARASSPDRSYYLQVADRIDHNRACLSVARKLCRRAYHILRELGEDALAPIEQAVADEEAIAAAA

SEQ ID NO: 220038 - protein, 374 aa, unidentified
METIYIGVDFHARQQTICYLKTETGELVTCELKHEDKQAVRAFYAQFGGQVVVGLEASGYSPWFERLLEELGCEVWLGHATEIRRRARWRQKNDRRDAELILELMLHHEFPRLHRPAVQSREVMRMLRYRQKLIKIRTMSKNSLQALALQAGVARRSHLFTREGKQELTAALMSPAMQWQREHWLQLLEPLNQQVLEAMVWLKAQSKGDVAVARLRTHPGIGLLTSLCLAHTLQPVDRFRNTRKVVAYAGFDPVERSSAERKRFLGISKAGSRLLRHLMVEAAHVAVRKDEDLKCFYQRLADRRGRPKAKVAAARKLLIRTYIMLRDEIDYAEFRRRAVAARLARLGHGPKVPEVVIGQPASTERQEQLSRTRK

SEQ ID NO: 220039 - protein, 411 aa, unidentified
MDKVYDKCCGIDLHKKLIVACFKQGNRQEIRDFGATTRELLEMADWLKEGGCEMVAMESTASYWKPLYNILETCELKAMVVNAQHMKAVPGRKTDVKDAEWIADLLQHGLLTASYIPDKDQRELRELVRYRKSLVGERARELNRLQKMLEGANIKISGTIRDINGKSARNILEHLLSGKQIDSAEYDILYEKKVIAHNLKATKEQIIDDLNGVMSALQKKMMRIILNHLDELNAHIRELDDDIDNFMKPEEKEAAKVIQDIPGIGNTSAQAIISVIGADMSRFPTDAHIASWAGLCPGNNKSANKRKSGKTRKGNGLLRDTLIVCAHSAVKNKSSYFHAQFARISAHRGSKRAYVAVAHSMLVAIYHILKEGVAFKDLGADYYNQFNRERKINAYLKKLKALGWEVPVVAA

SEQ ID NO: 220040 - protein, 378 aa, unidentified
MDVLYHRCAGLDVHAETIVVCALLGEEDHIQKEIETFPTFTKDLFRLLKWLEDRGVTHIAMESTGVYWKPVFNILEDYFDITLANAQRIKNVPGRKTDVSDAEWIAKLLRYGLIEKSFVPPADIRELRDLTRLRKKWIGQLTAEKNRIQKVLECSNIKLSSVISDIFGVSGRKLLERLMKQGYIEEPEIDACIHGRMKGKRQQIQDSLFGTLTEHQLFMIRQSWKHIESLESLLREIEERIDQLLQAYKQEMELLVTIPGVKKETAAVIIAEIGVDMGQFPTSQHLASWAGVAPGNHESAGKRKSTRTTKGNPHIKSALCEAAWALSRCRNQRLAAKYWSLAARRGKKKALVAMAHRMLTIIYCMLSRKEPFREQPTY

SEQ ID NO: 220041 - protein, 317 aa, unidentified
MAMQVGKLIVGADVAKAELVIHHDDRDEIIRLKNSKLEIRRWLKQQTLNTAIAVEATNVYHLDLVELAHSLGFEVYVIDGFQLSNYRKSVGGRVKTDPSDARLLSRFLKNEGEDLRPWSPPPAVYGKLQSLLRRRAALVTARTAMTQSWANESLLKAAFETFVKSIDRLDQLIQKKIKEVLRDAGLQEQVARCQAVEGIGFLTAAALVMAFTRGEFKSSDSYIAFLGMDLRVSDSGQKNGRRRLTKRGCSEIRRLLHNAAMAASRSAAWKGLYEQHRSSGKATTQALVILARKLARVAFALMKNQDEYVTKGAKLAC

SEQ ID NO: 220042 - protein, 528 aa, unidentified
MPYQVRTSHRKHRKSKSNSRKRQTVQKPNGVIAPRVKKVGGERFAIVCVDPAKHRSEWMMADYFGNLLIEQQTVEHRAAFFKLAVARIREAQEKHDIQDTIVVVERTGNYHLPPKRAFAKAGFETRVVHPFATKQYRMPADPGIKTDGNDLNAQHRAAVAGFGLCEFELESPYRELQLRARHRRNLVEKGAAMACQIREHLHLSMPGYASMFDRLFERPTALAIAARCDSPAKVIELGQARLSQHLRKNKIRHQVRTLEKVLAWAAQVADDNVQDGPMHHAIWTDLHELYQHFQRQITALERELAGDLVQTPYVRLMAIPGINVVSAAELAGEMGPITRYANANAITGRSGLYPSRHQSDQTDHDSGPIIRQANRRLRCVLMRIADNLSCHCNYYRGQAGVDEARGIDKRSSRVKIAKRFSRLLLACVAGNEPMRHPCFQQPDSILEKLRHFHHEHETPLDRLLADLETAVGQLPYNTRSREAEIVAQVLGEHAHRRAGVTTIGALLPAVLARLGIQTTNEKENRDRS

SEQ ID NO: 220043 - protein, 345 aa, unidentified
MSMVIYVGLDVHLNSIAAVWGKPQEKPRTLVIEPSDEGFSALVKAVGTKDVWGVYEASSCGFEAYDRLREAGWKVSIVAPTHIAKSAQSRKRKTDLRDALRLREVLMSHAELGTEMAQVWIPSRELQEQREVVRRRLKLGEVSCRVKNGILSLLRMHRMKRPSGMKGAWTRKHLAWLKELAEGSILGAHVRLVLGSQLRELDFVQREIDVVQKAVEALAEEQPYRAAVENMTRVPGVGVLTALTFLVELGDVRRFDNRRQVGSYLGLVPASYESGEASDRKGHITRLGPPRVRKVLNQAAWQLVRLDARWREGYQAIAARGGPKNAIVAVMRKLGIELWNRAKAA

SEQ ID NO: 220044 - protein, 318 aa, unidentified
MKTPSRYLGVDVSKDLLVVAFERNRWQFANSKQGHRKLIAQIGKQSGSIHVVCEATGPYHLAMGLALQEAGIALTVSNPTRIKYFGRSEGVLAKNDPIDAALIERFANAKRPEADPPISREQIALNELVNHRAQLVASRKRLLATGQQLLDAGVRKEVDRAIAALDRCITAAERRLKEKIESNPNWKAKLACLSSVSGVGFITAVVLLAKMPELGSLSRGQCAALGGLAPYDNESGAHSGKRSIHGGRSDVRSALYMSALSATTYNPVLRQFYQRLIEAKKPCKVAITAVMRKLLVYLNSLLKSLRQAPALSGGQTYP

SEQ ID NO: 220045 - protein, 376 aa, unidentified
MKKIRFVGLDVHAETITVAVAEPDGEVRSLGTIPNREESVRKLVKKLGSPEQLRACYEAGPTGYVLYWLLTSLGVQCDVVAPTLVPVKAGDRVKTDRRDALKLARNHRNNDLTAVWVPDEAHEALRDLVRAREAAKQDQLRARHRLSKFLLRHGKRFPEAGKAWTLKYMAWVRQVRFTQPAQEYTMLDYLHEVEHMNERVLRLEQAIEEAVKLSPAWMQEVVQALQSLRGVAKISAATLVSELGEISRFDNPRKLMAYSGAVPGENSSGERVRRGAITKTGNAHLRRVVIEAAWSYRLRPGIGPALRQRQKGVSEEVKEIAWKAQNRLHKKYQRLMAAGKDQRKIITAVGRELLGFIWAIGRATETRCRQQSAMTA

SEQ ID NO: 220046 - protein, 270 aa, unidentified
MNTMTLLGIDIGKHSFHLHGQDTQGHQVLRKKMSRGQLLRSLAQLPICTVVMESCGGAHWLAREIGALGHAVKLIAPQYVKPFVKGNKNDFIDAEAICEAASRPTMRFCTIKTAEQQTLSALHRVRGSLIEHRTAATNQIHGFLLEFGISLPVGVTALHRVPALLDDPQHPVPLRLKGLVMRLYYQIQQLTDEIKDIESDLKQQLKEDDAGQRLQSIPGIGPITASAVLADVGDVSRYRSGRDFAASLGLVPGQYSTGGKTVLLGDQQAW

SEQ ID NO: 220047 - protein, 350 aa, unidentified
MSITKQSIGIDISKDTFTACGCSHQSDGKLIFSEVKSFNNEATGFNQLLRWVKGFATPGVQVVFLMEATGVYYESLAHQLFKIKKKVVVVLPNTSKHYFASLNVKSKTDELDARVLSRFGVERIHRYWAPPSPVMLQLRNLTRYHLQLQEQKTALGNIKHSKEAAHGVQKFIMQSNKKLIKQLDAQILNCKSEIERLIKSDTELSKKVEKLMTIKGVGLMTIATIVAETLGFEHFKNAKQVVSFAGYDVVQRESGTSIKGKTRISKKGNKYIRNALYFPAMVATRFNVDLKTTYLRIINRKTSKMIGQVAIQRKLLVLIYTLWKTDSNYIIGYKEVAPTILAEATLDSHL

SEQ ID NO: 220048 - protein, 348 aa, unidentified
MSSYYIGADVHSNSTELAIENRGKIVARYSVPTSIPAIANVLNVFQGKKYMAIEEGPMSGWLYRNLSKQMDDFISSDPRRNKLIASDGDKDDKIDAAKLASLLRGGFLRRIHQSDDAGRAELKHWVSLYHDRVRDAVRSINKIRGRCRMHGVKLSRAALRNPDSRADWLLETNNRALATQLNMLWIGYDATVQQVKLAKRQLALLGKKYEIIQFFSQLPGVGLIRATTLFAYLDTPWRFKKKNKLWKYCGVGLQRTTSGTDKKGNPKPARLKLPWAVNRTLKNAVLGAAQTAINQKNNGFKDYYERMVQHGVITSNARHAVARKMLTAMWAMWKTNSPFDENLVFLSN

SEQ ID NO: 220049 - protein, 348 aa, unidentified
MEHIAIDLGGRKSQICIRDATGKIVQEKQWATDYLGRFLKGRPKSRVIVETCSESFHVAGQALAAGHEVRVVPGTLVKSLGVGARGIKTDRRDARVLSEVSTRIDLPSVHIPSMGSRSRKTMCGMRDSLVRTRTQIINTIRGFLRTQVIRLRKGATVTLAKRVREYFEEQGLDLAEALERQLETLEFIHKQVVAADRQVKRVAQGDPVCVRLMTVPGVGPITALRFVTAIDDVTRFRNAHVLESYLGLVPGEHSSSEKQRRTSITKAGVPAVRRALVQAAWVAWRVQQGGPLGAWANQVAGRRGKKVAVVALARKIAGILFAMWRDEKNYDTTRSAKPRATVEFPVAG

SEQ ID NO: 220050 - protein, 360 aa, unidentified
MEQITRGESSRVVVRVGVDLAKRVIQVHAVDATGRLLTSRALARGKFIEWCVRLPAGCVIAMEASSSAHHWARKLVAMGLDARIISAQLVEPYRTQGASGKNDANDAAAICEAASRPTMRFIPIKSVEQQSMLCVHRLREGLKEDRTACINRIRGLLAEFGLVFAKSPRELQAVLSGVLEDASNELGTLARLTLQRAQAQWRELDEHLVWCDQRIDAHGRDNPEVRQAATLIGIGPVTASAAIATVGDFKQFKSGAQFGAWIGLTPRQRSSGGKNNLGGITKRGDTYLRTLLIQGAKSAVMTADRRRDKISSWVSALRERSGWQKAVVALANKNARILWAVMTRGETFDPNHLSIKPTGA

SEQ ID NO: 220051 - protein, 525 aa, unidentified
MSRIHRVLQKGGRASGSSDRQLLGARCPTLSVVPVEGDRFIGEAEPPFKRFFHIAPGPKHITSNKRWCDRMTKVTKKQKPIQVSEDMPVINRNAGGIDVGASEVWISVPPDRDEEPVKRFETFTRDLYTMADWLKQCGIGSVAMESTGVYWIPVFQILEQRGIEVILVNARHAKNVAGRKTDWLDCQWLRILHTFGLLAGSFQPAAEIAVLRSYLRHRQMLIEYAAAHIQHMQKALTQMNLQLAHVVSDVTGLTGMRIIRAIVTGERNPQRLAEMRDWRTKSDEETIAKALEGNYQPEHVFALRQALELFDFYQQQIQVCDQQIRDYLRSLESKTDPENNPMKPARAKKKNRRNDPSFDCRHEAYRISGVDLTQIDSISESAALTILSEIGVDMGPWKTEKHFASWLTVCPNNKITGGRIFQRRTRKSANRVRDVLCLCAQSLFNSRSALGAFSRRMRSRLGPEKAIVATAHKLALLIYRLIKFGKDYVDIGEDAYEQQYKKRAVRNLARKAKEFGFQLVALAEA

SEQ ID NO: 220052 - protein, 335 aa, unidentified
MGFEFFIGIDVSKNELDFAVVQGSRLLFHREAANTPEAVKAFVGELGKLPGFKLGKAVFCMEHTGIYNNHLLNCLYKKKAHVCLEAATQIKNPLGNVRGKNDKVDAIRIAGYAYDKREKLRLWEPKREVVQQLAHFTAVCSRLVEAKKMLKTPLLETGVFLSKTIAKKNSGLCDSTLKSIGSDLKKAEKAIAGLIDADDELRRLFGLATSVGGIGKVTAAQIIMATNEFKDIGEPKKFACYAGVAPFTKESGLFKGKARVSHMANKKVKTLLHLSAMVAIQHSPDLKLFYERKVNQEKKNKMSVINAVRNKLILRVFACVNQNRLYENNYNKLVA

SEQ ID NO: 220053 - protein, 341 aa, unidentified
MDKTLYCGVDLHSNNAMYVITDQEDQALFKRRLPNALPEVLEALEPYRRQLKVVAVESTYNWYWLVDGLLDHGYPVVLANPSKIDQYDGIKEADDLTDAAFLARLARLNILPTGYIYPAADRPVRDLLRRRRLLVRHRVALMLSLQTMAMRQSGQSIGWRALRTLSEDQRCVFLGDNDCLTFVTDQQIELLELLNERIKRFEDKVLEHTCLRPAYECLLTMPGVGVILALTIMLETGPMERFKTVGDYTSYCRCVRATHRSNGKIKGQHNERNGNPYLAWAFVEAVHHAIRSCPAAKRFYDRKLAQRNGALATKALAAKWTKAAYYMMKRQEAFDLSRVFG

SEQ ID NO: 220054 - protein, 431 aa, unidentified
MKKLSSEPPAQPIVAFVGIDWADQKHDIVWSAATSAAATEHQVVANRPEALSQWVTEMRQRFGPQGRIAIFLEQSRGALIYHLMNYEGLMLYPINPLQMAHYRKAIKVSGDKHDRLDATLLCQFGRLHLDGLKPWQPDDALTRKLALLNEDRRQAIEKRSALANELKSALKIYYPLALELLDNDTSTLLAADLVLHWPALEILQKQSQSKLRRFFYAHNCRSEQKMLQRLEAIRQAQPMIRDRAIIEAAALKVQLLSQQLKSLLPYIALYENQIAQLFGSHPDGFLFSDLPGAGPALGPRLLTAFGTDRDRFSSSTEAATIFGIAPICDSSGKRTPKQPGTVCYRHACPKFLRQSWHEFAACSIRSCPWANAYYEAQRAKGKSHHTAVRALAFKWIRIAYACWKNRTPYDPNRYKLALAQRGSPFAPATAQ

SEQ ID NO: 220055 - protein, 374 aa, unidentified
MRSPNNMLFVGLDVHKESISPAYAPQEPGSEVIALGTIGTRQCDIDKLLKQLQSKGRALRIVYEAGPCGFWLHRYLHKKGLECSVVAPSLIPKRPGDRVKTDRRDALQLARLHRAGELTAIHVPDIEDEAVRDLSRAREDAMRDLKSAKFRLKAFLLRQDIRYEGQARWTPAHLRWLARVVCPTPAQQIVFQEYLRTINEQNERLARLEQALREQVEHWWLAPVVEAVQALRGVQFTSAVTVIAELGDLTRFTHPRQLMSYLGLTPSEYSSGSKRQQGGITKSGNTHARRVLVESAWAYRHPAKVSAYLQKRIGHLPKELQDLSWKAQVRLCKRYRSLCARGKHVNEVVVAIARELAAFFWAVAKIVPITHNAR

SEQ ID NO: 220056 - protein, 343 aa, unidentified
MKLTRVGVDLAKQVFQVHGVDRAERPAWCKRLKRSRWIADLERDVEPGAEIGMEACGSAHHWARLLQSKGYRVKLIAPQFVKPYVKSNKTDANDAEAICEAMSRPSMRFVGVKTVEQQDLQAVHRVRSSLIRERTAKANQLRGLVYEYGLVAPREISSLRRAVPQWLEDAENGLTVRFRSLLAGLYRDLKQLDERVRELDQEVATITREHEPVRRLMQINGVGPLIASALYALVGDAKQYRNGRDLAVALGLTPRQHSSGGKEKLLGISKRGDKYVRTLLIHGARSALRTAPSRTDRISRWALALAERSHPNVAVTALANKTARVAWAMLRHGANYEPERVAA

SEQ ID NO: 220057 - protein, 348 aa, unidentified
MQISTIGIDLAKNVFQVHGVDASDKPVLKKQFRRGQVIEFFGKLPPCLVGMEACATSHQWARELKKLGHDVRLMPPSYVKAYVKRGKNDAADAAAICEAVRRPSMRYVPIKSTEQQSALMLHRARDLLIRQRTQLINAIRAHLAELGLVAQKGREGLQQLMRTAADADDEALPSDARFACQAIVAQLQAVQMQIAGLDKRMHQAHRANPASKRLETIPGFGVIVSTAVVATMTDPKAFKTGREFAAWIGLVPRQNSTGGKDRLGSISKQGDRYLRRLLVLGALSVVRRARTRPDKYPWVVAMLGRRPAKVVAVALANKMARIAWAILAKGETYRAPMHTSSGAIAASA

SEQ ID NO: 220058 - protein, 344 aa, unidentified
MQVSTIGLDLAKQVFQVHGVDVEGMVVLRRRLRRSEVVKFFSTLPGCLIGIEACATAHHWARELSRLGHQVKLIPPSYVKAYVKRGKTDAADAEAICEAVSRPSMRFVPLKSVEQQSALMLHRSRDLLVRQRTMLVNAVRGHFAEFGMVAPQGIRRVGELAALLIEEDATTLPSLARQALRALLAQLQALEKQIESLDAAVIASHRDNEVSRRLASIPGVGPITASAIVASVADARQFKSARHFAAWLGLTPRSHSTGGKERLGGISKQGDPYLRRLLVTGATCVIRYARRKAPGEGGWVKALLARRPARLVSVALANKMARIVWALLVRGNVYQAPVVTVATA

SEQ ID NO: 220059 - protein, 366 aa, unidentified
MKQQHQDSEVTIGLDLGDRRHRFCALDSRGEVLEEGSLLNDRASLARLTARYRGALAVMEAGAHSPWVSRYLKRLGWEVIVSNPRKVRAIYQHERKSDQRDALMLARIGRMDRALLYPVRHGSEEAQQDLLRIKLRDSLVRARVALINSVRSSLKSLGYAVSNPSSERFHKVAMERLPERVQQMIAPSVQALAELSMRIAVLEREINVLARTKYPQTLWLQQVPGVGALTALYFVLKIEDPQRFENVRNVGAYAGLCPRRDQSGQSDPQLRISKRGDPYLRRLLVSAAQYILGPFGPQSALRAYGLMLAADGSARARKRAVVAVARKLAVLLLSLWKNRSHYEAFPHWQTIEDKRSGTIAMHRVEA

SEQ ID NO: 220060 - protein, 338 aa, unidentified
MTILMGLDQHRAQITAEWVDTSTGEVSRARVAPADRAGVRRFLARFRGQQLEVALEATTGWRFVVEELQRIGAVVHLAEPADTAALRGHKKRAKNDRADARHVRELLMAGRLPESWIPPAHILDLRARVRLRHTLSEERGEWQQRIQSVLYHHGCPQRGDLINQAGLAWLAAQALPACAREQVTAALAMIDALERQLAPLDKELRRYARRQPGCKALMRHYGIGALTAVTILAELGDPTRFSSSREAVRFAGLDITVHASDQRRAPGHLSRQRPPALRWAPFEAAQCARRPNSPDHTYYQEAAKRLGGNRACLSIARKLLKRSYHTLRELGEEALQPA

SEQ ID NO: 220061 - protein, 341 aa, unidentified
MAVAGGLDLHRGQLTFDYVDTGTGESWRGRICPADRESLRGWLRRFHGVPDVEFAVEGCTGWRYVAEELQRAGITPHLAEPAGTAGLRGRKRRAKTDWADARHLRDLLLDGRIPESWIPPGHVLEARALVRLYKDLLEERTSWQQRVHATLFHQGIPVVPKLGTADGQQRLEAAELSAAGRRAVQAGLRQIERLTQEMASLRRELARLSSRQPGCRALRRAHYGIGGLLSVAVWAELGDCRRFSSSDDAVRHTGLDITIYDSDGRRARGHIARQGPPVLRWALYEAALYASRPASPDYAYYCGVRDRIDGQRALLSVARKLARRCYHTLRDLGEDALAPAA

SEQ ID NO: 220062 - protein, 389 aa, unidentified
MTESSDYESVQVFIGVDVGKDTHHAVAVNRSGKRLFDKALPNDENKLRSLISDLKQHGQILLVVDQPATIGALPVAVARSEGVLVGYLPGLAMRRIADLHAGEAKADARDAAIIAEAARTLPHALRTLKLADEQIAELSMLCGFDDDLAAQTTQVSNRIRGLLTQIHPALERALGPRLDHPAVLDLLQRYPSPDKLASRGEKKLATQLCKLAPRLGKRLAADITRALTEQTVVVLPRLALQLITLRKQRDEVALEVEQRVLAHPLYPVLTSMPGVGVRTAARLLTEVACRAFASAAHLAAYAGLAPVTRRSGSSIRGEHPSRRGNKTLKRALFLSAFAALRDPISRAYYTRKMSQGKRHNQALIALARRRCDVLFAMMRDGTFYTPAAS

SEQ ID NO: 220063 - protein, 429 aa, unidentified
MEVMHERVAGLDVHKATIVGCVRVQVGREVRRECRTFATTTDGLVALLAWLTASRCTHVAMEATGVYWMPVWKILSDGDFTLIVANAAHIKNVPGRKTDLNDAMWIADLMACGLINASFVPEEDLQELRSLMRSRKQLTREQTRHVQRMQKTLTEANIRLDSVICDIMGASGRRIIEAMIAGVRDPHQLAALASKRIKATAQQLHDALHGRLTDHHRFLLKLHLGQWDGLDAAIRGIDVEVDGRITRIDQQLKAGAGQGAKAVPFRELIRLLCTIPGVSVLAAITILAEIGRDMSRFPTAGHLVAWAGMCPGQNESAGRRKAARLRKGDPWLKTTLVQCAWAAKRKKDSYYKAQFFRIQSRRGPQKAICAVAASILTAIYHILKDGTEHRDLGADYFNRRSTAAQTTRLVAQLTKLGFEVQLQPIAKAA

SEQ ID NO: 220064 - protein, 344 aa, unidentified
MLIIGCDFHSGFQQLAIFDNRSGEIEEKKLLHPDEATEFYRSLREPVRVGMEAGVPCQWFRRLLAECGHQLWVGDAARIRAAEPRKQKTDRRDAELILKLMLEERFPRIWLPSEEERDVRQLLMDRHHRMRRRSQVKNQLQALALNQGLQKGRKLWSAAGLEQLRQLPMMEHAARRRDELLRTVVELDRQIAELDVLVRHEAEGREDARRLMTHPGVGPQTALGMVLTLGEVDRFESAKKVASYLGLIPGEYSSGNRQRLGHISKQGSSLMRFLLVEAGQTAVRGDAELRRAYARLAAKKSRAVAKVMVARRLAVRLYWMLRRNWTYAELARHAGEPGSFCGAK

SEQ ID NO: 220065 - protein, 367 aa, unidentified
MKKISTVATKQAKNFPPRKLTIGLDLGDRWSWYCVLDEAGKIRLEQRVSTTSKAMSEVFGAMPRSRIALEIGTHSPWISRLLSELGHEVIVANARKVRLIAESRKKDDRLDAQTLARLARIDPQLLYPVKHRSVQAQADLSVIRARAGLVRARTALVNTARGLAKSYGERLRSCNVRNLNPEKAESLSPELQAALEPLLNAIESLSERIVEYNERIEGLAQQSYPQVALLKQIKGVGTLIGLTFLLTLEDPHRFRKSRDVGCYLGLQPGRRNSGQSEPQMHISKEGDPYLRTLLVQGAQHILGPFGPDCDLRRWGLKLAERGGRNSKKRAIVATARKLAVLLHHLWVSGEVYKPLHNSSPTTVAAAA

SEQ ID NO: 220066 - protein, 435 aa, unidentified
MEDISRLQVGVDISRNKADMAMLRATGEILEKHHEFANSQSGYLEAKAHLLRMLQTHNLQGIDIAVEATSYYWLPLLSAFKQDVDLAAYQPRFAVLNATWVKWFKKSNSPGHKSDQSDPYYIAEHLRTMQGKSWWQMEERWLALRFITRLRFHLVKSLVREKNYYQLFLFLAYSAYNQVKPFSNVFGQLSQSLLNDEYLFEDLVKLPELQLAAQLDELSNHQLDDPYQCAVNLKKVYQESFRLLPSLAAPVRQALGTISTIIKTLEAQKHQLNRHIAQLVKKEYPEVNWLQSVPGVGIVYASTIAAEIAGVDRFFEPMKWDKRHNCYRKRNQRDAEDAVAKYAGLWWPRSASGGFVAEELHLSKQGNAYLRYALIEAVDHMRLWIPAYTNFYAKKFAEANKHAHKRALVLAARKSVGLFVGLLHHQVCYRKEEAY

SEQ ID NO: 220067 - protein, 400 aa, unidentified
MFVGWDWASTTHDVTVIDDAGNIVDRWAPEHTEMGLDATMARLIRHGRPEQLPVAIERPSGLVVDRLLAAGHPVIPIHPNAFHAARPRWGAAAAKSDPGDSFKLADYLRTDGHRLRRLRPLDAATRELQALSRLRDDHVAAKTAASNQLGALLDAHWPGAKQIFSRIGSQIALAFLDAYPTPESAARLGEARLAGFCRRHSYRGGRSPGELLGRLRSAPAAPVGLAPEVLAELVGAQVRLLRTLLATIAELDRALGAGLLGHAKAGLLAPLPRIGEISLAQVVAEVGPILDRASTVEHATAECGAAPVTKASGKTKAVTFRWAANTKARNALATFASNSRHSSPWAAKVYADARRRGKHHPHAVRILARAWLRVIWACWHNDTIYDPARHGAERRLAART

SEQ ID NO: 220068 - protein, 422 aa, unidentified
MSYCPVAGIDVSKRFSDMCILSPDNKIFAQEKIYHDETSINRANALLQKAERLFFSKPVIVMESTSHYHLILFQFFSEHGYDVIVVNPLQSNSMKDFSIRKRKTDRVDAFKLAMMYRTKTLRPSQIPQTVTRALRQLCRHRAELLDDVSSYKNRLTALLDQTFPGYDKVFSDVGGVTSCAVLVRFPTPTILLVEEESELVEVIAAASKSGYSFAKKKAGLLISAAQKAQTLGIHSCADETLIVCTIQMLRTLSESVLQIETAIDNLLAQIKEMRNNVSLLQSIPGVGSHSAALLLGEIGDISLFKKPKQLAAYFGLDPTERQSGSFRGTKNKLSKRGSPYARAALHMGVVNSICKRGKDSAANPVLLSYYEKKCKNKPAKVAQAASMHKLVFIVFAVLRDQKPFELKTPEQHAVEQGFVKAA

SEQ ID NO: 220069 - protein, 303 aa, unidentified
MSEITLVGLDLAKNIFRINAVDKNGKRIMNKNIHRGSMVTFFANLPSCTVAMEACSSCHYWARTIESLGHEVQIIHPRYVTPYRIGDKNDANDAAAICSAARRPDMRFVRMKSQNQSDMQSIHRVREGLVKEKITTINRIRGLLAENGITIKQGPTWVFSLVPAIISDENNDLSGIMRNLLRVQHEHLVHLRAQINELETTLKILAAQDEACKRLMLIPGIGLLTATLLSSEIGNGAAFHNSRAFTAYLGLVPRQYSSGGKSKLRGIGKTGNRQLRTLLIHCARAVQRSVNQGKTPFGGGSLE

SEQ ID NO: 220070 - protein, 459 aa, unidentified
MKIVNTHCAGIDVGSRSHYVAIGQSDSDVREFGVYAEDLKELSNWLLDNGINSVAMESTGNYWQNLYVELINSGIQVVLTSGRFTKNMNRKKTDVRDCQWIQKLHSLGLLPSSFLPDSSTEKLRTLCRHRANMIDLKADASNKMQKFLKLLNFRLDVVVRDVTGLTGLKIIEDICKGILNPEELAKNRHYNCRKSQNEIAKALVSNERDDYIFGLNQEFERHKFYLQQIDKCDQKITGFLNQLLKCSSPKKPEEKSYKRNNKNSINGMDLNKVSFQYFQGVDLYQIPGVSHSTILSIMSEIGPGGFEKFPSAKHFASWLRLAPNNKISGGKTLSNRIPKGSSRLKIALRNAANAVGNLKESDLGRFFTKIAFKKGRQAAITATARKIAVILWNMVTKKEQYLTKTTYIFLDEKRKQIALIRKKIAKFGLDPNELGIFTQERYREKWNLKQTNIQTVSLR

SEQ ID NO: 220071 - protein, 401 aa, unidentified
MSKKNTRNALDTSLSYAVIGLDLAKADCAVAAVPCSDDDLGLIDRMDYESLFEQAEKLKPTLFAMEPCCGYSQISLRLQNMGHEVKVISGHAVKNWIATHKSNQKTDLNDATALAKLALYDHDLQPIRVKNVEECRIASVQAIRIQLRTQATKSLVCFKSLCQCWGIVIRRGSLNTKKMAEAVAAVEKLLGAEVASSLMILRDAYKFTMKQINALDKLLDALVEANEQARTMKTVLGIGTQTAARLAVTTGDIKRFPMPRSYVAYFGLAPRNIITGHSGTPSPSKRGALKPVSSRGQGKVSRRGDRVARSFIIQGAATIYMLYCKDMLPECQLRRWLHEQIKRGKPYGKIIVSLAAKLLRIVWALLTYGEKFDSHKAGVPRSVLAAMEKPLKHDVAAESAA

SEQ ID NO: 220072 - protein, 350 aa, unidentified
MLHAGLDLSRKRLDVCLLSEHGELVEEFSAPPDADGLRGLVRHVGKHGVPVRGVIESMTGARFVHDTLEQLGWEVLIADAQKVKGLAPLACKTDKIDARVLAVLSERDLLAAIWLPDPRVRSEREQARFRLHLVKHKSMLKHRIHSTMLSFGHPCPVTDLFGVQGRELLDRLQIPDPWRQSVDASLDLIDYLERQIDQINRDLKASGAEHPYVPLLLTVPGIGWVLAFTIASEIGDITRFPTAKKLCGYTGLCPRVHQSGEKDRRGPLTKQGPKYLRWAMLESTMHALRHPAYAERYQRNKKRLGRQRGARVAQIDIARKLTEAIWHMLTNNQPFAPTPASGGAAFRLAA

SEQ ID NO: 220073 - protein, 403 aa, unidentified
MNNVAGIDVSKGKSMVSVLRPFGEVVAKPFSVGHTGSELKELADYLKSLDGETRVVMEHTGRYYEPVARFLHDEGVFVSAVNPKLIKDYGNNTLRKVKTDKADSRKIARYGIDNWAELRQHTPMDTIRMQLKTLNRQQSLYTKTKTMMKNNLIALLDQTYPGVNALFDSPVREDGSQKWVDFATTFWHVDCVRNMSLTAFAERYRKWCKRHGYNFSQSKAVEVHTGAQDLIAMLPKDALTKTMVRQAIDALNAVSASLERLKAEMQALAAQLPEYPVVMAMHGVGDSLGPQLMAELGDVTRFTHRNAITAFAGVDPGADQSGTHEAKSTRVSKSGPPELRRALFLVMDCLLKTQPQDDPVYRFMDKKRAEGKPYLVYMTAGANKFLRIYYGRVKEYLASLEGN

SEQ ID NO: 220074 - protein, 345 aa, unidentified
MNTTQVAVDLAKSVFQVAVSHAPGRVDEQHRLSRQRFRNFFLHHPPTHVLMEACGSAHHWGRELQTFGHQVSLLPPSHVARYRQGNKTDRADAKALLEAARNEDITPVPVKSLDQQAITALHRLRSGYLATRTARINTVRGLLREFGLPVPQGARTFLTQAHLVLEDETLPTYLRVALTQALLEIQELQTKADDLKSQLERIAPLIPSVPFLMTVPGIGILSATALVASVGDVRRFPSGRSFAAYLGLTPRESSTGASRRLGPISKRGNRYLRVLLIHGARSALLAAHRCPEPDSLQAWAIRTAQTRGHNIATVALANRMARIAWRVWRDQRPFQRRFAAQEDAA

SEQ ID NO: 220075 - protein, 289 aa, unidentified
MMIIGCDYHPSWQQICWMDTVTGETGEKKLEHASGEAEKFYRGLSVPALIGMESTGNCQWFVEMSTTAGHDVWIGDAARIRASDSRQQKHDRRDAALILKLLLEGRFPRIWTPSGEEKDLRQLLIHRYKLVRIRAQVKNELQHLAMNQGITKKRRLWSKAGEKVLRELPLKPWASRRREDLIQVREMLSTQIGLLDQAVVEVAEKNEKARLLMTQPGVGPITSMAFVLTMGDVNRFQRGKQVASYLGLIPREYSSGGHQRFGSISKQGNRFMRMLLVEIDGPPGSAPGG

SEQ ID NO: 220076 - protein, 369 aa, unidentified
MKNTIVHHEGAASLEVAVGKVKRCGSIIKIGLDMHARLYVAVAQYDQLLPKPARRLAPTEFVPWVEQLLRAGHTVHVVYEACGLGFGLYRQLKEIGAHCYVIAPRKLDEQYTRVKTDPRDATTLCQRLSRYLDGNTRELAVIRVPTEEEEQARHVSRQREQLVHLRQKLEFQGRSLLVNHSLPSPAHWWKNQTWSRLSKLLPGWLIIRLEVHRPALLTLQQQIDALSAELEAAAPAHVPAGIGKLTTVMMTREICSWERFKNRRAISSYTGLCPGEHSSGSKRIPGSVTKHGNPRLRAALVECAWRMVRFQPNYPPVKKRLAVLCKGARATGAQRKKAIVAVARHLAVDLWRIHTGRNTAQQLGLTINL

SEQ ID NO: 220077 - protein, 300 aa, unidentified
MDARSPTIRNIIGGVDTHKDLHVAAVVDDCDRVLDTCSFPTTRQGYRQMLAWMRSFGDLQRIGIESTGSYGAGLLRYMQAIGIEVLEVTAPDRHDRRKRGKNDDLDAQSAAHAAFAGQRTVTPRSRNGMVESLRVLKACRKTAVNARRIALQMIQNTIIAAPDPLRDQLRRMTRMQLIRTHAAWRPDLTAYRDIEAAYRICLISLARRYLELHDEIADLDMMIGAIVKNLAPDLIARNSIGHNSAAQLLLTAGDNPERLKSEASFTALCGVSPVPASSGKTVRHRLNAAGIVLQTAPCIS

SEQ ID NO: 220078 - protein, 319 aa, unidentified
MVVGIDVAKAELVVATRPSGERWTVRNDERGVRTVVERLRRDAPDLIVLEATGGYELLCVAALAAAALPVVVANPRQVRDFAKATGQLAKTDRIDAEILALFAERVRPAVRALPDTEAQELEALLARRRQLLEMLQAERNRLGQVFGRGKQPVKKSLTTHIAFLERELKRADTELAELIRTSPAWREKDNLLQSVPGVGRVLSFTLLADLPELGRLSRREIAKLVGVAPLSRDSGTMRGRRFVQGGRASVRAVLYMGALVATKRNPVIAAFYQRLVAAGKPKKLALVACMRKLLTILNTMARTGERWSAEYQAKTLIPA

SEQ ID NO: 220079 - protein, 346 aa, unidentified
MKQITTIGLDLAKQIFQVYGADADGFPVFNRRLRRAEVLTFFEKQPSCLVGIEACGSSHYWAREIAARGHDVRLIPPAYVKPFVKRGKTDAADAEAISEAVIRKTMRFVPVKSIEQQTAALVLKTRGLLVRQKTQAINALRAHLSELGVVVGVGTAKVAGLIEIVRDETDARLPKAARFALSAITDQIEALTRQIGRLEQEIVAEAKQDKDMRRLTTIPGVGAITAASIKALVPDPAGFKSGRHLAAWLGLTPKSRSSGGKERLGKISKMGNAELRSLLVLGATSVLRHARGNKKASKWLTAILARRPYKVVAVALASKMARIIWALLTKGGTYRVMEAARGVADA

SEQ ID NO: 220080 - protein, 396 aa, unidentified
MAMRKREEELVFPNAAGIDVGASSHWVAVGGQSCGEPVREFGAMTDDLNAMADWLLSCGIDTVALESTGVYWIPVYEVLQQRGLKVFLVDARQMKYVPGRKSDVQDCQWLQRLMSQGYLRAAIRPGEEVCVVRAVARQRDVLLIEQASWVQRMQKALVQMNIQLTEVLTDVMGTTGQAIIRAIVAGERDPKVLARHRHVRVKASEQDIAKALTGNWRDEHLFVLGQASAMYDDIARHLNECDTKLQGLLTQLGQAQVDLGKMPRAGSKTRSSFDARQILANWAGVDLTRINGLGLAAVMKILSEVGPDLSRFANVKHFCSWLGLCPGTKISGGKVLSNKTKRSGNRVRQALKMAAMSLSHSDSALGAFYRRMSARMDKPRANTATAHKLARWCTSC

SEQ ID NO: 220081 - protein, 349 aa, unidentified
MKYSNAKQEHKAIKVLGIDLAKQSFQLHGVDEKGHVVLRKKLSRKQLSTYIAKLPPCLIGLEACGGAHHWVRTFTGLGHHVKMIAPQFVKPYVKSNKNDAADAEAICEAVQRPNMRFVPVKNIVQQDIQSLHRIRSQRVARRTAHANQIRGLLLEYGIVIPKGINYIRKAIPEILEDAENNLSPLFRELLSELYDEMVHLDEKISSLDERLENIATQHEDCRRLLTIPGVGVLTATALIAAIGDISVFKNGRELAAWLGLVPRQHSTGGKATLLGISKRGDNYLRALLIHGGRAVVRVAHKHQDKRNQWVGEIKQRRGENITNVAVANKNARIAWALLSKKEDYRTVAA

SEQ ID NO: 220082 - protein, 373 aa, unidentified
MKNSTTKLFVGLDVHKESIAVAYAPEQRGAEIISLGSFGTRHCDIDKLLKKLLSHSLNLVFAYEAGPCGYWLYRYLTKKGHACLVVAPSLIPKRPGDRVKTDRRDAIMLARTLRAGDLTTVYVPDVDDEAIRDLSRAREDAKRDLRAAKLRLKSFLLRQDIRFEGTANWGQKYLRWLGNVTCETPAQQFVFQEYVHAITERNERVERLETELRSQVDNWRLKPVVTAIQAMRGIQFITAATLIAELGDVTRFANPKQLMGYLGLTPSEYSSGRKRKLGGITKAGNSHARRVLVEGAWSYRFPAKISRHLQYRLELVPKEIQAISWKAQVRLCKRFHRLTASGKHRNKVVVAIAREMAAFVWSIAMQTPIKDVK

SEQ ID NO: 220083 - protein, 341 aa, unidentified
MKNKSFIGIDISKNVIDASIFCEGTPIKDFPHAVFNNSRKGFGEMCTWLKKNHVVLSNCLFGMEFTGSYSMELEKFLYARNYQFCMLSTHVVKHYPMGSKDKSDKIDSAKIADFLYRYNGTECVKPYKMPDKTMQRLKTLMNERKFLVEQRTCFMNRRQLCSTKEDAQLYDGYIRKLGHDIENIELEEQKLLATDDSLLTTYKNLLTIPGIGFVNAINAIVITRNFTAFETARQYASYVGVAPHSHTSGTSMRWRPRPSARCDGQAKADLSMAATVAVQYDAELQSFYNRKLGGKQDSDTKRKALNAVKFKLVLRMFAIGKQNRKWEPLDSKSSNEKLAIS

SEQ ID NO: 220084 - protein, 345 aa, unidentified
MPIVGGMDIHRKQITFDYVDLATGEVVCGQIAPADRRHLRAWLERFDGIPDVAFAFEACTGWRYVAEELGRAGIEAHLAEPADTAAARGRKKRAKTDRADSRLMRDLLLQGRLPECWIPPEHILECRALLETYHAVRREHTAWVQRAHAVLFHQGATRLREGGTGTAEGRELLREITATQLSPAGRQQIGLYLRMLEVTEAELDTLRRQLTGMACRLAGAKALQDRLYGVGPVTGLALTCWLGGAGRFSSARKAVRFAGLDITVYSSAGKRSPGHLSRQGPPVLRWCAYEAGKVHAHRSAPDHGYYAQVKDRIDGKRAALSEARKIIRQACHLLAELGDDALATG

SEQ ID NO: 220085 - protein, 403 aa, unidentified
MFCLGIDVSKKSCRYLLLNHEGQKAKIFSLDNTHEAFQDLLKRLKDLSIPKEDLLIGLEASGGFWENLYSFLKDNGFRVVLLNPYHTNKFREALAKKAKTDDIDALVIAQLLRTGEYVQSQVAEELIQSLRELTKLRYELMTERKNFQRQVFSLLSIIFPELEKTALKNPFSVASMAILQRFPTAIDLAQAKPKQIEKIVRSIQGNNFNIEEIGKLIQTAQASIYSGRAKEARATSLRILLRHVETLSSSIEELEAQIKEILSPQEPQGSFPGENLLTIPGVGDKTLAAVLSYLGANGSSFSSSTKAVGYVGYFPKIFQSGQTRRENTICKRGPKLLRWALYMAAVASLKHNPEMRTLYHRKLSQGKTEKQALICVGKKLLQIMLAMLKSGEPYNPAKVFVTC

SEQ ID NO: 220086 - protein, 346 aa, unidentified
MLYAGLDLSRKRLDFCLLDQLGEKVEVGAAPPDADGLRGLAARISRFREPVVAAIESMNGARFVHDQLEQAGWDVAIADAVKVKGLAPLACKTDRIDAWVLAELARRDLVPAIWLPDPEIRAERERARFRLHLVRHRTALKQRVHAVLLAHGKPCPVSDLFGVAGRDLLERLALPEPWLGTVEATLQLVDHLDRQIGDCERDLQRLGVEHRYVPLLVTVPGIGWVLAYTIAAEIGDIRRFATPTKLTGYTGLCPRVYQSGQSDRRGALAKNGPRYLRWALIEATMHACRHPLYRDRYQHTKQRLGKQRGAKVAQVDLARRLAEAIWHMLTRDQPFAPAGAADPLAA

SEQ ID NO: 220087 - protein, 325 aa, unidentified
MTDATAISSSSSLFVGIDVAKDKLDLARSDADAVRCFASDDAGIACIRDELRGSGVKLIVIEATGGLERTLVGALLDAELPVALVNPGRVRHFARGIGILAKTDAIDAKVLVEFARRGEPRLLEKRSKIRVELEALVTCRRQLIHMRTEQSNRRAVTSSKTALRSIDAVLKVLNRQILELDRKIAALIESDDDLDRDGKLLASVPGVGVVLASTLLAELAEIGTVGRRTICALVGVAPFNDDSGRIKGKRAIRGGRASVRSVLYMAAVAAMRFNPIIRRFAQRLAHSGKLKKVQIVACMRKLLSILNVMIRDGLRWEQLNLVKDA

SEQ ID NO: 220088 - protein, 443 aa, unidentified
MNTSHPYDLIIGLDRSDQKADLHLITTTTGERRSVVIATTPEALWEWLLALRQQQPQARVGLCLEQPAVHLIAFLESYDWITLHPINPITLQKYREAFVTSRAKDDTQDAFYLAELLLTHHRQLKVWTPEDSATRAVQQLVFHRRAIVDERTGLSNRLIALLKQYFPQALVLCGEDLWRPLATRFLLKWSSLQAVQKAKPATLKQFYYLNGSRSAKLLEQRLALVQRAVPVTDETALLASFALRVQLICRQLQLVQQTITDYEKQIASAYAAHPDHAIFASLPGAGPGLGPRLLASLGSQRERFGAAADLQQYTGIAPVTKRSGGSCYIHRRYLCPKFHRQSFHEYAKESILWSRWAAAYYLQQRGKGNPHHTAVRALAFKWQRVIWRCWQDRKPYREETYEAALRKNDSPLVALFDKVELGKSPFKNPVKNPKKTVDGLPQR

SEQ ID NO: 220089 - protein, 343 aa, unidentified
MKQDISVLGIDLAKNVFQIHGANAHGQRVLTKRVGRKELIKLMSNFKPCVVGIEACTGAHYWARLFSTMGHTVKMMAPQFVKPYVMSNKNDRNDAKGIAEAVTRPEMKFVPIKTIEQQEVLLLHRARELCVKNRTSQSNQIRGLLAEFGVIINKGLSELHKLPEILDLNKDKFGVKAIHVFERLYEQFKIYEEQVLLYEKDIEEHVKSEPVCKEILKIEGIGPMTASALVATIGDAKMFKNGREVSAWLGLVPKQHSSGNKIRLGGISKRGDRYLRCLLVHGARSALRCIDNKTGKKNLWAANKKAALPMNKAAIALANKNARIVWAIMATGECYRQEEIHVA

SEQ ID NO: 220090 - protein, 355 aa, unidentified
MIDGRGSHSGVVVGVDTHKDEHVAVALDQLGARLGAHRVATTTQGYADLERWANNLGKVRTFGIEGTGCYGAGLARFLTGCGYRVVEVNRPDRSERRRLGKSDPIDAELAARAVLAGVAQGTPKSGVDQVEMIRMLKSTKNSALKARTQAMNQMRALIVTAPAELRQALDGLTTRALIIRCVGLRPSDLVTPTAAAKHALRSLARRYRHLTAEIEGLAGDLERLTLIVAPALVEAFGVGSDTPAALLIAAGSNPERLKSEAAFAALCGVSPIPASSGKTNRRRLNRGGDRQANAALHRVVIVWLRDDERTKVYMQRRTGEGVSKAKVIRCLKRYVAREVFTALRELNQKSATKAA

SEQ ID NO: 220091 - protein, 400 aa, unidentified
MAELWAGIDAGKRTHHCVLIDGAGVVVLSTKVSNEEGDLLDLIASVLRIADGREVSWATDLTDGGAALLIALLEAHGQQLLYIPGRIVHHAAATYRGDGKTDAKDARIIADQARMRTDLLPVCAPDEVAVGLRLLTSHRLDVIHDRVRAINRLRATLMEYFPALERSFDFSKNKAALTLLSGYSTPQGLRGMGATRLTAWLKARGCRNSAGVALKAIEAAKAQDTVLPCQSVASILVAKLAETIRAIDDDVASIDARIHEQLSLHHDAENLISMPGFGPYLAATFLAQIGGSLREFDSADKLASFAGLAPVPRDSGRISGNLHRPRRFNRRLLRTCYLAALSSLKNSPSSRTFYDRKRAEGKSHKQALIALARRRMNVIWAMLRDHTPYIEPVPTVPITG

SEQ ID NO: 220092 - protein, 310 aa, unidentified
MIHPDVIGCDIAKAHLDFFDSGLERHFRIDNTPAAISAWLDGLDGRGVHIVFEATGRYDRQLRIALETRELPYSRVNPARARDFAKAIGLLAKTDAIDARLLARMGQSLPLSTQAPDDPARHVLARLHTRRDQLVAMRQQERTRLHETEGIERDSAESHMAWLDAEVARIEMACRDVLKAEKTLQEQEARLRSIPGIGPVAALTLIAHMPELGNRSAKAIAALAGLAPFNVDSGTSRGKRHIRGGRKRIRDALYMAALTASRMLRAFKSHADQMKEAGKPFKVVIIALARKLLAIANAIIRDKTTFRRTT

SEQ ID NO: 220093 - protein, 327 aa, unidentified
MSSPNPEVPAQSGLTVGIDVAKATLQVALDLESPTRVLPNDAEGIDALLELLGKQPVRLVLLEATGGLEFLVACTCQLAGYDVAIINPRQGRDFARAMGQLAKTDSIDARVLSHLAHIIDGHPDRHTFVKPLRSNEQQFLAALVTRRRQIVAMLVAEKNRLQQTPPATRKSVTTIIKALTKELARIDADMDNHIRAFFADLSALLSTVKGVGKNTASVLIAELPELGKLSRREISALVGVAPLNRDSGFMRGKRCVQGGRQTIRNGLYMAALVATRYNPAIQPFYQRLVAAGKPKKVAIVACMRKLLTILNAMVKANKPWDETMITP

SEQ ID NO: 220094 - protein, 336 aa, unidentified
MYSGIDLHSNNSVVAIIDDADRIVAQKRLPNDITKIVGFLARWQDDLAGVVVESTYNWYWLVDGLQDAGLHVHLANTAAIKQYDGLKHSGDETDAQHLAHLLRLGILPTRTILPREHRVVRDLARKRMQLVNCRTTHVLAVENIMARQLGERMTSNQIKQLTADTIDSLPLAADVGLAIKANVAVIATLQSQIEVLEKRLQERVKPRPQYGLLTSIPGIGQTLATVIFLETGPIDRFVDVGNFASYARCVDSVHTSNRKKKGEGNVKNGNRYLAWAFVEAANFARRLCPEAKRFHERKKARTNNIVATKALAHKLARASYHILKEGKPFYATRCFA

SEQ ID NO: 220095 - protein, 349 aa, unidentified
MYYMGIDHHKQYSHITVLNERGEVIKAEKVWNIGREVKEFLSGLDDEISGVVEAGYSHYTMFDLMDSVGVRMKIAHPEQVKAIAKAKIKTDKRDSKILAHLLRSNLIPEVYCRDKENREAQRVLRHRVTYVRMQTQVKNRIRALLAKQREEVRQIVVVEENLFKASGVKVLGSLELPGKDQQMLESLLDTLEHLKGKIKLSDALVREILRSSEEARLISTLPGFKEFFPVLVSVEIADINRFDSPAKLHSYAGLVPSTHASGEKLYHGKLVRQGNKWLRWAAVEAVWPAVRSDFDIRLYYQRRAKRKGANSAKVATARRLLTIIYRVMKEKRAYIPYKREKHTAAFVRI

SEQ ID NO: 220096 - protein, 397 aa, unidentified
MVTVGIDIGGRSHAVARCRDGNLNADREIVRVTQDRLGFDLLDTWLDRQGEPVDLVVMESSGHYWMPLASHLRRRGVPVAVVNPLAAKYFARSRLARTKSDPADARSLAEMAMRDAPDATRDPLAGVELRQAARFAMTLVEEQARVSQRLLRLIELGFPELGEVFDDPTCRTAREVLRIAPTARSATRRRTATLANANSAPGHRRLGTAKAERIQAAAAGSIAVPELDAEAAFEIGLLLDQHDLLERQIEAADRHMASLLDSELARRLQTIPGVGPSTAAVLISEIGDITRFDDFDQLLAYAGVHPAERSSGRKGASPETAWHMSKAGNTHLRAAAYRMALVGTQHNPVIAAHYARKRAAGKSKMNALGHCMRKALAIVWGVWRNGTDFDPGHGVEA

SEQ ID NO: 220097 - protein, 344 aa, unidentified
MNQISRIGMDTSKHVFQLHGVNAAEEVVLRRKLRRKEMVAFFEKLAPTVIAIEACGASHHWARLLHSFGHTVKLIPPQLVKPYVKRNKNDAADAEALCEAMSRPTMRFVPVKSPEQQGALMLVSVRDRLIRNRTQLANAIRGHATEFGLTAAKGMAHLVPLLDRIQADESLPDLARELFATQAKEYEQLQTQIDEVDAQLLARHRADECSRRLAKIPGVGPVGATLLRMKTPEPELFRSGRQFAAWIGLTPRDHSTAGKVRLGVITRAGDEGLRSVLVVGATAVIQQAQRRGTASPWLAALLKRKSPKLAAVALANKTARIAWKLMLTGEAYTATPAPAAAGAA

SEQ ID NO: 220098 - protein, 318 aa, unidentified
MTFTPIGIDIAKAKFDAAALRNGKYKTKVFQNTPEGFKAFLAWLQAFPAPHVCLEATGRYGEGLALFLVDHGLAVSVVNPAQIHAFGQAELSRTKTDKTDAKLIARFCHSQRPLLWQPPPLAVRQLQALVRRLESLLEMRQMERNRLDGADPTVRPSIEAVLATLDAEIAATQKRIREHIDPDPDLRQRRDLLDTIPGLGNATIPVLLAALGDVHRFENARNVAAFAGLSPKEHQSGKWKGHTRLSKTGDALLRKALYMPAIVARRHNPLIRAFCERLKAQGKNGKLIVGAAMRKLLVLAYGVLKSGQPFNPNFALAS

SEQ ID NO: 220099 - protein, 327 aa, unidentified
MASHFQKTEADYKKVLKYLEFLRTIYGNDTKFLCGYEAGCLGYTLYHQLSARNVDCVILAPTTMLEQRSRKRIKTDRRDAEIIAKCLAQHNYSPVHIPTATDEETKEFIRMRDDHKLALKKVKQQILAFCLRRGYRYDGNSHWTASHMKWLKALNPEALYKEILEEYLLTYTILSDKLERLDQRIEELASREEYRESVKKLCCFIGVKTHTALSVLVETGDFNRFASAQTFASYLGLVPGEDSSGDDKTQLGITKAGNRHVRMLLTEAAQCYARGQIGYKSKALKSRQSGNSLQVIAYADKANERLRRRYYKMVLAKGKNTMLPKQP

SEQ ID NO: 220100 - protein, 340 aa, unidentified
MTQHKIIGIDLAKNIFFLFEINHKGKNLSRKKLQRSKLLSYIANKEPCTIAMEACSGAHYWAREFSQFGHEVILYAPQYVKTQRRKQKNDYNDAEAIAEVALYKRPHPVPHKSAEQQDIQSLIRMRRLLVTERTRIVNQVRGLISEYGIIMPKGAAAFRKTIHEILEYDENQLSCILRELISHQYERYLYIDEQVKWFDDKLNQTIKQFENAKRLMSIPGFGPLTSQAVAVWLGSGQQFKTGRDASAAMGLVPKQDTSGDKVILLGITKRGNTYIRSLLVHGARAALRRAKFKSDNLSKWMLELQERRGPNRAAVALANKLMRIAWAVITKNEEYRPTQS

SEQ ID NO: 220101 - protein, 340 aa, unidentified
MRMFAGLDVGFKRTAVCVVDEAGRIVWRGMVDTHPEALSRALQHWGEKLAKIGLESGSMTPWLARELAKVGFPVVCMDARAAADAVRSRRVKSDKADAHALAEMLRTGWYRTVYVKSEDSHRLKAILGARDQLVRAKRALGNQVRGVLRPFGIRLPSRQGTKKFAEAAHQAVRRDNMLHASVTALLETLAAIEGQIARLDEQLKELARRSPVCWRLMSVPGVGPIVALAFMAAIEDINRFRRMRSVGAYLGLTTRRYQSGETDVVLGISRQGDAMARHYLYEAANVLLTTVRRPSALKSWGLKLMKRRGPKRARVAVARRLAILLGRIWKDRTHFDAVPA

SEQ ID NO: 220102 - protein, 354 aa, unidentified
MIAVGVDVHKRQCSLAMQFEDGELASFAPFENTRAGWLEVLAVLPPEAELALEVSTSGYFAMSVLEEAGWRERAHWVHTAGIESSRKQKTDRLDARRLARKLSVRERDPLPEAWFPPRDIRELRLRARQRCWLAVRRAQGKNRLQSLLQMHGLRPPVTDLFGVAGRSWLGAQALAAAVRESVEQILRLHDFLSQELEISEGYLRAVDRKFPELRRLRTIPGIGAILAPVIWSEMGRLERFASADAWVNYTGLVPSLYESGEVSVRGGITRQGSAWLRWALIAAAQGAVLGTNAFARRYRRLRRRKPANVAKTAVARSLARCVYGVLSHQEDYQESRWGFRRPGVGRSWGAANLR

SEQ ID NO: 220103 - protein, 316 aa, unidentified
MAYRSALGIDVSGEQLDWHRLPEGTSGSHPNSASGIAELVKMVTAEGVDIVIIEATGGLQRDVALALSMAGVAVAVLNPRQVRDFARAAGQLAKTDAIDARMLALFGLRMQPEPRQLPDPVALDLADKLARRGQLVEMRAAEKNRLTRARRAVQKSITKHIRFLDQAIEALEQELDDGMRGSPLWVEKAKLLEAVTGVGPQTVRRLLIDLQELGKLSRHAIAKLVGVAPLNCDSGKRRGQRHIWGGRAPVRAALYMAATSARRFNPTLKAFYERLIATGKPFKVAITAVMRKLLTILNAMLRDMAPWDPEKAAAKA

SEQ ID NO: 220104 - protein, 339 aa, unidentified
MKLYGAIDLHSTNSVVSLIDEQDRVVYQKRLDNNLTVILQQLSPYRSSLEGIAVESTYNWYWLVDGLMEADYRAHLVNTAAVQQYEGLKYTDDHSDARWLAHLLRLGILPQGYIYPKQERAVRDLLRKRSQLVRHRTANLLSIQNLVTRNTGSSISSNRIKQLPLEEVSSILADKDHVLAVQANLSVMQCLEEQIGSLERVVKERVKLRPAFRYLKTVDGIGEIMALTIMLETGEIGRFSAVGHFASYCRCVGSQKISNGKRKGSGNKKNGNKYLAWAFVEAANFAVRFNPQIRRFYQRKKAKTNGIVAIKAVAHKLARACYYIMHDEVPFDVAKAFAG

SEQ ID NO: 220105 - protein, 414 aa, unidentified
MIPAVIERCAGIDVGKTFLTVCLLTGPADGEPRVETRKIGTFHSDLEALRQWLSNERCTHAVMESTGSYWKPVFSVLETSVTVILANGQDVKGRKGHKTDWNDCRWLAHLLRHGLVRPSFIPPRPVRELRDLTRRRKQVLSNAASERNRVQKVLEEANVKVGSVLTDVFGVSGQLILEALLEGKASVEEAANLARHTARRKIPEIVQSLEGNRLDDHYRFLIRLSLEHLAFLEQQLQRIDAEILSRVEQPEFRQAFELLQTIPGVKQDGAASILAEIGPTMARFPTEAHLSSWAGVCPGNNCTGGKAKPAKIPRGNRWLRTTLVECAWAASKKKNCFLKDRFWRLATRGKKRALVAIAHTILVLVYRSLASGQPYQERGSVEVDETKRRRLIRHHVRRLGRLGIAVSSLRPAAP

SEQ ID NO: 220106 - protein, 341 aa, unidentified
MNIKRIGIDLAKQVFQLHGVDHQEKPVLRKQLRRNQVLNYFAKLSPCLIGIEACSSAHYWARELQKLGHTVKLMAPQFVKPYVKGNKNDANDAEAICEAVARPNMRFVAIKTIEQQDIQAVHRIRSGLVQQRTAKVNQIRGLLAEYGIVVERRVETLRKALPLLLEDAENGLSFDFRALLQSLQQDLIALDDRASEMDKKIQQLASSNSTAKRLQRIPGIGPITATALVCAIGDAKQFKRGRDLAAWLGLTPRQHSSGGKDCLLGISKRGDTYLRTLLIHGARAVLKVADKKDDPRSRWLQNLCSRRNKNIAAVALANKNARIVWALLTKETDFLPEGKPA

SEQ ID NO: 220107 - protein, 420 aa, unidentified
MFATDDLLVGVDVHRQTNVVQVMNGAGDILTKPQRLTNNRPGTAALSQQLAELAQTGDYDRIHIAAEATNNYWLTFFCELEQSPELADWPVTLYPFNPKVIHNFRKSLGDWDKTDDRDTLVITERLRFGRQLPYPFHMEDHYLPLRTLTRYRYHLVGELVRVKSHALSLVYLQASEYTNDAAFSNVFGKTSQAVLKEFPALETVATMPFDELVEWLDVKGKRRFPDPEDNARRLQRIARDSYQLPAEWLAAVNTALSLSLRHLTVLQQLLARLDTAIAEQMEHHPNSLTTIPGIGPVFAAGIIAEIGDLARFDHRHEKVASFAGLKWSKHQSADFTAEETRLKRTGSSYLRYYLCEAAQLVRMHDAEYRAYYQKKYDEVRHHQHKRATVLTARKLVRLVVRLLTTNEPFRARQVPTDTNG

SEQ ID NO: 220108 - protein, 350 aa, unidentified
MNYVGVDIHKRYSFVSATDEQGHRVREARIEGNAPSAFAQFFAGLDGSSKVVLEACWNWGLLHDVLDELEPVEEIVLAHPFKTRLIADAQIKTDRLDARALATLLRGNLVARVHIPSPQTRQRKNLLRQRLYWARLRTMLRNRIHALLDRQRGLALPQCSDIFGVKGLNFLRSLQLPEPDGALLAEQLALHDLIAQQMRAQEKRIVAETRTDPIVQRLQSIPGVGKVLAVVLAAEIDTITRFPSAERLCAYAGVVPTTHASGGKIHHGRLLPWCNKWLQWALVEAAWIAVGCSGYFGGVYRQHRQRGKPANKAITIVARRMCRIVWTLLREERDYEERATMISPAAPAKD

SEQ ID NO: 220109 - protein, 349 aa, unidentified
MRYIGVDLHKTNFVVCFLNENGESQTETFILDEQGLSRFKRRPRKDDLLAAEACANTLHFCRQVIDRVGEIKVVDTYRFAVIARSKSETDKKDAAMLARFLKLGWLPGAPIPTEQVEQLRHLFQARESLARMLTRLKNMAHAALVRSGYAYARAAFSSNRARARLLSLDQLSAVDRLVIGRALRQMSRVGGEISRLEAEIIGRGKSLAGLKRSLQIHGLNLMSAIGLLAEAGQIGLFETSKQLVAYAGLATSVRQSNETTRRGTITKQGRKRLTTIVIRAALSMAKRTKTPLMEFYERKKREKGAGKAICATGRELLVIVFVMLKKGLDYWHIEERLYNEKLRALRSAA

SEQ ID NO: 220110 - protein, 481 aa, unidentified
MKPKPQEKTEKIIKPRANHWEEMNRKQRREMTRKIQSQELSLEVVHPDAAGIDIGNESHYVAVPATRDSQAVRRFGCTTGELQAMAQWLKQCRIRTVAMQSTGVYWVAVYDILEQAGLEVYLVNARDTKNLPGRKSDVQESQWLMKLHTYGLLRNSFRPSQEIRMMRTYWRQRNDLVHSAGRHIQRMQKALTQMNIQLANVLSDVSGMTGQAIIKAILRGEHNPHKLAALRDLRVKASEEQIAQSLEGNWQPDLLFVLKQEQDGYEFCQQQMAECDRQLAQYLEQREDRSQRVPLPEEKRKGRRRQKKGNTPQFDLREGLFRMSGTDLTRIDGIDVMTATTLISEAGLDMSKWQTEDHFVSWLRLCPDNRISGDKIIGKGRLPTNNRVTIALKMAACTLRLSNSYLGAQFRRLRTKLGGPVAIKAMAAKLARLLYRMLRYGMNYVDKGALFYQAQHRQLQIKQLKWKATKLGFRVVEAHVA

SEQ ID NO: 220111 - protein, 314 aa, unidentified
MAQTVMYAGIDVSKAYLDVSLFPRLDTLRVSNDAPGFGELIAWLRRHNVVRIGLEPSGGYEEEVMDALNDASFEVIRLNARSVKLFGKSVGQLAKNDKADARTIARFTALQADKAATKRRRDLAPLVECLKHRAHYRDWIMDCENRLEHMKSPEFRAELKAERKRLQQRVAELDRQIAKFVAAHEDWRALAERLRSLPGVGPVLSSTLIGLLPELGSLPRRSVAALVGVAPFDRDSGKQRGERHIYGGRAAIRSVLYMAALRAIRCNPQIAAFAVRLKGKKPKVIITACMRKLLVTLNAMVRDGTDWRRANATA

SEQ ID NO: 220112 - protein, 360 aa, unidentified
MQTQATKLNFEGQNFFVGIDVHLKSWTVSIVTDHLTHKAFTQPASAEVLSNYLKRNFPGGIYHSVYEAGFCGFWTHYMLTEMGINSIVTNPADVPTTQKEHLQKDDPTDSRKLARSLRSGELSAIYIPDPSTLEDRSLVRMRATLIKDMTRFKQRIKSFLYFYGISYPKEFERSGSHWSKRFMKWLNEEVSLQHDSGTHTLKILVQEAEQQRKLLLEVLHKIHSLASGEKYAKKIALLRTIPGIGFITAMTFLTEIEKIDRFEDTDHFAGFVGMIPSRHSSGEKDKNGEMTFRGQDTLRRSLIESSWIAVRFDPALMMSYHSYIKRMEPNKAIIRIARKVLNRMYYVLKNKKEYVSGIVK

SEQ ID NO: 220113 - protein, 360 aa, unidentified
MRYCTSIGIDTHAKKNEVCALDTQTGEMSSTTLSDDPAQLITWITQQSFTQPLCCCYEAGPTGFNLARTLKAAGIECLVVATSKLPQRIDRQKNDRLDAEWLARMLIAGSVRSAHIPSIEEESLCHLSRLRGEVASDLRRAKQRARSFLLVTRTSYTLTKKYWTKTFYQWADSHEFSCPADSFTFRHKVSAILRLQERLSQIEAEIMRIINSDPALASKMARFTCIHGIGDVTAFSLVCEVYDFKRFSCGSAFASFIGLVPSENSSGQKTAHGKLTKTGNSHLRRLLVEVANHYSRPFKIIKEERADVPEIIRVKAEKCSVRLKKRRFALKERGVMANKVKIAIARELCEWIYYIAVMPA

SEQ ID NO: 220114 - protein, 343 aa, unidentified
MNEYIGLDVSMKETMVSIRREGKRIWRGRCASDPQLIADLVRKRAPTARRVVFETGPLSVWFYHALRAEGLPAICIDARHAKAALDMAANKTDSNDADGLAELAEVGFFREVRVKGFDSMLTRTLVMARTRLVRMMTELSNQIRGVMKTFGLVVPAGRGSVFETNVRALLVDQNGLAPIVLPMLEAWRSLRIRAAELGRQLIGGARRSQACRILMSIPGVGAITAMSFATAVEEPANFKKSRSVGAWLGLTTRRYQSGQVDYDGHISRRGDHHLRGLLYEAATVILTRSSADSTLRAWGVRLRERVGFKRAAVAVARKLAVMMHAMLKTGELFDRSAGIGAAA

SEQ ID NO: 220115 - protein, 446 aa, unidentified
MKKSSRMSVIHPHAAGVDIGAEFHVVAVPPDADAEPVRTFQSFTGDLHRMSDWLKTCHITTIAMESTGVYWLPAFEILEAAGFNVILVNARDAKNVPGRKTDVNDAQWLQKLHSFGLLRASFRPEHDISVLRSYLRQRERLTEYRAAHIQHMQKALMQMNVQLHHAVSDITGVTGLSIVRAIVSGERDPSVLIQYRDVRCKKTPEVLQQALTGNWQPEHLFALEQSVAFFDFYQEKIRECDDQIETSLLQLSTGTEEPEGVLPSARHRTKQPNQLSFDVRPLLWKITGADLTQIHGFGPYLALKFVAECGIDMNRWPDASHFTSWLCLSPGNKISGGKVLSSKTRRSSSRIAAALRLAATTIGRSDTALGAFYRRLSSRIGKAKAVTATARKLAILFYNALKYGQKYVDPGADYYEERYRNRVLDGLKRRAKSLGYSLQQDPELCV

SEQ ID NO: 220116 - protein, 400 aa, unidentified
MLSIGIDVSKGKSTVCGMKPGGEIVYTPFEIQHTREGMSELVSLLRGSGEEVRVVLESTGSYHCPVVAALLENGIFVSVVNSLRMKRFCSQSIRRVKTDQIDAMQIALYGLAYWQELQPTRLPENTYRELQLLARQYYQMTSMLIKAKVDFNALCDQVLPGMQELMNDHAGRHKLSDFVLRYRHTTHILEMGETRFRKDYCKWAEKKGYRNRERMAALIFATAQNGIPVLPNAPSTQIVITEAIRVLHTVEASRDAILTQMQALAKTLPEYSLVREMPCIGDTLAPRLIAEIGDVRRFHSKRALIAYAGIDAPPYQSGKFCANNRHISKRGNRYLRKTGYEVMQSYVMHKPANDPIFTFIEKKRSEGKCGKLAMVAGLNKFLRVYYGKVTELYRSLPAIE

SEQ ID NO: 220117 - protein, 406 aa, unidentified
MNMNAVGIDVSKRKSTVAILRPGGKIVVKPFDVPHLSTDFQSRKELIRKLDGETRIVMECTGRYYEPVARELSLDGFFVSAVNPQIIRNFQGQGNPLRKVKTDKADSVKIARYTLDSWANLKQYSLMDELRSQLKTMNRQFDFYMKHKTAMKNNLIGLIDQTYPGANTYFDSPAREDGSQKWVDFIDTYWHVDCVRKMSLSAFTDHYQKWCSRRKYNFSKSKAEEIYGNAKELIPVLPKDNFTKRIIKQAIDQLNAASQTVEQLRALMNETASRLPEYSVVMAMKGVGPSLGPQLMAEIGDVTRFTHKGAITAFAGVDPGVNDSGDYSQKSVHASKHGSPVLRKTLFQIMDVLIKTKPDDAVYLFMDKKRAQGKPYYVYMTAGANKFLRIYYGRVKEYLSSLPESE

SEQ ID NO: 220118 - protein, 463 aa, unidentified
MQQPIEVQVDEHEPIVERVVGIDVAKASGMVCLRVPHETIPGRRVTKVWSVKATTRALVELGDHLRCQGVQRVVLESTSDYWRPFYYLLEAAGLTVWLVNAAQAKNVPGRPKTDKIDAVWLAKLAERSMVSPSLVPTEPMRQVRDLARARFDLVADRARVKQRIEKLLEDALIKISSVLTDIHGVSGRAMIEALIAGQRSPKALAELAKGRARARSAALQEALDGRFTDHHARLARLLLDQLDELTARIDQVTALLEAAITALTPPQADTDTPTGDSGDSGDSGDSGDGAPAQPAPGRYARAVERLCAIPGGGPDSVRAVIGEIGLDMSVFGTHQRLCSWAKVAPRTVQSGRKTGRARTGRGNPYLKSALAQMAMGAAKTDTFLGERYRRLIKRMPKAKALVALQRSILVIIFHLLADPTAEFTDLGSDFYQRRIDRARRTTHLLRQLHALGYQVQLTETEAA

SEQ ID NO: 220119 - protein, 411 aa, unidentified
MEAAVITAVGIDVSKSKSTVAVRRPGGEIVLRPCEIHHTNSDLKKLASTLKKLEGDIRIVMEHTSTYWRPIALTLKEAGFFVSVVNAMLIHDFSDNTIRKLKTDRADALKIANYALTFWDTLPPFNNEEETRLLLKMQSRANERITATATALRNGLIALADQTFPGVNIAFDPNTKNANGHEKWVDFFLRYWHKDCVCQYSMEAFTESYRGWCKRKNYKFRTDTAHKIYLLAQEGVATLPKCESTKMLITQACKSLNAVCEAKQSTQLEMQRLAAMLPEYEVVVQMEGAGPITGPALMAEIGDVRRFKNKKALVAFAGIDAPPFQSGAFESKSRHVSKRGSPHLRRTIFIISNIILTRSNPENAVYCFMDKKRSEGKHYYVYTVAGSAKFLRVYYARVTEFLRSQPSSDAC

SEQ ID NO: 220120 - protein, 445 aa, unidentified
MSSASLSVLDPLAAFVDVGSEHMHVSIAGGPPEVFGTFTTELHRLRDWLKAQSVKSVAMEATGVYWLPLYGVLEAAGLEVRMVNGKQTRNLPGRKTDMKDCQWGATLHAHGLLQAGFVPSADVRRLQDYLRLRADHLTSAAACVQHQQKALERMNIKLHDVISSLVSESGQRVIAAILSGERDAERLLALCDVRIQKKKAERVKESLRGTWAREHLFALRQAVENWQHYQRQIMACDQQIEEVLREMSGPEEPGAPLPPATKRGGINAPQIDDLHRLVFKLCGSKDLTVLPAHTDYSLLQLIGEVGLDLSAWPSEKHFTAWLGLAPGSHQSGKRKGSVRRKRNRPGRLFCMMARSLVQSKNIALGGFYRRMAGRRGGLVANIALARKLASLFWRVMVKGLSYAEAGLKAYEEQVLETKRRALCRLAKQLGRVVLPSLAEFQAADT

SEQ ID NO: 220121 - protein, 378 aa, unidentified
MHKDSVYLCILRENGEKIERVYGVLTPQLDSMRDFMAENEVSEVAMESTSVYWIPIWRVLVDSFELKLVNPYFIKQLPGRKSDVKDAQWIAECVMKELIRGSFIPSPLVQRLRLYDRRIFEINAELVRKYSKIDAILQRCNIRLSNYVSNTDCKSYKAVVKQISEGVTSPQELLRHVHKRIINKHGEDTILAALTGVVSEAEIDMLAQYVAESALLEDNKNKCIEKMREICNREFEEQMKNLQTIPGVSERSALTVLAEIGPDVNAFPSAKHLVSWCGFNPRNDESNKKIKSNKITHGNRFIRIASVQCAWAASRTKDCYFSKFYAFHTQVRKKFKLKVVVAVARKILVCIWHILKFNVSYKDFEPQKSVAKDCTQLA

SEQ ID NO: 220122 - protein, 371 aa, unidentified
MENGITHVGIDAHKKDLFVAMLVGDQKAPVTWQLANEAQAVRRLVRKLEREAPGAVHVCYEAGPCGYALQRQLTTTRVRCQVIAPALIPRKPGERVKTNRRDARKLAALLRAGLLTEVRPPTPEEEAVRDLCRARDDAREDRQRSRHRLGKLLLRRGLHYSGRNWTRAHRVWIEGLAWAQPAERVVVDDYLLAIDQVEARLTELDARLADVAQREPYREPVGWLRCFRGIDTLTAICLVGELHDFRRFQSPRALMAYVGLVPGEHSSGETHRRGRITRAGNALVRRLLVETAWHYQHRPSVGVALTRRRKGQPSRVIAIADKAQQRLCGRFRRLAAGHKLAPKIAVAVARELVGFLWAALQPPPSTSQEAA

SEQ ID NO: 220123 - protein, 315 aa, unidentified
MTGPAVWVGIDVSKATLDLALRPTGERWTLANDEAAIQSLVQDLGPHAPSLIVLEATGGFEHAVVAALAAAGLPVVVANPRQVRDFARATGQLAKTDAIDAQVLALFAERVRPEPRPLPTEAAQALDALLTRRRQLLDMLVAEKNRLGFARAVVRRGITQHIRWLERRLGDVDHELGQMIEQSPIWRAKDDLLRSVPGVGPVLSRTLLGELPELGQLNRKQIAALVGVAPLARDSGTLRGKRLVWGGRAPIRTVLYMSTLAAVRCNPVIRTFYRRLRAAGKPAKVALTACMRKLLVILNAMVRSNTHWQQAPAVV

SEQ ID NO: 220124 - protein, 366 aa, unidentified
MKKISTVLTFENEIFNEQKLTIGVDLGDRWSFYCVLDEAGKIILEQKVPTTPEAMKQTFSRIAPSRIALETGTHSPWVSRLLTELAHGVIVAHAQKVQLITKSNRKDDRHDARTLARLARIDPELLGPVRHRSVQAQIHLTVIRARAELVSARTALVNAARGLVKSYGQRLPKCGTQQVSRELAAALSTELRDVLEPLLKEIESLNERIQEYDERMEKIAKEVYPEVCLLKQVKGVGTQIALTYVLTIEDPHRFLKSREVGCFLGLKPGRRNSGESEPQKKISKEGDRYLRTMMVQGAHYILGPFGEDSDLRRWGLKLAERGGKNAKKRAVVAVARKLAVLLHRLWVSGEVYEPLRNSQKAMRAVA

SEQ ID NO: 220125 - protein, 389 aa, unidentified
MKIFVGIDIAKLNHFAAAISSDGEILIEPFKFTNDADGFQLLVSKLESFDKNSIIIGLESTAHYGDNLVRYLVAEFYQVCVLNPIKTCQMRKNNVRKTKTDKVDTFVIAKTLMMQDDLRFVSFYDLDMMDLKALGRFRQKTIKQRTRLKIQLTTYVDQVFPEIQYFFKSGLHQHAVYALLKEAPSPKEIASMHMTHLANLLKVNSHGHFTKEQAKELRVLAQKSVGANDSAISIQITQTIQQIELLDSQLEKIEAEMTDIMRFNDSVIMTIPGIGYINGGMILGEIGDIHRFSNPNKLLAFAGLDPSVYQSGNFQAKTTRMSKRGSRVLRYALVNAAWNVVRNNATFKAYYDAKRAEGRSHYNALGHCAGKLVRVIWKMLTDEVEFNLE

SEQ ID NO: 220126 - protein, 402 aa, unidentified
MIFINCLGIDIGKSESVVAHYKDEVLVKEMVIQNNQNGYRYLKNYIKHLDSLFILFESTGIYSRGMKRFCEIHKIDYLEMNPLEAKFKTSSLRSWKTDKSDAHKLALLAFRMKDSKVQRQSEEIYFELRERARFHLEMEINQNRLKVELVETLHQTFPGLEKLFTNRYSKIALSIAKAFPHPDFVSTLTHDELMEKVLHSTDKGISVNKAHKYVQKLIEIQINSFPNVDKSSFLLQKVQYLCDKLLIGIEEMKEFDQEMIDLAKNTTEFENIISIPGIGELTAALLIGELGNIREFKTNKQLNAFVGIDIKRYQSGTSKSRDTINKRGNKKARRLLYLIIMNIIRGRNHYQSHIVDYYYKLREQPHGKTHKTAVIASINRLLKTIHYLIVNNKLYDYQKAPH

SEQ ID NO: 220127 - protein, 422 aa, unidentified
MTKTLNVGIDISLKEATISLLTWEGKYLGKNFKISNNPIGAKELEDRVLSILSLGNFEHIRFGMEATQDYGFHLAEYLATSDKLFIWKPLVYVINAKYIKDFKRAFPERDKTDLIDSQFIAEYLRFGKLPHPFEPNNRYLPLQRLIRYRYHLVKDIERETKFFLANLFLKFPSWVQNRPIKTLGETAMNILAEFYSLDEITQMPLEELTLFVARAGRNRSPKPEEIAREIKKAARESYRLKPGLADSIQFILENTIINIRAFRSSLKETDKAISLEMKGFSNPLLSIKGIGPVYGAGIFASIGNIKRFSSDDKIAKLAGLVWKRKQSGKFEAEERRLIRQADRYLRYYLVEAANSLRVHNEEYRTYYRKKYREVNKHRHKRALVLTARKLVRLVFALLSRNQLYEPARAFQCAQPSYSVSSR

SEQ ID NO: 220128 - protein, 354 aa, unidentified
MSNKSNLTVATMGIDIGKNAFHVVGLDRRGAIVLRQRWSRGQVEARLANMPPCLIGMEACVGAHHLSRRLQSQGHDARLMPAKYVRPYSKGQKNDFRDAEAIAEAVQRPTMKFVATKTADQLDLQALHRVRERLVSQRTGIINQIRAFLLERGVAVRQGLRFLRAELPIILATRSDVLSPRMLRIIEELAGDWRQLDERIEGLSQEIEALARQDPACERLMTVPGIGPIISSAMVAAIGNGAVFTKGRDFGAWLGLVPKQISTGDRTILGAISRRGNRYLRALFVQAAWVVLVRIKDWDRYGFKAWIDAAKKRLHHNVLAIALANKLARIAWAVLNKERAFECVKTRATASQPA

SEQ ID NO: 220129 - protein, 349 aa, unidentified
MLHAGLDLSRRSLEVHLLAENGSTVSTMSVPPDLDGLRGLVRKAALLPGGRQVLAVIESMNGARFVQDTLELEGWQVEIADAAKVKGLAPLACKTDRIDAWVLAELSRRDLVPSIWLPDPATRSARELARWRLHLVRHRTALKNRVHATLVTFGYPCPVADLFGLKGRDLLRRLQFPEPWLGDLEAALRLIDTLNFEIATLENELKAEGADHPYVRLLLSVPGISWVLAYTIASEIGDISRFASPVKLCGYTGLCPRVYQSGQSDHRGALSKNGPKYLRWALIEAATHAASHPLYAERYQYMARRLGRQRGKKVARVDLARRLAEAIWHMLTTGEVFAPAGLKASKAAA

SEQ ID NO: 220130 - protein, 361 aa, unidentified
MSTKNSNEISFKGKHFFIGFDVHKTRWVVTIRHSGMHLRTFSMDPSPEGLKKYLEKNYPEGIYHLVYEVGFCGFWIFRRFKQLGVDCLVINPADVPTAHKEKERKSDPVDSHKLARELEKGNLEGIYIPTEDEQHLRSLCRLYTTSVQSTTRVKNRIKGLLNFNGIEYPINSSSWPAKFISYLQSLPLDNGPAKKTLSIHMDELRLHRMHTLLILKELRKHVRTTHGGTIIKLLISVSGIGFKSAVILYTEIMDMKRFSNFNKLRTYIGLVPSTHDSGETQSSSGLTVRKNKFLKRIIIESAWVAIRKDTALLAYYNKQRSRMKSQRAIIRVAVKLLSRIRYVWLNERAYVTGIVEGTTVS

SEQ ID NO: 220131 - protein, 376 aa, unidentified
MSNVRFIGLDVHAETIAVAVAEPNGEVRSLGVIPNRLESIRKLARKLGPIEHLRVCYEAGPTGYVVYWQLAALGVRCEVVAPTLVPVKPGDRVKTDRRDALKLARSYRAGDLTAVWVPDAAHEALRDLVRAREAAKKDQLRARHRLSKFLLRQGRRPPTTVKAWTQAYLAWVKSAVHFEHAAQEATLLDYVHEIDHVAARLTRLERAIDDAVQTAPVQTRAVIEALQALRGVALVTAVTIVSEVGDFTRFARPRQLMGYSGAVASEDSSGTRTSRGAITKTGNAHLRRVLIEAAWCYRHRPSIGATLRKRHAAVDEDVKAMAWKAQHRLHARFRALTTHGKPPQLAVTAVGRELVGFIWAIGTTVHTKQRDSMIAA

SEQ ID NO: 220132 - protein, 382 aa, unidentified
MSSQSTTTRSIIYLGLDVHKESVTIAVLPTAAKVATRVDRLPNDLPKLKRYLDRVAREGELRVCYEASGAGYVLHRALRDWGYACDVIAPSLIPTRPGVQRKHDKRDASELARLYRAGELTPVRIPSEAEERVRDVVRCRETFQREILKSRHYILKFLARRGLVFRDGTNWCTPHLQWLQHLTTEQSPLAAADRLVFREYHALLQYKLQRREELDREIARLAELPTLAPMVQRLQCFRGIALQGAMVLATEIVDWRRFERPTQLAAYLGLVSREDSSGDRERKGSITKAGNSHCRHVLVQAAWSYHHRPAISADLKRRQTGQPPAVIAHAWKAQHRLHQRYTHLAYRKQPQIAVVAVARELVGFLWAAMIDCQPTTGAPAMA

SEQ ID NO: 220133 - protein, 312 aa, unidentified
MEKLSYGGIDVSKDRLDVVVLPEERFFSVSNDAAGWAELVARIRPLAVSAIGIEPSGGYERGIIRSLLAAGLSVRRINPNKLRQFARARGVLAKNDRLDARLIAEYVAIMPTRVVQRDEAVEKLAEVVTMRRQLRDEHVTVENQAAHIEDAMLRRLNKRRLTRLEADTRLLDKRLAEMVATNAALAQRYELLTSMPGVGPVLAFTLIALLPELGQMSRKQIAALVGLAPYDFDSGKLRGHRSIYGGRMPVRNVLYMAALSGCRYNPALKAFHKRLAAADKKSKVVIVAVMRKMITTLNAMLRDNVEWQPKSA

SEQ ID NO: 220134 - protein, 338 aa, unidentified
MFYVGVDLHKKSISVCVMELVDRARNIIERRKFRCDEEELMAEYFANLGEYQLVVEATASYEWFVQLVEPTADRVVLAHPGHLRVIAQSKRKTDKLDAQTLAEFLALDQIPEAWRPTPRVRQHRALVRHRQYVVGRRTSVKNKIRRVLSHYNADTKNLFCKAGRKHLATIELSEADRFTVDLLCEELDQHSERLKRVVKQLRAFAKQAPVAEQEARQVLESMPCAGLVTTEVVLAEIGDIRRFGSQRKATAYAGLAPGIRESAGKSKQLAITKQGSGLLRTTLVEMAWRLVNKTRRWARVYEKLSARCTAKKAIVAVARRVWCVIVSMLQSGQKYQPM

SEQ ID NO: 220135 - protein, 445 aa, unidentified
MHYKRLLTWIDGSSSYLSVGLDVGADFTWMSIALPNGSFIGKPFKIIHSDPRSRDLAVTKIKEAQETYSLKSRCFLESTGIYHIPLLCFLRDKGFDCSVINPIITKNSTNINIRKLHNDKFDSKKAALVGLNVSLKTSILPDDSVVDLRNLVRDYYYFKDLQSAVALKLTAELKVSFPAYAKVFSKVTTQSSLKLLSSYPLPEDMLAASKEDIVDIIRSTARFGEAYALRKYDAIISAAQDAAVFGRALPSNAVRIRLYIDTYQEYQKHLDALLKALHETVEKLQDTLIYDQICLLQSLYGIGFLSAVVLVAEMGDFKLFSSPKKLYAYFGLDPAVKQSGKLNGDKVHMSKRGSSLARRVLHMAALNNVKVAKGSGTPVNPVVYDYYTRKCSCKKKPVAMGAVMHKICNIIFAMLRDNKPFEIITPEEHCRRFAAEHPDKIRKAA

SEQ ID NO: 220136 - protein, 354 aa, unidentified
MPRQSKDTVATLGIDIGKNTFHLVGLNKRGAIVLRQKLSRRQLEARLANLPPCLIGMEACVGAHHLSRRLKAFGHDARLMPAKYVKAFLKGNKNDYRDAEAIAEAVQRPTMRFVATKTAEQLDLQALHRVRSRLVSERTAIANEIRAFLLDRGIAVAQGLHRLRVALPDILATRTDLLAPRLLHILNDLIGDWRRLDERIHAVSLEIQLLAQDDPACERLMTVPGIGPIISSATVAAIGTGDAFSKGRDFGAWLGLVPKQISTGDRTILGKISKRGNRYLRTLFVQAARVVLLRPATWERHGLQPWIAAAAQRLHHNVLAIALANKLARIAWSVLHHGRNFEVRKISEATSQPA

SEQ ID NO: 220137 - protein, 394 aa, unidentified
MRFAGIDIGAETHVVAVVDATGAVLSKPTPFTEDADGYARLRDRLGAATDLLVVMEATGHYWKNVFATLAAQGIAVALVNPLRTHRFAGEDLERTKTDAIDALGLARFGAQKRPPATRLPDAATEELRELVRLRDRLVQDFGDRVRQLHRLVDLGFPEFTRYVKGLDTELATAILQEYPTAQAFQGVSVKRLARLCYDGRHQVGTELAQALISAAGRSVGRHHAEAYRVQVRYACEDLAVLRRRLRSLEADIERTLNDHEVGRLLTSIEGIGPQTAARLVGELGDPAAFRSAAALAAFIGVVPALRQSGKRTATRAGLTPFGHAPLRAKLWMPTLTAVQRNPWLRSYYQRLRARGKLPKVALVAAMRKLLIAVYHVAKHRRPFIAVPVAAESRP

SEQ ID NO: 220138 - protein, 353 aa, unidentified
MKTYYVGMDVHRASIVIVVMNGAGKIVMQSVIETGAERVRGYLKQLRGKVYVTFEEGTQANWLHEVVRPLVTEVVVCDPRHNKLMQSGNKSDRVDAQKLAELLRLGSLKAVYHGDNGVRALKELVRSYDCLVSDTTRVMNRLKAIYRGRAIGCAGHEIYCQDRRQQWLEKLRERGAKQRASCLYQQLAALKPLRHEAKRLMVKEARRQPAYPWLLSVPQFGSVSVAQLLAIVGTPHRFRSKRQFWTYIGLAVVTRTTADHEVVNGVLRRSRRPVSTRGLNRNHNHLLKRVFKNAANGACHSGPFKAAYELRVKQGMAPSLARLALARQLAAITLAVWKHGEQFNPERMKQQAA

SEQ ID NO: 220139 - protein, 344 aa, unidentified
MKSLPKSKLDDNISMFVGMDLHKNYLQIAVMNEKGKVLENSRIDNNLKQVGKFFDNLNDEKTCIVMESSCVWYNIYSYLSEKKHLNVVLSNPIKTRAIASAKIKTDKLDAVKLANLLRGGYIAECYVPDRRIMDLRELVRHRAALVRMRTKLKNKIHSIVLMKGIQISNKHCPFTHLYNEELKALNDYRINGYLHLIESLDYEIKVVSKEIGTLAKEDEMASLLMTIPGIGYYSALLIVSEIGDINRFPDSHHLCSYAGLIPSTHSSGGITYHGSITKIGSKYLRWIMLECVHTHIRTNKNSNISQFYTRLAKSKGNSKAAVAAASKLLRIVYCVMKEKRNYQS

SEQ ID NO: 220140 - protein, 371 aa, unidentified
MDERIKFFVGLDVHGDSIAMSVCEAGREPGRFVSTLTPDVQALLKTLSKYGAARQVSVVYEAGPTGYGLYRALSDRGYRCEIIAPSLTPRRPGERIKTDRRDSLRLAELSRAGELKAIWVPDQAHEALRNLWRAREDAVNLRLQARQQLKAFLLRQGRRYPGKTSWNKTHQRWIAEQHFDHPADYIALAEYQLAVQAAQDRVQRLTTALEHAIEGWRQEPTVAALRALRGIDTVSAIGLVCEIGDIARFGSARQLMGYLGLVPSEHSSGNSVRRGSITKTGNAHARRLLTEAAWNYRFPAHMSQALRDRSATLSPSIRTHAWKAQVRLCSRFAHLSARGVQANKVCVAVARELTGFIWAIARQSLPDNTHQ

SEQ ID NO: 220141 - protein, 336 aa, unidentified
MSAYIGLDVHKDWTFATVLDQTGRVVVRRKLENEHVPSFLENFNVEKVGLESSTYIVPLYRALVDRGFRVEVGHPKKTRYIAEARIKSDRVDSKAIAELVRLEALPQSYMPPPDIAALREKVRRRAFLVRQRAKLMAKIRVVLAYEGLKPPEGLSLFTRKGVDWLESLGLEPVNCYLRLIMAFNGEIRRLSFDLRRLAGLDEDVRLLMTIPGIGYYTALLVKAETGDVNRFSNGEHYCSFIGIVPSTYSSGGVTRHGGITREGNPWLRWALFEAAMTHVKYDTSISRSYQRIAERRGRKVALVATARRLALCCYSVLKNRRPYRAFPHGQALHNSS

SEQ ID NO: 220142 - protein, 347 aa, unidentified
MDHYVGLDVSLDTVFVCIVDEAGKMIREQGLISTPEAIGGFLLGTGLEITKIGLESGNLTHYLTKGLLSMKYEVAVMESRKMAAILAVTINKTDKNDARGIAEALRVGHYKECIHRSDDALEIRTLLHGRGTLVEERTHLISSIKGHLKVYGIKLGKGKNKTFRQKVEASVATLKISTQKTIQALLNVLGVLEIEIENLNKEVVALGRKDADVQLLQSIDGVGPITALAFKAEMDNPARFEHSKDAGAYVGLTPTQYASGETQRQGGISKRGSRRTRCLLVEAATSLLMRSKKWSTLKAWGMKLMKKKGAKKAIVAVARKMAVIMHRMLMTKEPFKRTDKPKEEKAA

SEQ ID NO: 220143 - protein, 351 aa, unidentified
MKSFNNQIKGENLFVGIDLHKHRWHITIRTADVEIFSNSIVGRWDNLRRILDRYKSCRIHAVYEAGCFGFWLFDRLNNYGACCIVTPPSLIPQEHGNRVTTDRRDSRKLARLLAKELLKCVCVPSEEERFHRQVIRRRHQLVGDRVRTQNRIKSELYFYGIDLPAVRGKWSQVYFTNLQRIKFKNNWMQQSFNQLLEQYEFLCAQIDKQTQLLKQLARLPLYRDRVRILCSIPGIGILTAMEILLELQDISRFRRAEQLAAYVGLTPSQYSSADKIRMGRITGMGKNTVRSALVESCWHLIRKDKAMRRKYEQIKVRAGGKRAIVAVSRKLILCIRRLLLDNRPYVYKPVC

SEQ ID NO: 220144 - protein, 362 aa, unidentified
MKLVPPNTDPTPSSPNPRRRYKLGVGIDIAARTFTAATCELDETPSKAHNFTQTPEDFIRLEKHLLAAGLLPTDMLVVMEATGTYWIELAIFLDSRGFPLSVINPATARDFAKSLLIKLKNDRIDAQMLARLAITHKPALWTPPPLIYRELTQRLAQRNDLVAMRTSLTNQLHALSVCPSVPSVVSRFDLLVHTIDLQLKELEVEIKTALNLAEEWAASVARLQTIPGVGPLTALWLVVLTLNFTLCTKAESLVQFAGLAPIERRSGTSVRGRPMIGHGGHGPLRSLVYMAAGSAIRFNPLIKAYYEELRLTKGKPYKVARCAAARKLLHIAFAVATHSEPFEAAYALRNRAARLEPKAQAR

SEQ ID NO: 220145 - protein, 395 aa, unidentified
MHSIGIDVGAAQHRVAICREGNIEAERQVLRIPSSRSGFAELDHWIARQGTIERIVVESSGHYWQTLASHLRAAGHPVAVVNPLAAKYFAKRRLQRAKSDPADARTLAALGMVDRPETREPLAGAELREAARFAMRLVEEQSRLCNRILRLVDLGFPELGEAFEDPTCRTAMALLKVAPTARAAARRSVATLARANRGAGQRALGPTRAAAIHAAARASIAVRELEAQIAFEMPLPIEQHELLERQIAVAEARVATLLDGELARRLQTIPGVGPASAAALIAEIGDISRFSSFDKLVAFAGVHAAEKSSGKKGADPETSWHMAKTGSPYLRAALYRIAVVGLQHNPIIQAHYARKRAQGKAKMNALGHCMKKALAIVWGVWHGGRDFDPAAHSVA

SEQ ID NO: 220146 - protein, 334 aa, unidentified
MENIALIGIDLGKNSFHIHCQDRRGKAVYRKKFTRPKLIEFLATCPATTIAMEACGGSHFMARKLEELGHSPKLISPQFVRPFVKSNKNDFVDAEAICEAASRPSMRFVQPRTESQQAMRALHRVRESLVQDKVKTTNQMHAFLLEFGISVPRGAAVISRLSTILEDNSLPLYLSQLLLKLQQHYHYLVEQIKDLESQLKRKLDEDEVGQRLLSIPCVGTLTASTISTEIGDGKQYASSRDFAAATGLVPRQYSTGGRTTLLGISKRGNKKIRTLLVQCARVFIQKLEHQSGKLADWVRDLLCRKSNFVVTCALANKLARIAWALTARQQTNVA

SEQ ID NO: 220147 - protein, 338 aa, unidentified
MQLQPLYIGIDVSKLTLDVSCLGQASTHCYHQFENSKAGLRSLNRWLLQQEGFSYTDVLFCMEHTGIYTRQVVAFLILQGAKVWLESALHLKRSIGMIRGKNDKVDSYRIARYAMVNADQAKLISPSNGTLQLLKDLLACRTRISKSIQSINVSVRELARIDKASGKELADLNKAALEGLRKSKTAIEKRMQELINSDSELNRIFTLATSVKGIGRVLATELLIYTHKFSRMTNVKQLACYCGVAPFTHTSGISIRGKTRTSHFANMNLKRTLHLAAMSSTQYVPDLRKYYERKVAEGKSKMCVINAIRNKLLHRILAVVKRGTPYVLNYAEINLVKS

SEQ ID NO: 220148 - protein, 405 aa, unidentified
MEVIYERCCGLDIHKASITACVIIGGQKEIRTFATMTDSLLQMTAFLRERGVQMTAMESTGSYWKPVFNIMEVEGIQAILVNAAHIKAVPGRKTDVKDAEWIADCLKHGLLRASVVKPRDQRELCELIRYRGSLIEERAREYNRMGKVLEGANIKLTSVASKMDTVSGMNMIRALIDGVVDPAVLASMAKGRMRSKTDDLKRALNGLIAPHQQMILKAMLDHIDQLSNSISGLDTEIEKRMSQDVELIEALDEITGVGKISAQTILAEIGTDMSRFPTAAHLASWACMCPGNNESAGKKKSGQTRKANSTLKKTLVQCGRAAGNSKDTYLSVLYHRIAARRGAKRAAVAVGHSILVTCYHMIQNRTHYRDLGADFFQNRNKEALVKQNVKRLQALGFKVILEQTA

SEQ ID NO: 220149 - protein, 361 aa, unidentified
MRQFIGCDQHKEYSVFVAMNELGECGEPVRVQHDPEVMDAFLATMPLGVEIALESSGHYYWLVDAMERAGLRPHLANAAEVKKRSGRAAKKTDKDDARGLAMLLRNGTLPEVWIPPAELRDRREMLRMRMFLSQQRTRIKNRIHGALARYNLRVSGEPYSGVWRNELMRRLPELPPHTRQSVLWQLDVLDAAEALRKKAENHLLETLTNLPETDLLKTLPAVGPILSMVLMLEIGDIRRFAGPAQLASYSGLTPRVSSSGGRTRLGQVCGNVNRYLKWAVVEAANLVVAQPLKWRGPLLLRLYQRVRRKKNHQKAVVALGRHLAEAAFWILKNGEVYQPPQPHTQAAKPSFVDARVSAERS

SEQ ID NO: 220150 - protein, 429 aa, unidentified
MGFMSEIEVMGQEPQFAAFVGLDWADQKHAWCLQAAGATQRENGEVEHTPEAVEAWVGQLCRRFGNRPIAVAVEQVKGALVFMLSKYELLHLFPVAPAMSASMRDALYPSGAKDDPRDAELLLDLLMKHRDKLRRLAPDSEATRRVQNLVEERRNLVDEKTAQTNRLTNHLKIYFPQMLGWFDRLDTELVCALLERWPTLEELQKVPPARLRTFFRKHRCRDQELIERRMVGIQQAIPATRDRAVIEAKSAVVKVSAQLIRSLARGIADLDRKIEEAAEAHPDFFIFESLPGAGAALAPRLLAAFGSQRERYANAEEVQAYTGIAPVTERSGKKKWVHFRWACPKFLRQTFHEWAGHSIAHSQWARNYYQQQRERGKGHHAAVRGLAFKWIRIVFRCWKDEVVYDENKYLAALAKRNSPLAAIAAGTIL

SEQ ID NO: 220151 - protein, 367 aa, unidentified
MKKISTVAAKQSKNFREQKLTIGLDLGDRSSWYCVLDEAGEVVLEQKLGTTPKAMKEVFGKMPRSRIALETGMHSPWVSRVLSELGHEVIVAHARNVRLIGESRRKDDRFDARTLARLARIDPQLLAPVKHRSAQAQAHLMVIRARAGLVRARTSLINTARGLTKSYGERLRGCSPRSMNVKKAQSLSPELQAALEPLLGAIESLSERIYEYNQKIEKIAKESYPRVARLKQVKGVGTLIALTYMLTLEDPQRFRKSRDVGCYVGLQPGRRNSGQSEPQLHISKEGDPYLRTLLVQGAHHILGPFGADSDLRRWGLKLAERGGKNGKKRAVIATARKLAVLLHRLWVSGEAYEPLRHSRQVLLPAAA

SEQ ID NO: 220152 - protein, 379 aa, unidentified
MESITQNEKILYVGIDVHKDTYALCCFDFQRNELSDEMTVKATTKAVIKYLEALKKKHKEEILFVCGYEAGPTGYGLCRGLQKAEFACVVMAPTTMANPEGKRRVKTDRIDARAIARILAYKSYSQVHLPSEEMEALKEYTRARDAKKRMLKKAKQELLSFLLRNGKTYPESGNYWTAKFFTWIKTVQFSEKWMQEAFNEYLAEVYSLKAKIEIMDAKICEIAELEIIKDKVDKLVCFAGIDVTTAVETVVEIEDFTRFATAAQFVSYLGLCPGEDSSGKTKIMLPLTKAGNRRVRALFCESAKAIKRTNPYGEKSKRMKVRQKNASAQIVAYADKATNRIRTKMKKLEGRGKNYNVASAAGARELACFVWGMMNGKIA

SEQ ID NO: 220153 - protein, 412 aa, unidentified
MDIVHDRAVGMDISKRDAKVCLRVPGKRAGTYASTVSTWGATTSQILELRDFLEHEHVTTVVMEATSDYWKPFYYLLEETLPVMLVNAKAARNIPGRKTDVSDAAWLAQLGAHGLLRASFVPPEPIRELRDLTRARSIATRDRTREIQRLEKFLEGSGIKLSSVVSDLTGVSSRAMLEALINGERNPDVLAGLAKGTLRSKIPDLVDALTGRFKGHHAFMARLHLDQIDAQSRIIDALTGRIEEAMTPFRAAREFLATIPGVSLKVADVIIAETGADMTRFETPGRLASWTGVCPGSNESAGRIKSAHILPGNKYLKAALGTAALSASRSKDTYPAAKYRRIAARRGPMKAIVALEHSILTAAWHLLAEGECYTDPGADHFTRLDPIKAKNNAIKKLNSLGFDVTITPATAA

SEQ ID NO: 220154 - protein, 320 aa, unidentified
MTSKGAEKMKNDTIGVDVSKDHLDAHRLSDRVNRRFANDKTGHRAFIRWLVQPSVERVVFEPTGPYHRAFERALGLAGVPYAKVNPRQARRFAEAVGTLAKTDRLDAAMLARMGAMLELQTRPPRSDALLALKELHLAREALVKDRTAAKNRRTVLTASLLKRQNAQRLEQIERQMAAIEAAILEQILADPDLAQRFAILTSIPGVSAITAFALLIEMPELGALEAGQAASLAGLAPVARQSGRWTGRAFIRGGRAAVRQAVYMPALVAARFNPDLNAKYRELIKAGKPAKVALTAVMRKLIVLANALLKANRSWAPKAA

SEQ ID NO: 220155 - protein, 345 aa, unidentified
MPIVGGLDIHRKQITFDYLDTVTGQVCRGQVCLADREHLRAWLARFAGCDDVAFAVEGCTGWRYVAEELAAAGIAVHLAEPADTAFARGRKRHAKTDKTDCRHLRMLLAEGRLPECWVPPGHILECRALLETYHDLRAEHTAWVQRIHAVLFHHGAPALGAGTLRTEQGVAALRAVTAEWLSPAGQLQVATALEILEALEARMHELRHQLTDAARHLAGAKVLAERLYGVGPVTALAITCWLAGKDRFSSSRQVVRFAGLDVTVYSSDRKGPPGRLSRQGPPVLRWAVYEAGKTHARASAPDHAYYAQVKDRCNGKRAALSEARKILRQACHILAELGDDALAAT

SEQ ID NO: 220156 - protein, 343 aa, unidentified
MQVSTIGVDLAKNVFQVHGVDSSGKVVITRQLRRKQVIEFFSKIPPCLVGMEACGTAHHWAREVSKLGHTVRLMPPSYVKGYVKRSKNDAADAAAICEAVTRPSMRFVPIKSADQQALLMLHRTRDLLIRQRTQLINALRAHLAEFGLVAETGREGLAQLAAIIADESNREALPSAMKQALQAIVDQLAALELQVGALDRAIHVHHRANDMSCRLETVPGIGVIGATAIASTVTDPSVFKSGRDFAAWIGLVPRQHSTGGKERLGGISKQGDRYLRRLLVIGATAVVQHARRHPQKHPWIIRLLARKPAKLVAVAVANKMARIAWAIMAKGGHYRAPELAAAT

SEQ ID NO: 220157 - protein, 347 aa, unidentified
MKYYCGLDVSLNSTAVCVVNADGDIIQEGEVPTEPAAISQWLNDRSLDPERLGLEAGSLTPWLCTELLKHGWNAICIETRHAKAALAAQQVKTDRNDARGLAHIMRTGWYKEVHVKSKDSQKLRVLLNNRRCLLDKRLDIDNQIRGTIKVFGLKMGRVTPATYEARTRELISGDAELQDFILPMLEVRRQLIEQCKRLEKLILDHVKHDSVCRRFMTIPGVGPLTALAFKTWVDHPERFQRSRAVGAALGLTPRKYASGEVDYDGHITKCGDAFVRAHLFEAAKVLLSRSSRPSAIKSWGLKVARRSSKKNACVAVARRLAVLMHTMWKNGTDFQFQEPDSQQAAGA

SEQ ID NO: 220158 - protein, 411 aa, unidentified
MERVYDKCCGIDVHKKIIVACFKKGNEQEVRNFGATTRELLELADWLKEGGCEMVAMESTASYWKPLYNIFESSELNAIVVNARHMKAVPGRKTDAKDAEWIADLLQHGLLKASYIPDRAQRELRELVRYRKSLVGERNRELNRLQKMLEGANIKISGTITDINGKSARNILEYILSGKQIDSVEYDILYKKKVISHNLKATKEQIIDDLNGVMSDVQRKMMRILLAHLDELNTHIKELDDDIDNSMKPDEKKAVTLLQDIPGIADTSAKGIISVIGTDMERFPTNAHIASWAGLCPGNNESAQKRKSGKTRKGNALLRETLILCAHSAVKNKNSYFYAQFARISAHRGKKRAYVAVAHSMLIAIYHILKDGVVFKDLGADYYNQFNRERKINAYLKKLKALGWEAPVVAT

SEQ ID NO: 220159 - protein, 381 aa, unidentified
MTTAAPHYEHDYTTEATLFIAFELSEKTWKLGFTTGHGQKPRERMITARQQERVLDEIAQAKRRLGLPATAPVVSCYEAGREGFWLHRFLQGQGITNHVVDSSTIEVNRRRRRAKSDGLDVRKLLSMLLRYAHGERQVWQVVKVPSVEAEDQRHLHRDLETLKQERASTMTRIEGLLSSQGLRVPSLTKLPEQLDALRLWDGSPLPPGLRRRVLRVYAQYTFLSEQIAAVEAERRAQLQTSADASLDKVRQLMQLKGIGINGAWLLVMEFFGWRAFKNRREVGGLAGCTPTPYQSGEHAREQGITKAGNRHVRWMTTELAWSWLRFQPDSALSVWFRERFGSGGKRLRRIGIVAVARKLLIALWRFLETGVLPAGAVLKAA

SEQ ID NO: 220160 - protein, 275 aa, unidentified
MIIGCDFHPSFQQIAYVEQETGEYEERRLSHRGEAAAFYRSLAGRAVRIGVEATGNDRWFHKLMSELGHELLVGDASAIHASAPREQRTDKRDARHILRLLMENRFPAIWQPSVGNEEQRQLLLHRCRLVRMRTRIKNQLDSIAKSEGLTGSRAWKAKRRQQIEALPLTGWYAERRKDLLALLDEMDKRIEPLDKAVKAAAEQNAEAQLLMTHPGVGPVVSLAYVLILGDWRRFPRGKQVGSYLGLIPAEAFSGKHQQRMGHITKQGNTLHWPGR

SEQ ID NO: 220161 - protein, 477 aa, unidentified
MQDRRLVGIDLGITSAHTVRVLDGAGAIVCRRKAVPTVESLGQVEQAALAGTTGGTRLEVVIEPTGPAWLPIAVFFTTRGHTVYRVSSAKAHDLRRFLSRHAKSNGIDADTLARLPLVDPAGLQPLQLPDAPRAALDRRVRATDRLTQQAATHKRRLKDLVRQLLPCSPLVGELGAADLAVLERYGDPRALLRAGHARLTRLIHTASRGHQDAERADQWRAAAHAALQLHADHPAVALAELATEVATEVRLLRATQAELARHAIQREACYRRVDPAGLARSLPGLAEIGGPALVAIMGPASRFSHAGKFRAFTGLAPKAAETGHSDRKPQPISKAGNRLLRTTLVRAADNARHLDPQLARIYWTQMVQRGKDHLGALCVVAARLAERAWTVMDRGLPYVICDTDGTPVTPAQAKAIIAERYTVPEDVRQRRRSKKGKAPQQVLAGHVHGAQGATRRPSPPASLGRQPAHVKRTKPRA

SEQ ID NO: 220162 - protein, 402 aa, unidentified
MNAVGIDVSKGKSMVAVMRPFGEVVFSPFEVSHTDKDLTDLAKKLKSLPGETRVVMEHTGYHHTPVATALHEAGIYVSVVNAMLVHDYGNNSLRRVKTDRKDAVKLANYALDNWLSLLRYSPPGATRLILKTCHRQYEQFTKMHTMQKNNLIALLDVTFPNANKLFSSPPRPDGSEKWVDFVAQYWHCECVCGMSEKAFARTYDKWCRKHGYNFSEDKALDVYASACGHVCIMPKCESTKLIIQQAVAQLQASSAALAALKKQMQDLASTLPEYPVVMQMYGVGPSLGPQLMAEIGDVRRFHSKSALVAFAGIDAPPYQSGQIDVRSRSISKRGSARLRRTLFLVMAVILQNSPSDEPIYQYMDKKRVEGKPYKVYMLASANKFLRRYYATVKTYLDGLDQI

SEQ ID NO: 220163 - protein, 369 aa, unidentified
MAEYSGAFVAFDVAKAKHAIAVAEAGRTGEVRFLDEVENTPAKIERTIKKLASRYGRLQVCFEAGPTGYGLYRQVQELGQDCLVVAPALIPRRPGERVKTNRRDAVTLARLHRAGELTGVWVPDPVHEAIRDLVRAREAAMDDLRRKRQQLLSFLLRHSRIYDGGGHWTLAHRRWLARQAFEHPAQQIVFQEGMNAIDDAVQRLRRSEEQLATIIPSWSLAPLVRAYQAMRGASFLVAVIFAAEIGDVRRFETPRQLMSFLGLVPSERSTGDTVRRHGLTLAGNRRARRALVEAAWTYRYPARVSETLRARLEGVPKPVRDIAWKGQVRLCARYRRLSAAGKKLPVVVAAIAREMAAFLWATGREVAPM

SEQ ID NO: 220164 - protein, 609 aa, unidentified
MAVWLLLPSPPPRCLFGPFSPALALLLAWGLLLPWLIFEVVMTPRFHPSAPAPDSDFATKPRPDPPPNPDQQAAGEYRQRKARTLAKMQDKQRVRVNAMPVLRAHAAGIDAGQSRHWVCIGFTDDPDNDHQLVREYQTHTDSLRQLVGWLKENQVTSAAVESTSFYAEVLVEMLEQAGIEVFLVDPSYTKQLQGRPKTDKRDAQWIFRLHSVGLLGSAFRPQEQTRVLRNYLRHRARVVRQAVRHIHHMQMALELMNLKLRCVLDDITGSTGLKIIKAILSGVRDPHRLAALRHTQCKHSAKEMVQALDGNYKDEHLFTLKLAYESWEFHQRQLDSIDQEVAKQLEKMKRDGALPALPRRKNNPKKANSARFDVRTALYYVVGIDLTEMEGIDELTALTIVSEIGTELSKFKTVGHFCSWLGLCPNPNESGKQKRPSRTRPGVNRTAQALRMGASSLHSSHSALGAYLRRMKSRMGAPAAVTATAHKLARLVYYALKHGMPYVRKTQEEYEAQIREQRIKSLQKKARQLGFTLIENPVRTGGDTPVPVVVTEKEEPAQEPEREKVKEPEPAQKLEKKPSKGAGTKKKAEVAGAAQAKKKTKKAAAATRP

SEQ ID NO: 220165 - protein, 391 aa, unidentified
MIYVGIDVAKNKHDCFISNSDGEILFKAFTISNNREGFETLFQRIKSVSDDLTKVKVGLEATGHYSYNLLGFLLDKGLPTYVINPLHTNLYRKSLSLRKTKTDKVDAHTIASMIMSDVNLKSYSDTSYHNEELKSLTRYRFDKVKERAHLKQSISRLVTILFPELEKLVPTLHMASVYALLSEFPSASAVASAHLTRLTNLLYESSRGRFAKDTAAMFREAARTSIGSHMPAKSLELKHTIKLIHELDAEIEEIENEIKSIMDEINSPILTIPGISYRMGAMILAEIGDFSRFDSPDKILAYAGLSPSTYQSGQLDNCYSHMEKRGSRYLRYALYNAVKYVCLWDENFGAYLTKKRAEGKHYNVALSHAAKKLVRLIFAMEKSGQSYNKAA

SEQ ID NO: 220166 - protein, 317 aa, unidentified
MKFIYFIGCDVSKNELDFAVYNGNKFVLHRKIKNDTKSINNFFIELQKLPDFELSNTIVCMEHTGIYNNPLLEYLHKIDGNICLESALQIKNSQGSVRGKNDKIDSIRIAQYAYTFRDKIQLWKPKREVIQRLARYTSDRDRLISVKKMILVPLKECVNFVIDKIQNESESFFEATLKSIEEDLLKIEKAIQDVIKSDEELCRLFGLITSVQGIGSVTAIGIIITTNEFKDINDPRKYACYAGVAPFVRESGIFRGKGRVSKMANMNMKSLFHMASLVAVRFSDDLKKYYARKTQDEKKNKMSVLNAVRECKLNSVC

SEQ ID NO: 220167 - protein, 368 aa, unidentified
MKTDKYLGLDVHKDTIVVAVADGGRTGEVRLYGTIPNDLHALERLIAKLGGEGVRLHLVYEAGPTGYVIYRWCRRRDLPCIVVAPSKTPQQKGVRQKTDKRDALQLARLHRAGELTSIHVPDEADEAIRDLTRARSDAVADLRRAKQRLKGFLLRHGYRYQGKANWSDAHQRYLRELVLPVPALKAVLEEYLLAITHATERVARLEALIEAQVPEWRFYPAVQALMCLRGIQLTAATVLISEVGDIHRFRHPRQLMGFLGLVPKEDSSGGTRRVGSITKAGNAHARWILIEIVQHAFLPPKVSSQLALRQQGQPGAYRELAWKVQVRLHKRAWHLLSRGLMRQKVTVALAREMCGFVWDLLRRVPVAA

SEQ ID NO: 220168 - protein, 523 aa, unidentified
MSRITCLKRRSSRRKCSVQKPNGILHPRVEKVGPQHFGVVCFDCHKATSKWMLADFYGKLLVEPTKIHHTRPELELVVARVREIAKEHQLKDLVVAIERTGIYHLPVKRFFDRGGFDTRIVHPFATKHYRLPADAGNKTDDTDLDAIFRATIAGYGLIEQELDETYASLRLLTRHRRDLVSKRSILCCQIREHLEAVLPGYAALFEDLWNSNIALALVEWIGSVDRFRELGVKGLCQLLHQHKQRFLKPVVERIAAWARSAVPTNPQCILHRRIGLTLLEDYREKSRKLREIEQDLASLLVQTPYILLLSHPGVNVISATALAGEMGPMEHYPHAKSITGRAGLYPSRYQSGEVDHHSGPLVRRANRQLRRAILLIADNLIKCNPHFRGLAGLWKSQGKDARDNRVKVACRFCRILYQIVAGRQVFAHPSQRQRDYILRKLIAFHQEYATSLPVVLAQLQKAIEQLPRNTHTAEAQSLAGELHRADAAKGKTIRHIGEILPVVLAKLGVSAIQLNDREDQGPS

SEQ ID NO: 220169 - protein, 411 aa, unidentified
MEVVHERCAGIDVHKATVVACVRMPGARPGERHSETKTFATTTRGLTELTHWLVGHGVTDVAMESTSVYWRPVYAVLENTVRLILVNARHVKMVPGRKTDVRDSEWLAQLLECGLLRASFVPPRPVRDLRDLTRLRKTLIRERGHHVNRIEKTLELAHIKLGCVVTDLMGKTGRAILQALSAGIDDPDQLAEYAQGLLRKKRAALREALVGRLTPHYAFLLQQHLALIDALETHIVTLDARIEEAMAPFAEPAALAQTMPGVAVRAAQAILAETGVDMQPFPTAAHLASWARLCPGTHESAGKRQPTTTGKGATWLRATLQEVAWAAVRTKKSYYRALYHRIKGRGGPKKAIVAVQHAMIVALWHMLTRRVAHHDLGADYFERRNTARIRRHHIRRLEQLGYDVVLVDKAA

SEQ ID NO: 220170 - protein, 338 aa, unidentified
MNKFTKKQWFSGIDISMNTIDVALLNVQSPEKVKEKQFKNSFQGFDAMLEWMIKQKVNVSECVFCMEHTGTHGLLLFVWLHQKEIDFCVEPGLQIKRSLGLVRGKNDKVDARRIADYALTQKTKLKPFVIPAQNLIQIKQLLTYRDQLVKMRTGFMNSLKSHQQYHQVTKMDFVIIDIEQQIGQLAERISQLEKQIIQIIKSDQQLKKNYELTTSVVGVGKIIAAFMLVTTNNYTSFENGRKYACFAGIAPFEESSGRYKGKAHVSHLANKKMKTLFSNGANSARNWDPEIKAYYERKAKEGKAHHSIMTAVSCKIVNRVFAVVNRQTPYVKLYQNNF

SEQ ID NO: 220171 - protein, 371 aa, unidentified
MADYREVFVGIDVAKLKNAVAVAESGREGEVRFWGEVDVSDANMRRIIQRITAKFDHVHFCYEAGPTGYGLHRLIRSLGHECVVVAPSLIPRKPGDRVKTNRRDALALARLLRAGELTEVWVPDEGHEAMRDLVRARAAAVETLRVHRQQISAFMLKHGRIYPRKKAWTMRYLCWLQEQQFDHPAHQIALQEMVEAVRVSKERVGRLETVIEEFVPNWSLAPVIRALQTLRGVDLIVAVTFATEVGDVSRFESPRQLMGYLGLVPGERSTGETVRRGSISKAGNGRVRHMLVESAWTYRHPPKVGARKLYRLQEAPPKVREIAWKAQSRLTARYRMLAGRGKRTTVVCTAIARELAGFMWAVAREAQSIRS

SEQ ID NO: 220172 - protein, 411 aa, unidentified
MDLRLKSTKAENKNSCMLQSKQKLVSKKTKKKPLKAAAQQPSKSPVRDRICLGAFNTVSEQDPRRSLESNPNSRQSRPQGKTSQPSSHLQDRVTSMDSLITSFVGMDISKHTWDVHLSPDNRSFTVPATATGLSELLSQLPAVGTCLIVMEATGGYERDLAAGLFDAGHLVSIANPRQCRDFAKAFGQLAKTDRVDARMLALFAEKVRPRLSEKPSEKQAELDELVTRRRQLVAFQSAELVRQEQARSKQAIRSLKKHLELLKKQIKELNAAIAKLIQSDEDWRRRAEIVASTPGIGEATAATLIAELPELGKINRNEIASLVGVAPFNHDSGKFKGQRRIKGGRKSVRTALYMATFSAMRANPLIQVFDERLKTKGKPFKVRVIACMRKLLTILNIMVREQTLWMPKIVN

SEQ ID NO: 220173 - protein, 354 aa, unidentified
MQQPERAAEVIIGVDTHKDTHTAVALNALGARLGTTTIPVSREGYRQIEAWACSFGSVRAFGIECTGSYGAGLSRALQASGHRVLDINRADRSARRRHGKDDPLDAEAAARAVLSGQATTLAKSGTSSVEMIRHLKLARDSAVKARAQAMQMLKGLIVSAPAELREQLEGIRGKVTLVRHLAALRPGPMTSTTASAKVGLRALARRWLSLSKEIEGHDRDLDALAAAHTPELITAPGIATGTAAEMLILVGDNPERIRSEAAFAKMCGACPVPASSGKTSRHRLNRGGNRQANAALHRVIVTRMRCHQPTIDYVRRRTAEGKTKAEIMRCLKRYVAREVFTHLCKPRQPASETA

SEQ ID NO: 220174 - protein, 392 aa, unidentified
MYIVGIDIGKNHHEASIVSPEGKQIGRSLRFATTHKGADSLMSFIFKNIGNSPCVFGMEATGHYWYPIYSFLKAKGYTIYVINPIQSDSLRKMYIRQTKNDSIDSFLIAEVIRFGQFGTTSMADENILAMRQLCRYRDSVISSRTEIKLRIGTIMEQIFPEYEKQFSSLWVSTSMGILEKYLTPENIENAPIDELFEIIKDKSHNRLTRAKAISIKEAAADTFGIKIAQDAFSFQLKQLIDRMNFLDKQIEALDCQILEYYEKFDCYLHTIPGIGMIAAATILAEIGDINRFKNSSSLIAFAGIDPTVRQSGEFNSTHNHMSKRGSPYLRHAIFLAATTCSFHNSPLNAYYKKKRDQGKHHLTATGAVARKLTTVIYAVLRDSKPYEPKKFC

SEQ ID NO: 220175 - protein, 337 aa, unidentified
MKYSGIDLHSNNSVVVVSDEADRVLVRRRLPNDAAAILALLAAHREELVGVVVESTYNWYWLVDALQAAGYRVHLANTAAIKRYEGLKHSDDEDDAGYLAQLLRLGILPSGYICPPAARAVRDLARKRMQLVRSRTAQVLSVENMLSRETGAGMRSYAVQRLTAQAVEEFGFNPEVEQSMCANVAVIKTLNREIDKLEHRLHQCVRLRPEFHLLTSVPGIGQTLATLIMLEVGTIERFAAVGNFASYARCVDSARISNGKKKGQGNVKNGNAYLAWAFVEAANFAQRYCAEARRFYERKKARSNGIVATKALAHKLARACYHMLKENKPFDVKRCFA

SEQ ID NO: 220176 - protein, 374 aa, unidentified
MRHDSEAFVAFDTSKWRNAVAVAEAGRAGEVRFVGEVENSAAATAKLVRKLAGKYARLTFCYEAGPTGYGLYRQIKGLGQDCLVVAPSLIPKRPGDRVKTNRRDAMSLVKLLRAGELTAVWVPDERHEAMRELTRAREAAVVDLRSKRQQVSAFLLRHELRHGGKRTWTKAHMSWLAGLKLAHLEQRIAFEEMLLAVRQAGERIERLEQAIRAAVEDWSLREVVPALMAMRGIDLISATAFLAEVGDLSRFRTPRQLMAYLGLVPSEDSTGDTIKRGPITKAGNRRARRVLVECAWSYQHPPRVGKDKQVKVAAAPPEVGAIAWKAQGRLCARYRSLIRRGKLKTVAVTAVARELAAFIWAINRELTTARAAVS

SEQ ID NO: 220177 - protein, 400 aa, unidentified
MRVVFGIDVSKASSEVAILVNGEKVHGYTISNDAIGFARLLGDLRTVHKPEIIFEATGVYSRRLQTFLDDNGYAYTRLNPLETKKQLDSLRVRKTDQIDAEKLAQSQFVLNRKPTYVQEEVYQNLRDLSRFYQNLTEDIVRAKNRLHRVLQVTFPELENILSTPSGEQYWNLVIAFPCKDCVLELSNDELSKSIRLSTSKRISDKRVAYLAEKLIALANQSYCAVKKTSPILEEVRYYAKELLRLYEQRQAVLDEMVELAQPLPEYDILLSIPGIAETTATSIIGELGDIRRFQYANQINAFIGIDLRHYESGNFLAKEHITKRGNPYARKILFKCIHNIASASHTNPCHIADFYEKRKRQSQTTSTKPHTIASIHRLIRTMYYLIMHNKLYDYASTQNR

SEQ ID NO: 220178 - protein, 368 aa, unidentified
MEELITGFVGLDAHAESTAIAVAEIGRTAPRFVGTVGPRIAELTKALGKLGKPQGLSVVYEAGPCGYALARELRSLGYRCEVVAPSKIPRRPGERIKTDRRDALNLAGLARAGELVSVTIPDERDEAIRDLSRARVDAVRARLKARQQLKALMLRHGRRYSGKTSWSAAHERYLATVSFAHRAQNIAFTEYRQAVSEGEARVQRLSQSLTQEVEHWRMHSLVSAVMTLRGLDLVAAATVVAELGDLRRFAHPRELMGYLGLVPSEHTTGSKRRLGAITKTGNGHVRRVLIEAAWNYRYPARISRVLQLRQERQPPEIRAIAWRAQLRLNHRYRRLKARGLQHNKICVALARELAAFVWDIGRHITPSA

SEQ ID NO: 220179 - protein, 354 aa, unidentified
MKQIKTKDWKRETLYVGIDLHKRKWVVTVRTFDLELKTFTTIADKNILLKSLHNGWFGARFKAVYEAGCFGYHLAEFLNQNSIKTSIVSPQKIPVEPGNHVKTDPKDSRKLARELSKGDLIGIYCPSKQAQLDRALMRKRNQIVKRKVQIQLQIRAILTFYGINANFPTSGQWSKEFLKELKSILFDHQFFDKAFKQTIEEYEYENQKLKEINKMIIELSKTERFKKLVTLLCTVPGIATLTAMVLILELVEIRRFSNADKLSSYLGLTPSEHSSGEKVRRGHLTGMGNSKLRNILIEASWVAIRKDLALLEKFNRVRRGKSKTRAIVSVAKSMAARIRRVWLTGEPYVLGVVQ

SEQ ID NO: 220180 - protein, 416 aa, unidentified
MVSRGSGWKLLFVGDDWAEDHHDVCLQDAAGRVLAARRLPGGVAGITRLHELVAGHQDGDDPSQVVVAIETDRGPWVRALVAAGYRVYAVNPKQAARHREVVAVSGKKDDAFDAAALADMGRTRRHQLREVAADSDEAEAVKVAARAHQKLVRERTRQALRMRSALREYFPAALDAYAPLTLTGPDTLELLAKAPGPAAAARLTIAQISAALKRARRHDVAGKARQIRAALREQHLGQPEIVTEAYAAGVRASAAVIAVLNEQVKVMEARVESFFRRHPDAGVYLSQPGIGVITGARMPGEFGDAPGRYADARARRNYAATSPLTIASGKKKTVHARFIHNDHLVNAMHDQAFAAISASPGARAYYDELRSREIDHTGALRRVANRQAGILHGCLKTGTGYDEHTAWGHRSQPAAA

SEQ ID NO: 220181 - protein, 391 aa, unidentified
MISVGIDVAKDKHDCFIINSEGEVLADVFTIPNNMDGFNSLLQKIRECSAPQDKIKVGLEATGHYSYNILGFLLDNGLATYVLNPLHTNLYRKSLSLRKTKTDRVDARTIAAMLLSDVGLKPYTDTAYHNEELKSLTRYRFDKVKERGQLKQSVSRLVCILFPELEKLVPTLHLASVYALLDEFPGAKQIADAHLTHLKTVLFDTSKGRYGRDKAVEIRESARTSIGSVMPAKSLELRHTIRLIRELDTEINEIETAIDGIMDEIHSPITTIPGIGTRMGAMILAEVGDFSCFESPDKLLAYAGLSPSIYQSGQLNNCYAHMEKRGSRYLRYAIFNAAKCVCLWDPIFVAYLAKKRAEGKHYNVAISHAAKKLVRIIFALEKSGQPYRMAS

SEQ ID NO: 220182 - protein, 335 aa, unidentified
MKHYAGLDLSMESTQVCIIDENGRKLSSEKAESTPDAIADALRRHGSIERAVIETGRMSPAICLGLRELGVNVVCIDARQAHQSLKAMKANKTDPHDAAGLAQLARTGFYKEVHVKSPGAHGVRSMITARGHLVETRVRLDNMIRGLCATFGYRPGVGQGKAFIERIMEASHIPGLGEAITSLLTVRVHLVEQIKELDLKLRMFATQSQACQILMSIPGVGIQTSAAFSAAIDEAGRFQQSRNAGAYFGLVPRRHQSGELDWTGRITKQGDSMVRKLLYEAANSILTRSRESFALKTWALKISKRRGLKKARVALARRLAVIMHAMLRDGTLFEA

SEQ ID NO: 220183 - protein, 403 aa, unidentified
MNSVGIDISKGRSTIAVMRPFGEVVISPFEVRHTDSELSKLAKQLKSLDGETRVVMESTGNYHAPVAWLLHGAGFYVSVVNAMLVHDYGNNELRRVKTDRKDAVKLANYGLDRWLTLPRYIPEEDTRLLLKNCYRQYRQYSKVQTVLKNNLISLLDTVFPNANRLFSSPIRGDGSEKWVDFVAEFWHCRCVSEKSERAFTGKYLRWCRKHGYNFREAKAHTIYAEASGHIGVMPKFETTKLLVEQAVAQLRATSTALAALKHEMQSLASQLPEYPVVMDLFGVGPTLGPQLIAEIGDVRRFYSKKALVAYAGLDAPPNDSGDVTGRHKSMSKIGASSLRRTLFLVMSVYLQTAPLDEPVCQFMDRKRAEGKLYRVYMMAFANKFLRIYYATVKAYLESLEHTA

SEQ ID NO: 220184 - protein, 341 aa, unidentified
MTHYVGLDVSMEETSVCILDAAGSMVWEGRVASEPAAIVRLLHRRAPRAERVGLETGPTSTWLWHELRAAGVTAICIDARHAQAALSMRLNKTDRNDAAGLAQLMRMGWYREVQVKQLVAHGDGALLASRALLVRQRCELENQIRGLMKNFGLRVQRTKGKAFEQSVRSLAARSAILKEVVPPLLTAWSALRLQIAVLSRRAHDRAKSSAVCRRLMTMPGVGPLTSLAFSATIDDPARFKHSASVGAYVGLTPRRYASGEIDRMGRISRCGDALMRSYLYEAANIMLVRSRGTNPLKSWAAKLAKRAGHKKARVALARKMAVVLHRMWRDGTDFGAHQQTA

SEQ ID NO: 220185 - protein, 336 aa, unidentified
MVQIYGIDLGMSSFDVSFLSESGSVRHLSGVKNTVHGISKFLLSLPSSAVLCAEHTGVYGDLLLRLCTLNRTCLCFVPGYQIKHSLGLQRGKSDPLDACRIREYAERFYDLLRPCFYPGEEMSELQELYRTRSLLVESRKRLDTLNIGDNCKSSVSLAADHARRAVLAELNTQISGLDHEIEALIQNSSEFSRNYQILTSIVGVGPVTSCELIIKTENFRKLDTAKKCAAYAGIAPYPKESGKMKCGHKISPMGDKQLKTLLFLCACSAKEHNKEIRLYFLKKHKVEKKHFFVAMNNIANKLLRLIYSLIQKQQTYDRDYIQRDPRCVVISDTNKC

SEQ ID NO: 220186 - protein, 347 aa, unidentified
MFNTNVIAIDIAKSSFHVCNLNKNNKITTNRSFTRTKLKDWLIRQPASVVAIEACGSAHYWSRFVVKLGHTYMLIPPKYVTPFRKGHKTDKNDALAIAVAAKQPEIKTVSLKSIEQQGLQSIERMREHHSDAMTATSNMLRGLVYEFGHVIPKGYSRLKSDIPDILEDAENELPHAFRDQLHAMFQFFLTIEAALISVEKKLAELIKQQSICIALMALEGIGPVNALGLTLALGNNGESFKNGREASACIGMTPKQFSTGGVVTLGGIGKRRGNNKLRSTLFQGAMSIVKLLKNRPPRNCKERWLASIIERRGAKKAAVALANKNIRTAWAMVKYSKAYEAPASLMA

SEQ ID NO: 220187 - protein, 409 aa, unidentified
MSLELNEAVFFTGIDWAAETHAVCVMDPAGKIVAQFTICHSADGIAGLLRRLARYGDSAGMQVAIERPNGRLAGLLLEAGHPVVPVKPNAIKAWRDGEVLSGAGDAAVIAEYLRLRQHKLTVAVPYSGQTRALRTVVRTRGDLVDARVAATNQLAALLEAHWPGAAAVFADVESPISLAFLSRYPTPASACHLGEKRMAAFCVKHGYSGRRTAAELLERLRGAPSGATSEALTEALHDAVLALAAVLAALNASVKALDRSAAAHLGEHPDGAIFTSLPRSGQINAAQMLAEWGDCRQAYAGPDSVAALAGCTPVTRESGKHRAVSFRWACNKRFRAAVTTFAGNSRHASPWAAQIYAGAIASGKDRPHAVRILARAWIRVIYRCWLDEVPYDPALHGAASHLALPARAA

SEQ ID NO: 220188 - protein, 338 aa, unidentified
MSMYCGIDLHSNNNYVAIRDGTFEDVACRRLRNDLGVVLKFLEPYREEVEAIAVESTFNWYWLVDGLKEAGYDMRLVNTTKASDYSQMKYTDDRHDARWIAHLLALGILPEGYIMPPEERGLRDLLRRRSYLVHQRTSLYLSVKTIFARSKCQNVTTQEIRSWDSETVRGMFDDPHVAESVVAMLPVVRVVTTQIKSIEKTVMETGRLRDEFRFLLTAPGIGDILALTIMCETGDISRFQKVGNYGSYCRCVKSEKFSNNKKKGKGNRKNGNKYLSWAYSEAAHHAKQYEPLAKRYFDRKKSRCHPMVAARALANKMARACYYVMRDQVPFDPSRTFL

SEQ ID NO: 220189 - protein, 399 aa, unidentified
MTQCSTTSFSGQDVYCGFDVHKSSWEVCVRISGVQAKAFHAPGDVAGIVSTLRSSFPGARFHSVYEAGFCGFQAHRALVSAGFDNIVVNPADVPTSGRERAFKCDRLDCRKLARHLEAGDLHCIDVPSLAQERMRGLVRRETQIRDAATRCGNQLKGAIYFHGLRPVPGRLTNAALRELESEEAADDDPETPSLVRQLRFLREERARVIADERRLQKELGFSEDVGLLTSIPGIGPRAASVIQAELGDISRFPTRNHLASYVGLSPHLNGSGEGERAKASGERKKKELHYLLIQAAWIAAGRDPALCALFCRQCRRHRKTRGIVAVARKLLFVVHAVLRSRKPCDARLFQERHPGPEAEPRKGGIPRVCVKAAEQAASADEEDALMPGVVFEEAPGLKA

SEQ ID NO: 220190 - protein, 349 aa, unidentified
MGRSIGVDLHRNRFTTAIRAANGRTYDRTWELRDLERFVAELRSDDRVAVEMTTNTRLFYDAVRPAVAEVQVVNTAQFKVITRSVKKTDHHDAAALALYLEKNMLPTVRLKEVEQGQLAALVSTRDTLVKQRTTLKNKINNRFAMYGRPIQREMLSSEKGLAAVEAEPFDTLVRVEIGVLTAQIRSLNASVKELEKAIEAEARNVAGYESLMSIKGIGSVSAATLLTVIGDVNDFADAGKLTAYFGLVPRVSNSNETERSGRITKRGSKLGRTVLVQCGLIAKKYSQYLSTFYERVKRKKGGGKANIALARKLLEIVYRALKNEWVFEDFGAFRLVGGVSPVKRKRRAG

SEQ ID NO: 220191 - protein, 375 aa, unidentified
MEGAPMLDTTTFIGLDVHARSIKAVSLDVMTGEVRCATFGYDAGAVAEWVRSMDPRARCVYESGVTGFDLQKRLSGLGVDCVVGAVSKMIKPSADRRRKNDRNDAEFLARMLSVGNVVEVWVPDDECEAARDLTRALEDARDDLSRSKQRLSKFLLRHGLVFDERTPTGRRKGNWTRAHWSWIESIRFAEGADNDVLAYYVDAVRRAAEDKARLEGLVEAEARKPRWRKRVDSLRCLKGVDTASAADLVFEAGEFSRFRNARSFAAWVGLTPSEHSSGESDRRGAITKAGNKHLRKTLVEAAWHYLTCSGRPKDLAKGQAPDRGARRHAAKGVRRLAERREALLARGVHGNKANVATARELACWVWAVGLMAEEA

SEQ ID NO: 220192 - protein, 346 aa, unidentified
MKQVCRIGLDIAKHKFQVHGVDKHGKDVFNKQLNRKDVLVFFANLPVCTVGLEACGGAHYWGREIQKLGHTVRLISPRHVKPFVINNKTDAADARAICEVAGRPSTRFVSVKTEEQQDMSAWHCIRERLIKSRTALANQIRGLLSERGIILPQGITHVRKRLPEIVEDSQNGLSMTARDFFSDLYTELHEADERLAELDHKMEAITKANEHCTRLMKVPGIGPVTASALVAHVGDAKQFKNGRELAAYLGLTPREHSSGGKQKLLGITKRGNTYIRKLLIQGARNVCRAWSGVMDAANDRRKAWLQGVVARRGQFVASVAQANKTARIAWAVLARGEDYQAAKATN

SEQ ID NO: 220193 - protein, 336 aa, unidentified
MEHLAIDLGGRESQICVRSSDGQIVEERRCRTAALSAYLAIRPQSRVVVETCSEAFGIADAALMAGHEVRVVPSTLARSLGVGARRLKTDRRDARALSEVSCRIDLPSVHVPSRQARQRKTMCGMREALVGARTKLVNTVRGWLRAEGRRPRGGDVNTFAVRVRALYTDTTLPTYVERQLRMSESLNQEITNADREMAAIAKADPIARRLMTAPGVGPSTSVRFVAALDEISRFRGAHAVESYLGLVPGENSSSERQRRTSITKAGPTALRWCLVQAAWAARRTRRKGPLQRWADGVEKRRGTRVAVLALARKLTGILYAIWRTGGVYEPRRFSAF

SEQ ID NO: 220194 - protein, 387 aa, unidentified
MPQPNDLSRSLVALDQNSTIIAVVELSHSSWLVGGIVPGIERQPRKKLEPSPERLLALLHRWRDEAVRAGCKITRIALAFEAGRDGFWLARWLAARGVEAHVIHASSLAVSREHRRAKTDRLDTELLKRGFLGWLRGERGHCSMARVPTIAEEDAKRPNRERDCLVGERTRIVNRIKSTLARLGIHTFKPTLRKAADRLATVHTPEGVPLPPNTLAELQRDMARLGCVVSQIKEIEDVRQKRLEQQHETGPHAMVRLLARIVGVGVETADMLVHEVLSRPMRDRRAVARYAGLTGSPDESGAQRREQGLARAGNARVRRGMIQLAWRFLMFQKESALALWYRARTADSRKGTRKTMIVALARKLIIALWRFVTTGEPLEGVVLRPAT

SEQ ID NO: 220195 - protein, 348 aa, unidentified
MKIIGCDFHPGYQQIAMVDDVTGEMLERRLEHEKGEARRFYQGLQGEVVRVGMEAVGNTQWFEHLLAELGQELWIGDAAQIRHLVVRRQKTDRRDARHILQLLIDERFPRLWVPSVAMRDTRQLLRHRQKLVEMRTQVKNQLQHLALNQGVQRKRRLWSREGRAVLEALPLEGWTARRRNDLLAMLDRLEQQVGELDGAVRAEAEQRPEVRLLMTHPGVGPVVGLAYALTLGPVTRFPRGKQVASYLGLIPSEHSSGGRQKLGSISKQGNTMMRTLLVEAAQTAVRFDEELRREYRRLAARKHKALAKVMVARKLAVRMYWMLRENQPYTPRPVARMQGSPSHSVVAG

SEQ ID NO: 220196 - protein, 424 aa, unidentified
MKVTYQICCGVDVHKSFLVATIVKTTGGIEPSYQKKRFSTFNNSIFEFKQWLLDNDCRDVCMESTGKYWVPVFNLLEDEINVVIANPKWVKAVKGNKDDTKDSKWIGDLFRLGLVKGSYIPCKIVRILREYTRYRCKLVSCRSSEKNRYQNALTVCNVALDSVVSDIFGKSSTSIIDYLLEQSGTSINHEEIASKLLRSLKSKEDAVIESVEGYQMTDAQKYRMRLVRAHMDYITAEIKDVDKMIENMISSNPDFENAVQFLCTIPGVKCDSAITIISEIGTDMSQFSSSKRLCCWAGLTPGSNESAGKKKSVRITRAGVYLKPALVQCAHAAVKSDQSPYYKKKYESLVKRRGKKRAIIAIARMILTAIYQMLSTGEQWNPSDLYKIDVPEALIEKQKAKAIKQAKKLLQREGLLPPDEPVAS

SEQ ID NO: 220197 - protein, 338 aa, unidentified
MRLYGAIDLHSNNNVTVLIDEQDKVVYEKRLPNDLGLIAQQLVAYQSSLEGIVVESTYNWYWLVDGLMDKGHHMHLANTAAIQQYEGLKHTDDTSDARWLAHILRLGILPEGYIYPKEERAVRDLLRKRGQLVRQRTANLLSIQNLITRNTGSSMSSNRIKTLQPQQVDELLADGDLVLAVKANVAMVQCANGQIEILERTVRDRIKPRPEFCFLKTVPGIGQTLALTIMLETGDIARFAGVGNYASYCRCVGSQKLSNGKKKGKGNTKNGNKYLSWAFVEAANFAIRFSSRINRFYQRKKAKSHGVVAIKAVAHKLCRACYYIMKNRVAFDVTKAFA

SEQ ID NO: 220198 - protein, 570 aa, unidentified
MVVVGTDAHKYSHTFVATDEVGRQLGEKTVKATTAGHATAIMWAREQFGLELIWGIEDCRNMSARLERDLLAAGQQVVRVPTKLMAQTRKSARSRGKSDPIDALAVARAVLRETDLPLATHDETSRELKLLTDRRDVLVAQRTSAINRLRWLVHELDPERAPAARSLDAAKHQQALRTWLDTQPGLVAELARAELTDIIRLTGEINTLAQRISARVHQVAPALLEIPGCAELTAAKIVGEAAGVTRFKSEAAFACHAAVAPIPVWSGNTAGQMRLSRSGNRQLNAALHRIALTQIRMTDSRGQAYYQRLQDAGKTKRAALRCLKRRLARTVFQALRTVHQPSSEHTQPAAACHRSYCSSHLGEPPRLTDMTQKTRIQPLPPKRAGLLIRALYRIAKRRFGEVPEPFTVTAHHRRLLIANVVHEALLQRASRKLPPSVRELAVFWTARSIGCSWCVDFGAMLQRLDGLDVDRLPDIDNYATSSKFSDDERAAIAYAEAMTADPHSVTDEQVADLRARFGEAGVIELTYQIGVENMRARMNSALGITEQGFNSGDACRVPWAAPDVPSAESR

SEQ ID NO: 220199 - protein, 359 aa, unidentified
MGSIAFDPADVVVGVDTHKDQHVAVALDGLGRRLGERFVSAAPAGYADLLAWAAGLGRVAAFGVEGTGSYGLGLARFLRRHAVMVLEVARPPRKGQRRLQGKSDPVDAEHAAREVLAGTSVVTPKTGEGAVEAIRLLKVARDTAVVAHSQAMITLKATLVTASDTLRAELEPRTDFALVTACAALEVSGDLADPEVAMRHALRALACRWLALHEEIKAHSRHLKRLTSRTAPALVATFGIGFDCAAELLCAAGDNAGRIRSEAAYAKLCGACPIPASSGKTSRHRLNRGGNRQANAALFRIVVVRMRWHPATIVYVHRRTAEGLSKREIIRCLKRYVAREVYRLLPVPATASAEPLQAA

SEQ ID NO: 220200 - protein, 339 aa, unidentified
MAILYVGIDLAKNVFAIHGVDEHGKPALVRPSVPRARLHQLVAALPPCTIGMEACSGAHHWARLFAKQGHTVRLMAPKFVAPYRMSGKRGKNDAADAQAICEAVQRPNMRFVPVKSQDEQARLCVHRVRQGLVEQRTATINRIRGLLSEFGIVLPQKAATVRREAAAHLEDLPGWANTAVGDSLSELHRLDERIAEYDRHVVHMAREDERSQALMQLSGIGSTTASALVSTIGNARDFKNGRQLAAWLGLVPGQYSSGGKVRLGGITKAGDGYLRTLLVLGAKAVLAAARNKHDRLSRWAMALEVQRGYWKAVVAIAAKNARMAWAVLAKGENFKPFEA

SEQ ID NO: 220201 - protein, 345 aa, unidentified
MTEYKRIAIDTSKSVFTLHGIDGEDHAVLRTNLRRGQMNAFFRKLPSTEIALEACGGSHHWARELTALGHQARLVPPQYVKPYVKRGKNDRNDAEAICEAAGRPGMHFVPVKTLAQQAQGMVLKVRETLVAHRIRLANTLRGHATEFGVIAAKGLDKIVPLLSAIEQEAAIPAEAKEMFVLLGQEIEQLDVRIEQVDKKLLAAHKANPVSKLLATAPGIGPITALTLAIDINPAVFESGRHLAAWAGLTPKEHSTGGKQRMGGISRAGHQRLRSLLVSGATSVINAAMKPGSRQMTAWLRALLLRKPRKVAAVALANKMARVAWAMMTTGEAYRRPAVEAGMVAA

SEQ ID NO: 220202 - protein, 407 aa, unidentified
MGRRRWLWHHRRSGERMEVSLVRVNDLSRSVVSFEQSTTLVVVVEMGARSWLVAGTVPGVERQPLKKLEPDAAMVLGLIERWRREAIKARQTISRVVLAYEAGRDGFWLARWLMVRGIEVHVIHSASVAVSRERKRAKTDRLDAAMLMRVFLGWLRGERGHCGMVAVPTLEEEDARRPSRERESLVNEKLRITNRMKGALARLGIRGFKAHLRKAPQRLDGLRTPEGTGLPPNIIEEFRRDMARLAFVREQITQIEKARIERLQRAPNTGPNLMVRLLARVIGIAIETADMLVREVLSRNWRDRRAVARYVGLTGSPDESGTKRREKGLTKAGNARARRGLIQLSWRFLQFQKDSALSKWFRLRTEGSSGARKTTMIVALARKLLIALWRLVTTGEVPEGVVLRPAV

SEQ ID NO: 220203 - protein, 409 aa, unidentified
MKLFVGIDVSSQDMKACVMNLDGEVLTSLTVDNNLPGASYLRDQVVDIAQKHMIQEIQIGMEATSVYSWHPAMFFHEDESLKKYKTKVFTINPKLIKKFKESYTDLDKTDHVDAWIIADRLRFGRLRLSAVMQEQFIALQRLTRMRYHLVHNLIREKQYFLQHLFYKCSSFTAEVESSVFGNALMELLLEQYSLDEISTMDLQELAKYLQEKGKNRFADAECVAKSIQKAARSSYRLSKCVEDSIDLLLATSIESIRSINKQIKELDKAIQKLLDGIPNTLQTIPGIGPVYCAGILAEIGQIDRFDNQAALAKYAGLTWSKHQSGKFQAEETNMIRSGNRYLRYYLVEAANSVQRNEPEFRAYYLKKYHEVSKHQHKRALVLTARKLVRLVDVLLRNDQIYTPRRKVDK

SEQ ID NO: 220204 - protein, 370 aa, unidentified
MNHDTTVFVGLDVHKDSITAACIGTHPGESPVDLGTLGTQQYAIDRLLKKLSGRGRLQFVYEAGPCGFWLERYMRSKGERCLVAAPSLIPKRPGDRVKTDRRDARNLALALRAGTLRAVHVPTADQEAFRDVVRAWQQSKRDITAAKQRLKAFLLRNDIRYCGRATWNAAHRRWLSELVLASASQQIVYQELLGAIDERERRRDRLEQQLDTLAPQWEGYPLAQALLAFRGIQKTVAYTVVAETADLSRFSHPSRFMAWLGLVPAEHSSGATRRQGPITRCGNRWVRSLLVEAAWAYRFNAKVSGIIERRAQHIDPAIRDLAWKAQLRLTRKYRRLIGRGKHKNVAVTAVARELAAFIWDAARRLEQRAS

SEQ ID NO: 220205 - protein, 346 aa, unidentified
MLYAGLDLSRKRLDFHLLDGDGGTVEVGASPPDADGLRGLTQRLERHGAPIRAAIESMNGARFVHDRLELAGWEVEIADAQKVKGLAPLACKTDRIDAWVLAELARRDLVPAIWLPDPLVRAERERARWRLHLVRHRSSLKQRVHAVLLTHGKPCPVSDLFGVRGRQLLNSLGLPEPWQGTIEASLRLIDELEREISGCERELRRLGADHRYVPLLCTTPGISWVLAYTIAAELGDINRFPTPRKLAGYSGLCPRVYQSGERDLRGPLSKQGPRYLRWALVEAATHACTHPAYRDRYQHTKARIGKQRGAKVAQIDLARRLTEAIWHMLTRQQPFAPKGATDPLAA

SEQ ID NO: 220206 - protein, 457 aa, unidentified
MMETKRRREQRSMLPVHPDAAAIDIGATVHVAAVGPARDPEPVRSFGTFTGDLHRLADWFAQCGIKTVVMESTGVYWIPIYEILEQRGFEVRVVNARDAKHVPGRKTDVSDAAWLQRLHEFGLLRGSFRPQGAIAALRAYLRQRERLLDYAAAHIQHMQKALTQMNLQIHHVISDITGATGMRIIRAIVAGERDPDTLASYRDIRCHSSAETVRRALIGNYREEHLFALAQAVELYEVYQAKVATCDEKIEGVLERLKQPGRAPAKPLRAARHKTRQPNAPAFDARGALYAVLGVDLTQIHGLGPYLALKLISECGTDLSAWPSAKHFTSWLSLAPGNKISGGKILSSRTRPSGNRAAALLRLAATTVGRTETALGAFYRRLSARIGKAKAVTATARKIAVLFYNAVRHGMDYADPGASYYEERYRRRVLTNLQRRAKAFGYVLQPTEIKVVPMAVS

SEQ ID NO: 220207 - protein, 387 aa, unidentified
MYFIGIDISKFKHDCAVIDDIGDVVTPSWSFSNDCEGFSLLADLLINLGEDIKIGFESTGHYGQNLKLFLESNSFTFMEFNPLLISRFVSSKSLRKTKTDSIDALLIAQYLMTVEYKPYPASFYHMDKLKSLTRFRDSLVRQRSRQLVELTNVLDKVFPEFKPFFKHRFSVTALYILSNYTTPEKIANMNARSYEIFRKLSRGKFTMSAFVQLKTLAKNTVGQSDDYLLHEIAVLLELYNQLDSKIQELEEQVVACIRGINPPMLSIPGIGALSAAIILSEYGDFSKYDNPAKLLSFAGLEPGYFQSGQSEHTGHMVKHGSSHLRYALMNCCLPLTTNEPVFAEYYAKKRAKGKPHRVAMTHVAKKLLRVIYTLQTTNVTYDPNLIR

SEQ ID NO: 220208 - protein, 387 aa, unidentified
MPKKITAVGYSAAMARAEAEPARARFWVGLDVGLRNTAVCVVDADGAVVHQMSMKSDATEIGRYLRKNFKSHVSMIGMETGSLSPHLAAQLRRQGFPVAVLDALQVHRVLSIKRNKTDTNDARGIAEITRSGREYLTEVYVKSSLSFEIRAYLIMRDRLVKQRRETEAMIRGLVRVYGGRIEGGTESPATYRSRAIDQMCLIADRENIDLRPRVLPLLDLCQSFYDEAQRIERELDLLAAANPVCRRFMEIPGVGTITALSFFSAIEDPHRFRHVEDVAAYLGLTPRVYQSGDSLTHGSVSKMGNQMTRTHLVSAATVMLSNTKSFSTLKDWGLRLSKRVGFNKAKVALARKLAIVMLSLWRDGTHFMAKAANVEAHRELMRRQAAV

SEQ ID NO: 220209 - protein, 372 aa, unidentified
MIQRFHGLDQHTKHSTICVLNREGQEEAFVSRYPDLRGYIEKLGPDDAVVMEAATGAFFWADMVESTGATCYILHPYKFKIIRDSWNKTDKQDARNMAKALWVYLVTGEFGIPTVYKPSVAIRELRRLFSQYYLLNRQVTLMKNTIQAILGDNGVSLNYRQKTLLSSETEAKEMVAGFNLSPASFLSIQINLQVLWKVEEQKKKLKKEILLAGEPFAAEVRLLITVRGITPLTALAFLADVADIRRFKTLRKINAYLGLVPTVKESGGKSKTGHINRQSRRLSRTLFTQSVMHFADASPYLRLYYSNLISRRGVGRARIALIRKICGMMRRMLLEQKEFRWIQPSNFERKLKRYECQLKKIKKMKEEERKIA

SEQ ID NO: 220210 - protein, 334 aa, unidentified
MTTERFVGVDLHKKSCVFTELDSKGKILRRGKFGNNIGEVSAFAASLHPGTKLVVEPLLNYLWFLDQVAPYVKSVHPANPHRVRIIAEAKCKTDRYDSYILAELLRTDFLPESHYVPARIRELKDIVRQRLHLVGHNTALKNRMRHLVFLNSSVVGARNITSPKAQREIKRLHLSESIRASVEQCQRVILGIEPLLEELDREIEVRCSGIKEIEILMSVYGIGPLWAAVIYTEVVDISRFRSRKALISYAGLAPSVRASGDKVSSGGITHQGSSLLRTALVEAGMNAKKVCPELRRLYQRVFYKKGKETARVAVARKMAVIIFALLREKRAFRL

SEQ ID NO: 220211 - protein, 342 aa, unidentified
MEQIRVIGLDIAKSVFQVHGVDGEGEVVVRRRLKRSRVVPFFASIEPCRVGIEACATSHFWARELGALGHDVKLMPPAYVKPYVKRQKNDAADAEAICEAVTRPTMRFVPVKTTEQQSVMVLHRVRELLMSQRVRLSNAIRAHMAEYGLVAPIGRNGLQRLIETINDETDEQVPAEARLCLKMLVDQLQLVNVQVLENDRRIRASARATEVGRRLMEIPGIGPVIASALVATVPDPQAFRCGRNLSAWIGLVPRQNSSGGKERLGGITKQGNRYLRKMLVVGAMAVIRYAQRNGTRRPWLVQLMGRRTTKIAAVALANKTVRMVWAIMVSGERYREPVPLAA

SEQ ID NO: 220212 - protein, 453 aa, unidentified
MKKETPKLGIVKMGSGLPVFNPYAAGIDIGDTLHCVAINDGNGGHEVKTTSAFTCDLHEIVDYCKSNSVTTVAMESTGVYWLVLYLLLEEAGIEPYLVNARHAKNVTGRKKDDTDAIWLQKLHTCGLLQKSFQPDNEIRLLRSYTRQRKSLILLGSDSIRRMQKALELMNIKIHTVISDILGKTGMAMVKAIIAGERSPEILFKLCDPRIKASREDIIKSLEGIWKEEYLFMLEQAVENYEFHQKQVKSCEEKIQQQLLKQVALIKDGDITGLEETPQKKSKVKTRKNQFDFSLLPYLIALAGVDLCKIPGISQVTALEFIAEVGLDMSKWKSSKHFAAWLNLTPNTKISGGKILSSKMMKKNNKAGQLLRQAASCLVINKSAIGDYYRSMRARLGGKGAALATAHKLARIIYTMLLKQTEYNPGMIIENHEKSREEKIKKLEKQINRLKQVA

SEQ ID NO: 220213 - protein, 315 aa, unidentified
MEDSQVFVGIDVSKSCLDVASRPTGEVWQVPNDAGGIIDLAQRLTGMSPPLVVLEATGGLEWALTAELAAAGLPVAVVNPRHVRDFARAAGTLAKTDALDAQVLAHFAQAMEPDPRPLPDSDAQDLQALVGRRRQLVEMITAEKNRRRTVIARIRPQVEEHIRWLGKSLEDLDQDLGGFIRSSPMWRTKERVMRSVPGVGPVLSATLLANLPELGALSRGQIAALVGVAPFNRDSGTLRGKRTVWGGRRQVRAALYMAALVATRYNPVIKDFYQRLCSKGKPKKVALTACMRKLLVILNSMVKHGRDWQPTLQTP

SEQ ID NO: 220214 - protein, 450 aa, unidentified
MKSASAGAHSDVSDPKGLFVVGVDLASRSIRLCSEDPGTGEILNREVSREKFEGLIRKRGGPSMRLVMEACGSSNYWGSIAEMNGHAPVIVPARFVHGCSSGSKDDARDAECIWQMGYVPKIKSVRLRGAESRMALALLRFRESVLKGMGGLANRIRALSYELGSVSGKGAPAAVGALDKLCEETEREAPGSVMSENLAAVSSAACGLMKAITKAEQAIDERVMSLAESDGRCRLLMTIPCVGPVAAVAISAFMEDPASYRNGRQFAARCCAVPLHTGSGGKITILGIPPRGGMFIRRILFEAAMGMYNRVMRQQKDGREGKGEVPKALSEWIVSLAGRMPVKKAVSAIVNKLCRISWAVLRSGRPYDQEKSSLVPPSAMGPDGKVRNARAMRKSAARKLLQAVGKLESFLERRKGQIPAGDDTARGRGSEADDKGSEGRHGNAGKDGLK

SEQ ID NO: 220215 - protein, 412 aa, unidentified
MELLHRRCCGLDVHKETVVACLRLVSDGKVTTEVRTFQTTTADLLRLSEWLAANECTHVAMEATGVYWKPVWHILDDGEFALVLANAAHVKNVPGRKTDVNDAMWLAELLAHGLIRASFVPDAQTQEMRNLLRTRKQLVREQSSHVLRVQKTLEDANIKLDSVLTDLMGKSGRAIIEALIAGETNPVKLAGLADRRVKASPEKFREALRGRVTKHHRFLLRLHLNQIDALDAAMATLDAQVGANLGPFRIAVELIGSIPGIKNLGAHVIVSEIGIDMSRFPSAAHLISWACICPRNDESAGKRRSNRVRKGGTWLKTTLVQCAWAAVKKKDSYLQAQFYRIKARRGPKKAIMAVVASILTTIYHMLKDGTMYKDLGRNHFERRSSDQQKNRLVKRLADLGYAVEIKPLATTA

SEQ ID NO: 220216 - protein, 428 aa, unidentified
MNIEDTIRRKQFCQIVSEIKGSHEYLIVGIDVAKDKHHAFMGTATGTSLLRRLVFENTIDGFSKLLSQVEAVKNRNGLEKIAFGLEPTGNYHKPLGRHLIRCGHNVVLVTGSAVKHNRQVLDGRWDKHDTKDAANVADLVSRGKCLYYDLPSSKIDELRDLLSLRRRLKKEEHSLRMRIRNSLLAKFFPELDRFYGACESESLSIVRWCLDPNKIAGMEFDQFFRMVTRTTRGIAQRLRLQKIHRLAVESIGCPMGQAAEFEAGLLVEKLKQVRQQIQETQELIEDVSIEFAEYTWLLTIPGFGPYISARVLASIASPWRFDNCKQVLRLGGYDLCASRSGKRSDKAVPVISKNGNGELRYALYQAAHVASTRNRHFIKYFNKLLRGRERERGIKINMRVKLAAKMLVIAWTLMKKQEPFDPHHLNIE

SEQ ID NO: 220217 - protein, 345 aa, unidentified
MKYYIGLDAHAATSTGVVIDQEGKIIFRETFETTEGNLWHFIERVQGERNLTFEESHLSQWLYVTLKDKVEKLVVCNPVYLAKKPGAKTDFRDALHLAQELRCGHVQAVHHEQSAWIELRMLVSGYLDLVSQIAACKNRLKALFRMEAIKTSESKFYKNRNRIKEIANEQSRFAANSFYEQIDFLEREKQTYKIEFQRNKTRYRPIRNLMSIPGIDLIRANIIAAVVCTPHRFKNKHQFWGYCMLVRHIQASGGRIYGNKRVHGRGELRNVFIGAAESALRSKTALRDHYEARRAMGLSHKAAKLSLARKIASLSLSLLKNNETYQDDFEQRLSERIAIRKTLNL

SEQ ID NO: 220218 - protein, 356 aa, unidentified
MRKINQLSFEEETIFCGIDVHKKNWSVSIRDSRWELENYSQNPDSDALAAHLKSRYPEANYKAVYEAGFCGFSIQRRLTELGIECIVVNAADVPSSDKDNKRKKDKRDARKLSRELSKGELKAIYVPEPFMEHARSLVRQRTRFVWDQTRCKNRIWHLMMFSGIEMEAEKAKRYWSKAFIKKMKHLPFGDDNLKDTFDLALEEFMEIRKLVLNATRKIRALSQSDCFELIQKLLQSIPGIGLINAMIIHTEVMDIKRFKTLDSFCDYVGIVPDTHSTGERDKSRGITHRSNGYLRPAIVESSWVITRKDPAMLMRYNKACKTKEPNQAIIVVAKHLLSKIRYVWTNQQAYITDKIS

SEQ ID NO: 220219 - protein, 420 aa, unidentified
MFSDTTLIVGVDVHQRRNVTLVMDGGGDAVDNHRHFANNRLGSDQFASYLADRAQSGSFTTIHIAAEATNNYWLPFFCHLAETPALAAWPVTLYPFNPRLVANFKKALGEEEKTDLRDAGVVAERLRFGKKLPRPFVMDELYLPLRTLTRYRYHLVRELVRVKSYCLSLIYLKATDYTDKKKKPFSNPFGATSQAVLRQFATLDEIVNTPLDELAEWLDVKGKRRFPNPEENARKLQQVATEAYQLPEEWTAVIHDLVSLNLRHIACLENLIGRVETAITQQMENIPHTLETIPGIGPVFAAGIIAEIGDLARFEYNEAKVASYAGLRWPRSQSDEFEADDRRMSRSGNHFLRYSFCEAAQLVRLQAPEYRDYYNRKYKEVRKHQHKRAIVLTARKLVRLVVRLLTTNEPYRLRRQVSNE

SEQ ID NO: 220220 - protein, 341 aa, unidentified
MKKFIRIGVDLAKNYFQIHALVSEGGPAVTRKVRRSKMHEFFSQIEPCLIGMEACGSAHYWARELKAMGHEVLLMPPAYTKPYVKRGKNDAVDADACCEAMSRFGMRFVPIKSAEQQATLMLHKTRELLVKQRTMSVNALRSHLSEFGIIAAKGIGRVDELLELAESDATLPNAARAGVKVLSQALEGLDKAIDDLEDEITSAHAQNEMTRLLYKVPGIGKIISSVIAASVPDPSVFKSGRDFAAWLGLTPRQNSSGGKQTLGAITKQGNRYIRKLLVLGATSLLNVMGKRKGALRDWIVGLLAKKPARLVTVALANKLARILWAMMKTGESFRTEMFAKA

SEQ ID NO: 220221 - protein, 417 aa, unidentified
MERTNNAIPIQGYVALDIHKEYVLVGGMDREQASVLKPRRVEMPHFRTWAEANLRKDDIVVLEATTNVWDIYDIVALLAGRTEVAHPAAVRQIAEARVKTDKEDLKRLLRLLIAGMVPRVWVPPVPVRELRGLISYRWRLVKMSTMIQNRLHSLLHKHNIQPLEGGLKTDKNRAWWEQQEFSPMEALQVRQELASLALIEGHKEEVEQELGRLSLVEPWASQSAYLMQLSGVGVVIAMTVLGAIGDIFRFESPKKLVGYAGLGAGVHDSGKEHCDKKITKAGRKELRWALIEAAWRAVGSNPYWKQQFEALERRMPSNRVIVVIARKLLVTVWYVLSRREAFRHASQEDLAYKMLIWSWSMDEEARQGMTPQQFAKYGLLRLGIGRDLSRIVKGGGPRRLASAEEVLALRPELRPPQ

SEQ ID NO: 220222 - protein, 367 aa, unidentified
MPSIALERSDVIVGVDTHKDEHVAFAIDGLGGTLDEPRFFPANPDGYADMLSWAAGLGDVHAFGVEGCGSYGSGLARFLRRSEHTVREVARPPRKGERRLSGKSDAIDAEHAARVLLSGTGSATPKLADGQIEAIRLVKIARDTAVKGHSSAIITLRAVLVTGSDALRAGLEPLTAHKLVVACAGLDTAGDIADPEVAMRATLACLAQRWLTLHEEIKIHTSHLKTLTRAAAPELLDRFGIGFDSAAEMLVTAGDNTDRIRSEAAFAKLCGACPVPAGSGKTSGRHRLNRGGNRQANAALYRIIVVRMRWHPPTIAYVQRRTEQGLTKREIIRCLKRFVAREIYNLLPDPSGPQHPLEAPNNRSSTT

SEQ ID NO: 220223 - protein, 353 aa, unidentified
MRQVMIQEKSVNSKSDEANEPQNVYVGVDLSRLKLDVWAFNKHRTYTNDELGFSKFIKLIQKIKQPVIVAYESTGSISLYFSEQLDRAGIRRCCINPAWIRHYAKSIGQIAKTDKIDSEMITIYATLHQIKADNPMSPEALRLRQLQRCRAMIIKHRAQYKASLYTYKDEFALEKILARIRQLDVEIIELQKEIETLIFSNEEMKKRYKLYLQVGGIGEKTAKVLLCDLPELGYLNRREIAALVGVAPFNWDSGRKTGKRFARFGRREVRTALFMSIISIKRIEDNPIHEFYDKLRAKGKKHKNASIACIRRLLVRLNAQVRDWIADGMPPIENETKKPTRISKLKQAEKSVA

SEQ ID NO: 220224 - protein, 364 aa, unidentified
MKQKEKHNTIGLDLGEGRHRFCVLDEAGEVVEQGSLSNERVALGRLTQRYRGALVVMEAGTHSPWISRYLKELGSEVIVSNPRKVRAIYQHERKSDQRDAQMLARLGRMDRALLYPVRHSSEQAQQDLLRIKLRDSLVRSRVGLINSVRFSLKSLGYTVRNPSSERFHKVVWETLPEAVRQMISPSVQALAELSARIKELEREINLLARTKYPQTLWLQQVPGVGALTALYFVLKIEDPQRFENVRDVGAYVGLCPRRDQSGGSDPQLRISKRGDAYLRRLLVSAAQYILGPFGPKSALRAYGLMLAADGSARAKKRAVVAVARKLAVLLLSLWKNRSHYEAFPHWQTIEDKRSGTIAIHRVEA

SEQ ID NO: 220225 - protein, 322 aa, unidentified
MSILHLNIGIDVSKDTLDVAILSSEAKAKTFQVSNGPAGFSKLILQLKKFGASESWRITLEATSAYHRAVVMAMLDIGVKVLVLNPKQARDLARGLGVLRKNDKTDAHVLALCARMAWREPEPIAQGVGFQLQEISRRIEVLSVQRSGEMKRLRKPGLSTLIKESCHRQISLLDDEIALMERAWLETLEESQELKRAYQNIRTVPGCGKATSRKVVSELLAVLRDRTTAQCVAYAGLAPHEQTSGTSIRRKSQTFSTGNKFLRTALYMGAISSIRNDPISKAMYTRLVEAGKPKKVAIVAVMAKLMRRIAAVVKRGTPWVNA

SEQ ID NO: 220226 - protein, 369 aa, unidentified
MSEPITFVGIDAHQRELQIAMFVGAATQPVQWTCSAEPSAIERLKRTLERAAPGVITCCYEAGPSGYTLQRRLTGGRVQCRVIAPSMIPQKPGDRVKTNRRDARKLAELFRAGLLTEVHPPTPAAEAVRDLCRARDDARQDLLRVRQRISKLLLRHGVTFTAGRHWTQRHHRWLEHVPWEHPAAQHVMRDYLLALAQVMARLTELDRALARIAEHPPYQPAVAALRCFRGVDTLTAVTLLAELHDIDRFPHPRALMAFVGLVPSERSTGDHQRRGAITKTGNRLARRLLIQAAWHYRHRPSLGLMARRRRENQPVAMLAIATKAEHRLCGRYRRLCAHGKLKPVAIAAVARELVGFVWAALHLPEARMM

SEQ ID NO: 220227 - protein, 423 aa, unidentified
MSQWRIGQEADPAIKPANTGGGEMANTPSIKFFVGIDVLKEKFDVCCIDGTGEKLFRLSTDMVRSGFEELNKKLTKLADSRDSVVIGMESTACYHIPLFSYLTSEGYNVVVINPLLISNYMKLQLRKTKTDKKDAQVIAQYLNEQREAYSQSVMRSDITELRDLSRQRESLVDQMTAQKVDIKRILSVTFPELERITNIFTKSMLRLLSQYPSASAIKNTRRAKIAKALIPGSYGKQTDESVDVIRKAAKTSIGVVSLAKEVVLKQKVAILIQLEEHLSELSEILIELCQSQMGEDVEILTSMKGIGNQSATNFLIELGGGVDPYKSPKQVIAMAGLDPSVYQSGKHEGKGRISKRGNRHLRRIIWLMSTKVIIFNDFFKEYYLKRREDGLPYKKAVLATAHKLIRTLFAMLSNKTTFKVRAS

SEQ ID NO: 220228 - protein, 390 aa, unidentified
MAKKVRSWAGLDVHAAKVVACVVDAESGEMTVHRLAGDIAKVVAFCAALPGPTRVAYEAGPTGFGLARALLAAGVECVIAAPGKIERPAQDRVKTDQRDAERLVRLLMINALHAVRVPGLAEEALRDLTRAREDLRGDLMRARNRLGKLLLRYDVRYEGTWDRWTERHRAWLAKVELPERGAQATFLDYLGAITALEIRRGTLEATIAELAPASRWAGDIARLRCLRGIDTLSAVGLCAEVGDFARFERPAQLMSYLGLVPSERSTGEARRQGAITKSGSSLARWLLIEAAWHYRHSPRVGTKLARRQHGQEPAVIALSWKTQQRLYQLWRGLDHKRGKRRQLVAVAIARHLAGFCWAIVTLDPHTTRGGNATASDTPELTPALAPSTPD

SEQ ID NO: 220229 - protein, 340 aa, unidentified
MNWTVAIGIDTHRDRHSACALDRLGRPLGELELSADSVGYQALWRWACSLGVPAFALEGSGSYGAGLARHLAARGAELYECERPTRRDRRRGKSDRIDAQAAARRLLAGEGLAQLRGFGPREELRVLLLERRGARRAQTAALNQLHALVITAPPALRERLERLRGLVLARRAAAIRSQESFARPLRRLARRALALAAEVELVDGELTRLVQALAPALLAESGVGPVCAAQLLVSSGDPRRMRSEAAFAALAGASPVDASSGRQQRHRLNRGGDRQLNAALYVIALNRKHTHPATRAYYERLLAGGKTKREALRCVKRVLARHFYGQLRAVGSLELAGSAS

SEQ ID NO: 220230 - protein, 346 aa, unidentified
MNIYIGLDVSLASTAVCVLSSHGKVVKEITALSEPDDLERVLRSLLGTVVAVGLEAGPLSQWLYRHLTEAGFDTVLMETRQVKGALKAMPIKTDRRDAEGIARLLHMGWFRPVHCKSISAQEMRALLSSRKAILQAIVALELSIRGVLRNFGLKMGRIAKGGLEDRVLELADGNVMLQAAARPVLSARAALRLELAGLEKRVRDHAKSDPVCRQFMTMPGVGPVVALTVKSAIDDPERFRSSKDVGPWVGLTPRREQSGERDIMGSISRAGDAGLRTALYQAAMVMLHKGRPNWLTAWAWNVAKRRGKKRATVALARRVGVVLHRMWLDGSTFRFTQAEAAAVSGA

SEQ ID NO: 220231 - protein, 407 aa, unidentified
MDKLFVGIDVGSRDNAVYIMMPDGSKHSSFHVQNNLGGAQIISKRVVSVLMENELSNVVIGMEATSVYGDNLMCFLREDGALARFNRKLHVLNPKQVKKFKDVHPELPKNDPVDAFVIADNLRFGRIANPVYMDDYRYKALQKLTRARFYAVENLTREKQRFTNYLFMKCSGLAQEKVFSNNYGTTALAVFEVFESPDDIVSMDIEQLTSFIAEQGKNRFPNPGEVAKAVQSAARGSYRLPKTVNDTVHQVMSISISSMRAMQAQIKALEKEIARQFENIPNTLISIPGFGPVISAGIIAEVGDINRFDCQAGLAKFAGLAWNQYQSGTFQGQNNRLIKSGNRYLKYYLYEAAFSIVRCDTEFKRFYDLKYNEVNKYQHKRALALTARKLVRLVFRLLKDNRLYIPV

SEQ ID NO: 220232 - protein, 341 aa, unidentified
MEYCGIDLHAEYSQICILDEDGEVMETSRVRTSRKALERFFRRDRMRVVMEAGGSSPWVSRLLDSLGHEVVVCSPRRVRLIAESKLKNDRVDAEVLARLVRLDPEFLKPIQHRSEEAQLLRANLKVRSAMVEARTKWINTVRGLLRGFGYKVSGKAPQTFVDRVDKMKLPSELRAVIEPLLEQLDLLSGEIARRNEHLEEMVKELPEVDHLRGIPGVGPVVATYYVLTIDDPNRFRHSRDVASFFGLRPSMRESASVSHYGRITKEGDPEMRRLLVQAAHACLLTKADSELKSWALALAERKGKGKAAVALARKLAVLMHHLWVTGEVYQAFPNKEANQAA

SEQ ID NO: 220233 - protein, 396 aa, unidentified
MISVGIDVSKGKSTVCIMKPCGEILESPFDIGHTADELDSLISLIKSFDEETRVVMEDTGHYHLPVATYLSSHNIFVCCVNALRMKKFCSQSLRRAKTDKIDSIKIASFGITYWNELVKAYPSNVIYDELKFFARQYYQVTGMLVKSKVNFSNLLDQVMPKINDVLSNQGENHKLTEFVSRYIHFQNILDMGEMKFTSDYCKWAKKKGYRLNERKAAEILALAQNGIPTLPNSQSVKIAVSEAVKLIHSIEESRNTILAQMQDLCNTLPEYSVVKEMDCIGDTLAPRIIAEIGDVRRFKNKHSLIAYAGIDAPPYQSGAFHASERHISKRGNSYLRKTGYEIMQSLIKHKPADNAVYDFIQKKRSEGKCGKEAMIAGLNKFLRVYYGKVMEFYSEH

SEQ ID NO: 220234 - protein, 315 aa, unidentified
MPDPVCIPERFIGCDVGKTAIVVHDLTSAQTRTLPNEPQALADFAAGLAGECLVICEATGGWEAALLSALAQAGRPAHRADARKVKAFIRSYGRLAKTDAIDAELLARYGQERHNSLVRWQPPATERIRLATLVATRADLVRDRVAWSNRAKAPTAQPVAQTIAAMRATIQAEIDRIDQAIEALLESSQHIARIVAELRTITGFGPKTAVALIALMPEIGTLNRRRAASLAGLAPHPNQSGAADRYRPTRGGRPEIKPVLFMAALAAAKHDENLSAFYKRLIATGKKPIVALTAVMRKLIVIANARVRDANLKLS

SEQ ID NO: 220235 - protein, 343 aa, unidentified
MESAIWLGIDVGKRSFHAAVAVETLHGNQWRKLPCQAFEHSAPGLRALLTWLHTQGVMPAQLAGVCIESTGRLAQHFSTLAKGRLGAVSIINPARSKSFAQSLGNQHKNDAVDARLLAYFGQHMRPRAQSAKDVAYIKLREMTRAHEDLQISLSAQRQRLEDAPPSAEVRALLKRLIRMLEKEMRGLQMKIKALLEDTPSLKKDAERIATVPGLGARVAQTLLAEFGDLNQYNRDELVALAGVYPRQHESGSSVHKKPRMAKPRMAKAGKANVRAVLYMAAMSARQCNPRIKAFAERLRKNGKAPMQILVAIMRKLLLIAHALVVSKTDYDPDDSPLQSPLPT

SEQ ID NO: 220236 - protein, 472 aa, unidentified
MSDSIFRTAGTNLKDILTSYDLGEILYASIDVAKYNHSAMVVNFFGDIIIPKFDFPYNNHGIDFLRKKLQLAQEQTQAKKLFLGLESTGHYHENLVACLRTLGYDVQVIRPIDSKHERDNVHAKTDAIDLAAIARVIISNKGTRSYIPDAIYYNLQRASRTHRQLTWQETRTKNIITFIVDKTFTGLWNPEDSIFSDKWGKASLLFIESYPTPQQATKLGVKRLAAFFRKHDTRLGMDTARRIIQLAKITPARTIEEMESDIKALRAHIQVLRTLMSAILEQQKQMVKFLVQTPGTYLLSVPGIGVVYASDFTAEVGDVHRFAYARQVMSLAGTAPRKYQSGEVDKLNLPTSHKGKNLLRVTVNQIALSLNSHCPEYHHYYSKKHFQYKDTPGKARTATANRFIKLAFAMMKNETLYHPRTGNPLKTEKEYYQSVWDKMKKRVAPYLSDDIPQDNYLTEIQSKLEEKYGINS

SEQ ID NO: 220237 - protein, 349 aa, unidentified
MIIVGCDYHPSFQQIAFVDTETGELKEQRLMHREGAEEFYRALTATGLPVRVGMEASGHARWFERLLAELQFELWMGDASEIRRKRGRKQKTDRQDAQHILHLLLKDDFPKIWVPSWENRDVRQLLWHRHRMVQARTRIMNQLQAVALNEGLRCKKRLWREHGRQQLEAFQLAPWASRRRRDLLELMDRLNPMIAGLSQEIEKQATGSAHVQRLMTHPGVGALTALAFVLIIGEVERFHCGKQVASYIGLVPLEDSSGNRRRLGHITKQGSSMLRFLLVEAAQVTVRSDPQWRRQYFHLMMRRGRKTAKVAMARRLAIRLYWMWRRGWDYEQVSRFGSHAGQPGNRHGV

SEQ ID NO: 220238 - protein, 334 aa, unidentified
MQNITLIGIDLGKHSFHIHCQDKSGKALLRKKFTRTKLMQFLATCPPSVVVMEACAGAHFMARCISDFGHETKLISPQFVRPFVKSNKNDFVDAEAICEAASRPSMRFVQPRTETQQAMRALHRVRESLIRDKVKTTNQIHGFLLEFGISLPIGDAVIKRLSLVLAEHEIPEYLSRLLVRLHTHYFYLVEQIAELESELSQSINADDTAQRIMTIPGVGPITASLLSSQLGDGKQFSCSRDFAASTGLVPRQYSTGGKSTLLGISKRGDKNLRRLLVQCARSFIMRLERKHGKLAEWVREQLNKKHSNVVTCALTNKLARIAWAITTQKKEYQA

SEQ ID NO: 220239 - protein, 334 aa, unidentified
MKKFEFFLGIDISKNTLDYCLLDDQCKVLEKGKVNNEPVSLSKFFLKFENEYCCKTTLLIVFENTGIYSKPVARFLNENKWCYSEVSALEIKRSKGVSRGKSDRVDAHQIAQYGFRNLDKIMLCTEPELIHQQLKILNTEREKMLSAIGSFSRTGEAEEFLGKEVFKVVKTHNRQTLSALKKQLKQLDDKISALLRSNEDLKKKQELLKTIPGIAEVGSLYLLLATKGFTRFKNWRKFACYCGIAPFEYSSGSSIRGRNRVNPLADKKMKSLLHLLALTSIRHDPELKLYYERKKEEGKHSLLALNNVKCKLVSRIFAVIKRETPYVKTHQFAN

SEQ ID NO: 220240 - protein, 379 aa, unidentified
MGKGIRFVGLDLHAETIAVAVAEEDGSELDFGVIANRPEAVRRLIKRLGPVEKLRVCYEAGPCGYVLYWQLTGLEVDCKVMAPGLIPQKPGDRVKTDRRDAKKLARMYRAGLLTAVWVPQADDEALRDLVRAREAAKKDELRARHRLGKFLLRRGCRAPQGVEAWTKRHCQWLRSLRLEQPAQEVVFIDYRHEVDHAAERLVRLERAIDEAVERVPASKRAVIEGLQALRGVSKVTAVTVYSEVGELSRFARPKLMMGYTGMVSREHSSASRIRRGAITKTGNAHLRRVLIQAAWAYCRRPNLSPALKRRQAGLSEEIKEISWKAQHRLYGRYQRLVSKGKTPQQAITAVSRELVGFIWAIGVHVEAQTRQESQGHAAA

SEQ ID NO: 220241 - protein, 403 aa, unidentified
MTKYHVGVDVGKYRHHVTIRDISSDSYCKSFSLTNDREGFDELISSLEKLSVDKSDFLIGVEACSYALNLSNFLMEAGYNLVEVNPFRASQFRKAQGKKAKTDKIDSRTIAAILSLGDHKILSIPDPILDNLKDLTRFRTDLVNERSTMIIHLHEALSILFPEFNSVFKQLDSASSLAVLATFPGPEHIIAAGEETVGKTLSLASPHRMGRGIARRIIEAAQNTVGVIQKQPGLGIKISILAKRIASLQSTIRELDRQITALFNGLPCKLQGFPLGRAPTLAAIVSEIGDIHRFPTLKKFLSHLGWCPQTFQTGNFRLEHPRMSHAGNKYIRRLIWMLSVFSVRVVPLYREYFQRRVTEGKAKMHVLIAVGRKILSTLYAMLKKGVPYDPNWEENGHIAVAGC

SEQ ID NO: 220242 - protein, 335 aa, unidentified
MYYLGIDLHKDESHVAVLDDDAEVVEEIRVTNANLDEVAEEYAGAKAVIEATSNYYTVYDALDEHLDVVVADPSQTKAIGYAEVKNDRLDAKLLAQLRRAGMIAESYVPSEELRQRRALVRGRKRLVEKRTDFKNEVHALLDKHGITYDWDPFSVSGRDILAGEDVSLGVVGDQLMESFLSIIDELTAQIEEPESLIEETAASLEETQLLMTIPGVSFYSSLLITSEIGEIDRFDEAKQVVSYAGLDPVVHESGDSRTEGSISKRGSGELRWILVQCVQTAVHRCNDPYLGRFYARLKQRKNHQIAIVATARKLLVSIFHMLEREEVYDPPEVSA

SEQ ID NO: 220243 - protein, 320 aa, unidentified
MTLTLGIDVAKAKLDVALRLPTGQIRSTIIANTDAGFVELQAWLAPHDRTALHVCLEATGVYWEAVAETLAEAGFTVSVVNPARIKAYGAARQVRTKTDAVDARLIADFCASQHPPAWTPPPPAQRELRAWVARREALVVMRTQEQNRLPVAHPSVRPGIEALIAHLDRVIAEVEAAIRQRIDDDPTIKHQHDLLDSIPGLGEKTIPVLLSFYGGPERFDHARQAAAFAGLDPRQHQSGSSVHGKPRLSKVGHAGLRKALYMPAMVTLHKTAWGRAFRDRLAAAGKAPMVIIGAMMRKLVHVAFGVLKSGQPFKPALHGA

SEQ ID NO: 220244 - protein, 355 aa, unidentified
MQKYKISFKGQNIYVGIDVHLKTWHVTTLTESGCKYSFAQHADAKELFDRLNKKFPEAHFKSAYEAGFCGFSAHYALTDLGIENIVVHAADIPTTGKEKAMKTDAVDSEKIAWALKRGELKGIYVKDKRYMDDTNLMRLRQRFIMDLSRQKNRTKHLLYTQGVTYPERFRNSRTHWSRNFMKWLREEVELLSDQKMSLLLLCEQVENTRKAILKVTREIRRLSAAERYKENYDLLTSVPGFGLTTSMMILTEFDNNIMRFPNERKFVAILGLIPTSHDSGDKKVSGEKINRGNKHLGPLIVEASWVAIQRDLELGAYYSNCCQIMKPHKAIIKVARKLACRAYAVLKTKTRYVLP

SEQ ID NO: 220245 - protein, 317 aa, unidentified
MKSEMLIGIDVAKDELVIDSGQGLVTIANTPSAIDAWLATLPEESYLGLEATGTYHQQVANRAVSMGKVVYVLNPRDMRHYALGLGRRGKTDRVDAQMIRRFITAERCHLRPYQPATEVHHQLALLQRRRATVVKHRQALHKALRGMNELAAPIRAALLSLDALLTNIDKQMNGLLTRQPMLKAEARRLESIPGIGRQTSTQLAVLFDRVPLSGSDAAVAFVGLDPRASDSGQKRGRRRVSKRGPAELRRLLYNCAQAGVKTAVWKPYYQALLAREFSATQALVILARKLLRIAFSLWRQADARFDAQKIGCIKVAA

SEQ ID NO: 220246 - protein, 409 aa, unidentified
MSDSLPVLHGSVIGLDVHQAKINACWIYNDDQGEMHIEHREFGAFKRDRRELALWVASCHPNAVVMESTGIYWRSPYAALERAGVLAWVVNARHIKSVPGRKTDVADAQWLAMLARAGLLRPSFIPEATIREARLIARYRQKLVSMVSGEKNRLHKILAEAGIRLNVLVSDLHGKTARAMVKAIIEELPVETIVAMAGPLRADRKELEEALQAESWSDAHRFVLENILQHIEMLETQIEVFDRRLAEYLAPWEGMLQLLQTMPGIDAPGAALLLAEIGGDMSCFGSAERLASWAGICPGNNESAGKRKSGRIRQGNPWLKRLLCEMAQAAARTRCGLKAKFESLQARKGYKKSVIALAHKMLRIIYAMLSQGQPYQDSVVNYEELMVQRNAPRWLKMLNKYGFLATQKA

SEQ ID NO: 220247 - protein, 378 aa, unidentified
MKVITLYIGLDVHKDSITLAIAEPGPKGEIRLYGSITNDLGRLEVALGRIRKAHPGAQLEVAYEAGPCGFVIARRLKQLKIPCLVAAPSLIPKAPGSPFKTDKRDARAIARLLRAGELTAVYIPEPTDEAIRDLCRARTDAVDDLRRCRHRLKGFLLRHGYRYQGKANWSQPHMRYLRELVLPHPAMKTILEEYLQGIDAAHERVQRIEASMLALLDTWRLKQAVEALMAFRGFQLVAAMITVSELGDIHRFPHPRQLMTYLGLVPTESSSGPHQRQGGISRCGNSHQRWLLTECAEHYALPPKISKELSHRQEGQSQEVKALSWKAQNRLHQRFTRLLARRLQRNKAKVAIARELCGFLWALLRSQDCYRQPTPSPQ

SEQ ID NO: 220248 - protein, 386 aa, unidentified
MRGKTFVPQDYDVFAGLDVDKKTIAATFSSQQGFIRSLQMPYNVDHSLNHVRKHFGDQKIAFVYEAGPTGYGLYDGLAAQGYRCLIAAPSMIPRAPGQRVKTNRLDSRGLSESLRGGQLKSIHVPSQIYRELRHLTQLRDTMVREAAAHKQRIKAMLLLEGIDFPPAPAGRQWSLRVKEKLRKLVCSRTVRFKLDQLLDSLEFCEKQVVNSTKEIRRFCKEDAELSQSIQYLMSIPGIGWIVASQLLARIGDWRQIDNVRQLGSFLGLVPTENSTGDTVDRGSITRVGDGRLRSKLIQAAWSAIRQDAELREFYRSVCQRNPRGKGPRIAIVAVARKLSTRIYAVLKNQRPYIVRQQVHSVPLTQEETSPQGTTRRCAEPGETDAS

SEQ ID NO: 220249 - protein, 330 aa, unidentified
MSFRGPKALNDSEGEAEKFYRDLKLRGANVRVGMEATGYARWFERLLAELGFELWIGDPAEIKTMRVRKQKTDRNDARLLRRLLLENRFPQIWVPSPENRDLRQLLWHRHRLVQMRARIMNQLQALAMNEGRRWKTKLWSQKGRAELAKLPLAFWASRRRQELLELLDHMHPIIGELTAAVEQEAEKRPEALRLMTHPGVGPLTVLAYVLIIGTPTRFHCGKQIGSYIGMIPSENSSAGKQRLGHISKQGNALLRFLLVEAAQVAVRIDPDWRRRYLHLAFRREPRIAKVAMARKLGVRLYWMWRKEWTYEQVLQFGSHAGQLVTGHGVK

SEQ ID NO: 220250 - protein, 350 aa, unidentified
MEYIAFDAHKHYTLASVVTHDGQLVREERIEHDRGALRGFLERCERGSPVAVETIGNWYWIVDEIEAAGCRPRLVHARKAKLMMGEINKTDKLDARGLNRLQRNGTLPTVWIPPGELRDQRDLPRTRMVFVRQRTQLKNRIHATLAKYALHELEVSDLFGVRGRALLRERFELLPPHTAYASQQLLRQVEGLGRQVRAFEQRIEATFKPTPAIQRLLTLPGVGLTLAVVITLEVGDVARFASAEKLAAYAGTTPRVHASGGKTRFGPSRPDVNRYLKWAFVEAANAICLHRGRAGHRHVSRLYERVARRKGHAKAIGAVARHLAEATYWMLSKQEAYREPKGAGRFVHGG

SEQ ID NO: 220251 - protein, 342 aa, unidentified
MYYIGLDVHKKTISYCIKDTSGQVYREGTIGATRNELDVWIQTLPQPRMMAMEATIFSGWIYDHLLPHAEQVKVAHPLMLRAIAAAKKKNDRIDAGKICDCLRCDFLPECHMASTEIRDRRRTLRYRHLLVRQMVQMKNRISGLLMETGVSHNKKQLHKVKYFGELMSNNKEVHENIRPLLRLSRETIVRCQKTEYALVSSLERDSLLAERVERLKTVPGVGPITALTWALEIGDVTRFRSAKQAISYCGLCGAEKSSAETALRTPLSKQRNKHIQRVLIEAAKLAPRQSHELALIRERELQKGNRNRATLAVARKMVTYLLAVDRRKQGFVPDEGRNTAAA

SEQ ID NO: 220252 - protein, 355 aa, unidentified
MDNRKYIGMDVHKEAIAIAVLNAAGKLVMESIIETKANTILEFLKGLRGELHLTFEEGTWASWLYDLLQPHVKRVVVCNPRRNALLKEGSKSDRVDARKLAELLYTKMLRPVYHRDNGMRAVKELARSYVTISKDQARVMTRVKALYRSWGIACSGKQIYTVRHRVSWLGKIKEPGVRRRADFYYQQLDGLRSVRRQVRRELLAESEKHKASKLLRQIPSIGPIRAALLLALVQTPHRFRTKRQLWTYSGFGIETHDSAEYRCVAGQLERSKKPQQVRGLNRNYNHDLKNLFKSAATNAVAKSGPLQECYLALVKRGIRPEMARLTVARKIAAITLAIWKKGVSFDAERLKQQTA

SEQ ID NO: 220253 - protein, 346 aa, unidentified
MNYVGLDVHARQSTFHILDENGKKVATRAVHGTERTVIKELAKIKRPMSICYEASCSYGFLHDQLCAIADHVVVAHPSKLRAIFSSKRKNDRVDAAMLAKLLMLDMVPAVHVPCPDVRAWRRMITHRRSMVDDRTAMKNALRALLRTLGVEAPRSLWSKKGLAWLAGLEFDNTLDAIQRDEMVERLGTLQGGIRRVEDELNKTGRAHPGVALLMTIPGVGPRTAEAAVAYIDDPRRFRNNKTVGAYFGLVPCQDASAAKNRLGHITADGPAVVRRMLTEAAWQGIRRSPRIRAYYERIARGKDNRKKIAVVATMHYLIRVMHAMLLNGEQWRAEPARRSHAADRAA

SEQ ID NO: 220254 - protein, 358 aa, unidentified
MRTQIRELDFTGQNIYAGIDVHKNSWKVSIYSEGLYHKTISQPPKPEVLHDYLSKHFPKGIYHSVYEAGFSGFWIHDQLQSLGVNNIVVNPADVPTTDKEKKRKTDRVDSNKLARHLRSGDLEAIYTHTRDILEDRLLVRTRAMLVKDLTRYKNRVKSDLHFFGIEIPEELNRNQSYWSKRFMNWLHSLEFQKRSGTDSFQILLEQAKTLRQHLLEVNKKIRELSRTNYYQKRVTLLGSAPGISLTTAMVILTEIDDIHRFANREKLRSYVGLTPTSHDSGDKESHGEMINRGNMFLKSTIIESAWVAARIDPVLHMKYIGYCKRMKKNKAIVRIACTLLDIVNYVLRNEKPYIAVNS

SEQ ID NO: 220255 - protein, 346 aa, unidentified
MVTHYVGADVDCKMTELAVECGKQIVMRDRVPTDIRSLRAFLGGIEGQKVMVIEEGSLAGWLYRNLRSHVDRFVVCDPRRNRLVYDDGDKTDPLDAADLAALCRSGHIREVYHTVDEERLALKEAVALYGDRVREGVRQANKFLSICRAHGLQRPRGVCQDSKARDRWLDELKRDQPDVVQALAIHGIGLDAVRKQVKMAKRELARGCRRYEIIGHWQELPGVGMIRAATLFGYLDTPWRFKTPKKLWKYCGLGLQRTASGTDKQGRPNAGYVHLYRRVNRKLKAAIQGAALSAIRQGNNPFSEGYDRLIRNGVTASNARHTVGRRMLSVMLGMWKTNSRYDPCLV

SEQ ID NO: 220256 - protein, 410 aa, unidentified
MHYKQNHIYIGLDLHKHTHTAVIIDCWDEKIDKIVIENKPSDFTKLLNLVKKHAGNLTPVFGLEDVHGYGRSLATYLLEKDQIVKEVNSALSYSERMSYPTTQKSDDWDAFCIASVLLRKLDLLPDANPQDLYWTIKMVVNRRDALVRSISTLTNQLHGQLGYHYPSYKKFFTEVACKTALVFWETYPSPHHLKGVTGDALAMLLRKPSHNNCSTKKANKILEIAESDGDTTREYQESRDFIIQSIVRDIRFKSGEIEKVEKEMVKLLELLGYKLESIPGINTVTAIALVAGIGDINRFANSDKLARYAGIAPVNFSSAGKGKDKKSKQGNRELYATFYFLAIQQVQIAKGSKLPRNPVFLEYYLRKISEGKTKVQALVCVMRRLANIIYGMMKNKQEYIMPTLPLKEAV

SEQ ID NO: 220257 - protein, 336 aa, unidentified
MQHYCGIDLHSNNHVVVVIDEEDKRVFEKRLGNDLLLTLKTLFPYRETLQSVAVESTFNWYWLVDGLQEHGFNVQLVNTAAVKQYDGLKYSGDYQDAFHLAHLMRLGILPTGYIYPKEQRAIRDLLRRRLSLVRSASAQLISVQSQIWRSAGIRIKSDTLRKPDFKTTLLDGYTLQAANVGLTVYAVIQQEINSLEQSAYQAVKLTKNFELLQTIRGIGKILGLTIMLETGDIHRFASAGNFASYCRCVDSTRTSNGKKKGAGNAKAGNKYLSWAFSEAAHFSVRFEPLAQRFFERKKAKTNGIIAIRAVARKLARASWMMLKHQQPYDAKLMFPG

SEQ ID NO: 220258 - protein, 408 aa, unidentified
MIFAGVDWAEAHHDLHVEDEQGRRLGGGRLADGMEGLTRFHELAAAHAEDPGEVVVGIETDRGLFVTALIAAGYQVFAVNPMSVARYRERHGSSGAKSDPGDAKVLADLVRTDRHNHRPVAPDSELAGAIKVVARAHQSMIWNRRRQANQLRSALREFYPAALAAFDDLTGAEACEVLRLAPGPALGAALSKAQITAALRRAGRVRRLPERAAQVQAALRAPQLQPPPVIAAAMAASVSALVAVTGEMTRQIAELERQLTADFEQHPDAEVIRSLPGLGTILGARVLGEFGDAPDRYLDARSRRNYAGTSPVTRASGRKRVVLARHVRNKRLADAIYLWAFSAISASPGARQYYDHRRAAGDGHDRALRALGNHLVGYLHGCLTNHSRYDEHTAWAHRPAPELSSTAA

SEQ ID NO: 220259 - protein, 346 aa, unidentified
MLYAGLDLSRQRLVVHVLNEAGETVTRTWVPPTRDGLRGLVGQIALYGQDVTAVVESMTGGRFVHDELELGGWDVELADAAKAKALAPLAAKTDKIDARVLAELARRDLVPAIWLPDPSVRAERESARFRLHLVKHRTALKNRIHATLTTFGQPVSVSDLFGSAGRELLGRLELPEPWSTTLTRSLDLVDELDRRIAACERELRAAGADHPYVPLLVTLPGISWVLAYTIASEIGDIGRFAGPKRLTGYTGLCPRVYQSGETDRRGALTKAGPKYLRWALIEAATNASRHERFHAKYERTKRRLGKQRGSKIARVELARELATVIWHMLTRQEPFRTAGPTHVLVA

SEQ ID NO: 220260 - protein, 364 aa, unidentified
MLIIGCDYHPGFQQIAFVDTDTGELSERRLGHREEAEQFYHELKQRDLAVRVGMESSGHSRWFERVLHELGFELWIGDPAEIQTKRVRKQKTDRQDAQLLLQLLLENRFPRIWVPDAANRDLRQLLWHRHRLVQMRTRVMNQLHVVPLNEGLRRKKALWRPAGRKELESIALARWASRRRQDLLDLLDQLTPKIQELTRALEEEVENRPVTRLLMTHPGVGPLTALAYELVIGTPERFHCGKQLASYVGLVPEEKSSGDRRRLGHISKQGNVLLRFLLVEAAQVTVRSQQEWRSKFFHLAMRRGRKIAKVAMARKLAVHLYWMWRQGYDYGQTQKLGSHAGEPGHPDGVQSITDVMIGHPAPSK

SEQ ID NO: 220261 - protein, 413 aa, unidentified
MEILYKCCCGLDVHKKFVVACLLMIDDNGEEIRQVRRFQTDTAELLRLLDWLVTAGCEAVAMESTGVYWKPVYNLLEGGPMELLVVNAQSIKGLPGRKTDVQDAEWIAELLQHGLVQGSFIPSRFQRDLRDLTRARTTLVQERAGVVNRLQKVLEDANIKLAGVATDVLGVSGRAMLEALVAGQTDPQQLAELAKGRMRKKMAQLRQALAGRFGPHHRFLISEHLSHIDFLDESIERLSQEIAERLRPFEEELQLLDTIPGVNRQTAEELAAEVGLDMSRFPTGHHLASWAAMCPGHHESGGKRYSGKTRKGNRWLKLTLTEAAHGASHTKNTYLSSQFHRLVGRRGKKRALVAVAHSILVIAYYVLKRRQPYQDLGSNYFDELHRQTLQRNLIHRLEKLGYKVTLQTLAPAA

SEQ ID NO: 220262 - protein, 415 aa, unidentified
MTEQRWYAGVDWASESHHVFLTDGEGRKIGEKIFKHGGEGLAEMANWLLEVSCAADPGQIHIAIEAPHGPVVETLIERGFKVHAINPKQMDRFRDRFTMAGAKDDSRDAETMASALRTDPRCFRLLANADPVVIELREWSRIAEELGAERNRLANRMREQLWRYFPAMLDLESDLGAAWLLDLWELAPTPAKARRIREATVAKVLKRNRIRRFDAAHVLDVLRKPPLQVAAGTTEAASAHIASLIARIRLVDRQLKEAYRQLDALTARLIPSAEVEPGQAKQHDVEILASLPGVGRIVLATLLAEAWDALQRRDYAALRSLTGVAPVTKRSGKSCIVIRRQACHDRLANAMYHWARVAVQHDARSRAKYAVLRGRGHSHGRALRSVADRLLNVACAMLKTGTTFNPSLAAPKGAC

SEQ ID NO: 220263 - protein, 337 aa, unidentified
MRITTLGIDLAKSVFQLHGVDETGVVVLRRKLRRAALLAFLSELPACRIGMEACASAHDWARRISAMGHDVRLIPPAYVKPYVKRQKNDAADAEAICEAVLRPGMANVPIKSAEQQGCLVLHRSRDLLMRQRTMLLNAIRAHLSEFGIVLPQGPARIIAFMKGLRESGHPDLPDEAAMAITVMSSQLDALEVGIHAIERKLLAWHRDNAVSQRLETIPGVGLITATALAASVSDPEAFRSGRHFAAFLGLVPRQNSSGGKERLGHITKMGNGYLRRLLVIGATSVVRRAGASTTRTGEWLRGLLERKPARLVTVAMANKTARIAWAVMAHGRAYRAA

SEQ ID NO: 220264 - protein, 376 aa, unidentified
MGKRREERIEQLSVGVDLHKNQFTVCAMYEEGPVVLEDEYRTTRDGYGQFMDRMHAFEEKEGCTVALAVETTGNARYFKNQMEAEGFAVVVVNTNKFKVISQSTKKNDSNDAATLAYYLSKDMLPESHLCDQSSEELRRLIGVRSILVSNCVKIKNQIHGMMLGYGINTQGGQLQSIKKRRALTEGLEDQGYAEAAASLNVMLGIIDSLTEQIKTVERQMREMTKGNEDVDLLMSIPGVGYLTAATIAAYTKDLEKRFEGDFKRFASYVGIVPSVHNSNETVHMGRITKRGPQELRTAFVQATMGMVRLSKVTGQWKLMTDYRTMKTSKGSGKSIIATTRKLARIIFAMLHSREPFNPGLMVKNNCLLTIDEVIGA

SEQ ID NO: 220265 - protein, 309 aa, unidentified
MKQEVVYCGIDVAKEQLDVALGPKRWQVFNTKQGVGQLVKQLKAERSKVHAICEASGGYEKAIVIALQKSALAVSLVQANRVRQFARAAGVLAKTDQIDAAVLVHFGRAMHPPPSAAQSEQIAHLRELDAQRRHLSRLLSAEQNRLAQLSCAELRSLSRSLISKVKKQIATIDARIAILIAQDQNLCVKAQKLTSIAGVGPRTAALLLAQMPELGSLNRAQAAALAGLAPFNRDSGLMRGKRTIFGGRRTVRTGLYMAAVTAARCNHILAPFYQRLCAAGKPPKVALTAVMRKLLLALNSALAPALNPA

SEQ ID NO: 220266 - protein, 415 aa, unidentified
MLILGCDVGSETHYLRAIDTRGRELSKSAFSFSNNADGFNKAKEWAVKIAAEYDKKQIVLGLEPTGHYWFCLATWMISNGLSVVQVNPYAVKQTKELEDNSQLKDDTKDPKLIANLVKDGNFGMPYLPEQLYADLRRLSMFRDQLNEDRIRSINRLHRELKIYFPEYKEALGKTEGTFSLELLKQAPFPDDLAALKEDGIRQIWHNAKLRGRGYSRAGEILEYAKASVGLREGKETGKLVVQWFVQKILELDAELALIETQINQKCLEIPHTDKVLEICGIGENTLSGMMAEMGDISRFDDVKEIQKLSGLGLVASSSGKHKGETKISHRGRKRLRYWLFQAAKSAVVHAEEFKELHVYYTTREQNPLKKMQSLIAIACKLLRIIFTILKKGIKYDPRKMLKDIRRESRQESLAA

SEQ ID NO: 220267 - protein, 347 aa, unidentified
MVYVGMDVHRKRTQVAVMDEGGEELSNRNFRNDPAEFVPMLMTLESGTPVVLEAAYGWGWLAELLDEFELEPHLAHAKACKAIASARLKNDKVDARTLAHLLRADLLPEAWIAPREVRDLRALLRHRARLVRFGTSLKNRIHAILADQGVRIEVPKLWTRPGRRWLAEVELPGRQRAIVGDLLVLLDTTAEPIARLEREIKAAAKSDPRAEALQKLPGVGYLTAMMLVAEIGDVERFATALKLCAWAGLTPTVRNSDRTVHHGHITKQGSTWVRWALIEAAQVAKSRPPFTRTYAQIMQRRGKHIATVAIARKLLARCFHILKEVSQDSQSSGEGLRAGCARYPTCA

SEQ ID NO: 220268 - protein, 369 aa, unidentified
MSEGITYVGMDAHKKSITVAMLLPGEETSSLWELRNEAKAIRSLTRKLKREGPGEVVCCYEAGPCGYALQREIQGRGIRCMVVAPSLIPRKPGERIKTDKRDADKLAKLLRAGMLTEVSPPTSEEEAVRDLCRCREDAKEDLERARHRLVKMLLRRGLIYGQGRAWTKGHRNWLRNIEWDFDADRAVFNDYLYAIEQLEERLKGLTEKLEAEAKQPAYAEPVAQLRCFRGIDTVTAITIVAELHGFGRFTSPRELMAYLGLVPSEHSSGGTERRGAITKAGNGHVRRVLVEASWHYRHRPAVGVKLRKRREGQDEKVIAIADRAQQRLYRRYWHFVARGKEVNKAVTAVARELAGFIWAVLFPQACASQ

SEQ ID NO: 220269 - protein, 311 aa, unidentified
MTPNHIGVDLSKDSLDICDPRRGEARLPNRPVAIARWLAGLGPGDVIVFEATSGCDRVLRIALGKAGRPGVRLNPLHAWHFARSLNLPKTDRVDAAMLARLGAERQPAPDPAPDPAREELRALVQRRDQLKRMETQEKNRLSGCTLPLVARDIRAELAGLARRGARIEAAIADHLARHPALAAAERLLRSVPGLGAVSAVTLLVHLAELGQVDRRAIASLGGLAPRAHESGRHRGRRFLGEGRRQVRRALYMASLSALRHAGFLADFVARLKAAGKPAKVILMAVARRLLTTANAVLRSGEPFDARRAAAA

SEQ ID NO: 220270 - protein, 309 aa, unidentified
MKQSVVYIGIDVAKAHLDVAWAGTFRRLPNERSGHAVLVRWIKQSATPVQLICEASGGYEQGLLESLEKSEVKVTLVQAVRVRQYARAAGILAKTDQMDAKVLAAFGSAMQPPPTPPLCAEQKRLRQYEAQRRHLSRVLVAEQNRLVQLSCAELRTLSRGLISKIKKQIETIDTRIGDLIAQDQTLREKAQKLTAIRGVGVRTAALLLAQMPELGQLNRRQAAALAGLAPFNHDSGSIRGKRAIFGGRRALRSGLYMAALSAARFNPILSRFYRRLRAKGKPHKLALTAVMRKLLLALNQTLKPIPSLA

SEQ ID NO: 220271 - protein, 341 aa, unidentified
MLIGIDPHKGSHTAVVVDRDEVEIARVKVRAGRDQLIRLLAFAEPYTPRTWAIESAGGLGYLLAQQLVAAGEPVVDVPATLASRVRLLGSGRGSKNDPNDALSTAIAALRHRDLRPVAREDHTKVLALLARRHKNLSSSRTQAICRLHAELAALIPGGLSRSLTATIAARALARVRPATAVELARVQLAEDLLVDVRRLDEAIVENKKRIKTAILASSSSVTNIHGVGPLVAALILGQTGDVRRFRSADHYASYNGTAPIEASSGPQVRHRLNPRGNRQLNHAMHRAAVSQIRNDTPGRAFYERKQAEGKSHKEALRALKRRVSDAVYRQLVADANNAATK

SEQ ID NO: 220272 - protein, 401 aa, unidentified
MNAVGIDVSKGKSMVCVMRSFGEVVLEPFEVLHTAQNLHDLAEKLKALDGETRVVLEATGNYHKPVAFVLHNAGLFVSVVNPVLIHDYDNNSLRRVKTDKKDAVKIANYTLDKWTRLRQYLPEDEARLALKNCYRQYQQAVAIRTMLKNNLISSLDLTFPDANNLFSSPAKSNGCEKWVDFIGEFWHSGCVSSLSADAFAKKYLKWCQKHRYNFTRSKSDEIYSCAVNATSLPKSPTSKLLIQQQVAQLKAVSKSVAAFQQEMLRLSQQLPEFDTVMEMYGVGPSLGPQLMAEIGDVRRFSSKKSLIAFAGIEPQPNDSGKIMGNDKGISKVGSAVLRRTLFLIMTVILQTQPQDEPVFQFMNKKRSEGKPYKVYMMASANKFLRIYYARVKAVMDSECSQ

SEQ ID NO: 220273 - protein, 373 aa, unidentified
MPKYSTAFGMDVHLRSTTVCALDADTGEAVTRRFPGNPWGEIAGWMGGFPGPSLAAYESGYPGFAPQRELAGLGVECVVAAVSKIPRSAADSASKNDRNDAARMAKAILAHDISPVWIPSPEVEGIRDLAGAYDGATARLATAKQRLLAFLAKRGFVYGGTTPAGNPRKYWTYDFLRWLDKVRPEDDGGVRTLAALRSEVEAAAEARADLLSEYRAAVDASPIAAEVAALQSIKGCAFALAAAFSAEVGDFTRFRSGRQVTAYFGLAPSQRSSGDSVRLGGISGAGNALVRKLAVEGSWCYAAARHQPKLMPRDTGVPLEIRMHGRKGSERLLRRREEMLARGMPAAKANAATAAELVRWLWALGMMCREGAE

SEQ ID NO: 220274 - protein, 357 aa, unidentified
MGKATGNLARVTRIGLDLAKTVFQVHGVDAKGEVVIARKLRRGTMLEFFGRLAPCMVAIEACGSAHHWGRQLVALGHAVNLIPPAHVKPYVRRNKTDAADAAAICEAAMRPGQRFVALRSIDNQAAVMRHRIREQLVGQRTALLNALRGHLSEIGVVTAQGAQHAYRLKRMLADGADENGEIVIPEHVRVALAPLAAQIDALDQAIAAIDDKLIETVKADEKARRLMTIPGVGPVIATAVVATVGEVSSFASGREFAAFLGLTPRQHSSGGKERLGRITKMGDRYLRKLLVVGATTVLHHAIGHNDSLRCWARQTLERKGGRAGFKLTAVALANKLARIVFAVLRSGEVYDDRPVAA

SEQ ID NO: 220275 - protein, 407 aa, unidentified
MKKKNIIEFEQVVERGCGMDVHKDLIVATIQGKGIKMQTKSFNAFTSSLIKLKEWLLKNGITHVAMESTGIYWKPVFNILGDDFTILLVNARHVKNVPGHKTDKKDSRWLSKLLLSGLLKSNFIPERAIRELRDLTRYKTKLTNQVSSEKNRFMKILEDANIKLSSVLKDVFGATGTKIINHILGHESYRPEELLQYVHGKVKSSREDIKEALTGYITPHHRFMLKTILGNIARIESTIAEVDTQIGSCIVPYKAQRELLESIPGVGKDGATCIIAEVGVDMGQFPDQNHLASWAGVCPGSNETAGKNKSGRITYGNKYLRSILVECGWAASRTKNTYLSAKYKSLVGRRGKKKTIIALAHKILIATYFILKDKIEFKELGPDHLSNFKKDRLIAYYRQQLERLMVA

SEQ ID NO: 220276 - protein, 412 aa, unidentified
MLKIVYPICCGMDVHKSFVVACIASTNNQGVTTYKSHRFSTFTKGLRELSQWLLQNNCQDVCMESTGKYWIPIYNILEPTCKIVLAHPKYVKSIRGKKTDKKDAKWIADIFKHDLVSGSFIPPADIRQLRDLVRYRFKLTNYTTGEKNRAQNCLTVSNLKLDDVFSDVFGKAASAITERLLLNSEPFDVEPFLTKNMKSSVEDIQLAVDGVICPEQAEKLRIIRSHMDSLSLCKLNLESLILSVAEKYLPQLNLVLTVPGIKSFSAIAIIGEIGVDMSVFSTSKQLCSWAGLTPQNNESAGKKKTTRISRAGAYIKPLLVQCANAAIKGKHHPEVRNRYLALKKRRGHKKAIIAISRMLLTAIYNILKKNEPYNPALYRQSDRPPAHREVSVDEAVYILQRQGYIVSAPATT

SEQ ID NO: 220277 - protein, 355 aa, unidentified
MSSEKYIGLDVHQATISVAVMDSQGKLIMESILETKASTILEFLAGLRGALSVTFEEGTWAAWLYDLLKPHVAKLVVCNPRKMAVLKQGNKSDKIDARKLADRLRLNDLKPVYHGETGVRMLRELARSYLTVVKDLSRVMNRLKALYRSWAIPCAGRDVYYTRHRSQWLGKIPEAGTRRRAEQLYQQLDMLQHLRQQARRELLAESRKHTITAKLRQIPSLGPIRSALAVALIQTPHRFRSKRQLWTYSGLGLETRDSGEYHFVKGQVRRRKKQVWIRGLNKDYNHDLKGLFKAAALRASVLPGPFQDFYQRSLSKGIKPTMVRLTLARKIAAITLTLWKKGENFDIEKLKSQAA

SEQ ID NO: 220278 - protein, 350 aa, unidentified
MKITAIGLDLAKEVFQLHGVDSDGRVVLKKQLKRAQLAAFFVNLEPCLVGMEACAGAHYWARKLRAMGHDARLIAPQFVKPYVKSQKNDAADAQAICEALTRPSMRFVAPKSVDQQSVLALHTSRSGFVKARTALVNQVRGLLAEFGVVLPKRLAAFHAGVPQAVQDLGNELTVLMRQLLSSLHEQVRHLDELVGKIELQIRQWASRDDSAKRLQQIPGIGPITASALVASLGDVQQFDNGRQVSAWLGLVPRQHSSGGKNVLLGITKRGDSYLRTLLIHGARSAMQAAQRKKDGPPAWLQALLGRKHPNIVAVALASRNARIAWALLAHKRDYKVGYESPNPLSLSASA

SEQ ID NO: 220279 - protein, 342 aa, unidentified
MAGLYAGLDVSLELTSVCVVDEEGRMVREAKVASEPDAITRELRSAPGDYFRVGLEAGPLSQWLCFGLKDAGLPVVCIEARHAKAAMVAMNRNKNDRNDARSLAQLVRSGWFKAVHVKSRPSQELRTLLTAREFYVNKLRDHENEIRGLLRPFGLKVGKVGARDFEARARELVAGNPLLELCIHTLLAGRMAMKMALADLHRALLRLTENDELCRRFMTIPGVGPVTALAFKATVDDPARFRRSNDVGAHLGLTPRQYQSGETDVRGRISRSGDAFTRTALFTAAHVMLTRSRQWTAIRAWGVRIAQRSNLKKAKIAVARKLAVIMHRMWRDETPFRWGAAA

SEQ ID NO: 220280 - protein, 352 aa, unidentified
MQIIAFDSHKRYTWALVETQDGRRLCEERISHRKGAIREFLLRWEKGSAVALETIGNWYWLVDEIEDAKMRPRLVHARKAKLMMGTVNKTDKLDARGLNILQRTGTLPVVWIPPGQLRDERELCRTRMVFTVLRTKLKNRIHSVLAKYCLCDEFEGISDIFGKAARERIREVARRLPSQTRYTMACLLRQLKITETQIKSLEKRMRQVYKETDEVRLLMTMPGVGFILAVVIWQEIGDVSRFGGPEQLASYSGTCPRIHSSGDKSRFGPLRSDVNHYLKWAFSEAGNSVAVNRAYLANRHVGRLYNRLRSRRGHAKAIGAVARHLAEASYWILMRKEGYKEREVLAVSPTVA

SEQ ID NO: 220281 - protein, 322 aa, unidentified
MAKHSTICAGIDTGKRKLDVAIEGSREQLQVKNTAEGHEALLTWLRQHRVKRVGIEASGGYEQPVVAELRRKGFVVVVFQPAQVRAYATFHLKRAKNDKVDAALIAACTAAVRKIHAAPDPRLLPFAEQLTMIDQIGEDIARLKNRIESCRNAAINQLWREDIARLEQRERAALKALVAAIRKHPDLAKRLALINSVDGIGLPTAVAILVRLPEIGRITREQAVALAGLAPYDDDSGERSGVRHIEGGRKRLRRALYTASLAASFRWNPQLIQLYQRLTKAGKEHKQALVACARKMLIFANTVVARGTPWCGEPPVGSLSAS

SEQ ID NO: 220282 - protein, 428 aa, unidentified
MAADHDSTIPVTWVAIDIAKKSNAVVVEWPQGRQERFRMANSHADHERLVDLLQRQPGQSRIAMEPTGTYHRPLAHRLVTAGFEVWLVSSLAAARFRDAMFNSWDKNDPKDALVILDLLKQGKVLRYYDALLASTHDLEELSKTYMQIALARTRLHHSLLTHYLPLYWPEFERYWHTSRAEWIVDFLFRFPIPAAVREISADRFVEEAWALVGRKVRKREWMEELYGLAQHSIGLPIGLESLSVQTFRMQLERYKALIHQRDALEGMAESMLASDSDFALLKTIPGIGSVLAMVILAESGDLRRFGHHRQYLKFCGMDLAKNQSGASRGPERLSKRGNARLRCAFWFAGSVAVRMRENSFRAKYERYVRMDPLSSDRRRKALTAVAAKMARVAYGVVKTGTPYQAYFEAGLPSGSIPLTRAVGAARTP

SEQ ID NO: 220283 - protein, 333 aa, unidentified
MEKLIHFIGIDVSKLTIDVAIIINNDIGRIIQLVFANDSKGFKELKNRLNKEKISFPETVFCMEHTGYYSKQLSRFIIARHGNLWMEMSLKIIRSLGVQRGKNDKLDAKRIALFAQRNQQDFVPYNPPRLIVENLKTFLMLREKLINSKIALVVPVNELTCVDKAAGKIALKAISKALQGIKKNINTLDAKIDELIASDKELAEKFKLVSSVPGVARITFCYLVYFTNEFKNYTQAKQLACYCGVVPFEYTSGSSVKGKPKVHNMANKKMKKLLHTAALCAVTYYPEFKQYYERKIEEGKPKMLILNNVRNKIVLRIAAVIKNNLPYKTNTAA

SEQ ID NO: 220284 - protein, 348 aa, unidentified
MEIISRIGMDTSKSIFVLHGVDASDQVVLRKKLRRKEVVEYFRKLRPTLIGIEACGASHYWARQLGALGHKVLLIAPQHVKPYVRRNKNDAADAEAICEAMSRPRTWFVPAKTAEQQAGLMLAGTREAFVRRRTQLSNTIRSYAAEFGLVSSRGLDKIEPLLARIAADDDLPTLAKEMFADLGEDYALLQKRLEIIERKLRLWHRNDEQSRRLAEIPGVGVVGAALLAMKVPDPKAFRSGRDFAAWLGLTPKDHSTAGKQRLGVITRAGDETLRSVLVVGATALLRQVRLGRSHHSRWLADLLRRKPPKLVAVALANKTARIAWKLMVSGESYDRTRVGTAAREAAPA

SEQ ID NO: 220285 - protein, 354 aa, unidentified
MKQINKLDFSGQDIYVGIDTGKKSWKISILTKDFEHGTFTQPPEPKALVSYLNKNFPSANYLCAYEAGYFGFWIFNQLNQMGVSCIVVHPADIPTKDKEKHNRNDSSDARKIARCLRNGELIPLHVPSDSELQARSLVRMRLEMKRKETRCKNQIKAMLTFYGVIIPDELTNSHWSKRFINWIESIQQANGNQALSALLMELSHLREIIAKLTKQIHSLSKQEPYNQNVRYLISIPGVSTLTSMILLTELIDINRFANSDHLASYVGLAPGEDSSGDKERSTGISRRRNGYLRSMLIESSWIAVRKDPALLMTFSELTKRMSKSEAIVRIARKLLNRIRYVLKNQCVYETGVLS

SEQ ID NO: 220286 - protein, 368 aa, unidentified
MKKVSTAATMQSRDFCVQQKLTIGLDLGDRHSWYCVLDEAGKVQLEQRVRTSGKALRELFSTMPRSRVALETGTHSPWISRLLSELRHEVIVANARKVRLIGESRKKDDRLDAQTLARLARIDPELLCPVKHRSAKAQADLAMIRARAGLVRARTGLVNTARGLAKSYGQRLLSCNVGNMNPEKAEELSPELQRALEPLLSAIEELSERIVEYNEGIEALAQKSYPEVVLLKQIKGVGTLIALTFLLTLEDPHRFGKSRDVGGYLGLQPGRRTSGQSEPQMHISKEGDPYLRTLLVQGAQHILGPFGVDCDLRRWGLKLAERGGRNGKKRAIVATARKLAVLLHHLWVSGEVYEPLHNNSRTAVAAAA

SEQ ID NO: 220287 - protein, 428 aa, unidentified
MNYNTQNAKIASITEKTLIVGIDVGSETHYARAFDWRNYEYSKKPLEFSNTEAGFLTFKAWIEDIAQKHGKTAVIPGMEPTGHYWFALGKFLQDNGMKPVHVNPHHVKKSKELDDNNPNKNDRKDPKTIAALVNEGRFSYPYIPTGIYAEIRSLSNLRFQTQEELTRIKNRIARWFSIYFPEYKDVYGDLKAVSGRMVLKVAPLPEDIRKLGAEGVNRIWRDAKLRGAGMKRAKTLVSAAEHSVGSKEAPEAARIELRNLLNDMDVYASRLEELLQGIEDKLKEIPYVDKLMEIKGIGLVTVSGFIAEVGDIGRFDNPKQLQKLAGYAIVANDSGKHNGESRISYRGRKRLRYVLYEAAISLIGKNAEFREIHEYYRTRKENPLKKMQSVVAVACKILRVFYTILTKGVDYDAEKLISDIRRPQLQAA

SEQ ID NO: 220288 - protein, 355 aa, unidentified
MSSEKYIGLDVHQATISVAVMDSQGKTVMESILETKASTLLEFFSGLRGSLFVTFEEGTWAAWLYDLLKPHVTEVLVCNPRKIPLLKQGNKSDKIDARKLAERLRLHDLKPVYHGETGVRMLRELARSYLTVVKDLSRVMNRLKALYRSWAIHCAGRDVYYKCHRSQWLEKIPEAGTRRRAEQLYEQLDLLRHLRQQARRELLAEGRKHTITAKLRRIPSLGPIRSVLAVALIQTPHRFRSKRQLWTYSGLGLETRDSGEYHYVHGQVRRRKKQATIRGLNKDYNHDLKSLFKGAATRASVKPGPFQEFYQRSLAKGIKPTMARLTLARKIAAITLTLWKKGEDFDIDKLNSQAA

SEQ ID NO: 220289 - protein, 358 aa, unidentified
MADKVTVAAVVGGVDTHKDLLVAAVVDQNNKVLGTQYFATTRQGYRLMLAWMTSFGALKRIGVECTGTYGSGLLRYLQNAGLEVLEVTAPDRMERRKRGKSDTVDAECAAHAAFSGIRTVTPKTRNGMIESLRVLKTCRKTAISARRVALQIIHSNIISAPDDLREQLRNMTRMQLIRTLGSWRPDASEYRNVTNVYRISLKSLARRYLELHDEIADLDVMIAAIVDELAPELIKRNAIGYEIASQLLITAGDNPQRLRSESGFAALCGVSPVPVSSGKMNRYRLNRGGDRAANSALHIIAIGRLRTDDKTKEYVARRVAEGHTKMEAIRCLKRYISREVYTLLRNQNRQVNSIPIMA

SEQ ID NO: 220290 - protein, 412 aa, unidentified
MEVLYPHCAGLDVHKNTVVACVRHTVDGTIKREVRTFKTITKELLALSEWLAAEGCTHIAMEATGVYWKPVWHILSDGDFALVLANAAHVKNVPGRKTDVNDATWLADLLAHGLIRSSFVPDQQTQEMRDLLRTRKQLVRERSRHVQRLQKTLEDANIKLDSVISDVMGLSGRKMIEALIAGESDSEQLAQLAHRRIKATPEELCEALRGRVTRHHRFLLNVHLQQIDAIDAAINTIDQEIDAHVEPFRDTVLLLTTIPGVDELGACVILAEIGRDMSRFPTAGHLISWAGLCPRNDESAGKRRSTRMRKAAAWLKTTLVQCAWAATRKKASYLQAQFHRLRARRGAKKAIGAVAASILTAAYEMLKTGTLYEDLGCNHFDKRGKGKQIHRLVSRLRNLGYAVQITPLPAAP

SEQ ID NO: 220291 - protein, 294 aa, unidentified
MPNDPAGWAILVEQLRGFSVTAIGIEASGGYERGAVRSLQAAGMPVRQVNPFKLRQFAKASGVLAKNDPLDARMIASFVGIMPTRPAQRTTPAAEQLVEMLAVRRQLSAEKTAAENASRLLEDLMLQRLSRRRIARLAADIELLDKRLVEIVATDATLAHRYRLLTSMPGVGPVLACTLIALLPELGGMSRKQVAALVGVAPYAFESGTLKGRRCIWGGRANVRQVLYMAAMSASNWNPALKLFHDRLKGAGKLPKVVIVAVMRKMITTLNAMVRDDIAWADRLSGRHSVTTAR

SEQ ID NO: 220292 - protein, 355 aa, unidentified
MNSSKYIAMDVHKDSISLAVRNAAGKIVMESLIETKASMILQFIDGLRGDLHVTFEEGTSAAWLYDLLKPHVTRVVVCDPRKNKSMREGNQSDKIDARRLAELLRLNHLTPVYHGEHGLRTLKELVRTYLTVTKDLARVMTRLKAIYRSWAIPCSGKQVYARCHRAEWLGKITEPGVRRRAEFYYLQLDALRVLRQDARRDLLAESKKHKAWKRLCEIPAIGPIRAAVLLGILQTPHRFRTKRTLWNYGGLAIEMHSSADYRSVDGELQRSRKNVLVRGLNRNCNHDLKNLFKGAAAVASSKPGPFEEFYAALVAKGMKPEMARLTLARKIATIVLIVWKKGVCFDAQYLKPQTA

SEQ ID NO: 220293 - protein, 320 aa, unidentified
MEAQAFDTFVGIDVAKHRWDVHVLPAGTKLSCSADAAGLEQLLAALKPQGSCLIVVEASGGYEQRLAADLLDAGHSVARVNPRQVRDFARSLGRLAKTDAIDAQVLALFAQKVQPRPGEKQPENQAELQALVTRRRQLVQMKAAEQVRLHQARVKLTRKSISRMLDGLRAEIDEIDVEIARLIEDDGDWSQRAARLTSVPGIGPQTSRTLVAELPELGKLNRQQIASLVGLAPFNRDSGQFRGTRSIWGGRAHVRSALYMAALTARRCNPIIRAFAERLQRQGKRFKVVITACMRKLLVILNTMLRNQADWNPKLLPQSP

SEQ ID NO: 220294 - protein, 344 aa, unidentified
MPHYVGLDVSQKTTAICVVDEQGRRLWRGACVTDPGAISARVLRHAGVVDVKVGVETGSMTPWLVHGLRSAGLDVECLDARRVKAALQMRLNKTDENDAEGLAQVLRTGWYRPVHVKSFDAHRARALLGARAQLVGMTTRLSNMIRGVLKTFGLLPGAGRGLRFDRSVEALLEGAPEIGLIVRPLLATWRQLREQIAVFDKAVQQRVRADPICRLLMTVPGIGALSSLVYVSTVEDPGRFSRSRAVGAHLGLTPRRYQSGETDRSGHISRCGDGLARTLMYEAAVVILHRIKRSLHLKDWAAAIEQRSGPGKARVALARKLSVILHSVWRSGEPFRWTPHTIAA

SEQ ID NO: 220295 - protein, 348 aa, unidentified
MTMLADTADAVIGVDTHTDTHTACLLDRLGRQVATITVPADPRGCAMLLAWAQKQAPGPRLAWAVEGTRSHGLGLMRTLQDSGHTVVEAGRPARASKRPGGKSDPADALRAARDALAADKLAQPRSDGPREALRILLTARAQATTARTAAVNTLKALLLGAPDNLRQPLRGLSTPRQARKCRSLRVHASQPIADQILRTELRRLATHIGAWDRELRANKAQLRQLVEQIMPALLDQPGVGPMSAAQLLVSWSHPGRFRSEAAFAALAGVSPLPASSGKITRHRLNPFGDRQLNRALHVIIKWRMLHHSQTHAYLARRAGHKTEREIRRCLKRYAARSLYRLMEAAART

SEQ ID NO: 220296 - protein, 418 aa, unidentified
MENDYAAFIAIDWADQKHAFRLQVAGQSQQETGTLEQKPEVIGPWVAKLRERFGGRPVALALEQSRGALIHALLTFDFLVLYPLHPTTVAKFREAFKSSGAKSDPLDTQQILQILTKHRELLKPLNPDTEPTRLLARQVEDRRKIVDTRTGHIQGAVASLKEYFPQAIQLCSANLTSRLAWDLLKKWPTFEALQQAKPSTIKRFFYGHNVRSPELIQRAIQIATQGQALTSDPAIVESGRYLALMHLEMIQRLNPIIEAYERRIEKLFNDHAEAPLFQKLPGAGPAMAPRLLSFFGTDRSRYATATNAQSFSGIAPVTKSSGKSRAVYVRRACPKFDRQTFHEFARLSVAKSQWASNYVDYYTAKGKKYHTIIRSLAFKWIRILFRCWQNRTPYNEDQYMQTLAKRGSIFATLHLKPA

SEQ ID NO: 220297 - protein, 430 aa, unidentified
MKFNTQNAKIEAITEKTLVLGIDVGSEMHYARAFDHRGIEYTKKPFKFSNTEAGFMALQAWILDLKEKHEKDKVVPGMEPTGHYWFNLGKFLQDNEMKPVLVNPHHVKKSKELDDNNPTKNDRKDPKVIAGLVREGRYMIPYLPDGVYADLRAASNIRFQLQAELTRIQNRISRWFHIYFPEYKTVYGKPDAKSGILILKTAPLPEDILTLGVDGVNQIWRDAKLRAVGKARAKTLVEAAEHSVGNKEGAVSARMEIRMLLEDYESRNIRLQEVMALIEELVDQIPMAEKLLEIKGVGIRTVSGFLAEVGDISRFNNPKELQKLAGLALVENSSGKHKGETTISRRGRKRLRYLLFEVAMSLVAKNQEFRELHVYYTTRKLNPLKKMQSLMAVATKLLRVFYAMLTKGVDYDPKKMVSDIKRPAAYLQTE

SEQ ID NO: 220298 - protein, 354 aa, unidentified
MSNKSNSPVATMGIDIGKNAFHVVGLDRRGAIVLRQRWSRGQVQARLANMPPCLIGMEACVGAHHLSRRLQLQGHDARLMPAKYVRPYSKGQKNDFRDAEAIAEAVQRPTMKFVATKTPEQLDLQALHRVRQRLVSQRTGIINQIRAFLLERGIAVRQGLRFLRAELPIILANRSDVLSPRMLRVIEGLMADWRRLDERIGGLSEEIEALARQDPACERLMTVPGIGPIISSAMVAAIGNGAVFTKGRDFGAWLGLVPRQISTGDRTILGPISRRGNRYLRALFVQAAWVVLVRTKDWDRYGLKAGIDAAKKRLHHNVLAIALANKLARIAWAVLNKERAFECVRTRAASSQPA

SEQ ID NO: 220299 - protein, 415 aa, unidentified
MSLKIVYKICCGIDVHKTFVVACIASTNDKGVTSYESHRFSTYTSGLKTLLQWLLNRNCKDVCMESTGKYWIPIYNILENDCSIVLAHPKYVKAIRGKKTDKKDAKWIADLFKHDLVAGSFMPPADIRQLRDLMRYRFKLTCFQSSEKNRLQNCLTVSNIQLGNVVSDTFGKSAQAILDKLLENPADTSFDLEPLVYKSLKKKLPELRDAIDGYITPEQVGKLKVIKAHYESLESRKAELEELILALATPYQQELAILQTAPGIRSLFTAIGIISEIGTNMEAFPSAKHLCSWAGLTPTNNESAGKKKSVRVSKAGCYIKPLLVQCANAVVTSKKHPEIRNRYLRLKKRRGHKKAIIAIARMLLTALYHMLKNGENYNAELYRKYDLPPTNWEITVEQAIIIAKNQGYKIKSTTA

SEQ ID NO: 220300 - protein, 341 aa, unidentified
MQITTIGLDIAKHVFQVHGIDAEEKVVVRKQLRRGQVIKFFEGLSPCLVGLEACATSHYWARELSKLGHEVRLMPAKDVKAYVKRNKNDAADAEAICEAVRRPTMRFVQVKSAEQQAHLMQHRARDLLMHQRTQLINSMRSHLAELGIIASQGREGVKELLAIVAKNANPHLPDDARASLVVMAAQLQALQTTIGAIEKRIIVQHRTNKESRRLQTVPGIGPIGASAIAATVTNPKIFRSGRDFAAWIGLVPRQMSTGGKAKLGPISKQGDRYLRRLLVVGAVSTLRRAKLNPQRYPWVTRLLARRPFKVVAVALANKMARIAWALLMSGKTCRSARFAAA

SEQ ID NO: 220301 - protein, 349 aa, unidentified
MKINRVGVDLAKNVFQLHGADRKGKVVWRRRLSRGKWLTVLCDSVEPGTEIGMEACAGAHHWARQLIQKGYPVKIIPPQFVKPFIKSNKNDANDANDAAAICEAMGRPDMYPVKVKTVEQQDLQAMHRIRDEIKSHRIAKANQIRGLITEYGLVAPQELHALRRAIPDWLEDADNGLTFLFRQLLQGLWGDLYALDQRMAELDKQIAVVAQEDPTAKRLQQLRGVGPLIATALVATIGDGKQYRKGRDMAAALGLTPRQHSSGGKDRLLGISKRGDAYLRCLLVHGARSAVRTAKDKDDRLSHWINNLQARRHANVVAVAMANKMARMAWVIMTRDVDYDPDLAAASVS

SEQ ID NO: 220302 - protein, 329 aa, unidentified
MAHIGIDVSKKKLDCMWVRDLEAGKVKPKVFTNNPRDFPTLLRWLERNTGEGAESLHVYLEATGIYHEPLAYWLHEQGVQVYVLNPAQVRYHAQGMGVRNKTDRKDSMMLARYGIERAPQPWQPEPPEVRELKRLLTRLEALGEDIQREENRLEKAHFSADHLAEESIDNVLKALREEHSRLQQQIDDHFDSNDHLKRDRELLESIPGIGRVLSASLLVTLRGRVFVDARQAAAFHGAVPVHQQSGSSVRQRPRLAKAGPARLRKILYMAAVVATRHNPDIRAQYQRLLARGKAKMAAIGAAMRKLVHIAFGVLKSCTPYQPRSKQACQ

SEQ ID NO: 220303 - protein, 401 aa, unidentified
MDWADKFHQVWVSDAQGQKVAENKVVENKEGLGEFSRWLNESRARGIELWAAIEKPQGRIVDFLLDHGVVVYPVNPKALDRARDRFRMSQSKSDSFDAHVLAEFLRTDHGHLRALEPNSDDAQELKLLTRDQHRLGRQKTRLLNQIRVTLKEYYPRPLEVFSDLEAQIARDFLKQYPTPRALSDLTQRKWNRFAKREHHLGEGRCKELWEKLNQPQLQVPDHVVRAKAQLLLVLLAQLEASSDAVQTYNERVKHFFASMPAAKLVKTLPGAKTGTIVAMLWAELGDSNNRWESFHHLQAEAGVVPVTKASGKSHVVHFRFSCNKVMRHASYWLAFVSLNQSEWANHYYRDQRAKGHNHHQALRALGAKWLKIIFVMWRDHKPYDENYHLANITRQKMRQAA

SEQ ID NO: 220304 - protein, 264 aa, unidentified
MKLTRVGVDLAKDIFQLHGVDRAERPVWCKRLKRNRWIEEIEQNVEPGIEIGMEACGGAHHWARLLQSKGYRVRLIAPQFVKPYVKSNKTDANDAQAVCEAMSRPSMRYVAVKSIEQQDIQAVHRVRASLISERCAKANQLRGLAYEYGLVAPREIAALRIAVPAWLEDASNGLTVRLRALLSGLYADLRALDERVRELDKEIRAIGGENEAVGRVQQIRGIGPLIASALVAMIGDARQFKNGRQVAVALGLTPRQHSNCRRAY

SEQ ID NO: 220305 - protein, 428 aa, unidentified
MSNQEIIRRRQYCQIVKEITGSDQYLVVGIDVAKEKHHAFMGSATGKSLFRKLIFENNLDGFSRLLKIAEVIKSQNSLSKIVYGLEPTGNYHKPLARHLIRCDCNVVLVSGVAVKRNRELLNGRWDKNDTKCAANIADLVSRRRCLYYDCPSPSIIEIRSLLSLRRRLKREEHGLRMRIRNNLLAQYFPELDRFYNACESESLAIVQWILNPDTISAMEFGEFFHMVTTTRRGIAQTLRLRKIHGLATESVGCPMGPAAEFEADLLVEKLKQVRRQVKKTNDLIEDFCLEFTEYSYLLTIPGFGPYISARVLASIGDPFRFENRKQLIKLAGYDLCAKRSGKTSDKAIPVISKKGNGELRYALYQAASVATARVDLFRTYFTRLLRGRERERGIKTKMRVKLATKMLVIAWTLMKKREVFDPAHLNIE

SEQ ID NO: 220306 - protein, 319 aa, unidentified
MAQNDLVVAGIDVAKDKVDVCIRSLSLKRTFANTDEDRRELASWLRRNKVGKAVMEASGGYEREWAKALRVARIEVRIVDPKRVRSFARSAGRLAKNDTIDAEMIAWFAETFTEARSQVFDATREQLHQMVHARQALKDMQSKLTNLGEHAVPAAVQRIQARISKTIAVELVKIEAEITALVQATPHFAELAEIIESVPGIGRITSAVLIAAMPELGQANNKIVAALLGVAPYDDDSGRRRGERHIKGGRRRTRNMFYMATLAAATRHNPVLKAFYDRLVAKGKLKKVALTACMRKLICILNVMIERREKWDASRYAVS

SEQ ID NO: 220307 - protein, 373 aa, unidentified
MYEITRGAIVRVGADLAKRVIQVHAVDAAGRRVVSRALKREQFMAWCAQLPAGCIVAMEACSSAHHWARKLCALGLDARLIAAHFVSPYRMEGKSGKNDMTDAVAICEAASRPSMRFVPVKTREQQGVMSLHRVREGLKEDRTGCINQIRGVLAEFGLVFNKSPKVLRTVLADVIEDASNELSAMARRVLQRAFDHWRELDDHMRWCDSQVGQHVRSSPAAQRAAKITGIGELGASALTAGVGDFHQFKGGHQLGAWLGLVPKQNSSGAKTSLGRITKRGDDYLRTLLIQGAKSALMSAGKRDDPISRWLLQLVARVGWQKACVAMANKNARILWAVMTHDCGFDARHVSDKPQAKKSAVERLAAPTPTMCPA

SEQ ID NO: 220308 - protein, 312 aa, unidentified
MDAIVVGIDVSKERLDVAVRPSGETFVVSRDAEGLDALIAKLTPLAPAAVAVEATGGYETVVAASLAAAGLAIVVVNPAQVRSFAQALGKRAKSDPLDAGVIAHFVEATRPQIRPLPDAETRLLADLVARRRQIVAMIVAERQRQKRLTNRRLQKSIARLLAALQKELSSLETGIDETVRGSPAWREKEDLLASVPGVGKIIARTLIAELPELGTLDRRRVAALVGLAPWTRQSGKWKGKSFIGGGRADVRSALFLGAMVAARRNPDLKLFRDRLVAAGKPKLVALLATARKLLTILNAILRDQKPWRQQTA

SEQ ID NO: 220309 - protein, 348 aa, unidentified
MLADQLDYVVGVDPHRDTHALAIVDVRTGGVVVEASVEASSIGYARALELARGQAPGRRSFAIEGAGSFGAGLSRFLSGEGERVLEVGRLRRERRSGGKNDALDAIRAARSVLAESRAAEPRAGGEREALRALMAAREGAVKARRAALCQLRALLITTPESLRSELRPLTRAQLLRRLGSVRPDRRRDVELRGTLRALRALARRVRQLTSEERELAGEIERLARALAPQLLDQAGVGPLTAAQLVISWSHQGRIRNEAAFARLAGCAPIPASSGQTIRYRLDRGGDRRLNRALHMILVTRRRSHPATIAYIERRVQEGKSSREASRCLKRYLARNLYRLLEHGAPLAT

SEQ ID NO: 220310 - protein, 376 aa, unidentified
MMDESGKVVFKAFSFPNTSDGGHALFSKLASYSPSSDDFEIGMEATGHYWLSVYSFLFEKKFLLHVINPIQTDGWRRGTEIRKRKNDIIDSVLIADLIRYGQFVETRLADEDLFSLRSLTRFRTYLVESISDLKRKVVCVLDQVFPEYQSIFSDIFGKTSKEILLQFSSPIDFESVSSQTLAQLLAKLSRKQVGSAKAEQLKAAASGSFGVTFAKSSFTFQLKALIEQIAFIEKQVKETETEIAGIMEKLESPITTITGIGNVTGAAIISEIGDISKFDSPRKLVAFAGLDATVTQSGEFEAAHNVMSKRGSPYLRKAIFQAALVAAFKDPVLSAYYQKKRAEGKHHLTCIGAVARKMCNIIYAVVKNNQPYVPKA

SEQ ID NO: 220311 - protein, 307 aa, unidentified
MKKNTVSTQSATELFVGLDVHKESIDVAIADQGREAEVRHYGKVTGDLAALNKVLHKLQSPNRTLRVVYEAGPCGYAIYRHLTARQIDCTVIAPSLTPRKSGEHIKTDRRDAISLARLHRAGELTAVYVPREDDEARRDLSRAREDAKRAETRACQQLQALLLRHDIRYTGRTPWSAPHLRWLSQIKLAHPAQQITFQEYVTVIDEAAARVERLTRQIEERLPSWRMVPVVQALQAMRGVALVTAVCMVAEVGDLTRFDNPRRLMAYLGLVPSEHSSGGRWHLGAITNAGNSHVRRMLRRGRERPTR

SEQ ID NO: 220312 - protein, 398 aa, unidentified
MDQMLERLAGLDVHKKTVTVCVRVPGARGGRRQEVRTFGTTVPELLALREWLETQGVTHAAMESTGVYWKPVFYILEEAVTCLLANAAHIARVPGRKTDVQDCVWIAPLVEHGLVRGSFVPPAPIRDLRDLTRARKALSQDRTRAANRLHKVLEDAGIKLASVANDVLGVSGRAMLEALVSGTTDPTVLADLARGKLRAKLPALRHALTGRFRPHHAFLVGQLLAQLDFLEEAMAQMSVQIDAVIAPFQAELARLDGIPGVNRRTAEVFIAEVGVDMRQFPTAKHLASWAGLCPGNRESAGKHKVGTTRKGDRWLRTALVEAALSAARATDSALAARYRRVMRHRGHKKAVIAVAHAILISAYHVLARQIPYRDLTIIAMPSACAAARLRRWSVRAIA

SEQ ID NO: 220313 - protein, 414 aa, unidentified
MPETAYALYVGIDWGTVTHQVAVLDAQRVLLGERAIAHEAVALHGLTEWLTQLAHGEPARVAVALEVPRGAVVDTLLERGFHVFALNPKQLDRFRDRYTVAGAKDDRRDAFVLATALATDQPAFRALAPEDPLLIELREWSRVEDELREEWGRLASRLREQLHRFYPQALALCPAADEAWFWALVGLAPTPAAALRLRHAAVVTLLRAHRIRRLTADQVLAALQSPPLRVAPGTVTAASAHVALLIPRLELVDRQRRDCARRLERLLDALATTGEHQGHRDVTILRSLPGVGRVVAATMLAEASRLLAARDYHGLRTQAGVAPVTRQSGKRLLVGMRYACNPRLRNALYYWGFISVRYDEHSRQHYQLLRGRGHSHGRALRGVVDRLLTVLMAMLAAQTPYDPARRSALLALAP

SEQ ID NO: 220314 - protein, 412 aa, unidentified
MQVVHPVCCGIDVHAKMLVACLILANGEKKKRTFSTMTAELLQLRDWLVAVQCTHVALESTGVYWKPVFNILEDALTVILINPEHTHALRGRKTDVKDAEWLVDLLRHGLLQPSFIPPPVIRELRELTRYRESVIREQSSVANRIQKLLESGNLKLGQVASDALGVSGRMILKALAKGESDPRKLAALARGKLKEKSLSLEQALQGRLTVNQRFVLGELLSRWEQLEAADARVTSEIDKYVQANPKLARARELLDSIPGIGPRVAEVIMAEIGIEMASVFADAAHLASWAGMCPGNKATGGKRLSGRTRKGNTYLRSALVQAAWGASLKKHCYLSSQFHRLVKRLGRKKALVAVGHSLLVIIFHVLQNDQTYTELGGDYFDRRHVEQQRDYYVRRLQLLGLKVTLEKLPQAA

SEQ ID NO: 220315 - protein, 349 aa, unidentified
MALTIVEETRPITGGVDTHADTHVAAALDPVGGLLGVGEFPATAAGYARLLGWLGGFGTVCLVGIEGTGSYGAGLARHITAAGIRVVEVDRSDRQDRRRQGKSDPLDAVSAARAAQSGRARGAPKGRDGAVEAIRALMVARRSAAGERTRTINQARALVLTGPDDLRALFGRHTPAALITGLASLRPRTGDVAGHATRVALRELGRRAQFLDGQLERLDELIVPLVTAHAPGLLALYGVGPRTAALLLIAAGDHPGRLRSEAAWAHLCGAAPIPASSGKVTRHRLNPGGDRQANHALWRIVFTRLGSDAATRAYAERRTAEGKSKAEIIRCLKRYVAREVYPHLRPAAG

SEQ ID NO: 220316 - protein, 341 aa, unidentified
MEIDILGIDLAKQVFQLHGADQRGRAVHRAKVSRGSLFESVRTLKPRVVVMEACSTAHHWARRFQSLGIEVRLISPQYVAPFVKTYKNDRNDAEAIVEAASRPAMRFVTVKSVEQQDIQAAHRMRAILLRHRTALINQMRGLLGERGHAIARSPEAFKRAIPELLRTSGDELTAFCQTLLTELLQHLSAIEDRIHLIEASIQTFMKQSALCKKIAEVPGIGPITATAIVASIGDATQFRNGRHLAAWLGLVPRQYSSGGKSRLQDISRRGDTYLRTLLIHGARAVLRYVKSKTDAHSIWLQHLIARRGYNCTAVALANKNARIIQALLSSNASYHPRGAAV

SEQ ID NO: 220317 - protein, 331 aa, unidentified
MKPADGTIIEEGKLPATHGVLLPRAGKRPEPWHGAMEATLFRGWIYDALAPFAAKLQMGHPALMKAIFASKKKNDQLDARKIADLLRADLLPACYVAPTQMRELRRMLRYRNLVVAQAVQMKNRMSGMLMEVGAEYSKDRLHGREYFSQLLDRLEQVPESVKDLLRLSRGALDLFETVQRKLLDRLQKEPLLRQRVELLRTIRGVGEVTALTWVLEICDPRRFPSIDHAVSYCGLTSALVESADKPQRGPISKQRNAHLQTVLIEAAKLAPRWNPQLAAVHQRELQRGHRNRATLEVARKLVAYLLAVDRSGQPFQVRGTPTAAKEVQKVA

SEQ ID NO: 220318 - protein, 348 aa, unidentified
METSEGTPRYRLFVGVDVAAVTATVAWQATGVPAIRPFTIEQSPQGFAALERRLRATGHAPDQILVVMEATGSYWLSLATALAGAGFAVSVINAAQAHHFAKALLKRAKTDAIDARTLAQLAALLQPACWTPPPAIHEELRQRLAQRDALIAVRQQVRNQLHALIQGPLVIANVRARMDILIATLTGQIAEVEAELAALVAQDTGWTDAIRRLQSIPGVGLLTAAWIVVGTLNFTLCATAEQATAYAGLAPMPRESGSSIHGRATIGRGGNGRLRTALYMATLSAAQHNPVIKPFYRRLRDAGKPPKVARCAAARKLLHLVWAVGTKHQPFDPGYQQQQHEALPQLAA

SEQ ID NO: 220319 - protein, 373 aa, unidentified
MSKVSKFVGLDVHKETIAVAVARGDSAAESLGSIPNDADAVVKLVHRLGADDGLWCYEAGPCGYELQRLLSELGVNCIVVAPSLIPTKPGDRVKTDRRDALKLARLLRSGDLTAVWVPDAAHEAFRDLTRARQAAQEDLTRVRHRLTKLLLRLGVRAPATAWSKAYRQWLDALTLPQSLQQLVLDETRLAVAQGEQRVERLTAAITEAASQVSQAAPIAAWQSLRGIRLTTAAMVGAEIGDVTRFRSPRELMAYAGVVPSEYSSGGSTRRGRITKTGNAHLRFALVEAAWHYRHGPRLSKALKARQQGQPAEVLAIAERAQRRLNSRYRHLVARKTKQQAVMAVARELLGFIWAIAWAVHPDQRLRPAQRQAA

SEQ ID NO: 220320 - protein, 367 aa, unidentified
MKKVSTVATAASRKISQQKLTVGLDLGDRSSWYCVLDESGRVLQEQRASTTPKALGGVFGGMPRSRVALETGMHSPWVSRVLSELGHEVIVAHARNVRLIGESRKKDDRLDAQTLARLARIDPELLCPVKHRSAKAQADLTVIRARAGLVRARTALVNTARGLAKSYGERLRGCNVRNMNPEKAEGLSPELQAALEPLLTALQSLSEQIAEYNERIEALAQQSYPQVRLLKQIKGVGTLIALTFLLTLEDPHRFGKSRDVGCYLGLQPGRRNSGQSQPQMHISKEGDPYLRTLLVQGAQHILGPFGPDCDLRRWGLKLAERGGKSGKKRAIVATARKLAVLLHHLWVSGEVYEPLRNSSPLAMPAAA

SEQ ID NO: 220321 - protein, 361 aa, unidentified
MSNGSTEQMKMTAGMDLGDNYSYLCLIDTESGQLIEGSRLRTTPEAMRRRFDSERPLHVAIEVGTHSPWVSRLLTECGHKVLIANPRKTRLIYGERRKTDKLDAEKLARLARADPELLYPVEHRGCNSQAHLAVVHSREALVRSRTQMINHVRGTVKSFGYRLPKCSTPSFHKKVPGQLPSELAEVLGPIVETIGSLTEKIKDYDRRIEELAAERYPEARLLRQVSGVGSLTALTFVLTLEDPQRFAESRSVGAYLGLTPGTDQSGEHDPQKRISGEGDEMLRRLLVSSAHYILGPFAPDSDLRRHGEKIAERGGKNAKKRAVVAVARKLSVLLHRLWVSGEVYEPLHNARRLGVQGEEVA

SEQ ID NO: 220322 - protein, 387 aa, unidentified
MQKPHDDSKMCLAAFEQDRTLVVVVEMSLSSWLVAGLIPGVSREPLKKINPDPERLLQLLYRWRDEAVAAGRKISRIAVAYETGRDGFWLARWLRNRGIDAHVIHATSVAISREHRRAKTDRIDTAMLRRGFLGWLRGEPGHCSMAVVPSVAEEDAKRPHRERDTLIHERTSIVNRMKSILIQFGVRNFNPVLRKASEKLDAVRTPEGIPLPANAVAALRRLMDRFRVIKEQVKAIEQTRLQRMERDPTDKMNTMVFLLVRIIGMGVETAEQLVREMLFRNFRDRKAVARYAGLTGSPDESGSKRREKGLSRSGNRRVRNILIQLSWRMLQFQADSGLVIWYKKRTESARGSRKPMIVALARKLIIALWRYVNTGVVPDGFALRPAV

SEQ ID NO: 220323 - protein, 353 aa, unidentified
MTSLTDLREVVDVVIGVDTHVHTHSAAVIDSATGGVIGEITVPATAAGYAELVEFAGEYPTLRAWAIEGTGGHGAGLTRHLLESSKLVVELDRPKRSARRNGAKSDPLDAIRAAREAMARPRLGTPRSGSERQALSVLLTARRSAINASTEAQLQVFSLVVAAPGPIRVRFRGQKLAAMLNTAAALRVQSAWDVETTSTVVALRTLARRAHAMLKEARELQKAILAIIRGWRPDLLEEFGVGPIVAATVLCAWSHPGRVHSEAAFAMLAGVAPIPANSGQVTTRYRLNRYGDRHLNAALHTVVQSRIQYQPATRDYVARRTGEGKTSREIKRCLARYVARDLYRLLESGAAAA

SEQ ID NO: 220324 - protein, 348 aa, unidentified
MSTIQIGVDLAKTVFELAISEAPGVVTSRRRLSRAAFPRFLAGQAPAEVLFEACGSAHHWGREAQRSGHRVKLLHPADVARYRDGNKTDRADAKAVLEAARNRALTPVPVKSVEQQAVVALHRIRQGYLRTRTARISALRGHLRELGHVIPVGASRVSREARTAFADEAIPGFLREALVALLEEIRSLDEKAESVRASLTTLARQMPEAQRLLTVPGVGVLTATALVAFIGDIHRFTSGRHFASWLGLTPREHSSGSSRRLGSITRKGNSYLRMLLIHGARAALRAGGVTDRPDDLRTWAKDVAIRHCHNVAAVALANKIARICWRTWRDGRDFERREPQEEGRRTRG

SEQ ID NO: 220325 - protein, 338 aa, unidentified
MRLYCGIDLHATNCWVVILDVSFRAVREVKVPNDLSEVLAVLEEHRDAVEGIAVESTFNWYWLVDGLQDAGYRVHLTNTWAVKQYAGLKYTDDRHDARWLAHLLALGILPEGYIYPKEERPLRDLLRRRAFLVRKKSSLLLSMHGAFECRTGMRVKANDLKKWSAEDVEAHLEDPTISLGITCLVEPMQVLGEQIHRIEKVVLKRARLREEFGLLQTVWGIGTVLALTIMYEVGQIARFATVGDFASYCRCVKTDRLSNGKRKGSGNRRNGNPYLSWAFSEVAHYAARFYPEAQRYFQRKRAATNGIIGNRALAHKLARASYYVMRDQVPFDPDRLFA

SEQ ID NO: 220326 - protein, 326 aa, unidentified
MCSLPVYVGLDYHDSSVRVCVEDTDGSELGNADRANDWKTIADFGDRFGRPVRAAIESCCGAADLAEELVSCAGWSVALAHPGYVQRMKQNPDKTDCQDAQLLADLERVGYLPRVWLAPRYIRELRHVVRYRLQLTEQRRATKLRLRALLREQRCHAPEGWNAWTKAWQQWVRQTAELSEQGRWLAKQHLRELARLATRIRQVEKRLERITANDVEVQRLQQQPGIGPVTAWTIRAEIGHFDRFRTGKQLSRFCGLSPRNASSGQRQADAGLIRAANPALRTVLIEAAHRLARCDPSWQKFAQRLRARGKPGSVVAAAVANHSITR

SEQ ID NO: 220327 - protein, 364 aa, unidentified
MRNVALDLGVREISYCEVANGKVIRRLTVTKLSTLEEFLGPEAAPAKVAIEACREAWHVHDILSAWGNRVLLVDTTRARRIGVGEHGRKTDRVDAEKLAFAVERGGIPAAHLLSPHRRKLRLELSVRRALVETRAQYVTTVRGLVRAHGQQIRRCATSSFVKVVRETALKEEVRELSEPLLRVIELVDGQISEVEERIERLAKQEPVVELLATTSGVGAIVASAYVSVIDEAGRFRNAHQVAAYLGLVPGEASTGGKQRLGGITKQGNSYVRWLLVQAAWSILRKRGTDDGLAEWGRRIAERRGKRIGAVAVARRLSGILWAMWRDGTEYDPHFAARATAGGFMAASRKLKASAERLEQSATQS

SEQ ID NO: 220328 - protein, 339 aa, unidentified
MKEISTIGLDIAKKVFEVHGVDEEGAVVVRRSLRRGQVVGWFAKLAPCLIGVEACATAHYWARELGKLGHSVKLIPPSYAKAYVRRNKNDAADAAAICEAVSRPSMRFVAIKSEEQQAAAGIHRVRELLMKQRTMTMNTLRSLMAEFGIVVMEGARHIAELEAILADPKDKRVPEPLHTGLLKLAETLGSLNSRIEAIDKTIVAAGRGNATFRHLITIPGYGPILSSAMAAMVIDPKTFKNGRHFAASLGLVPRQEGTGGKVKLGPISKRGNGYLRRLLVNGAMAILATKRAKQDPWLARLLATKKRKLVAVALANKMARIGWALMTRQEDFCALPAAA

SEQ ID NO: 220329 - protein, 362 aa, unidentified
MVRVPSIGIRRTAMEHYAGIDVSLELSSVCVVDAKGKIVKEAKVASDPEALVLFFTGLGFIVERIGIEAGPLSQWLHAGLAKTGFETVLLETRHVKAALSAMTVKTDRKDARGIAQLIRMGWFRPVHCKSTGSQEVRALLVARKLLLGKLLDVEFSIRGILRGFGLKMGVVTRNGFDARVRELCAGQAMLEQIARSMLAARCALQTEYTKLHKAMLSIVRGDAICRRLMTTPGVGPVVAITFKTAVDDPTRIAKSKAVGALFGLTPKKYQSGETDVTGGITRVGDESVRAALYEAANVLLSRVTRFSALKRWGMDVAKRRGMKRAKVALARKLGVILHRMWIDGTSFRWTKVAGGDEQLARA

SEQ ID NO: 220330 - protein, 410 aa, unidentified
MKIAGIDVHKKVLMAVVVDASTPEEKPARRRFTTMPSELHRFVTWLREQGVEEAVMESTAQYWRSVWLELEPHMRLHLAQAFSNRAPRGRKHDFKDAERLVRRLIANELILSFVPSGEQRIWRGLTRMKLQLTRDRVRLQNQIECLLEEMRIKLSIVVSNLLGASGLRILHALAAGETDPKKLAQLGGERLQCTEEQRIDALTGRAQPVHGAMLALQLERLQLIDQQMAQLHSMIATAMKPQQDAVIRLAEVPGLGVDSAQQIIAEVGAQASTFASAAELTSWVGTCPGKEESAEQNHSSRSAKGNKYMRRVLNQAAHAAAAKKGSHFQDVFRRLLPRLGYQSAIWAVAHRLCRLVWKILHEGVRFIEKGADVGPREKKKRAQMLARALRKLGYEVTITPINQLIPKPAV

SEQ ID NO: 220331 - protein, 453 aa, unidentified
MSTKLAVLDSLAAFVDVGSEQMHVSVAGGSPEVFGAMTGQLHRLRDWLQERGVQSVAMEATGVYWLPLYSILEAAGFQVLMVNGKHTRNLPGRKTDMQDCQWGATLHAHGLLRGGFVPPAHIRQLQDYLRLRQDHVSLAASHVQHMQKALERMNLKLHDVISNVAGVSGLAVIEAILAGERDPARLLALCDPQIQKRKADRFQEALRGTWAEEHLFALRQALESWRHYQQQIQACDQQLKEVLARLEASLTPPESSASSAGTGASPPTKKKPGINAPAIEGLEGLIVRLCGGKDLSVLPACTSYSLLQLIGEVGLDLSVWPTAKHFTAWLGLAPGSYQSGKRYRGIGRKRNRAGRLLCVITRSLSRSKDSALGGFYRRMAARRGGLLAIVATARKLAVLIWQVMVKGLDYVEAGLKAYETQVLETKHRTLRRLAKQLGVTILPALSSSESANS

SEQ ID NO: 220332 - protein, 335 aa, unidentified
MEFEFFIGIDVSKNELDFSVQQSKSFLFHKEVINEPEAINALLKEISKLECFSLSKAVFCMEHTGIYSNHLLSCLYQKKANICLESAIQIKKSLGNLRGKNDKVDSMRIAAYAYKNRDELRLWAPRREEVQQLAHLSSTRSRLIKAKKMLKTPLKEYGSFVKKKAARQNTDVCNKALNGIEASLENVEKSIMLIVNADPELKRLFTLVTSVIGIGKVTAIQLIVTTNEFKDINNAKSYACYAGLVPYLEESGVFKGKGRVSHIANKKVKTLLHMAALVAIQYNDELRLYYERKVNVEKKNKMSVINAVRNKLVQRIFSCVNQNRKYEKNYLKLVA

SEQ ID NO: 220333 - protein, 353 aa, unidentified
MEKSQNNFIATAFVGIDVHDRSWKVCVLSYAGFKKEFSCRPETQILITTLRKLLPDFTFECAYEAGFSGFWLHDELNEIEGVNCIVVHPADIPTTDKEKAQKEDRRDARKIAQQLKGEGIKGIYVPHKTEVGLREIQRLQFTITKDLTASKNRVKAFLKRYNIQPPKDQFPTTRTHWSAKFMRWLKALELHNHGLKFTLDNLIDRVAQLRQQKVQILKELRISIQKSNKDKAYNKLRTIKGIGAIGAATILTEMVDIKRFSSYEKFHSFIGLVPSTANSANTEKIRGVTPRANRRLRNIFIEASWVAIKYDTDLHHYYHELTQRMKANKAIIRVAKKLATKVRYNLLELELEI

SEQ ID NO: 220334 - protein, 334 aa, unidentified
MKEITTVGLDLAKNLFQVHAVDENGAVLVRRQVRRAQVLLFFSRLHPCLIGIEACAGARHWARELAKLGHDVRLIPPSHVKPFVKRGKTDAADAEAICEAVIRPNMRFVPLKTEKQQAVLMQHRARDFLVRQLTQLANAIRAHLGEFGIVVPKGVHNMGRLIAEAETAGLPPEARMPLDLLAGQFRDTKQRIDVMTAQIKADAEVDETARRLQTMPGIGPITASVLAATLPNVSSFRSARDLPAWLGLTPKPHSSGGKERLGSISKMGNRYIRRLLYPGAMGVISARRLSEPSTDWLGRLVATKPLKVAAIALANRMARAIWAMLKTGEAWRPA

SEQ ID NO: 220335 - protein, 372 aa, unidentified
MNNTTVYVGMDVHKESFTLCAYTLEEEKGSYSRRTPADYKEVLKYLEFLRTVYGNDTIFVCGYEAGCLGYTLYHQLTDRHVDCVILAPTTMLEQRGKKRIKTDKRDAEIIGKCLAQHNYSPVHVPTASDEEVKEFLRMRDDHKLALKKVKQQILAFCLRHNYRYDGNSHWTATHINWLKSLTPEALYKEILDEYLLTYTTLSDKLERLDKRIEELAAKDEYKEAVRKLCCFIGVKTHTALSVIVEVGDFRRFASAEKFASYIGLVPGEESSGDGQTRLGITKAGNRHIRMLLTEASQCYSRGQIGYKSKALKARQDGNTPQVIAYADKANERLRRRYYKMVLSKCKKHNVAKTAIARELACFMWGMMTDNIA

SEQ ID NO: 220336 - protein, 339 aa, unidentified
MNNSVIGLDIAKNIFHLFTLLADGKTLKKKLKRSELLGFFANYPASIIGIEACGSAHHWARELTKLGHEVILLNARFVKNYVIGNKTDFNDAEAIREAVTRPKKRVVAIKTVAQQDIQLVHNIRKELVDQRTALVNQTRGLLSERGIVINQGITQIREQLPLIVEDAENGLTALSRELFAEQYEKLKTLDDEIKAQDQRINRLCNTNDLSKRFLDVPGVGPLTATIVAADIGDGGKGYKSSRDYAASLGVVPKQHSSADKQNYLGISKRGNRYIRTLLIHGARAVLKNCTKKTDKLSLWLQALVARRGFNKAAVALANKNARILWAMANNGKDYEALAA

SEQ ID NO: 220337 - protein, 406 aa, unidentified
MEVERTAVEIGLEVDFGREAATRAAEGLLLPPCILPLPATKQSASLSVDGSPQPPRVSEPEQKRGAPSTGSIRNPNSRLGRKLSPHLQGRVMERLPIAPSFVGIDVSKDRLDVHICPSGQTVAAQRNETGVEQLVGELRQLAPTLIVLEATGGFETTVAAALAGAHLPVAVVNPRQIRDFARATGRLAKTDVLDAQVIALFAERIRPDPRPLTDADSQALAELVARRRQVVEMIGMETNRLHQVRNPRVQRMLRATLKTLTEQLAELDRDIDNTIKRSPIWRAADDLLTSVPGVGDVTAHTLIADLPELGQLDRRRIAALVGVAPINRDSGQMRGKRTIAGGRSDVRNALYMATLSAIRWNPVISRHYRSLVERGRPKKVALIACMRRLLGILNAIVRTKTPWQCA

SEQ ID NO: 220338 - protein, 362 aa, unidentified
MQVPSLSLLKSEQFIRPAEPVFRMLGVSSLVLPKCIIMDKITNYYGIDISKDVFDVMDNFKVHHQFSNNKSGFTEFLKWLKPNGCCVMEATGVYHTQLADYLYEKDIFVSVVNPLVIKRFIQMNLRRIKTDKADAEMICKYAQLNELNAYKPEAVYIKESRVISESLSLLLKSRTMFKNRLHALIHKQSKHRSALIKPIKDTIKNLCKQIEVLEVELQKLIIENESDLYYNLQTIPGVGKSTAMYMIVISDGFRKFESAKQFICYAGLSPVERRSGSSVHARSHISKQGNGKLRNLLFMCSFNACISNKSCKLMYERITAKGKSKKLALIAVANKLIKQSFAIARSGLVYDSEFVSVKPSVK

SEQ ID NO: 220339 - protein, 339 aa, unidentified
MVEVYAGLDVSDKSTHVCVVDSKGVVRWAGACATDPAVIARTLKARAAGVERVILETGPLSSFLYHELKERGVPVTCVCARHAKGALSARVNKSDPHDAEGLAHMSRTGWFKAVHIKQEATHMDRARLKIHAQLIEAHRAMAGQLRGLLKLFGLRMGKVTTAGKRRERLAALFAQKPELEAIMAPLIQSLEALEAQIARAAKSLAASAAADPVAARLMSVPGVGPITALVFKTSIEDPDRFTRGEDAGAFAGLAPRRSQSGERDVKGHISKAGDPMLRSALYEAANSLLSRVKRPCALQSWGLRLAEAKGGKRARVAVARKLAILLHRLWRSETEFRWA

SEQ ID NO: 220340 - protein, 332 aa, unidentified
MFIGIDVHKRYSQIAVLDENGEIVEEVRVENANLDDFAQQYAGSKAAIEATSNYYHIHDTLSEYLDVTVANPGELKLISDSDKKTDRVDAKQLARMVRLGSIPESYVPTDEVRQARALVRGRQKLVENRTEYANKIHGLLSDHGITREVKPLSVEGREFLAELSLPSPWDALLESYLELIQVLTEQIESLEAEIEERAGSLKETQLLMTIPGVSYFTALTIYAELGEIDRFDRDKEVVSYVGLNPIIRESGDSRFEGSISKRGSGRVRWLLVQASYSAVHTCEDEYLSRFYNRLARKKNSKTAIVATARKLLVSMYHMLDREEVYDPPGVSA

SEQ ID NO: 220341 - protein, 345 aa, unidentified
MQESFYVGLDLGSSQCYQTVINSDGALRLARSIPTSEHHLRAAFTNLQGDVRVHLEASELSNWVASIIQPLVAEVIVSHPRSLAWIGKDSQKDDKIDAKKLAELLRLGRVHQVFYQSDNSRQTFKYLVTHYEQLSREQARFKSKIKARLRTLGIIRKDARLFSINGQTAVLDEIESVSIKQMLTQSFAVLNQMLASFDDAKRAMIEFSKQFREVRLLQTAPGVGIITACRFVAYLQTPHRFSNKRKLWRYCRLGVTRRESNGKRLAHPKLDSAGVGSLKDVSRKVFEAARRTKTANSFKQFYEMSLMNTKNAVHARLSTQRKILATLRAMWIGNQPFRNDLTEVG

SEQ ID NO: 220342 - protein, 429 aa, unidentified
MKSKAYRATAVNRVDAEQVSRGHPGQPLTVGLDIGKYRVLAVGRWADAQFERPWLVAHPEQLPDLLALLRRLAQDHAVTVALEPSGTYGDPVRQALTDAGLPVQRVSPKAAHDYAEVFDGVPSQHDGKDAAVVAELAALGKAAPWPYAAKEVWEQELVSWVEWLDAHRQIEALWLGRLEGLLARHWPELTRLLKASSATALRLLAHYGGPAALAADGAAAGQLRHWGKKFLRPEKIAQVLASARTTLGVRLGAVEQRQFQAYAEQALAARREMRRSQRALRVLAADRPVLQAQGRVVGLPTACVLWASLGDPRQYTSGPAYRKAMGLNLVEHSSGTYQGELRISKRGQPRVRRWLYLAVLRLIRQEGVRDWYRARKQQGRRAARKALVGVMRKLAVALYRVGVAGVAFEAWRLFPGAWPWRDRAARSRR

SEQ ID NO: 220343 - protein, 338 aa, unidentified
MFMIGIDPHKGSHLAAVLDEHETLVEELRVRADRHQRERLLQFAAPYMPRVWAIEGARGLGSLLAQQLVAAGEIVVDVPAKLSARVRSLDNECSDKNDCHDARSAAIVGMHNRRLVKVAPENHAMVLRMLAKRHHDLTARRTQSVCRLHALLATMTPGGLPRLLSADRAARELRKLRAADAVGSARRAACYELLGEVRNADRHLRELHTRIVAAVRAADTTVTNVYGVGPVVAAYLIGYTGDVTRFATKERYARYNATAPLEASSGPKPRHRLNLKGNRQLNHALHLAAVTQISHDTAGRAYYQRKLTETQNPKEAMRALKRRISDVVYARLQADTTR

SEQ ID NO: 220344 - protein, 404 aa, unidentified
MRRIDHRAAHPRSAAHAHDTALFVALELSRSTWLIGSNTPGSDRISKHQVPAADMSALLALLKRLKARSERSCGTTVRVISIHEAGLDGFWVHRFLEANGIESHVVDAASIAVNRRSRRAKTDRIDVEKLLDTLMEWVRGGRRVCSMVRAPSPTEEDERRLTREREALVIERTRHVNRIKGLLATQGVFGFEPMRKSHRKQLEQLRGWNGQALLPRLRAELTRELDRLELVISQVAAVEDERDRALKAQQHLAPSMRASDAATGARSLVTEHAGRLLLRLRSIGPEFASVLSSEAFYRNFGSRREVAGYAGLVPSPWKSGGIDVEQGISKAGNARLRKTMIQLAWLWLRHQSGSTLSRWFRERVGDGRGKIRRIAIVAVARKLLIALWRYVTLGLVPGGAELKV

SEQ ID NO: 220345 - protein, 335 aa, unidentified
MQIYGIDLAKEKFDVSFLRLSSKSNVVTPVHHVVRNTQNGIKAFLKGLPSDSVLVAEHTGVYGERLLKMCTEMNVKIAYVGGHVIHTYKSGPDRGKTDEQDCNVLRDFGERFTDKLVYTTFPEEDIYELRQLSRQRTMLVEERKRIMTADKTEDCRPYRSEAVKRSMQHIVDLLNEEIKDMERDMLTVIRKHDKISNSYDIITSVNGVGLVTAVELIVKTRNFTTITTAKQYSAYAGTAPYEKSSGKMNQGAHVSKWGNRRSKTLLYICAECARMHNKEMKLYYERRTIIDKKAHHYVLNAIANKLLRLIFSLINKNEKYNPCYIQRDPRSININ

SEQ ID NO: 220346 - protein, 401 aa, unidentified
MATLRDNVTRVKRFRDLKATLRTDRTRLLVGLDIAQAEHVVHLRHAHTRVVTSALTIPNTTRGFAQLGARIQQAQRATGCREVVCGLEPTGTYHQAVAQFLEAQGMDVVLISSSVAYWNRRTQDGTWDKHDRKDAANCAELLEQGKVLFFSQPDGPLAELRHLVRCLRRARTELAACKARWRTTLRPALAPMGEPLPRRLYVELPPGLQAWEPAAPGRPAVPKGRLPLGLATACADLGAQVTAVQARIAALEAACTPVAERLPAYPLLRTIPGIGPTVAAILLAEIGDIAWFTKFSQLRKLAGLDIVRVQSGQFAGQARISKCGRSLLRWALYHAAMGMARTTAGRARLAALKAKRQGDRYAGFKAIVELAAKQLRVVWGVWRSGMPYDPTRTGGLRRQPR

SEQ ID NO: 220347 - protein, 411 aa, unidentified
MNNTLFVGIDISKRSNVATFMNCEGKVVGRLAFSNNGSGADRLVAKILSYYEKEDFEAIRIGMENTSVYSKNLVWFLYEHEALNEHKLSIIPLNAIMVANYKKSFLDMDKDDITDSFAIADFIRIRPGLLPFKLDDRQEALKIMTRSRYNYVQALSRMKSQFLTRLFLSFSEMEAGKPFYSIFSKTSLSLLEEEFTLDELAEKPIPELVEFLQEKGGGKFQNPEEIAKVLKKAASSSYRVPAMVRESLNRTMASDMEIMRILENEIHNCDKNIEKLMKSVPAILVSIPGIGPVLAAGIMSEIGDISRFQKQESLGKMAGFKWKRNQSGKKESEDKAAVLSGNKKLRYYLVEAANRVRIHDPVFEAYYRKKYAESKTHAHKRALILTARKLVRVIFYLLKENKLYKPDVGIS

SEQ ID NO: 220348 - protein, 400 aa, unidentified
MLSIGIDVSKGKSTVCGMKPGGEIVYAPFEVQHTREGMLELVSLLRSSGEEVRAVLESTGSYHCPVVAALLENGIFVSVVNSLRMKRFCSQSIRKVKTDRIDAMQIALYGLAYWQELQPTRLPEDTYRELQLLARQYYQMTSMLIKAKVDFNAICDQVLPGMQELMNDHAGRHKLSDFVLRYHHTTHILEMGETRFRKDYCKWAEKKGYRNCERMAALIFATAQNGIPVLPNAPSTQIVITEAIRVLHTVEASRDAILTQMQALAKTLPEYSLVREMPCIGDTLAPRLIAEIGDVRRFHSKRALIAYAGIDAPPYQSGKFCANNRHISKRGNRYLRKTGYEVMQSYVMHKPANDPIFTFIEKKRGEGKSGKLAMVAGLNKFLRVYYGKVTELYRSLPAIE

SEQ ID NO: 220349 - protein, 316 aa, unidentified
MSSPSVFVGIDVAQAELVVAVRPPEDSWTVGNDEPGIAALIRRLRPLAVTLIVLEATGGYERALVAALATAGFPLVVANPRHVRDFARGTGQLAKTDHVDAEILALFAERVHPTPRPLPDAATQAIEALLARRRQLLDMLTAERNRLAHAGPPIARDLRRHIRWLERRLGKLDDDLDQQIQRSPVWRTQDDLLQSAPGVGPVLSRTLLAALPELGHLTHKQIAALVGVAPLARDSGTRRGHRRVWGGRAAVRAVLYMGALAAAHHNPVIRAFYQRLVTAGKPKKVALTACMHKLLTILNAMVRSNTVWRANVAQTT

SEQ ID NO: 220350 - protein, 336 aa, unidentified
MEKYSFFVGIDISKGHLDFCIRNSSVRLGFNRVPNDPGGIKEAIKWMRSFEGFRVKECLACLEHTGIYGLTVLETLHRLDFAVWMEVAACIKNGSGSLMRGKNDKVDASRIADYAHRFRADAKLWEPPRKEITLLADLMASRTRLMAVISKLAVPVNEIKSFKAKGHYEKIKDASKKTIEAARKEAKAIEKQILEIMMGDAVLARLYEVVTSVQGVGFVTATNLIIATNEFKYINDPRKLACNAGCAPFEHSSGTSIRGRNKVSHKANKRLKSLLHMCATSALQAEGEFKVYFDRKIAEGKNKFIVINAIRNKIIHRVCACVREDRLYTKFPKTVA

SEQ ID NO: 220351 - protein, 346 aa, unidentified
MQKQRYIGVDYHRKHSYISVMDKEGKKVKEGVVANHKEEVAAFLTQAQCDGNSAAVLEASRNWPVMYDWLEELVDEVHLAHPLKVKAIAEAKIKTDKIDARVLAHLLRSDLLPEAYVAKPEVRQVRNVLRQRMFFVRLRTMVKNRVFSLLDRYPELSEQKPGRDLFSQRGLIWLKQINIKEIDRKLLDEELELYQVLEERISRSNSLIEKLAWGDWRVRLLKTIPGIGKFFAVLIAYEVDDIGRFANEKKFFSYMGIIPSTFSSGGRTFHGRLTKQGNKYLRWAIIEAIWPAIQSDADLMAYYEKVRVKKGPNPAKVATARRLATIVYRVLYQKRPYKVFGSRLPS

SEQ ID NO: 220352 - protein, 350 aa, unidentified
MKIMTEVNPRGTTIGIDLAKNVFQVHGADEKGKMVMKKQLKRAQVLPFFANLVPCKIGMEACGSAHYWARKLQALGHDVQLIAPQYVKPFVKRNKNDAADAEAICEAVTRPNMPTVPIKNASQQAILSVHRARQGFVKARTAQANQIRGLLAEYGIAIPQGIGHITKRVPEIIEDGENDLPGSFRLLIQRLVDHLKELDRQVGELEVEIQWWHRKNDASQKLAKIPGIGPITASAMVASIGDARNFKNGRQLAAWLGIVPKQHSTGGKSTLLGISKRGDTYLRTLLIHGARAVVRIAERKQDADSWIKKLLARRNKNVTAVALANKNARTIWALLTHDREYSPGYVKAVA

SEQ ID NO: 220353 - protein, 430 aa, unidentified
MKSNTQNAKIEAITEKTLVLGIDVGSETHYARAFDYRGIEYSKKPFKFSNTEAGFVTFKEWILDLKERHEKDKVVPGMEPTGHYWFNLGKFLQDNEMKPVLVNPHHVKKSKELDDNNPTKNDRKDPKVIAGLVREGRYMIPYLPDGVYADLRTASNIRFQLQAELTRIQNRISRWFNIYFPEYKTVYGKPDAKSGMLILKAAPLPEDILTLGIDGVNQIWRDAKLRAVGKARAKTLIEAAGHSVGSKEGAVSARMEIRMLLEDYESRNMRLQEVMVLIEELVKGIPMAEKLLEIKGVGIRTVSGFLAEVGDISRFNNPKELQKLAGLALVENSSGKHKGGTTISRRGRKRLRYLLFEAAMSLVAKNPEFRELHNYYTTRRRNPLKKMQSLMAVATKLIRVFYAMLTKGVDYDPKKMVSDIRRPEAYLQAA

SEQ ID NO: 220354 - protein, 386 aa, unidentified
MATPDKIRIEQDMLPQPTLFLAFELGQNTWKLGCTIGMAQQPRERTIPAGALETLQEEIARAKQRFGLPEDARVVSCYEAGRDGFWLHRALVAHGVQNHVIDSASIEVNRRQRRAKTDRLDVRKLLTMLLRHRAGEKKVWSVVRVPSVEEEDRRQLHRELTTAKQDRTRVINRIKGLLAGQGVQLVLEGNVDAQLDRVHQWDDSPLPSALLSRLKRAWQQVCFLTTQMQTLEAERRALLRHREDPVLAQVRQLFTLRGIGVNSAWLYVMEFFAWRDFQTPKQVGALAGLTPTPYQSGQSRREQGIAKAGNRHIRAMAIEIAWAWRRFQPASALSQWYERRFGAGSARLRKLGIVALARKLLIALWRFVKTGVLPEGAVLKTAVPSR

SEQ ID NO: 220355 - protein, 435 aa, unidentified
MEEVEDEPLFCDRVAGIDIGKATVMVTIRVPSEARAKGRQQETREFGTTRRELLALADWLRCWQVERAGMEATSDYWKPVLFTLEQEGFDCLLYQASQVKALPGRPKTDKLDSVWLARITEQGSLAGSFVPPEEIRRLRTHTRYRRKLVQMRTAQKERCEKLLEDAHLKLSAVISDIHGVSGRDMLRAIAAGERNPKVLAQMARGVMRSKIARLEQALDCSFFTGEHAFILTMMLDSIDSLTAQAGVLDARIADMCQPYQRQLEQLDEIPGFGTTTAQDLIAEIGTDMNVFPTAGHLASYARQAPRVKESAGKRKGKNATGRGNPYIGGALGEASISAGRTQTFIGEKYRRLTRRMPKRKAQVAIMRSQLVIAHALLSDPDARYQDLGPDYYERKADIRRRARNHARALERLGYKVTLEAIDPGTGELHLVATAG

SEQ ID NO: 220356 - protein, 408 aa, unidentified
MNTLYVGIDISSKSNVVYMMLPNGDKHSNFSVASSHEGSVQLVKRIYSALTSHSLDTVLIGLEATSVYGDNLVYFLREDATLAPFNSRIHVINPKQVKRFHDAYNDLPKNDYVDSFVIADCLRFGRINKEVYSGDYRYQALRNLTRARFFTVQNLIKEKQRFMNVLFKKYSTMTQEKVFSNTFSATALAVYEEFDSAEALANMDLHELTDFIIEKGKNRFQNPDAVAKAIQKAARSSYRLPKTVNDSVNQVFSISITSMKALESQIKEFDKAIKAQTELLPNVLISIPGICPVYSAGIMAEIGDINRFDNQAALAKYAGLAWKQYQSGGFEAEVTRLIPSGNRFLKYYLCEATFSLVRCDKEYSDFYHLKYKEVNRCQHKRALALTARKFVCLVFRLLKDNRLYCPAK

SEQ ID NO: 220357 - protein, 365 aa, unidentified
MKKIAYVGIDYHLKSLSIAVMVKGKTEFFDMIRLKNDDKIIRKYMRKLSEKFELKACYEASSNGYSFHRKMAAWGYPCEVIAPSLIPRKPGDHRKNDFRDARDLAQNYAHGMLSIVHVPTEEEESVRSLVRCRITFKETAKRVKQQINSFLLAQDQHWSQSKWTLKHRKWLWNLRMPHAYLQQVLDEHLAHLDYLETRIKYLDEQIEQIAASAVYAPAVKKLAAMKGIKTLTAMLLIAEITDFRRFPNPSALMAFLGLIPSEDSSGDKRNDGAITSAGNKRCRSALIESVQHYARIPHISAQMKSDLSQLDAHSAGIAVKCLKRLHKRYWALILKGKLRPVAITAIARELAGFIWAMMQPQPVIA

SEQ ID NO: 220358 - protein, 314 aa, unidentified
MPQIQFVGIDVAKDYLDVHVLPIDTSLQVLNDESGFEELLEFLKPLKVNRVILEATGKLEAPVAVALYQAGLPVAIVNPRQARDFAKSTGQLAKTDRIDARVLAEFGRSVPIELRPIKDEQAQAFEDLLARRRQLVQMIAAEKNRLSRARGRSLTDIRAHIAWMEKRLPRIDDDLQAAIKSSPLWRERDALFQSVPGAGSGLSLSLLINLPEIGSISNRAISKLVGVAPLNNDSGRRRGRSTIWGGRANVRCALYMSALSGIRYNPVLKAYYQKLRTAGKKPKVALIACMRKLLTILNAIARSGVPWQAATIAR

SEQ ID NO: 220359 - protein, 408 aa, unidentified
MLVPLSNAIVGIDLADSKQMVVVTDHDSKVLARRMFRCRAWDLGAGLDWARERAAAKGFAAVTVSCEPTGHRWRVLSQLAADRGMPFVCVQPMVTSWARRAEDLTPDKTDEKDAVLIARLTAQLRCYEPEPVDETWARLRHLGTRREQLITETSGQVQQIRDLLECVWPAVLDCAQQPFRSNTWIAALRVITDRDGGDFARTHRLGAARFDHAVRRQIIKRGGQKPCLRIATKIFAALADPAGVIAHRPGALERVQLLLQDWAHAQERLSDTEQRMLAVLDELGVTALATSITGLSPVGAAAILAQTGDPRRFATARALVKHAGLAPREKLSGTFKGRTKLTGQGRPGLRLAAWRAVWGAQRANPVYNARYRHLTTRETNKLRPTQAQTVIAAAILRHLHAVITTGRA

SEQ ID NO: 220360 - protein, 373 aa, unidentified
MPRYSTAFGMDVHLRSTTVCALDAETGEAVTRRFRGNPWGEVAEWMSGFPGPSLAAYESGYLGFAPQRELSGLGVDCVVAAVSKVPRSAADLSSKNDRNDAARMAKAILSHDVTPVWVPSPEIEGLRDLAAAHDAATARLAAAKQRLLAFLARRGYVYGGTTPAGNPRKYWTYGFLRWLDGIHPADDGGIRALAALRNEVEAADETREALLAEYRAAVAAGPLSAEVEALQSIKGCGFALAAAFASEVGDFSRFRSGRQVTAYFGLAPKQRSSADSVRLGGISGAGNALVRKLAVEGSWCYAQAGHQPKLMPKGSGVPLEIRMHGRKGSERLLRRREEMLERGMPQAKANAATAAELVRWLWALGTMCREAGE

SEQ ID NO: 220361 - protein, 310 aa, unidentified
MLDTTTFVGLDVHARSIKAVSLDVMTGEVRAATFGYDAGAVAEWVRSVDPGARCVYESGVTGFDLQKRLSGLGVDCVVGAVSKMIKPSADRRRKNDRNDAEFLARMLSVGNVVEVWVPDDECEAARDLTRALEDARDDLSRSKQRLSKFLLRHGLVFDERTPTGRRKGNWTRAHWSWIESIRFAEGADNDALAYYVDAVRRAAEEKARLEGLVEAEARKPRWRKRVDSLRCLKGVDTASAADLVFEAGEFSRFRNARSFAAWVGLTPSEHSSGESDRRGAITKAGNKHLRKTLVEAAWHYLTCSGVLALL

SEQ ID NO: 220362 - protein, 402 aa, unidentified
MNAVGIDVSKGKSMVAIMRPFGEIVSAPFEIKHTASGINSLVELINSVEGESRIVMEHTGRYYEVLAHQLSEANLFVSAINPKLIKDFDNDSLRKVKSDKADAVKIARYALDKWQNLKQYNVMDELRNQLKTMNRQFGFYMKHKTAMKNNLIGILDQTYPGVNTYFDSPARSDGSQKWVDFASTYWHVDCVRKMSLNAFIDHYQNWCKRKKYNFSQSKAEEIYGKAKELVPVLSKDAITKLIIKQAVDQLNSASTTVESLRTLMNETASKLPEYPVVMAMKGVGTSLGPQLIAEIGDVSRFTHKSAITAFAGVDPGVNESGSYEQKSVPTSKRGSSNLRKTLFQVMDALIKTHPQDDPVYQFIDKKRAQGKPYYVYMTAGANKFLRIYYGRVKEYLSSLPES

SEQ ID NO: 220363 - protein, 332 aa, unidentified
MNYELFVGIDISKLTIDAVAFTAETFKAPTHCIFNNNYDGFTEMLEWLAEYGITDDKILFCCEHTGIYICPITAFMDVKGLSLWVENGLHIKRSIGIKRGKSDKADALSIANYAFSNRFNARIYHFPSVTASKLRHLLAHREQLVRHQTSFKCTCSELKGFDKENALYCIADSQEMLRIYAERIKKVDAELSTVIEEDQELNVKFRLVQSVHGIGKQTALFILIYTEGFSSFSDYRKFASYCGVAPFPYSSGTSIRGRNRVSSLANKKLKSLLTMCALNTIKKDNEFKRYYDRKKAEGKNSMCVLNVIKNKLLSRVFAAVKRGTPYHDEIAA

SEQ ID NO: 220364 - protein, 368 aa, unidentified
MNEHITIVGLDVHKATVVAAILPPTATRPTQTVTIENCPKAIERLVRRVAGEGRLVLVQEAGPCGYQVQRQMTEMGKKCVVVAPGLTPVRPGDRVKTDRRDAEKLARLYRAGELTEVHVPSCAEEAARDLVRIREDALEDRLRARHRLNKFLLRQGRVYRETKAWGVAHRAWLRRQRFEWQPLQQTFEGNLRAVEEAEARLESLDQQVRDLAQSGPYRMAVHYLRSLKGLETLGALTLAVETLDFGRFERAPAYMSLTGLVSSEHSSGGRERRGSITKAGNAHLRRILVEAAWSYRLKNTVSPALAERRRSCPPEVIQIARKAQDRLHRKFWRLVSRGKPSQVAAVAVARELAGFVWAIAQQVPAAAT

SEQ ID NO: 220365 - protein, 433 aa, unidentified
MKVTIRSEEFKSEETLVVSFDVSKDKLNYFFCYRDATDGQRRECEEHFSNRTPVIERQLREFRALGQQQGLPELLVVCEPTGGYERSLLKTAHRLGLRTAYVNPESVNKLQVVQSNDSGKTDEKDPRTIHTLAAVGKTLKQRPLPEPYLQLRRLHGFYEDEVDAGVRLRGHLQAVLQELFCDYAQSADFLYTKTGKALLDRYGFNPYRIVADSWGQFVRNLQRHSRVRLTVLEAIYQAAKASRLHQASAWEQEVLEQRLRQLYQDWERHEQRKAELRQQMTEIFSRLPEHQTLGGIPKVSAFHLARLVAQTGPLSDFRHSAQLVRLSGLNLRERRSGKYVGQLKISKKGRALLRKVLYQVCFGCLIGKGRLYHEYYQAHVNPKQSHSAMRTMVSVMRKFVKLLHGVHRSRTAFNPARVRVSASEFARQQKLAV

SEQ ID NO: 220366 - protein, 422 aa, unidentified
MKVVYPICCGIDVHKTFLVATIIKTTNAIEPSYSKKRFSTFNNAILQLKQWLLENNCHDVCMESTGKYWVPIYNLLEDVIAVTIANPKWVRAVKGNKDDVKDSKWIGDLFRLGIVPGSFIPEKNIRILREYTRYRAKLVSCKSSEKNRFQNAFTVCNVALDAVVSDMFGKSASSITDYLITSDTFDPETCTSFLKRSLKKKSDAVIESIQGYQMTRDQKDRMIMVKAHLDFVENSISELDHKLDQMMAPHEHLIALLSTIPGVKRSSAITIISEIGTDMTQFSSSKRLCSWAGLTPGNNESAGKKKSVRITRAGVYLKPALVQCAHAAVKSRDLPYYRIKYERIFKRRGKKRAIVAIARMILTAIYHMLTTGESFNPCDLYKIDMPQEMKDQQKSKAIKQAFKLLISSGYLTSDVQNHSAIS

SEQ ID NO: 220367 - protein, 385 aa, unidentified
MTATTRRFDPTALENMLCLSFELGEGSWTLSFTSGFGAPVHRRRVPARDRDAVLRQIEAMKERLGLGASCRVVSCYEAGRDGFWLHRFLEAHEIENLVVDSSSIEVSRRSRRAKTDRLDGESLLDLLLRHRAGSQQKVFSVVRVPTVEQEDRRHLHRELRSAKQDRTRVTNRMKGLLANQGLALDLKRDVPAQLASLRRWDGSPLPEGLRARLGREWERVVFYTALIERLEAERREILQRGEDPVLEKVRQLNLLRGIGTNSAWLYAMELFGWREFRNRKRVGAIVGLTPTPHASGMQERERGMSKAGNRHVRAMAIEIAWGWLRFQPRSALSQWYQRRFGGGSTRLRKIGIVALARKLLIELWRYLETGVVPEGAELKTDVRVR

SEQ ID NO: 220368 - protein, 416 aa, unidentified
MKSASNTLPETPLNDLTAGIDWARDDHAVCIVDHRGREVARTIVEHTAAGLRDLLAFLTGHDAGEVAIERADGPVIDTLLEAELTVVVISPNQVKNLRGRYGSAGNKDDRFDAFVLADTLRTDRPRLRRLEPDTPDTVALRRACRARKDLVGHRVAAANQLRAHLRNVLPGAIGLFSDIDSEISLAFLARFDTQDRADWLTPKRLGNWLTKNGYSGRTSPEALHTRLSAAPRGITGADAATQAHITQALLAVLTTLLAQIKALTAQISHQLDTHADAHIFTSLPRPGRVRAARLLAEIGDCRAKHPTPESLACLAGVAPSTRQSGKLRSVGFRWACDKQLRDAVTDFAGDSRHANPWAADIYNRAINRGHDHAHAVRILARAWLYVIWHCWQDGTAYDPARHNALQHVIAAKTEAA

SEQ ID NO: 220369 - protein, 400 aa, unidentified
MKQACCGLDVHKDSIYAAIYKNQKAGEVRVFSTLTADLIQLSKWLKEEGIQSIAMESTGIYWVPIWNILEREDFKLLLVNPYFIKQVPGRKSDIKDAQWIAELLYKDLLKSSLVPSHQIRTMRHYSRAYVKRTQAITRVVLSIERILESANIHITSMVSCVDSKTVMKVIKSIVGGETNPNNLIKFVHGRVKNRMGEKVILSLEGYIKEEHRFLLRQRIEEYELLNRHADELEKMMIEIGEAYYKKELELLKTMPGVNTQSALQLIAETGGDMSAFQTSNKLTKWAGLSPRNDETAGKVKSTATTKGNTYLRRIIVQIAWASSRTKGSHFQSQFRHLAIRKGNKKALIAVARKQLAVTWNILTSMKAYDTSKQPVISQDQLKARKQYYEKELNKINRIIS

SEQ ID NO: 220370 - protein, 413 aa, unidentified
MSLKIVYPICCGIDVHKTFLIACIASTNSSNITSYSSHRFSTYTNNLRELVTWLEHHNCRDVCMESTGKYWIPIFNILEPSCNLVLAHPKYVKAIRGKKTDKKDAQWIADLFKHDLVAPSFMPLADIRQLRDLMRYRFKLTCFSSSEKNRFQNCLTVSNIQLGNIVSDTFGKSSQRIISQILAHPHDSLDLPSLIHGSMLSKLPELTLAVDGVFSPEQAAKLKIIRQHYDDLEIRKAELEQLILALAMPYQQEINLILTVPSFKNVFSAITVLSEIGANMGTFPSAKHLCSWAGLTPTNNESAGKKKSVRISKAGCYIKPLLVQCANAVVRSEKHPEIRNRYLRLKKRRGHKKAIIAIARMLLTAIYHILKNKVPYNAELYRKADLIPADREITVEQAILLAQSQGYRIKTAS

SEQ ID NO: 220371 - protein, 392 aa, unidentified
MEARTMSLPPAASHDDAERCLLAIELSKKSWIVAVNTPLSDKISRYTLKPCDWKELLKLSERIRTRVAGELKKRVDVVSCYEAGYDGFWLHRLLEAQGIRNYVIDPASVQVDRRARRAKTDRVDVERLLRSLMAYLRGEPKVWSVVRVPSVAEEDDRRLHRERGRLIRERIQHVNRIKGLLAIHGIYDYQPLHRDRMQRLKGLHTADGRQLSPRLKAEIVRELQRLELVLRMIETIEAERDAIASAKTKAKTKMEHSNAKKIQDLVKIKCIGPEFATALVGEVFYRSFDNRKQLAGYVGLTPSHFQSGPMCRDQGISKAGNTMARTTMVELAWMWLRYQPGSLLSVWFHNRVGKLKGRIRRITIVAVARKLLIALWRYLETGLVPDGAILKV

SEQ ID NO: 220372 - protein, 469 aa, unidentified
MCVALDFAKAQHTALICNGVGDLLKPSFAVENTLQGATKLLSEVRACAKPKKIRPEHVFFGGEDYPSYAENFLRNLRNEKFLVVRVNAWEAKQQRDNFQASSDSLDLLGIARCCLNRRGESVRDLPEAYPNLRIATRDRDKLVRMRTAVSNRIHSYVDRLFPGFLSVSKSGLEPFSKASLELMEDRFSPAQLSRRPRQALAEWLRRRGVTQSQDTATQLKRLAKDVLEPAPEQTVMLQQTLAQLVGLYRGLETSIARIDREAAHWLARTPGAWLTSIAGFGITLAAGGIAELGPPSQWRSVRQLCSYSGVVPKSKQTGGPDKEAIVGAVQQRCNKRLKNVVLQAVEKVIQYGPEDLRRMAQELEARGAHTEFAMAKRLVRLGKYLAVTSTVYRPKTMMDPDTPKATLAAHYQTVWEKLLPKWREKAELRDVFAPEHPLGQWRKMVQELYALELPLPQQKAGKQSSALTP

SEQ ID NO: 220373 - protein, 491 aa, unidentified
MIGEVPCVEAHGTIPFRRVPFSSILGPKPDLQRMKTKAAKIQKPTQKNKKIRVDDYWEKINPDAAGIDIGARENYVCVPADRDARSIQRFGTTTPELETMAQWLEKCGIKTVALEATGIYWIAAFQLLEKKGFQVVLVNPRQVKNVTGRKSDVQDCQWIQKLHTFGLLGASFRPADCYCVMRSYMRVRDDLVANRSTQIQLMQKALHQMNVQLCHVLSDISGESGMAIITAILAGERNPVALAGLANRRVRSSKERIAQALVGDYRPEHLFALQTAYDLYLAYQGKIDQCDQCLSQELERLPERVDLAVRPLPPASETKQINEELRAGLYRKLGVDITAIEGIGTTVGLTMLTEVGPDLNAFRTEKHFCSWLGLCPDNRISGGKILNTHTRRVVNRLADALRIAATTLQRSQSALGAFHRRMKARLGAAEAVTATAHKLARLIYRLIKHGEAYVREGIEQYEKRNQQYKLQAVRKMAESLGLKLIEPIPVS

SEQ ID NO: 220374 - protein, 351 aa, unidentified
MMIIGVDYHPGFQQIAFLVEETGACGERRLNHSDGEAENFYRDLKARGISVRVGMETTGFSRWFERLLAELGFEVWIGDAAEIKTRRAKKQKTDRLDAELLLKLLLEDRFPRIWVPSPENRDVRQLLWHRHRLVQMRTRIMNQLQALAMNENRYWKGKLWSERGRAELEKLPLAPWTSRRRQELLELLDRMNPTIEELTAAATLEAKKRPEALRLMTHPGVGPLTALAFVLIIGTPERFGCAKQICNYVGLIPSEDSSGGRQRLGHISKQGSSLLRFLLVEAAQAAVRCNADWRRRYRHLAMRRQRNIAKVAMGRRLGARLYWMWRNGCEYSPSLEFGSHAGKLGTGNGGQ

SEQ ID NO: 220375 - protein, 388 aa, unidentified
MTKVDDLSRSLAALDQDSTLIAVIELSLKSWLVAGLVPGVERRPLKKLAAEPEAVRHLLERWRGEALKAGRRIKRVAVAFEAGRDGFWLARWLRERGIEAHVIHPASVAVSREHRRAKTDRLDTELLMRAFLGWLRGERKHCQMCLVPSLADEDGRRPGREHEALTRERTRLVNRIKATMGWLGIAGFNAKLRRAAERLAELRTPDGLGIPPNTQAELRRAIERLRLIRQQIKEIETERLERLERTPAAKPQAAMLLLQRIVGLGLETADTLTNEVLLRPLRDRRAVGRYGGITGAPDESGAKRREKGLARAGNARVRQTMIQLAWRWLMFQKDSALARWYRERTENASKLVRKKMIVALARKLLIALWRYVTDGVVPEGAVLRPAAA

SEQ ID NO: 220376 - protein, 337 aa, unidentified
MNITTIGIDLAKTSFSLVGTNKHGKIVLRKTLSRNKLMSFIAQCPPCLIGLEACSGAHYWAREFEKLGHEPRIIAVKFIEPYRKGSKNDNNDAEAICEAVRRPNIWYVPVKTADQQALLCVHRVRQGVAGERTRWINRSRGLLSEFGIVIPKGRYALQAVLPVILTDRDNGLPELARQMIHDLWLSIQQANEQILCYDRALSRLAREDDTAKRILTIPGVGELTATGVVASVPDPRLFKNSRQFAAWLGLVPRQYTTGGHVRLGRITKRGDKYLRMCLVHGARAVIAKLGDKQDHVSCWVRGVIERRGYLRAVVALAARNARLIWTLMVKREDYRAI

SEQ ID NO: 220377 - protein, 362 aa, unidentified
MREFTALDAHKQYTFASVERDGRVVREERIWHERGAIKGFLAGCQPGSPVAVEATGNWYWIVDEVEAAGLVPRLVHPRKAKLMMGLINKTDKLDARGLNLLQRNGTLPTVWIPPGELRDQRDLPRTRMVFARQRAQMKCRLHAALAKYGIAGPEASDIFAPRSRPALLQAIRQLPENTRFAAERELEQLDGLREQIELFEVRMEEVCGRSRAVELLDSLPGVGFILAVVMALEIGDVERFPSAEKLAGYAGTTSRVKASGGKVHLGRLRPDANRYLKWAFIEAANVVSLHRRHWAGRHAVQLYERVRSRKGHQKAVGAVARHLAEAAYWMLKKGEPYREPGSRPAGGEQAGFVHEGASAVMT

SEQ ID NO: 220378 - protein, 387 aa, unidentified
MAEPPFEVILGVDTHAQVHVAAVLDHLGRLQATLTIPATPAGYRQLLTWAAQHGHLTRAGVEGTGTYGAGLTRCLTRAGVKVIEVDRPNRQRRRRRGKSDPTDAEAAARAVLAGEATATPKTRSGIVESIRVLRVARSSAVKARTQTANQLRDLLVTAPDTLRAQLYPLPTAKRVAQLAAQHPGHGADPAVATRRALWYLARRYQTFTAELDALNADLAALTRRAAPRLLARYGVGVETAGSLLVTAGDNPDRLTSDAALAALCGASPVEASSGKTVRHRLNRGGDRQANNALWVIALTRLRDDPRTLVYAERRTKQGKTTKEIMRCLKRSIARELFPLLKADLHDACQLSLTQELRSVALVPARPRDEAAVLSARVIGSTPAKLRG

SEQ ID NO: 220379 - protein, 321 aa, unidentified
MQEPTLFIGVDVSKAELVVSLGPEHRPRSVGNDATCIANWLREVPPGALIAMESTGRYHGLLAHLAHRAGLKVYVLNARDVYFYARALGTRGKTDGVDAGVIARYLAEHHEHLHPWQPASSVQQRLQDLLTRRAQLATQRSALKQIVSGVDVRDIDASGVYEALDALLDAMDQKVQELIASDARLRSGCQRLRTITGIGAQTSALLVTLFSRFEFANADALVAYCGLDPRPNDSGTRHGKRRLSKKGPSLLRRQIYLVGFSASHSKALKPLYESIRAKGFASTEAFVILGRKLLRVAFALWRGTESFDPQRLLPKNDLQKT

SEQ ID NO: 220380 - protein, 410 aa, unidentified
MTSAALTCGIDWAEAHHDVALVDDDGRVLIRKRVSADLPGFTTLLELIAEHGGDPESTPVAIETDKNLFVTALAAAGFTVYPINPKALARYRERHGQAGAKSDPADATTLAHVLRTDRHVHRQLPAISDQGLAIKVLARQHQEAIWALHQTISRLRAVLLDFYPQAVKAFPKMQQHAATTILAAAPTPAAGQRLSRRRIEALLHRCGRRNDPALVEQILTDLKTPALRQPEPVERALGITVEGQLKIIVAMREAVDQLEAELAAVFDTHELAPVLRSVPGLGPVLAARVLAEVGDDPTRFTSAAGLRAFAGTAPVTRASGRSHYVKARKIRNKRLGDACHWWAFATLTRSPGARAHYDRRRAAGDHHNAALRNLANKLLGRLWWCLQNNQPWDDEAAWSLPSTAPDTVAA

SEQ ID NO: 220381 - protein, 376 aa, unidentified
MSHFNDIYVGLDVHKATIAVAIVRGPRSPAHFYGEIENTPQAVANLVNKLSVDGEVINFCYEAGPCGYELYHPLQGFGHECDVVAPSLIPRKTGVRIKTDRRDAMALAKLHATGSLTAVWVPDKDQEGLRDLSRSREDFKQIETKTRQRLGAFLLRNGKVYGGKTKWTQAYWRWLETVTFDTATQHIVLQEYVEAVRDAQRRVLNIEGQIRQAIKGWSLEPVVQAFMALRGVSLITSFTILAELGDLSRFESPKQLMAYLGLVPSEYSSGNKRRQGALTKTGNGHVRRVLVESAWNYRFVARKTRDIQKRAEQTSEAIQAIAWEGQKRLCGRYQRLLQAGKLKQQVTAAVARELCGFVWAIACEAMGAAHGSRATA

SEQ ID NO: 220382 - protein, 351 aa, unidentified
MPRTTTLHAVTAIGIDMGKNTLHLIGLDARGAIMLREKVARGRIALRLANLPPCLIGIEAGMATHYVARELAALGHDVKQVPATYAKPFRQGQKNDFRDAHAVAEAVQRPTTRFVPAKTNEQLDLQALHRVRSRLVSERTAVINQIRGFLLERGIVVRQGPRFLRQQLPDILAKQTDVLSPRMARIVADLANDWRRLDERIETVTDEIGTLAKSDDSCRRVMTVPGIGPIISSAMVAAIGNGAAFARGRDFSAWLGLVPKQMSTGDRTILGRISKRGNGYLRTLFMQAARVILLRSANWPKHSFGLWLVRAAQRLHPNVLAAALANKLARIAWTVLAQERSYEARVTKAAA

SEQ ID NO: 220383 - protein, 376 aa, unidentified
MTTVRFVGLDVHAETIAVAVAEQSGEVRCLGIIPNRPESIRKLMKKLGPAKELRVCYEAGPTGYVVYWQLTALGVKCEVIAPTLVPVKSGDRVKTDRRDATKLARSYRAGDLTPVWVPDGAHEALRDLVRARAAAKKDQQRARHRLGKFLLRHGRRPSTAMPSWTARYVAWVKTLHFEHGAQEATLLDYLHEVEHMADRVARLERAIDDAVQTAPERMRAVIDALQALRGVALVSAVTIASEVGELSRFATPRQLMGYSGAVASEDSSGARTRRGGITKTGNAHLRRAVVEAAWAYRHRPAIGAALRKRQATASADVTAIAWKAQHRLHARYRTLTAKGKCKQQTITAIGRELLGFIWAIGVHVEAQTESVKPMVA

SEQ ID NO: 220384 - protein, 351 aa, unidentified
MKTEPTAHPKLHIGIDIHKRSWKVHCATDFFIGKSFSMPPDPKVLYDYVQKNFAGYEVSTAYEAGCCGFSAHRIFEAFGWRSVVANPADIHRRGKEKYSKTDRIDAQLIARELKDDWLNSIKVPDVQREALRSLFRRRNDIVKDIRRNKSRIKMQLLYFGITIPEEFDKDNWSHNFRNWVAGVDFAHPTAKSTLEGRMRTFRFLDKEKREVSNELRAYCRKHYKTDYNLLRSVPGIAGIVACGILSELGDLRRFSTIKHLAGYLGLAPGIYQSGDNSRDTGITKRANKIMRSYFVEASWQAIRADPIMQAYYRKHLPKDSKTIIIKIARKLASRTLAVIKTGIPYQAGVIQ

SEQ ID NO: 220385 - protein, 409 aa, unidentified
MRLFVGLDVSSFDIKACILNGEGKKLDFFSVNNDLPGATALKERVLQCIANQEIETFKIGLESTSVYSFHPSMFLHYDEDLQRFGAKVFLMNPKQIANFKKSYSDMDKTDEIDAFVIADYLRFGRNQMSIVKESQYVALQQLTRSRYQLVRMLTKEKQHFLQHLSYKCNTFSQEVDSSIFGNAMMELFLEKFSLEELADMPLEELAEFLQTKGKNRFGDPKCVASTIQRAVRSSYRLDKVVEDSIDVLLGTSIAVIRTYQQQIKEIEKSIKRIMAGLTQTLESIPGIGPVFAAGIIAEIGQIERFDDETKVAKYAGLYWRTHQSGRFTAENTSLSRNGNHYLRYYLVEAANSVRRHVSDYQEYYVKKYNEVPKHQHKRALVLTARKLVRLVDALLRSHQLFTPERCVKV

SEQ ID NO: 220386 - protein, 353 aa, unidentified
MKSDKYIGLDVHQATTVVAVLDAEGKLILDTIVATEASTLIRLLQSLNGTLHVTFEESTQAGWLYEVIRGFVSEAIVCDPRRNRLLSEGSKADKPDARKLAELLRAGMLRSVYHGHHGTRLLKELVRGYETLSSDVQRTMVRIKAIYRACGIRTPGRRVYQPSQRGEWLVRLSEPGKRQRAEWLYQQLDQLRPLRRQAKLAMLAEGRKHQAVRLLRTIPQLGDIRATLLVATIDTPHRFRTRRQLWSYSGLAVVTHMSAEYEMKEGRVVRSRKPIATRGLNRNCNRRMKEVFIGAATGGSQSEPYRSYLQALQSRGVRKEMARLTLARKIAAVALVVWKKGETFDSQKLNWTT

SEQ ID NO: 220387 - protein, 316 aa, unidentified
MQREVFVGIDVAKAHLDVAYNDEADCTRYTNDDAGISQLVDHLKSRQATLVVLEATGGYQRQVLSELLAAGLPSVAVNPRQVRDFAKALGKLEKTDEIDAKVLARFAACIRPATRPVVDDTTQEFQALLARRRQLMEMLVAEKNRLHQRATKAVSRSIEAHIDWLKKQVRDTDKDLENRLRNSPAWGPRVEVLESEPGVGHITSMTLLSELPELGTLNRKQIAKLSGLAPLNRDSGTQRGQRSIWGGRATVRTALYMATLVATRFNPTIKTFYNRLLSHGKAKKVALIAAMRKLLTILNAKLRDHTRASNPKILPT

SEQ ID NO: 220388 - protein, 368 aa, unidentified
MGDRIIYVGLDVHKAGIVVAVAEGGLRDEMREYGRIANTPAALRRLASKLGQEGMELRFCYEAGPCGYGIQRQLSALGHECIVVAPSLIPKRPGDRVKTDRRDAASLARLHRAGELTAVWVPDPGHEAMRDLVRARLDAVRALRRARQQLSGFLLRQGCHYGRPAWTKLHRRWLAGLKFEQAVHHIVLEDYIQAVEAAQTRRDRLTAQIEAMLPDWTLAPVVAALQTMRGMALVNAATLVAELGDLSRFANPRQLMAYLGLVPSEHSSGASIKRGGLTKAGNSAARRLLIEAAWTYRFPARVSRELRLRQEEQPRPIREIAWKAQLRLCARYRKLARSGKPANVVTAAIARELAGFVWAIARRVPPAG

SEQ ID NO: 220389 - protein, 401 aa, unidentified
MKGPIISVDVSKGESHYQGFKELNVKYSNVRKIKHDKQGLNELLKLIKEMEQSLNCEVCVVYEATGVYHCVLKKFLDDHNIKQFIINPLLSAKTRKNDSLRSPKTDKLDPKSIAKTFYNQNLYQSSKSERIYHELRELSRYYEDVLVHIRKDKVAFRAQLDIVFPGYDTLFVDLYGPVSLTIIEKYPHPEMIVNKSVKTVSKIIQKKTCHGESVSQSKAIKAIEFSKTIYSWCNKDDIEVIILKRLIDNLKAHLNEAETILNEMVKLAQDLPNFEIIRSIPGIGDNLAARILAELGDVNRFKKFSQLVAYVGVDPRINESGQEDGQHLHITKKGNKRLRCLLYLAVTCALRLKTDNNKIKEFYIKKMQQSNPMCSKAAKIACVNKLVRIIHNMCKNGTLYQ

SEQ ID NO: 220390 - protein, 358 aa, unidentified
MLYLAIDQHRKQLTVNLRNEQGDVILKRQVSTEWPRVRSFLEAVQKQSAPEGGFVTILEVCGFNDWLLKLLAAYGCRETVLIQPEKRTKNKTDRRDANALGELLWTNRQRLLAGKKVQNVRRIVPPSDRDAEDRQLTALRQRLGWLRTRTINKVQHLLLKHNLQQECPTKGLQTQRARKWLAKLPLGAIDRLELNQLLAQWALWDKQLAELEPKIRQRQAENPTAAIVATVPGAGAYSSLALACRIGSIERFPHARSLAHYWGLTPRSRNSGDATQRLGSITKQGSALARFLLAQMVMHVLRRDLVLKDWYRRIKRRRGAKIARVAVMRRLATILWHLVKYQQAYQPGGGKNGKTTAA

SEQ ID NO: 220391 - protein, 318 aa, unidentified
MLIHYIDIAKRNFVIAVSSLSKTKTETNNPKGIAHTIEYLKKHKVALVVTESTGGLEIPAAKAIRRAGIAVIIANPRQTHQFAQSQPLTKTDAKDAKMPAFFAQMTAQKEDSQTMPYQPPTEAEEVLEALVNRRNQSADMRTAEKNRLHQVHETQVGSVKQLIAHFDRLIDELDKQIDDHTHTHFDGKAQVAEQIKGIGSITTATLMAMLPELGRLSHKRIASLAGIAPHPRESEETKFKSRCFGGRSAVRKALYMATVAATRFEPLIRDFYQRLLSKGKPYKVAVTACMRKLLTISNTRMRDYFAENDTAENGIRTA

SEQ ID NO: 220392 - protein, 429 aa, unidentified
MEEIDDTDLVVERVAALDLGKAGLDACVRVPHTHHPGRRMQELRSYGTTTAQLLELAAWLRHWHVQRVVMESTSTYWKGVYYLLEAEGFDCWLVNAREVKNVPGRAKTDRADAVWLAKVAERGMCRPSLVHPPEIRRLRDLTRYRRALVQDRTRERQRVEKLLEDAQIKISSVLSDLHGVTGRAMMDALINGQRDPHTLARLAKGSARKKTARLEEALRGFFTDHHAMILQMMLANSDRLSAQIAELDGRIEEAVSPFCAQSARLADIPGVDVMAAAELIAEVGVDMTRFPSAAHLVSWAKFCPQTHQSAGKSKSQGRGKGNPWLAGTLGRVVFANSRSETFLGARYRRLARRRGKQKAIVATGNSLLTVVYHLLLNSDARFCDLGPGYYESRINKHRRARDLATQLQALTGQHIVIRDGKAVITDTAA

SEQ ID NO: 220393 - protein, 455 aa, unidentified
MPKRTTSDRPELKPVNFGAAAIDIGSKMHMAAVNPACTDTPVRTFGTFTEDLHDLADWFKACGVTSVAMESTGVYWIPVYEILEQRGFEVILVNARYAKNVPGRKTDVSDAAWLRQLHSYGLLRGSFRPDAEIATLRAYLRQRERLVEYAAAHIQHMQKALMEMNLQLHHVVSDITGATGMRIIRAIVAGERNPDVLATYRDVRCHSSIETIRAALVGNDRHEHVFALTQSLELYDIYQAKMLDCDRKLEALIAALSNKGAKPGGKLSKPRVKTKQVNTPTFDVRTALYGVLGVDLTEIHGLGPSLALKLIGECGTDLRAWPSAKHFTSWLCLAPGNKISGGKVLSSRTRRSSSRAAALLRLAATTVGRSDTALGAFYRRLSSRAGKSKAVTATARKIAVLFYNTLRHGMSYSDPGADQYEQQYRSRVLANLQRRAKSLGFVLQAIPVDANPAVS

SEQ ID NO: 220394 - protein, 347 aa, unidentified
MDYFAGLDVSLETINVCIVNAAGDVLLEKKIAAEPAAIVHLLKTFGSPFKRIGLEAGPTSSWLYSELRAAGYGAICLECRHVKAGLSAMRNKTDRNDARGIAQLVRLGWFRQVHVKSEEAQRTRMLLVNRQQLLTKALDIENSVRGSLKVFGLRVGVVARRGFEARVLELVADDPILLVVTEPMLRVRQALLEEFERLDRLCQQLARRDPVCRRLMTVPGVGVVVALTYRTGVDAPERFSKSRDVGAHFGLTPKRYSSGQTDYDGRISRCGDEMVRTALYQAANVLLHHGRWSSLRSWAMRIAKRGSVKGAKVALARRLAVVMHRMWTDGTDFRWSDTSRMTAPTAA

SEQ ID NO: 220395 - protein, 391 aa, unidentified
MIYIGIDVAKDKHDCFITNSDSEVLFKAFTIANNLDGFNDLYQKIESVMDDVTKVKVGLEATGHYSYNLLGYLIDKGLPTYVINPLHTNLYRKSLSLRQTKTDKVDARTIASMLMSDVNLKSYSDTSYHNEELKSLTRYRFDKVKERAKLKTSVSRLVCILFPELEKLVPTLHIASVYALLSEFPSAKHVATAHLTRLTNLLSESSKGRYGKDTAITFRDSARASIGSNMPAKSLELKHTIKLIQELDSEIDEIENEIKIIMDEINSPILSIPGINYRMGAMIIAEIGDFNRFDSPDKILAYAGFSPSTYQSGQLDGAYAHMEKRGSRYLRYALYNATKYVCHWDPTFAAYLAKKRAEGKHYNVAISHAVKKLVRVIYHLEKTKQQYIKAA

SEQ ID NO: 220396 - protein, 376 aa, unidentified
MLYVGIDVAKNKHDVTALNVPGKTVLKPLTFSNNKAGFELLDLSLRQLNQDCLIALENTGHYAFNLLNFLHEQGYKVYTYNPLLIKEFAKSLSLRKTKTDKKDAHGIALKLLSDPNREQFQHDNRQVDLKILARHIHRLKKKQSDWKVQYTRCLDIIFPELDKIVGKHSEYTYQLLTRYPNPQKRIEAGFDKLIEIKRLTASKIQDILSVAPRSIGTTSPAREFEIIEIIKHYKRLIDKAETCVNDLMAEFNSVITTVTGIGGRLGAVILAEIRNIHAFDNPAQLQAFAGLDSSIYQSGQIDLAGRMIKRGSPHLRWALIQAAKACARFSPAFKAYLKTKLEQGKHYNVAIIHLAKKLIRTLFYILKKSCHLTNKK

SEQ ID NO: 220397 - protein, 405 aa, unidentified
MGKVFVGHDWAETHHDVYVEDGAGQRLGKARLDEGVSGVARFHELVSSFVDDPGEVTVATETDRGLFVGALVAAGYRVLAVNPMSAARYRERHSTSGAKSDPGDAFVLAELARTDGHHHRPVAADSELAEAVKVLARAHQSMIWTRQRQVNQLRSTLREFYPAALAAFDDLASSDALAVLALASTPSLGRGLSRSKIASALRRGGRQRRIDERAAEIQTILRADTLQAPGPVAEAMGASVRALVAVISEQVAQTARLEAELADHFELHPDAKIIRSLPGLGMILGARALGEFGDDPNRYTDAKSRKNYAGTSPITRASGKHHVVLARHARNRRLADVCYQWAFAALTASAGARAFYDQHRAAGDTHHQALRALANRLVGILHGCLRHRTPYDEHTAWGHRTAAAA

SEQ ID NO: 220398 - protein, 362 aa, unidentified
MAVNQRASAQGENRMRFYTKQHRHYCGIDLHARSMYVCILNQAGEVLVHRNVKACPQAFLEIVAPYREDLVVAVECIFTWYWLADLCAEEKIAFVLGHALYMGAIHGGKAKNDKIDSLKIATLLRGGTIPQAYVYPAGMRATRDLLRRRLHFVRKRGQLLAHIQNTNHQYNLPGFEKRIAYPANRDGVVEHFGDEAVRKSIALDVALVDRYDDLIAELEGYLVRKAKIEEPQGFQLLRSIPGVGKVLAMTILYEIHDIHRFDRVQEFASYARLVRCAKESAGKKLGTGGKKIGNVHLKWAFSEAAVLFLRHEARGKTLLARLEKKHGKGKALSILAHKIGRAAYHMLVRGRPFELEKFMATA

SEQ ID NO: 220399 - protein, 449 aa, unidentified
MGIDVACRAAHQASLADEQGRFVWSGRKFRTTTADLDRLWSMLPAGTDPSSVTVIMEPTRNAWVPLAAWFRRRGAVVVLVPPEQSADLRAYYSKHTKSDRLDSKVLARIPLLHPEGLHTTAGLGPGDALRRAVKLRSNLVKRRTSILARLDALLEILGPGWHGALGADLANKTPLRFLAHYADPHLVVRLGRARLSRFLIRYSRGSWRENKADELIAAARETLELWAGELDFPDLGDDIAIEARLALKLTDEIADIEVRIAALLDKADPAGIVCSTPGVGPILGAQIVGRLGDPSRFASLAAIRSFSGLVPKLDSSGLSGKHGGPTKSGDACLREALFMAAEQARRSDPSLAAKYHRLMTESGKHHNSAVCHLATTLLTRIAGCWRRGEHYVLQDVDGSPVTPEEGRAIIAQRYTVPAEIRVTRRTTGRAGASTSRRTEPHNAAARRLY

SEQ ID NO: 220400 - protein, 312 aa, unidentified
MKIICGVDISKAKLDACIEPGAIFASFDNDPAGIAELAAFCRQHQAGLVAMEATGGYERRAFSLLWEAAMPCAMTNPRSVRRYAEAMGVLEKTDRLDAHIIARFAHAKNLQPTPAPTPAQQRLKALVARLRQVTDDLTVQKQRRASLADNAEMLASINEVIALLKRQSRTLEGEIASMIDDDPLWAHLAEAWRSVKGVAGRTVARLMADLPEIGTYSNKAIAKLVGLAPLADDSGKRQGKRSIRGGRASVRSILFLVAAIAAKYDKTLAEFRDRLLAAGKEKMVVRIALAHKLLVRLNAKARDARAQYANAT

SEQ ID NO: 220401 - protein, 377 aa, unidentified
MGKHTRFVGLDVHAQTIAVSVAESTGEVRSVGTIPNRPDSVRKLMKKLGSAEGLRVCYEAGPCGYVVYWQLVGMGIHCDVVAPTLVPVRSGYRVKTDRRDALKLARSYRSGDLTPVWVPDTEHEALRDLVRAREAAKKDQLRARHRLGKFLLRQGRRAPEGVRNWTQKHLLWVKSQRFGQAAHEAVFVDYVHEVDHMAERVERLEKAITAAVESAPEPMRVVIQALQCLRGVKQVTASTMVAEVGDFTRFSHPRQLMGYSGAVSREASSGSRVRRGPITKTGNAHLRRVIGEASWSYRSRPSLYRDLRKRQVGHSEAIKAISWQAQHRLHKRYCRLVSQGKPPQKAVIAVARELLGFMWAIAKQCELELSEIKQSAA

SEQ ID NO: 220402 - protein, 358 aa, unidentified
MAMELSNKNWKLGFSNGEKIRLVNVVAGHLNGMQSAIARSKEKLGLSAKCPVYACYEAGRDGFWIHRCLSAMGVQNLVVDPASIEINRRKRHVKTDRLDAEKLVRMLMRYWLHNERTVWRVVVVPEEAQEDERRTHRERARLIRERTSHICRIRSLLVQHGIRPLKILGCDNSQMKDWQGKALPSGIQKEICHEQERLRLVNEQIKQLDAEQKEQLKMPITEADRKAAKMKTLKGIGQHDSCLLSKELFGWRKFNNRREVGAISGLTGTAYNSGDTVVEQGISKAGNRRVRSTMIELAWRWTFYQPDSELTKWFMQRFGSGGKRMRRVGIVALARKLLIALWKFVEFGEVPAGAVVRA

SEQ ID NO: 220403 - protein, 388 aa, unidentified
MIYLGIDIAKLNHFAAAISSEGGILIEPFKFSNDYDGFYLLLSKLAPLDQDSIIIGLESTAHYGDNLVRFLISKDFKVCVLNPLSTSAMRKNNVRKTKTDKVDTFVIAKTLMLQDPLRFISLKDLDYIELKELGRFRQKTVKQRTRLKIQLTSYMDQVFPELQHFFKSGVHQNSVYTLLKEAPTPNDIASMHMTHLTHLLQTASHGHFGKDTARGLRILAQKSVGIHDSSLSIQITQTIEQIELLDSQLFHTELGMANLVTCLHSVIMTIPGIGTTNGGMILGEIGDIHRFSTPGKLLAFAGLDPSVYQSGNFQAKKTRMSKRGSRVLRYALVNAAHNVVKNNATFKAYYDAKRAEGRTHYNALGHCAGKLVRVIWKMLTDEVEFNLE

SEQ ID NO: 220404 - protein, 345 aa, unidentified
MWIIGCDFHPGFQQVAIFDNQTGEIREKKLLHPSQATEFYRGLEGEVRVGMEAGAPCQWFRRLLQECGHQLWVGDAARIRAAETRSQKTDRRDAELILRLMLEGRFPRIWVPTEAERDVRQLLMDRHHRMRMRTKVKNQLQSLALNQGLQKGRRLWSAAGLQQLRDLPMMEHAGRRRDQLLQTMGSLDQQIAALDVLVRREAEAREEARRLMTHPGVGPQTALAMVLTLGEVSRFASSKQVASYLGLTPREHSSGGKQRLGHISKQGSSFVRFLLVEAGQTAVRGDAQLQRAYRRLATRKNNRALAKVMVARRLAVRLYWMLRNRWTYAELARHVGKPESFRGEQ

SEQ ID NO: 220405 - protein, 410 aa, unidentified
MGWHEVACGLDVHRSSLVACLVRGVPGGPREVEERRFGTTGAEVTAFRVWLEEAGCQTLGMEATGVFWRPVYRELEGRMRVVVANPAHVKAIRGRKTDRKDAAWLAGKVQEDGIPASFIPAPEVREGREWARLHTNLVRARTQARNQTLKLLLGAGIPLSAVLSDVFGISGMGLLEALAEGRTAWEELEGHLRGRARLKAGQIRLALEVRLREAEREQLSFQLKRLKALEEQVAEVDGHLRTWSEAYRAKRVLLTTIPGIGELAAQLVLAEVGPDLSAFPSAKHFAAWLGLAPANNQTGDRQRPAGTRKGNHRLQSLLVECAQSSARTKGCSLRTKYQGLKMRMPPQKAIVAIAHKLALIIYRVLVDEVPYREQEFDSTPSPSRARRLRQAIRLINEAGGSVCMSKQFNE

SEQ ID NO: 220406 - protein, 388 aa, unidentified
MNRILKIGMDVHSTNYTLCAMEPTIGSEDRIYGEIQVAPDYKEIVAFIASLKLKLGLHHDYSIECGYEAGCLGYTLYHQLANAGIKCVILAPTTMLTQQGKRIKTDKRDARLIAQCLCYGGYHPVYIPTGEDDSVKEYLRMRDDHKVALKKLKQQMNAFVLRHGYQYPGTKWTHKHVGWLKKLELDPMYRETLNEYMASYEEQEAKIERYDQRIEEIAAEVRYQENASKLGCFLGIRTHTALSLIVETGDFKRFAKGNTYAAFLGLAPGERSSSTNVNRLGISKAGNSHLRSLLIEAAGGICKGAIGHKSKELRSRQRGQSAEVIAYADKANTRLRSKYYKMIRHGKKRNVAVAAVARELACFIWGMMTGNISKYPGSGTSDPAVSQG

SEQ ID NO: 220407 - protein, 332 aa, unidentified
MKYNTFIGVDVSKLTIDAHLHLINVSKTFSNNEKGFASLLAWVKKHGKVSDLTKAIIAFEHTGMYSIKLAMYLNEVNVSFAMLPALQIKQSIGIRRGKSDQIDAQRIAEYACLHRETLQATILPAKGILRLQSLLTLRDRLVRDRGGFEATWKEQNKALDEKEYKGMFQIYKSLIQNLTLQIKKLESQIKAVIDSDEKIKVNYQLLTSIKCVGPVLAANMIACTHNFTRFTNWRKFACYVGTAPFEHQSGTSIKGKTRVSSLSNRQIKKLIHLVAICACAYNPELKDYYKRRVSEGKNKMSTLNVIRNKLIARMFAVVNRGTAYVDLMKYAA

SEQ ID NO: 220408 - protein, 409 aa, unidentified
MNENGKRYIGLDVHKYYLIALGVNPELEVVLPARRVELTHLEAWMKKTLTRQDVVVLEMSTNTWQIYDELVAHAGSVTVVHPPHVALITRSQVMNDKIASSILARLLAKGLLVGIWVPPQEVRELRGLVAQRQKMTRLATRAKNRLHAVIQRHHLAAPEGNPFRKSHNEWWLALPLGRLEKMNLQSDLETLQFAEKQQERLTEEMTGIVAENEEIGRLLHLAGFGVITAVTVYAAIGDIRRFAEAKNLVGYAGLGARVHDSGMMTHTGKITKAGRRDLRVALVEAAHVVAHSHPHWQAELARLQPRLGYNKAIVAIARKLLISVWHVLSRKVSDRFAEPEKVSQKMLRFAYEVGKAKRAGKTAAQFARERMDTLGLGRELTSIPWGSKKPIPLPPSQLLEKKVSDVPNR

SEQ ID NO: 220409 - protein, 345 aa, unidentified
MKKVMAGIDLHSNNLVIGIMDMDGKRVASQKLSCKLKEVVKFLSPFKTRLEQVAVESTYNWYWLVDGLQRLRYPVVLANPAGMEQYSGIKHADDTNDAFFLAELLRLKILPIGHIYDEQLRPVRDLLRRRLSLVHHRTALMLSFKSLYTRATGKEMTLSQLKELEIKQAQDLYDHPANQLIAGMQIKHIEQLTESIEKIEKAVLDCARELPLYTKLTTLPGVGTILGMTITMEVGDIKRFAEAGNFASYCRTVEAKRTSNSKKKGENNSKCGNKYLAWAFVEAANFARRYDEQCRRWYERKAAKKSKVIATKALACKLAKAAWHLMALGTDYEAKRMFGQPATTQ

SEQ ID NO: 220410 - protein, 367 aa, unidentified
MRKHNIARESTATSKRAKRKLTVGIDLGDRSSCYCMLDEQGEVLAEGSLATTKKGFAQVFGSKPRSRVALEVGTHSPWVSRCLADLGHEVIVANARRVRLISDSTRKDDRLDAKTLARLVRIDPELLSPIRHRSAQAQTDVMVIRARAALVEARTMLVNAARGLTKSYGERLGSCGTGQVREELAKSLSEPLQNALKPLLAEVESVSARIREYDEQIEAIGKSRYPETELLKQVHGVGALTALTYVLTVDDPYRFRRSRDAGAYFGLRPRRRESGDSRPQLRITKQGDAYMRKLLVQCAHHILGPFGPDSDLRRWGLELAARGGKNAKKRALVAVARKLAVLLHKLWATGEVYEPLHVRNRSKTVAA

SEQ ID NO: 220411 - protein, 375 aa, unidentified
MTTIARLGIDTSKSLFQLHGVDEKEGAVLRKQVRRGQFLAFVAKLAPTEIGLEACGASHHWARQLQALGHQVRLLPPQHVKPYVGLNKNDKIDAAAICEAMSRPKIRERFVAVKSAEQSAAQMLLGTRDGLLHRRTQLSNTIRGHAAEFGLVTPKGLAHVKPLLERIAADETVPALAKELFATLGEEFAELGPRIAQLDKKLKAFQRSNEVCRRLIEVPTIGPVIASSMVVKISNPAAFRSGRRCAAWLGLTPKDHTTAGRMRHGGITRAGDEGLRAALVSGATAYIQQVKRGRTRPSPWLAGLLKRKPEKLAAVALANKTARIAWKLMVSGQRYDRDLAEAREGLGATQHGGSAPSPSLHHHIAAHGATAITAA

SEQ ID NO: 220412 - protein, 338 aa, unidentified
MVIIGCDFHPSGQQVYGIERESGEVVAEGWIAHSGKEVDQFYAALPAGAVVGVESSGNLLWFERKLAQYGHRLRIGDAAQIQAHEVRKQKHDRRSAELIARLLWEGRFPDLRWVPSLAERDLRQLLLHRDKLVRMRTQVKNQLQHIAMNQGQQKKRQLWSQGGRALLEKLPLEPWTARRRDDLLRWLDQLDQECASLDEAVEQAAAANAEAGRLRTHPGIGPVISLAFVLTIGPITRFQRSRELVSYLGLNPSEQSSGERRRLGGISQTRQRVSAALADSRSANGGARRCRISAPISTPGGQETSGRGQGDGGAEAGGTPVLDAEDAADVSRTGSYAG

SEQ ID NO: 220413 - protein, 341 aa, unidentified
MKVNTLGIDLAKNTFQLCGMSKRGQIIFNKKLKRERLVSFVNKLDKASDFTVAMEACGGAHHVARGLIAQGWNVKLISAKFVKPFVKSNKNDAKDAEAIAEAAQRSNMRFVGVKSVGQQDIQAIHRVREGFIKRRTALANEIRGLLLEYGTVIPQGIGKLRKSIPVILEDGDNGLTVNFRKLLRGLFEELIRCFEKIEELDKELQIIYTTNENCKRLSKIEGVGVITATSLVAAVGDPKAFKNGREFSAWLGLTPRQCSTGGKTTLLGITKRGDSYIRKNLIHGCRAVVYRAGGKDDKKSNWIKNKLLSKGVNKTSVAVANKTARAIWAVLAKEEEYRRAS

SEQ ID NO: 220414 - protein, 313 aa, unidentified
MAEDGLVVGIDVAKGWLDVAILPTGESFRVGNDTDGWAELIKRLKRRSVRAIGVEPSGGYERRVAKALGKAGLPVRNVNPHKLRHYARALGRLAKNDRIDAFLIARYTAELPTRPLHFDPIIEQLADLVVARRQLTEDKVSLGNQLEQVRDATVKRIFSRRLRRIETDILLLNKRIAEVVASHAHLAARDRLIQSFLGAGPVLSHTLLALAPELGQASRREIAALIGVAPYDHDTGVLKGRRSIWGGRSDVRRVIYMAAMTASRFNPVLKAFHQRLIDAGKPPKVAIIAVARKILTILSAMLRTGQQWSPARA

SEQ ID NO: 220415 - protein, 315 aa, unidentified
MVTGIDCSKDYFDIAVLREGKITFKSRFTNNSQGFMDMLPHVQDTHVVMEATGPYYFQLARFVHDSGLRVSVVNPLIIRRYAQMRMSRAKTDSKDAMVIAEFAQMTSPKLWTPPTEEIQKIRNLETYLEGLKQRRQMLCNQLHAFESAGTIEQLLYNEIKEEVESYDKRIKDKECEIEKLIKQNYAEMAVNIRSIPGIGPRSVSMLIIATDGFGMFENYKQVISYFGLAPRIYESGTSVKGKGHICKMGMGQIRKVLYMAATSAIRCNKACKELYERLRGKGKPYRVALIAAVNKLIKQVFAIAKSGEPYKAQFG

SEQ ID NO: 220416 - protein, 391 aa, unidentified
MVCVGIDVAKDKHDCCILDSDGTIRADCITIPNNMDGFKQLLQTIRDCTKKSDKIKVGLEATGHYSYNILGFLLDNDLAVYVMNPLHTNLYRKSLSLRKTKTDRVDARTIATMLLSDVDLKSYTDTAYHNEELKSLTRYRFDKVRERAKLKQSVSRLVTILFPELEKLVPSLHIASVYALLSEYPGAKQISEIHLTKLTNLLATASKGRYGKDKAIQIRDAARTSIGSVMPAKSLELKHTIKLIRELTSEIDEIEVSIQKIMDELNPPILSIPGVGIQSAAMILAEIGDFSNFESPDKVLAYAGCSPSTYQSGKLTNCYAHMEKRGSRYLRYALYNATKYVCHWNPVFAEYLAKKRAEGKHYNVALSHATKKLVRLIYALQKSGKAYLVAA

SEQ ID NO: 220417 - protein, 359 aa, unidentified
MSKQKLNQKRNKDNLKFTKQNVLQSYDHYIALDWSIKNMAIARLKPKTNEPKIIDVPSDIKELKLYLKNLQGTKIITIEETTTSHWLYVELYDYADKIIICDPYRNRLLSDGPKNDKIDAGKLCLLLKNGMLKEVFHSNDRLYELRKLVSYYDDEVKAGVRLMNQKSALYRAENKSYKKKETIKDDSINKFIVSQLDEKINLYIDKKENYEKEFYKITKGNKVIKSLMSIPGIGIISGVTILSMVIDARRFKSGNHYLSYCGLANHKKMSGGRNYGKRLPRYSRKLKSVYKSAAVRVISTNNPIREYYDYLVKEKSLTEQNANNAVARYIARVSLGIIKSGKKYKPYNWRENKKRNDAA

SEQ ID NO: 220418 - protein, 409 aa, unidentified
MEQSHISFEQVVSRGCGLDVHQENVVATISGDGLKEQTRTFSTFTSSLKELVRWLQEFGITHVAMESTGVYWKPVFNVIEPHFELILVNARHIKHVPGHKTDRNDSAWIAKLLLSGLLKGSFIPPQFTRELRELYRYKRKIIGQRVSEYNRLQKVLEDANIKLSNVVSDVFGVSGWAMVEAIIEGEQDPLVLVNLAKGRLKQKKQQLILALEGNISEHHRFMLGFSKTAILQLNELLGQLDNRIDQYLSHWEEEIKLLQTIPGVQKQTCTAILAEMGADMSAFPNQHHLASWCGLCPGNNESAGKKKSERITHGNRSLKTALVEAAWAATHTKDSYFKRRYYALSVRRGKKRALIAIAHKILVAAYFILKNRVPYMEPDNQEWQLKRKQAQINNYLRRLRELEALPPSQ

SEQ ID NO: 220419 - protein, 457 aa, unidentified
MTRRKHSRPARDIAPVHPHAAAVDIGATLHVAAVRPGCDPEPVRTFGTFTTDLHRLADWFEQCGVETVAMESTGVYWIPLYEILDQRGFEVVVVNARDAKHVPGRKTDVSDAAWLQRLHEYGLLRASFRPKGAIATLRSYLRQRERLLEGAAAHIQHMHKALTEMNLQLHHVVADVTGVTGLRILRALVAGERDPDTLAAYSDPRCKAPAETLRAALVGNYREEHVFALAQALELYDIYQAKVAACDQRIEAVLERLKAANPPPAAALPPARPRRRQANEPGFAVREALHAILGADPTQIDGIGPSLALTLVGECGTDLSAWPSAKHFTSWLSLAPHNKISGGKVLSARTRRSGSRAAALLRLAAVAVGRTATALGAFYRRLAARVGKAKAVTATARKIGVLFYNMLRHGMDYADPGASAYEARYRQRVLSNLRRRAKSLGYVLQKADPASAAIAVS

SEQ ID NO: 220420 - protein, 372 aa, unidentified
MNYNTVYVGMDVHKESFSLCAYTIEAEKASHYQRTEADYKKVLNYLEFLRTIYGDDANFICGYEAGCFGYTLYHQLTANNVKCIILAPTTMLEQRSKKRIKTDRRDAEIIAKCLAQHNYSPVHIPTAKDEETKEFLRMRDDHKLALKKVKQQILAFCLRHNYRYDGKSHWTAAHLKWLKALTPEALYKEILDEYLLTYQTLSDKIERLDKRIEELATQDEYKEAVKKLCCFIGVKTHTALSVLVEVGDFKHFASAQHFASYLGLVPGEDSSGDDQNRLGITKAGNRHVRLLLTEASQCYARGQVGFKSKELKSRQSGNTPAVIAYADKANERLRRRYYKMVLNKYKKHNVAKTAIARELACFMWGMMTDNIA

SEQ ID NO: 220421 - protein, 349 aa, unidentified
MNEVSTQPPTVIVGLDLGDRFSQAYFLDGATGSVLREVRLRTTPGDLERVLGKAGRMRIALEVGTHSPWVSRLLAKLGHEVLVANPREVRLITKSRHKSDHFDARALARLARLDPELLAPVLHRGEEVQRDLAVVRARAAAVSARTMLVNHLRGAVKSLGGRLPMCSSERLHKIASAALPAELSSALQPIVETLAALAQTIRSYDAAIDALNKTHGATSTLRQVSGVGPVTSLAYVLTIEDPHRFRKSRTVGAYLGLAPGTRSSGERDPQMHISREGDPFLRQLLVQSAQYILGPFGKDSDLRRHGLALALRGGKAAKKRAVVAVARKLAVLLHRLWITQATYEPLRAA

SEQ ID NO: 220422 - protein, 416 aa, unidentified
MNAPSTTEFAAFVGIDWADRKHDVCLLPAGASKPEVSVLPHRPEAIAAWAEGLRQRFGGRPIAVCLEIARGPLVYALQRYAFLVLFPVNPATLAKYRKAFHVSGAKDDPLDAQLALDLLLTHPERLARLQPQEPEMRTLQELVEQRRALVGDVGRVTNRITWALKQYFPQALEWFEDKNTVVFCDFITRWPTLKHAQRARKARLIAFFHEHNVRYPHIIEQRMRGIACATALTADRAVIEPNRLLVEALVQQLRGLLQSVERFDREIDALARTLPDYALFASFPGAGTIFTPRLAAAFGERRERYGSADEVQKYSGIAPVTERSGNKCWVHWRLHCPRFQRQTFVEFAALSLPHSYWAKIYYEQQLSHGSSRQAALRALAFKWIRVMYRCWQNRTPYDEARYLNALKRRGSPLVTG

SEQ ID NO: 220423 - protein, 370 aa, unidentified
MRDVITHVALDAHMRMLQVAMLLPGSDVPIEWQVANEGGAIRRMVKRILKEAKGEVRMCYEAGPCGYALQRTLKELGVECIVIAPSLIPVKPGDRIKTDKRDARKLVGLFRAGLLTEVHPPTQGEEALRDLSRCREDARADMGRARHRLGKMLMRRGIVWEGGKKNWSQAYMKWLRTLTFAHPADKLVFEDYVLAIEHLEERLKGLESALEAAAQKDPYRERVGALRCFQGIDTVTAVTVVAELHDFRRFQSPRELMGFLGLVPSEHSSSDSRRLGSITKAGNSHARRVLIESAWHYRHAPHLGPTLRKRREGQPAAVIAIADKAAQRLHRKFAKLDARGKPRPKIVVAVARELVGFLWAVLYPAAVQAS

SEQ ID NO: 220424 - protein, 340 aa, unidentified
MSLYGGIDLHANNSVIALINEQDEVIYRKRLPNALPTILEQLAPYHTEMKGLVVESTYNWYWLVDGLMEADYRVHLANPAAIQQYSGLKYTDDHSDARWLAHLLRLGVLPEGYIYPKAERAVRDLLRKRAHLVRQHTANVLSVQNILVRNTGARFSVKRLQELTKQELKSLLAEEPQVLAVTSSLAVLDCLRQQIKTLEKTVHKRLHHTPAYEQLLTVDGIGTILAQTITLETGAISRFPTVGNYASYCRCVDSTKISNGKRNGTGNVKNGNPYLAWAYMEAAQFAMRFQPAAQRFYQRKLAQSRNNTVLARKAVAHKLSRACYYIMRDLVPFEAAKAFG

SEQ ID NO: 220425 - protein, 370 aa, unidentified
MSEPTTLYVGLDVHKDSIAVAHAEAHRADPPHFVGTIGTRQADVDKLVRRLHSKASTLVFAYEAGPCGYVLHRYLTGRGLDCWVVAPSLIPKRPGDKVKTDRRDAVELARLLRSGDLTRVYVPGVEDEALRDVSRARDATLVTLKAAKLRLKSFLLRLGLHYTGRADWNEAHRRYLAKVVCPTAAQQIVFQESVRAVDEQVERLRRVEQELLELAPTWRLYPYVEAVQALRGVQWIVATTVVAELGDLTRFDNPRQLGAFVGLIPSEYSSGESRRQGGITKAGNGRARRALIEAAWAYRYNPKISVQIQKRLESLPKPIQDIGWKAQLRLCKRFRRLRARGKHANIVVTAIARELLAFMWAIAQEVPKTS

SEQ ID NO: 220426 - protein, 343 aa, unidentified
MQTITTIGLDIAKSVFQVHGVDAAGQVVIRRQLKRRYVLAFFQKLPPCLIGIEACASSHYWSRELQALGHTVRLMPPAYVKPYVKRQKNDATDAEAICEAVARANMRFVPTKTPEQQSCLMLHRTRHLFIRQQTAVINSIRAHLAEFGIVAPVGRKGVTELLHIVADPSDKRVPEVARACLAALGNQLLSLKEQIVEFDRMIMVWHRSNETSKRLHYIPGVGPLLATALVASVADPRTFRSGRNFSAWIGLVPTQHSSGGKDRLGSISKQGDRYLRSLFVAGALAVIRYAKIHGTKHRPWLTALLTRRPTKVAAIALANKLARMAWAMMARGERYRQPVALAA

SEQ ID NO: 220427 - protein, 439 aa, unidentified
MTLSLPEMVLAFDFSLDRLDVALRGPAPQWLWGQRAYANNWAGYQQLKQDLLEELQRASPVRLTAVGESTGPYWWHAFYQISHDAELAPFDPQLALLNPAHVKNYRKALAEQDKTDPDDARLIDHYYRAVGVKQPYQFDDRYLRLRTFSRAYARVMHTLAAEKAYFLSVLYLWGSEYQRREVQPFSDLFGATSQFILDAYADVQALTDIPLDELTALLVQRSHNTFREPYDNARKLHQVAQDSYPVPDALREALYQVLQLTLTHIRLLSDNQQAYRRLLTTELATLPEAQRALDFKGLGPVLVAGCLAEIQDTTRFTTGAKFDRRTQRDRPRTYRDGQAAVAKLAGLWWPKQDSGRVQGLQPRLARERNPYLRFWLVQSAYTLQRYQPDYQRFYQKKYREAHDHHHRRALILTARKATRLIFALLHKGRLACLEEGVLT

SEQ ID NO: 220428 - protein, 353 aa, unidentified
MVEFSKVEAQEVVGLDLGDRSSQICRLDRKTGVVLEEKRLSTTTASVQRYFSTLAPQLVALETGTHSLWMTRLLKSLGHEVIVANPSKVRAISSSLKKTDERDARCLAQLVRVDPQLLSPVEPRSEESQQAIAVVRAREGLVKGRTMLINQVRGMVKSFGFRLPSCSSAAFACKAQQDKNLPPLLKQTLEPSLRVITEMSVEIARSDKEVEALARRWPVTHRLRQIKGVGALTALVFVLTLGDPLRFARSRAVGAYLGLVPGSRSSGQSTPQMPITKQGDRMLRRLLVQASHYVLGPFGQDSDLRRFGLRLAERGGKSGKKRAVVAVARKLAVVLHRLWVSETDYEPLRKAAA

SEQ ID NO: 220429 - protein, 391 aa, unidentified
MERPMAQQLDDLSRSLTPLEQDSTIMAVIEMSQASWLVAGIVPGIERHPLKKLEPSEVELLRLFMRWRAEATQNGRTITRIVVAYEAGRDGFWLARWLRARGIEAYVIHPTSVAVSREHRRAKTDRLDTGLLKRVFLGWLRGEPDHCHMAAIPTLAEEDAKRPNREREGLVRERTRLVNRMKSCLVRFGVRTFKPTLRNAPDRLATLRTPEGVPLPPNTLLELRRDMARLRFVMDQIKEVEEMRAQELERAPQDKTHVMVRLLARIMGIGLETADMLVHEVLARTWRDRRAVARYAGLTGSPDESGSRRREKGLAKAGNARVRRGMIQLAWRFLLHQKESALAQWYRARTADARGGTRKTLIVALARKLLIALWRMVTTGEVPAGVVLRAA

SEQ ID NO: 220430 - protein, 366 aa, unidentified
MKKISTMQVFSNEILKEQKLTIGMDLGDRWSFYCILDEAGKIILEQKLPTTPEAMKQTFGKIPRSLIAMETGTHSPWVSRLLTELGHEVIVAHAQKVELITKSNRKDDRHDARTLARLARIDPELLGPVRHRSAQAQIHLTVIRARAELVGARTALVNAARGLVKPFGERLPKCGTQQVSRELGAGLSAELRDVLEPLLREIESLNERIKEYDERMEKIAKEVYPEVSLLKQVKGVGTQIALTYVLTIEDPHRFLKSRVVGCFLGLRPGRRNSGESEPQKGISKEGDRYLRTMMVQGAHYILGPFGEDSDLRRWGLKLAERGGKNAKKRAVVAVARKLAILLHRLWVSGEVYEPLRNSQKAVRAVA

SEQ ID NO: 220431 - protein, 375 aa, unidentified
MPDVTPSIAPADVRLWVALDVHKFSIVAATLPPAGGTPQLTRIETTERAIRRFIERLGGPDGLAVAYEAGPGGYALWRLLAGMGVACDIIAPSLVPVRAGDRVKTDRRDAKKLVRLLRAGELSFVSPPTPELEGLRDLLRCRDDLRCARTAARHRVAKQLLRHGRVYREGKTSWTLKHRAWIARQRLDEPLAQLALQQMLIHLDGIDRQLEILDKRLDEIARDERWASQVQKLRAFRGIQTLTALGLIAEIGDFARFSHPRELASWLGITPTEYSSGDSQHRGHITKAGNRHARRLLVEAAWHYRHPPRRPATGPVTDRAWNAQVRLHHRYRHLTAQGKRPTVTTVAIARELAAFIWADMTNQPLARHDHQEAAA

SEQ ID NO: 220432 - protein, 334 aa, unidentified
MENIALIGIDLGKNSFHIHCQDHRGKAVYRKKFTRPKLIEFLATCPATTIAMEACGGSHFMARKLEELGHSPKLISPQFVRPFVKSNKNDFVDAEAICEAASRPSMRFVQPRTESQQAMRALHRVRESLVQDKVKTTNQMHAFLLEFGISVPRGAAVISRLSTILEDSSLPLYLSQLLLKLQQHYHYLVEQIKDLESQLKRKLDEDEVGQRLLSIPCVGTLTASTISTEIGDGKQYASSRDFAAATGLVPRQYSTGGRTTLLGISKRGNKKIRTLLVQCARVFIQKLEHQSGKLADWVRELLCRKSNFVVTCALANKLARIAWALTARQQTYVA

SEQ ID NO: 220433 - protein, 492 aa, unidentified
MNSIYTNRSQVVTQMLKDVEAVKILLVPLDFAKEKHVVRICDATGDYLHKHPIEVTNDKAGLDYLCQRINTACGRRGILKKHVLIASESPHSYCLHFMHELQDKGYIVLRVNAAEAKKFRKNSIASSDTIDLDGIANAVLNRRARPLDEEQEIYSSLKRSSRYYKRYKKDFSRQKNRIGKLIDELFPGFLNIRKSGVEPYSRFSIELMSKGFSIYKIRKMKPANLVAKMRKYHIHNPVQKASKLQAHAAASITPSKLIVESLSRSLEHAIQLYKALEGVCDSEWEQLALNLVQTPYSSMLSLPGIGVVRASTCAAEFGHPDTWNNLNKMCSYAGIAPRSMQSGGPDKPAIVLGLPKKCNRRLKDALLQAAHHTGMAPHAAGALLPQFKEHKLMRHYKAVKARNGKSGLSTARMIIRKMRGMVRGETIYLPAKELSVYELKIYVTSTFEKIHNTLKDIDFDSIKPENNCLIKMEEEWKLLIESLEQKDSDINL

SEQ ID NO: 220434 - protein, 347 aa, unidentified
MNFYNNTHPYYCGIDLHARSLYVCILDQDGNTCCHKEISAAPDKLNDLLKPYIGNIVVGVECMHCWYWISDFCEDIGVDFILGHALYMKAIHGGKAKNDKIDSFKIAKLIRGGNFPLAYVYPKVMRATRDLLRRRMKIVRHGADLKAHVVNTTSQYNLPPNKVNLKDVSAREQLKNTFSDRSVQKNIDLDIVILDCYAEQLGKVEWYIQQQAKQHNPKHFHLLKSVWGIGPILALTIIYEIGDIKRFESVQKFASYARLVKCKAESAGKTYGTQGNKIGNAHLKWAFSEAAVLYLRGNKKGQKYLLRLQKRMSKAKALSALAHKIGRCVYFMLKNETVFDESRFLTG

SEQ ID NO: 220435 - protein, 350 aa, unidentified
MLIIGCDYHPGFEQIAYVDSETGEFQERRLKHPEEAEMFYRTLWEQGVKVRVGMEASGHSRWFERMLEELSFELWTGDAAKIRAKRVRKKKTDREDARHILQLMLKDDFPKIWVPTWQNRDVRQLLWHRHRMVQTRTRIMNQLQAVAINEGVRYKKRLWREAGRKQLESLSLAPWASRRRKDLLEVLDRINPTIAELTQAIEEEAEKCPQARRLMTHPGVGALTAVAFVLIIGEANRFDCGKQIAAYLGLVPEEDSSGERRRLGHISKQGNSLLRFLLVEAAQATARSDGRWRNQFFHLAQRRGRKIAKVAMARRLAVRLYWMWRRGWDYEQLQSFGSRAGQPGYPHGVQ

SEQ ID NO: 220436 - protein, 346 aa, unidentified
MKVLIGVDPHKASVAVAAVEEAKGELLERAVFQQDRAGSRALERWATRFSERRWAVENAGGLGRYLAGRLAASGESVVDVPPKLSARVRVLSTGNARKNDELDALATALAASRNERLAAVDPEAASEALRLLSERREDLVAERTRALNRLHALLRDLLPGGVAGKLSAARAARILRGIRPKGASDRLRRRLASEILRDVRTLDTKIADLDERIEAEVEASGTTLTEIFGVGPILAATIIGAVGNAARFPSKAHFASYSGTAPLEASSGGAVRHKLSLLGNRKLNYALHMVAVCQARSDARGGAYYRKKIAEGKSRKEALRCLKRRVCDAVFRSLVADSQAPSRSAA

SEQ ID NO: 220437 - protein, 336 aa, unidentified
MEQFIGCDAHKRYSVFVAVGEDGGCSPAWKVSHSEGAFEAFLEKLPEGSEIALEASSSYYWMVAAMERTGHHPHLAHALEAKHRMGKTHKTDKLDASGLGILLRNGTLPEVWIPPAELRDQRELLRLRMQFVQQRTRWKNRIHGALTRYNEHVGVTDAFGVRGREQIARQLGELPGHTRQSVEQQLAVLDFVERQIEDCERRLAGLLEPSEEVRLLRTLPCVGPILSAVLWLEIGDVNRFPDAPHLASYAGLVPRVRASGGHTRLGPVGRDVNHHLKWAFVEAANLVAVNQRRRGPCHVLELYQRLKKRKNHQKAVVAVGRHLAEAAYWILKKREV

SEQ ID NO: 220438 - protein, 393 aa, unidentified
MALFVGIDVSKEKFDACGIGEQGKKAFSLSCSMNREGFDKLILQLPAVGTASLLFGMESTASYHIALFSYLTAKGYQVALINPLLIANFAKLSLRKTKTDKKDAFTIAQFLLLRREALAVYTESPHLTELRDLARRRERLVDQMTSLKNDIKRILSVTFPEIETITGVFTKSTLRLLTQFPSAYAIGKAGYDAVAGIVVSRSRGRKSSASVETLMNAVTSSVGVASPAKDLILKQEVSLLLHLEEQAEETMKLMRSLCDEKMEKDMEILTSMKGIGEKTAVNFLIEMGGDIKAFGDYKKLIAAAGLDPTTYESGKYKGKSKISKRGNSHLRRVIWIMTVRVIISNGLFRAYFFKRRKDGLIYKMAVLATAHKLLRVMFSMLANERCFESERRK

SEQ ID NO: 220439 - protein, 385 aa, unidentified
MRDKTIVPREYDVFAGLDVDKKSIAATFSSHHGFIRSLSMPYNVEHLLNHVRNHFADQKVAFAYEAGPTGYGLYDGLAAQGYTCLIAAPSMIPRAPGQRVKTNRLDSKALSESLRGGQLKSIHVPSPLYRQLRHLTQLRDTMMSEAVGMKQRIKSLLLFEGITFPPAPAASQWSLIVKAKLRKLPCSNTVRFKLDQLLDSLEFAEKQIFKTTKEIRRFCQTDPELSQCIEYMMTVSGVGWIVASQLVARIGDWRELENIRQLGGFLGLVPMEHSTGDKTDRGPIPHTGDGRLRSKLIQASWSAIRKDGELREFFRSVCQRHPRKVASRVAIVAVARKLSVRISVVLMQQRPYEVREKVHSAPLTQEETSPQGTTRRQREPGEKNS

SEQ ID NO: 220440 - protein, 352 aa, unidentified
MTVTNLARSITGGVDTHLDVHVAAALDERGTLLGVESFATTESGYKKLLGWLSDFGTVELVGVEGTGSYGAGLTRHLQGENVRVVEVDRPNRQRRRLKGKSDPQDAITAARAALSGEAAGEAKTRDGNVESMRVLRVARASARKARTQALNQMRTLVSTAPDPIRAELRGLSVFNLLERASSYRPGAKRDIVSLTKFTLRMLARRALTLEEEISEIDAILKPLVKETAPELVATLGIGTDAASALLVAAGDNPERLRNEAAFAHLCGASPLDASSGKNQRHRLNRSGDRQANSALWHIVLTRMVYDPRTTEYINRRRTEGLTKKEAVRCLKRYVAREVFSLLPHDTLGLDSP

SEQ ID NO: 220441 - protein, 412 aa, unidentified
MQTLVERGCGLDVHQATVVACLLVALKNGKITKQIQTFNTTTRELVKLREWLLAEGCTHVAIESTGVYWKPVFTILEGSFELVVANAQHVKKVPGRKTDVKDAEWLADLLCHGLLRSSFVPPKPIRELRDLLRYRRKLVESQSAERNRLLKLLETANIKLSSVASDVFGVSGLLMLRALVEGKATPAEMAQSAKGRLRNKVQDLELALEGKIEEHHRFLLQLQLHRLQTVEKDLDELEQRIQEKLQPYATQQTLLQEIPGVDRTVAAVLIAEMGVDMSVFPSVSQLASWAGLCPGNNESAGKRKSSHIPKGNVYLKTALVEAANAAARAKGTYLRDKFYRLKARRGYKRAAVAIAHKSLVAVYHMLSQQVSYNDLGDLYLDKLNKSHLTRNLVHRQERLGYSVTLTPQQEAA

SEQ ID NO: 220442 - protein, 376 aa, unidentified
MLYVGIDIAKNKHDVTALNVPGKTVLKPLTFSNNKAGFELLDLSLRQLNQDCLIALENTGHYAFNLLNFLHEQGYKVYTYTPLLIKEFAKSLSLRKTKTNKKDAHGIALKLLSDPNREQFQHDNRQVELKILARHIHRLKKKQSDWKVQYTRCLDIIFPELDKIVGKHSEYTYQLLTRYPNPQKRLEAGFDKLIEIKRLTASKIQDILSVAPRSIGTTSPAREFEIIEIIKHYKRLIDKAETCVNDLMAEFNSVITTVTGIGGRLGAVILAEIRNIHAFDNPAQLQAFAGLDSSIYQSGQIDLAGRMIKRGSPHLRWALIQAAKVCARFSPAFKAYLKTKLEQGKHYNVAIIHLAKKLIRTLFYILKKSCHLTNKK

SEQ ID NO: 220443 - protein, 345 aa, unidentified
MELHTIGIDLGKTVFHLVGLDLRGEVVVRKKFSRTQLLRFTANVHVGLIGMEACGGSHFLGRALREQRHEVRLIPAQYVKPYVKTNKSDYIDAEAIAEAVARPTMRFVPIKTDDQLDMQSLHRVRERWVMRRTAVINQIRGLLLERGITLRKGRPHVDAALPLILEDADANLSGAVRLLLTQLKLDLDQLSVRIDEADAVIQKTAHENEACRRLVAIPGIGPVTATALIAAIGNGGAFHKGREFAAWMGVVPREHSTGGQQKLLGISKRGNSYLRRLFVQGARAVLQQRTKQSSGLSAWLAQLTSRTHRNVVAVALANKLARIAWAVLAKNERYRPSVVAEVAAA

SEQ ID NO: 220444 - protein, 380 aa, unidentified
MKMNVRFLGLDVHAETIAVAIAEPEGEVRSLGTIPNRAESIRKLIHKLGPVEQLKACYEAGPTGYVLYWQLAELGVVCDVIAPTLVPMKAGDRVKTDRRDAERLARSLRSGDLTAVWVPDAASEALRDLVRAREAAKQDQLRARHRLSKFLLRTGQRPAAGVKAWTEIYMAWVRRLRFEQVAQESTRLDYLHEVEHMGERVRRLEQAIAEAVKLASPAMQQVIGGLQALRGVAQISAVTIVSELGAISRFASARQLMGYSGTVPSEDSSGQRTRRGSITKTGNAHLRRIAVEAAWSYRLRPGIGPALRKRQQGVPEEIKEIAWRAQNRLHKRYCRLAAAGKDQRKIITAVARELLGFIWAIGVKAEATVQQPMVQQPMAA

SEQ ID NO: 220445 - protein, 382 aa, unidentified
MSEIIRIGIDTSKSVFVLHGVDETERPALRKKLRRRDLVDFLAKLKPTRIGIEACGAAHHWGRTFQTLGHEAVLLPTQLVKPYIARNKNDSADAEGICEAMSRPRMRFVPIKTAEQQAAQMLIGLRDRLVRQRTQVSNAIRGYAAEFGLVAAKGLDKIEPLLARIADAPDLPDLAKELFALHSQEYVQLKVRLRQIEAKLMAWHRHNELSRRLAEIPAIGPIGACALAIKVTDPGAFRCGRDFAAWLGLTPKDHSTAGKQRLGTITRAGDEMLRSVLVAGATAVIQQARHGRGKATPWLIDLIKRKPPKLAAVALANKTARIAWKLMVSGERYDPHHQGRGRSNPPSPPAASIAPCSHRQGRCAPPTGGGLRPALTALARGA

SEQ ID NO: 220446 - protein, 381 aa, unidentified
MHRSYDYFVGLDVSQRTTSVCIIDADGKKFCEGKCNSRPEDIRGWLVNRVAEDKTLKIGLEAGNMSSWLYSGLVKFGFDVVCMETFQAHRFLATYRNKTDKNDARGLAQLVRMGGEDFLKVVSIRSQASQETRVLLAMRDHLVSQKVGLENHIAGVLKPFGVIVERGNVTAETFYKRTLEGLAEAERNGVHVRPYVLPSLNLYMEAVEKIAPLTEKIQAIANSIEMVRRFMDIPGIGPVTALSFYAAVDNPQRFQKSSDVAAYFGLTPRQFQSGETNFMGGISRRGDPATRRVLVIAATVLLSGTQQWNSLKAWGVRLAKRIGFSKARIAVARKLAMIMHKMWLNNDRFRPKNLSPQERIKLKQELIVVASKSGRVATAAV

SEQ ID NO: 220447 - protein, 390 aa, unidentified
MFYLGIDIGKFHHAAALINQQGKVIATLPSFPNTRSGFQQLLELIRAHLPQQEQLRVGMEATGPYWIPLAEWLKAQGWTPVILNPIQTASLRNYGIRGSKTDNIDSVLIANTLRMEGEQPQRCSPKLSEELRHFTRLRADMVKDRTRIGLRVTSILDRLFPELLSSFSKTLSPSCLALLSAAPTPRKLLALGEEKLTALLRRVSGGNLKATRAQEIMDKVVHSVGIPSQAMEESLALLLEQIDLINAHIKVVDRRITELYEQAGVYFTTIGGVGTLSAATILAEFGTITKFTHPEQMVAFAGIDPKVRNSGKHQGQVHISKRGPRYLRRALYLACQGVVRNDDYFHSIYQRYRDKGKSYKEAIIAVMNRFIHVLYAMWRDNRPYYPLTQA

SEQ ID NO: 220448 - protein, 415 aa, unidentified
MHFAALDWASDHHDVAVVDRLGTLVAEFRFAHSAVGWAEFQEKMKPYAGCPLALETSSGPAVDQLLQRGWTIYPVNPKAAERYRERKAPSGDKADRPDAWSLADALRTDGHGWRKLIAQDEATATLRALCRDEIGLIEQRTLLVNQLIAALREYYPAALDIFDDWTRPYAWALLSQFPTPAGLQQAGKRRWEKFLHCHRLWHPNTAAERLKIFAAANALPASAPVVAAKSLLAISLVKVLQTLENQLEEYRKRIHVTFHQHPDFDIFGSLPGAGEKLAPRLLGELGSARELFPDADSLCCHSGASPVRYQSGQINRARIRWACDTVLRYTVHLWADCSRKKSAWAQAYYARKREQGMSHAAALRCLGKRWLKVLWRMWQDRQPYQESIHEQSLKDHGSWVLARMASTVADAPNPL

SEQ ID NO: 220449 - protein, 347 aa, unidentified
MDQIIRIGMDTSKHVFQLHGVNAAEQPILHKKMRRKEMVDFFAKCPPTVIAIEACGASHHWARLLRELGHEVKLIAPQLAEPYVKRGKNDAADAEALCEAMSRPTMRFVPVKSADQQAALMLVGMRERAVVAQTQLANTIRGYAAEFGLTAAKGMSHIPLLLERIMIDESIPAAARELFASLAEEFAQLGERLKEVEAKLMAWYRNNECCRRLAKIPGVGPIGAVLLVMKAPAPEQFTSGRQFAAWMGLTPKDHSTAGKVRLGISTRAGDEALRKTLVVGATSLLRQVRAGRGRNASLWLIELLKRKPPKLAAVALANKIARTAWKMMVTGEAYKGNAARPALACAA

SEQ ID NO: 220450 - protein, 402 aa, unidentified
MSMYFIGIDISKYKHDCCIISAADQKVVSKVTIKNNKAGFDELLTIINSLSNPENIRIGFESTAHYALNLELFLESSLLTFMEVNPVLISEYKKSKTLRRTKTDSVDCESIARWLMTVEYKPHSKGFYHAYSLKSLTRLRDKLIRQRSFYLVKITNVLDHTFPEFKPFFHERFSKTALYLLENYGSAEKMARMNSASYEKLRSLSRGKFSPQQFLQLKELAANTVGVSNSIFDVELNSLLSLYKSLVKEIDAIEKEINKLIEEVHPHYMSIPGIGPLSAAVIYSEYGDISNFANPGQMLAFAGIEPGINESGTESHGGRMVKRGSSQLRYTLINCCLPLIRFDMTFATYYAKKRGEGKPHRVAIAHVAKKLIRVIYALERQDIDFNAQKLRQSSGLILISPI

SEQ ID NO: 220451 - protein, 343 aa, unidentified
MDHFAGLDVSVKETSVCVVDDAGRIVREARVASEPEALLAVLTTPGWQFKRIGLEAGPLSQWLFDALAEAGLPVICVETRHMRAVLKAQINKTDRNDARGIAQMMRAGLYRPVHVKTLRSQKLRMLLTHRKLLQSKAIAIENDLRATLRNFGLKVGVVGTVKFEARIKELVENLPDLALLVEPLLVVRRALREQIGVLHRRLLAIVRADEVCKRLMTIPGVGPVVALTYRVTVDVPSRFRNAKAVGAAFGLTPSKHQSGESDRMGGISRCGDEMMRAMLYEAAQILLVRSTRWSWLKAWAMQIARRRGVKKAIVALARRLAVIMHRIWMDGTEFRWSREATAA

SEQ ID NO: 220452 - protein, 356 aa, unidentified
MNKFKTLSFEGVTIYCGIDVHKKNWRVNIRSFDRELEDFSQNADVDCFIAHVKKRYPGAAVKVAYEAGFCGFCACRKMVLAGIDCIVINAADVPSSDKDKKQKNDTVDARKIARELSKTNLQAVYVPTLKEQNDRSLVRVREQMVANQTRSKNRIRHLMHFNGLKVDDGVDKEKYWTKAFIKALQELSCGDESLRMTLNIMLKELTEIRQRVLEATKLVRKLAATDAHGKNVELIRSIPGIGVVNAMVILTELGDIHRFANFDHLCSYVGFTPSTDDSGDRKKDRGITHRCNNRLRIALIESSWMLISKDPAMLMKYSQYCRKMNKNQAIIRIGKHLLSRIKYVLLKQEKYETCLA

SEQ ID NO: 220453 - protein, 338 aa, unidentified
MTYYAGIDVSLEYASVCVIDAEGQRVREGKVLSEPEALMNWLASVGVGLTRIGLEAGPLSQWLYAGLRQAGQPVELLETRHVRRAFEIMPVKTDRKDARGIADLMRLGWFRPVHCKSIDAQETRAVLTARKLVQKQVLEVESSLRGILRGFGLKVGKTTPVRFEARVKELVAEYPSVERIATSLLAARAVLRREFNGFERQVRAMARNDTRARLLMSTPGVGTIVALTYAAAIDDPCRFKSSKTVGAHFGLTPRRYQSGETDYSGRISKLGDSSVRAALYEAAHAILTKPLKGCAALKSWAMKIARRAGMNKAKVALARKLAIIMHRMLVDGTTFQSA

SEQ ID NO: 220454 - protein, 406 aa, unidentified
MYVGIDVSKDSLMAHAIDQDGKDIFHSFKVRNNKTGCNKLIDFIHKHAKQSDFESIKVGMEATNVYWEHSHRLINNSKKLNSNFKLITYILNPKVVKKFKDAYNSLPKTDSIDAWIIADKTRFRVPKSTIPEEVYRPLRELTRFRYKLVKNIRSEKNRALSLVFLKFSDLKEDVPIDIFSEASMTILESFTLEEIADKDLEELAAFLHENSNNRLGGSTPLNKIITDLKKAARNSYRLKPKMNQAITQTLSMTFDNIRFLQSQLNRSKKVLARELKAIPQTLDTVDGIGVILTSGIIAEIGDIDRFHNQAALASYAGLTWTKHQSGSFVAEETSMTKTGNKYLRYYLVEAANSLRVHNDEYRSYYYKKYHESQKHKHKRALVLTARKFVRLVFALLSKGEIYQPRR

SEQ ID NO: 220455 - protein, 322 aa, unidentified
MKFIGIDIGKNSFVAAFPSPSGYKTKTFPNSILGIRKFIDSFSNPDHHCVLEATGNYGYLLLYLLHQSNIAVSLVNPKQIKHFSRMMMAVTKTDDKDACTIALYAEKMNPPVYKMPSEAILLLKQKKTVIRQLKKQLTATKNLLGSLEVLPVKDRNCMQALNKTIAFLTGQVESLEAELTQIATSEFEKQVKALTSVKGIGITLATALIVASGGFTHFDNAKQLSRFIGICPTYYQSGTSLNIKGGINRNGDANLRSLLYVASWSAIQHNAACKEMYLRLKANGKPSKVALIAVANKLVKQAFAVVSKNVCYIDGYCSTKPV

SEQ ID NO: 220456 - protein, 340 aa, unidentified
MPGPRARIRKAGCSGVLNPSRKEHVNSTREIFVGIDVSKARLDIHVLPSGDLWTTENQTDAITTLVSRLRSLQPTLIVLEATGGLERRVLAALLTADLPAVAMNPRQVRDFAKGMGYLAKTDAIDARVLALFAEKARPEVRPLPDAQTQELEALMVRRRQVVDMLTAEKNRLSSAPPSKRVIRAIRKTISCLEGQLEDFDKDIDNAIRESPAWREKDEVLQSVPGVGRVLSRTLLGHVPELGTISKKKMGILIGVAPLNCDSGKYRGQRHCWGGRTEVRNVLYMATLSAIRRNPVIKAFYDRISSGKLRKVAIVACMHKLLTILNAMVRSNSRWSPALPA

SEQ ID NO: 220457 - protein, 368 aa, unidentified
MSNYVTAIGLDVHARSIKACALNPMTGEVERASFGYDPASVAEWALGFESPKAVYESGVTGFHLCRALRALGLDCAVGAVSKMQRPAADRGRKTDRRDAEFLARLLATRNVVEVWVPDERTEAARDLSRALADARGDLQRAKQRMSKFLLRHGHVFDEPTPTGGRRGNWTRAYWRWADAIEFVEPDDAAAYEHYRDCVRRCEEARDALARRVAESAGRPEWKPAVDALRCVKGVDVATAFLLACEMGDPARFPSAPSFASWCGLAPSEHSSGETSSRGGITRAGNAHVRRALVESAWHVPMSSRDPKPLAPGQEVAPAVRRHATKCNRRLIERREAMAAAGKRPCVANCATAREMACWVWAIARMATS

SEQ ID NO: 220458 - protein, 338 aa, unidentified
MNKITTIGVDLAKSVFQLHGVDGEGTVVLRRQLRRSQMLEFFQRLPDGCLIGMEACAGAHYWARELTMFGYEVRLMQPSYVKGYVKRGKTDAADAEAICEAVSRPSMRFVPVKSEETQGQLVTHKAREFLVRQQTQLVNAIRAHLGEFGITIPKGIQNVDRLIEACEHGKLPAVARKALNLLADQLVDTQKRIAELSNDIHADAKASESAMRLQTLPGIGPITASAFVASLPDIADFKCGRDLSAWIGLTPKPHSSGGKERLGRISKMGNRYLRRLLYLGALSQVSARRRGQPGDDWLWKIIQRKKPKQAAIALANRMARTIYALLKNGTEFDAAKAA

SEQ ID NO: 220459 - protein, 449 aa, unidentified
MREPQEIEDRGHEQVAWRVAAVDVAKASGVVCTRVPREGSPGRFVTKVWPVDATTNAILELADHLVAVRVEKVVLESTSDYWRPFFYLLEAAGLDVMLVNARDVKNAPGRPKTGKLDAVWLAKLAGWGMLRPSFVPPAEIRQLRDYTRLRTDLTRERTRHWQRLEKLLEDALIKVTTVASRIDTMSVRDMLEALIAGQRDPHKLADLARGKMRAKRAALVQALTGRFDDHHGELASILLAQIDGLSAQIDTLTTRIGELITAIPAAQGIDTDGTTGPQAGLDPDAPVLAAAARLEQIPGISRHAAQVIIAEIGLDMSRFPTAAHLVSWARLCPRTIQSGARISSGKAGKGNPYLKGVLGDAAAAAGKTDTFLGERYRRIARRRGKLKALVAIARTLLVIIWHLLADRAARYDDLGPDYYASTIDTDRKTRNHVRQLEALGFTVTLAPAA

SEQ ID NO: 220460 - protein, 344 aa, unidentified
MDTYLIGLDIAKNVFTAHAIDRTGKPLFRKKLSRSELLPFFASVSVSTIAMEACGGAHHWARKFQELGHQTQLLPAQHVKPFLRGQKNDMRDAQAIAEAALMPTMHRVPTKSVEQQTILSLHRLRTGWVEERTALSNRIRGLLAEFGIAIGQGLSVLRNKLPRILQESDLPGLLRTGIERCRLHFLALDAEIAQVERDIQSWHLQHEQSKRLADIPGIGMLTATQVVALIGNGAQFRNGRHFAAWVGLVPRQYSTGGVTRLGRISKRGSIHLRSLLIHGARTVIRWLIQKPEAKTSGRYRWILELLKRMHPNKVAVALANKQARTVWNMLHYNTRYHDPDVLAA

SEQ ID NO: 220461 - protein, 333 aa, unidentified
MYDVYVGIDISAKTAHVHWYQPLQTRSGAFQIAQNEGGYKRLVTTLQRICPDSTQIHIVMEATANYWLSLALFVHQREFAVSVINPTQGKRFAQMQLRHAKTDPIDAQMLCDFAYIIQPTLWTPPPEIYFELQQALALRDDLVTTRTQFRNQLHAMNQHARPQSFLFDILYYHIEQLTRHIQQLEQHIQQLLNSDHQWHVATQRLLTIPGIGTITAAWILTSTHCFERCETPDQAAAYAGLVPHPNQSGQSQKKGKTGGGNKTLRSMLYMAAGSALQHNPILKPFYQKLLKRGKIKQVARVAVARKLMHIAWAVVVKQRDFDPDFAKQSKIAA

SEQ ID NO: 220462 - protein, 419 aa, unidentified
MSFKIFKFNCCGLDVHKTWIYACIGITDSNNRTEYKQARFSSFSKGLHQLCVWLAKYNCNDVCMESTGKYWIPVFNILEQRSLWVTLSHPKYTKPMKGNKTDRKDAKWICDLYMCGMVKPSFIPPADIRQLRDLVRYRFKLTCMITGEKNRAQNCLTVSNLKLDDVFSDVFGKSSRSITEQILQHPGETFDVAPFVNSRCKTPIVEIQAAIDGAISKEQAVKLRQCLDHIDELNKHISEVEQEILRLSDKYEVALNLIRTVPGFDKNPLTAIQVLSEIGGDMSVFPTAKHLVSWAGCCPRNDQSNQKIKSTRISRAGSYFKPVLVQIANALIKSKKHFEFTTRYKRIKTRRGHKKAIIARCRMILTAIWHILTDLKPYTPEGFLESRPVNKEKVLTISQALNLIKQRGYIIKDDVGPVT

SEQ ID NO: 220463 - protein, 369 aa, unidentified
MAKNGTLAKIRELQPSFQTTTDQITIGIDLGDRFSHCCVLGPDGRILTEGRLRSTPETMARHFQGLPPSRIAIEVGTHSRWLSQLLTKWGHEVIVANPRNLRIIADSIRKSDQVDAHMLARLARVDPKLLSPIVHRKQESYPDIIQLKARDLLVKNRTRLMNAVRGVLKSAGLRLSPCGTSCFPSKAAMCISDELKPSLTPLLETISHLNKQIYSLDKSIESTAHNRYPETIRLRQISGVGPITALQYVLTIGDPNRFTHSRDVPAYLGLTPRRHQSGSVEQQLRISKAGNKQLRSLLVQCAQYLLGRFGPDSDLKRWGTRMFERGGKNSKKRAIVAVARKLAVLLHRLWVTGDTYHPLYNVGAATLAS

SEQ ID NO: 220464 - protein, 338 aa, unidentified
MKLYGAIDLHSNNNVTVLIDEQDKVVYEKRLPNDLGVIAQPLAAYQSSLEGIVVESTYNWYWLVDGLMDQGHQIHLANTAAIQQYEGLKYTDDHSDARWLAHILRLGVLPQGYIYPKEERAVRDLLRKRGQMVRQRTANLLSLQNLITRNTGSSIRSNRIKTLDSETVDALLPNQDLALAVKANLAMIQCADGQIDILERTVTDRVKLRAEFSFLKTVPGIGQILALTIMLETGEIQRFPTVGDYASYCRCVGSQKLSNGKNKGKGNTKNGNKYLAWAFVKAANFAIRYNARIKSFYQRKKAKSHGVLAIKAVAHKLCRACYYIVRDQVPFNVAKAFA

SEQ ID NO: 220465 - protein, 338 aa, unidentified
MVLIGIDPHKATHTAVAVDKEETALGELTVKADRHQVERLLKWAIDYPERRWAIESANGLGFLLAQQLVAAGEDVVDVPPTLAARVRVLGSGKTQKNDPNDALSTAIAALRAKRLRTVVAENHGAVLRLLADHHHDLGSLRTQAVCRLHALVRCLIPGGTGLRLSADRAAVVLRRVRPENAVDVERKRMALGFVADIKRLDTEIAASKARIVAAVAASGSSVTELYGVGPVVAAFLIGHSGDIARFASRDHYASYNATAPIEASSGPRVRHRLNPRGNRHLNHAIHLIAIVQIRHPSEGRQYFDRKVAEGKTTKEALRALKRQISNAVYRQLVIDSTR

SEQ ID NO: 220466 - protein, 419 aa, unidentified
MDTLNTTSFTAFIGIDWADAKHDICIQSADADEREFDVIPHKVELIDEWACTMRQRFGSPIAVAVELSKGPIVYALQKHDCFVIFPVNPTTLARYREAFQPSRAKDDPTDAELAVDLIIRHHERFKPLQPQSVDIRMLVSLVEQRRNLVADKIRITNRLRVALKQYYPQMLEWFDHIDTLLFCDFLTRWPTLLQVKRARQSTLRKFFHEHSMRFEHVLEQRLIAIKAATPLTLDEAVVVPHRLQALVYVEQLRVLLDAIKRFDIQIESVAKQHDDYALFTALPGAGASLAPRLLVAFGEQRERYKSAAEVQKYSGVAPVTERSGKKHWVHWRWQCPTFMRQTFVEWAAQTINKSYWAGEYYRQQREKGSTYQAAVRALAFKWIRILYRCWQTRTPYDEVTYLKALERRGSPLLAARKLT

SEQ ID NO: 220467 - protein, 321 aa, unidentified
MSAYAAWLRSLGEKQDIIVGLEDTNGYGVHLVEALSSEGFTIRYVPAILTERERKTSTKRHKSDYVDAKRVGKVILAKYEQTLPAKESIAGKEELQIAQSLDLLLQERRDLVKQKTMLKNQMHAMLHQYYGDHYADAFKKPFNKEAVAFFLDDLEANTKTAKEILATSIVRRLNRLGLIEEQISKITKGLTLVGSSSKEVAALQRELHGCGAVTACTIMAEVTTIKRFAGKNNLASYAGVAPTPHSSGSHHKLNTNPFGNRRLNRALHTVALSQIACKGDDRGKVYYQKKLKEGKTKLWGLRCLKRQIVNQVYRILKEATQ

SEQ ID NO: 220468 - protein, 318 aa, unidentified
MNTKTNQNVKVGVDTGKFQLDIYIRPLDIYFTVSNDEKGIKEAIKIIRKHSPGRIIIEATGRLEMPFIVACANASLPFVVANPVHIKRFAGAIGQRAKTDKLDAQLIAHYGEAIKPKLSQLKPDTMQTMSDLVASRNQLLVMQTMEKNRLQILPKELAMTIKPILTVFKSQITKIENKIVALIESCPDYQAKNCILQSMKGIGKIASASIISNLPELGYMTNKQASALVGVAPMNRESGRYKGLRKIQGGRHQVRTVLYMAMMSAIQSNPVFKETYQRLVAAGKPKKVAIIACIRKMVVILNSMLRDGVLWEAPKATN

SEQ ID NO: 220469 - protein, 388 aa, unidentified
MARESVPNTCPIALDYDSTLVLAIELSNTNWVLAAQVPGLPRVKAKQSIEPTAEALLAAIDGYRERARAAGRSVERVVATYEASWSGFWLARWLLRRGVETHVVQPSSVPVDRRARRAKSDGIDAELLLRTLLAWLRGEPRVCSMVPIPDEADEDRRRRVREREDLVTERVSLVNRISAVLATLGVGDYNPLRRDRRERLEALRTALGDPLPPHAHARILRMLDRLELVCAQIAELERERDAVLEEEAPDKAEEMIQRLAGLQGIGVQSATVLVREAFVREFANGKALGSYAGLSPTPFSTGGTEREQGINKAGNRRLRTVMIELAWLWQRYQPASSQVIWFRERVGSTGKRMRKVMVVAMARRLLIALWRYATQGVVPEGAVLKPMP

SEQ ID NO: 220470 - protein, 315 aa, unidentified
MYYLGIDVSKKTIDCCLISDSIFYERRFDNTEDGFRRLDDWIQEYTAEAVYCCCEATGIYHEAIAAHLRQKHTVSIVNPSKIKGFREAEQTRTKTDRQDARLIAEYCRKMQPQAWQPPTEEQEYLQAITDYIARLKQQRAAEQTKHQTAPDTIRHHIQTTIDHLNRLIATVQNELKDFYRQKPAYNEKKNRLKTIDGIGESAASALLAKLTRYDFANQNQFAAYLGLDPKIKDSGTSVKGKPRISKQGQKSARKALYMPALVAYRMNAFPAFTARLKARGKPPKLIIVAIMRKLAVIAYQLYKTGKDYDRSRYRN

SEQ ID NO: 220471 - protein, 414 aa, unidentified
MEVVYRCCAGVDVHKKSLTVNVLRRGIEGKEDLDEVRSFGTMSKDLFGLAAWLKDIGCTHMAMESTGVYWKPIYNIMSAEGFDVMLVNAAHIKTVPGRKTDVRDCQWIAQLLQHGLLKGSFIPPEPIRELRDLTRQRKKLVGQRASCVQRIQKVLEDANIKLSSVATDVVGASGWEMLRKLISGETDAQKLAALARGRLKSKKEQLADALEGRLTEHHRFLLRQHMREIKFLEEMIGEYDERIEQQVRPFFEYIPLLDSIPGINGTAAAGIVAEIGADMSQFPDHAHLGSWAGMCPGNNESAGKHRSGTTRHGNKWLRALLVEVAWAASRKKGSYFRTQYKRLSARRGKKRALVAVGHSILTIVYHVMKYKIAYEELGEDFFDKLNGDRLRKHYTKRLESLGYQVDLRPMSVVA

SEQ ID NO: 220472 - protein, 422 aa, unidentified
MLEETQETEEIIGRVAALDIGKAELVCCIRVPGQGKRGRRLQEVGTYATMTRSLLVLADRLRELGVTRVVMEATSDYWKPPFYLLEAQGFEVWLVNARDVKHLPGRPKTDRLDAVWLCKVAERQMLRPSFVPPPAIRRLRDLTRYRADLVGVRTAEKNRVEKLLEDAQIKLSVVASDIFGVSGRAMLAALLSGERDPKVLAQLARTRLRGKIAQLEEAFTGRFSDHHAFLLATMLERVDAVSADIATLEAHIEAAIAPFAPAADRLDEITGVGRIAAQVIIAEIGLDMSRFATPAHLASWARFAPGVKESAGKRKGNNATGHGNPYLARVLGEAAVAAGRTNTFLGERYRRIARRRGTKRAIVAVGRSILVIVWHLLADPTVHYHDLGPGFYDTRVNAERTKRNHIRQLEALGYTVTLQPAA

SEQ ID NO: 220473 - protein, 364 aa, unidentified
MKKRSTVNEAEGMGAWTVGMDLGDRMSHVCVLDGAGAVVERGKVQTTEAGMRKRFERAARMRIAMEVGTHSPWVSRLLKEVGHEVLVANPRKTRLIYQNRGKQDPVDAEVLARIARLDPKLLYPVEHRAEGVAEDLAVLRSRDVLVRTRTQLVNHVRGAVKATGHRLKKCSTRTFSEKAVSEIPEEVGEALSSVVATIQAVSKQILELDKRIAELGKKKYPETALLRQVGGVGPIVALAYILTLEHPGRFRKSRAVGPYLGLVPSRSQSGDSDPQLRITKEGDAFLRRLLVQSAQYILGPFGPDCDLRRSGLSLSARGERNAKKRAVIAVARKLAVLLHRLWRTAEVYEPLRKNGTLQHAVVAA

SEQ ID NO: 220474 - protein, 368 aa, unidentified
MKRYYCGLDLHSNNTFIGVLDEDDRRVFCKRSPNDILGILEYLKPFKEAMSGVVVESTFNWYWLVDGLMDVGYKVHLAHPPAIVQYKGLKVQDDKHSSFFLAKLLKLGILPEGYIFPKEDRYIRDLLRKRLMLVQNSTKYILNFKSMMNRSFSVSINSNEIKKLNPDLLKKEFFKNNHLLLSAKSSISAINYFHNEIKILEREILKEAKLKPEFQRLLSVPGIGKILGLTIALETGNINRFSAVGNYASYCRNVSSVRSSNKKRKGSANKKNGNKYLAWAYLEAAHKLKRYCPQAKTFHERKKIKTNIVVAIKALAHKLSRACYYMMKDGTEFDVEKIFGKPIKVESGSKSTGGLANKPNAPIDNTAA

SEQ ID NO: 220475 - protein, 408 aa, unidentified
MAKRTAQRAEIKAVPQFLNESLYVGIDIGKGKHLAGFLSKTLLERHERFEACPALVFENSREGFRLLIERIRSLSPLEHVFILMERTGHYHRALAQYLQELDLPVYVMHVQSRPGGMLKTDKRDALTLANQLYSQLELGVQVANKLQLIRRVMPPTEAAAQLKGLIRHRYELIQESTQRKNKLTAICDEVFPELTRVVKDPNSLFALALREQFPTPQALATTSLTTLVGIRGGARSLSDAKLLELQRLAAQSIGVKEVARQRGLVLEQTQLIKELHLLREHVEQLEDEIVSIVEHAREGQILLSFPGIGPVMAATTIAAIGSIHNFPSASALKSYFGWAPVVVQSGSTLDHSRLTRGGTRTMKQMLFLAVFQAIRLPDNEWAKLYERCGRSDDRSHLRSAQARCGAVE

SEQ ID NO: 220476 - protein, 354 aa, unidentified
MKTYYVGMDVHRASIVIVVLNGAGKVVERITLQTSATAVRSYLQRLKGKVYVTFEEGTQAQWLYDLVRGLVTEVIVCDPRQNRLLAAGNKSDAVDAEKLAELLRNRSLQAVDHADHGMRALKELVRIYDSLVQDSTRVMLRLKALYRGRAIDCRGHDIYRQDRRTQWLKKLKERGAKQRAEFLYRELAALKPLRHEAKLLMVREARKQAAYPWLLSVPRLGAVSVAQLLAVVGTPHRFRTKRQFWTYVGLAVVTRSTADQEVVNGVLRRSRRPVATRGLNRNHNHLLKRVFKMAATSACHSEPFQAGYEARRQQGMDPALARLTIARQIAAITLSLWKRGEKFKVERIKKQPAA

SEQ ID NO: 220477 - protein, 470 aa, unidentified
MSKKRRYRSISVEGLRPEVVLAKLGPEPECTVSVDVAKERYVVGLGAGGVVALVLHFIVSQQAVLFLELLSALTAAGKRLAVVLESTGTYGDWLRGQAEARGWPILRVQSKHTHDFAELQDGLPGKHDAKDVHILAQLHALGRSAPWPLAASASRDLRVLVDEAAVQKARLEEDYNRMEAWLARHWPELACWVDLRTASTLGLLAACPGPAAVRAMPEVALHELARASRGQLSETRRQGVVTSAQQTVGLPVTSGEAEGLRRMSERLREGEANVARLELQLRAAAHEDPEVERLSAVVGVLAAASIQATVGAPSRYGSAQAFLKSLGLMLYERSSGVQQGARHLSKRGPDRVRQLLFMATLRMLHPEHGDPVARAWYVRRHAYQCGHRTAAVVAVMRKLATALWHVARGSAFDASKLFDTRRLTPTDIPTSDARVDAPRAARFTRETPRTTTVRRVTRSRVTSPTTEVRP

SEQ ID NO: 220478 - protein, 343 aa, unidentified
MATVTRFLGLDYHQDSVQVCVMDAEGNTLTNRSVPNSWRCIGAVVGGTVLPAEFVAVRASIECCSGAAHLAEELIEQLEWSVTLAHPGIVNRMKQNPEKSDWADAHILADLMRLGYLPRVWLAPTEIRQLRSLVRYRYQQVKQQTRLKLRIRALLREHRIPKPKEFGAWSLMWFAWLKCLELDDVTRFLMDQYLEELKQVQKKIADAKQLLFARTRNDALIAKLLKLDGIGPITAITMRAEIARFDRFDTGKQLARYCGLTPRNASSGKRQADAGLVKAGNTQLRMVIIQAAQRLINFNPHWGHFAARLMQRGKPRNVAVAAVANRWIRRLYHQMQPEQLVVS

SEQ ID NO: 220479 - protein, 342 aa, unidentified
MKIASIGIDLGKTTFHLVALNIHGRVLVKNKFSRRQLLAYTANLPASLIGIEACSGAHFIGATLRLQGHDVRLIPAQFVKPFLKSNKNDFLDAEAIAEAVTRQNMRFVPIKTDDQLDLQALHRVRDRLVQRRTAVINQIRGFLLERGITFAQGPANLRRHMPSLLEDAEQNLTPRMRSLLAHLWHEWKQLQNDVDRISSDIDAIAEQDPACQRLRQIPGIGPLVSTATVAAIGNGAAFRKGREFAAWLGLIPRQHSTGGKARLLGISKRGSVYLRRMFIHGARAVLLIVKYDTGRLGQWARELALRAPRNKVIVALANKLARIAWAVLARGTEYRATCVAAA

SEQ ID NO: 220480 - protein, 347 aa, unidentified
MSKINVIGVDLAKNVIQVSVVLGCNRELSNKSLTRKKFAEFLARRKPSLVAFEACGTAHYWARYAQQQGHEVTIIPAKSVTPYRQGHKTDSNDALAVAEAACRPSIKRAPLKSVEQQGLQSIQRSRELLVQNRTGLSNHVRGLLMEFGITVAQGWAALHRRIPEILEDGENELPDMYRPTLQLLWHRLCELRDDIKQLDAQIKVLVQQHAACRELIALEGVGPISAVLLFASLGTGEAFANGRQFSAYLGLTPKQYSSGGKVKLVGISKKAANKRLRAVLVQGALSYVRCLKEPKTAKDRWLHALIERAGTGKAAVALANKNVRTAWAMLTRGESYQRNYQHELSAT

SEQ ID NO: 220481 - protein, 314 aa, unidentified
MHTIGIDIGKETFHAAFDDQTVAVFDNTRSGVRQLLRRLKQQDYPASGTQIGAEATGAYHLLSCRILKEAGFSVKILNPLLAHRIISGSSLRQVKTDRHDALAIRQALLAGFGDEFIDTSEIIALKALIKQREALSHTRIQLKQRLCAHYLKQEAADVPLHNGLSGILKACSKEVLVLERRLGAYAKEDQVLLRSIPGVGKVTAASLVAYVGDIRRFPSPEKLVAYIGLDPRVYESGSSVKGKGYLTKRGNAYLRFILFNAAFIARRNNPDLKAYFEKKIKEGKHYFNAMCAVERKLVHVIHAVWSRRTPFEYR

SEQ ID NO: 220482 - protein, 479 aa, unidentified
MKPREKSTFERLTKGPLNRRQRRELQRRLYAKDPGLQIVHPNAAGIDVGNESHYVAVPPDRDEQPVREFGSWTADLLKIAEWLKACGIQTVAMQSTGVYWIALYDVLEKAGLEVYLVNAHYTKNLPGRKSDVQEGQWLMKLHTYGLLRHSFRPPTEIRAVRTIWRLRGRLVQDAGRYVQQMQKALTMMNVQLANVISDLSGVSGQAILRSILAGERDPHQLAALCDRRIQATEQEVAASLEGNWQEDLIFELRQVVHAYDFAKRQITECDLELQKYMAALPGREAPAVDTATTPAAALPGRPKKRGTANAPQSFDLAGELKRTCGVDLTTIEGIDVMTAETALAEVGPDMSAFPSEAHFTSFLGLSPTRDISGGKVIRQRPRKVKSRLGMGLRMAASTLLRSDSYLGARYRHLRARLGPQKAIKAMARYLACLIYRMLTKGQAWVDQGAQRFEHKKRERELTTLQRRAAALGFQLRAAS

SEQ ID NO: 220483 - protein, 389 aa, unidentified
MNEQGRVLARKRLPEGVAGMARLHELIGEQLGEDADDAQVIIGTETDRGPWVAALVAAGYTVYGVNPLQASRYRERHGVSGAKSDTGDAHMLTDMVRTDSHQLRAVAGDSPDAGAVKVVARTHKTLIWERTRQVQRLRHQLREYFPAALAAFEDLDAPDALELLARAPDPARAAKLTRAQISAALKRARRRDIPGKATVIMAALRGAQLGQPPAITAAYAATVRSLIAVIITLNEQVKILQGQVEAHFGQHPDAEIYLSQPGLGPVLGARVLGEFGDDPHRYASGKARKNYASTSPITRASGKKKLVMARFIHNDRLIDALMAQALSALGSSPGARAFYDAQRAAGVEHNAALRKLANRLVGILHGCLKTRTLYDESTAWSHRENKLAA

SEQ ID NO: 220484 - protein, 351 aa, unidentified
MMIIGCDFHPRFQQISFLLEETGECGQRRLMHTAEAEQYYRSLCGTPVRVGVEATGSYGWFRRLLSELGHELLVGDATQIRASNPRRQKTDKRDAEHILGLLVEDRFPAIWQPPAENEQLRQLLLHRSRLVRLRTRVTNQLEGMAKNEGLLLPSGWSNKRRKAIEALPLPGWYGERRKDLLALLDRLEERIAPLDKAVSQAAANNAEACLLMTHPGVGPIVSLAYVLTIGNWQRFPRGKQVGSYLGLIPSEESSGDKRRLGHISKQGNTLVRWLLVEAATTAQRYDASWHRQYLRLSMTKHHGVAKVAIAHKLAVRLYWMLRSGEDYQHVRERGSTARQSECPGGRSRAAD

SEQ ID NO: 220485 - protein, 398 aa, unidentified
MTESSDYESVQVFIGVDVGKDTHHAVAVNRSGKRLFDKALPNDEIKLRALISDLKQHGQILLVVDQPATIGALPVAVARSEGVLVGYLPGLAMRRIADLHAGEAKTDARDAAIIAEAARTLPHALRTLKVADEHIAELSMLCGFDDDLAAQTTQASNRIRGLLTQIHPALERVLGPRLDHPAVLDLLQRYPSPEKLASLGEKKLATQLNKLAPRLGKSLAADISQALTEQTVVVPGTNAAVIVLPRLALQLITLRKQRDEVALEVEQRVLAHPLYPVLTSMPGVGVRTAARLLTEVACRAFASAAHLAAYAGLAPVTRRSGSSIRGEHPSRRGNKTLKRALFLSAFAALRDPISRAYYTRKMSQGKRHNQALIALARRRCDVLYAMMRDGTFYTPTAS

SEQ ID NO: 220486 - protein, 345 aa, unidentified
MHVVGIDTHKATLAACAIDDLGQVLGERTFPNAPAGFTALAGWLGELGGIERVGLEGSAGYGAGAARFLLAAGETAVEVPPGLSHRERTRTRRAGKSDPGDALAIARVTLREPDLPPVRLPDASREIGLLVEAREDLVAEATRIRNRLHADLVVLVPGYGLAAANLVADKHRRTAARLLRRLPGVHGELARDRLSRLGRVSLEVRSLERRIEALVADHPLRTLPGAGALVTAKLVSEAGDIRRFRSADAFAMLAGVAPIPASSGQVSRMRLNRGGNRQLNRALFSIAFAQVPNVSTGPSLHGPQAGRGQELAGGHARPQAPSRPGRVPTAIAAGYSGSVCGGLTR

SEQ ID NO: 220487 - protein, 445 aa, unidentified
MFIQSQDDSHCCYSLFIKVVILMMKLKYSICCGLDVHKNVIVATIVTTNKDGISEYLQKSFSTINSDIQRFHNWLIENNCYHVCMESTGKYWIPIFNYLENDIDICLTHPKYVKAIKGKKTDKKDSKWIADLYKFDLVRCSFIPPKDFRQLRELARYRFKLVCMKSSEKNRIQNCMTISNVGIASVLSDPFGKTATEIMSYLLEHTADSMDEKAVRKLIKKGAKAKSDEIIEAIKGYNIETDQAKKLELAQGHLEYLDDMITQTEVELYVRIKPYYEFVEFVSTMPGMTELSSTIVLAETGVDMDIFDDAKHLCSWCGLSPANNESAGKKKSVRIAKAGDYLKPMMVQCALAAIKSKKQPYFAIKYGRIKKRRGHKKAIIAIARMMMVCIYHMVSEKKPFTPTDYEELMNPQNHVERVVLNENNVFAYLESLGYDSSKLVKRNDN

SEQ ID NO: 220488 - protein, 462 aa, unidentified
MTGKHEVESSEGSRRQLQGLPVIRRNVAGIDLGSERHWVCAPTVDGSGREIASYGATTPELIRLAEWLKQRQVESVAMESTGVYWIAPHEVLEAQGLQVLLVDTRQLARVPGRDKKTDPTDCEWIQRLHSCGLLRSSFRPEEAVCMLRTLVRDKANLVAECGDWLRRMQKSLDQMNVRVHRAVSDIDGVTGMAILRAIVGGERNALKLAKLRDPRCSKTEQEIAEQLTGHWREDHLFSLQQALKMYDAVQERIAAYEKEILRKLGDMEREEQRGQTAPPLQNANKTKAIKKRGQEPKRQALYRMSGVDITHIDAIGVETVEVVLSEYGPDLSRFPTEKQFVSHVTLAPHVPTSGGKPLRKRKRNSASTRVAAALRMAALSLRHSQTALGAYYRKMAQRLGGDIAVFATARKLATLIYRLLRWGQPYVDEGANAYETRYRQQRLGRLAATAKQLGYQLAPINA

SEQ ID NO: 220489 - protein, 310 aa, unidentified
MEGFIGIDVAKATLDIASLPDGESWTVTNDEPGLAELAPRLLALAPTLVALEATGGYESPAVAALAKAGLPVVVVNPRQVRDFAKAMGRLAKTDALDAATLAEFAQRVRPALRPLPDEAAQLLESLVTRRRQLLEMLTAEKNRLGFARGPVRRDITQHIRWLEKRLADVDGDLREAVAASPLYQAKADLLRSVPGVGPVTAVTLLASLPELGHLSRHEIAALVGVAPMNRDSGTARGKRMVWGGRAPVRAVLYMAALVGIKHNPALRRFYERLRAAGKPFKVAATACMRKLLTILNAMVHQQRRWDPQRA

SEQ ID NO: 220490 - protein, 450 aa, unidentified
MIAAVVERCAGIDVGKKFLKVCVMAGPLNEEPYYEIRKIDCSHSGYEQLREWLKAEGVTRVVMESTGPYWVPVFNILETDVEVILANPVEVKNRKGHKTDATDAWWLAHLLRHGMIRPSFIPKKATRELRELTRRRKKLIGQVAQERNRVQKQLEYGNVKLGNELSDVFGLSGQLMLKALVDEERTPEQIAALAQGSLKKKKPQIAEAVRGQRLSETQKELVRSSMRHMVFLELEIEQLDALIAALIRSSQQQQPYELLQTIPGIKGEAAATLLAETGAEMKQFPDAGQLSSWGGVCPGNNESAGKHKSRHTTHGNPWFRATLIECAWAASRKKGSAFQLKYNRLKPQVGHKRALVAVAHALVKAIYYVLATGEVYRENLPQALTEVQRQRVIRHHTRRLRRLGCWLPAERLKPLQEWYVTGCIPSPDPPPAKRRGRKPKASATAGIPAL

SEQ ID NO: 220491 - protein, 387 aa, unidentified
MARKRTLSTLDTSIAYEAVGLDLAKEDAAIAAFGPDHEGPYLIDRIPYDKLYELLADMAPTLVAMEPCSGAHQIAEQIQELGHEVMMISGRHVQAWVKDHCNGQKTDLNDAFAILNLAYDRWLTPIRGKTREECRLLALQSSYRQLKGQRTKTMVHVKATLHAWGFPIRTGSFNQKALHELIDANREAFGDEVVETLHLMINRVHDLDHDIATVLKLLTEATQRDPRASLLRSIPGFGVLTTSRWCAVVGDIARFDTPKQTMAFIGLVPNNRITGHHTETSSGREARGQGKMSKRGDKMLRSLCILGAGALCLMVRNDRLPDCPFVASIKERLASPRPWFKVLVYVAAKLVRIATALLKYGETFSFEKAGISKAVLKQWELEQAKAA

SEQ ID NO: 220492 - protein, 427 aa, unidentified
MVRSIGMDVHRDFCEVAIAEAGAVRAAGRILTTPAALELFARSLAPTDEVAIEATANALAIARIIEPHVARVVLANPKAVREKSPRAKTDKVDAKTLARLLAVGFLDEVWTPDEAARARRRLISRRCALVRQRTREKNQVHAALQRNLIERPPMSDLFGVKGRAWLSVRLGRLPLDERLSVEACLRQIDFVAGELAALDKIIAADALSDVDALRLMTLPGVSAVTAIALRGAIGDISRFRTPRHLVAYLGLDPRVRQSGNEPAKHGKISKQGPGEVRGLLVEAAWHAARTAGPLRAFHQRLAGRRGANIATVAVARKLVIIAWHLLSRGEKYAFMRPALYRQKIRRLGLMTGATRQQGKRLAEPSYLRASDPRRHAEDELVEAHEAAYRRLVADWQASRPSRKAGAGATPGRASQRPSKGKAARQAV

SEQ ID NO: 220493 - protein, 443 aa, unidentified
MIRCLVAGIDVGSEQHWVCAPTSDGSGREIADFGATTPELIRMAEWLKQRQVESVAMESTGVYWIAPHEVLEAQGLEVLLVDTRQLARVPGRDKKTDPTDCEWIQRLHSCGWLRGSFRPQEQICMLRTLVRDKASWVAESADWLRRMQKSLDQMNVRVHRAVSDLEGATGMAILRAIAAGERDARKLAQLRDRRCRQSEEQIAEQLSGHWREDHLFSLQQALKMYDAIHERIAAYEKEILGRLHQMERPDQLGQTAPPLGNANKAQKIKKHGQEAKRQALYRMSGVDAAQIDAIGVDTVEVVISEYGLDLSRFPTEKQFVSHATLAPHVPKSGGQPLKKRKHNSASTRVAAALRMAALSLRHSDTALGAYYRNIAKRIGGDVAVFATARKLATLIYRLLRWGQPYVDEGAQAYENRYRQLRLQNLTARVNALGYKLTPINAGA

SEQ ID NO: 220494 - protein, 304 aa, unidentified
MDATVVGIDVAKDRLDVCVRPGNESFVIARSGAGIEDLVERLQKLSPRIVAIEATGGFETVVAAGLAAAALPVVVVNPAQVRAFAQALGKRAKTDPIDAAVIAHFAEATKVEPRPLPDAMTRLLADLVARRRQIVEMMAAEGQRGRRLTHKRLQNSIARLRKALEKELAELDSEIGDHVRGSPVWAEKEELLASVPGVGPVVARTLIGELPELGSLDRRKVAALVGLAPWTRQSGQWRGKSFIGGGRKSVRTALFMAAMVASRHNPVLKQFRDKLVAIIAVARKLLIILNAILRDKTPWQPKTA

SEQ ID NO: 220495 - protein, 434 aa, unidentified
MKRYVGIDLHKQLVVGHIVDEAGKTVDTFRYHSVDGPTLALIGRRRLTQEDEVVLEATTHCWAVVRALEPFVARVVVSNPMATKAIAKAKVKTDKVDASVLSHLLRLGYLPEVWQPDHATRDLREWTARRSRVVGQRTAVINRLRSTLAQRLMHCPYDMTSRAARDWVASRDVDADTRWLLESDLRLMDSLQAELDAMDKLLAKRGYVDPRVKLLMTLPGVGQHTAQALLAAIGDIARFRDADSLASYLGLVPSTRQSADHCYHGPITKQGRSHTRCLLVQSAHAVHSHPGPLGYFFRRLKKRKPHNVAVVAVAHKLVLLAWHVLTKGEPYRYAQPQTTEMKLAELRMRATGQARRSGPATGGKSRGKVPEGSRVIKALSVVYQNEGVPVVTSAPPGERRHLAESKLQAFAESVQQERIVPRRSAQQLADKKTR

SEQ ID NO: 220496 - protein, 316 aa, unidentified
MEQSKIYVGIDVSKDRLDIAVHGADKRWSFTNDEGGIEQTVKCIKELSPVLVVLEATGGIELPVVASLGAAGVPVAVINPRQARDFGKATGKLAKTDALDAKVLAHFAAAVHPKAQELPDATAQEFAAILARRRQLVEMLTAEKNRSRTAVKPVRERIRAHVSWLEQELDSTDKDLDRAIRGSPLWREKDDLLKSVPGVGPVLSSTLLGQLPELGTLNRKQIAALVGVAPLNRDSGKFRGKRAVWGGRASVRAALYMATLVATCYNPVIKVFYDRLCAIGKPKKVALTACMRKLLTILNAMVKNRTYWAPVCPANS

SEQ ID NO: 220497 - protein, 324 aa, unidentified
MIDGILGIDVCKNTLDVSISSYTKVRTKSFTNSPDGWRHLLDWLIAHKNQRVHACLESTGRYSLGIACALYEADHVVSIINPAQIRDFVRTKLGRNKTDGVDASHIREYCELFKPSPWAPPSEAHRRLGELQTIRSGIIAGLTEWKNRKNSGIVDAEAQALADATISHFTSQLGAVDKAIALTIDNDCDLQSKRDLLLSISGVGETLAGVVLAELPGPDVLRSSAEVVAYAGLNPRQHQSGTSIDRATRISKIGNAVLRAALYMPALSAMRYNSAIVALVTRLKSRGRLKPKQIVVAAMRKLLVLCFGVLKTGRPFDAAIAMGG

SEQ ID NO: 220498 - protein, 318 aa, unidentified
MNTAKNQNEITVGVDTGKQQLDIYIHPLELYFTTSNDEKGIADAVNEIRKHQPTRIVIEATGRLEHVFIMACAKAQLPFVVANPAQVKKFAGAVGQVAKTDKLDARLIAHYGAVIKPELSTLRPDELRRMSDLLSRRQQLLVMQTMEKNRLQIMPKELLSSIKPILTALKNQLAKIDHQLLKLIENSPQYQHKNALLQSVPGVGPVVALSLISNMPELGCLTNKQAAALVGVAPINRDSGSYQGQRRIRGGRAQIRTVMYMAMMSAMQCNPVFKATYQRLLAAGKAKKTAIIACVRKMVVILNAMLRDGVPWNPAMGQ

SEQ ID NO: 220499 - protein, 335 aa, unidentified
MKTPVIGMDIAKHVFQLHAVNVATGKIERVKLKRGDVSNFFAKRERSLVVIEACGSAHHWARQLGQLGHDVRLICAHSVRPFVLRNKSDAADARAIWTAAQQPEARFVAIKSEAQQSVLALHRIRAQLMKVRIMQTNALRSILYEFGEILSEGYQSFAKEIAPALARTSERLPSMLVDSLREQWARIQAVNEDIAVLERRLSHALRDSPECQRIAEIPGVGLLTATATVSTIGDPATFHSGREFAAWLGLVPRQTGTGGRIRQLGLSKRGDTYLRTLLMHGARAVIARCTHTPWLDDLLTRRPFNVAVAAVANKLARTIWALLSRQTRYEAPFHA

SEQ ID NO: 220500 - protein, 320 aa, unidentified
MTYIGIDVSKDSFVAAYPKKGDYKTLKFANTTSGVRKFINSLPAECHCVMEATGNYSMLLLYLLQQANITVSMENPQKIKHFARAMLYTTKTDEIDAQLIAKYGEKMEPEPYRIPSESIILLKQKRTVLRQLKKQLTMMINLQHSLSVLPKQDPAAKVATEQTIKFLRKQISKLEDEITNLSNKEFKRQMELLTSIKGIGENIASALIMATGGFTYFSSAKQISRFLGLCPTYQQSGTSVNFKGHINRNGDAHLRSQLYVIAFASIRCNSACKEMYERLRARGKSGKVAIVAVANKLIRLAFAVVTNNRPYIDGYVSTLA

SEQ ID NO: 220501 - protein, 356 aa, unidentified
MTKVKTNFAEQTIYVGLDIHKRSWNAALYLNDQYLRNVHQPPSPQTLYKFLQTNYPGADYVCAYEGGKFGYWIQRQLSSKGIKCIVVNPADIPATHKDEVSKTDVRDARGIAMALQCGQLRGIYIPTIQQESDRSLVRHRKKIWRDLVRCKNRIKGFLDYTGIQLPDRFSNSNWSKNFLTWLLGLQFEYSSSRTTLDYMVKEAELLRKELLSISNDIRKLMRSKEYKKLYYLLRTITGIGPLTAALLITEIGDMKRFPSFYELNSFIGLLPTEHSSGEREVRGRLTIRRHRQLRSDLIECAWTAKRTDPALSIYYHEQLKRGKEPKLIIVKIARKLLSRIRYVWLTEKAYERGVVK

SEQ ID NO: 220502 - protein, 337 aa, unidentified
MKFCGIDLHSNNSVVVVTDETDRVLVSRHCPNQLTPILSLLEPHRAELVGVVVESTYNWYWLVDGLKAAGFEVKLAHPVAMKRYDGLKHSDDKDDATFLAHLLRLGILPTGYIHPPQERALRDLARKRIQLVRSRTQHILSVENIMARQFGQRLSCNEVKGLSATSVDRLGLPTDVALAMKANVAIVQALQIQIDFLEERLLHEAYLRPEFSLLKTMPGIGEVLATVIMLETGNIERFADVGHFASYARCVKSAHYSNGKKKGEGNAKNGNAYLIWAYIEAANFARRFSEDAKRFFEKKKAKTNAVVATKALAHKLARASYHILKEKQPFDARRCFA

SEQ ID NO: 220503 - protein, 468 aa, unidentified
MGLRDAIGIDPDAKGFVCAYVKLSGAKATTKVYMSTDSDLKAFLYWVKGQGNVIVAIEGANGFSRPLEKTLREAGVIFYSFKPADTNTFRKAVLGQNKDNRKDAESVARYAMALETQGKLESYRRVWFADAELQLLTRHYERKSQAMTAETNRLWKLLRLASPDLYLALRGSHPQVELSENIIKSQGILTLLSEKPELSDWKDLTNEQMLESMGGGKYKGRENLIEQLQMLTESFTPVSPAMQLLIRSSAQQIQRLKTEQAEIVKMLEVLTSNNAAVQTLKQIRGISTRTAATMIAEIIDIPRFPREYSLAGYSGLGMKEHSTGDKFRMVHMQLFNHRLKDAFMTAARNFVLYNPESHLTGYHRNLVKRGMSSMEATKRVARALVRLIYRTLFTLTVQETVATETDWIKEEEGEMASGFIRSDQSHKSNKSPSPSLPSKISGRKNVKGASEKKPRTVNRREAALKILS

SEQ ID NO: 220504 - protein, 341 aa, unidentified
MKEFIRIGVDLAKNYFQVHTLESEDGRATTRKLSRQAMRKFFLETKPCLVGMEACGSAHYWSRELQAMGHEVRLIPPIYVKPYVKRGKNDAADAAAICEAMSRPGMRFVPVKSEDQQATLMLHKTRELLIKQKTMSVNALRGHLFEFGVVAAKGVGRVDELIEKAESDAKLPETAKATVKILAQLMETIDASIAALDQEIAAVHAQSPVSRLLAGIPGIGKITASAIVASVPDSSIFKSGRDFAAWLGSTPRQNSSGGKEKLGSITKQGNRYIRRLLVLGATSLLRVAGKRKGVLRDWMVALLARKPARLVTVALANKLARIVWAVMMTGETFRTETFERA

SEQ ID NO: 220505 - protein, 387 aa, unidentified
MSQTIATVMPAAVDYETTLVLAIEVSNKSWVLAAQVPGLPHTKAKRTIEPEAEALLAAIAGYRARASAMGRSIERVIAVYEAGWSGFWLARWLMRQGVEVHVVQPSSVPVDRRVRRAKSDGIDSELLLRTLLAWLRGEPRVCSMVPVPDEADEDARRCVRERSELISERIGLTNRIGAILATLGVSDYNPLLRNRSRRLAELRTALGEPLPANAHAKIKHLLARLELVLTQIAELERERDAVMETEASDRASRMIQQLTTLRGIGVQSATVLVREAFVRCFANGKALGSYAGLASSPYSSGGIDREQGIGKAGNRRVRTVMVELAWLWTRYQPGVAQVCWFRERVGATGRRVRKVMAVALARKLLIALWRFVIDGVLPEGAVLKPAA

SEQ ID NO: 220506 - protein, 407 aa, unidentified
MEVYVGVDWGGLSHAVCVVDAKGRVLDRFQASHDREGLQALALRLMKHGEPGDIPIAIERPSGLLVDALVEAGFVLMPIHPNAVKACRPRYRAVSAKSDPGDAYILADILRTDGHRLTQLRPQSDAIKALRGLVRGRDDLVSSRVALANQLTALLDGFWPGAALIFADVATPIALAFIERYPTPESAARLGPKPLAGFLAQHSYCGRRSAEALLERLHAAPAGRAGETESDAKGELVRALARTLQSLVGEIARITHRIEHMIAELPDGRIVMSFPRTGRVCAAQILAELGDVRERFQTPDQLFAEAGVAPVTYASGKSRGVGWRWACNKRLRAAITCFADNSRHQSPWAADIYKRARARGCDHPHAIRILGRAWARVLWRAWTDRLHYDPTRHAGAQPFQAPVGASG

SEQ ID NO: 220507 - protein, 428 aa, unidentified
MSITQNTKIRRITESTLVIGADISKKVHVARACDVRGIELGSPLTFKNERRGFRGLKKWVRTLMLKHSCDNVVFGVEPTGHYWINLAQFLRREGIRVVVVNPFHVKKTKELEDNSPTKNDRKDARVISLLVKDGRYSEPNIPEDIYADLRVGMNERDRLSVDLKRVQARIHNWLERYFPEFTEVFKDWEGKAALVCLHKFPCPADVEQMTALDIVCEWRQGGISRGVGLSKANFLKEMAEQSIGLTEGLKMAHRELEILLGQYDLYQKQLDQLLSEVEQLLSEIPGAQNMLSVPGVGLVTVAGFLAEVGELTRYDNPRQIQKLAGLNLKENSSGEHKGQTTITKRGRPRLRSLLFRCVIPLLAKNTEFRLQHEYYTQRTENPLKKMQSAIALSCRLIRVLFALGRKEVSYDPVKMLGPVHLERTQNVA

SEQ ID NO: 220508 - protein, 413 aa, unidentified
MKQIYSNFVAHIGLDWSDQKHDVCLKSSNSDKLEYTVIQHTPEAIEDWVLSLQQRFKNRPIAICLELKSGPVVYALLKYDFIVLFPIPPNALAKYREAFTQSGAKDDPSDAYLEMDYLLKHPGALKPLVPDSKETRILQRLVEDRRLLVNDKVRITNRITAAVKSYFPQVLQWFNDIDTVMFCDFIQQWSTLEKAKRAKKATLIKFFKSHRCVRANVIEKRLSTIKQAMPLTEDDAVIIPFERLTRVLVVQLSNVLSAIHEYDLEIAMRFRTHDEYDIFEALPGAGPVFGPRLLVAFGTNRQRFGSSDEVSRLSGVAPVLKRSGKKSWVHWRYSCPKFLRQTFVEWANQTIRYSFWAREFYNEKRASGKSHQATIRALAFKWIRIIFSCWKNKIPYDESTYLFALKQKKANAI

SEQ ID NO: 220509 - protein, 403 aa, unidentified
MKSVLSIDVANGKSEVLLITEHGEVLIEPYEVKHCLSDFNSLKNKIDTFKIDDLTIFMESTSTYHLPIQRFFTKNNYNVQVINPILGKNNTRNLRKTKTDIEDCYNLADLFFKNTVKIHTKNMNDIYSSMVELSRQEKHLTESLVRSKNRFKQIIANSFPEYIKCFTANDIFGKTSLNFINEFPHADIIKEKRIDELANNIYKSCKNGCSYNRCLTKAKKIKELASNSYPGIEKDSCEVDNLINIVDIISYNNLKLNELKQNIIKLAKQTPYFEIINSIYGIGETSTAQIIAELGDINRFQNIKQLNAFCGLDPTIVQSGKSINYHGPISKRGNRNARKILFITCCSIIRASVLHNIDSEILLYYRKKQADNKHFKECITACSTKLLRIIFAMCKNNSLYTQK

SEQ ID NO: 220510 - protein, 463 aa, unidentified
MRDAIGIDPDSKGFVCAQVKASAPVKTRGYLATEAELGKFVKWVKGEGDLIVAIEGSNGLSKPLEKKLRETGVVFYSFKPADTEKFRKAVLGQNKDNQKDAESVARYAMALESQGKLDGYRRVWFPDAELQLLSRGYERKSQAMTAEINRLWKLIRHASSELYLALGGNHPEVEMKDNMLKNQGILALLGQHPNFQEWKDLSEAQFLAAMGGNHNGRRELITQLCKLAGNLTPVRPAMALMIQDSARTIQRLKREEDDIREMLEQLTKDSPAVQALKEKRGIGTITAATMIAEIIDIRRFSRDDNLAGYMGLGMREHSTGDTTRMVPSQLFNHRLKDAFMTAARNYVRFNTDSHLAGYYRNLVKAGMKPLEATKRVARALVRVIFRELYALQGSEANPPEIEEAKEGKSDVASGATRSEQSHSSNTSPSSLTSKKAPRPIKVKSTRRLRTTKRRPNAVLKKSC

SEQ ID NO: 220511 - protein, 418 aa, unidentified
MHKAKVTACVRTPDRSGGRGQEVREFKTTVRELLALRDWLAGLGVTHVAMEATGVYWKPVWAVLEDEFELLLCNAAHVKNVPGRKTDVGDAQWLCQLLEFGLLRGSFVAPRPVRRLRELTRRRRTLVRERSQEANRLHKALEDTGIKLDCVASDILGVSGRAMLDALLAGQRDPAALADLARTQLRGKRELLIEAFEGVRFNADHALLIGGILRHIDFLELEIAALNDAIETHLKTATDPEGQTVAFDAAVTLLCSLPGIAARGAQMMLGEFGTDMTRFPTDKHFASWAAQCPGNHQSAGKRKSGRTRRGPTWLDSALHDAAMGAIRAKDQHFERKYRRIKARSGHMVAIGAVKHALLIAIYHMLSTAELYRPPTPNPQAEAKARQRATQRYVAQLERLGHTVTLQTATSTTPAVAEP

SEQ ID NO: 220512 - protein, 331 aa, unidentified
MFPVGIDVSKNTLDLCMLYDGIKGRIKTRNIQNNRHSVENILRWLRLQHCSPEDVHVVMEATGVYHERLATELHDAGFRVSLANPHRSREFARGMGIMTKTDKVDAYMLACYAFLKKPHRWEPPAPEIRYLGALLRRRDVLLGDALREENRLEKYLSTDTPADIISSCRRMAQLLREEVSNIERQIKAHIKASPALRRDYTLLTSIKSVGPQLGMHMLVVLRSHNFVSAEQAAAFLGVVPIEKRSGTSVRSRPRMSKIGPPQLRAKLYMSALCGKIYNKRMRNIYDEMCLRGKPKMVAIGALMRKLVHWCYGVLKTGIVFNDEGLKQVLST

SEQ ID NO: 220513 - protein, 406 aa, unidentified
MRDYIGVDWAAKEHAVWVEDETGTKVMSRTVAQTVDGRQDWGRWLDERRAAGHERWAAIEKPEGRIVDFLLDHGVVVYPINPKSLDRARDRFRVSSAKSDPFDARGLAGFLRTDQSHLQPLRPSSEAAQELKGLTRDHARLVRQQTRLLHQLTATLKAYYPLALEVCEDLKSQWARAFVRAYATPAAVTALTERRWQRWGRPHRLRAERIEDLWALLHQPQLPVPAHVVRVNARLVGALLEQLDVTRQTVQTYREAIEDFFARMPAPEWTTSLPGAGSGTTVPTLYAELGDAVGRWQSFRHLQAHGGTVPVTDRSGQHVAVSFRFACNLHLRQAVYQFAFQSLTKSEWARAYYDRARKRGHKHHHAVRALGAKWLKILFALWRRKVAYDETYHLATMARQALRRPA

SEQ ID NO: 220514 - protein, 395 aa, unidentified
MFIVGIDIAKRSHEAIIIAEDGQVVRKAFSFRNNCTGYNLLLEQVRRLTLVKSQIVFAMESTAHYWLALYARLLKDGYAVMVLNPIQSHSLRELYIRKAKTDARDSLIIADLVRFGRCKASNVPQDKILALRELCRSRAYLVDMAADLKRKLIALLDRIFPEYESLFDSVFSKASIAVLSKYSTPQKVKNANLRKLTDILMESSNGHFGEWKAHQLKEVACSSFGIDDSGGVYSTLLGMFLEQILSLTAQADSLEKQISVFFQEFNNPLTSIPGVGTVLAATILSEIGDITRFSSADKLLAYAGLDPSVKQSGEFKSNQNRMSKRGSPYLRRAIWLASTVAVHRDPMFQTYYEKKISEGLHYMNVIGHVSRKMTAVIFAVLRDGQPYQPILQSAG

SEQ ID NO: 220515 - protein, 322 aa, unidentified
MTSPTHELDPAAHAGIDVSKERLDVHLLPKGETFAVNNDPEGIDALVERLLKERPELVVLEATGRYERPAATAIAAAGIAVAVLNPRQARDFAKATGRLAKTDKIDAQILARFAAAIEPSPSVLPDQEAQALQAILTRRRQLILMLVSEKNRRLMAPEALAKRIAAHIRWLEKELERTDRELDEAVQQSEVWRRNEQLLRSVPGVGPVLARTLLAELPELGTITHKRLSSLVGVAPFNRDSGKIRGKREVWGGRAPVRATLYMGALVATRHNPTLKEFYERLLAAGKPKKVALVACMRKLLSILNAVMRDRANWRCPHVLTP

SEQ ID NO: 220516 - protein, 352 aa, unidentified
MPFYIASDFHAHQQTVAWCDTETGETQITTLKHNLEQVRVFYASLPPGIVGVEASSKARWFEDLLEETGHQLVVGNPVLIRRRATSRHKSDRRDAELILQLLLRDEFPAIWRRSREQTQVLEILKLRHSLVCQRTQVYNRLQALAKSCGLGKARTRTTAFQERFKASDLDEVEALQRSQLLQLIGNFDGQLKELDKWLAKRAALDPQVQLLVTQPGVGNLTALALVNSLGDISRFTHPTKQVPAYFGLDPLEKESAGKRQAAGTSRAGSAITRFLLGQAAQSAPRRDPQLKAFYKRLAKKKPKGVAKTAVARKLLIKLVIMLRDAITAEEFDRRGGTSGGGSKSSWIERSVV

SEQ ID NO: 220517 - protein, 344 aa, unidentified
MDHFAGLDVSVKETSICIVDETGKIVREVKVASEPEALLAVLSNAAYHFKRIGLEAGPLSQWLFSALAEVELPVVCVETRHMQAVLKAQINKTDRNDARGIAQMMRVGLYRPVHVKTLRSQKLRMLLTHRKLLQSKAIAIENDLRGTLRNFGLKVGIVGKVKFEARIKELVENLPDLAALVEPLLIVRRVLREQIIILHRRLLAIVRDDEVCRRLMTTPGVGPVVALTYRATVDVPARFRKSKAVGAVFGLTCSKYQSGEIDRNGRISRCGDEMMRVMLYEAAQSMLHSKKWSWLKAWAMQIARRRGMKKAIVALARRLAVIMHRMWVDGTEFRWTREQAAAAA

SEQ ID NO: 220518 - protein, 344 aa, unidentified
MNLTRIGVDLAKQVFQVHGVDRYEKVQVKRTLSRRQVRSYFAKQAPCLIGMEACASAHYWARELGQLGHTVKLIPPQFVKPYVKSQKNDANDAEAICEAVGRPNMRFVTIKSAAQQDIQALHRIRSELVRQRTAKANQIRGLLSEYGIVVPTGIGTLRRAIPEIQEDAENGLSSLFRRALEGLRRDLEVFDTRVAELDAEIVQVAVNDETAQRLQSIPGIGPMGATALVAAFGDARQFARGRDLAASLGLTPGQHSSGGKERLLGMTKRGDSYLRTLLIHGARAVLKVAGRKDDPRSRWVMSVAHRRHKNVAAVALANKMARIAWVLLRRGGTYNSLHGMTATA

SEQ ID NO: 220519 - protein, 413 aa, unidentified
MDKIYDICCGIDVHKKLIVACLNHKRKKELREFGATTRELMELAEWLQKNECEIVAMESTGSYWKPLYNIMESYGLHAIVVNPAHMKAVPGRKTDVKDAEWIAELLQHGLLQPSYIPSKDQRELRELVQYRKSLVGERTRELNRLQKMLEGANIKLSGTVTNINGKSARKILEYILSGNEIDEKKYDEMYEEKLIAHNLKASKEQILDDLKGFMSPLQRRMLKELLQHLDELNVHIENLNDEIDNFMKPEEKQASQMIQDVTGIGNTSAQAIIAVIGTDMERFPSDRHISSWAGLCPGDNVSAKKRKSGKIRKGNALLKSTLVLCAHAAVRHKSSYFHAQFKRISTHRGKKRAYVAVAHSILIAIYHILKDGVKYQDLGAEYYNQFNAERKIHAYLKKLKALGWEPPKEAVPA

SEQ ID NO: 220520 - protein, 344 aa, unidentified
MDQFAGLDVSVKETSVCIVDDTGRIVREVKVASEPEDLLRILSNPAYHFKRIGLEAGPLSQWLFSALAEAGLSVICVETRHMRAVLKAQINKTDRNDARGMAQMMRAGLYRPVHVKTLRSQKLRMLLTHRKLLQSKAIAIDNDLRGTLRNFGLKVGMVGTVKFEARIKELVENLPDLAVLVEPLLVVRRVLREQIGILHRRLLAIVRDDDVCRRLMTIPGVGPVVALTYRATVDVPARFRNSKAVGAVLGLTPAKYQSGEINRTGAISKCGDEMMRVMLYEAAQVMLTRTNKWSWLKAWAMKIAKHRGMKKAIVALARRLAVIMHRIWVDGTEFRWTREETAAA

SEQ ID NO: 220521 - protein, 350 aa, unidentified
MLIIGCDYHPGFQQIAYVDSETGELQERRLPHPEGAEKFYRDLWEGSVKVRVGMEASGHARWFERLLEELSFELWMGDAAKIRAKRVRKQRTDRLDAQHILKLMLKDDFPKIWVPNWGNRDLRQLLWHRHRMVQTRTRIMNQLQAVAINEGVRYKKRLWRDAGRKQLESLRLAQWASRRRQDLLEVLDRINPTIAELTQAIENEAEKCCEARRLMTHPGVGALTAVAFVLIIGDAHRFDCGKQIAAYLGLVPEEDSSGERRRLGHISKQGNSLLRFLLVEAAQATARSDGRWRNQFFHLAQRRGRKIAKVAMARRLAVRLYWMWRRGWDYEQLQSFGSRAGQPGYPHGVQ

SEQ ID NO: 220522 - protein, 347 aa, unidentified
MYSSDLGKYKSVACLYCPATAEAAFRTLDTSRAELTRLIARARPAVVVIEACTLSGWVHDLCGELGVPCRVANTAAEAWKYKHAKRKTDRDDALRLAQLAALGQLPEVVVPAKRVREWRALIAHRQALVGQRVAAQNRVRAVLVGQGLPAPRGAKAWTAAGLAGMAQFARPLAQCGPDELWRGLLDLALTAYRQAEELAAVAEARLDAIGMADPRVQLLDTVPGLGPRTAEAVVAHLGDPKRFRTGKQVAAYGGLVPRQYQSGEDDRRGRITKRGPAVLRKLLVQCAWAMLRYNRWARAVFDRLSRGRARRKQAVVALARKVLVRCWAMLRDGAAWRGEPEPAAVAA

SEQ ID NO: 220523 - protein, 346 aa, unidentified
MPRKRILVKSIDTSISYQVIGIDLAKHLVSACLITGAGEIFGIDRLTYDDLLKSAERMSPTLFCMEPCPEVHYLAEKLQGYGHHTKVIDGAAVKEYIKTHFGGQKTDLNDAQAIAFLSLDTNLPEITPKNTSNSVLSSIQAVREQFRKEYIQSFVSLKGICQRWGLPISKGVMNKNKVEELVSESKKIPQEVKDWLLELLQSCRELQKRLNKISKYLKEYADNDEICQKIMSVPGIGPITATRLKATIGDIQRFEKPKSIVAYYGLVPKSKATGHNEKKGGITRRGDRVARSLLIEGAGVVLNLAAKGFLRSKPLNKWIEKKEKTQNAWGKPGRTYIIFNKTSLTH

SEQ ID NO: 220524 - protein, 312 aa, unidentified
MTEHCYGGIDVSKDRLDVMVLPDRKSFSVDNNAAGYSELVKRLRGLSIAAIGIEPSGGYERAVIRALLAADLSVRRINPNKLRQFGRARGVLAKNDRLDARLIAEYVAIMPTRVVQRDPATEQLAEVVTMRRQLCDEHVAVENQTAHLEDAMLRRLNKRRLARLAADILLLDRRMAQIIASNANLTRRYELLTSMQGVGPTLACTLVALLPELGQMSRKQIAALVGLAPYDFDSGRLKGHRCIYGGRLPVRNVLYMAALSACRYNPALKVFHHRLAATNKKPKVIIVAVMRKMITTLNAMLRDNVAWQPRAA

SEQ ID NO: 220525 - protein, 391 aa, unidentified
MRGAIIFGEFDVGRPCDAQRMIWTPSTRGGTVGAILDGARRSNREKESTVKITTIGIDLAKTTLSVHGVDDNGKVVLRKSMSRSKLLEFMANREPCLVGMEACGGAHDLARRLIAMGHRARLMAARFVQPYRKSQKNDGNDAEAICEAVARPNMRFVPVKSAEQQALLSVHRVRLQLIETRTALINQLRGLLAEFGILMPKGRYQLRTHATPALEHPDLPELARTVLKELNTRIQALDIEILSQDRRIEAYARDNVLAQRLIAICGIGPISASAIVASVGDAKLFKNGRQFCAWLGLVPRQYSTGGKARLGRITKRGDVYLRTLLVHGARSALNVLAKRTDRLSTWIQSLSARRGYKKAIVALAAKNARIAWAVLATGKPYEPRGCAQAAQ

SEQ ID NO: 220526 - protein, 327 aa, unidentified
MKQFYLGIDVSKEAFSVALLGGQQPHRGHFINDLEGFERLGRWLKKQQAKRVHACMEATNRYWEPLALFLHKQGLEVSVVNPKLIKRHSQSIMQRNKTDPQDALTIADYCLKQRPKRWQPPSLAYRELREMVRHVSALKSDRTRALNRKQSGLGNVTVLTAIEAQIEFLNQQIADLEQRIVNHIDQDPDLKQDKELLLSIPGIGDTTAAVFLAEVQDVSRFSQAKQLDAYAGLTPGQRQSGSSVHGRPHLVKWGNAQLRTAFYMPALSAYRWNPIIAGLHQRMLGRGMSKMTIIVACMRKLLHLCYGVLKTRKPFDPNHSASFHFSA

SEQ ID NO: 220527 - protein, 313 aa, unidentified
MSQNNPNILYVGLDVAKLSLQLHLAGRFHLLANDAKGHAQLRKRLRGHPHAHVVCEATGGYEQAVVRALQSAGVPVSIVEAGRVRYFARAQGQRAKTDPIDAAVLSEYGTTFQPAATAPASPQQQQLAELAQRRRQLIHLLVSERNHAEHYTDAFRVRQSRQLVKALAKQITQCDEAITTLIAQDTDLARKAERLKAIPGVGPVVAATRLAEMPELGKLNPQTAAALAGVAPYNRDSGGQPGSRRINGGRAAVRRALDMATLSAVRHDRILKEFYLRLRAAGKKPRVAMTACMRKLVILMNRLLKNYDFQLAS

SEQ ID NO: 220528 - protein, 395 aa, unidentified
MFIVGIDIAKRSHEAIIITEDGQVVRKAFSFRNNCTGYNLLLEQVRRLTLVKSQIVFAMESTAHYWLALYARLLKDGYTVMVLNPIQSHSLRELYIRKAKTDARDSLIIADLVRFDRCKASNVPQDKILALRELCRSRAYLVDMAADLKRKLIALLDRIFPEYESLFDSVFSKASIAVLSKYSTPQKVKNANLRKLTDILMESSNGHFGEWKAHQLKEAACSSFGIDDSDGVYSTLLGMFLEQILSLTAQADSLEKQISVFFQEFNNPLTSIPGVGTVLAATSLSEIGDITRFSSADKLLAYAGLDPSVKQSGEFKSNQNRMSKRGSPYLRRAIWLASTVAVHRDPMFQTYNEKKLSEGLHYMNVIGHVSRKMTAVIFAVLRDGQPYQPILQSAG

SEQ ID NO: 220529 - protein, 347 aa, unidentified
MRPKLLMENDYILRQCVGIDVSKETLVVTMCMFSFAEEAHYSDVKTFKNNKTGFNQLVKWSRKEAYTDKPLRYVMEATGVYHEELANHLVKIGCTVIIMMPNKAREFAIWEGMISKNDTIDSRVLALVGCVKRSMRPWQPSKEIYHELRAMTRFAQDTKKLRLALKNHLEALEHSHQAEKSIVKHYEAMVSYLDKRLKMNLKNMKEKVASDEALNKKVENIITAPSLGFTSVITVIAETNGFALIQNRKQLTSYAGFDVKDNQSGNVKGTSRISKKGNSRIRAILYMPAVQAQLRSKHLKEAYDRIVQKHPDKKMIAVTAMERRLLLLIYALWKSDKPYDEDHNKKK

SEQ ID NO: 220530 - protein, 415 aa, unidentified
MRSPVVSGWTARSEDVPLRQLIAVPVDVGKSSAAVMAVDFAGRAVMPAMDFEITRDGVAGMLARLQRALPAEVRLVRVGVEAAGHYHRPLTAPGVWPAGWQVVELNPAHVTAQRRVNGSRGVKTDRVDLAAIADLLLAGRGLPVVVADEALMELSAWAGHRRRRIQVRTATKNQLLGQLDRAFPGVTRALPDVLRTKAGRLVAAHFADPARLARLGEDRFRAFAAHRGVRVSGVMAARLVHAARAAIPVPEAPVARQVLAADLALLDDLDTQIGQAEDRLAALLPATEYAILTTVPGWGVVRAAAYAAACGPSARWASAAKIYRAAGLTPVVYESAGRRRDGGISREGSVHLRRALLDLGTGLWLQDPAARDYARSLRERGKPGGIITCALAKRASKIAYAMVRDQAPYDPARWR

SEQ ID NO: 220531 - protein, 350 aa, unidentified
MLIIGCDYHPGFQQIAFVDTETGECGERRLAHREEAEQFYRKLSERSLRVRVGMEASGHARWFERWLSDLQFELWIGDAAEIRTKRVRKQKTDRQDAQLLLRLMVEDRFPRIWVADADNRDLRQLLWHRHRLVQMRTRIMNQLHVVALNEGVRRKKALWRPAGRSELESLLLAPWSKRRRQDLLDVFDQLTPKIQELTRALEEEVEKRPVARRLMTHPGVGPLTALAFELVIGTPERFHCGKQIASYVGLVPSEESSGDRRRLGHISKQGNSLLRFLLVEAAQVTVRSQPQWRNKFFHLAMRRGRKIAKVAMARKLAVHLYWMWRRGWDYGQFAKLGSHAGEPGNRHGVQ

SEQ ID NO: 220532 - protein, 315 aa, unidentified
MTSLICAGIDAGQRSLDIGLAPSGRTFRLPNTAAALGPLLERLQRDGVQRVVLEAAGTYAQPVAHALDAAGFAVGVVNPRRIKAFREAEGKRAKTDRLDAGLIARFALVMTDAIRPLPSAEQRTLKALATRRRQLTEMIAMEKTRLKQALEPAVAESHRAAIADLSRACAKVEALIEDGLAKDPRRAEDRRILTSIPGIGPRIAQVLLTEMPELGRCDRKAIASLAGLAPHISQSGKAPPRAAIAGGRPCIRAALYMSALVAVRRDPKMKLAHHALRDSGKPAKVALVAIARRILITANAMIKAQTPYKPDLNHT

SEQ ID NO: 220533 - protein, 342 aa, unidentified
MEYYAGIDVSLECSSVCVVDANGKIVCEAKVASEPQALIAWFGSLGFGLQRIGLEAGPLSQWLFAAMKAAGLAVELLETRHVRKAFEAMPVKSDRNDARGIAQLMRLGWFRPVHCKSMSAQETRSLLTARKLVQSKLQDVENSLRGILRGFGLKVGKTTGQKFAGRIEELVAGHPHLQTIAKALLAVRAVLRAEFAAFEKQTRRMVRSDTQARLLTSVPAVGPIVALTYASAIDDPARFKSSKQAGAHFGLTPKKYQSGETDYTGRISKIGDASVRTALYEAANVMLTKPVKGCSRLKSWAMRIKRRAGMSKAKVALARRLAVIMHRMLADGTPFNAAAAAA

SEQ ID NO: 220534 - protein, 321 aa, unidentified
MGRVVIGMDPHKRSATIEIIDDRETVLAGGRFGTDRDGYRAMLAAGRRHPDRIWAVEGCNGIGRHIAQRLVADGETVVDVPPKLSARVRVFATGQGRKTDPVDAHSVAVAALRAKGLRQVVVDDETVALRLLVDRRDELGRARTDLVNRIHKLLLELLPGGAKTFLRADQARALLATIRPRDLVGRTRRRLASELIAELVQIDKKIKAANTELTDLVTASGSSLQDLNGIGPSGAARLIGDIGDIRRFASRGHFASWNGTAPLDASSGDQQRHRLSGPGTGASTACCTSWPSSSCATTPPAAPITAAAWPRARRRWKPSEH

SEQ ID NO: 220535 - protein, 400 aa, unidentified
MNYFLGIDIAKTNHVASLINNNGDIVIRAIKFTNSNEGFNKLLNTIQSKLGDLSNIEVAMEATGHYWLSLYSALTDNNFNVSVYNPYQIKSYRGAYNNRKQKNDIIDSIIIADYLRVFGSKESKFPEEKLLSLKQLTRFRANIVANVSSLKVQVIGLLDKVFPEYKKLFCDTFGNTSKQLLLNCPTPDDIINISTTKLANLLSKNSKGRFNKDTALHIKEVAKSSFGIKFTTDACSFEIKQLINQIVFLESQIDAVSKEIKELYNKLDSYLLSVPGIGDNLAPIILAEIGDINNFDKPSKLIAFAGTDPSENQSGNKLSSNDKTSKRGSPYLRHAIYTASLVAISNEPELRAYYDKKISEGKHHFVALAGISRKLLTIIYYILKEDRDYIRYDNIKDKLN

SEQ ID NO: 220536 - protein, 320 aa, unidentified
MPKLNDLSRSLTALELDSTLIAVIEMSLSNWLVAGIVPGIERQPLKKVGTDEQELLKLLYRWRDEATKAGHTVKRVAVAFEAGRDGFWLARWLRARDIEAYVIHPTSVAVSREHRRAKTDRLDTELLKRAFTGWLRGEPQHCQMAGIPTLSEEDARRPNRERENLICERTRIINRMKACLVRFGIRNFKPTLRKAPELLMRLHTPEGVPLAPNTMAEMRRDLARLRFVMDQIKEIENARLQWLEHAPEEKPLAMVRLLARVIGVGIETADMLVQEVLSRNMRDRRAIARYAGITGSPDESGRKRREKGLAKAGNARGSCR

SEQ ID NO: 220537 - protein, 343 aa, unidentified
MTHYAGIDVSLETSSICIVDGAGTIVRELKAESEPGALAAALTATELPFSRVGLEAGPMSQWLHAGLAEAGLPVVLVETRRLRAATKTMPVKTDRIDARAIAQVVRTGWFRAVHVKSELSQETRALLAARKLLVAKLRDVDNGVRGLLRGFGLKVGTVGERAFPRRARELAHSRPELAAVVEPLLQVREALLAGRERLHRLVLAAVRDEPTCRRLMTVPGVGPVTALTFCSAVDDPARFGRSRALGAHFGLTPRRYRSGETDRVGHISKQGDGLARQALYEAANVLLTRTSRWSALKAWGMSVARRAGMRRAKVAVARKLAGVLHRTWRDGTEFRRGRETAAA

SEQ ID NO: 220538 - protein, 409 aa, unidentified
MADYDIYVGIDWGTLTHQVCMTDAHGQPLDELAVAHSGPGLTALVAALRRSGGEPARIAVAIETPRGAVVDTLLEQGVHVYTLNPKQVDRFRDRHTVAGAKDDRRDALVLADALRTDRGAFHRLQPDDPRIVQLRELSHLTEDLTQERGRLANRLRAQLLRIWPAVLTLAPAADEPWLWTLLERAPDPAQAQRLPRRALRAVLATHRIRRITAEGLHAVLQEPCLPTAPGTVEAAREHVAVLVPRLRLVATQQTHCARRLEELLAALAAPDTAERREHRDVTILRSLPGVGRVVAATMLAEAARPLAARDYQMLRAYAGVAPVTRQSGKTRLVSMRRSCSGRLRTAVFHWATNSIRLDPRWRAHYDRLRQRHSHARALRGVADRMLGVLVVMLNTGTLYDPARRATRAA

SEQ ID NO: 220539 - protein, 341 aa, unidentified
MKQYIGVDLHRNSFTTCVWNEEGKSEIKRWPIQGLKVFARGLSAEDEVAVEATGNVRMFSEALKESGCRVRVVNPHQFDVISRSVKKTDEHDAKILAEFLAKGMLPEVRMKDGLQARVASLVQTRDKLVKLRTVLKNKVNNLLAGHGILLRKESLSSEKGLNEVLKQAVDDLEHVELEILVNEIRHLNGSIRKVEDIISEHGPKLPGWQNLTSIKGIGEVGASILLSTIGNIQDFEDEGKLAAYFGIVPRVHNSNGTEHSGHITKQGNKLARTALVQCALIAARYSPYLNQYYRKIEARRGTGKAIIALARKLLGIIYRTLKNGWVFKDFPNYILVTENAV

SEQ ID NO: 220540 - protein, 440 aa, unidentified
MEVINPNAAGIDIGSRSHFVAIGQGTEDVREFGVYNEDLKEIANWLKENEIETVAMESTGTYWQSLFAVLQAEGLSVILCNGKFTKNIKGKKSDVQDCQWIQKLHTMGLLSGSFLPDEATEQLRTYCRHRANLLDQAADTTRKMQKYLRLLNLRLDVVVNDITGLTGMKIIDSICKGEVNSKKLASLRNGNCKKSEQEIAKALETNGRKDYLFTLNHEYKMYLNLQSKIIECDTEIEKMLNLQINNDDNKKQHHIDKKVHKRINKNTPKNIDINLLSYQFFEGVDLLAIEGVSYSTVLTLMSEVGQGIHKFETAKQFASWLRLSPNNKISGGKVLSNKIPKGSNRLKIALRNAANAIGNLKNTALSNFFARISHRKGRVSAISATARKLAVIVWNMIVKGQPYIPLTEYQFVDQKRKKITAMKRLITKFEITTDDLNLQL

SEQ ID NO: 220541 - protein, 341 aa, unidentified
MGDYIGIDLHKTKSFVTRMTAQGHILEQVNLLHTTGALQHYLTALPADVHVAVEATGNWMWLYEQIEDRQLDLVLAHPLKVRAIASARIKTDKIDATTLAHLLRTDLLPTAYIPPRPIRDQRELLRYRASLVRLRTQVKNKIAAILTKTGVRTPTKTAFGVKSRRFLATVSVRPCYRLALDGYLRQLDHFTTEIRGADQVIAEQVTADPQAQLLCTIPGIGAYSALLIRSEIGDIHRFPDSRHLCSYAGLVPSVHTSADTTRLGRLTKQGSSWLRWILVEVSVHAINGAPQFRSLYYRVAKKHGHNVGRVAVARALVKTIYAMLTTQQPFRPIRKGSPVSA

SEQ ID NO: 220542 - protein, 343 aa, unidentified
MEHYAGIDVSLKESSVCIVDAKGKVVREVKVASEPECLVGYFDELDLSVVRVGLEAGPLSQWLHAALAASGREVVLLETRHVKAALSAMTVKTDRKDARGIAQLLRMGWYRPVHAKSPPAQDVRALLVGRKLLQGKLLDVELSIRGILRGYGLKVGEVSRGRFEARIHELIEGQAALSMVIGGMLAARTALWDEFTRLHRAMLKIARADQVCQRLMSTPGVGALVALTYRSAVDDPTRFGKSSTVGAYFGLTPKKYQSGETDRDGGVSKVGDAMVRTALFEAAHIMLTRATRFSSLKRWALDVAQRRGMKRAKVALARKLGVVLHRMWMDATDFRWSANAVAA

SEQ ID NO: 220543 - protein, 278 aa, unidentified
MQTITTIGLDIAKSVFQVHGIDAEGKVILRRQLKRRYVLAFFEKLPPCLVGIEACASSHHWSRELQALGHTVRLMPPAYVKPYVKRQKNDMADAEAICEAVTRANMRFVPTKTPEQQSVLMLHRTRHLFIRQQTSVINAIRAHLAEFGIVAPVGRRGVEELLNVVANPNDKRVPEIARACLLAFGVQLRRLKEQILEFDRMIIAWHRSSETSRRLDDCPGIGPALATALVATVADPKAFRSGRNFSAWIGIVPKQQSSGGKDRLGSISHAKIRNHRRI

SEQ ID NO: 220544 - protein, 357 aa, unidentified
MAALSIADVPAKVTIGVDTHKHSHIARAKDGLGRHLGQLEIETDPRGYAGLLAWAQEFGPVVTFGIEGTSSYGAGLTRFLRAQGQAVIEVLRPVRRDRRFGSKSDPIDADAAAGAVLSGKATAVPKAGDAGVEMVRALKIAKQTAIKARTQAVNAVKGLIVMAPDPIREQLRNLKTPALVRTCSAYRVDGASDPTSAIKLSLRSMCRRYVVLDQEVRSLEKELDALTIRLVPQLRQLFGVGQDVAATLVLAAGNSGDRLRSEASFSMLCGASPIPASSGMVQRHRLNRGGDRQANAALHQIVVVRLRYNEATRAYFAKRKAEGKSKKETFRCLKRYVAREVYRTLVDPRDEAVRSAA

SEQ ID NO: 220545 - protein, 331 aa, unidentified
MRVRKMFAALDIHKNFSHAIICGEDGRIIKEGRIKTTEEDIRKFFANYKPTKVALEATTLSTWIVDVLDAMGIEPKVAHPYKTRLIAESQIKTDKIDAEILVHLLRTNLLPTSYIPPRFIRELRALITQRVFYGRLSGKLKNRIYSELNRRGIKYETKRIFGNKGKEWLRSLNIRNITSNLSLLEHVEKEIKALDIEIIRIGKEIKEVRLLTTIPGVGWYSALLIYAYIGDIERFPSEEKFFSYAGLVPGVKQSGDKRYYGRIINQSCKLLRWILIQDTWAHICAAPDSKISRHYEKLRKKKCKQVAIVGAARKLAQVIYWMLKKGKEYEG

SEQ ID NO: 220546 - protein, 420 aa, unidentified
MVYLERGYNLKELPWSKIVSNSFLFKEACMILVGVDVAKDKHDCYIMTSEGEVLFKSFTIANNMEGFNQLYEKILSVIDNFDNVKIGLEATGHYSYNILGYLLDKGLTPYVINPLHSNLYRKSLSLRKTKTDKVDSHIIASMLMSDVSLKPYSNTLYHNEELKSLTRYHFTKVQERAKLKISISRLVTILFPELEKLVPTLQMNSIYALLYEFPSAHAISKAHLTRLTNLLNTTSKGHYTKDKAVLIREAAKNSIGSNMPAKSLELKHTIKLIKELTSEINEIEEEIKIIMNKINSPILTIPGIGLSTGAQILAEIGDFKNFSSPDKLLAFAGLSPSTYQSGNMYSSNTKMEKRGSKYLRFALFNAAIYVSYWEPTFSQYLKKKRVEGKHYYVAISHVVKKLVRLIFHLEKTNERYSTVV

SEQ ID NO: 220547 - protein, 410 aa, unidentified
MDLYCGIDWATAYHDVAVVDTDGRVVGRGRVGNDAAGFAQLLTLLAEVGDGPEHPIPVAIETDRGLWVAALRATGRVIYPINPLAASRYRARYALSGAKSDATDAVLLANIIRTDPDAHRPLPADTELAQAIRVLARAQQDAVWARQQIGNQIRDLLKDFYPAALAAFAELPSGGLARADARTILAAAPTPAAAAKLTPVRLRRLLAKAGRRRNLDRDVERLRTVFTDTYLHQPPVIENAMGIQLSALLGQFEAACAAADELAEAAIAHFEQHPDAAIITSFPGLGKLTGARVLAEIGDDRTRFADARGLKAFAGSAPITRASGKKTIVLHRHIKNRRLAAVGPIWALASLRASTGARRHFDARRANGDWNRQAQRHLFNKFLGQLHHCLHTRQPYDEHRAFPPPHTLAA

SEQ ID NO: 220548 - protein, 412 aa, unidentified
MNVVYERCCGLDVHKKMLVACLIVPGADGQRQKQVRSYSTMLADLLALRDWLTAAGCTHVAMESTGVYWKPIYNVLDGSVEVLVVNAQHLKAVPGRKTDVHDAEWIADLLQHGLLRASYIPSRAQRELRELTRTRTRLIQQRSQTINRLQKVLEDSNIKLGSVVSNIMGMSAQAMLKALLEGQTDPHLLAELAQGRLRAKREQLEQALVGSFQPHHRFLIQEHLTHIDYLDEAIARLSQEIAAQLRPFESLLGLLDTIVGINRRLAEVLLAEIGTDVKRFPTAKHLASWAGMCPGNDQSAGKRLSGRTRKGNRWLRTALMEAAHAAAHSKNTYLSAQYHRLASRRGKQKAVLALAHSILVIVYMVMSRQEAFKELGGNYFDERDRQAVEQRLVRRLEQPGYQVSLHPNDPAA

SEQ ID NO: 220549 - protein, 358 aa, unidentified
MSEITRVGVDLAKNLIQVHAVDAGGKVVTNRQLKREKFIQWCMQLPAMCLLAMESCSGAHYWARKLLELGLDARIIAAHLVTAYRQQGKGGKNDANDAAAICEAASRPSMRFVAVKTVDQQSMLSVHRLREGYKADRTACINRIRGLLAEFGMVFPQSPKVLSDQLSATLEDATNDLSGLARMAIDQAQKQWKELNEHIDWCDQRIAAHHKQNEQVRQATELMGVGPVTASAVVATVGNFKQFKNGSQFGAWLGLTPRQNSSGGKNNLGSITKHGEIYLRTLLIQGAMSAVMTAHRREDPISKWVHQLREKSGWQVAAVALANKNARILWAVLTKNQPFDAGHVSVKPGSPQAVMCAA

SEQ ID NO: 220550 - protein, 410 aa, unidentified
MQAMLERVAGLDVHRDTVAACVRVPGPGSTRQKFVQTFGTTTGDLIALRDWLKVHEVTHVAMESTGVYWKPVYYILEEAFTVLLVNPAHMKNVPGRKTDVKDCEWIAELQEHGLLNGSFIPPKPIRDLRDLTRRRTTVTQERAHEVQRLHSVLQDAGIKLSSVATNIMGVSGRAMIEALVKGTKDAEVLADLAKGRLKAKLGELRKALEGRFRGHHAFLASRILGHIDYLEDEIAEMDRAIEEQMRPFAEEAKRLETIAGVKRKTAEKVISEIGVNMKQFPSAKHLASWAGLCPGNNESAGKHKSGRTRKGNLHLRAALVESALAATRTRDSYFSAQYARIMRRRGHRKAVIAVAHSILVIAYHLLSRGKTYEELGRKFFEQRDKEAIQRRCTQQLERLGFKVTLEDAAA

SEQ ID NO: 220551 - protein, 389 aa, unidentified
MERIIYVGMDVHTTNYTLCAYTDTELDSVMLQEPVKLAPSVESVERFIRKARKKLDACVPDFGDGPAKVICGYEAGCLGFSLLRQLERMGIPCVVMAPTTILAERGGRRIKTDKNDAEWLARSLCFGSYKPVYVCDDEDLDNRDYIRARNAKKELLKQTKQQILCFLHAQGHSYDGTPWTGRFFKWIKGLEMSARKREALDAYLGSYRFLDDEIRRMDSRIEEMAREERYREGARRLMAMKGIATNTAMSLLTEVGDFARFKSADAFAAFLGLVPGEQSSGRNEKRMGITKAGNSHLRKLLVEAAHGFARCRCASSKSLALRKRQEGLPDEVVRYADRAARRLSHRARHLLEEKGKAYNVAVAAIAREMACFIWGMMNGLYQTRAEAQG

SEQ ID NO: 220552 - protein, 431 aa, unidentified
MLKINPLSTLYVGIDVSSKSNYVCALDFFKNKYINSSFANNQPGAEELALKILECLNQHPDLTMVVAALESTSVYSIHIANYLSSCEELMRFKPYVFVLNPKCTANYKKSYIGLGKSDPIDAFVIADYARAGNIESEPWRGSQFLALKRLTRHRLHLVECMTREKTYLISNLYLKFSELQMLEGDDQPFCDIYGATSSSVLMEYLSPEEILASSEEDLIAFLAEKSRNRIKDISKTADLLKKAARDSYRLDKALYEPLNVSIASSFNCIETFKREIKVIDNAIEKEIKGLNPNAFIILHSIDGIGPVFAGGIIAEIGDITAFHSSDALAKYAGLTWKSNQSGDFYGEDTPMIKAGNRYLRYYLGEAANSMRKHNVEYGAYYRKKYNEVPKHQHKRALALTSRKFVRLVYGLLARNQLYSGVSLDTSIKDSN

SEQ ID NO: 220553 - protein, 349 aa, unidentified
MTDQRIPYCGRIVYVGIDVHKETYTVTCVCNKQIVKTVTMQADPAALAASLPRWFPGATLYSVYEAGFSAFVLHRVLTKAGITNIIVNPASVAVAANDKVKTDRRDSKKLAIDLADGRLRGIYVPTEAEELARLLPRTRAQIVKHRATIARQIKAKLHPFGLIAPASRRLISSRYLREIAAWSLPPELSVSLTLLAEQWRFATRQLIEMRRLLRDQAQAQEEIEKVYRSVPGIGEVVARTLATELGDMTRFANERALFSYTGLTPSEYSSGASVRRGHISRQGSSRVRHLLVETAWRALPRDGVLKEMFDRIAATRGKKRAIVAIARRLTGRIRACFRQGTTYAVGTYA

SEQ ID NO: 220554 - protein, 367 aa, unidentified
MTSTNSTVQPPRSAEPVVEVTGGVDTHKDTHTAAAVDSAGRVLGSAQFTADGAGYAALLNWLRGFGRLVLVGIEGTGVYGHGLARFLQDRQVPLVEVDRPDRKARRFQGKSDPVDAEAAARAALAQVRTGVPKQRDGQVEALRALRVARRSAVSHRADLQRRLKALVVTAPDGLRQVLRELPTRQLIEVCASARPDRTKAHNPTVATKVALRSLARRHQQLTEEITDLDALIAPLVATINPALLELTGVGPDVAGQLLVTAGQNSDRLRSEAAFAMLCGAAPLPASSGRTNRHRLNRGGDRDANSALWRIVITRLGTDQRTRDYAARRTAQGLSKPEIIRCLKRYVAREVFAVLQPANLTGDLAQAA

SEQ ID NO: 220555 - protein, 368 aa, unidentified
MKQQTSAATETVNKSKTIIDFTGKSIFVGIDVHLKDYQVACVHESINLGNHRMSANADILIGHLKRRYPGAHFKCVYESCAWGFELQRKLGKAGMECIVVHAADVSTTDKERRRKTDPVDAMKLARGLEAGSLEGIHIPDEDLQKERNLMRYRQRLTWDLNRSKNRLKSLLKYQGYTIPEKLVKSNWSKNFLTWVKEVADKDEILQPVFLLELEQIEFLRQLKLKTERKVRELMNSDKYKANAELIMSLPGLGPVNAMLYSLEVGDTSRFSSFHNLNSFVGLCPDKHSSGETDRSLGITRRGHRQLRRVLIEAAWIAIKVDPAMLDAYKELTKRMTKNKAIVRIARKLLRRMRAVLITKIPYQKGVVA

SEQ ID NO: 220556 - protein, 383 aa, unidentified
MRTVCGLDMHKDSVYLCILSSTGEIYEKKFGVLTTELIEMRDLMLSHHVLEVGMESTSVYWVPIWRVLEPHFKLKLINPYFIKQLPGHKSDVKDAQWIAECMLKELVNGSFVPPERIQQLRQYDRRIYDLDDEIIRKLAKLDAAVQRCNIRLSNYVSNTDSVSYKAVIDKICEGVTDPNVLVEEIHGRIINHHGKETIIASLTGSITECDIDIMRQLKAEIDLAEQHKQECMDKMLAICENEYSTQLHNLQTIPGVKMRAATSLIAEIGTDMSHFETANHLASWSGLKPRNDQSNKTIKSRRITYGNRYLRRTIIQCSWGASRTKNCFFSRFSYHQTQVRKKNRMKVQVAIARKMLICAWHILKDGVSYKDFNNIIEASVTNG

SEQ ID NO: 220557 - protein, 403 aa, unidentified
MDRGAGLDWAKDTHQVCVLEGDGKPLVQRGFTHDERDLDRMCELLIALGVKRIAIERPEGVLVERLLEAELTVLPIHPNQLKAARPRFRAAGGKSDAFDAFCLAELARTDHRRFRTLAPDSDETKALRALTRAREDLVKTKVSLTNRLQAELDAFWPGAAVIFCRIDSPIALAFLERYPSPTDARALGEKRLAGFLTRHGYCGGKSASELLAKLRSAPKGRAKETEEAARRTAVLSLLAALRPVVEQVKLLESRIADAVRAHPDGEVFLSLFRNPDSTLTAAKLLSEIGDQRERYPSAEALAADAGMSPVAKESGRRKVATFRRACDKRLRDAMTTLADSSRLHDPWAKGIYLRARERGCDHPHAIRVLGRAWLRVIWRMWQDGAPYDPSRHGGRKHLNAAGG

SEQ ID NO: 220558 - protein, 341 aa, unidentified
MVCVGLDVHKSWTTVAALDPDSGEVWRFDRVPNTRADFAEVLRALPEPRRGVLESGRNSWALHDQVRPLFEELYVADAAELKRRMSGRGAKTDRKDALKMALVLAEGRVPAVWVPSLQIRDVRTLTRGKVRLTQLRTQVINQVRSLCAMFGQECPASSLRTQKAQVWLQQLALPPLATQMLQRWIQIWQLLETCVAEAEQQIEQVVAHDEEAQRIQTMPGVGAFTALTVVAEIGDVRRFDSAKALIGYSGLAPQVHQSGERTRHGPLPHSGNPWLRYVMVLAAQHVACRRTDSVLRRRYWRTHMRHGPNPAKIATARKMLALAYHLLRRREDYQEKLLTAA

SEQ ID NO: 220559 - protein, 412 aa, unidentified
MEGETVIAGVDTHKDVHVLCLLDGLGRKIWSGSFRADPEGYDRLAEAIGDPGSCLVVGVEGTASYGAGLTRRLAELGYNVVEVLRPKRDKARPGEGKSDPLDAERAARKAASGRGCSVPKSQDGWVEAVRQLYVARRLAVATSTSCVACAKSILTTAPGALRERFRGCERPKDLMPLLARRRKAGDALEESVLASLRSVATVWKEARSQVESCDARIRALLEANAPALLGIEGCGTTTAAALVVAAGDNPGRLKGEAAFSMLCGVSPIPASSGKTERHRLNRGGNRQANWALYEIAIKRMAYDERTKRYVAKRTSEGKSRREAIRCLKRYIAREVYRVLMDPNPDGAAPEGPELAKMRKAMRVTQKQAAAGLGMSAASLGHLEHGRRRSTKLERRYYELLCELKGALPQTAY

SEQ ID NO: 220560 - protein, 335 aa, unidentified
MSLELLAIDLGKRSFHCHGIDSDGVILSRKVSRAKLLETIKELTPKAVAMEACASAHFWGRRLLAEGCRVLLINPWFVKPFVKGSKNDAADAEAIYEAALRPTMRFVPVKTTEQQDLQSLHRARERVVCARTALINHMRGLLGEYGVILPQGAWRFLKQAQDAIAAADLSDFARGLFVDLFDELRALDLRLDTLDQQLLKICRTNEACRRLSKLPGVGPVIATALVAAVDDGRHFRSGRELAAWIGLVPRQYTTGGKPRLGGIGRRANHYLRRQMIHGARAVMFRLTKHEDRRSQWLKGLAARRGFNRAIVALANKTARIAWAVLTRKEDYLAAA

SEQ ID NO: 220561 - protein, 412 aa, unidentified
MTAKDQFVAHVGLDWADKKHDVCVQFKNGDRIFHVIEHTPEALDSWLNELHQRAKGRIAIAVELKKGPVVYALQKYPFVTVFPVHALSLARYRQAFWPSGAKDDPQDAELALDLMLRYPHKIKAIEVDNPDIRLLQQLVEQRRLLVEDKRRFVNRLINTLKQYYPQPLEWFSHRDSSLFCELIIRWPSLQQLKRARSDTVRHFMNAKGGPAVAYTEQRVASIASAIPLTTDKTVIEANALMATALASQIKLTGDLIRTYDERIESLFDTLPDAELFKSLPGMGPCMGPRMLAALGDNRDRFNNAEEIQNYAGIAPVTERSGQKSWVHWRWQCAKFVRQTFVEWTAKTVNSSYWARLYYQSQREKGKSHQSAIRALAFKWIRIIYRCWKTRTRYDEAKYLLALEARKSPLLKP

SEQ ID NO: 220562 - protein, 351 aa, unidentified
MQCIAFDAHKQYTWALVEDEKGKVVREERVAHRKGALIEFLASCEPGSPVAVETIGNWYWIADEIEAAGMVPRLVHAGKAKGMSGSINKTDKLDVRGINRLQRSGTLPTVWIPPRALRDARELPRTRMVLVGQRTRIKNRIHANLAKYGVAVGGASDLFGVRGRVLLKKRLGELPSETRYATERLMEELDHLDEQIQGFEERMAELFQPTRELELIETLPGVGFILGVVILTEVGDVGRFPSSSHLASYAGMTPRVHASGGRVRYGPTRSDVNRYLKWAYAEAANAVMIHRRKRPERHASCLYERVRHRSGHQKAIGAVGRHLAEATYWVLRKGEAYRDPAADREVSTREA

SEQ ID NO: 220563 - protein, 326 aa, unidentified
MQSILGIDVSKDTLDAILLIDHRRIHKVLSNDLKGHQLLENWIIANQAGQVHACLEATGQYGEGIAEYLYDLQHKVSVVNPARIKRYGQSKLHRNKTDKADAELISEFCWKEKPGLWKPHSPEMKHLRALVRRSQDLKAQLQQENNRLKSGEKNPWVLDDLSLNVVFLRGRIKAAENKIKEIIKQSDTLKTKHELLTSIPGIGLITASTLLAEVGDFSAFESAPQLAAYAGLNPTNHRSGSSIYKKTRVSKEGRSELRACLYMPALVALSWNPVIQDLAERMMKSNHHKMEIVIAAMKKLLHLAYGVLKTQKPFDSDYGTQFNFSS

SEQ ID NO: 220564 - protein, 355 aa, unidentified
MDPKKYIGMDVHQASISVAVRDAAGKLVSESIIETKATSILEFVRGMRGSMCITFEEGTSAAWLYDLLKPHVTKVIVCNPRKNALLNAGSKNDRVDARKLSDLLRAGLLTPVYHGENGVRTLRELGRSYITITKDLTRVMNRLKALYRSWAISCPGAKVYSRRHRNAWLEKLSEGGVRRRAEQLYQQLDALRKIRQEVRAELLAESQKHPAHQLLRQIPLLGPIRVALLIGLIQTPHRFRTKRQLWAYCGLALQTRASGEYRFNAGELQASKKAPALRGLNVNHNHDLKNLFKGVAMNVSTSTDPLADFYRNLLAKGMKPSLARLTLARKMAAIVLAVWKKGVGFDPGELKQNAA

SEQ ID NO: 220565 - protein, 426 aa, unidentified
MSQTDAATEPEFAAFIAIDWADRKHAWSLQVAGCSQRESGEIQHTPEAVEAWVTMLSARFAGQPMAVALEQSQGALVFMLGKYGHLHVYPIHPRSAAQFRAALYPSGAKDDPMDADLLLDLLVLHRSHLRPLRPDTERTRLVRHQVEARRRLVDEKTRQVQRLTAKLKLYFPQVLDWFDQVESPLVGALLHRWPTLPELQKARPDTIRSFCRRHNCRDAELIERRIQNIRQAIPAIGDAAVIQPAVTMTRSLLDLIATLREGIAKLEQQIAEATAGHPDFPVFDSFPGAGPALAPRLLAAFGSMREAYTTAADMQKYSGIAPVIRRSGKAESIHFRRACPKFLRQSFHEWASHSIAFCDWARLFYQQKRQDHDHHAAVRALAFKWIRIAFRCWQDGVPYDDARYVDALRRHGSPLAAALNASDSAS

SEQ ID NO: 220566 - protein, 375 aa, unidentified
MQAAEGRGYELGFVLYMAMELSNRKWKLGFGNGVKLRRKSIEARDRVRLLEEVVLAKRKLNLPAEAKVVCCFEAGRDGHWICRWLEAEGFEVYEIDSSSIETARGRKHVKTDRVDVEKLLDLLVRYCHGFRRAFRVVRVPTAEAEAGQRLHREDAYLVRQRTRIRNRLQSLLVTQGISELALGGDWAARLDGLRGWNGQPLSAQLKAELLRLHEQYRLFEEQLAILQQAYAAELESASRVGEVRRQLECLKSLGPKFSRVLAAEVFAWRRFTNGKQVAGMSGLTPTPSQSGDAYREQGISKAGNWRVRWVMIELAWLWLRWQPDSELSRWYRRRFAGGSRRMRRIGIVALARKLLIALWRYVEFGELPAGAVLKA

SEQ ID NO: 220567 - protein, 346 aa, unidentified
MSQQHFVGLDISVKETAICVIDPNGRVVHRASVESDPKAISEQLLGTGLAFGRIGLKAGPLSPWLYAGLVEVGLPAICVETRHMHAVLFTRINKTDRNDALGVAQMMRVGLFKAVHVKTPASQQRRLLLTSRKLLQRKAYDIENDLRGQLRNFGLKVGMVGAAGFDARVRELVVNIPVVAAIVIPLLLAREALRAQLAKLQKMLIDAVRVDPVCRRLMTAPGVGPVVAFTYRACVDNPARFSRSKCVGAHYGLTPRLYQSGETSRTGRISRCGDEMIRTPLYEATLVLLTSPHTRRWSGLIAWGMGVAKRRGFQRAIVAVARKLAIVLHRMWRDGADFRWSAAHAA

SEQ ID NO: 220568 - protein, 341 aa, unidentified
MLKFIRIGVDLAKNFFQVHALETDDGRAVTKKLSRSKVLGFFKSVEPCLVGMEACGSAHYWARELTSMGHQVYLIPPIYIKAYVKRGKNDAVDAEAICEAMSRPGMRFVPIKTKDQQAVLMLHKSRDLLIKQRTMSTNALRSHLLEFGVITAQGANRIDGLIEMARSDHDVPEMAKELIDILAQQLDEIDAAIVAVDKKIAAVCANDARMRLLDLVPGVGKIIASVVAASVPEPAIFNSGRDFAAWLGLTPRQNSSGGKAKLGKITKKGNRYIRKLLVLSSTSLLRSVAKRTGALRDWIAALLLKKPARLVTVAIANKLARIMWAMLNTGEGFREEIFMKA

SEQ ID NO: 220569 - protein, 407 aa, unidentified
MISVGIDISKEKITVCALEEGSKIIWKPFDVYLNKSKVEELLKKLEKIKEEIKITMEATGKYHLPILYELKERDYFVAVINPLKMKQYCRALNFRKAKNDKIDAKQIAEYGLMYWKELEEYKVDEENYRVLKELNRSYQHYMDLRINQMNYIEQTVHQIFPGIKKLIPHNTGDFSKDKLLDFLEKWWHKDLVLEKTEEEFVEEYKTWAKEKRYHPNANKAKAIYKLAEDSISTQPSHNSKIETNIREGINLIKQINQILNSILSQMIEISEPLEEYQEAKKFSGISEKLAVQIVAEFGDLTKFKNKKSLISFIGIDSPPYESGNFKADQRKISKRGNAILRKVGYQAMKCMMSAKNPENEIYNYMIKKEKEGKAKKVCKFAGLNKFLRIYYARVMEAKAEKKGLKAA

SEQ ID NO: 220570 - protein, 340 aa, unidentified
MDKRYIGIDLHRNRFTCCIRLENERTYVTRWELEDLGKFVKKLRPGDEVAVEITGNTRLFYDAVVEHVARVVVVNTNQFKVICKSVKKTDPHDARALALYLSKDMLPEVRMKDKEHGQLASLTQTRDTLVKLRTALKNKVNNILSARGLNLAKEALSSEKKLTEVLELPFDDIVRIELRVIVEQIRSLNKSIAELEKTIGDEGSKLEGHKGLSSIKGIGRITGAILLSVIGDVNDFADEGHLASYFGIVPRVSNSNETERSGHIHTRGTKLGRTALVQSALIAANYSPYLKRFYEQVKARRGAGKAIIALARKFLGVIYRTLKNKWVFEDFPNFVLAEEK

SEQ ID NO: 220571 - protein, 348 aa, unidentified
MNYIGIDLHKKFSQVTVLGEGGEIKERVKIDNREEVLNRHFNNFDEPSKAVIEATFSWGWLADYLQSRKIEVVLAHPQKVKAIASSQIKTDKVDSLILARLLRADMIPTAYFCPKPLREVKEVLRSRASLVGLKTQVKNKIHSLLHKYNIREDEKFSDLFGKRGKEFLNSLELGEYTTPVLKRYIETLSFLEEEIKKTSVDLKQVFEKDEVAQFLERLPGIGFYTALILSKEIGNIDRFFSAKHLCSYAGLVPSTYQSGEHTRHGKIKQGNKYIRWVLIEAVPKTIGKDKVLNAFYQKIKAKKGHNKAKVATARKMLGQIWYLLKTKQSFVDPETGSPVFFSGAFPHH

SEQ ID NO: 220572 - protein, 345 aa, unidentified
MQTITTIGLDIAKSVFQVHGVDAQGKVIVRRQLKRRYVLAFFQKLPPCLIGIEACASSHYWSRELQALGHTVRLMPPAYVKPYVKRQKNDSADAEAICEAVTRASMRFVATKTVEQQSCLMLHRTRHLFIRQQTAVINAIRAHFAEFGIVAPVGRTGVEELLKVASDGNDNRLPDVARVCIAALAAQLQMLKARILEFDRLIMAWHRSNQVSKRLDELPGVGPALATALVGSIADPKAFRSGRDFSAWIGLVPKQHSSGGRERLGGISKQGDRYLRSLFVAGALAVIRYAKKRGSKHRPWLAALLARKPTKVAAIALANKIARMAWAMMAKGERYKQPVALAAAW

SEQ ID NO: 220573 - protein, 355 aa, unidentified
MAADEIAVIGGIDTHTDLHQAAVIDTVGRHLATRAFETTPDGYRQMLEWLCSHGELLVVGLEGTGAYGAEAARFLTANGVTVIEVDRPDRKARRDNGKSDPVDAYAAATAVLSGRASGIPKTRDGIVEAIRTLRVARSSAVKARTQAINQIRTLIVTAPATVRERLRGLATGELVDTLARSRPAGDLADPVCAAKITLRRLARRYQLLCEEIAEADADLGPLVTRAAPRLIALPGVGPETAGQLLTSAGDNPDRLKSEASFAHLCGAAPIPASSGRTNRHRLNRGGDRQANRALHTIVLVRMRYDQRTRDYVAKRTTEGMTKKDIIRCLKRFVAREVYKHLPHPRITTEHLIQTT

SEQ ID NO: 220574 - protein, 326 aa, unidentified
MTRFYLGIDISKATFDAWLIGGQEPQGGKFSNDAKGFGKLGRWLKKRTAGEAHACMEATGRYWEELALFLTDEGYAVSVVNPKLIKRHAEAVMQRNKTDKQDARTIADYCLKQQPDLWEPPSPAYRQLKEMARHLKALKDDRQRERNRLKSGLTVPDVRAAIEKHIAFLEEQIDDLEQQIADHIDQHPQLKADKALLESIPGVGAVVAATFLAEIPDVSLFAQADQVAAFAGLTPSEHHSGSSIHKPGKLLKWGNRHLRAVLYMPALTAHLWNPIIANLKQRLEERGKSKMTVIVACMRKLLHLCYGVLKTRKPFDPNHVFNVQSA

SEQ ID NO: 220575 - protein, 439 aa, unidentified
MSRVIVGVDPHKKSVTIEAVDEQGQVLSTGRFATDSNGYRLMLKYVRDQWPHHSWAIEGANGVGRPLAQRLLAQGEPVLDVPAKLAARVRVFDTGNARKTDATDAHAVAMVALRTPGLRELAFDEELVALRLLTDRRDELSHLRVQTVNRLQRLLTELIPGGAKRDLSALQAKRLLATVKPRSLVGKTIRRMAAEEITDLVAVDAKLKAIRKELRAAVQARGSRLMDLFGVGPAGAARILSDVGDVARFPDRNHFASWTGTAPLDASSGEQIRHRLSRAGNRRLNHVIHIAAIVQIRHDTEGRAYYRRKLAESKTPMEALRCLKRRISDAIYRQLVADAEPTTGAGHEDASPGGHSGASSQSSAADLFTPVIGSSDQPLPGPAVPTLPPSGAPANPHAPSAPRPSRRRAGAVKVERPTGRTTLTATSADAHSTQPRTRS

SEQ ID NO: 220576 - protein, 336 aa, unidentified
MEQATTIGLDIAKHVFQVHGANATGHVLFRKRITRAKLLGFLAAQARCVVAMEACAGAHYWAREIAKLGHHVRLIAPAYVKPFIKRQKNDAADAEAICEAAQRPSMRFVPVKTEEQQANGIVFRARDLLVRQRTQCVNALRGHLMEYGYVFPKGITHVEALVALVEDLQSALPDSARVILKLLIDTFTALEAQITALDAEINQRSKSDPTARRLMTIPGVGPITALVPAAEGFPAGRDFAAWLGLTPLQKSTGGKQKLGAVSKRGERTIRRLLIIGASAVVQQASRRGAPKGSWLAQMLARKPKMLVTVALANKMARIIWALLVKGGTYRTPAVAA

SEQ ID NO: 220577 - protein, 355 aa, unidentified
MSQEKYIGMDVHQASISVAVMDARGKLIMECLLETKAATILEFIQGLRGTLALTFEEGTSAAWLHDLLKPHVSRLVVCDPRKNALLKDGNKSDRVDARKLAELLRTNQVKPVYHGKHGTRALKELGRSYLTITKDVTRVMNRIKAVYRSWAIPCAGTSVYTPRHRAEWLAKLVEPGVRIRAEHLYQQLDSLQPVRLEARRELLLESRKHAAVKLLRQIPSIGPIRAALLVALLQTPHRFRTKRQLWAYSGFAVEIHDSGEYRSVRGKLQRNRERITVRGLNDNHNKDVKSLFKSAAISASTRPGPLHDFYVTRVESGMRPTMARLTLARKIAAITLTMWKKGVSFDPKQLQRQAA

SEQ ID NO: 220578 - protein, 337 aa, unidentified
MKYSGIDLHSNNSVVSVIDETDRVVAEKRVPNELSRILALLAPWRDELEGVVVESTYNWYWLVDGLQAAGFTVHLAHTTAIRKYDGLKHSGDETDARFLAHLLRLRILPTGTILPPSQRAIRDLGRKRMQLVRSRTSHILAVENITARQFGKRITSNQVKRLDEQAINQMCLPEDVALAVQANAAVVATLSAQIEVVEKRLHEKVAPNPDYALLTTVPGIGQILATVILLETGTIERFASPGNFASYARCVDSQRMSNGKKKGEGNTKNGNAYLSWAFIEAASFALRYCDQARRFYERKKARTNPVVARKALAHKLARACFHILKEHRPFDVTRCFT

SEQ ID NO: 220579 - protein, 482 aa, unidentified
MARQKMSTFERLQSGKMNRKERKELSRRILAEDAGLQVVHPNAAGIDIGNESHFVAIPPDRDANPIREFGSWTADLHEMAHWLKEHGIETVVLQSTGVYWIAVQEVLEPYGLEIYLVNARGTKNLPGRKSDVQECEWLRKLHTYGLLRNSFRPPEQIRAIQTIWRQRDRLVKECGRAIQQMQKALTKMNIQLANTISDISGVTGQAILRAIVAGIRDPHELAELRDRRIAASEEEIVQSLQGNWKDDILFELRQVLEAYDFYQNQITACDQELAKYMADVPSREVPGKQDLPEGAQPLVSAKSSRRSKTPKKNRVGFDLAAELHRAMGVDLTAIDSIDVRVAQVIFSEIGPDFSAFPTENHFASWLTLAPQRDISGGKVIRHIPSAGRNRVANALRMAAQSLWHSDSYLGARYRRLRARLEGKTAVKAMARYLACLVYRMVTKGQAYVDRGAAYYEKKRHEKERNVLARKAASLGLKLVPST

SEQ ID NO: 220580 - protein, 312 aa, unidentified
MTPSIIGIDISKDRLDVHRLPDGAAKRFTNDMAGHTALLDWLAQTRVARIVYEPTGAYHRALEQALAAKGLPLAKVNPRQARRFAEATGKLAKTDRADAAMLARMGLALAPDTRPLPSQILRDLKELHLARQALMKDWTAAKNREKSLRLPLLKRQNQKRQRQIETQIAAVEAEIASRIAANAELAERLAILESIPGIAKITACALLIEMPELGTLDGKQAASLAGLAPLARQSGRWTGRAFIRGGRASLRQALYMPALVATRFNPQLKAKYHRLITAGKPAKIALTAIMRKLIVLANALLRQRRNWAENPA

SEQ ID NO: 220581 - protein, 420 aa, unidentified
MTVDLERGYTSKEPCGLKQYLNLLRRSIFMIYVGIDVAKNKHDCFVTSSDGKVLFPVFTIQNNREGFDDLFSKIQSVSSEVSNIKVGLEATGHYSYNLLGYLIDKGLPTYVINPLHTNLYRKSLSLRKTKTDKVDARTIAMMLMSDVNLKSYSDTSYHNEALKSLTRYRFDKVQERARLKQSVSRLVTILFPELEKLVPSLHSASVYALLSELPSAEKIASCHLTHLTKLLENASKSRYRREKAIEIRDAARISIGSNMPAKSLELRHTLRLIGELDSEITEIESEIKQIMDQISSPILTIPGISYRMGAMILAEIGDFSRFDSPDKILAYAGASPSTYQSGQLKSSYSHMEKRGSRYLRFALINAAKYVCHWDETFGTYLQKKISEGKHYNVAITHAAKKLVRLIYAMEKSGMPYIKTA

SEQ ID NO: 220582 - protein, 460 aa, unidentified
MSNKTKKRKKNPFFEQINFNAAGIDIGADTHYVAVPPGRDPEGKDVRSFASFTADLYVLASWLKKCKIDTIAMESTGVYWIPLFEILESKGFKVILVNPRHFKNVPGRKTDVLDCQWLQKLHTYGLLQGAFRPDFQICELRAYMRQRDMLIAYAAKHIQHMQKALEQMNIKLTEVISDITGTTGMKIIRAIIGGEQDPKKLAGLRDPRCKNDINIIAKALHGTWKAEHIFTLQQAVELFDFYKKQIDDCELKIQKHLETFEDRSNDNPLSSAGKTSNAHHPMNFDAKSHLYKITGVDLTSINGIDVSTALCILSEIGLDMTRFPTEKNFASWLGLSPGSKISGGKVLSSKTKPSANRAARAFRLAAYSLQRSKSALGSFFRRKKSQLGSPKAITATAHKIARIFYLMLKHGTHYKDIGQDYYEQRYQNRVINNLKKRAKQFGYKLEINKQLEPVMADSAN

SEQ ID NO: 220583 - protein, 322 aa, unidentified
MTRIICGVDIASSSLAARIGQDGAPASFPNNPEGIAALAAFCQQHQVELVAMEATGGYEQQAFAQLCEQGLAVAIVNPRAVRQFAHSMGALEKTDAIDAGMIAWYAETRNSQPLCLAPQTQLELRARVLRLRQLTDLRTTQLNQQRLVINRAVQATFRKMLRFLASQIEELEQAIAGLIQADPLWRQLDQAFRSIKGVADRTVARIMADLPEIGTLSNKTISKLAGLAPLANDSGKHKGKRAVRGGRASVREILYVVASVVGRYEPDFITFQQRLRTAGKPPKVVRIAVAHKLLIHLNAKAREVRQRMAPVLDHSRLAPVTT

SEQ ID NO: 220584 - protein, 347 aa, unidentified
MEYFAGLDVSLDSTSVCIVDEAGQIVAETSVATDVDSLEQLLANWGVDLKRVGLEAFSISSWLCGELAERGLPVHCIETRHANALLKTMLNKTDRNDARGIAQMMRTGWFKEVHVKSVDAQKLRTLLIGRKAMLVKVLDMENMLRGLIRPYGLKVGKISTGRFDMRIRELTESVPGLTDIVAPLLEARGVMRRQFAELHRLALRTARMDDAVRRMMTVPGVGAIVALTFRATVDDPARFRRSRAVGAHFGLTPRRYQSGETDRIGRISKCGDSLTRTMLFEAAVAVLTRIPRQSKLRSWGLKLVKKRGLKRAATAVARSIGVLLHRIWVDGSVFRPNGTRPPELVAA

SEQ ID NO: 220585 - protein, 399 aa, unidentified
MGQQLWAGVDAGKSDHYCVVIDAEGQRLLAQRVANDETALLELISTVSTVVDGAEITWAIDLNGGGAAVLIALLVGAGQRLLYIPGRTVYHASGGYRGDGKTDAKDAAIIADQARMRRDLQPLRPGDEIAVELRILTSRRADLVADRTRAINRLRAQLLEYFPALERAFDYSTSKAALILLTGYQTPDGLRRAGAAELAAWLRKRKARNADAVASKALAAANAQHTIVPGQHLAATVVARLAKEVMALDIEIDDTETMIEERFRRHRHAEIILIMPGFGVVLGAEFLAATGGDICGFDSVDRLAGVSGLAPVPRDSGRISGNLKRPRRYHRRLLRACYLSAQIAIRTDAASRTYYDRKRSEGKTHTQAVLALARRRLNVVWAMLRDGTAYQPAPTAAAA

SEQ ID NO: 220586 - protein, 318 aa, unidentified
MEVAGRFVGIDLGKRTYEMCIVDRKGKISRTGGKTDFAGIDRLCEKLNGDDAVAIEACNLAFRIERAIRKSVGCKVCIMNAGKLAVIYMSTRKTDKEDSLKLAKLLKTHDEDELPIVAPPSDEEWERRKLLSEYRSLKCQRTKEINKLHAIFEHNGYTQFVRKDMRSEKNRANILPLLKGYEKEEAERLVERLNLLEKQIERLLQKINAEVENDGKIQKVMTVPGIGPITALAYVAYVGDVNRFDNAHQVSNFIGFVPKVDNSCTICRSGHTTKQGNPLLRSLLVQAAWATVKSKNGGALRININIWLKPVALEKENP

SEQ ID NO: 220587 - protein, 423 aa, unidentified
MDDSARVWSERQAFAGLDWASDHHDVVVVDRHGTIRESFRIEENAEGWHRLRERLSSYPDLAIALETSYGAAVERLVEAGYAVFPVNPKAAKRYRERKAPSGTKTDFVDAWSLADALRVDGHGWRVLKPDDPLTVELRLLCRDEIHLIEQRTAFVCPLRAALSEYYPAVLQAFDDWTMRAAWALVERYPTPQALVAAGKRRWEKFLHTHKLYHSRELYARRLDLFAAAQDYCGGAAVTNAKSLLARSLAIQLRVLQDHLDEYRSRIVERFEQHPDHDLFGSLPGAGEKLAPRLLAELGDDRARFDSVEGLQCYAGTAPVSYQSGQIHQARLRRACHKILRSTVHLWVNHSRSTCPWAEVYYRRKREQGQSHACALRCLGQRWLKILWKMWQTRRRYDPELHQRNQVHHGSWVIALLPPAEAHA

SEQ ID NO: 220588 - protein, 383 aa, unidentified
MSIVGIDISSTSATFCILGNTGVIAQDNFQLNKAGFNKLLTTPGINKDSTFVMESTGKYHLTCYHFLLNHNMTAYVVNPLLIKQYKDTITLRKTKTDKSDALLIAGYANNPSIQLEGRKTELESESKLLSRDRLSNSEALAKAKTRLKGDIAVSFPELHNIGLFTDSWLNLLSVYGSSKQVASASITQLAKAIRGTRAKSTERDKKLAKEAKNLANDSVGVDLHAAITKHQAKTVLYLKKEDKELTKALVNMEKEIHFEEMEIITSFPGISYTTAAHFMAEVQDIHRFSRYQKLIAFIGTDPTIYQSGNIDRHGRISKRGNKVLRKYCYLMATNSLRSNPVLAEYYSKKRNQGFPHRKAMIATTNKLIRALYALLIRGEKASI

SEQ ID NO: 220589 - protein, 411 aa, unidentified
MQRVIGMDIHRTFAEVVVWEAGQLRPAGRIDMTRSGLEGFGRSLSKQDEVVVEATGNAMAVVRVLSPYVARVIIANPLQVKAIAHAHVKTDKIDAGVLASLRAAGFLPEVWLPDAATERLRRLVARRNQIVRHRTRIKNEVHAILQAHLIPPCPHADLFGRLGRSWLARQDLPNDELAAIERHLRELDRLAEDLEVLDREIAEQVIEDPSVRRLLTVTGVNIIVAAGLVAAVGEIRRFSSPQKLVSYVGLNPRVRPSGLGLAQHGRISKRGRSHARAMLVEAAWAAAKAPGPLRSFFLRIRARRGHQVAAVAVARKLAVLCWHLLTKDADYQWARPALVANKIRAMELQAGQPAKKGNKRGPAYAYNIKQLRDREIDVARHAEHVYEQFVSRWQRRGPGKRRTGATAEERR

SEQ ID NO: 220590 - protein, 404 aa, unidentified
MWYAGIDWANDHHDALVIDEKGSQVGSLRVDHTPQGMSRLNTFLEQIVGAESKEQMACIIEITHGLLIAHLLETGWPVYPVNPRTVDRRRAASGAKTDMIDAYLLAKTGRADLADLHRLTPDSEKIAELKLLTRDQDALIQMQTRLVNQLTACLKAYYPVALELFAKLQQKSTLLFLQTYPTPQAAMAASAEQIQEVLRRAKHSNPTIVAAKIVERLQQPHLQADVVTTRTKSRLMGALVSQLLPLIAQIAQYNKEIKTLFLTHEDHEIFASLPRAGKRLAPRLLAEIGDDRTRYQDASSLQALGGTSPVLFQSGMYSKAHRRLGCIKPLRNALHQFAWQTTQSEPWAMQYYQRKRAEGKSHTVAVRALANVWVRIIFAMWLHHQCYETATFEHAQQQHARPAA

SEQ ID NO: 220591 - protein, 351 aa, unidentified
MEYVGIDWATRRAAWCALDAKGEIVGEGVVSADLEGVLRLVAANGRDVRAAIEMMSGAAWVADTLETAGWRVDVADSRKARALAPLAAKTDRIDARVLAELARRDLVPAVWVPPFADRALLEQLLRRMQLVRLRTSGKNRIFGILTQWGVRVPLNRLRKADGLELLERRGVPVVWRDSVQEMLMTIDYLDERVARLDAVLRPLAHEDERARLLVTIPGVGPLLALTIASVVGDVSRFSSASRLVGYSGLVPRVHQSGESSRTGRLSKAGSPLLRWAAVEAAQHAWRPQNPWHRLYVDVRRRQGHGNAAKAAVARKILIASWHVLARHEPFKPAASVAAPIVPASSSQPLAA

SEQ ID NO: 220592 - protein, 337 aa, unidentified
MSYQWFIGIDVSKQTLDITILHNSEKKMYEQIVNSVQSIKSFLKKLSDELKISLNDCVFCLEHTGIYNSHFLKVMEERKLAVCLESSVQIKQSGGLLRGKNDKVDSYRIALYAFKSKEFLKLWQPERNVVRHLRRLSGIRERLLNAKKQISNTIKEDKRFIDKKSSAQMLRCCKQSIKALQEDIKRTEQKIKKVIDCDDRLKELFSIIESVPGVGKITATEIVINTNEFKKINDPRKYACYAGVAPFEHTSGTSVRGKTRTSKKANLRAKSLLHMTALVAARFSDDLREYYERKVADGKNKMNVLNAVKNKIIHRIFACVNQKRLYTNNYKFCLLKS

SEQ ID NO: 220593 - protein, 415 aa, unidentified
MSEVESVRRQPQFAAFVGIDWADQKHVWGLQAVGSEKRESGELEHTPEAVEAWVGQLCQRFGNRPIAVAVEQSRGALVYMLAKYEPLHLFPVPPTMSASMRKALYPSGSKDDPRDADLLLDLLLQHRDKLHRWSPDTEATRRVQNLVEERRKLVDEKTAQTNRLTNHLKIYFPQILDWFEHLDSELVCALLERWPALEELQKVPPAKLRSFLRKYHCRDEALIERRILAIGQAIPAIRDRAVIEAKSTVVKVMVQLVRSLVAAAAHPDFFIFESLPGAGAVMAPRLLAAFGSQRERYGSANEVQAYTGIAPVTEKSGKKKWVHFRWACPKFLRQSFHEWAGHSIPHSVWARAYYQQQRGKGQDHHAAVRALAFKWIRVAFRCWKDGVVYDETKYLASLARRGSPLATVAATAKPL

SEQ ID NO: 220594 - protein, 367 aa, unidentified
MEKSSKVFVGMDVHKESIDVTLAEAGGEVRRLGQIGGDRGSLRKMVRKQQSKGGERVFVYEAGPCGFWIHRELAALGERCMVVSPALVPKRAGDHVKTDRRDSERLASLARAGELEAIHVPDIRDEAIRDLVRGRDDAVIAQRRVRQQLKALLLRNDIRYVGKTSWTGAHRRWLSELKLPEPAQQIVFEEYVDAIAVATGRIERLTRAIETEVLTWRFAPVVAALQAMRGIQFVHAVTLIAELGDLTRFGSARQLMGYLGLVPREDSSGEHRRQGSITKAGNSYARRALIEAAWAYRHPARVTRIIATRQTGLPKAACDIAWRAQLRLSAKYRRLSARHLHHNKIVVALARELSGFVWAIGQSVKPH

SEQ ID NO: 220595 - protein, 340 aa, unidentified
MEFKFFIGVDVSKETLDVALLDARQHEQINHVQISNDEESISQLVQGLESANGFDLKQTLFCMEHTGLYNYPLLNFISTHQLNVWVENSVEIKQSMGLQRGKNDRIDAKRIAKYAFKNTDKLRLWQPSRQVVDTLRHLNALRDRLVETKKRLLVPVEEFKEYGDAAMTKLLEKAMAKSVNAINSDLEKLEKQIKKIIDDDNDLKQLYALITSVVGIGFATAVNLIIYTNEFKLFSSVRKLACYCGVAPFEHRSGKSINGRTRLSHFANKKLKTNLHMGSLTSVKLDDGLRKYYERKVAEGKNKMSVLNAVRNKLLARVFAVVKRGTPYEKNYSFNNLVLS

SEQ ID NO: 220596 - protein, 387 aa, unidentified
MPQPNDLSRSLVALDQDSTIIAVVEMSQSSWLVAGMLPGIERQPRKKLEPSAERLLGLLHRWRDEAVKAGRQITRIALAFEAGRDGFWLARWLRAHGVEAHVIHPSSVAVSREHRRAKTDRLDTELLKRGFLGWLRGERGHCTMARIPTIAEEDAKRPNRERECLVRERTRIVNRMKGTLARLGIRNFKPTLRKAAERVTTLHTPEGSALPPNVSAELQRNMARLGFVVSQIKEIEAARQKRLEQEPETEPHAMVRHLARVVGLGVETADILVNEVLSRPMRDRKAVARYAGLTGSPDESGAKRREQGLAKAGNARVRRGMIQLAWRFLRFQKESALALWYRARTADSRVGTRKTMIVALARKLLIALWRFVTTGETLEGVVLRPAG

SEQ ID NO: 220597 - protein, 462 aa, unidentified
MNNKATQRTDRKRKSKKIELNEQWEKINPDAAGIDIGAREHYVCVPARRHQPSVRRFGTTTPELEQLAQWLLECGIKTVAMEATGVYWMAAFQILERRGFQVLLVNPRQVKNVSGRKSDVLDCQWIQKLHTFGLLAGSFRPADPYCVARSYARLRDDLVARRSTQVQLMQKALHQMNVQLSHVLSDISGQSGMAIIAAILAGQRNPVALAALANKRVRSSKERIAQALVGDYRDEHLFGLQTAYDLYMAYQAKIDQCDKRLVEELAKLPDKVDRKSKPLPPADKKKQIDQELRAGLYLKLGVDITAIEGVGARAGLAMLTEVGPDLKAFATEKHFCSWLGLCPDNRISGGKVLRTRTRRVVNRLADALRIAATTLERSQSALGAFYRRMKAKLGAAEAITAAAHKLARLVYRLIKHGEAYVREGLEQYEKKNHQRKLKAVLKMAENLGLKVLEPQPLVCSVS

SEQ ID NO: 220598 - protein, 330 aa, unidentified
MLQEREVIAYCKVENNIEAIESKLKEVIKTYQIELRDMMICAEYTGHYIYPLTIACQNQGVDLWLESGYNIKCEAKKERGKNDKEDSRRIAEYGYKNQDDARFYTLPNKEMTLLSSLLSERDSYVTEKAKWEGQLKDQKDFITKEVYNTKAQRLQKLINQYEQFIKDIEAEIEKLIQENETIKHQSKLLQSIPGVGKQTAMAMIVATRCFTLFNNGRQFCCYAGTAPFVYNSGTSIRSRCHVSHRADKNMKSLLHMCALSLIRCYKKENQFIEYYHRKINEGKNAMSVLNAMRSKLILTMFAVIRTNQPYSVEVVHNYVENFSKKSIVNP

SEQ ID NO: 220599 - protein, 360 aa, unidentified
MLRQRTSVGLDVHARSVIGCALDGDTGEVFERRLSPDPGEILDWLRSLPGRIAVTYEAGPTGYGLARFLIAAGIVCLVAAPSKLIRPVGDRVKTDARDAAHLARLLHLGQIVEVRVPTVTQEAARDLVRAREDCRGDLMTARHRVSKLLLRQGIVYSGGNPWTGRHEAWLRKQHFDTPGLGLAYDSAFETMLACRDRRDRLDTAIETMAADSEFTSTVTRLACLRGVSTLTAFGLAVEIGDWDRLTGRSIGAYLGLVPSEYSSGASRVQGGITKTGNGHARRLLIEAAWHHRRRYQPGAVLRRRWDGASPAARARGHAGNQRLHHRWTDFDGRKKRPVIANAAIARELAGWCWSLAVLQD

SEQ ID NO: 220600 - protein, 340 aa, unidentified
MSLYGGIDLHANNSVIVLINEQDEVIYQKRLPNALPTILEQLAPYHTEMKGLVVESTYNWYWLVDGLMEADYRVHLANPAAIQQYKGLKYTDDHSDARWLAHLLRLGVLPEGYIYPKAERAVRDLLRKRAHLVRQHTANVLSVQNIMARNTGARFSVKRMQELTKEDLSTLLAEAAQVLAVTSSLVVLDCLRQQIKTLEKTIHKGLKHTPAYEQLLTVQGIGTILAQTIALETGAISRFPTVGNYASYCRCVDSTKISNGKRKGTGNVKNGNPYLAWAYMEAAQFAMRFQPAAQRFYQRKLAKSRNNTVLARKAVAHKLARACYYIMRDLVSYEVTKAFG

SEQ ID NO: 220601 - protein, 354 aa, unidentified
MPRKTTSVEAVATIGIDIGKNTFHLIGLDKKGAIVLRQKLSRGQVDNRLANMPLCLIGMEACVGAHHLSRQLKALGHDARLMPARYVRPYSRGQKNDFRDAEAIAEAVLRPTMKFVAIKAVEQLDLQGLHRVRERLVCQRTSVINQIRAFLLERGIAVRQGLRALRTEIPIVLAMTDKLSPRMIHMIEDLCTDWRYLDGRIATVSNEIEMLSEQDDGAKRLMTVPGIGPIISTATVAAIGSGDVFSKGRDFGAWLGLVPRQMSTGGRTILGPISKRGNRYLRMLFVQAARAVLLRPQSWEKHGLKSWIEAAARRLNRFKLAIALANKLARIAWGVLHGGRNFEVRPLRPAPQAS

SEQ ID NO: 220602 - protein, 341 aa, unidentified
MDDYIGLDVSMKETAVSIRRDGKRIWRGKCASDPKLIADLIRKRAPSVKRVIFETGPLSVWFYHVLRAEGLPAICIDARHAKAALDMAANKTDANDADGLAHLAEVGFFREVRVKGFDSMLTRTLVAARTRLVRICTELSNQIRGLMKTFGLLVPGGKGSTFEKNVRSLLVDQESLAAIVLPLLEAWRSLRIRAAELGRQLVAGARQNQACRILMSIPGVGAITATSFATAIEDPDNFKRSRSVGAWLGLTPRRYQSGEVDYDGHISRRGDRHVRGLLFEAATVILTRSSAESGLRTWGLKLRERIGFKRAAVAVARKLAVTMHAMLKAGTVFDRSVGAAA

SEQ ID NO: 220603 - protein, 407 aa, unidentified
MEVVYRCCCGIDVHKKVIVACLINGGEQELREFGTTTSEIKTLANWLTESGCEMIAMESTGVFWKPLYNLFELMDLDAMIVNAAHMKALPGRKTDVKDAEWIADLLRHGLLRASYIPSREQRELREITRYRKSLTEERCREVNRLQKILEGANIKLDSVVKDITGKSARKLLQRIIDNDIPDSDEVSRLIHGRMRSKLDQIVASIDGITTPLQRKLLAQIIDHIDDLNRRIGELDKLVQAYMTEYEAAIEAIDEIPGIARRSAEVILAEIGIDMSRFPSAAHLCSWAGICPGNYQSAGRRKHGKTTKGNKALKTILTQCAKSAKTVKSSYFSAQYQRIAARRGKNRATLAVAHSMLIAIYHILSKKVAFRDLGADYYDSFNRDRKINSYLKRLKALGWEPDPIPSSA

SEQ ID NO: 220604 - protein, 419 aa, unidentified
MNKIKTDKCRIVNAKMLIVSIDIGKTINTGYCRCPDGKDVKPFEFSNHAEGFRKLWDRICWTKTANRLEEVVVGFESTGAYGEPLVHYLRQKPVKLVQVNPMHTKRMKDLQGNSPGKTDRKDPKVIADIIGLGHALSVVIPEGAAAELRRLTLARERSIQRRTALYNQLQDLVFILFPEFLQVMKNVKTKTAHYLLRHYPTPQDIARCGFETLTSILKRVSRGKLGRARSQALYDGAEQSVGLSEGRKGILLEIDEIVSSLEACNRFIEKMEEEMLTYLQQIPYSNSLLSVKGIGEVTVAGLIGEVGDFRQFHTLREVMKLAGLDLFEISSGKHKGNRHISKRGRPLLRKLLYFAAINTVRKGGVMHASYQRHLDRGMPKTKALIAIARKLLGILFALVRDHSQYVETYSQKEVLKLAA

SEQ ID NO: 220605 - protein, 375 aa, unidentified
MAKNTRFVGLDVHAETIAVAVAEGRGKVRALGTIPNRPEAVRRLLGKVGKPGELRVCYEAGPTGYALYWQLTAMGIACEVIAPSLAPSKPGDRVKTDRRDAERLASSYQAGTLTVVWVPDPQHEALRDLVRAREAAKQDLKRAKHRLGKYLLRYGQRPGNGAKAWTAVWWQWVRKLELPHAEQNTTLLELILEVDHQSQRVARHDGAIDRAVASAPEHLRAIVSALQALRGVAQETAVTVALEFGSFSRFERAPQAMGYTGLVASEYTSGSKKRQGAITKTGNSHLRRALVEAAWHYRHRPRLNQRQKQLQDELSPKVAEIAWTAQERLHRRYWALTNKSKPSPKVIAALARELVGFVWAIGKETEQTLAAKRAS

SEQ ID NO: 220606 - protein, 316 aa, unidentified
MDEPRPACCVGVDVSKDRLDVHLRPSDEAFAVARDGKGLESLVERLKALNVSLIVLEATGGFETTVAAALAGAGLPIAVVNPRQIRDFARALGKLAKTDAIDAKVIALFAEKIRPQARPIASEELQELGELVARRRQIVEMIGMEQNRRRRSTDKRLAKRIDRHLAFLEKELADIDSDIDAGVRASPAWRETEELLTSVPGVGPVTARTLIAELPELGQLDRRKLAALVGVAPFNRDSGTWRGHRMIAGGRTGVRNALYMAALVAIRFNPLIKAVYQRLIARGRPKKVAIIACLRQLLTILNAIVRDATPWTAQNA

SEQ ID NO: 220607 - protein, 415 aa, unidentified
METVHQRVGGLDIHKKTIVVCVRITGADGAVQEEIRTFATMTDDLLALCDWLSGQGVTHVAMESTGVLWKPIWNILEGYDFRPLLVNARELKQAPGRKSDVKDCQWIAHLLACGLLRSSFVPQRGQRQLRDLTRHRAQLHGEHTRCANRIHKVLQDANIKLSSVATDILGKSGRDMLAALAAGQHDPAATAELARGKLRKKIPDLKRALKGCVMEHHQFMLEQLLDHLALLEEQVSRFDDRIGEALRPFLDEQTFGRLDAIPGVNRVTIENVVAEIGVDMRQFPSAERLASWAGLCPGNEESAGKRKRSRTTKGNVWLRRALCEAAWAAGRSKDTYFAAQYRRLAGRRGKKRAIMAVAHSLLVVFYHLLKNEHLEYRELGGNYFDTLDPIRLRRHLVKRLESLGYEVTLAERNAA

SEQ ID NO: 220608 - protein, 440 aa, unidentified
MRITYERVAGIDVHKKTVVVTRLRVTEEQQVEWETHTFGTTTPELLQAYDWLQEWECQQVALESTGDYWKPVYNLLEEDFEVWVVNAQHVKRVPGRKTDASDAEWLAELLAYGLLQPSFIPPKPQRALRELTRYRTRLIQERSRLVNRVQKLLEGANIKLASVATDLQGVSARAILAELAAGNTDAEALAELARGRLRNKIPELERALTGKVEPHHRFLLSQQLEHIDFLDEQVAEIEAEIERQLEAMSPLSEASETAEEATATPPTPAGSPISWSTAVSLLDTIPGINRQAAQIILAEIGVDMSVFPTAGHLCRWAGVAPGNNESGGKHYSGRTTKGNRVLKSTLVECAQAAIRTKDSFFKARYQRLVARRGKQRAIMAIAHSILKAIWQMLRSGEVYHDLGAEYYNQRDKDAKVAYYTRQLEKLTGAKVLIALGEAMA

SEQ ID NO: 220609 - protein, 360 aa, unidentified
MFSERTSVGLDVHARSVVGHGIDQVTGEVFTSRLVPDGGAVTAWLAGLPGPVAVLYEAGPTGFGLARQLRSAGYRCEVAAPSKLRRPAGDRVKTDARDAEHLSRLLRLDDFTAVAVPEEATEAARDLVRCREDSRSDLMRARHRVSKMLLRHGVVWSGGHAWTGDHLAWLARQRFAQPVSQYAFEEALDQVLATAARRDRLDVRIEELAADSAWTPVVRRLGCLRGISTLTGFALAVEIGDWTRFDGNSIGAYVGLVPSENSSGRSRVLGPITKTGNGHIRRLLVEAAWHHRPRYVVGKTLRGRWDLSTPAARARGDAGNRRLHHRWAVFQARKKRYNVATIAVARELAGWCWSLAVIED

SEQ ID NO: 220610 - protein, 355 aa, unidentified
MRFYTEHHQFYCGIDLHARQMYVCVLDEAGKIVLHRNMPAGPEQLARAIEPYVGHDLVIAVECVFTWYWIGDFCAERDIPFVLAHALYIKAIHGAKTKNDKIDSRKIAMLLRAGVLPQAYPYPVDMRSTRDLLRRREYFMHQHSELLGHIENTNTQYNFRPFEKSIVHRSNRSGIVERFADEMVATSIEADMLLLDVYHQIILDLEAQVLKKARVHDPVALQLLRSIPGVGKVLALVMLYEIHDITRFPSVGQFISYARLVKCPHESGGKRFGGRGNKIGNAHLKWAFSEAAVLFLRGNEAAQRYHEKLVSRYGKAKAMSIIAKKLGRVVYTMLKKRQPFDPKKFYSEAAHESVA

SEQ ID NO: 220611 - protein, 319 aa, unidentified
MQSKLTFGMDIGKNEVVVACHEGAFAILKMANAVAGLRRWLGSVPAGSRLGLEATGGYHEPVAELAYSLGFTVYILNPKDVHFYARALGARGKTDRLDAQIIAAYVAEHCARLHPFTPLSADEKLLRELARRRATLVNAKSMLQQSLRVLPGFEREGRELLRAMGSFADRLERKLAQIAARSSERATLVKRLQTIDGVGTLTSIRCATLFTRVPLHSSDAAVAFFGLDPRPNDSGQHRGRRRLSKRGPSEDRRLLYNAAMSAIRTPAWRPLYLHLRNRGLASTEAIIIIARRIVRIAFAMYRNHSNFNPRLVPRPYCPA

SEQ ID NO: 220612 - protein, 417 aa, unidentified
MQVTCGIDWAQDHHDIALVAADGAVVAQRRIGNDAAGFAELLAMLAEHDTRSGLEGEGGGELVPVAIETSRGLLVACLQATGRDVYAINPLAAARYRERYRVSGAKSDALDAIVLANILRTDRHAHRALPRDSEQARAVAVLARAQQHAVWDRVQVYNQLRQLLGDFYPAALAAFAGTGRATLDSPAARTILIAAPTPQHARALTVERLCALLVQAGRQRGVDREARRLHAILMAPQPRQAQLVEQAMGRHLLAVLRHFDVVCGNVDDLTQAAEAAFATHPDARIITSFPGVGLLTGARLLAELGDDRARFADAKALKAYAGTAPITRASGRRALVSARRARNDWVMAAGYMWTVTAIRCSPGARAQYDRRRAAGDSHSAAQRNLLNRLLGKLHHCLQTGVPYDETQAFASNLPSAA

SEQ ID NO: 220613 - protein, 320 aa, unidentified
MEAMIERCAGLDVHQETVVACVLFGPLDKRPKKEIQTFPTTTSGLLALSDWLASQEVTDAVMESTGIYWKPVWNVLEHSVQLVLANARHVKNVPGRKTDVKDAEWLAKLLRSGLIESSFVPPADIRDLRDLTRYRKKLINSRTAERNRIHKILQDANIKLTSVFSDLFGVTGCRILEALINGEKIELHSLQQMVDPRVKASLTEIYEALNGRIRKHHCDMLRFHWEHISYLDQTIDKIVEQIDQVLIPYREECELLDTIPGVNKDSAAIFIAEMGVDMSVFGSAKRLASWAGVSPGNYESAGIKKKVKRPMETKLSERLR

SEQ ID NO: 220614 - protein, 317 aa, unidentified
MTEQQKPFVGIDVSKARLDIAVRPSRAFWQCTNAPESFPELVARLRTIDPALIVLEASGGLETAVTAVLAEAHLPVVVINPRQVRDFAKATGALAKTDALDAQVLAHFAEAVRPEVRALPSGQLAELDALADRRAQWVKMHSAEQNRLTSAPTCVRPDIQAHLDWLAERIDNSNKELRRLIESTPAWRAEDDLLQSMNGVGPVLSAVLISAVPELGTLSNRRISKLIGLAPLNRDSGKHRGKRMIFGGRAQVRSALYMPTRNAVRFNPVIKALYDRLKAAGKPEKVVMTACMHKMLVILNSMVKTNTHWRQLDVASS

SEQ ID NO: 220615 - protein, 345 aa, unidentified
MSVSGAYEGRQIVGMDLHRRRSVLVRMSETGEHLETVRISNDPEYLREVMTRAGEAPEVVLEAAYGWYWAADALAELGATVHLAHPLGVKMFGLRRVKNDERDAADLADLLRMGRLPEAWIAPPATRELRGWVRHRAKLVALRSGLRCQIHAVLASAGMQVPMSDLFGVSGRELLTTATLTVESRSRVESLLRIIGALDFEIDLYTKLVASRLRTDPGYHAIQAIPGVGPVLAAAFVAEIGDITRFHRPAELASWAGLTPRHHESDTTVHRGRITKQGSRLVRWAAVEAVQRVPARTRLGQRRDRVAERRGHNIGVVAAARDLITLVFYGLRDHHVRCLPTKAAP

SEQ ID NO: 220616 - protein, 528 aa, unidentified
MHCLVAKRCGFGQNARPRWRVCEGLADRAERLVEFTYTREYAMSKRKLSTFERLHQGKMNRKQRKDLARRLYSDNPGLEVVHRNVAGIDVGNESHFVAVAPGCDPQPVREFGSWTADLMRMAEWLKSCGVKMVVMQSTGVYWIAVYEVLEKAGFEVWLTNARDTKNLPGRKSDVQESQWLLKLQTYGLLRNSFHPPEEIRRLRTMWRLRERHVQEAGRAIQHMQKALTTMNVQLANSLSDISGVSGQAIIRAILKGERDPYQLARLRDYRVQASEEEIARSLEGHWQEDVLFELQQAVDGYDFYHQQIRECDRQLQKYLAAVHPRPPIQPQPVATVGSAASQQAPKPKKKKGSKQPRKNEPKFDVDAELNRICGVDLRTIDGVDVMTILTLVSELGTDMTPWPSEDHLVSWLKLSPRRQVSGGKLIKHEHHKVKNRAAEALRMAASTLTRSDSYLGARFRSLRSRLGPGKAIKAMAAYLARLIYRMLTRGQAWVDRGAQQYETKRHARETHSLQRRAATLGFRLVPVA

SEQ ID NO: 220617 - protein, 330 aa, unidentified
MTMTPTQQTYNHVVAFEVSKEALVVHTLPADEQCTIANKPQSVRRLLKSQLKHNRKQNLGPILIVCEATGGYERHVLDAAIDLGLPVHRAHGARVRFFARYCGLIAKTDPIDARVLAHYGIKTDKLRLYVPPPPETAALRALHARRTEIQQMMIAETSRLDQTHHKSIVKSLKAHIAQLKSALEAIEDEITHLLQENASLKKKVELMRTVIGIGPVSAMILLAYLPDIGSMTKGEVARLSGLAPINNDSGKKRGARHVEAGRTAIRRALYMAAVVAMRANPVIKRFADRLRGKGYPFKYVAVAVMRKLVVILNAVLRDGQPWKGAQAACA

SEQ ID NO: 220618 - protein, 376 aa, unidentified
MSPSILYLGLDVHKESVTIAVLPAAAPAPTRVEQLPYDLKKLQRCFARLAQDGTTLRACYEASGAGYVLQRAMTSWGYACEIVASALIPQKPGDRRKFDKKDAANLARLYRAGELTPIRIPTAAEERVREIGRCRETLQREMLRSRHYLLKLLLRRGLIYHTGAHWTHRHRAWLDDQRRSGVLTAGDAVAFDEYLALLDYKLGRRAELDRQIEALALTPLYRPMVARLTCFRGISTLGAMVLATELGDWQRFAKPTQLMAYLGLVPTEHSSGSREWRGAITKAGNSRCRHILVQAAWNARRPPSRSRLLTRRQDGQPPALVAQAWKAQRRLYTLFHRLAARRPAQIAAVAVARELGGFLWAAMREVEAVGHSSMVA

SEQ ID NO: 220619 - protein, 428 aa, unidentified
MTNRQPIPTDALLVAIDIAKVRNEVLIEAPNHKRRRRLSVLNTRAEHDRLIETLRAYGKPVICAFEATGNYHRPIAWRLIEAGFDVRLVSSMALARTREALHNGWDKNDPRDAQVILHMLRIGATQRYHDPLRAGINDVQELSKTHEAIAKAKTEIQHRILTHYLPLYFPEIERFRGNSRSDWFFAFLDAFPTPASIMALSKEAFIEAAWDVVGRKVSKERLLADIYETARTSIGLPLPIDAPAIRMFRMVIAEARSLIRQRNEIEDMADAMLRDSADYKALRKVPGIGPVIALTILAEGGDLRRFRHHRQFLKFCGLDLSTQQSGQHRGQTRLSKFGNARLRRTLWIAGQVAIRQRENGFRHKFERYIAKDRDNPDLRRKALTAITAKMARVVHAIIKSGSDYRPFVEGRVPGGRISFCGAVRAPKG

SEQ ID NO: 220620 - protein, 368 aa, unidentified
MNQAKYIGMDVHQATISVAVMDSAGKLILESILETKAATILQFIRGLRGSLLVTFEEGTSAAWLYDLLKPYVANVLVCDPRKNALLKDGSKSDRIDARKLAELLRGNYLSPIYHGENGVRTLKELARSYLTITKDLTRVMSRIKAVYRSWAIPCAGPAVYRPRHRAEWLAKIVEPGVRLRAERLYQQLDALEPLRQGARRDLLAESRKHRAVKLLRQIPYLMMRAEFCGSIHMLGPIRSALLVALLETPHRFRTKRQLWAYSGFGLETHDSGEYRYVRGQLRRNRERVTVLGLNENHNHDVKNIFKSAAISASTRPGPFQEFYAGLLAKGRRPAMARLTLARKIAAITLTIWKKGVCFDANELHRQAA

SEQ ID NO: 220621 - protein, 366 aa, unidentified
MKKISTVQVFGNEIFKEQKLTIGVDLGDRWSFYCVLDEAGKIILEQKVSTTPEAMKQTFGKIPRSLMALETGTHSPWVSRLLTELGHQVIVAHAQKVELITKSNRKDDRHDARTLARLARIDPELLGPVRHRSAKAQIHLTVIRARAELVSARTALVNAARGLVKSFGQRLPKCGTDQVNEKLAEGLSAELRDVLAPLLREVESLSQRIQEYDERMEKIAKEVYPEVSLLKQVKGVGTQIALTYVLTIEDPYRFAKSREVGCFLGLKPGRRNSGKSEPQKRISKEGDRYLRTMMVHGAHYILGPFGEDSDLRRWGRKLGERGGKNAKKRAVVAVARKLAVLLHRLWVNGEVYEPLHNSQKAMRAVA

SEQ ID NO: 220622 - protein, 427 aa, unidentified
MAYRIAAVDVHKKMLAVVVADVAEEGEYRFERRKFGATPDQLHLLAQWLVQQEVEEVVMESTAQYWKPVWGALELYWRPARQQRDGATKMCGTLHLCQAKSNRGARGRKNDFADGERMIRRLVAQELVLSFVPDPEQRLWRAVTRRKYQLTRDKVRFTAQLESLLEQAHIKLSSLVSDLLGVSARRMLKALAEGETDPSALAALADHRLHATPEQLRDALGACAQLHAVYRRLLKMALEELQLMQDQIEKLEREAADLLRQHQDAVERVAEVPGFGADSALQMIAEVGPEAAAFASAKDLSSWVGVIPGDEESAGKPHSTRSPKGNKNMRRRLNQAAQAAVKTKGSIFEVTFRRLLPRLGYKQAIWAIAHRLCRLLWLIPHKRVHYQERGPAVSAKSRRTRTARMIKELRKLGYRIEGGLLPEGTPA

SEQ ID NO: 220623 - protein, 301 aa, unidentified
MGTISLGVDLAKCIFSVCEMDGIGRVLRRREFRRDAFATYLAQLPAGTVVAMEACSGAHHWARRCREYGLVPRLIAAQFVRPFRKNPVAKNDPNDAEAIATAARQGNMRFVPVKDIDQQARLSWHRVREGYKAEHLAIGNRLRGLLAEFGIVVPNRDAALHRVLGDLDAYAELPGEFKELLRSLSEHWVQVHAAMAACDARIERHARQDSRCARLRAIVGVGPLTADAMVASIGNAREFKNGRQLAAWLGLVPTQHSSGGHARLGAISCRGDGYLRTLLIQGARSSLERAKRVSLDKATPE

SEQ ID NO: 220624 - protein, 354 aa, unidentified
MNNITTVGIDLAKDVITAYAQDLQGRCVLSRNFKFKELAEWLVQLPAGCVVGMEACSSAHHWGRRMQTMGLQPRLMAAEFVQAFRKSRSAKNDHNDAEAIAIAVRQPTMRFVAIKTEDQQSRLSWHRVREGWKEERTGLINRCRGLLLEFGYPINRSAAAFQRALQTCLHEETLPDNLRRLLAQIDGQLRQLDQQLALCDREIAQSAHNDEAAKRLQAVAGVGVITADAVCASVGNAHDFKNGRQFAAWIGLTPRQYSSGGKTQLGRITRRGDAYLRSLLVQGARSTLQASLKKAPDKLNRMQQWIIRLYGRVGYHKTLVAIANKHARQLWALLAKGETYDLNAWQQYAIGEAS

SEQ ID NO: 220625 - protein, 336 aa, unidentified
MRELTTVGIDLAKNVFAVHAVDRDGRVVLRRLIGRGKLAELIAQLPPSLIGMESCTGAHEWARRFQVMGHSVRLMAPMFVAPYRKSGKNDGNDAEAICEAVSRPNMRYVPIKTRDQQAMLTLHRVRQGFVVERTAVVNRIRGLLAEFGVVMPQRVESLRRELPAHCETLPTLAARAILDLQQHLRVLDTRIGEYDLELKRLAGANEDARRLQTIPGIGPISASAIVATVGSAAEFRNGRQFAAWLGLTPRQFSSGGKSRLGPISKRGDAYLRMLLVLGARSVLQTAARHTDRLSRWVQSIHARCGYHKAIVAVAAKNARILWAMLAKKERFTPQFA

SEQ ID NO: 220626 - protein, 387 aa, unidentified
MQIADRSEAPTAIRIDLGAIFVSLELSRSTWLITSLSPGSGEKMSKHLVRGGDIAALLERFTQLQEKTHTRTGKRFEIIVIQEAGLDGFWIHRVLQSKGIDSHIVDPASIATSRRRRRAKTDRIDGEALVRALLAYKRGEPRVCAMVKVPTPEEEDRRRLCRERKVLIAEQIEHINRLKGLLFSQGISGYEPLRRNRWTRLEELRTGDGRLLPKHLKAQVRRELDRLELLLEQIKAVEVERDALLAAEETSAPAPAAILLNIRGIGPEFAAVLWSEGLFRHFDNRRQVAAYAGLAPTPWQSGAVDREQGVSKSGNPRLRTTLIQLAWLWVRHQPRSALTLWFEARVKRNGGRLKKTTIVALARKLLVALWKYVTAGVLIEGAAMKAA

SEQ ID NO: 220627 - protein, 325 aa, unidentified
MQTSTTVAGIGIDVSGAKLDLAIRFSDLSYADSSYENNAKGIRSILSVLKREETAKAAPLVIESTGNCHLQSAIMIKQRDYAVKVINPVLTRKFQKSSIRNAKSDKIDARRLADIACIEPKLPDFSCNINDIAAKKITSYLSHLEKVRQQMSSSLRQLERTDKLLKMNIDLKPINRAIKKIEEQMAVLAETLKTDLPETAKKIVNETKGISEKQMAIFLAIVGKRHFATRDQLVAYVGLDIALRQSGGWRGKQKLSKRGNGYARKILYQIAWSLKQNNEHYKSYFNRLKNDNKKHYNTAMVATARKFLRFMHAHYFSLGNVVGVN

SEQ ID NO: 220628 - protein, 385 aa, unidentified
MDQTSSSPLSANTLHCALELSKKSWLLAIQFPDREQPSLYAIEGGDAEKLMAKLTAARDCWAKVSGALPVITLCYEVGYDAFWLARFLKARGIECLVIDPGSLQVNRRGRRVKTDRIDVKLLLRTLIAWCRGERHVWSLVRIPSIDEEDLRRSHRERSRLVRERTAHINRIKGLLFAQGIRGINVKSQYKTLAVEKLVTGDGHRLPPRLADEIAREIQRLAMVQEQIAKIERERDTAPTPCEATERKRHLLLQLKSIGPAISALLSREVYYRQFANRRQVGSFLGLTPSPYNSGEQEHCQGISRAGSGHVRAIMIETAWLWIRHQPKSALTRWFVERTAGQSTRMRKIMIVAVARKLAIALWRYVEHGLVPQGAILSPPMTGNAR

SEQ ID NO: 220629 - protein, 369 aa, unidentified
MKKNNMYVGMDTDKNSIDVAIGEEGRNKEVRHYGRIENNLSSIDKLVGKLETLGHTLHFVYEAGPCGYTIYRHLRAKGIDCAVVAPSQIPKRSGDRVKTNRRDALNLARLHRAGELHRVYVPLPEDEAMRDLSRAREDAKRAEVKTKQQLSAFLLRNGFKFTGKTPWSNPHRRWLNEIKLPHPAQQITFQEYRDAVDEAHNRVERISEQIRTLLPNWRLKPVVEALQAMRGVSLIVAVITIAELGDLTRFTNPKQLMKYLGLVPSEYSTGDNRRQGSITKTGNGSARRALTEAAWSYNRPARVSRAIDERQKNLPKVIKEIAWKAQLRLCARYRRLVNKGKNKQVVITAIARELAAFIWAIACQVKINA

SEQ ID NO: 220630 - protein, 345 aa, unidentified
MKNTTQIDTIPETFLGIDVGKAELFCHLLCSSSSQSAKFTNTLPGIKSLLNWLKKNTELSTTSACLEQTGHYGKLVSKALYESSLEAVYLVNPRRIKAYGNQKLRRNKSDTADAKLIANFLRSEHLELIEWVPQSTDREKITEFNRYVESITQDAAKLKTKCEAISDPSLLRSLKRRIKFLEKERADIRKRINVLISKSEELTSQQTLLASIPSVGEVTQHTLIAELPDIKQFKNARQLAAWSGLTPQHYESGTSGRTQTPITKIGSSALRRALFMPAMSARTKNPILREFGDRLQKNGKKPKQIIIAIMRKLLHQIYGILKSNQPFNPNKKGFISAAISQEIRA

SEQ ID NO: 220631 - protein, 317 aa, unidentified
MEGSQLFVGIDVSKACLDVAVRPTGQRWSFPNDEGGCAALADKLKSLGPALVVLEATGGMQVLLTAVLAEAALPAAVVNPKQVRDFARATGKLAKTDRIDAQVLAHFAEAVRPEPRPLPDAQTQALKARLARRRQLVSMLTMEKNRTLGALPRSLRSELQAHIHWLEEALKESDDELGRMLRDSPLWREKEALLRSVPGIGPTVSLTLVAQLPELGTLDSKKIAALVGVAPFNRDSGTLRGRRTVWGGRAPVRAALYMAALVATRYNPVIRAFYTRLCKAGKAKKAALTACMRKLLIILNAMLKHQSPWRVSSSFVP

SEQ ID NO: 220632 - protein, 360 aa, unidentified
MEVGQTMADHGVVGGVDTHKDLHVAAVVDELDRVLESRCFATTRHGYQQMLTWMRSFGQLRRIGVEATGTYGAGLLRYMQNAGVEVLEVTTPDTHDRRKRGKNDDLDAQNAAHAAFAGRRTVTPKSRDGMVESLRVLKACRKTAVAARRVALQMIHNTIVCAPDELRETLRRMTRMQLIRTLAAWRPDLTDYRSVVSAYRITLKSLGRRYLDLHDEIADLDTMIVAIVDELAPALVARNSIGHGSAAQLLVTAGENAERLQSEASFAALCGASPVPASSGKTTRHRLNRGGDRAANSALHIIAIGRLRTDPRTKAYIAKRVAEGHSKLEAIRCLKRYIAREVFSLISQRKQEINQGRNVA

SEQ ID NO: 220633 - protein, 415 aa, unidentified
MVDVIVERCAGLDVHRDTVVATVRVPGSGKSRRRRVQETRTFGTTIGQLERLSDWLAECGVTRVGMESTGCYWKTVFYALEDRFDCWLVNARHLRNVPGRKSDVIDSRWCCELVELGLVRPSFVPPPEIRRLRDLTRLRATQVQERTRAIERLEKVLQDAGIKLTSVASGVYSVSARAMLEALLAGVTDPAILAELARGRMRKKIPQLREALASRFDIGHHGVLVAGLLAHIDALDQAIGNLEARIGIATAPYADLIELLCTIPGVGVRIAEILIAECGLDMSVFPTVAHLASWAAICPGTNQSGRKRGSGKTRNGDTWLCTALTQAAHAAVHTKNSYLAAHYWQLRGRRGEQKAIGAIRHDILTAYYHIVRDRVGYRELGPDWLAHRHSPEHRTRRLVKQLEALGHRVTLEAAA

SEQ ID NO: 220634 - protein, 382 aa, unidentified
MKTNQTPLSKIIAQSDEVLYLVLELSNTKWLVHFSDGSRRRQKGVDAGNMVALNQEIAQAKEKFELSADALVVSCYEAGRDGFWLDRYLHSRGIENLVVDASSIKVDRRGKHAKTDRLDVEALYEQLYDYCRGKQKALRVVRVPSAQDEEQMRLHRELQVLKQERVSHRNRIRSTLVRHGLRSTRIGGARWQERVEGFRQWDGSALGKDTQGELVREAERLALVQSQIRELELERGRRIAEEKGKKIEQVSRLTQLRSIGPATAWVLVMELFGWRALANRSEIGALAGLTGSPYISGELEHEQGISKAGNARVRALAVELAWLWLRYQPQSELSRWFGKRFGAGGKRARKVGIVAVARRLLIALWRYLEYGEMPTGARLKAI

SEQ ID NO: 220635 - protein, 351 aa, unidentified
MPSKKDAAVIRAIGIDTGKNTLHMVGLDEKGAIVLREKVSRNRITARLVNVPPCLIGIEAGMATHYMSRELVALGHKVKQVPPAYARPFRQGHKNDFRDAQAVAEAVQRPSTRCVPIKTDDQLDLQALHRVRSRLIGDRTAVINQIRGFLLEHGIPVRQGPRFQRQQLPQILATRTDVLSPRMVRIIGEIVDDWENLDERIERVTDEIEGLARADVSCGQLMTVPGIGPIIASATVAAIGNGTAFAKGRDFAAWLGLVPKQMSTGDRTILGRITKRGNRYLRTLFVQGARAILLHPASWAKHSFGPWLTSAARRLHRNVLVIALANKLARIALTVLVQGRSYETRVEPAAV

SEQ ID NO: 220636 - protein, 317 aa, unidentified
MAQNRTVVGIDVAKDKVDTAIRSVAEASFATTPEGRRQLLDWLQAHGVDKAVMEASGGYDRSWASLLRRAGLEVVIVDPKRVRHFAKSAGQLAKNDPIDARMIAWFGEVFEDTLGQPHDEDRQELDQLVTARLGVGRLKEQIDSWREHEQPTVVQKAHQALLKAVAVQLTKLATAIAAKIDQTQRFGQRAEIIHSVPGLGDGAAAGLIAFLPELGRVDRQAAAALLGVAPFDDDSGKRRGERHIVGGRRKLRCLLYMAVLGAATQHNPVLKAHYQRLIAKGKKHNVALMACMRKLIGILTTMLRRSEKWDPTRHATA

SEQ ID NO: 220637 - protein, 408 aa, unidentified
MDNTLQFLRKECITMILVGIDIGKNKHTFSIVDKGTGEILSNPAIFDNNLAGFLYLIKKLRGYVKSELLIGMEDTGHYHLALLKYLLDNRYTVSLINPTTTDLTRKIQGGIAKNDTLDSITICDVISSNRRKKPYRITKVNQFELYEQKQLTRHHHDLKEELNIYKNRLQKCIDIVFPEFNSLFNSKYGIVYMRVLKTFSSANAIANADIRSIRKCFEFKGRGGRISLSAEQLKMSAKISVGIPSVAEEIQIRHLVCQIELLEEQLSEIDKRIEEFSIKNNSTILSIPGISHFSGTSIIAELGDICNFQKSSQIIKFAGVAPYHYESGQFTAQHTSITKKGSRYLRKTLYQIILPVINNNEVFRTYYKKKLAEGKGHRCAHGHCIRKLLRVIYHLLTTGQQFNPEFLA

SEQ ID NO: 220638 - protein, 352 aa, unidentified
MLIIGCDFHTRYQQIAMAREETGELLVERRLEHESGEAHAFYRELQSSKEPVRVGIEATGPIHWFERLLAELGHELWIGDSAKIRASEVRKQKTDERDARLILDLLLASRFPKIWVPTPAERDLRQLLWHRHKLVCLRTMLTNQLHFLAMSQGLCRKKKLFTKKGRAELGSLTLGPWAGRRREELLKLLGQLDPPIAELDRAVLEEAQRRDDAALLMTHPGIGPVTSLAFVLASGLITRFHRSKKIASYLGLNPSEASSGGKRRLGAISKQGNTMVRWLLIEAAQFAARLDPELRQDYQRLKFRRGHAVAKVAIARKLAVRMYWMLRSGADYAQLVRRQGSPGNVLVDVSLP

SEQ ID NO: 220639 - protein, 436 aa, unidentified
MDVHKDSVTACLLVINEGGKDRNEKREFGTMTRDLRELASWLASAGVEAIAMEATGVYWKPVWNILDAEKKFKMLLVNAQHIKCVPGRKTDQKDSEWIAELLQHGLLRASFVPPVEIRQLRDLTRMRTRIRQTLASFANRIQKVLEDANIKLGSVASDVLGVSGRHMLKALLAGEQDPQKLANLAQGHLRKKLEPLQLALEGHFTEHHRLQLKFLLEFIEFGEKQLSNLDSEVQLLLTRVQPKASLPDPDDGALAESKGSPPQATSLQTAVELWDSIPGIDQLAATTLVAEIGANMDQFPSARHLAAWAGLCPGNNESAGKRRSAKIRKGSVWLRRALCQAAWAASRTKNTYLAAQYRRLIVRRGKKRTIVAVAHSMLIVAYCLLKRQCVYQDLGANFFDRLDERALTHRLVKKLIGLGYQVTLKPGRAEAAPETA

SEQ ID NO: 220640 - protein, 407 aa, unidentified
MNAVGIDVSKGKSTVAVLRPFGEIVVSPFDVSHSPKELSKLVTLLKTLNGDTKVVMEYTGNYYLPIALFLRNNGFFVSVVNPILVKDYSTKSLTVRKVKTDKKDALKIASFALDRWNELSPFSAQSEARLLLKSYNRQYNQYNKLKIILKNNLIALLDQTFPGANTLFSTPTRKSDGHEKWVDFVLKFSHSECISKKSFSFFLKSYLSWCKKFGYKFSKSKAQAVYDFACNCSPSLSFSDSSALLVSNAIIQLNSINETLASLASEMNKIAATLPEYDTVMSMFGVGSVLGSQLIAEIGDVSRFPNKKALVGFAGLDASPFQSGNFNPQSRSISKRGSAALRKTLFQVMSVVLQRAPTNNVIFQFMDKKRSEGKHFYVYMTAAANKFLRIYYARVTEHLNLFTTTTA

SEQ ID NO: 220641 - protein, 327 aa, unidentified
MTQSIVGMDVSKHSLDVVLLHPEQKHYQVVENNLAGFEYLSSWLQAKGCEQVHICLEATGQYGYAAAEYLYLCGYDVSIVNPARIKAYATSRLKRNKTDKADALLIAEFCQKEKIALWSPPKPVFKALKDMVHCLDDLKAMRQQERNRMEFMASDPLVESMRLEHLTWLDEKIKTLRAAIHKHIQQDPQLKHHSALLISIPGIGELTAARLLAEIRDFHEFRNARQLTAYAGLNPRQYQSGSSVYRKSRLSKTGNGNLRHALYLPAIVAKNHNPIIRAFCQRLTDRGLSKMAVVGAAMRKLLVLAYGVIKTDSTFNPEFVLKEVFMA

SEQ ID NO: 220642 - protein, 351 aa, unidentified
MIIIGVDYHPSFQQIAFMDEKTGEYGERQLNHSNGEAEKFYRELQHRGVHARVGMEATGHALWLERLLAELGVELWIGDPAEIKTKRVRKKKTDREDARLMLRLLLENRFPKIWVPSPENRDLRQLLWHRHRLVQMRTRIMNQLQAVAMNEGYRWKKKLFSEKGRALLEKLSLAPWASRRRKELLELLDQLDPKIAELTAATEQEAKKRPEVLLLMTHPGVGPLTGLVYALVIGTPERFPCGKQIGSYTGLVPCEDSSAGRQRLGHINKQGNSLLRFLLVEASQAAVRCNPDWRRRYVHLRMRREKRIAKVAMARKLAVRLYWMWRNNWQYSQLVEFGSNVGKLGTVHGVK

SEQ ID NO: 220643 - protein, 319 aa, unidentified
MDGSTTSFVGIDVAKASLEVHLLPEGRHQRLSNDKPGIEQLLGTLPAAGACLIVLEATGGYHRRLVADLLGAGHRVAVVNPRQARDFARGLGILGKTDALDARCLAEFAKHVQPRSMAQISTTQAELQDLVTRRRQLVEMRASEMNRMDTLASKKVRKDVQQMVDLLRKRIDRLEKEILALLEADDAWKNKADLLDSVPGVAGVTVASLLAKAPELGTLNRQKISALIGVAPFNNDSGPFRGKRTIWGGRAEVRSVLYMAALTARTHNPVIREFAKRLEAAGKPFKVVIVACMRKLLVILNTMLKTNTSWTTKKCLVTT

SEQ ID NO: 220644 - protein, 440 aa, unidentified
MIEPNAAGIDIGHREHWCAVPSDRCERPVRAFGTFTEDLERMADWLKECGLKTVAMESTGVYWIAAFQVLERRDFEVRLVNARQVKNVSGRKSDVLDCQWLQRLHSYGLLNASFRPADAMCVLRTYLRYRDELVGARSVQCQHMQKALQQMNVQLHQVLSDVTGVSGLRIIEAILAGEREVTKLAGLADRRVRASQATIQKALRGDYRAEHLFVLRSAFELNQTYEAKIARCDEQIIAQMATLPTCAEEDKKPLPPRKPGRPLRCDLVAGTDLRKELYRCAGVDLTAIEGIGVLTAQVVISEIGLDMSRWPTEKHFSSWLGLCPDHRISGGKVLSRHTRHVLNPVADALRIAATTLQNSKTALGAFYRRMRGRLGAASAITATAHKLARIIYRLLKYGEHYVQQGLEAYEKKYRERLLHNLKKTAAALGLELTQKQPLPP

SEQ ID NO: 220645 - protein, 349 aa, unidentified
MTEQRRSYAGECVYVGVDVHKETYTVTCVCHKQIVKTATVQAEPASLAASLRRWFPGATLASAYEAGFSAFVLHRALTTAGITNIVVNPASIAVAANDKVKTDRRDSKRLAVDLADGRLRGISVPTEEEELARLLPRTRAQLVEHRATLARQIKAKLHQFGLIAPSSRRMLSHRYLREIESWTLPPALRASLQMLAEQWRFVTRQLIEMRRLLREQATAQAAIDKVYRSVPGIGEVVARTLATELGDMTRFANERALFSYTGLTPSEYSSGASVRRGHISHQGSSRVRHLLVETAWRALPYDAVLQTMFERIAATRGKKRAIVAIARRLIGRMRACFRQGTMYAVGTLA

SEQ ID NO: 220646 - protein, 460 aa, unidentified
MNDHFLGVDASKGYSDFVMLDGKKQIVIENFQLDDTFEGHSQLYELLRRFNQDYPQATIYAAIESTGGYENNWFQSLLNFQGSLPIKTAHLNPLGVSHNSKADLKRNVTDKISAQNVAEYMIAHPEKVSYQHQDSLASLRKQWGFITMLTKQCTQLFNQLESLVYNANPEILAYCKDRTPQWVLKLLTRYPTARRLSRAKVNSLARIPYVSTERAKELIATAKKSVGSANDKVTEQLIMSTVKQILHLKKLIDTQTEILANQCQIPEVELLKTFTGIGDYSAIGLMLQIQTVERFLTSKKLSSFFGIHPEYKKSGDGTYKYRMSKKGRKEGRRILFTVAMTAIQSNPLIREIYQQAVDRGMEKMAAMGLCMHKILRIIYGMLKHNKPFDPQIDLKNRQKKLPRQKKGGPDQNRRYQDFDSKAPVSRRQKMKRKERKQSQNAVDVKHGISEAPVPTDQLAN

SEQ ID NO: 220647 - protein, 364 aa, unidentified
MNEIIKQCVGIDISKDTFTVCVCRRDLSGKEYLSETVDFKNLKTGFNQLVKWSRKITDPSIETLFVMEATGIYYENLAHHLHRLNLPVSVLLPNKVKHFAKSLNVKTKTDQVDARIIARLGAERKLLLWKPPPEIFKLLKDLTREYAELIRERTAFKNRLHAMSSGYKPHPAIIRSNKAIIKKLTENAEKIKEEIEKLIYSEEWLGSKVNKVLTAKGVGLMTVATILAEMQGFEFVSNIRQLCSYAGYDVVQRESGTSVMGKTRISKKGNGRIRAALHFPALQSARHSPRMKSIYDKINQNKPSKMVGATAIQRKMLVLIYTLWKKDEEYVEDYENKAGRGLSNLPAQDELPTSSQKLSFVCEI

SEQ ID NO: 220648 - protein, 386 aa, unidentified
MKTVAGLDVHKDSVYLCIMRENGEKIERVYDVLTPELDSMRDFMTENDVSEAAMESTSVYWIPIWRVLVDSFDLKLVNPYFIKQLPGRKSDVKDAQWIAECVLKELIRDSYIPAPKVQKLRLYDRRIFELNAELGRKKSKIDAILQRCNIRLSNYVSNTDCKSYKNVVTQISEGVTSPKELLKSVHKRIINKHGEKKILASLTGIISDAEIDMLSQYVAESTLLEDNKNKCIEKMREICNKEFEEQMKNLQKIPGVSERSALAILAEIGPNVNAFPSARHLVSWCGFNPRNDESNKKIKSNKITHGNRFIRVACVQCAWAASRTKDCYFSKFYAFHTQVRKKFKLKVIVAVARKILVCVWHILNSNVPYRDFVTSNPTVKDCIQLT

SEQ ID NO: 220649 - protein, 319 aa, unidentified
MLIGIDVAKAELVVAARPSGARWTTPNDEPGVRALVARLRADAPALIVLEATGGYELLAVAALAAAGLPVVVANPRQVRDFAKATGQLAKTDRIDADVLALFAERVRPAVRPLPDADAQELDALLGRRRQLLEMLQAERNRLGQVFGRGKPLVKKSLRAHIAYLERELRIADTDLGAMIRESPAWRERDDLLRSVPGVGPVLSLTLLAELPELGRLTRREIAKLVGVAPLSRDSGTMRGRRFVQGGRAGVRAVLYMAALVATKRNVVIRALYQRLLAAGKPKKLALVACMRKLLTTLNTMARTHQRWSLDYATAARHTA

SEQ ID NO: 220650 - protein, 460 aa, unidentified
MKVRLGVDIACRAAHRAACADETGKIIWSGHRFHTRAEDLQALWAKLPSDTTEVLVVLEPTRNAWVPLAAWFRRRGATVVLVPAEQSADLRAYYAKHTKTDRLDAELLARLPLLHPDGLHPETTNGPGDPLKRAVKLRSGLVRRRSACMQRLDALLEILGPDWVAALGSDMTQTAFKFLAGWANPHQVKRIGRARLARWFQRQTRKAWGERRADAVVSAAEATLALWGPAGLDYEALAADIATEASLALELSRQIARLDERIFDHYCDADPDHILLSVPGVGKILAGQIRGRLGDPHRFTSLAAARSFSGLIPHQHSSGLTDATGGPTKHGDACLREALFLAADHARKTDPTLAARYQRLMCQTGRHHTSALCTIATVLLTRIVACLRNGTPYQVRDVDGSPITPEQGRAIVAARYQIPPEVRAARRVVSNLRSRQRGWDERIEQGVAKRSTTPPVPPPA

SEQ ID NO: 220651 - protein, 411 aa, unidentified
MKALYERCCGIDVHKRIVVACLKCGKKQEIREFGTTTEELRSLTEWLSDSKCQMIAMESTGSYWKPLYNIFELSSLAAIVVNACDMRNVSGRKTDIKDAEWIADLLQHGLLRASYIPNREQRELRELSRYRKSLIEERARELNRLQKMLEGGNIKLASVVSDINGRSARNLLTHMLKRDTSLTKEEVSSLVRGRLRHKVESIMKALDGFLTPLQKQLMLKVVDHIDDMTKRIGEMDDLMNQYLTEYHEAIQKLDEIPGIGRQSAETILAETGLDMSRFPTAKHFSSWAGLAPGNNESAGKRRYGRTTKGNITLKTTLIQCAKAAVKKTDSFLSAQYQRLVVRRGTNRATVAVAHTMLISIYHMLKNNVPFTDLGADYYNRFNTQSKIQHYLKKLKQLGWELDSATIPTAAV

SEQ ID NO: 220652 - protein, 430 aa, unidentified
MKSNTQNAKIEAITEKTLVLGIDVGSEMHYARAFDYRGIEYSKKPFKFSNTEAGFVTFKEWILDLKERHEKDKVIPGMEPIGHYWFNLGKFLQDNEMKPVLVNPHHVKKSKELDDNNPTKNDRKDPKVIAGLVREGRYMIPYLPDGVYADLRTASNIRFQLQAELTRIQNRISRWFNIYFPEYKTVYGKPDAKSGMLILKAAPLPEDILTLGIDGVNQIWRDAKLRAVGKARAKTLIEAAEHSVGSKEGAVSARMEIRMLLEDYESRNTRLQEVMVLIEELVRKIPMAEKLLEIKGVGIRTVSGFLAEVGNISRFNNPKELQKLAGLALVENSSGKHKGETTISRRGRKRLRYLLFEVAMSLVSKNPEFRELHNYYTTRRLNPLKKMQSLMAIAAKLIRVFYAMLTKGVDYDPKKMVSDIKRPAVYLQAA

SEQ ID NO: 220653 - protein, 419 aa, unidentified
MPFKIIRKNCCGLDVHKTWIYACIGITDPNGRTEYFEKRFSSFSKGLRDLSEWLSKHKCTEVCMESTGKYWIPVFNILEKTCSVELAHPKYTKPQKGNKTDRKDARWICDLFMCGMTKPSFIPPADIRHLRDLVRYRFKLTCMLTGEKNRAQNCLTVSNLKLDEVFSDVFGKSSRSITEYMLAHPGETFDVAPFVDPRCKTPVEEIQAAVDGAISPEQAIKLRQCLNHIDELEKHKEEIEREIFRVSDPYLDALTLIRTVPGLDKNPFTAIQILSEIGGDMSVFPTDKNLVSWAGCCPRNDKSNKTIKSTRISRAGSYLKPVLVQVSNALIKSKKHPEITDRYRRIKSHRGHKKAIIAVCRMLLTAIWHILSDLKPYTPDGYLTPRPVKKEKVLTTSQALNLLKLRGYVIKDDIAAAIP

SEQ ID NO: 220654 - protein, 370 aa, unidentified
MAKRSMFVGMDVHKESIDISLAEEGRDGEVRHDGVIAGDLEAVAKVGRALRAPARRLRFVYEAGPCGFGIHRYLTGQGEDCVVVHPSSMPKRSGDRIKTDRRDGDALARLHRAGERTAIYIPTADDEALRDLVRAREDAVGLSTPAQHRLKAFLLRQGRRYPGRAGWTRPYRRWLADLSFPLTPQHIALQEYRDTIDETARRVERVTDQLRQLTPAWRWAPVVDALQALRGVSFVTAVGLVTEVGDIRRFTHPRELMAYLGLVPSEYSSGPSVRRGGITKAGNPHARRLLAEAAWAYQGVPRIGRQMLYRQEALPKTVCDIAWKAQLRLTARFRRLVARGKAKPKVATAIARELTGFIWAIAQEVPPPPA

SEQ ID NO: 220655 - protein, 320 aa, unidentified
MSGYIGIDVAKSELVVAISGIDGVRSFPNSEHGHAEATKWLKKLDAPPVLIVLEATGGYERGITAALGNAKLPVVVVNPRQVRDFARGMGKLAKTDRIDAAVLAEFAARVRPEVRELPTEEQEDLRELLIRRDQLKQMLIAENTRLLQAAGKRYHRRRKEIKSHVSDLEKRMRMLESDLDDTLRRSSLWREHDDLLQSAPGIGKQTARSMIGFLPELGTVNAAQIASLVGLAPRNRDSGMMRGQRHIGGGRSRLRATLYMATLAAIRTDPVVKGWYEHLLAAGKPKKVAIIACMRKLLVILNAMTKTNTRWQPQTQPLPA

SEQ ID NO: 220656 - protein, 391 aa, unidentified
MPQPNDLSRSLTALDQDSTLIAVVEMSQSSWLVGAIIPGVERRPAKKLEASEGMLLALLHRWRDEAAKAGCTIDRITVAFEAGRDGFWLARWLRQRGIEAHVIHATSIAVSREHRRAKTDRLDAALLQRAFLGWLRGERGHCTMVAIASLAEEDAKRPSREREALVGERTRIGNRIKSTLARLGIRGIRPGLRKAAERLEQLRTPEGAPLPPNTLAELRRDLARLRLINDQIGEIEAARLERLRQQPDEARHPMILLLARVVGIGIETADMLVQEVLSRKLRDRRAVARYGGLTGSPEESGARRREKGLARAGNARVRRGMLQLAWRFLMFQKDSALAQWYRARTADARGATRKTMIVALARKLLVALWKLVTTGELPNGVVLRPAIQAAL

SEQ ID NO: 220657 - protein, 403 aa, unidentified
MKSVLSVDVANGKSIVLLITEHGEILIGPYEIKHCLSDFNLLKKKIDTFKIDNLTIFMESTSTYHLPVQRFFTKNNYNVQVINPILGKNNTRNLRKTKTDIEDCYNLADLFFKNTIKIHTKNMNDIFSSMIELSRQEKHLTESLVRSKNRFKQIIANSFPEYIKCFTSNDIFGKTSLNFIKEFPHADIIKERRIDALANNLYKSCKKGCSYNRCLIKAKKIKELANNSYPGIDKNSYEVNNLINIVEIISYSDFKLNEVKQDIVKLAKQTPYFDIINSIYGIGETSAAQIIAELGDINRFDNIKQLNAFCGLDPTIVQSGKSINYNGPISKRGNRNARKILFITCCSIIRSSVLHNIDTEILVYYRKKQAENKHFKECITACSTKLLRIIFAMCKNNSLYVQK

SEQ ID NO: 220658 - protein, 310 aa, unidentified
MDKIHIGIDVSKATLDVAISNQKEIKSFSNDEKGINQIINYLKREKPVLIVMESTGGLEKLLAASLAEYSLPVVVVNPRQVRDFAKAKGRLAKTDNIDARILAEFACDIRPEIRPLTDAQTEEIKAILVRRQQLIAMITMEKNRLYTANRIVVLSIEENLKWLKQQLDNLDKDIEAKIKSSPIWKEKDDLLKSVPGVGQVLSMTLLGTLPELGNLTRKQVAALAGVAPFNRDSGKYRGKRTTKGGRARVRPPLYMATLAATRFNPVIKEYYAHLIDMGKIKKVALTACMRKLLVILNAILREHRPWSYAS

SEQ ID NO: 220659 - protein, 311 aa, unidentified
MSIAVGIDVHKATLMIAIAGGRTWEVANTPRARATLVTRLRTLAPQTSVLEPSGGYERPLRAALHAAELPAARVTARQIRAFARARRLSAKTDRRDAQVLATSGATFAPTPTPVLDAGTAALAALRARRRQLTDTVAAEQRRRETAAPIARPSIDRHLAFLAGDLANLTAQRDALIAADPGLARKLRILTSVPGMGATTAALLLAELPELGRRDRGAIAALTGVAPFDEESGATRHSAHIDGGRERVRTGLFMPTRSAMRYNPVIASFAARLKAGGKPDRVRVIACMRKLLTILNAMLAKDELWHARPVTT

SEQ ID NO: 220660 - protein, 343 aa, unidentified
MQTITTIGLDIAKSVFQVHGVDADGHVVVRRQLKRRYVLAFFQKLPPCLVGIEACASAHHWARELQALGHTAKLMPPAYVKPYVKRQKNDATDAEAICEAVSRPNMRFVETKTPEQQSYLMLHRTRHLFIRQQTAVINAIRSHLAEFGIVAPVGRNGVDQLLGVVADAGDKRLPEIARACVAALGAQLQTLKAQVLQFDRLITAWHRSSEASRRLDAIPGVGPALATALVASVANPKAFRSGRDFSAWIGLVPKQNSSGGKDRLGSISKRGDRYLRSLFTAGALAVIRYAKIHGTKQRPWLTSLLARRPTKVAAIALANKIARMAWAMMAKGERYKEPAALAA

SEQ ID NO: 220661 - protein, 341 aa, unidentified
MKNKSFIGIDISKNVIDASIFCKGAPIKDFPHAVFNNSHKGFGEMCTWLKKNHVVLLNSLFGMEFTGSYSMELEKFLNARNYQFCMLSTHVVKHYPMGPKDKSDKIDSAKIADFLYRYNGTECVKPYNMPDKTMQRLKALMNERKFLVEQRTCFMNRRQLCTTKEAAQLYDGYIKEFSHDIENIELKMQNLLEADDSLSTTYKNLLTIPGIGFVNAMNVIVITRNFTAFETARQYASYVGVAPHFHTSGTSVRWRPRPSARCDGQAKADLSMAATVAVQYDAELQSFYNRKLGGKQDSDTKRKALNAVKFKLVLRMFAIGKQNREWEPLDSKSSNEKLAIS

SEQ ID NO: 220662 - protein, 391 aa, unidentified
MIYAGIDVSKDKHDCFIINSDGKILFKSFTIPNNREGFEVLYQKITSTTDDLTNVKVGLEATGHYSYNILGFLLDKGLTTFVINPLHTSLFRKSLSLRKTKTDKVDSHTIATMLMSDVNLKSYSDISYHNEELKSLTRYRFDKVRERAKLKTSVSRLVTILFPELEKLVPTLHMPSISALLSEFPGAFQIASAHLTRLTNLLYETSKGRYGRDNAILFRETARASIGSNMPVKSLELKHTLKLIGELDAEIDEIEQEIKRIMDELHSPILTIPGISYRMGAMILAEIGDFSRFDSPDKILAYAGLSPSTYQSGQLESSHSHMEKRGSRYLRYALFNAAKFVCKWDPVFAAYLAKKRAEGKHYNVAVSHAAKKLVRVIYRLEKSGQAYNKVS

SEQ ID NO: 220663 - protein, 324 aa, unidentified
MIDGILGIDVSKNTLDASMSSCNKVRARSFANSSVGWRHLLDWLITQKIRRVHACLESTGRYSLGIACALCEAGHVVSIVNPAQIRDFARTKLGRNKTDGVDASHIREYCELFKPQPWALPSEAHRRLGELQTIRAGIVAGLTEWKNRKNSGMVDAVAQSLADVTIAHFTSQLGAVDEAIAQTIDNDSSLRRKRDLLLSVSGVGEILAGVVLAELPGPDVLRSSAEVVAYAGLNPRQHQSGTSIDRVTRISKIGNAVLRAALYMPAMSAMRFNPAIVALVTRLKSRGRLSPKQIVVAAMRKLLVLCFGVLKTGRPFDPAIAMGC

SEQ ID NO: 220664 - protein, 353 aa, unidentified
MEQFIGCDAHKKFSVFVAVNEKGHAGEAMRVAHDRQLYREFLGRLPPHSMIAVEASGHYSWLVDEMERLGHYPKLANPLEAKRRMALTKKTDRLDARGLAILLRNGTLPEVWIPPSELRDQRELLRLRIFLVRLRTRVKNRIHGTLARHNVQIPGADLFGVAARLKLGARLPELPIHSREAVEQELATLDFLEIQIESAEQRLEAIMNVSVEADLLKTLPCVGKILSMVLMLEIGRVDRFPTAAHLASYAGLVPRVHSSGGRTRMGQVCGNVNRNLKWAFVEIGNLIVINQTRLAGTHVVRLYQRIKCAKNHQKAVVAVARHLAEAAWWLLTKQEVYREPQGPRQRTLSSTLG

SEQ ID NO: 220665 - protein, 427 aa, unidentified
MNCTQNEKLNQVSEKSIVVGVDIASELHYARAFDWRGVELGKVLKFENNLEGFKSLIRWIDRLKEQANKDNVLVGAEPTGHYWFGLGSYLKEQRIKLVLVNPFHVKRSKELDDNHPSKTDFKDPKTIAKLVIEGRYNEPYIPEGVYADLRIATSCRLRILKELNSVKNRIQRWLKIYFPEHCKVYGSFEAVSSMIVLKTVPLPADIERLGIDGINKLWRDAKLKAVGIKRAKSLYAAAQSTIGCTYGSESVKMEINLLIEDYQNKKDQYEAVMAVIEKLCMQIPEVAKLLEIKGVGLVTVAGFISETGDIGRFQSPKQIQKLAGLALKETSSGKSKGQTTISKRGRSRLRAVLFQAVMPLVSKNAEFAEIHRYYTHRIKNPLKKKQSLIALCSKLNRKFYTILTKCVDYDPIKLVSDIHRPQEQLAA

SEQ ID NO: 220666 - protein, 432 aa, unidentified
MKNTIVHHEGAASLEVARTKVKLSHAIIKIGLDVHARTYVAVAQYDQLLPKPARRLAPREFVPWVEALLRAGHTVYVVYEACGFGFNLYRQLKRAGAHCYVIAPRKLDEQSTGVKTDPRDATTLCQRLSRYVDGNTRELAVIRVPTEAEEQARHVSRQREQLVRLRLKLEAQGRSLLVSHNLPSPAHWWKNQTWSRLVRLLPSWIRLRLQVHRPALLALQQQIDALSGELEAAAPADVPAGLGKLTTVVMTREICSWERFTNRRAISSYTGLCPGERTSGTKRVPGSVTKRGNPRLRAALVECAWRMVRFQPNYPPVKQRLAILAKGARATGAQRKKAIVAVARHLAVDLWRIHTARCSAAQLGLHNAETLLVRGEQKAERQRCRLTTHDRLNLDPLERGVCSEPNLVREPFGKSHRRFRLSRAPFRFTETE

SEQ ID NO: 220667 - protein, 406 aa, unidentified
MQDDITPVWPVFAGIDWGSENHQLCVVAADGTQVLQTRVSHDVAGLRQLDQHLTRFGTRLPVAIERAEGLLVEHLQAAGHAVFPVSPRIAARARERYKVASVKDDRFDAFVLADTLRFEHQHWRALAVPSPLLAEIKALTRDRDRLSETQQTIESQLRMILEAYHPAPARLFSSVDRQITLSFVTDYPTPANASSVKATRMAGFLTRHHYTGRVPAQTLADRLRQNLLSGAPGTVAGKSFSALAFTQVLQLLNTQLAEFDDAIAAATAEHPDAKIFASLPGVGPVLTAVLLAEIGEDRARFPEPAVLLAEAGLAPVTRASGRSRSVRFRYAANRRLREATMWWAFNSIKLSPWAAAAFREARDQRGQRYHRALRGLAARWTRVLWRCWTNHEPYDPTRHGTAPAAA

SEQ ID NO: 220668 - protein, 315 aa, unidentified
MNDKAKEVFVGVDVCKASLDVCIEPHRELARFGNDTKGIAALCERLSTLEPTLIVMEATGGLEVAVAAEMGARGLPVVVVNPRQVRDFAKATGQLAKTDRLDAAVLCAFARAIRPAVRAPKEELIRTLDDLVTRRRQLVDMRVQEALRVHSASKVQLKSVKAHIAWLDKRIAEIESDLGKRLRESELWRAKDDILLTIPGVGEITSRSMLSRCPELGTLNRQKIAKLIGVAPLNSDSGTMRGQRHIWGGRADVRSVLYMATVSAIRCNVKIKAFATRLKAAGKPPKVVIVACMHKLLTIMNTMIKNATPWTPTVG

SEQ ID NO: 220669 - protein, 342 aa, unidentified
MQVSTIGLDLGKRVFHVHGVDAAGAVVVCKRLRRSEVLGFFAGLAPCLVGMEACGSAHYWARELAALGHEVRLMAPSYVKPYVKRGKNDAADAAAICEAVRRPSMRFVAIKTADQQGVLVLHRARELLVRQRTMLVNALRAHLAEFGIVARQGCGGVEELVEALAADGDGVPAPARAGLAALIRQLRTAEAEIKTLGREIDAWHRATPASRRLATIPGIGPITASALVATVGDGVQFESGRHLAAWLGMVPRQNSTGGKTRLGRISKQGDRYLRRLLVIGATALLRHGGRRAELGGDWVEELLARRPKRLVSVALANKMARIAWAVLTRGEPFRPRAAAGAR

SEQ ID NO: 220670 - protein, 385 aa, unidentified
MATPAASATAICDDDNVILTSLELSQSNWVITLRLPGSETLSRHSRKAGDTAALTALLDRQRDKAERLNGTRPRIVTIHEAGLDGFWLHRWLQDQGIESHVVDAASIAAPRRKRNAKSDSIDGETLLRTLAAWRRQEPRVCSMVVPPTPEQEDDRRIGRERGQLLSERIALTNRIKGLLCGQGVTGYQPCKRDRRERLAELRTGDGRALSPRLTAEIGRMLDRLEVVLRQIKQIEAERDKLLAETAAADPKAALALLLTLCGVGPEIAAGLALECFCRRFTNRRQLAAFVGLAPTPWRSGSIQREQGIGKAGRPALRKLMIEAAWQWLRYQPDSALSEWFRAKVGGAKGRVKRVAAVALARKLLVALWRFVTAGVLPEGAKLKAA

SEQ ID NO: 220671 - protein, 357 aa, unidentified
MPAQSKAAKPSTQIAVIGIDIGKNVFHLIGLDKCGAIVLKAKCSRGQLENRLANLPPCLIGMEACVGSHHLSRRLIALGHDARLMPAQYVKPFLKGHKNDYRDAEASAEAVQRPTMRFVAAKTEEQLDLQAMHRMRARLVAERTATVNEIRAFLLERGIAVAQGIHRLRKALPDILAKAPDALSPRMIRIIEALAADWRRLDDRVEEVSTEIETVARKEAPCQRLMTVPGIGPLISSATVATIGAGDLFSKGRDFSAWLGIVPKQLSTGGRTILGKISKRGNKYLRMLFVQAARVVLLKRVSWERYGLKSWIEAAAKRLHHNKLAIALANKLARIAWAVLHHGRNFEVSHEYTPQPA

SEQ ID NO: 220672 - protein, 357 aa, unidentified
MAEGSWVGLDVHARTTLAGVLDAASGELSLQRVQPRSEETIAWLLSLAQPVRVAYEAGPTGYGLARACARAGIACTVAAPSKIPRAPGDRVKTDRRDAERLARLLRLGELVAVRVPDPVGEEARDLVRAREDARGDLMRARQRLSKLLLRHGLVYEGSAWTRAHDTWLRRQRFAGRVLALACDESYGAVAQAKGRRDALDQAIVELAGEPPFCEVVGRLCCLRGVSTLSALALSVELGEWERFRAESLGPFLGLVPSEDSSGERRRQGAITKTGNTHARRLLVEAAWHQRRPLRTSAALERRRQGQPAPVRARADESARRLHQRWHALEGRGKRRTIVAVAVARELAGHCWALATMK

SEQ ID NO: 220673 - protein, 317 aa, unidentified
MIALGIDIAKLKFDVALLTQGKFKTKVFANDSTGISACLKWLGTHAVEPVHACLEATGSYGEALACALHDAGHTVSVINPARTKAYAQSLGLRQKTDAVDAKMLARFVQTQQPLAWTPAPPELRALQALLRRLDALVEMRTQEKNRLGVAEPTVSASIAQHLEYLEAQIDALKTQIERHIDHHPGLKQQQDLLDSIPGIGPATSACLIGELNLTRFDSARQAAAFVGLTPRRDTSGTSVRGKPRLCKQGNSLLRKLLYFPAITAMTHNPLVRALCLRLKAKGKHNMAIIAAAMRKLIHIAFGVLKSGKPFDPTLADT

SEQ ID NO: 220674 - protein, 410 aa, unidentified
MEVLYAHCAGLDVHKDSVVACARHTIDGKVSREVRTFKTTTAELMALSAWLSEQGCTHIVMEATGVYWKPVWHILSDGEFALVLANAAHVKNVPGRKTDVNDAAWLADLMAHGLIRGSFVPDEPTQEMRNVLRMRKQFVRERTSHVQRLQKTLEDANIKLDSVITDIIGLSGRRMIEALIGGETDPQALAALAHRRIKATSAELEAALRGRVTKHHRFALRLLLQHIDAIDAAITEIDREVDANIEPFRTAITILSTIPGVSQLSAEVIAAEIGVDMGRFPTEGHLISWAGLCPKNDESAGKRRSTRMRKGAPWLKTTLIQCAWAATRTKGTYLQAQFHRLRARRGAKKAIGAVAASILTAAYHMLSSGALYQDLGAGHFDGRAKTAQTNRLIARLRRLGYAVQITPVAA

SEQ ID NO: 220675 - protein, 403 aa, unidentified
MFTLGIDVSKKTSRYLLLNPEGRKVKSFTLENSPEGFQSLLQRLQELSIPQADLLIGMEATGNFWENLYSYLKGKGFSVVLLNPYHVKKYREAIAKKAKTDDIDALVIAQFLRTGEYVQSQVAEEAIQSLREITRLRYELLTEKKNYQRQAYSLLSLVFPEHAQTALKNPFSISALAIFQRFPTAQDLAQAKPKQIEKMIRSIPGNSFGPEDIQNLIATAQKSIYSGRAKEARGTSLRILLGHIANFMSSIELLDQEIRKMLSPQGPHDSFPGENLLTIPGIGDKTVAAALSYLGTDGANFSSSTKAVGYVGYFPKIYESGQTKRENKISKRGPKVLRWALYMAAVASLKHNPEMKALYHRKISQGKTEKQALIYLGKKLLQIMLAMLKSGEPYNPLMVFVNT

SEQ ID NO: 220676 - protein, 425 aa, unidentified
MKKTDYLSTLFVGIDIGSRTNVVSAIDFSQEYLIRMKAIPNAQGGAEQLEAMIADVLEKNHQFQYLIIAMESTGFYGVHIANYLSTCEKLAAFSTHVYCLNPKEVKGYKKSFNSLDKNDGIDSFVIADLARVGRISVKPWRGSQYLALQRLTRHRMHITECIAREKTYMLNNIFLKFSEFAMLGKEEHPFSDKYGATAEAILTEYKTNEELVSSPIEELAAFINTKSRGRIADPQETARLLQTAAKNSYRLDKCLYDPLTTSISCSFNCIASFEKELKAIEDAILKTVRGLSEADYTVMNSIPGIGKVYSAGILAEIGSIRCFPNDDALAKYCGIVWKQNQSGTFEAEDTPMNKAGNRYLRYYIIEATRSVINHCPEYKAFYDKKFAEVTTHQHKRALALTSRKFLRMLFGLLDKSQLYSAEKSR

SEQ ID NO: 220677 - protein, 344 aa, unidentified
MVETRRALTGGVDTHADVHVAAVIDPQGGLLGVESFRTDLAGYQQLSGWMCAFGEISQVGVEGTGSYGAGLARHLRRVGLVVVEVDRPNRQERARQGKTDSLDAIEAARAALSGRALGVAKTRDGNVEAIRALMVARRSARESRTKAMNQIRQLVYTAPDELRERFVGVPSWRLAEGVATMRVHTDPDPVRMATKTALATLGRRAVALGEEGKRLDVLIARLVNKVAPELVELVGLGPDTAALLLIAAGDNPSRLRNEATWAKLCGVAPLEASSGKVTRHRLNRGGDRQANHALWRIVLTRMSCHAPTKVYVARRTAEGKSKREIMRILKRYVAREVYHYLPRD

SEQ ID NO: 220678 - protein, 389 aa, unidentified
MSYRNDQSKKSSTALDQASTLLAVVELSRNSWLVAGIVPGIDRHPLKKLGADENGLLALLHRWQQQAVKAGREIKRVVVAFEAGRDGFWLARWLRARGIEPHVIHATSIAVSREHRRAKTDRLDTEHLKRVVLGWLRGEPDHCRMVAIPTIEDEDAKRPNRERETLIRETTRLVNRMKACLVRFGVRGFDPTLRRAADRLEKLVTPEGVRLPPLTLAEMLRDMARLRFLREQIRSLEKARVMRLKNDPTTRTNAMVHLIARIFGIGIETADTLVHEVLSRNLRDRRAVARYAGLTGSPDESGSRRREKGLARAGNARVRRTMIQLAWRFLRFHTASGLAQWYNKRAADGRASTRKTMIVALARKLLIVLWRIVTTGTVPTDLKLRRLAT

SEQ ID NO: 220679 - protein, 339 aa, unidentified
MELNVVAIDIAKKVFQLHWVEPDTGSIERLKLKRAQMLPWFANRQATLVVMEACGGAHEWGRELLKLGHDVRLLPPKMVRPFVRRNKTDAADAQAIWTASRQPGVRFVPVKSEAQQVVLALHRLRAQLMKMRIMQTNELRGLFYEFGIVMSEGHRALLKELPTALRDAQTRLPAMLIDSLDEQVRRINQIEADMGVVERRLSQQLRDTPACKIVAEIPGVGLMTATAIVASMGSPTAFNDAREFAAWIGLVPRQTGTGGRVRQLGISKRGDAYLRTLLMHGARAIVRSNKASSWPWLAALLKRRPYSVAVAAVANKLARTIWAVLARGRAWQAQAWQAA

SEQ ID NO: 220680 - protein, 340 aa, unidentified
MDKIIRIGMDTSKHVFQLHGVNADEKPVLRKKMRRKEMIDFFSSCPATAIAIEARGGSHHWARLLTSLGHEVKLIAPQLVKPYVKRSKNDAADAEALCEAMSRPTMRFVPAKSVDEQTALMLVGVRDRLIRNRTQLANAIRGYAAEFGISAAKGLAHVPLLLARIQADETVPELARELFASQAEEYARLEEKIADVNTRLKAWQHNDERSKRLNTIPGIGPIGAALLIMKTPAPELFRSGRQFAAWIGLTPKDHSTGGKLRLGCITRAGDEALRAALVVGATSVIQYARRTGKASAWLTELLKRKPPNWQPSHSPTRWRGSLGRSWCQEKHTRQNRHLRP

SEQ ID NO: 220681 - protein, 356 aa, unidentified
MSRDIKYIGMDVHKEAIVIAVRNTRGHVVMESIVETKANSILQFIHGLQGELQVTWEEGTWAAWLYDLLKPHVHQVLVCDPRRNALLKEGSKNDKVDARKLADLLRRGMLRPVYQGEHGLRRLRELARTYQTLSQDLNRVMNRLKALYRGWGIACGGTQVYAPRYREEWLGKIEPVGVRRRAELLYQQLDGLQALRRTLRPELLAESRKHKAAKLLRQIPCIGPIRAARLLALMQTPHRFRSKRQLWTYSGLGIETRDSAQYRFVRGELQRAKKPQQIRGLNRNHNHEMKDIFKGAATRASCGVGPLRNFYVALLDKGMKPEMARLTLARKIAAIALTLWKKEERFDAEPLKMQAA

SEQ ID NO: 220682 - protein, 386 aa, unidentified
MATATMSRIEPDSLPQPPLYLAFELGQNTWKLGFTIGVAQQPRERTIPAGALDTLQQEIARAKQRFDLPENARVVSCYEAGRDGFWLHRSLVAHGVQNHVIDSASIEVNRRQRRAKTDRLDVHKLLTMLLRHMAGERKVWSVVRVPSVDEEDRRQLHRELTTAKQDRTRVINRIKGLLAGHGVQLVLQGNVEAQLDQVHQWDGSPLPAALLRRLKRAWQQVGFLTTHIQTLEAERRALLRHRTDPVIAQVRQLFTLRGIGINSAWLYIMEFFAWRDFQTAKQVGALAGLTPTPYQSGQSRRELGIAKAGNRHIRAMAIEIAWAWRRFQPDSALSQWYERRFGAGSARLRKLGIVALARKLLIALWRFVKTGVLPEGAVLKTATPSP

SEQ ID NO: 220683 - protein, 357 aa, unidentified
MFMDIRSPLPYQARVGIDWADQEHEVFVRFASGDSYRRKIDSRPEAIQGWLLELRSACAEGKIAIALEQRRGALFYHLCTHLNWIDLYPINPHSLASFRKTFFSSRAKDDPVDSQLLEELVRTHSDRLRPYQPESPTERKLDLYCRHRRSLLDLATKTELKLISTLKQYFPLAVNLFAAVGMKSDIALNFLSRWPTLDELRRAKLHTVRSFFYAHNSRSQFESLPGAGEQLAPRLLSLFGSDRSRWADATDIQKYSGIAPVIERSGKSLWIHRRLSRPIFICQTFHEFAQQSTRFSSWADQFYRRQRARGKSHHSAIRALAFKWIRIIYACWKANKPYDESLYVQAIEKRNFSISSN

SEQ ID NO: 220684 - protein, 331 aa, unidentified
MKIIDVIGIDVSKLTLDVFIHGSKSYLKCDNTKKGFDKLCKWALSQSKVEKDNLLFVFEYTGIYSHNLAIYLEKKGFSFTIVPGLEIKRSLGISRGKDDKVDAKKIARYAYRLRDEIKPTTLPSKSILRMKKLLSLRDRMVKQRAGYKASIKEMKQIFKVKDNKQLFTTQNRMIKVLDKEIDKIEKELLEIVQLNEALKQTFNLMISIKGVGPIASYYIIVVTENFSKFKTYRKFSSYCGIAPFPYSSGTSIKGKTKVNHLANKKIKSLLDMVAKSAIQHNLEMKLYYKKKIDEGKNKMSVINAVRNKMLGRIFAVVKRQTPYVDILKYAA

SEQ ID NO: 220685 - protein, 407 aa, unidentified
MPKFVLSCDVAKGKSTFGLFEFEDGSLKTIKRPRNYEHNLDGLMAMYNDFELKDREDVLVMMESTLVYQTPLVVFFKSHGLENVVVENPLLIARKSFGLTKTKTDNLDCFRIADYAFRQQWEKPVQVSKEQQEARTLSRYIDSLLSQATVVQNKIRLYLVAVFPEIEKIAGKSLFSAGFLNLLKTCPHPQTISRKTIDGIVTAMAGNTKRCASYQELARKIKEVSKTSLSSVKEDSAECLILADIVSFYQSLSDRIRTMRQKLSELVRNHSLYSVLTSFKGIGDGIASSLTAELWDIEKYSNDKKLFASTGMAPGKEESGASINKDLSIGKKGNAHVRKWLFVAVQSIITQASMGRGDERIYAYYEKKHNNDKKHYYAAVVACCHKLLKQVYHRYMVLLKTNELIVY

SEQ ID NO: 220686 - protein, 424 aa, unidentified
MNCNTKLEAITDRTLIVGIDVAKKTHVARFIDDRGVELGECMRFENTRKGFCSFKKTIEGVKFLHRKETVIIGVEPTGVYGNTLIAYLQGEGIHVVNVHGMQVKRIKELEDNSPSKNDFKDAKVIASVVKNGYYHILRNFPEDVLELKEATRHAYQITKKLTRVKCQIDTFLTQYFPEFSDAFKDITKKTAMATLHLFPLPGQICELTAEQITIAWRRYGVIKGIGLKKANELKHLAKQTIGLKETESTRAHFISLISEYDFLTGQERTIWKRIEVLLKPNADFKALMTIPHMSLKMAANLLAEVGNFRDFSHPQQIVRLAGFNLKECSSGKNRGLSEITKRGRPMLRRVLYFIVLEQLKRGAPVWQILHKRYTTRKENPLKKMQSIIALCCKFIRVVWGMIKNGTPYNPDMIVAPKILFPNAA

SEQ ID NO: 220687 - protein, 370 aa, unidentified
MEERINFFVGLDVHAETIEVGVAQAGREPGRCVASIKHDVPKLLKMLGRYGDPQHVHVVYEAGPTGYGLQRALAKRGYRCEVIAPSLIPKRAGDRVKTDRRDCKRLAELSRAGELTAVWIPDSAHEAIRDVARAREDAVDARNQARHQLKAFLLRHEVRYPQRTSWTKTFYRWLSTLSFEGSGAQTAFTEYWQAVCTADERVARLSDALVRSIEGWRFEPVVQALRVLRGIDWISAIGLVAEIGDLQRFRHPRQLMAYLGLVPTEHSSADRLVRGSITKAGNGHARRLLTEAAWNYRFQPRIGYAAQRRAEDLPQALRDLGWKAQLRLTGRFARLRARGLHHNKICVAIARELAGFVWAVARQATQLRPS

SEQ ID NO: 220688 - protein, 359 aa, unidentified
MDIIEGSTRRVVGGVDTHKDLHVAAIVDGQDHVLGTASFATTRQGYRQMLAWMRSFGDLRRVGIESTGSYGAGLLRYMQAVGIEVLEVTTPDKHDRRRRGKNDDLDAENAAHAAFAGRRTVTPRSRDGMVESLRVLTVCRKTAVAARRVALQMIQSTVVSAPDGLRDTLRSMTRMQLVRTLAAWRPDLTAYRDVEAAYRISLKSLARRYLELHDEIADLDTMISALVKELAPELIARNSIGYNGAAQLLLTAGDNPERLRSEASFAALCGVSPVPASSGKTIRHRLNRGGDRAANSALHIIAIGRLRTDPATKAYVARRTTEGHSKLDAIRALKRYIAREVFHIITRRHREINQTRIAA

SEQ ID NO: 220689 - protein, 363 aa, unidentified
MRFYKNQHQFYIGIDLHARTMYVCVINNIGETVFHKNMECSRDNLELVTNTFGKDIVVGVECIFTWYWVADFCAEQGIDFALGHAYYMKSIHGGKTKSDKIDSEKIANLLRGGMFPIAYAYPKEKRAVRDLLRRRLFFVRQRAELSVHLQNTNHQYNINEPLASSRMRSEVYRNTIPQKFSDPATLKMVNADLAMFQAYHDIITKLEFQIEDSMEVQDPVSYSIINSVPGLGFILSLTILYEVDDIHRFSDVGKFISYCRLVKCSHESAGKKEKGGHNKIGNVHLKWAFSEGAVLFLRNNERGQRWHDKLVQRYGKAKAMSIIAQKLGRTVYYMLKRKEAFNPDKFYGDKKIENKDSGGEHLA

SEQ ID NO: 220690 - protein, 328 aa, unidentified
MGTASFPATAVGYRGLWEWVSRLGAVHRAGVEGAGSYGAALSRYLLARRVEVFEVNWADRSVRRRRGKSDVVDAQEAARAVLSGRACSQAKAGDGPVQCARLFKLAKDSAVKARTQAINQLKAVLVTADPDLREQLAGLKTPALVRTCAQFGDREADVDAKDAVRQATRIALRLLAQRIDQLTGQIRDLERHLTGLVERHFPQLLVPVGIGPDSAATLLITMGDNPERLRSEASFAALCGVSPAEHSSGRQHRHRLNRGGDRRANAALYRIVQSRLRFDARTRNYYERRIAEGKTRREIIRCLKRYAAREVFNLVRYGIAPREVAQAG

SEQ ID NO: 220691 - protein, 315 aa, unidentified
MEGEGPSVGIDVSKSVLDVSAYPSGKTWQVEYSAPGITALAEELAALGPAVVVVEATGGLEISLTAALGVAGLPVAVVNPRQVRDFARATGRLAKTDKLDAQLLAQFGAMVQPPARPLPDAQQRELQAMVTRRQQLIGMITAEKNRLRRTTPRVRQQIEVHVQWLREQLREVDRDLENFLRSSPLWQEDAKVLRSVPGVGPIVTATLIARLPELGSLNCKQVAALVGVAPFNRDSGTLRGKRTVWGGRGALRTALYMATLVATRHNPVLRAFYQRLCDAGKPKKVALIACMRKLLIILNSMIKNHRTWNPVAQNS

SEQ ID NO: 220692 - protein, 330 aa, unidentified
MNYVGLDIHTENIVYTVLSDDGNVKMRGKIVNDIEYIIEFLRNFEDGDLFVMESTGFYEPIYDTIESKGFKVKLANPLKVKLIAESRIKNDKIDSEILARLLKNNWVPESYVPDKKIREIRRIVRTRINLKKVSTGFKNRIYMELKRLKIDYDGNLFTLEGKHFLRSLNNFRINIYLNSLEDIEKEIKIIENEIQKYSDIEEVKLLMTIPGIGLFSALIIYSEIGDINRFSNSRKLISYAGLNPTTRQSSDVIYHGHITRQGSPYLRWILTECIHIHLIKDSHSNLSNYYRRMVKRIGKKKAIVASASKLLKIIYWVLKEKREYIKNYAQ

SEQ ID NO: 220693 - protein, 459 aa, unidentified
MNRRERREMIRKMQSEDLSLEVVHPHAAGIDIGNESHYVAVPPTRDPQPVRRFGCTTAELKTMAEWLKQCAIRTVAMQSTGVYWIAVFDILEEAGLEVYLVNARETKNLPGRKSDVQESQWLMKLHTYGLLRNSFRPTRQIRMLRAYWRQRQDLVRSGGRHIQRMQKVLTQMNIQLANVISDISGTTGQTIIKAILAGERDPHELAAYRNARIEASEEEIAQSLEGNWQDDLLFVLGQEQSAYEFCQKQMMECDRQLSHCLAQLEDRSQGATMPQETRKNRLRSKKGNKPQFDLRAELFRRSGTDLTQIDGVDVMTAMTIVSEVGWDMTKWKTENNFVSWLKLCPDNKISGDKVIGKGRMPTNNRATSALRMAASNLRLSGTYLGAQFRRLRSRLGAPVATKAMAAKLARLIYRMLHYGMRYVDQGAEFYEAQYRKQQVSYLKRKALKLGLQVIEVVAA

SEQ ID NO: 220694 - protein, 401 aa, unidentified
MKRLSGGIDIGSDNHHIIIMDDEEQILYDQKIAHKFSEFYKAVREFREIEKREGGIISFAIEGKNGYGAPFDRILIESGFTLYNVDNLKLKQFRNVFGAEWRNDKRDAKMLAKMLKLRDYLDAENEKAFIAVEKATKINEKLKILSRHQQTLIDEKIRLQNRLRKRLLEVCPEILEIGDTDSKKMLRLLVRYPDFSRYKGLTMGALLKIKMIGKKQASLMLESLRNTKYVEELADIYKTIISSHSRRILELKEEIEMLDKKLEKLGEKSSEVKRLKSISGVGTKLSSRLVGEIGDINRFKNERQLAIYWGVACIDDESGKHKRTRVVYKANKICKATMIEIAGCTIRYVSESATYYAKKRTEGKEHNHALRCLARQLIKVIFKMLKEDRDYILKEEMEKAA

SEQ ID NO: 220695 - protein, 343 aa, unidentified
MEYIGIDVHQRDSQVCIVSPRGAVQLERRVRTSRERLTALLGERPPARILLEASTDSEWVAQALEALGHDVIVADPNFAAMYATRSRRVKTDRRDARTLAEACRLGAYRPAHRTSAAQRAVRAELTVRDALVRTRTRAINVLRAVLRREGVRVPSGRAATFARRVEAVPLAPDLQAVIAPLLAVLASLNQALRRVEQRLARGVRTSPIGRRLCTVPGVGPVTAAAFVATLDDVGRFAQPAQVTAYVGLVPREYSSGEHQRRGPFTKAGDRRLRWLLVQAAWAYWRRRATAATALRLWTDRLAQRRGRFRAVVALARRLTRLLYALWRDGTVYDPTHLAHAAAA

SEQ ID NO: 220696 - protein, 346 aa, unidentified
MRKSIINLSSVTTVGLDLAKHVFQVHCVDALGRVVVAKAIRRNKLLEFFASLPRCLVGLEASGSAHHWARELIKLGHDARIMPPAYVKPYIRRQKNDAADAAAICEAVTRPSMRFVGVRSLENQAALMRHKAREMLVSQRTQLLNGLRGHLTEVGVIAAQGPRHARELAELIEACDETVPFEVCEALAPLVVQLRNLDEAIARLERIIAKLAQQDETARRLMSIPGFGPITASAMAATVQDTSGFAGPREFAAFLGLTPKQNSSGGKPKLGRISKMGNRNLRKLLVVGAHAVLFHRKPHTDPLRMWAKKLIEKKPFKLVAVALANKMARIAFAILRGKTVYREIPA

SEQ ID NO: 220697 - protein, 412 aa, unidentified
MLFVGDDWAEDHHDIEIQDEDGHRLARARLPEGIAGLSRLHELIAEHLTDDDVDAGTGFVAPNVMIGIESDRGTWVSALVAAGYQVFALNPVQVARYRERHGASGAKSDRGDAHVLAEIVRLDRAHHRPMAGDSPEVEGLKLVARSHQAFIWDRTRHFQRLRSALREFFPAALEAFPDLMAPEALELLERAPDPARAARLSRSQITAALARARRRDPESRAEAIQAALRAPALRQDPAIEAAYAVIVASAVRLIAQLNTQIAELQAVVAEGFGRHPDAEIVASQPGLGPVLGARVLAEFGDDPDRYADAKARKNYAGTSPITRASGTRRVVLARYARNRHLADATHQWAFCALTASPGARAYYDAIRSRGTGHHAALRQLGNRLVGILHGCLKSRTPYDENTAWPQLNASAA

SEQ ID NO: 220698 - protein, 342 aa, unidentified
MGHFAGLDVSVKETSVCIVDDTGKIVREVKVASEPEALLQVLTNPAYRFKRIGLEAGPLSQWLFSALAEAGLPVICVETRHMQAVLKAQINKTDRNDARGIAQMMRVGLYRPVHVKTLRSQKLRMLLIHRKLLQSKAIAIENDLRATLRNFGLKVGMVGKVRFEARIKELVENLPELAVLVEPLLIVRRVLREQIVVLHRRLLAIVRDDEVCRRLMTTPGVGPVVALTYRATVDVPARFRKSKGVGAVFGLTCSKYQSGEIDRSGRISRCGDEMMRVMLYEAAQSMLRSKKWSWLKAWAMQIARRRGMKKAIVALARRLAVVMHRIWVDGTEFRWTREVVAA

SEQ ID NO: 220699 - protein, 354 aa, unidentified
MLIIGCDFHTRYQQIAMAREETGELLVERRLDHASGEAHAFYRSLQSSQEPVRVGIEATGPIHWFERLLADLGHELWIGDSAKIRASEVRKQKTDERDAALILDLLLAKRFPRIWVPTPAQRDLRQLLWHRHKLVSMRTMLGNQLHALAMSQGLCRKKKLFTKKGRVELVSLGLAPWASRRREELLKLLDQLEPPIAELDRAVLEEAKRHADAVRLMTHPGIGPVTALAFVLAIGPITRFRCSKKIASYLGLNPSEESSGGRRRLGAISKQGNTMVRWLLIETVHHAVRQDPELRQDYQRLKFRRGHAVAKVAIARKLAVRMYWMLRSGADYARLVRRQGSPRGTLVGASPSLA

SEQ ID NO: 220700 - protein, 348 aa, unidentified
MTNQSHIIGIDLGKHWFHLIGLDRDGGIVLRKKMSRAQLSAFAATASRSVVAMEACCGSQYWGRVFAHAGHDVRIVPAQFVKPYVKTNKNDFNDAEAIAEAASRATMRFVPLKTTERLELQASHRIRRRLVHERTAAINQLRALLLEYGLVTPLGRETFARRWSQILGTASEQLSPRLLVLIQRLRAHWVTLDGQIAEATQELTTWADNSPLCQRVATVPGVGPMIATALVSAVGDGRMFARGRDMAAWLGLVPRQHSTGGTSTLGRISRRGNGYLRQLFLQGAVSAYLWMKRDQSALGAWLHQLDRRRQRPVVITALANKLVRICWKVLTSNTPFRLHPTRPVEHAI

SEQ ID NO: 220701 - protein, 428 aa, unidentified
MTYRVAAIDVHKKMLAVVVADVAGEGEYQFERRKFGTTPEQLELLTRWLIQEEVEEVVMESTAEYWRPVWGALEQHWKPERQKREGATKMSGALHLCQAKSNRGRRGRKSDYADAERMVKRLVAQELVLSFVPDPEQRLWRTVTRRKYQLTRDKVRFQNQLESLLEQAYIKLSSLVSDLLGLSARRMLQALAEGETDPAALAALADHRLRATPAQLRDALGACAHLHPVYRRLLKMALEELKLLEDQIAKLDGEAAELLQGHQDALQRLAEVPGLGVSSGVQIIAEIGPDAEAFESAKELSSWVGVCPGSNETAGEAHSTTSPKGNQNMRRLLNQAAQAAVKVKGSIFEITFRKFLSSGMKYKEAIWAIAHRLCRLIWLLLRRKTHYEERGPAVSAKSKRTRTARMIKELRKLGYRVEGGAIPAGIPA

SEQ ID NO: 220702 - protein, 375 aa, unidentified
MYEITRGAVVRVGADLAKRVIQVHAVDAAGRRVVSRALKREQFMAWCAQLPAGCLVAMEACSSAHHWARKLRLLGLDARLIAAHFVSPYRMEGKSGKNDMTDAAAICEAASRPSMRFVPVKTCEQQGVMSLHRVREGLKEERTGCINQIRGVLAEFGLVFNKSPKVLRAVLADVIEDASNELSAMARRVLQRAFDHWRELDEHMRWCDRQVGQHVRSSPAARRAAKITGIGELGASACTAGVGDFHQFKGGHQLGAWLGLVPRQNSSGGKTSLGRITKRGDDYLRTLLIQGAKSAVMSAGKRDDPTSRWLVQLTARVGWQKACVAMANKNARILWAVMTRDEGFDARHVSDKPQAKKSAEERFVAPTTTMTLCPA

SEQ ID NO: 220703 - protein, 385 aa, unidentified
MDALLYCCCGVDVHDEMIETCIIKGLGDEKEFIRKRFGTNPEDLKAFAEHLSNNDCYHIAMESTGVFWRPVYESIEKYCRYVEGIVVTNAAHMRNLPGRKADADDAEWISTLLQHGLLRSSFVPPRAFRDMREASRLYKKFVGEKSRYTNRIIKLLQAHGIKLSLVLADILCMSGRNILNALAEKGSLSEADVKNCLKGTLKHSPAEIHASVSNSLEPAECAMLVLLLRKIETAESDMQEIVSLMLRLAEPYQKALEQLDSIPGIDTVAALLLLAEISATPHLYFSSPEKLCSWAGLSPRNDESAGKVKSRKILPGNPYVKSILCQAAWAAVRCRNSPFRDWFWTHRGKLGDKKAIIAVSRKMLTVIYRLLESGDLFNPNHSKSA

SEQ ID NO: 220704 - protein, 425 aa, unidentified
MSARPAGARLSDHEWKAPSIMTTESSVAKVVAGVDTHADTHHVAVLDAATGGVLADKKFPTGRAGYTALIAFVCAFGQVLRFGVEGTNSYGAGLSRHLRVAGHTVVEVVRPNRAERRLRGKSDPLDAITAARTAMAPDRLPMPKTSDGVVEAIRVLLTTRRSAVKARTGAMQQICSILVSAPDTLRQQYEPLPAKSRLERLRRLHPGTDPTDVHAVTSRCLKQLATRCADLDREVDAIDASMRHAITDHAPALLAAHGVGVVTAATLLVTAGDNPERVTSEAGLAALCGVSPIPASSGKTTRHRLNRGGDRQANCAIHQIALVRMSSDERTRAYIAKKRAEGKSTKEAMRCLKRAICREVYRLLINPPEVPRIDDLRPLRQARGITLTTAAKHFAVWPAVISTLERGLRRDDNLATAYRQWLTAA

SEQ ID NO: 220705 - protein, 338 aa, unidentified
MNKITTIGVDLAKNVFHVVCCNERGKIVRKRMLKRGQVLGFFSNLEHCLVGMEACAGAHDWARKLEALEFEVKLIPAQYVKAYVRGNKNDYNDALAIAEAVVRPEMRFVVIKTPEQQDIQALHRLRKGCVGARTSLCNQTRSLVAEYGLVAPKGVGTLRQQIPRWLEDGENGLSDLFRRLLAESYARLQELDSHIAFYTQEIERQSRQDDACQRLQTLPGYGPILSSAFHSQVGHGEAYRRGRDASAAVGLVPRQHSSGGKDTLLGISKRGDRYLRSLLVHGARAVVSRTEGKVDPLSQWINKIRAKRGFNKAVVAMANKMARMGWAVLAHNTVYQAQ

SEQ ID NO: 220706 - protein, 418 aa, unidentified
MSDSKFLYVGIDVSKASNQVYAMDSDEKKFLSFSSPNNSEGASAIEQRLFEVLVKFAFTDVVIILESTGMYSYHIAVFLAASELLAKFNVLVFNINPKTSCNYRKTFCDLDKTDPKDSFLLADMARSGKYKQFTPVRGSQKLALQRLTRHRKHISELIGREKCYVLNNIFLKFSAFDSKIDGKSVFSDTFSASATEILSQFKTPEEIENSSIEDLVAILAKASKNRFENTVDVANLLKKCARLSYRLDKAAYDPINIAIASSLCLIRTFEKQLESIDKEILNLIKGLQTNEYASLISIPGIGPVFAAGILSEIGSVKQFANDSALAKYAGITWRTKQSGKFAADETPMTKTGNNYLRYYLLEATSMAILHNPEYRAYYLKKREEVTTHQHTRAVALTSRKLIRLIYGLVSKDQLFASI

SEQ ID NO: 220707 - protein, 310 aa, unidentified
MDATYVGIDVSKEKLDVHLRPSAEAFAVARDGKGLHELVERLRGVAPELIVVEATGGFETIVTAALAAAALPVVVVNPAQVRHFAKALGQRAKSDPIDAAVIADFAAAVKPQLRPLPDVAARLLAELVGRRAQLVEMLAAERQREERVANARVRKSLKRHIAALAKELKTIEDDIDGLIRSSPLWREKEDLLKTFPGVGETLARVFLADLPELGQLNRRKIASLVGVAPFTQQSGQWKGKNMIAGGRAAVRSAVFMAAMSAIRCNDMLRAFYQHLLALGKPKMVALIAVARKLLTILNAMLRDQKPWQHA

SEQ ID NO: 220708 - protein, 330 aa, unidentified
MKKWKFTLGVDVSKNTLDISCSELNEHIKIKNGSEGFIQFLKWCRRLNIDLKESFLVLEYTGGYEYKLLQFCEAHAIVYARIPGLAIKNSMGITRGKNDKIDSLRIAQYGEEKHKSLQPSKPLNPAIIRLKELLAYRKRLVRENAGYKNSIKGREYMYEKNKKDIIVKSLQQKLKANSKIIENIEAEMMSIVIVDEEMHLNFTLITSIKGIGKVNGLMTIAYTENFTSFSNPRSYAVYVGVIPFDHSSGTSIHGRKRVSHIANKELKQELNQAARSAMVWDKEMNAYAERKLETKCYKIVLNNIKFKLILRMFAVVKKGEMYVDNYKKVA

SEQ ID NO: 220709 - protein, 369 aa, unidentified
MKHSIIFIGLDVHKDSIAIALADDGRNGEIRLYGTIGGDLASLDKAIRKFRRSSVELRFVYEAGPCGYEIYRHLTSQGFHCDIIAPSMTPKRSGDRIKTDRRDAVTLARLYRAGELTPVYVPREDDEAMRDLVRGREDAVNATRKARQRLSAFVLRHGFRYSGRNPWSVAHLRWLAAIKMPHPAQQVTLQEYIHSIEECSERIDRLTEQILKLIPAWRMAPVVAALQALRGVATVVAVTMVVEIGDLRRFENPRQLMAYLGLVPSENSSGQTTKRGGITKTGNGHARRALIEAAQSYSHPARVSRELRKRQEGLPREIKEISWKAQVRLCGRFRMLMARGKNRNRTVTAIARELSGFMWGIAKEVPMPA

SEQ ID NO: 220710 - protein, 397 aa, unidentified
MFYVGVDVSKDSFNFCIVEQNKSVLKQGSFPMCMEGFSSFISVISPFSPCTVVFESSGRYHIPLAIFLSTKGFSVSVVNPKTIHSFIKFFSANNPSKSDKKDAFYIAVFSASQPELISKHFSDSSLPSVKFLARELEKIKQEIATCKTQIKYCLSVLFPEAEKNFNVFSSTFLSILKVFPSSSQISQAGIEGIRNCIVKTKGRNPSFSAKDVVATASSSIGISNEGMETALVYYIEKLEFLLAQAKKIGASFVREVERFFSREVEIVSSVPGISVTLACRFIAEVGNIERFDNWKKVVKYAGTDPVVKESGKWRVECGISKQGNPHLRNVLFQMAVGVVKWCQVFRDYFNHKFSQFGSYKKAMIAVVNKLIRVLFAMISRGQSFKHPDHAPASISHS

SEQ ID NO: 220711 - protein, 385 aa, unidentified
MTATRQNFKLIPRDYDIFIGLDVDKRKMAITCTDHDSWRRSLSMPYSASQLLNYTRKHFPGQRVAFVYEAGPTGFGLYDELTAAHHPCLVVSPSMVPSAPRNKVKTNRLDSKKLSEGLRGGQLRGIHVPAQIYRELRHLVQLRDTQVAQLKATKCRIKSLLLYEGIPFPAADGKWSGRVLRELEILPCNSSVRFKLDRLIDALQFHFLSAARVQKEIRRFCNQEPGLKDSIAFLSSLPGVGQITATHAVARLGDWRQIDNVRQIAGFLGLASKEHSTGDKENRGEITRIGDARLRSKLIQCAWTAIRKDPELRTFYRQIYERQPKKVAARKAIVAVARKLTTRMYAVLKQQRPYVTRDNSSIAPLTVEETIGLRERLDPAQNDEL

SEQ ID NO: 220712 - protein, 323 aa, unidentified
MTPTVLGIDISKKKFHAALMLENGKTKPKVFSNDLDGFQQLRVWLERHNVSSIHACMEATSIYGEALAEFLYEAGHIVSVVNPARIKGFAKGELLRTKTDKVDAALIARFCAAINPPAWVPLPPEIKQLQALLRRLESLMEIQQQEKNRLGTSTGAIAQSIESHLEYLDEAIEQTKQLIDEHFDDHSHLKTQRDLLTTIPGIGSQSAAVLLGEMGNVKAYKNARQVAAHAGLTPVERSSGSSVHGKPRLSRMGNARLRNALYWPAIVAMKHNPLLKVFSDRLLSRGKAKMQVIGAVMRKLLHQVFGILKSQKPFDPNFLSTTP

SEQ ID NO: 220713 - protein, 343 aa, unidentified
MDIIRVGIDLAKNVFQMHGVDRSEKTVWRRKLVRDEWLDILRRTVPLHAEIGMEAWGSAHHWARRLQTLGYTVKLIAPQFVKPYVKSNKNDANDAEAICEAMSRPGMRFVAVKTVEQQDVQAVHRVRAGLMEQRNAKANQIRGLTAEYGIVAPREILQLRRAVPVWLDDINSGLSDRFRRLLTGLGEDLRSLDDRIRELDHEIAAIAASDPVAKRLQQLRGVGPMVATALIATVGNARQFASGRQMAASLGLTPRQNSSGGKERLLGISKRGDAYVRCLLIHGARAMIQMARRRTDPLSLWVMRIAGNRHPNVAAVALANKTARIAWAMITRETDYQPELAAH

SEQ ID NO: 220714 - protein, 340 aa, unidentified
MGEITTIGLDLAKQVFQVHGIDADGTTVLRKQLRRSQVLSFFSRLAPCLVGMEACATAHYWGRELAALGHEVRLMPAQYVKAYIKRNKNDAADAEAICEAVVRPTMRFVPAKTAEQQAALLLHRGRERLVRQRTGLVNALRGHLAEFGVIAPQGLRNVGKLIAVVRDVGDARLPDLARQVLEVLAAQIEQLEGAVAAVEKQLMAWHKSNPVSQRLATIPGIGPIIASAIAASVAEPGGFRSGREFAAWLGLVPRQNSTGGKHRLGGISKRGNQYLQRLLINGASANLLRSKATKADPWVIGLRRRRPSLVVAVALANKTARIAWAVMQRHENYQRMAAAA

SEQ ID NO: 220715 - protein, 318 aa, unidentified
MNSHNKVETTEPVRYVSLDISKARLDYAIAGQKCRKVPNTAAGIATLITAIQPLPGVRVVCEATGGYERRLLEQLHQAQVPVCRLQPGRVRSFARAEGTLAKTDRIDVGVIYRYACSMHPRVEKPLLPEVTALRELMDYRRQLVEQSTQTDNRLETAGATLQALLLVQHEQQQAALAKADELIAQHLRAHPALQAKSARLQQVQGVGPVLATTLLAYLPELGEEDDKRIAALVGVAPFAHDSGESSKPRHARGGRVEVRNVLYMAAVSASQHNPVLAPFYARLRAAGKPANVCLLAVMRKLIVVLNRMLKDPNFTLVS

SEQ ID NO: 220716 - protein, 344 aa, unidentified
MNKLNRVGIDLAKNIFQLHGVNRTETSTWCRRLKRDNWIKVLLNKVEPGCVIGMEACTGAHHWARLLQASGFHVKLIAPQFVKPYVKSNKNDANDAEAICEAMSRPNMRFVTVKTVEQQEIQAVHRIRSELVGQRTSKGNQIRGLVAEYGLVAPQQIYHLRAALPEWLEDADNGLSDRFRRLLNGLWDDLKRLDKRVADMDKEIALIAASDPIAKRLQQLRGVGPMVATALLASVGDGKQFRNGKQMAASLGLTPRQHSSGGKDRLLGISKRGDAYLRSLLVHGARSAIYAARGKEDRLSQWVMSIASRRHPNVAAVALANKTARIAWSMLRHDTDYDPKLAAA

SEQ ID NO: 220717 - protein, 348 aa, unidentified
MDRYIGLDVHAQTTTMVVVSQSGKLLAERIIETDAKILLDAILGVAGRLHVCMEEGMHAEWLYELLVGRVEQVVVLLAPERSGSKSDSRDARWLANQLRLGIPHRRVYKARLSGLREAVRGYQALVKHSTRSKLQLRFLARGRGLPVDRSQLMDAESRQELLAHLPAVRRPRAMLHAELLDCTERLRLQALEQLHVQARGCPDVQRLMQVPGLGLIRSAQIVAIVVTPARFHSRQQFWSYCGLAIVTRSSSDWRSESGRFVRSARALTRGLAFGNSTLKAAFKGAALDVVRHYPEHPWTVAYRRAIDGGKRSNLALLTLARKIAETVLHIWKHKEDYDPSQHKVQPAA

SEQ ID NO: 220718 - protein, 348 aa, unidentified
MNTVHYIGFDVHKKSISFCVKTAAGEIVEEGVIPAERGALRQWASARRQPWRGAMEATLFSGWIFDTLQPYSERLEMAHPAKMKAICAGKKKSDTLDARTIADLVRCNLLPACYVATPRIRELRRLLRYRSLVVSEAVRMKNKMAGLLMETGALYAKEKLHRKKYFASLLEELEEVPASVIDLLRLSRGALEMFESTQKRLVRELLADPELTQRVERRMTIPAVGEITALTWALEVGDPQRFRSGSDAMSYCGLTAALKSSAGKQKRGPISKQRNHWLQTTLIEAAKLAPRWNPQLAALHARELERGHRNRATLAVARKLVAYLLAVDKSGQPFQLCVPLEVPTPKAA

SEQ ID NO: 220719 - protein, 354 aa, unidentified
MSQTLNTTIAVVGIDIGKNSFHIVGHDERGAIVLRQKWSRGQVEARIANMPPCLIGMEACVGAHHLSRKLRALGHDARLMPAKYVRPYSKGQKNDFRDAEAIAEAVQRPTMKFVATKTADQLDLQALHRVRERLVSQRTGIINQIRAFLLERGIAVRQGLRFLRAELPRILATPPDVLSPRMVRIIEDLACDWRRLDERVEGLSNEIEAIARQDAGCERLMSVPGIGPIISSAMVAAIGTGDVFTRGRDFAAWLGLVPKQKSTGDRTILGKISRRGNRYLRVLFVQAAWVVLIKPKIWERHGLKPWIEAAKKRLHHNVLAIALANKLARIAWSVLARGRAFEVRKMDQAANQSA

SEQ ID NO: 220720 - protein, 415 aa, unidentified
MSDQRRWYAGVDWGSQSHCVFLTDSDGRKIGEKIFKHGGEGLAEMAAWLMTASGAGDPGQIHVAIEVPHGPVVETLIERGFKVHAINPKQMDRFRDRFTMAGAKDDSRDAEVMASCLRTDPRCFRLLAAADPIIVELREWSRIAEDLGVERNRLANRLREQLWRYFPTLLALEDDLGAEWLLELWEAAPTPQKASRVREATVAKLLKRHRIRRLDAASIVEALRKPPVQVAAGTVEAASAHIASLVPRIRLVNRQLKDAHSRIDVLTARLMPAEETKPGQKKQHDAEILASLPGVGRTVLATLLAEAWDALQRRDYAALRSLTGVAPVTKRSGKSCFVIRRQACNDRLANAVYHWARVAVQHDPRSRSKYAELRRRGHSHGRALRSVADRLLNVACAMLKSGAAFNPSSAAQKPA

SEQ ID NO: 220721 - protein, 313 aa, unidentified
MGDETVGVDISKLHFDVYSYPGGGSGRFQNTDKGRKSLLKWLKSRQSVMVVFEPTGPYHKALEADLHKAGVALAKVNPLHARRFAEATGCLNKTDRVDAAILARMAAVLQIKAQPERPENLTGLTELLSARRGLMKERTANLNRQKNLVHPLLKRQCSARIRQIEGQVQMIERELRAAVAADAALTQKFEILISIPGISATTAYTLLAELPELGELTSAQAGSLAGLAPMHRESGNWKGQSRIRGGRAVLRQSLYMPALVATRFNPDLRVVYKRLVDAGKPAKIAITAVMRKLVILANTLVASGRIWELRPMK

SEQ ID NO: 220722 - protein, 345 aa, unidentified
MQSMYYIGLDVHKKTISYCVKDGSGIVHAEGTISATRWDLDRWMKMLPRPWTAAMEATIFTGWIYDHLKPHAAALKVAHPLMLRAIAAAKKKNDRIDANKITDCLRCDFLPECYMAATEIRERRRTLRYRNLLVHQAVQLKNKISGLLMEAGVSYNKQKLHKVGYFKELLATNPDINEGLRPLLRLCRETLVRLQKTESALLRSLQRDSLLAERVQRLMTIPAVGPITALTWVLEVGDVKRFSSIKKAISYCGLCGAEKSSADTVKRTPISKQRNKHLQSVLVEAAKMAPRLSPELALIYDREKQKGNANRASLAVARKLVAYLVAIDRSQRDFLVVEKENCAAA

SEQ ID NO: 220723 - protein, 337 aa, unidentified
MYYTGIDLHKKTSFITPIDKNGQIVKRRNLINDEAEILHFFLTLDDDTQVVIESTANWYWLYDLLTEHGMDVVISNPVKTKAIASARIKNDKLDSHMLAQLLRADLVSTVHVSSQQTRQLKELLRHRSKLVRDTVRMKNRIHSIMAKNNLRVPVSDLFGCRGLEFLSQAPLPQYQRRQVDTYLNLYTQLKEQVEALTKQIKQQAESNQKAQLLMTIPGVGAITAMFMIAEIEDIARFKSYRHLASYAGLVPRLDASADKQRIGRITKQGSPYLRTALVEAAQAATRTKSRLNVFFRRRIVRAGYQKAIVATAHKIIKYAYYILRDQTPYRESIDASA

SEQ ID NO: 220724 - protein, 363 aa, unidentified
MTTQEKQRTLFVGIDVHKDTHTAVGVSPFGEKLFELTVGNYQKDFDSLSTRIREVESESLLSPYIGLEDCHGYGERIASALYNHGYPMVHVPPILVDHARKRQTHPEKNDSLDALGVAKVMMNSLDSLPAFSIAESDTFAKYLKELSHDRAFLVEECTRLKNQLHLALHRIYNTEYRTYFKNPFSPQALQHWLRIRPVCDPYVLRALKRKVKRMQQLLIEIRELEKDMQTLMDEAGYTLTTASGCGTVLAASIIGEVGDIHRFNSPAALAKYAGCAPRECSSGKSTRYRKTRSGNRTLNCAFHRMALSQISRTGNPVGLRYWKKKVSEGKSKSQALVCLRRHMVNVVYMMLKHSSVYRLPAEA

SEQ ID NO: 220725 - protein, 342 aa, unidentified
MEYYAGIDVSLECSSICVVDATGKIVREGKVASEPEALIAWFRSLGFEVGRIGLEAGPLSQWLHAAMKQAALAVELLETRHVRDAFKAMPVKSDRNDARGIAQLMRLGWFRPVHCKSIGAQETRAVLTARKLVQSKLQDVENSLRGILRGFGLKVGKTTERSFAGRIRELVANHASLAIITEALLSVHGVLLREFKAFEKHVRLLARSDVKAKLLMSTPAVGPIVALTYASAIDDPGRFKSSKRAGSHFGMTPRKYQSGETDHTGRISKIGDASVRTALYEAAHIMLVKPIKGCSALKSWAMRIARRAGMKKAKVALARKLAVIMHRMLADGTPFNAAAAAA

SEQ ID NO: 220726 - protein, 360 aa, unidentified
MAKAKTLVGLDVHATKIVAVVLDAESGELRTFRIDGDAGQAAAFCAGLPRPVRAAYEAGPTGYGLARELSKRRVECVVAAPSKIPRASGDRVKTDRRDAELLVRLLLAGKLHAVRVPGPEEEALRDLVRAREATRVDLMRCRHRLSKLLLRHGIRFDDGPAWTQRHRDWLQTITLPWSAAQATMLDAQGAIDALCHRRDQLEREIVALVPSSPWAAQIGRLRCLRGVDTLTAVGLCAEIGDFERFARAEQLMSYVGLVPCESTTGQQRRLGSITKTGSAHARRLLIEAAWHYRKHPAIGKTLTDRHNGQPPEAIAIAWSAQRRLHHTWARLEKRAKRRTIIAIAAARELAGFCWAITQIE

SEQ ID NO: 220727 - protein, 322 aa, unidentified
MQDAQTRSNVFVGIDVAKDSFDVAVLPGEQSASFSYDDAGLEQLLQWLRPHGICLIVLEATGGLERRIAGELIDAGHQVAIVNPRQVRDFARGTGKLAKTDRIDAFVLARFAQQVQPRITEKASEKQVELAALVTRRRQLQSLAVAESNRRETARSSSARKSVEKHLEWLRKEVARIDAEIARLIAADETWRGQAERLKSVPGVGPATSAMLVAELPELGRLNRREISALVGLAPYNHDSGKLRGKRSIWGGRISVRSALYMAALTARRCNPIIRAFADRLQQAGKPFKVILTACMRKLLIILNALAKKHQAWSPASLHSPS

SEQ ID NO: 220728 - protein, 376 aa, unidentified
MQNDITLFVGLDVHKDSITVAYALGNGEVEVLGKIGTSARDIDRLCKKLQSKARHVKIVYEAGPLGYDLQRRLAAKGFECMVCAPSLIPRRAGDRVKTDRRDAVKLVRSLRAGDLSAVHVPTVEDEAFRDLARVWAGARDALKRARQALKSFLLAHAVRYAGSANWGPAHRRWISSFSFGNEYQEFAFNELRRAIEDRFAQCERLESALRQAVPQWRFYPAVLALQTMRGIQFTTAVGLLSEIVDVTRFAHPRQLMAWLGVTPSEHSSGGSRRQGSITKTGNSLARKLLIEAAWSYQHPAKISPEIQQRHEGVPKVIVDRAWDAQVRLCGRFRRMVAKGKNKNVAIVAIARELAGFIWDIGRLGMEQAIKTSRAAV

SEQ ID NO: 220729 - protein, 350 aa, unidentified
MLIIGCDFHSRFQQIAMLDPTTGEVINRRLEHENGEAKKFYATLPSPARVGMEATCDAQWFERTLREHNHELWIGDAAEIRAAMVRKQKTDSRDALHILDLLLTNRFPRIWVPSPAERDLRQMLRHRHKLVRFRTSVMNQLHALAMGQGLCRKKKLWTKVGRKELEGLLLDPWASLRRKELLQLLDQLDPWIANLDAAVIQAAESRPPAVCLMQQAGVGPVTALAFVLTIGPVSRFASSKKVVSYLGLNPSEESSGGRQRLGAISKQGNPMMRYLLVEAAQTAARLDPELRRDYQRLKFRRGSAVAKVAIARKLAVRLYWKLREAAQPVSSARMQGSPASPVVGESLSPY

SEQ ID NO: 220730 - protein, 302 aa, unidentified
MTSMPQPVADDQDSSRIEEIILGADTHQDLHVAAVITALGVLRETKTFPASAAGYDALLSWAGTFGILRRAGVECTGSYGAALARHLRQAGIEVIEVNQPDKANRRRQGKTDSLDAEAAARAVLSGRACGSAKAGDGPVEMLRMFKLAKSSAIKARTQAINQLKAVIIAADPQLRETLSGLSNLQLIRRCAQLDIDTLQDTTSAAAYTLRLLAQRILTLTDEIRELEQQITTAVTNHTPQLLTRCGVGPDNAAALLIAAGDNPDRLRSEASFAALCGVSPLEASSGKTRRRRLNRGGNRQAN

SEQ ID NO: 220731 - protein, 401 aa, unidentified
MAAVRDNAWVGIDVGKTHHWVCAVDADGKTLLSVKVANDEAGILSLIAAVTALTQQLTWAVDIIGAPSALLLALLAQASQPVRYASGRVVAAMSAAYVGEGKTDAKDAYVIAETARIRRDLAIIDTDTDLVRNLAVLTGHRADLIADRVRMINRLRDLMTSVFPSLERAFDYSSHKGALVLLTRYASPDRIRRIGQTRLAAWLRTRHVRGFAQVAARAIAAAKAQSVVLPGQDLTASIIAELAGNVLRLDERLKSLDDQIEELFQQHPQAAIIQSMPGFGPFLGASLLVGAGDLRAFPNAGHLAAAAGLVPVPNDSGRRTGNLHRPLRYSRPLRHVCYLSAQTSMMRAGPNRDYYLKKRANGRTHSQAVIALARRRIDVLWALLRENRTWTATPPQLAQAA

SEQ ID NO: 220732 - protein, 360 aa, unidentified
MSRTSLSQIHQFIEGYSSGKFWIGIDVHKRSYSLALLREDGMSYTWVTTADPIRLVEQLQGLPITISSIVYESGPTGFGLARTLKKANIPVDIAAPSRIPRPVRPGAKSDRLDCLKLAAYGSKGMVKSIAVPREEEEALRALLRRRQQLTESLVRVKQRIKSLLLYIGQTEPHGLRSWTDKSIRQLENMSLNDAYQILLKSLIRQLRFVQDERQIVLNQLQSLISKTDQQNRLGCLSSVPGVGSITALTFLLEVFNPERFNRAEEIASYLGLAPMVHHSGEQTPPGKLQPVGQACLRSLLIEAVWMWKTKDEGARTMYNNFLSKMGIPQKAICAMARRLAIILWRIAVEQRTYYPIEVKV

SEQ ID NO: 220733 - protein, 411 aa, unidentified
MRLYAGDDWAEDHHDIELMNEAGTVLARKRLPEGVAGMAQLHELTGRYLPDDPADTEVIIGIETDRGPWVAALVAAGYTVYPVNPLQASRYRERHGVSGAKSDQGDAHMLADMVRTDSHQLRPAAGDSPQAEAIKVVARTHKTLIWERTRQVQRLRHQLREYFPAAIEAFEDLDASDTLELLGKAPDPARAAKLTRAQVAAALKRARRHGIAGKTDAILAALRGEQLGQPPALTAAYAATARSLIAVISTLNEQVKILEEQVRAHFGRHPDAEIYRSQPGMGAILGARVLGEFGDDPHRYADSKARRNYAATSPITRASGKKKIIAARFIHNDRLIDALRAQAFAALNASPGARAFYDDLRARGIEHNDALRRLANRLVGILHGCLKTRTLYDEATAWDHRKNLPQSSVAA

SEQ ID NO: 220734 - protein, 323 aa, unidentified
MSSPSPSINIGIDVSKETLDVAVAETETHWTSKHEFTEFPQLVKSLKALQPTRIIIEASGGTENLLVSYLATAGLPVIVINPRQVRDFARATGQLAKTDRIDAFVLARFAATLQPTVRQLKSAETRELEALVARRAQLVNMLTAERVRLQQAQQQRRQSIVSDLKAHISWLEKRLDKCEGDLSKLLRSSPLWRATDERLQSVPGIGPVTALVLIAELPELGLLPDKQIVALCGLAPHARDSGKWHGKRTTRGGRARVRTALYMATLVATKHNLVIKTFYRRLLSAGKEKKVALTACMRKLLVILNAIFRNQTSWQPPRLVPGA

SEQ ID NO: 220735 - protein, 360 aa, unidentified
MKYYVMKYYTSTTQFNCGIDLHARQMYVCLMDREGKKLVHTNIRNNDFEFFLKRIAPYRHDLTVCCECMFGWYWLADACQAAGLHFVLAHALYLKAIHGGKNKNDRIDSEKLAHLLRTNLIPPAYVYPAAKRPLRALLRQRILYVWRRSELLSRLQSHQLAHNRPTLRQTRPNRAPWEQQLLAQEDNPVRQLALQNDLALIGHYDAQLAILEKELLQLTKQTACRDFTLLQTTPGIGEYLGLTILHEIGDINRFPTVKDFLSYCRLVKGTVASGGKIKGLRGAKLGNPYLRWAFGEAAVIAKRDHALLGPLAQRLEARMGGNKFKANTVLAIKLARAVYFMLKSHTVFDADRLVATLSRN

SEQ ID NO: 220736 - protein, 400 aa, unidentified
MLPHKSLDIRVSIDVGCYQHSIAVGLSTGELIDEFEIDHNQQGFDRFFNKIHDIESRYLAPVSVAMEGYNGWARPLDQLILSHGYTLFNINNLKLARFKEVFPSAAKTDAIDARKGLELFTLSDHLPLAKNCLQRIEKPDQINIKLKRYSRRRRRLVDEKVRIKGAMHSDLQSISPELLSLTKNIDQSWFLNLLTSVTELSQLAKKQQRSLAKIKGVGTRYLARIKEWQQVASFSEDISWVSPMLIEDAYKMLELRALIKALDDTMEALCEASEIGRLLKTIPGFGKTSCAELAGEVDDIRRFESEASLAMYLGMAPLDNASGVYRGSKTPKQINRRAKKAMMTAVDRHRANVTESQVFYDKKRKQGKKHNQSVRALGRYLTKVIFKMLIENRAYEIRLL

SEQ ID NO: 220737 - protein, 373 aa, unidentified
MNTIYIGVDFHARQQTICYLTTETGELVTAELKHEPKTAVRTFYEQFSGQVIVGLEASGYSPWFERLLEELGHQVWLGDATEIRRRGRWRQKNDRRDAELILDLMLHDEFPRLHRPSLQSREVMRMLRYRQKLIKMRTMSKNSLQSLALQSGIARRGRLFTREGKAELDAVVMSPAMAWQRAHWWQLLEPLNQQVLEAMTWLKAASQNDVSIARLRTHPGIGLLTSLCLVHTLQPVARFGNTRKVAAYAGFDPMERSSAERKHFLGISKAGSRVLRYLLVEAANTAVRKDEELKRFYQRLAQRRGRPKAKVAAARKLLIRAYIMMRDEIDYAEFRRRAVAARLARLRQGPQIPAALIGQPASTARQEPLPRGK

SEQ ID NO: 220738 - protein, 427 aa, unidentified
MNYTQKSRIEQITDSTLIIGIDVAKATHVARAQDHRGIELGKRLIFDSNHRGFEALNTWIKELQRSYYKTTAVVGMEPTGHYWLTMAHYLLQKEIKAVVVNPAHVKKSKELDDNSPTKNDIKDARVIAQLVKDGRYSEPNILTGKYAELRVAMVQRERLMRSLIEIKNQVHNWLDRYFPEYPTVFKDWEGKASMIALKNFPLPQDVVNLGMEGIVTQWKSEVKRAVGIKRAIKLIETASTSVGISLGQTMARREIEMLLEQYFLLTKQLDELAQDVVTILEEIPGAVQMLAIPGLGWITVAGFLAETGDLQAYSHPQQILKLAGLNLKENSSGKHKGQTRITKRGRPRIRALLFRSMLVLVSKNQQFKQLHQYYINRKDNPLRKKQSIIALCGKLIRVLFAIGKKSVDYDPHKLLGKERLMQFQLVV

SEQ ID NO: 220739 - protein, 325 aa, unidentified
MNLSCVLGVDIAKLKFDVCLIKENGKAKHKVFANTTSGFEQLVAWLSSYQVGSLHVCLEATGSYGEALATHLFDAGLTVSVVNPAQVKAFAASRLTRTKTDKVDAELIARFCLAQQPASWQPPAPEVRQLQALVRRLDALIEMRVAEENRLSSGVSIDAVRESLETHIAYLVEEIKDTERLIREHINNHPDLKEQSDLLDSIPGIASTTAALLLAEITNFKQYKSARQVAAYAGLVPRERRSGSSVRGRTCLSKIGNARLRKALYFPAITALRCSAFFQQWASGMRERGKSKMAVIGAAMRKLIHLACGVLKTGKPFDPNWAKTV

SEQ ID NO: 220740 - protein, 374 aa, unidentified
MSRSIIYLGLDVHKDSITIAVLPEGAPAPSRVERLPNDLPKLRRFCERLAAQGDLRACYEASGAGYVIHRAMRAWGYPCDVIAPSLIPIKPGQQRKHDKYDAAQLARLYRAGELTTIRIPSEAEERVRDLVRCRETLQREVLASRHYILKFLMRRGFVYREGTNWSTAHYAWLRRLAAASSPLVAEDQEVFGEYLGLLEYKLSRRDALDHRIGELALTPALAPAVNRLQCFRGVQRHVAMVLTTEIGDWRRFASPRQLMAYLGLVPKEHSTGDRERRGSLTKAGNSHCRHVLVQAAWAYRFQPKVGVALAARQRGQSPVVIAHAWKAQHRLHTLYRRLAFRTKPQIAVVAAARELVGFLWAVMQDQDVTKSVPA

SEQ ID NO: 220741 - protein, 366 aa, unidentified
MAPINHEVLHTMKYYTSTTEFNCGIDLHARQMYVCVMDRQGKKLVHTNIKNNDFAFFLKRVEPYQHDLTVCCECMFGWYWLADACQDAGLTFVLAHALYLKAIHGGKNKNDRIDSEKLAHLLRSNLIPPAYVYPARLRPLRALLRQRLFFVWRRSELLSRIHSHQLAHNRIPKKQTRSNRDPWEQQLLAAEDHPLRQLALKNDLAMIRHFDHQIGQLEEELQRQAKKTAARDYALLQTVPGIGEYLGLTILYEIGDIERFPSVKDFLSYCRLVKGTVASAGKIKGLRGAKLGNPYLRWAFGEAAVIAKRDHKVIGPLAQRLEARMNGNKFKANTVVAIKLARAVYFMLENKTTFDAERLIQVLSRN

SEQ ID NO: 220742 - protein, 503 aa, unidentified
MALVLALLALLVAEDDMPRPKANARKSDPAKNALLKTLNPHAAGIDIGAREIWVAAPPGSVPADVAPPGLPPPREWRGSVPDDTFERVRRFGSFTADLQAIASWLKQCGVTTCAMESTGVYWIALYDLLQSQGFEVLLVDPRQTTRAPGRPKSDKHDSMWIQRLHGLGLLSAAFRPEEKIRVWRSYQRHRANLIDDAARHLQRLQKALEQMNVKLTEVVSDVAGVTGTAIVKAILLGERDPLKLAKLRDPRCRHSEETIARALEGTWRAEHLLELRHSLELYQYCHQKARECDAAIEEHLKGLALPDVKPLEAKSRPRKLKDNEPRFDARHRLQQVAGVDLTAIEGIQERTALVILSEIGTDMSRWRNEKLFGAWLGLAPCPKKSGGRVLSSGTRPGKNRAAAALRLAARNLQRSKSALGAFFRRIASRRGVQKAITATAYKLARIIYAMLKHGQEYAAVGMEEYEAVYRERALRSLQKRARELGYELTQLPQEQPRADPTMP

SEQ ID NO: 220743 - protein, 315 aa, unidentified
MSEIVYKNYIGIDVSKKNLDIYIRSTGEIFQESNNKNGLEQLSKKLSNYSPCLVVMEATGGYELNALIGLQQAGFDVAVVNPRQVRDFAKATGRLAKTDCMDAGVLAHFGEAIRPMPKETVHQEQLDLLQLQQRRKQLIDMLVMEKNRLHTVSDKVKKYVEKSLKFFERQVKEIENKIAEDIEKNKEFSEKSKLLATTKGVGIITAAILITELPELGKLSHKEIAALVGIAPLNRDSGTMKGKRSIWGGRRSVRASLYMATLTAIRFNPAIKVFYQRLCDAGKVKKVALVACMRKLLIVLNAILKNDTPWKAQMC

SEQ ID NO: 220744 - protein, 370 aa, unidentified
MKQQKKSSDITIGLDLGDRRHRFCVLDKMGGLLEEGSVPNERVFLAQLSSRYPGALAVLEAGCHSPWISRYLQEQGCRVLIANPRKLRAIYQHERKSDRRDAQMLARIGRFDPALLYPVGHGSAEAQQDLLRIKLRDSLVRARVAVINSVRFTLKSLGYTVPNPSSERFHKVAMEGVPETVRQIIAPSVQALAELTARIKALELEINTLAKMKYPHTAQLKQVPGVGPITALYFVLKIEDPNRFGHVRDVGAYAGLCPRRDQSGESDPQLRISKRGDAYLRRLLVSAAHYILGPFGPQSELRAYGLMLAADGTARAKKRATVAVARKLAVLLLSLWKSQQPYEPFPKVRPRCQQEDRRSGTIAVHRLEAT

SEQ ID NO: 220745 - protein, 414 aa, unidentified
MNTLVSNTSLSGTLIALDIAKKHHDAKIRHPDGRTSFLRIENTLEGFNRLLALTASPHDDIIAAFEPTADYHRNIAWWLHKQGVRCHLVSSVRCARAREMLFKTWDKNDRKDASVIMYLLEQGLSSPFYDPLANGIIDIQEISNTYHQVTLARTRCLNSLVNHYLTLYFPEAEQFLHMSRAEWFCQFLLHFPTPSCITSLNRDVFVQQSWDIVGRKQYKKQFLEHLYDVAADPIALPLSEDSLAVTTFRLQLHRYVGLSAQRLQLEKQAENYLQERSDYRHLRTIPGIGAIIALMIIAESGDLTRFAHYRQYLNFCGFNLSASQSGQKHSGYRLSKRGNARLRYAFWLAATVAVRTRENSFRYKYERYIRENGDKPDQKRKSMTAVATKVARVAHAIVKQDIDYKGYYEISHGT

SEQ ID NO: 220746 - protein, 388 aa, unidentified
MTQAPGAVRIPTVVDYERTLILAIELSNTSWVLAAQIPGLPGVKAKRSIKPTPEALMAAIDGYRVRAEKAGRNVNRVIAVYEAGWSGFWLVRWLAKYGIETQVIQPSSVPVDRRARRAKSDGIDAELLLRTLLAWLRGEPRVCSMVPIPAETDEDARRRVRERAELVAERVGLVNRIGAVLATLGVGEYNPLRRDRRQRLDGLRTALGDPLPTHARAKIVRMLDRLELLLAQITELEQSRDAVLEDENPDRAASMIQQLAKLRGVGVQSATVLVREGFVREFANGKALGSYAGLTATPFSSGGIEREQGIGKAGNARLRTVMVELAWLWQRYQPASAQVSWFRERISGTGRRMRKVMVVALARKLLIALWRFATQGVVPEGAVMKPAS

SEQ ID NO: 220747 - protein, 347 aa, unidentified
MKFYNNTHPFYCGIDLHARSLYVCIIDQAGQTCVHKEISANPDKLAKLLEPYLGQVVVGVECMHCWYWVADFCEDIGVDFILGHALYMKAIHGGKAKNDRIDSYKIANLIRGGNFPVAYVYPKSMRATRDLLRRRMKIVRHGADLKAHVANTTSQYNLPPNKVNLKNVSAREHIRSAFPDPVVQRNMDLNMSILECYAKELSKLEWFIETQARQHNPVHLHLLHSVSGIGRILALTIIYEIGSIDRFESVQTFASYSRLVKCKAESAGKSYGTQGNKIGNAHLKWAFSEAAVLYLRGNKKAQKYLQRLQRRMSKAKALSALAHKLGRCVYFMLKNETVFDENKFLTG

SEQ ID NO: 220748 - protein, 478 aa, unidentified
MVLRGRSGSNPADLPDSVLDKTGLTMVLYLARLIADSVNYQLSTDLGSREHWACVPSSSTESTNIQPFGCTTPDLIALADWFTECGVTTVAMESTGVEWIPLFHILSARDFQVFLVNSKTVKTVPGRKSDVLDCQWLQQLHSYGLLAPSFVPEGDIAVLRSYLRQRENLIQNSSTHIQRMQKALTQMNLQLHKVISDITVLTGLNIIRAIVSGERNPQILAELADKRIKSTPEQISKALTGNYREEMVFILHQELSFYEYYQQQILALDEQIEQCLSKFKSETTSPPPEPKKAKRNRSNKPSFDLHSHLRSIAGVDFTTIDGLDVLTVQTIISEVGLDPSKFKTVKHFCSWLGLCPGCRITGGKVKSSQTRQVKNRAANAFRLAAQAVSRSQTALGAFYRRIKARSGAPKAITATAHKIACREGRRTARLFYTLWTTKESYLDKGADYYEQQYKQRTLNRISKKAESLGYQLVELPQA

SEQ ID NO: 220749 - protein, 423 aa, unidentified
MAKQQGDAGMQVIFERVCGLDVHKKVVVACLRILSAGGRIRSEVRRFGTMTEDLRKLLEWLKAEQVTHVAMESTGVFWKPIYNILEGHRMEVWVVNAQHLKKVPGRKTDITDAQWIAQLLQCGLLRPSFVPDRAQRELRDLTRQRTRLVQQRATVSNRVQKVLEDANIKLGSVASDVLGVSGRSMIEGLIDGEQDAAVLAELARRRLRGKIPELRLALDGNVTEHHRFLLRELLDQFDYVEGKIQALTERIDSVASPLFKQSATLLDTIPGIASESAQAIVAEIGTNMAQFPSHKHLCSWAGRCPGNHESAGKRRSGQPAKGNKWLGAVLTEVAWAASRTKHTYLNAQYHRLAPRRGKNRAIGALTHSILTAAYFMIRDQVPYNDLGPDHFTRLNPGQQTRYHVRKLQQLGHNVELTPIEEAA

SEQ ID NO: 220750 - protein, 352 aa, unidentified
MSQKFNTAIAVIGIDIGKNSFHVVGHDERGAIVLRQKWSRGQVEARLANMPPCLIGMEACVGAHHLSRKLKGLGHDARLMPAKYVRPYSKGQKNDFRDAEAITEAVQRPTMKFVATKTADQLDLQALHRVRERLVSQRTGIINQIRAFLLERGIAVRQGQRFLRAELPRILATPSDALSPRMVRVIEDLAGDWRRLDERIEGLSSEIQAIARQDAGCERLMSVPGIGPIISSAMVAAIGSGEVFTKGRDFAAWLGLVPRQMSTGGRTILGRISKRGNRYLRVLFVQAAWVVLIRPKSWERHGLKSWIEAAKKRLHPNVLAIALANKLARIAWGVLAHGRDFEVRKISEAAAQ

SEQ ID NO: 220751 - protein, 342 aa, unidentified
MSIVTVGIDLAKNVFAVHGVDAAGKPVLVRPSVARDKLLELIASLPPCLIGMEACSGAHHWAREFDKLGHTARLMAPKFVAPYRLSGKRGKNDAADAAAICEAVTRPQMRFVPIKSADQQGQLMVHRARQGFIEQRTATLNRIRGLLSELGIVLPLKAATVRRQALQHLEDLPGWANTVIGDLLSEVSHLDERIAQYDRHIALMARHSTQAQHLMQLAGIGETTATAIVSTVGNGHDFVCGRSFSAWLGLVPGQYSSGGKQRLGRITKAGDAYLRSLLVMGARVVLAAAMNSKAPKQDPLSRWARALAERRGYWRAVVAIAAKNARLCWAVLQRGDNFKIPA

SEQ ID NO: 220752 - protein, 344 aa, unidentified
MQHYVGLDVSVKETSVCIVDKAGKVMREVKVATKPEAILAVLTEEGLAIERIGLEAGPLSQWLYSALAGAGLPVICVETRHMKAALSAQINKSDRNDARGIAQMMRVGLYRPVHVKTLASQKRRMLLTSRQLLQAKALDIENDLRGTLRNFGLKVGMVGTVKFEARIRELVADHPDLAAIVEPLLIARRVLREQLGVLHRQLLEIVRHDEVCRRLMTTPGVGPVVALTFRATVDVPSRFASSKAVGAAFGLTPRRQQSGEIDRMGGISKCGDGMMREMLFEAALVLMTHSRKWSWLKAWGLKIARHRGMKRAIVAVARRLAVIMHRMWVDGTEFRWTREEAAAT

SEQ ID NO: 220753 - protein, 355 aa, unidentified
MTSTKYIGLDVHKESISIAVRNAAGKVVMECVIETKASMILQFIDGLRGDLQVTFEEGTSAAWLYDLLKPHVTKLVVCDPRKNKSMREGNQSDKIDARRLAELLRLDHLTPVYHGEHGLRTLKELVRSYLTITKDLARVMSRVKAIYRSWAIPCTGKQVYAARHRAEWLGKINEPGVRRRAEFYYQQLDALRVLRQEARRDLLTESKKQKAWKRLCAIPSIGPIRAAVLLGILQTPHRFRTKRPFWNYGGLAIEMHSSADHRRVHGQLERSTKNVLVRGLNRNCNHDLKNLFKGAAAVASSKPGPFQEFYTALVAKGMRPEMARLTLARKIATIALIVWKRGVNFDAQHLKPQTA

SEQ ID NO: 220754 - protein, 332 aa, unidentified
MVVMQEGGSNPKPPQRFQKEAFLYWAAKLAGSGAQVHAVYEACGFGFGLQRNLTALGIDCYVVCPQKLDEQNRRVKTDGLDAKALCLKLDRFVQGNRDAMALVRVPTEQEEQQRAIHRQREQLVKARKQLEAQGRSLMVNHGVEPVQNWWKLRTFGALQLPQWMKELLGNSQPILLGLQQKIGALTLQLQVAAASKQPRGLGKMTSVIIDREIGDWRRFNNRRQVGSYTGLCPGEYSSGNTRLQSCVTKHGNPRLRAALVELAWRLVRFQPNYKPVRKWRRILAKAGANRTGPIATGAARKKAIVAVARQLAVDLWRIRTGRCTPETLGLEI

SEQ ID NO: 220755 - protein, 376 aa, unidentified
MLSCPATGSARARKAYLTLKEPDMQRPRQGQVIIGVDTHKEIHVAAAVDWQGTLVGEECFPTTRQGYRQLESWARSLGDVLRVGVECSGSYGSGLTRHLAKNGFAVLEVTFPDKTVRRKRGKDDFIDAEMAAEAAFTGARTVTPKSRDGMVEALRMLRKTRSTAVAARRVALQMIRADVISAPEELRDQLRGMTRMQLIRHLVATRPDSTDFRTPLGAAKIALKRLAKRYVDLDDEVSELDDMIDAILADVAPLLVQLKCVGAQSAAQLMVTVGDNPERLRSEASFAMLCGVAPVPVSSGMTYRHRLNRGGDRQANSAIHIIAIGRLRTDERTKEYVAKKMSEGHTKMEAIRCLKRYIAREVYYVIKRQSELVNCS

SEQ ID NO: 220756 - protein, 333 aa, unidentified
MVKYIGMDAHSSSCTLCVTDSSGREIDNVTFETNGKTIKNYLRGIAGTKKLTFEECELSRWLFGVISPEVDELIICNPAANKQYKKLKTDKVDARQLAKLLRGEFLTPVFHDGSERERFRNLLSSYEDIIAEGVRLKNRYKSLFRKTGKRIRGTAMYSDESLLEGLTRDDDRFIGEHMYQLLASMEQTRQDYIKEIVRCSKPFKELKYLKSIPSIGNIQAAKIVSQVVNPLRFETKYKFYSYCGLVRHIRESADKKYGTKRTWGNGILKCVYKMAGRNALQGNSRLRVYYDALRKRGISHDNAYNAVCRKIAAISLSVWKHNKYYDESMIQAI

SEQ ID NO: 220757 - protein, 365 aa, unidentified
MQKISTMQTNGKNLFEGQLTIGLDLGDRSSAYCVLNEAGEIVLEHKLATTPEAMKQVFASMPRCRIAMETGTHSPWVSRLLTALGHEVIVGHAQKVRLITKSRRKDDRLDARTLARLARIDPELLSPVKHRSAQAQLHLTEIRARAVLVSARTALVNAARGLVKSYGERLRKCGTQQFGQETTSGLSAGLRGALEPLLREVESLNERIKEYDRRIAKMAEEKYPETTLLKQVKGVGDIIATAYVLTVEDPHRFRKSRDAGCFVGLQPGRRNSGESEPQMHISKEGDEYLRTLLVQGAHYILGPFGEDSDLRRWGQKLSARGGKNAKKRAVVAVARKLAVLLHRLWVSGEVYEPLRNTQKAMSAAA

SEQ ID NO: 220758 - protein, 493 aa, unidentified
MSPRAKKADPSSKTSPTPQPTSGPGKRLTRWEVINPHAAGIDVGATSHYVAVPPDSVADNEKNVRVFGAFTPHLHSLVDWLKTCGVTTVAIESTGIYWVALYQILEASGIEVVLANAKAVKRAPRRKTDVSDCQWLQQLHSYGLLSGSFRPCQSICQLRTLMRHRANLVSSASREVQHIQKSLQQMNLHLHHAVSDVMGATGQRILKAILAGQHDPEALLALRDENITKSTPAQMKAALQGDYRPEHLFVVAQALEAYEFIHRQMDESDKQIQSVLELIGPTASAKAATASESDNQKQPEKKKKKTRQSRKHNDPKIDFAPQLKRIFGIDLTQTLGMRVLSILVLLSEVGFDLSKFPNAKAFCAWLGLCPNNKVSGGRVLSSCTSKVVNRIASMLRLSAVAIGKTQTCLGWFYRRKCAQLGPAGAATATARKLAVILYHLVTRREEYVEPDLIQYQLRYQRHRTVKLLKQLETMGYEVSIKEKSETQTIVTTA

SEQ ID NO: 220759 - protein, 357 aa, unidentified
MTSISHAHLERITVGVDTHKYAHVGVALNEIGGRLAETTVTVNTDGYQQLEQWALSLGDKAVFGIEGTGSYGAGLASHLRRRGHRVVEVVRPNRQQRHLRGKNDALDAENAARAVPAGTAAAVPKSGDGCVEMIRQIKIAKDTAVKSRSQAMIALKTTMVNAPAELREELDLLSDRKLLEYCAELPHEAMETPADAARYTLRTLARRHRSLSQEIDIHERILQTLTERAAPELTSVFGIGSDSAAELLIVAGDNPERIQGEAVFAKLCGVCPIPASSGKTNRHRLYRGGHRQANAALHRIALIRMRFHEPTIEYVVRRTAEGKSKAEIMRCLKRFIAREIYHLLTRNRNMGIQTSAA

SEQ ID NO: 220760 - protein, 433 aa, unidentified
MGLIVPTTLQPEREDQPLPYEWFVGIDWGSQQHQVCVLDRASRLVGARAVDHDGASLAQLAAWLWTLSVGQPQRVSVAIEVPRGAIVEGLLERGFHVFALHPKQLDRFRDRHSVAGAKDDRRDAFVLADSVRTDRPSFRRLQLDAPHLLLLRELSRVEATLLEEFRRSANRFREQLHRLYPQMLQLCSAADEPWLWDLITLAPTPAHAMLLSEEQVQRVLKAQHIRRLKATEVLACLQAPALPVAPGTPEAAQAHCGFLLPCLRVLAEQMQACSQRVSALLHTLAQEPGEGEGPSDVAIVQSLPGVGRKITAWLFAEAAQALAERDFQVVRTHGGVAPVTRQSGKRRQVGMRRGCHPRLRHALYHMARVAMQRDAHFSQVYTALRAKGQRHGQALRHIGDRLLRILMAMLRHRTCYDASRIRCEPVVQLGQKM

SEQ ID NO: 220761 - protein, 341 aa, unidentified
MEITTLGIDLAKSVFQLHGVDADGAVVLQKKLRRGSVLEFLGKLEPCLIGMEACPSSHFWAREIAALGHEVRLIPPAYVKPYVKRQKNDAADAEAICEAVTRPSMRFVPVKTEDQQAVLVLHRSRDLLMRQRTMILNAIRAHLAEFGMITAQGPRKVVDLARRLSDPDDGLDLPVLAGSALLSLVAQLESLVEEIGKIERQLMAWHRQSAASQRLETIPGVGIITATALAASVPDPSVFKSGRQFAAWLGLVPRQNSSGGKERLGRVSKMGNGYLRRLLVVGATSVTRRAGTTDTWTGAWVRSLLERKPTRLVTVAIANKTARTAWALLAKGENYTAAPAT

SEQ ID NO: 220762 - protein, 376 aa, unidentified
MDRATTAPADRLFCAVELSKNSWLLGIQFPDHQKASVYPIKGGDSEGLMAKLVAARDRWAKVSGKKPSIILCYEAGYDAFWLARFLKARGIDCLVVDSASMQVNRRSRRAKTDRIDLGKLLRALIAWCGGERHVWSVVRIPSVDEEDLRRSHRERGRLITERTAHVNRIKGLLFAQGIRGINVKARYKTLQIDKLVTGEGRPLPPRLAQEITREIERLGLVQQQIAAIEHERDESPTTCKETEKKRTQLLLLKGIGPTGSAVMAREVYYRQFSNRRQVAGFLGLATSPYDSGQTERSQGISRAGSGPVRATMIQMAWLWIKHQPKSAIAQWFVQRTEGQNGRIKRIMIVAVARKLAIALWRYLEQGLVPQGATLTR

SEQ ID NO: 220763 - protein, 344 aa, unidentified
MKITTIGLDLAKSIFQVHGIDATGQVVVRKSLRRAQMLPFFAKLPSCLVGIEACGTSHHWARELIKLGHEVRLMPPAYVKPYVKRGKSDAADAEAVCEAVTRPTMRFVPVKSPEQQAALSMHRTRDLLVKQRTQLVNMTRGLLAEFGIDIPKGLERALLMARRIVDGEAPDIPIEAAKIVGTLSQQVLDVHVRLRQIDRDLLVWQRGNDVARRLMTIPGIGPVGATALAASVTDPHQFRSGRQFAAWLGLTPLQKSSGGKERLGRITKMGDKYLRKLLIVGMTSLAGRAKYHPEAIDPRLANLLARKPMRLATVAMANKTARIIWAIMVRGETYRASHQPALAA

SEQ ID NO: 220764 - protein, 363 aa, unidentified
MSDGTLMTTSAAITILALDLGKFKSVACRYDPVTGEHAYETIATTPPAVHDMLIEASPAVLVIEACSVCGWISDLAESLSIKVRVANTMGEAWKWKRVKRKTDRDDALKLAKLAATDQLPVVHIPELSVRQHRSLIRYRHALIDRRTGIKNTIRSLLDAQGLSMPMRSRGWTIESINELKQLSRPLSECDARTLWRGQFDLELRLLEAVTTLIKEADKKLDQLASQDERVKRLKTIPQVGARLAELVVSTLDDAKRFKTARQVSAYAGLVPKQYQSGQMNRLGRITGQGPGLLRRVLVQVAWGLQRREETRGHAVFERLCHGQRTRRKQAAVALARKILIWCWAILRDGSTWGDTRDRRLAIT

SEQ ID NO: 220765 - protein, 338 aa, unidentified
MTIVTVGIDLAKNVFAVHGVDATGKPVLLKPSVPRAKLAALIASLPPCLIGMEACSGAHHWARLFATFGHTVRLMAPKFVAPYRLSGKRGKNDAADASAICEAVTRANMRFVPIKTLDQQGQLMVHRARQGFVEQRTATINRIRGLLSEFGVVLPLKAAVVRQQALQHLEDLPGWANTVVGDLLSEVSHFDERIAQYDHHIATLAKADPAARQLMQLPGVGPTTATALVSTIGHGHDFSNGRQLSAWLGLVPGQYSSGGKQRLGHITKAGDSYLRSLLVLGARAVLVAAKNKTDPISRWATSLAERRGYWRAIVAIAAKNARMCWAVLHRGDAFKLPV

SEQ ID NO: 220766 - protein, 387 aa, unidentified
MTQVDDLSRSVGAFDQNTSLTVVVEMSEASWLVMAMVPGVDRHPLKKLEPDPDALLRLVERWRSEAEKTGRTIERVALAYEAGRDGFWLARWLRVRGIEVHVIHSTSVAVSREHRRAKTDRLDTAMLMRVFLGWLRGERGHCGMVAIPTLEEEDAKRPSRERESLVGERTRIVNRMKSALARLGIRGFKPKLRKAPERLAALRTPEGGAIPANMLDEFRRDMARLAVVREQIEEIEQGRLERLEQAPAARPNAMVHLLARIIGVGIETADMLVREVLSRNLRDRRAVARYAGLTGSPDESGSMRREKGLARSGNARVRRGLIQLAWRFLMFQKDSALVRWYRSRTEGPKGARKTTMIVALARKLLIALWRMVTTGVVPEGVVLRPAA

SEQ ID NO: 220767 - protein, 366 aa, unidentified
MEEVITYVGIDAHKRELHVAMLIGTAATPVTWTVENEPKAIDRLHRKLEREAPGPVRVCYEAGPCGYALQRQLTKGRATCVVIAPALMPRKPGDRVKTDKRDARKLAELWRAGLLTAVRPPTPAEEAVRDLCRARDDGRDDVQRARHRLGKLLLRRGLHFAGRNWTKAHRQWITTLTWEHAAERAVVDDYLLAIDQVESRLVELDARLAETADTEPYREPVAWLRCFRGIDTLTAMLILAELHDFRRFPSPRALMAYLGLVPSEDSSGDRHRRGRITKTGNTLVRRVLIEASWHYQHRPGVGAGLAARRTGQPARVIAIADKAQQRLCRRFRRLTAKDKPTAKVVVAIARELTGFIWAALQPATTA

SEQ ID NO: 220768 - protein, 422 aa, unidentified
MLEEDPQVEEIVARVAALDIGKAEVVCCVRVPHEGKPGRRLQEVATYSTMTRSLLEMADHLRCLGVSRVVMEATSDYWKPVFYLLEAQGFDPWLVNAKDVKHLPGRPKTDKLDAVWLCKVAERQMIRPSFVPPPEIRRLRDVTRYRIDLVGVRTAEKQRVEKLLEDAQIKLSVVASDIFGVSGRQMMAALIGGQTNPTVLAELARGRMRAKIGALREAFTGHFTDHHRLLLGKMLARIDAVDADIAELEATIEEMVAPFVQALQRLDEIPGVGVTAAQVMIAEIGLDMARFPTAAHLSSWARFAPGVKESAGKKKGTGTTGHGNRYLARALGEAAVAAGKTDTFLGERYRRIARRRGKKRAIVAIGRSILVIIWHLLSDPEARFHDLGSDFYDTRINPDAKKRNHIRQLEALGYKVTLQPAA

SEQ ID NO: 220769 - protein, 453 aa, unidentified
MCLEDRPVLEPNAAGIDVGAREMFVAVPPGRDESPVRVFATFTEDLERLTDWLEQCGVTTVALESTGVYWIPLFEILEQRGIRPCLVNARYMKNVPGQRTDWHECQWLQFLHSVGLLRSAFRPGQDVCAVRTILRHRNELVAAASQHVQHMHKALTQMNLQIHHVISDITGLTGRAIVDAILAGQRDGAELAKLRDPHIKADTETIRKSLEGNWRPEHLFTLGQSRDLYRIYQQQIVNCDLEIEKMLHGFAPRIDPRERPLPPDRKRNRAGSQRRRKNGHPHPEFDLRTAAYKLFGVDVSQIPGLEENALPLFSEVGRDMSRWPSAAHFVSWLALCPDNDISGGKLLWRGARRVKNRAGHLFRLAAFSLHHSLTPLGNYLRRMKAKLGPQAATMATAHKIAVIFYTMVKNQVEYDETLWATRDAQREKRLEAKLKRQAKQLGYELVPIEPKAA

SEQ ID NO: 220770 - protein, 339 aa, unidentified
MKISTLGLDLAKNVFQIHGVTATGEVAIKRTLRRRQVLTFFQKLEACTVGIEACGMSHYWARELTKLGHDVRLMPPIYVRPYVKRGKTDAADAEAICEAVTRPTMRFVPIKSPEQQAVLSVHRARDLIIRQRTQIANMIRGLLAEFGVVVAKGIEKILAFARSVLADEELMLPDIARHVIGSLCLQLLDLNGRVLAFDKQIAKACRTDERTKLLQTIPGIGPVTASAIIATVGAPEQFGSGRDLAAWLGLTPLNRSSGGRERLGRISKMGDQYLRKLLVCGMTSRVRRAKARPEGVDPWLKSLLERKPVRLATVAMANKTARVIWAVLMRNEPYKPVAV

SEQ ID NO: 220771 - protein, 342 aa, unidentified
MEDTMIGVDLAKNVFQLHCATMLGHLKFRKKLTRTQFREFMSIQPSSVVVMEACGSASYWAREMIKLGHEVKLIAPQYVRPFVKRQKNDAADAEAIVVAAQRPEMRFVEPKSEDQQACAVLFRTRERLLHQRTELVNALRSVLYEYGHVFPKGIGHIKRIEAVLEAPNSDLPELVREECQDLIDQISEKTARIDANTKKAKNLSLATDTARRLQTMPGVGPQTALAISGFAPPMESFKRGRDFAAWLGLVPRQYTSGGKERLGRISKAGQTDIRSLLIIGAMSRLTCLARKKIVEGSWLARMLHRKPLMLVAIALANKMARAIWAMMTKKEDYRDPAQAVAA

SEQ ID NO: 220772 - protein, 337 aa, unidentified
MKTLFIGCDIAKKDFEATLRADDVEQSIGTFKTNPHGYGELRKAVDKFNKADYQIHLIAEPTGTYHLGFIAYAYEQEWEVSLPNPVVIRQWAKGQGVRIKTDKIDAHTLAAYGFKEQPAAENSLPTHVEELDLMLKRKDDIKKSLRQEKNRLESYVHRTTGSDATHQSILDAIAFYEAQLLEIQAAIKSYLKQHQDLAKQRTLLSAVPGMGEQGVLKILVFLYRWDARTASLGNANGLVAFAGLDPVLHSSSTSVYRRPTISKMGDSEIRRTLYMSAFGGMKAKSSPLVDFCQRLLERDKPNKVALVASARKILVWAFAVFRSGLPFDNAKAMPKSL

SEQ ID NO: 220773 - protein, 338 aa, unidentified
MNIVFLGIDLAKNVFQLCGLNQAGKPVYTKRTGRKELLQTLANIPACLIGIEASTGAFYWQREFEKLGHKVKVISPQYVKPFVRGQKNDGNDAQAIAVALMQPTMQFVPPKSPEQQDIQALHRARQRIVNHRTATVCQIRGLLLDRGIPIGSAVSRARRAIPLILEDAENGLSSRMRRTIAELYDLFNDPERRIHFFDKEIETVFRQSEACQRIAKVKGIGPETATAVVAAIGKGTEFKNGRHFAAWLGLVPRQHSSGDRQVLMNMTKKGDKHLRTLFIHGARAVVRVATNNNDGHMNQWVNQLKERRGFNKTTVAVANKNARIIWSMLRNETEYQVV

SEQ ID NO: 220774 - protein, 428 aa, unidentified
MHNRKVKRMKNWKDLTHYAGFDWAKDHHAVVIVNGEGCIVADFEFAHSLEGWKSFDEKTSAWPNLAVAIETSQGAAVDQLLQRDYTVFPVHPIAAQSYRERKAPSGTKTDHLDAWSLSDALRMDGQGWKVLQPLDPMTQQLRLLCRDEVSLIEQRTALVNQLQQALAEYYPAALEAFEDWTDAFTWEFVLAFPTPQALVNAGKRRWEKFLHTHKLWRPETVEKRLKLFAQADQFKASEPIVRAKSQLAVSLCKLLCTLAQQLKLYRKQIEALFRDHPDHDLFGSLPGAKKMLAPRLLGAVGSDPERYGSHEVLQSMAGTAPISYESGKISKVRLRWSCDKFMRHTVHLWADCFRKASAWGQTYYQKKRQQGMSHACALRCLGQRLLKILFRILNTKTPYNAELHALNQQKHGSWVLKLINLPAVKPSE

SEQ ID NO: 220775 - protein, 295 aa, unidentified
MSKLSKKVIGVDVGAKFLTVSFTDNVNQDQVFNIQNNQRSILSFLKKFPTEDYCLVIEATGNYSSRILHLSLDNGFESSLINCMSVKYFSRMKNIISKTDAEDAKVIRLYGEIFRPEVYIPKSIEIEHLDQEIKLLNDLEEEKRRYSVKLKSLRYNPQLNPNTEKHYEKRLKQLDKEIREVEMRLPQLQDEEFREIKGLIQSVSGIGEKTSLQLMTATSGFKNFDSSKSLVKYFGLAPRIYQSGKKSYSPGKCRTSKTHIRSLLYVCSWTAIKYNTQCTELYLRLLEKESLKNLH

SEQ ID NO: 220776 - protein, 343 aa, unidentified
MQVSTIGLDLAKNVFQAHGVSAEGKVVLKKQLRRGQVLSTFAKLPPCLVGMEACAGAHYWARELRKLGHDVRLMPARDVKAYVKRDKTDAADAAAICEAVSRPSMRFVALKTPEQQGRLMQHRVRDLLLRQRTQTINALRAHMAELGLVAATGRQGLGLLLAILADAKDERLPQDARASLKLLASQITALQAQIDTLDKRLHAQHRQCPASRRLETIPGIGVIGATALAATITDPKAFKSGRDLAAFIGLVPRNNSSGGKQRLGPISKQGDRYLRRILVVGAHSILKQARARPDKHPWLARLMARKPGKLAAVALANKTARIAWAVLARGESYRAPTAPAAAG

SEQ ID NO: 220777 - protein, 391 aa, unidentified
MIYVGIDVAKDKHDCFITNFDGEVLFKAFTITNNLDGFNELYQKIASVMDDVTKIKVGLEATGHYSYNLLGYLIDKGLPTYVINPLHTNLYRKSLSLRQTKTDKVDARTIASMLMSDVNLKSYSDTSYHNEELKSLTRYRFDKVKERAKLKTSVSRLVCILFPELEKLVPTLHIASVYAMLSEFPGAKQVANAHLTRFTNLLSEASKGRYGKETAIAFRDAARTSIGSNMPAKSLELKHTIKLIQELTSEIDEIEHEIKLIMDELNSPILSIPGINYRMGAMIIAEIGDFTRFDSPDKILAYAGFSPSTYQSGQLDGAYSHIEKRGSRYLRYALYNAAKYVCIWDPTFAEYLAKKRAEGKHYNVAISHAVKKLVRVIYHLEKTNQQYIKAA

SEQ ID NO: 220778 - protein, 322 aa, unidentified
MAMLSFGGIDVSKDRLDVMVLPGEQCSSVSNDVAGWDKLIEQLRGSSIAAIGIEASGGYERGVMRALLAADLPVRQVNPFKLRQFARASGVLAKNDPLDARMIASFVAIMPTRPAQRPAPAAERLTEMLAVRRQLSAEKVAAENASRLLEDAMLQRLSRRRIARLAADIDMLDERLVEVVATDDALVRRYRLLTSMPGVGAVLSCTLLALLPELGCMSRKQVAALVGVAPYAFESGTLKGRRCIWGGRTHVRQVLYMAAMSASNWNPAFKTFHDRLKAAGKLPKVAIVAVMRKMITTLNAMVRDDVMWADRLTGRHTVPTAR

SEQ ID NO: 220779 - protein, 290 aa, unidentified
MIIGCDFHPSWQQIAWLNSETGETGERKLVHASGDAKAFYEQLGAPAWIGMEATGNSQWFIELVEDWGHEIWIGDAAQIRASYVRKQKTDHRDAAHILKLVVEGRFPRLWTPDWEQRGLRQLVLHRHKLVRIRSRVKNELQHLALNKGVQRKHKLWSQAGQKMLRELPLKPWAACRREDLLGLLAMLNQQIGELDDAVQKAAEENPQAKLLMTQPGVGPNTALAYVLTIGDVSRFRRGKQIASYLGLIPREESSGGRQKLGAITKQGNPHAALAAGGSSASSGAARSRTS

SEQ ID NO: 220780 - protein, 394 aa, unidentified
MIYAGVDIAKTDHVIGAVDERGAEMCPPMPFKNTEAGLERAVAWLEGLAGSPSDVVVGMEATGHYWMACYSFLVARGYSVAVINPMQVKAVRKLKGLDKVKNDRVDAGLIAEALRIGQYDETRLATDEMASLRSLSRYLQSLRGMVAELKTQCICLMDAHFPEYAGIFSDMFGAGSRAVLSKSPLPFELARRRADSLARDIAEASRRGGKSSGYAAKIKAAAKSSIGVRLGQEAASFQVKSLIRQIEFADSECAGVEARLRSLLDEVEPLVLTIPGVSYATGAQIVSEIGDVSRFRNAPALVSYAGLNSSVSQSGQFDSGGGPITKHGSPYLRRALWLAANRARQYDPGLRAFYDRKRAEGKPHRVAVTAVARKLCHIVFAVMRDQVPYDPGRE

SEQ ID NO: 220781 - protein, 311 aa, unidentified
MTDDTIGVDISKATLDIHRLSDGKIMSFSNCPAGFRALAKFCAQTAVIRVVYEATGAYHSGLERALGVHLPLVKVNPLQARRFAQAQGMRAKTDAVDAKMLAVMGDAFALEPDEPATKIQHDLRELRAFRSGLIKDRTRIMSRLKTQTLSITCRQSKARLAHVDKQIAEIDAEVDRLINSNDTLANSMKILRSIPGIGAVCASTILIEMPEIGSMDRKQVACLTGVAPMTRQSGQWRGKSFIQGGRKVVRNALYMPALVAMRHNPDLKAKYQAMIKAGKPPKVAITVLMRKLIELANALIKANRNWVKKEA

SEQ ID NO: 220782 - protein, 367 aa, unidentified
MADVFTIPNNLDGFRFLLRRIRDCTHAQDKIKVGLEATGHYSCNLLGFLLDNGLPTYVLNPLRTNIYRKSLSLRKTKTDRVDARTIASMLLSDAGLKPYTDTAYHNEELKSLTRYRFDKVKERAKLKTSISRLVCILFPELEKLVPSLHIASVYALLEEFPGAKQIAAAHLTRLKTLLETASKGRYKRDMALEIRDAARNSIGSWMPAKSLELQHTIRLIRELDDEIAEIEEQIQAIIDELNSPITTIPGIGFRMAAMIFAEVGDFTRFDSPDKLLAYAGMSPSTYQSGQLKNCYPHMEKRGSRYLRYALYNATKYVCHWDPTFAAYLAKKRAEGKHYNVALSHAAKKLVRLIFAMEKSRQPYCPAA

SEQ ID NO: 220783 - protein, 354 aa, unidentified
MTVYIGVDLHVRTQTVCWMDTADGEIHHHTLDHARDDLRAFYAQFPAPAVVGVESSGYSLWFHQLIEQAGHRLLVGHAYTIRQFARRRQKNNRRDAELLLDLLRRDEFPIVHRPAPASQDTLALLRYRHRLVRIRTVVKNGLQAVALNHQLQLGFRLFTPRGQQRFAALPLGRAYALQRQQAQVLLATLQAQIAAVEEELQRRAEADPRVVRLRTHPGVGRLTALAVVHTLEPVTRFDRARRIAAYCGLDPQEYSSGDTMRFGHISKQGSRLLRYLLVEAACSAVRHEEDLQRFYRRLRARKKPHAVAAVAVARKLVLRLYRMLREGIDYEQFRSRGRDARRARECASPVTRPD

SEQ ID NO: 220784 - protein, 400 aa, unidentified
MLSIGIDVSKGKSIVCGMKPGGEIVYTPFEVQHTREGMLELVSLLRGSGEEVRAVLESTGSYHCPVVAALLENGIFVSVVNSLRMKRFCSQSIRKVKTDRIDAMQIALYGLAYWQELQPTRLPEDTYRELQLLARQYYQMTSLLIKAKVDFNAICDQVLPGMQELMNDHAGRHKLSDFVLRYRHTTHILEMGETRFRKDYCKWAEKKGYRNRERMAALIFATAQNGIPVLPNAPSTQIVITEAIRVLHTVEASRDAILTQMQALAKTLPEYSLVREMPCIGDTLAPRLIAEIGDVRRFHSKRALIAYAGIDAPPYQSGKFCANNRHISKRGNRYLRKTGYEVMQSYVMHKPANDPIFTFIEKKRGEGKCGKLAMVAGLNKFLRVYYGKVAELYRSLPAIE

SEQ ID NO: 220785 - protein, 391 aa, unidentified
MILAGIDIAKDKHDCFIMNSDGEILVKAFTFSNNLEGFNFLYEKIRSVSKPKDKIKVGLEATGHYSYNLLGFLLNKGLPIFVINPLHTNLFRKSLTLRKTKTDKVDSRTIAMMLMSDVALKPYSDTSYHNEELKSLSRYRFTKVQERSKLKTSVSRLVQILFPELEKIVCTIHMSSIYHLLEEYPGASYIASVHLTKLTNLLMEASHGRYNRDTAIKFREAARNSIGSILPAKSLELKHTIKLIRELTVEIDKIDAEIKKMMDSIASPITTIPGIGYSMGAMIISEIGDFSRFSSPDKILAYAGLSPSTYQSGQLNNCYSHMEKRGSRYLRYALFTVAQKVCIWDNTFAEYLSKKRAEGKHYYVAISHAVKKLVRVIFHLERTGQAYLKAA

SEQ ID NO: 220786 - protein, 362 aa, unidentified
MRIIGCDLHARQQTLAMLDTTTGEVVEVTLKHEGDNVREFYSSLPRPVRVGIEATGSMQWFLNLMEELGIECLVGHPAQIRAAEARKQKHDRRDADLILKLLAENRFPAIWLPSKELHDLRALLRHRHQWVRMRTRIQNALQSIALANGLRRGTALWSQEGQSRIASLPLAPHTAYRRSELQALYEKFEAEIEKLNQRVEEQACKRLGARLLMTHPGVGPITALATDVFLGDPARFADSKALASYVGMIPREYSSGGRQRLGGLSKQGNPLLRFLWGEAGAHAARKDPELQRFYRRKLVQKGLGKASVAVARKLGIRLWIMLRDQIEYNEFCRRGQKQQKSSDACAGMPETPNGANSHRSID

SEQ ID NO: 220787 - protein, 352 aa, unidentified
MTMLAEVVDVVIGVDTHKHTHTAAVVVAATGAAVDEATVDTDPDGYAALVEMADRHSGLRAWSIEGTGGYGAGLTRFLTERGELVIELDRPNRPARRNGAKSDPLDAVRAGREALAREHLAQPRAAGERAALAVRLAARRSAVDASTVAQRQLLSLIVAAPETIRARFRGLKTTNTVNAAARLRMSSTWDTETRTYAEVLRDLARRIQAMKTEADAHEKAILAIVRSWRPDLLELTGVGPIVAATVLCAWSHPGRCRNEAAFANLAGVAPIPASSGLTTRHRLNRCGDRQLNRAIHVIAMQRIHHDPATRAYVERRRTDLRNPKTDREIRRCLKRYIARQLYRQLEQPLDDL

SEQ ID NO: 220788 - protein, 402 aa, unidentified
MGACAGVDWAKDEHVVLVADERGEVLAERVFIHDEEGIAALCELLVGLAVDRVAVERPDGLLVERLLDAGLCVLALHPNQVKAARPRFRSQGKSDRFDAWVLCELARTDAHRFRALAPDSDATKAIRALTRAREDLVQARVALANQLRAELERFWPGAAAIFADVDSQIALCFLERYPAPRDARGLGERRLEAFLHRHGYCGRRSPEELIARLRRAPQGRAGELEAEARRGIVLALVATLKPLVARIAELEREIAHAVRSHPDGAIFLSLFRDPRSVITAAGLLAEIGDSRLRYPSAEALAADGGMSAVAVESGKRKHAAFRWACDKRLRGALATLANTSRHHNAWAGDLYASARARGHDHQRAIRTVGRAWSRVLWRMWQDRQPYDPARHRALQRKLAPEG

SEQ ID NO: 220789 - protein, 355 aa, unidentified
MTSSKYIGMDVHKESISIAVRNTAGKIVMESVIETKANMILEYIDGLRGEVHVTFEEGTWSAWLYDLLKPHVTRLVVCDPRRNALLKEGNQNDRVDAQKLAELLQNNQLRPVYHGDHGLRAVKELVRSYLTVTKDLSRVMTRVKAIYRSWGIPCSGTQIYSARHRAEWLEKIHEPGVRRRAEHYYRQLDALRSLRLEVRKDLLAESKKHKVWKRLRQIPCMGPIRAAVLLGIVQTAHRFRTNRQLWTYSGLGIEVHSSADHQVVKGQLERKKKPIEIRGLNRNCNHHLKNLFKSAAATASTKPGPFQEFYAALVAKGMRPEMARLTLARKIATIALIVWKKGVCFDAHHLKPQTA

SEQ ID NO: 220790 - protein, 444 aa, unidentified
MDIINSSAAGIDIGSKSHYVAVGQALEDVKEFGVYAEDLTDICLWLKSYDITSVAMESTGDYWQNLYTELIKHGFEVILVNGKFTKNAKGKKTDVKDCRWIQKLHALGLLTSSFLPDQTTETLRTYCRQRTNWIDAASSTSRKMQKYLKFLNFRLDVVVKDVCGLTGLKIIEDICKGNLDPLELAKHRHYNCRKSEEEIAKALQGNNREDFLFGLKQEFDAYKFYQRKITACDKQIDRLIKDELKKDPSKKKLKTTNKPYKRVNKNAPNIKNLNQIAFKYFNGVDLFAIEGLSHATILSIMSEIGPDGFKKFKTSKQFASWLRLAPNNKISGGKILSNRIPKGSNRLKIALRQAANAIGNLKDTHLSDFFKRVAYRKGRQSAVSATARKLAVIIWTMVTKKVPYSPPTQYLFLDQKRKLRMLNRIKKNIAKFDLNPEELRIVTN

SEQ ID NO: 220791 - protein, 377 aa, unidentified
MHSENIAAYIGLDVHKETLAVAIAAPERLGEVRYYGSINNEAQAVRRLLQKLQGLYGNILSCYEAGPCGFGLYHQLTAMNIKCQVIAPSRIPKSPTDRIKNDHRDAISLARLLRAGELTPVWIPDLTHEAMRDLIRARAAAKRDSRVARQRILSMLLRTDKRYAGKHWTGKHRTWLANQSFSQPSQQIAFQHYCQSLEQIEDRILQLDQEISRLLPEWSLCNLVCQLQALKGVGQLTAITLVAELGDFSRFSSPKQLMAFLGLVPGEYSSGNSIRPRGITKVGNSKLRRLLYEAAWSYRTPAKVGAWLIYYRPDSVTQYSKDIAWKAQQRLCSRYRSLTAKGKKSQVAITAVARELTGFMWDIALAAQSSFCQQKQN

SEQ ID NO: 220792 - protein, 355 aa, unidentified
MRFYTQQHPFYCGIDLHARTMHTCILDQQGAVVLDKNLPCKPKALLDAIAPFRKDGIVVGCECMFGWYWLADLCMEQQPSAIPFVLGHALYMKAIHGGKAKNDKIDANKIARLLRGGTFPLAYVYPKGMRETRDLLRRRLYLVHKRSELLTHLQILNHQYNLPPFEKKLSFAANRSELDIANRFTDLSVQKNAQLDLALIDKLDEIIGQTELYLTRTAKVDDVQTYHRLLSIPGVGKILALVLLYELHEVVRFEHVGQFLSYARLVRCDHESAGKKLGSGCKKIGNAHLRWAFGEAACLFLRCSERARAWKQKQEKKRGPAKALAILAAKLGRAVFHMLRKKEAFDEERFWSGVA

SEQ ID NO: 220793 - protein, 347 aa, unidentified
MTIVEAAPGVTGGVDTHLDKHVAAALDPLGRLVGTESFGADAAGYKALLGWLEAFGEVTKVGVEGTGSYGVGLARFLRRKGIEVVEVNRPNRQARRNHGKSDPLDAVEAARDALSGRASGAGKSKDGPVEAIRALVVAKRSARQARIKAIVQMRHLGISAPEQLHCRVKGLSVTALVAECTRLRPARSSDPVTAATKAALSSLAHRVQALDDEIAELDEKIESLVAATAPELLALFGVGPDTAAAILVAAGDNPQRLHSEAAWAHLCGVSPVPADSGKSSGHHRRHNGGDRQANSALWRIVMVRIAHDPETRLYFERRVKEGRTKRDVIRILKRYVAREVYRYLPRG

SEQ ID NO: 220794 - protein, 416 aa, unidentified
MQVIYQRCAGLDVHKKTVTACRRNGKEQEVKTFGTTTPDLLELVDWLLEWECTHVAMESTGDYWKPVYNLLEGNLEVLLVNAQHVKYVPGRKTDVKDAEWLAELLQHGLLKASFIPPAPQRVLRDLTRYRSNLVQERASVVNRVQKLLESANIKLSSVATDILGVSGRAMLDAIVTGHTAPETMAQLAKGRLRNKIPQLEKALIGIVLDHHRFLLAKQLAHIDFLDEQIASISAEIDGQIHKMGQSQKPKALNTEQAVELLDTIPGVDKTTAEVIVAELGTDMSRFRTSSHAASWAGLSPGNHQSGGKHYSGRTRKGNRALRSGLVQAAWAASRTRDTYLSAQYRRLAGRRGNKRAIVAVAHSILVIAYHILDRQQPYQELGANYFDERRKESVLHRLMKRINNLGYQVSLEPTVA

SEQ ID NO: 220795 - protein, 385 aa, unidentified
MNILAIDLGKFNSMCCFYDTDTQKYRFQAVATTRPYLTAVFKNHKIDLVVMEACGPSGWISDLCQTIGLKTLVCSTNDEAWRWKNVKRKTDKDDALKLARMAMMRQLTSVHMPKHQVREHRSLIKYRKTLVGRVNRTKNLIRGLLANRGIEIDKGQRAWYTGRQLINSYRRPLAECSPTELWRGQLDVELTHLDSLAQQLADVERRLEGIAKDDQCIRRVQTIPGVGRRTAEAIVTALDDVDRFDNARQVSAYIGLVPRQYQSGETDRNGRITKRGSRLLRTLLLECAWMSLRYNEWSRTTYDRIHGGQQTRKKKAAIALARKIAVVAWSMLKHKTDWDPQRAGIAAEETVEEDSPSNTDQGRCDRGSHTDASSIGQVAENSMTS

SEQ ID NO: 220796 - protein, 344 aa, unidentified
MIWVGLDVHKCFSRMGCFDPATGEVHDLGSVSNDASALEEALEELPSPKTVVLEAGRSSYHMAGLLESMAEEVWIVDPGEVRRLQHTISKTDRRDAAALAWWAAKGVITPQWRPDAELLDLRELTRGKTALTRMSTRLRTMIRMLLARHGHECPHRDLMSERGQLWLEEVELEGHAGKMLVGLREILVVVQAKVDDFERTVEQTSKEHPMARRLRTIPGIGPFLSLALAVEIGDINRFPGPTQLRGYSGLVPAVYQSGDKDARGPLTKAGNKWLRYAAVLAAQRIGQMREPDPRLKRIFLSVAFRHGRNPGKIAVARRLLDLIYYMLKKGQDYRASKPRAVTTA

SEQ ID NO: 220797 - protein, 312 aa, unidentified
MKNDTIGVDVSKDHLDAHRLADGATRRFANDKRGQGALIQWLAETPANRVVFEPTGPYHRAIERALGASGVPFVKVNPRQARRFAEATGKLAKTDRLDAAILARMGALLELQARPAPSEILLELKELYVAREALVKDRTAAKNRGKVLTLPLLKRQNAQRLEQINRQIATVEAAILQIVEADPGLSDRFAILTSIPGVSNITAFALLIEMPELGALEPGQAASLVGLAPIARQSGRWTGRAFIRGGRAGLRQALYMPALVAARFNPDLKAKYLKLVDAGKPAKVALTAIMRKLVVLANALLKANRRSQPKHP

SEQ ID NO: 220798 - protein, 374 aa, unidentified
MAKRAQGSGTSSGREGPSVDTLGPTKATPSRRKKEAPVEREYVGIDLHRRRSVIVRKNAAGELLDKVRIDNSPMELARAVAAAGPNPRVVLEATFGWYWAADVLEELGCEVHLAHPLGNNWGHRRVKNDERDANDLVDLLRLGRLAEAWIAPPEIREIREVVRYRLKLVRLRSGLKAQVHAVMGKHGVLPSRWDMFGPGGNAQLDGLELPEGYMARLDSLRDVIDVYDREINDLDRRIPKMLANHQGYRAIQAIHGVGPILAAVFVAEIGDVTRFPSPAHLASWAGMTPMHHESDNKVRRGRISKQGSRHVRWAAVEAVSRNHGGDKIKADYRRIAERRGRNIGRVAAARRVLTLVFYGLRDGEIRCLTATDQG

SEQ ID NO: 220799 - protein, 355 aa, unidentified
MTSSKYIGMDVHKESISIAVRNAAGKVVMECVIETKASTILQFFDGLCGELHVTFEEGTWAAWLFDLLKPHVTKLVVCDPRRNALLQDGNQNDRVDARKLSDLLYLNKLNAVYHGDHGLRTLKELGRSYLTITRDQSRVMSRIKAIYRSWAIPCSGKQVYGLRHRVEWLAKIPEPGVLRRAELYYQQLDALRTLRQQVRKDLLTESKKHKVWKRLCAIPSMGPIRAAELLGILQTPHRFRTKRQLWTYCGLGVVTSSSADHEVANGQLRRKKKHVQIRGLNENCNHDLKNLFKGAAVVASIKPGPFAEFYAALVAKGMRPEMARLTLARKIATIVLIIWKRGVCFDAQYLKPQTA

SEQ ID NO: 220800 - protein, 332 aa, unidentified
MSIKYIGMDVHKEAISIAVMNGDGKVVMESIIETKASTILQFIQGLRGDLHVTFEEGTWAAWLYDLLRPHVTELVVCDPRRNALMKEGNKSDKIDARKLADLLRGGYLRSVYHGENGLRTLKELARSYLTISKDLTRVMNRVKALYRSWGIACGGQQVYAPRHRAEWLSKIGEAGVRRRAEFFYQQLDALRGLRQAVRRDLLAESRKHSATKLLRQIPLIGPIRAALLIALIQTPHRFRTKRQLWTYSGLAIETRDSAQHRFVGGQLQRSKKPQQLRGLNRNHNHDMKAIFKSAATMASSREGVFHDFYQGLLTKGMEPAMARASPWRERLR

SEQ ID NO: 220801 - protein, 416 aa, unidentified
MQVLYSCCCGLDIHKKFVVACVLRTAPDGNVQKETRTFSTMTSELLALGDWLRALGCTHVAMESTSSYWRPVYNLLEGHFELLVVNAYHIKTVPGRKTDVKDAEWIADLLRHGLLRGSFIPAPEQRQLRDLTRYRTHLVEERARLTNRLQAVLEDANIKLASVVTDVRGVSARAILQALVAGETDPALLADLARGRLRTKRDQLAQAVVGRFAAHHAFMIAEQLSHLDYLDEAMERVSSEIEQRLEEEWEAVELLDSVPGISQRAAQIVVAELGVDLRRFPSAKHLASWAGMCPGNKASGGKRLSGKTRKGNVWLRQVLIEIAHVASKTKDTYLAAQYRRIAARRGKKRALVALGHTILVIIYHILMQRKPYQELGPTYFDQRERQRVEQRLVRRLERLGYNVSLKPADPIPQLAA

SEQ ID NO: 220802 - protein, 361 aa, unidentified
MKLDAALDTSATTTAICIVNSRDGAAVLEATVPTDPAAIFRVLEPYLPRLHLVGHEATGWSAWLHRELEARGVPMVLLETHHAARMLEAQRNKTDKNDARGLAQLVRSGWFKPVHAKSEQANRLKLLLAHRRTLKRKLMDIENEIRQSLKMFGLMAGPRVQRSTFPSRIRALVAGDALLEGSTECMLRCWTVLWDEYRKLHALLVQIAGRDELLRRLCGIPGVGPVTAVTFKAAIDDPVRFAKSKTVGAHFGLTPKRLQSGTSIDIDGHISRRGDGEVRTALYEAASAMMTRSQKHCTLKAWGMRLAAKRGHKRAVVAVARKLAVIMHRMWIDGSSFRFTADSREGKDASNGNATDQQCAA

SEQ ID NO: 220803 - protein, 352 aa, unidentified
MVSVGVDIHKASGFAVVKDDGGRVVASFTFKNDKCGIGEFVERLQGFRDVRVAVESSGNFWVKLYEALEAKGFRVVLSNPARTKAIAEAKIRSDRLDASTLADLLRAGLVAESYVPPKHVRDVRALLRYRVSLVRERTRVKNRVHALLDKHEVSVGFTDLFGARGRSWLRSLKLPGNDGLILKLALDEVDRLDGLIDEVSRVIAGEAVEDPRVELLLGYKGIDYYTAMVVLYEVGDINRFCSARKFVGWVGLCPSVHQSGEHCRRGGITKQGNKWVRWALVQAAHQAARHDPKLRCFFERVAARRGVQKAIIAVARKLAVSIYYVLKRNEPYHGEDAGLRRRKVNRLRRMVS

SEQ ID NO: 220804 - protein, 349 aa, unidentified
MDRTTYGLDIAKNVMQLHWVEAETGEIGRKKLARAKLVAYFAQLQPVRIVMEACGSAHHWARVLGGLGHQVELLPAAQVRPFVRSNKDDAADARAIWLAAQQGDIRRVPQKSVQQQAVLALHRTRSHWVSVRTVTVNSLRGLLYELGVVLRGGRQAGLKALAEQRAAIDEQLAQPMRTLVDGQLGTLEQIGQRIDQLEREIAALNKQLKGAPELDQVPGIGVLGCSALAATLGDAKAWRSGREFSASLGLVPAHAGTGGKVRVGHLSKRGDPYLRTLLIHGARSVIEHAKEKPKWLQELLARRPKNVAVVALANKMARTAWAIVAHGRTYQREWKSSKPGSGAAHAVAA

SEQ ID NO: 220805 - protein, 297 aa, unidentified
MNSIVYVGMDVHKEQYTICCYSYETDKVEYKQTIPSDYKLVLKYIDQVRSRYDGEVTFVCGYEAGCLGYSLYHQLKEHAVDCKILAPSTMAVTNTHHVKTDKKDAANIARCMAFHTYSEVYVPDNDDNDVKEYIRMRDDQKLYLKNVKQQILAFVLRQGKHFECGKTYWTIAHLKWLKTLELSALQRETLDEYLLTYEYLTEKIGRFDERIEELASAERYKEKVKHMSCLIGIKTHTAFSMIVEVGDFERFEKALKFASFLGLVPSEDSSDARVNRCQEWMEWKRQGFFVRKMKEWY

SEQ ID NO: 220806 - protein, 334 aa, unidentified
MNDYIGIDISKSSLQVYIPKGNIDLEIDNTKQGLKKLTAKLKKLYGNTTSSLVWIYEPTGSYWTTIKKYCHDNNISCFIVKPSQSAAFAKTTKNRNKTDIVDARMLYRMHTIANKENISIPTHDVAQIQLQNHIRYYKSLVRERVVKTNQLEASLAREDEVFIVRKLRSKIKALKKEEKEIVEKMLGLIALVPKYKKQLESITSFKGVGNLSGIVLLEFFMRYKDASAKEITALAGLDPIEISSGSSIHKKSRISKQGSKLIRNTLFMGTLISIQYNAEMRNFFDRLKTNGKHTTSAQIAVMRKIVTITYSLYKTNTLYDETRYEKWNNLQKPS

SEQ ID NO: 220807 - protein, 349 aa, unidentified
MKVLKQVLGVDVAQNELVVTLGRINEDLSKELYSYRVFRNKETGFVALLKWLKKETQENVSVQLVMEATGVYHQRFAFFLTENGVDLSIVLPNKISNYIRTLETKTITDKTCSEAIAQFGLERKLESWKRPNQLYKTLQQLTRERDQIVAERVVIKNQLHAENTEYMPNTNSIKRLETMLKLMNKQELEIKTDIQKCIDKDNSVKKTIENLQTIPGIGQLTAVTILAETNGFELIRNKKQLTSYAGFDVKEKQSGTSVKGKPKISKRGNKHLRKCLHLPSLSAVKRSEVHKDLYVRIVSKSGVKMKALIAVQRKMLELTYVIFKNNTVFEQDYEAKKRVLLIKEDTLTS

SEQ ID NO: 220808 - protein, 402 aa, unidentified
MKKIVIGVDPHKLSATIEVVDQRENRLGSGRFTTDKAGFAAMRKYVHQWPEREWAVEGSLGVGRPLAQRLLEAGERVVDVPAKLAARARLLDTGHGRKTDAHDAHSVAVAAVRAKNLRVLAPDGQLEALRLLVDHRDQLANQRVATVNRLQRMLAELTPGQAKKDITALQAKAMLASVRPRDLAGKTRRRIAVDELATLMAIEKKVKALTVEIKGIVKERGSNLMDLCGVGPVVAARILADVGDVARFADRNRFASWTGTAPLDASSGEQTRHRLSRAGNRRMNRMLHIAATTQIRLDTAGRAYYRRKLADGKTRMEAMRCLKRRISDAVYRQLIADAHANNQGVGTGPGGHCGATQESSAVDLPPHIDTSDQPLPGPANPTLQPSPRPRKPMARRPLKRAG

SEQ ID NO: 220809 - protein, 385 aa, unidentified
MRPAVAMLDIIPRDYDIFGGLDVDKKSMAVTFRDHGTMRKSLKLPYSATQLLNYTRKQFPGQRVAFVYEAGPTGFGLYDELTAASHPCLVVAPSMVPTAPGQRVKTNRLDSNKLSEGLRGGQLRSIHVPTESYRELRHLVQLRDTQVAQLTASKCRIKSLLLLVGIPFPAANGKWSGPVLRELEAVPCSPAVRFKLDMLIDALQFHFQSAAVVQKEIRRLCQHDPELNRCLGFLCSLPGIGAITAAHALARLGDWRQIKNVRSIAGFLGLVSSEHSTGEQENRGPITRQGDSRLRNKLIQCAWVAIRKDPELRAFYRSVYERQPRKVAARKAIVAVARKMTTRMYAVLKEQRPFVIRVDNSIAPLTAEETAGPRERLDAAQNEQQ

SEQ ID NO: 220810 - protein, 379 aa, unidentified
MKKELYLGLDVHQEVIITAVAEAGHRGEVRETGAISNDLQAVEKWIGRLRKAHGKEVIFCACYEAGPCGFGLARRLRQLGVQCEVVAPSLTPRRPGDRVKTDKRDARKLARLLRAGELTAVYLPEPTDEAIRDLCRSRTDAVDDQRRSRQRLKGFLLRHGYRYQGKNSWSAAHERYLRELVLPHPAMKVILEEYLQAISAAGERIERCEAAMRDLLEKWRLAPAVRALQAMKGFRVIAAMILVSELGEVHRFAHPRQLMAYLGLVPTENTSSDRRRQGHITKCGNSHLRWLLVECAQHYARPPKVSKELSRRQETQPREVRAISWRAQNRLHLRYTRLLARRLQRNKAIVAIARELCGFIWELLRTQPCYHQAQSPPAL

SEQ ID NO: 220811 - protein, 354 aa, unidentified
MPEYVALDVHKRYSVLVHQKGATGKIKEMRLAHDRGVFVHALEGIRPGTAVALEATGSWYWVADEVEQAGLVPKLVHARKAKLMLGAINKTDRLDALGLLRLQKTGTLPTVWIPPGELRDQRDLPRVRAFLGKERTRLKNRIHAQLTKYGLGVSPYSDAFGVRGREELRRRIAQLPKHTRFVTEVLVEQLEVVQAQIERLEERIHREIAVSEEVRLLMTLPGVGRILGVVMALEIGEVRRFCGPEKLAAYAGVTPRVAASGGKVRYGRMRSDVNQYLKWAFVEAANVVALHARRRKVRHVDRLYLRVRTRRNHYKAVGAVARHLAEAAYYVLKRREPYREPRGSLSRSASAVPN

SEQ ID NO: 220812 - protein, 414 aa, unidentified
MAEQTIAWFVGVDWGSEEHQACLLDTHGTIVGERKCSHSAVGLAELGDWILSIAGAAEAVAVAIEVPHGPVVDALFDRGFLVYAINPKQLDRLRDRFSVAGAKDDRRDAYVSADGLRTDRHLFRRLQVADPRLIELRAWSRLAEELQEERVRLSNRVHQQLWRYYPQMLRLTDDLAATWFLELWEKAPTPAKTEGLPKSTVERLLKQHRIRRVDAEAILRTLREPAIKVADGVTEAASAHMRSLVARLHLVNRELKHAERKLDELCAGIGETEPATADCVAQRDVAILKSLPGIGRINLATLLAEASGPLSRRDYQALRTLSGVAPVTKRSGKSHIVIMRYAAHVRLRNAVYHWARVATQHDPKSRNRYAALRRRGHSHGRAIRGVADRLLALACILLQRQMPFDPHFGQAATP

SEQ ID NO: 220813 - protein, 405 aa, unidentified
MFDTEDVGVFLGLDVGKSAHHGHGLTPAGKKVFDKPLPNSEPKLRAVFDKPAAKFGTVLVVVDQPASIGALPLTVARDADCQVAYLPGLAMRRIADLYPGEAKTDAKDAAVIADAARTMPHTLRSLEPTDEITAELTVLVGFDRDLAAEATRTSNRIRGLLTQFHPSLEGVLGPRLDHQAVTWLLERHGSPAPLRKAGRRRLVELLRPKAPRMAQRLLDAVFGALDEQTVVVPGTGTLDIVIPTLAASLATVHTQCRALEAQINTLLEAHPLSPVLTSLPGVGVRTAAVLLVTVGDGTSFPTAAHLASYAGLAPTTKSSGTSIHGEHAPRGGNRQLKRAMFLSAFACMNADPTSRTYYDRQRARGKTRTQALLRLARQRISVLFAMLRDGTFYEPRVPKDIELAA

SEQ ID NO: 220814 - protein, 370 aa, unidentified
MTSIIYVGMDVHTTNYTLCCYSVSDDRTFAIAQVEPDYHEILKYLNRVEKQREEKCRFVCGYEAGCLGYSLYHQLHSHEIDCVILAPSTMMTAPGKRVKTDRKDAERISKCLAFHTYSPVHIPTEMDDAVKEYIRMRDDGNMALIRVKQQIIAFCTRHGKPFDGKSYWTKKHVDWLCEMDFDSAILKEALQEYMILYFQLREKVEMYDVRIEKLSQMDTYLEPVQRLGCLRGIAAHTALSLCVEVGDFRRFATAQQFASYIGLVPGECSSGDKQQYTGITKAGNSHLRKLLVEAAQVFSRSATKSGKSAALKERQAKCDSVIVAYADKANARLKKKYFRIALKSKANIAKAAVARELACFVWGLMTEHVA

SEQ ID NO: 220815 - protein, 343 aa, unidentified
MKLIRVGVDLAKNVFQAHGVDRKEKAVWRRRLARENWVKVLLETVEPGCEIGMESCGGAHHWARKLQQKGFTVKLIAPQFVKPYVKSNKNDANDAEAICEAMSRPGMRFVAVKSVEQQDIQAVHRIRSGLIEQRTVKANQIRGLVAEYGLIAPKELSHLRVALPLWLDDAQNGLTDRFRRLLNALWGDLLALDARAGELDREIELIAQSNPIAKRLQQLRGVGPITATALVAAVGDGAQFTNGRQMSAAFGLTPRQHSSGGKERLLGISKRGDAYLRTLLIHGARSVIRTAHGKTDRLSQWVTRLAERRHPNVAAAALANKTTRMAWAMLKNGTDYEPDRVAA

SEQ ID NO: 220816 - protein, 352 aa, unidentified
MAKLAELVDHVIGVDPDRDRVTAAVVCAKTQGELASRTFATTARGYGQALRWAKEHTADGRRAWAIESTGSYGAGLAASLGEKSEFVIEFDHPSTRAAKDGAKSDPLDAARAARETLGRKTWSTPRSRGTREGLRTLIVARDSAKLARVAAINILKALVVTAPVDVREDLRGLSLMQLVSRCQRLRPDTATDAERAATKLALRSTANRVRQLTDECRDLEAAMLPLVRSMAPALLEEPGVGVLVAAQILISWSHAGRCRDEAAFARLGGVAPLEATSGQTQTRHRLSRGGDRQLNRALHTAVLTRVKHHPPTKAYLARRIAEGKTKREAMRCLKRYYARHLFRLLEATPMTT

SEQ ID NO: 220817 - protein, 348 aa, unidentified
MNEITMIGVDLAKDVFQVHGVDQDHRPVLRRQLKRAQVLKFFAKLPPCTVVMEACGTAHYWARAIGALGHEARLVPPAYARPFAKRGKSDAIDAEAVCEAGGRPTMRFVPVKNLEAQALATLHRTRALLDKQRTMLVNALRAHLAEFGFVAGKGIHKVPDLAQLVEEASAERLPEIARGVLRGLLHMIAQVNAQLGVLEKGLRTFHRGNAASQRLETAPGIGLITATALTALTPDAATFKNGRHFAAWLGITPRQDSTGGKTRLLGISKAGDGYLRRLLVLGATSLMRSLEGKTTRLALWVQKLLTRRPKKVVIVALANKLARIAWAIMAKGETYRAGMIEAQAEAAA

SEQ ID NO: 220818 - protein, 339 aa, unidentified
MKYTPVGVDIAKHLIQVHFIDEHTGEVIDKQLRRQDFLMFFCNREPCLIGMEACGGSQHWARELTKQGHKVRLLQARFVKAFVMGNKNDVMDARAIWMAVQQPGKEIAVKTEEQQSVLVLHRSRRQLVKFRTMQINSLHGTLLEFGETIHKGRAAMEREFPEALERMKERLPPYLITVLENQYNRLNELDSLIEDIEKQLTSVAKQNETCKRLLDIPGVGPLIATAAVATMGEASAFKSGREFAAYVGLVPKQTGSGGKIRLLGISKRGDTYLRALFIHGARAAALLTKEPGPWITELKKRRPASVAIVAMANKLARTVWAIAAHGSKYDKNHVSIRPY

SEQ ID NO: 220819 - protein, 360 aa, unidentified
MMDGREATDRGVVGGVDTHKDLHVAAVVDEHDRVLGSACFAATRHGYKQMLAWMRSFGQLRRVGIEATGTYGAGLLRYMQSGGVKVLEVTAPDRHDRRRRGKDDDLDAENAAHAAFAGMRTVTPKSRDGMIESLRVLKACRKTAVAARRVALQMIHNTIVCAPDELREALRKLTRMQLVRTLAAWRPDLSDYRSVVSAYRIALKSLGRRYLELHDEIADLDAMIGVIVDELAPALVARSSIGRESAAQLLLTAGDNPERLHSEASFAALCGVSPVPASSGKVARHRLNRGGDRAANSALHIIAIGRLRTDQRTRAYVDRRIAEGHSKLEAIRCLKRYIAREVFTLISQRQRTIRQAQIAA

SEQ ID NO: 220820 - protein, 455 aa, unidentified
MIDTGDIDVFLGLNVGKGEHHATVVTPAGKKAFDKRLPNTEPKLRELFAKLQAKHGTVLVVVDQPASIGALPLAVARNMGCPVAYLPGLTMRRIADLYPGEAKTDARDAFIIADAARAMPHTLRAIDGEDETIAELEMIVGFDDDLAGEATRVANRLHGLLTQIHPSLERVLGPRLQHPAVLALLERFGSPAQMRKAGRRRLVTLLLRPKAPRMAERLVEEIFAALDEQTVTVPGTEAAALIVPSLAVSLAAVLDQRKLLAGRIEELLEDHPLSKVLTSMPGIGVRTGARILIEVGDGSTFPTAGHLAAYAGLAPATRGSGSSIRGEQPSRRGNKRSNGPSSSPRSPLWGTRHRGPTTTRRSPRASTTPRPCSASPAAGPTSCSRCSATEPRASASTSSSARRRSGGPAPSWPAATRGRSTSDVSPPLMPAPTEGIRGSGTRGRPPAAPGPPVAR

SEQ ID NO: 220821 - protein, 326 aa, unidentified
MKAILGIDVSKAELDVALSIEAGGYIQAVFENNRKGYQALSQWLDSQRVKELHACLEATGRYGEGVAGYLHEQGYVVSLVNPSRIHAYGQSKLRRNKNDRLDACLIADFCATQQPEPWTPPSQAQRTLQELSRESTTLKEDRQRKRNKLQSGLASLQTKQSLERQIEFIDQEIERLEQAAAQVTDDDPQLHEDIELLTSIPGISTTTAVRFLAEVDVAQFQQASQVAAYAGLVPREHQSGSSIHKKARLSKVGNRHLRTAFYMPALAAYRYNPIIQALVERLNLRGKEKMVIVAAVMRKLLHLAFGVLKTRKPFDPLYLQNMPVGD

SEQ ID NO: 220822 - protein, 367 aa, unidentified
MSIKKSASRDLTFVGLDVHKDSITSAVLEPGLEVPIVDRFFHDEASIRRFVANFENRAQLRTCYEAGPTGYELARLVHRLGVACEVIAPSLIPVAPGAKVKTDSRDARRLAHLYRAGELVAVHIPTPQEEAIRDLARQRADLVLDRTRARHRLSKFLLRHGEVFRSANQWTVAHDIWLRQRSFSDPALALTFSHYRAVLDSMEAHLRAVEDDLVPYFCDGPFAEAVGRLSAYRGVTEMGALVLSAEVCDWRRFPRATTLMGFCGLVPSEYSSGERTTRGRITKAGNTHLRVQLVESAWAYQHRPAVGPVMKKRQARCSEETVARAWRAQLHLCGKFRRLAARKTSTKTVATAIARELVGFLWGEMAA

SEQ ID NO: 220823 - protein, 343 aa, unidentified
MKYVGVDLHKKVISLCVVMQKAGQRVVVKRETLRCDEPQRIQSWFRRLGAFQVTVEATSSYEWFVQLVEPLADRIILAHPKKLRVIAESTRKTDKLDAQVLAEFLSLDMIPAAHRPSARLREHRALVRQRQYIQRRITSAKNRLRHILSHYNADVKYLFSEKGQAYLKELRLSAADRFVVRQLQASLDRWRYQLLEMQAELRKFAKKAPEAEREARQVLESMPCVGPVTIEVVLSELGDVRRFRSQKQVAAYAGLAPGIRESASRTKQLGITKEGSGLLRWVMIQTAWRLVGKTRRWGLAYERLKARTGAKKAIVAIARRLLGVMVAMLTSGRRYCLASEARA

SEQ ID NO: 220824 - protein, 426 aa, unidentified
MASLNKINPNSAGIDIGSSKIFIAIEDCEVKSFNTFTDDYLKAIVYLKEHNVTSVAMEATGVYWIALFEMLEASEIEVCLVNGRDVKNVPERKSDVADCQWIQQLHSYGLLRPCFIPDEAIRQLRTYVRLRNDHISMASQHIQHMQKALDLMNIKLHNVISQIHGKSGMRVLNAIIKGECNPEALAALCEDSILKKKRAEVIASLKGNFRAEHIFALEQAVAAYQFYQQQILKCDKQIEALLEQFTEGKEVPPNIRKPKPIRHNPPKVKELHSKLMVITQGKDATTITGMNDKTLLEVIAATGLDLEKTWRTKKHFTSWMALCPNMHRSGKSNKKRKVKKHSTAGQIFLEAAMSIANSKYSALSSFYKRLQAKKGRRVALKATARKIAERYYDLMTKGIEYVEQGINLYEQKFKEQQLKRLYSVWS

SEQ ID NO: 220825 - protein, 477 aa, unidentified
MAIPYPSRLTRKQRRELTRRLRSADPGLDVIHPNAAGIDVGNSAHYVAVRPDRDPDPVRRFECFTADLHQLADWLQHCGVTTVALQSTGVYWLPLYDILDARGLEVYLVNARHTKNLPGRKSDVQESQWLLKLHTYGLLRNSFYPSAEIRVVRTYWRQRADHVRAVSTCIQRMQKVLTQMNIQLANVISDLSGWTGQRIVRAILAGERDPQALAALSHPGIHASRDTIAKSLEGTWRPDLVFVLQQEVTMYDAYLQRIEECDQALAQHLKSLVDKAANTTDTTGAPSAAPRPARPRMKRRRKAGSHMPQFDLGRELHRISGVDLTRLEGIDVSVAQTVISEVGLDMSRWEDEHHFASWLGLCPDNRITGGRVIRRGTRHVINRAATALRLAATTLLRSQSYLGAQFRRFRGKLGAPKAITAMAHKLAVLVYRMLRWGHEYVDKGMQYYEERHRQQQIHLLKKRAAKLGFLLVEPQIS

SEQ ID NO: 220826 - protein, 410 aa, unidentified
MDAIVEKCCGLDVHQATVVACLLTGPSDQKPRKQVRSFGTTTVQLLELRDWLVAQGCTVAAMESTGVYWMPVYEVLEGHMQVIVGNAQHIKAVPGRKTDVKDSEWIGDLVRHGLIRPSFVPPPEFRQLRAMLRYRRKLVQSRSAERNRTLKVLEQCNLKLSSVASDVFGASGLAMLKALLQGQLNPQQMAQLARGKLRRKLQELADALTGLLREPYRFLLQLQLQRLERVNQDLDQLDKELKPRLAPYQEQLDRLCQIPGIDQNTAAVIIAELGVDMSVFPTAEHVAAWAGLCPGNNESAGRSKRAGTRKGNVHLKTALVTAAVCAAKKKGSYLRGKFFRLAVRMKPIQAHMAVAHKILISAYHMLKGKQDYKDLGEGYLDRRKQKQAASHLVRRLEQLGYQVQLAPKTA

SEQ ID NO: 220827 - protein, 317 aa, unidentified
MAHIGIDVGKSELHVAIDGQAEVRAFDNTAAGHEALIAWLQPLAIEHVLLEASGGYERQPLAALVSAGFTTSLFNGRQMRQLAQGLGHLEKTDRVDARMLARAAAMLEPRPYRLPGPQQARLADLVLRRRQLTDMRTMERARLQQVRLPSIRRSQVRIVKMLRTEIAKVETEIEATVRSDATLLEASIPLREVRGIGAVTAATLLALLPELGQLSARAIAKLVGVAPLSDDSGQRHAPRHIRGGRAPVRTALYMASLTAVRHDPSLRAVYARLRSRGKQAKVALVACMRKLLVRLNAILRDHYAKAVRTTSTEPVMA

SEQ ID NO: 220828 - protein, 412 aa, unidentified
MVYDCFIGMDVGKYFHHACVLDPQGRQVLSKRINQHEGSLRKLFDTYLADNASVLVVVDQPNNIGRLTVTVAQAIGADVHYLPGLAMRQLSRIHVGNSKTDVRDAYVIAHAGLNLPDALRSVDRVEEVFLQLKVLNGIDEDLARAYTRLINQMRSALVGTHPAFEHVLHGQMIHRKWILHLLAKYGGPTKIRRIGKARLAAFARGHRARNPEPVIDAMLAAIEGQSVTIAGAEYAELGIAMSAKDALAKLEHRKEIEAQVLELIQDIPQTEILLSMPGIGPRSAAQILMTVGDMSDFPNAAHLASYAGLSPRTNQSATSIMSNSPNRAGNKKLKNALWQSSCASIRFHERSRQFYERKRKEGKRHNAAVVALARRRLNVLFAMMRSEELYRDTPPSAQTSLPLEKVISLKLK

SEQ ID NO: 220829 - protein, 410 aa, unidentified
MDVFLERCAGLDVHQASVVCCVLIGAPGRKPQKLLRSFGTTTRDLKTLQAWLAEHGVTHVGMESTGVYWKPVYAVLEGHVDLTVGNAHHIKNVPGRKTDVKDAEWIAQLVRHGLVAKSFVPPPAIRDLREMVRHRRTLIETRTAVRNRVLKLLEGANIKLSGVASDVFGVSGMAMLEALAAGTNNATEMAGLARGRMRRKHAALEAALDGRMREHQCFLLGMHLRNLKAIDQDLDALDARIGTQLEPYRVQHRLLMQIPGVDWVTAASIIAEIGTDMDVFASARRLAAWAGVAPGNYESAGKPKGAGTRRGNVFLKSALFAAASAAVRTKGSYYRDKYNRLRARRGPVRAIMAVAHKLLIAAFHMLSTGEAFRDLGEGYLDQVARKRSTTKLVQRLSNLGYDVMLVPKAA

SEQ ID NO: 220830 - protein, 347 aa, unidentified
MRFYNGSHTYFCGIDLHARNMYTCVLDQEGRVLLHRDLPTDPDVFLKAIAPFRENLAVAVECIFTWYWLADLCAREGIDFVLGHALYMKAIHGGKAKNDRIDSLKIATLLRGGMLPQAYVYPPETCSTRDLLRRRLTLVRQRGQLLAHIQNTHHPYNLPTPKARINYRCNREGIAEKFSDPSVFESISSDVELAGHYDFLIKDLELFLTRKANVHDPENFYRLRSIPGVGKILAITILYEIHDIARFQRVQNFASYARLVQCEKSSSGERLGTGGGKIGNVHLKWAFSEAAVLFLRANPPAQQYIEALRKKHGKAKSISILAHKLGRAVYYMMKNKKPFSLEAFRMS

SEQ ID NO: 220831 - protein, 415 aa, unidentified
MAAAVLSAVGRAIGLDVHLDFCEIAICEDGKVRSAGRVASTPEALKVLAESLLATDRVVLEVTGSAWEIVRILEPYVAKVIVVSPGDTGITQARAKTDRLDARTLARLLWSGELDAVWMPDELTRVLRQRLSRREQLMRARTRAKNEIHAMLMRQLIGRPPFSDLFGVKGRAWLRQLELPVEECETVEGCMRQVEFLDAEIAEVERLIARYALSCSDARRLMSVPGVNVICAATFLAAIGDIRRFKTSRQLVGYLGLDPKVRQSGSSPARGGRISKQGSPQARWALVEAAFSAVRQPGPLHAFYERIRARRGHGIATVAAARKLTVLFWCLLTREEQYAHQQPSLTAKKLRRLELTAGAKRYDTKAAGIWSTNQAMREAERALAMQAEASYVRMVRDWQASTPKKVGASVTPERA

SEQ ID NO: 220832 - protein, 484 aa, unidentified
MCGGVNPSAQVKQEVIPVRTKRAYRAKEINAVSVSQIVAGRQGDRATVGIDIGKTGVFVMLRWADGKFAGPWHAENIREIRVIVEFLTTLASERELIVAMEPTGRYGDALRYALTQAGLNVHRVQGKASHDYAEIFDGVPSQHDRKDAAVVAELAALGKSAPWPYDAESVENQERTYWVQRLETAQETGQMWMGRREALLARHWPEVTKLLKLNSISLLKTLAHYGGPEELAADAGAAEQLAGWGRTLLTPEKIQALVESAAETVGVPEGDYERQWLRDCANQILAVRRTKQQAKRELKRLGEGKPVLSRLAAAVGYATASVLWVYLGSPRGYHCGEAYRKAMGLNLKERSSGKCRGQLRITKRGPGAVRRWLYLAAMRSLREKTVREWFEAKKTKDGDRGGKALVGVMRKLAVALYRVAVDDVAFDAAKLFPGKPLPQVKASARARQKGPPLRASAVTSSREGRGPRRRRRRKGLGATPLAGE

SEQ ID NO: 220833 - protein, 345 aa, unidentified
MNIIRVGVDIAKSVFHVHGVDRHSQIRWQGKYARNKWLDALSKKVPAGAEIGMEACASSHYWARELQKRGYCVRLIAAQFVKPYVKSNKNDRVDAEAICEAMSRPNMRYVAPKTVAQQDVQAAHRIREELVGQRTAKANQIRGLVGEYGIVAPVGIQQLRRALPEWLEDAENELSDSFRVLLHGLADDLRYLDDRVTALDERINDSVRRDPVARRLMTLRGVGPLTASALSGALGDGKAFRRGRDFSASLGLTPRQHSTGGRDRLLGISKRGDSYLRKLLVHGARAVLRHVDGKDDGLSHWLKALTSRKHVNVATVALANKTARIAWALVHNEATYDEELAAAGV

SEQ ID NO: 220834 - protein, 370 aa, unidentified
MLFIGDDWAEAHHDVELQDEQGRRLVRRRLPEGVAGIAVLHALIADHLGDDEPDTVVVGIETDRGPWVQALLAAGYQVFAINPLSAARYRERHVTSGAKSDPGDAKVLADLVRTDRQHHRPIAGDSELADAVKALARAHQNLIWTRQRQTGQLRSTLREFYPGALAAFDELAGRDALAVLEIAPTPAKGRALSRSKIASALRRAGRQRGIDARAEQVQAVLREPQLAAAPMVEVAFGHTVTAMVAVLAQLTTQIELLEQELNAHFEQHPDAEILRSQPGLGPVLAARVLAEFGDDPTRYADTRARRNYAATSPITRASGTRRVVLARVAGNKRLRDALYLQAFAAISRSPGARAYYDTHRARGHTHHLVP

SEQ ID NO: 220835 - protein, 412 aa, unidentified
MEGETVIAGVDTHKDVHVLCLLDGLGRKIWSGSFGADPEGHDRLAEAIGDPGSCMVVGVEGTASYGAGLTRRLVELGYNVVEVLRPKRDKVRPGEGKSDPLDAERAARKAASGKGCSVPKSQDGWVEAVRQLYVARRLAVATSTSCVACAKSMLTTAPSALRERFRGRERPKDLMPLLARGRKAGDALEESVLASLRSVAAVWKEARSQVESLDERIRALLEANAPALLGVEGCGTTTAAALVVAAGDNPGRLKGEAAFSMMCGASPIPASSGKTDRHRLNRGGNRQANWALYEIAIKRMAYDERTRRYVARRTSEGKSRREAVRCLKRYIAREVYHVLMDPNPDGAAPEGPELAKMRKAMRVTQKKAAAELGLSAATLGHLERGKRRSTKLERRYYELLCELERALPQTAS

SEQ ID NO: 220836 - protein, 456 aa, unidentified
MSKAIKNKKKKTPGKDAGKKLERFGLIHPHSAGIDVGSMLMVVSYTDQQGIIHLREFDSFTQSLYLLAELLQEAGVEKVAMEATGPYWQALYGILESYGMEMILVNPSHYRNVAGRKTDINDAGWLHQLLAHGLLRNSHIAPELNRELRQYLHERDIYKKQKSDTLNRIQKTLTLMNIKTQHLISDIEGVAGMKLLDAICSGIHEPDQLLKIIYSKQLKASPEDLLSSLKGNYQEQHINVLSLTLKSYNFFKDQMQAYETHIERTLGKMLAYDPTPIEKKKGLVRKNQYSINLKGYLQAIFETDLTEVEGLDEINLLTILAVTGTNMKKWPSSGHFISWLNLSPRPKISGGKVIGHEKRITNNPATQAFRMAANSLWQSKGPMGQQYRRLAATKGAAKAIKAVARKIAVIFYNLVLKKEAYDPARIQPDIEKQTARQIARLQKQAAKYGLTLQEVA

SEQ ID NO: 220837 - protein, 375 aa, unidentified
MNNNNTLYVGLDVHKESITVAYAINSEPVELMGKIGTSPTDIQNLCKRLRSKSSQVSIVYEAGPCGYGLYRRLVKSGFDCMVCAPSLIPKKPGERVKTDRRDAIRLVRSLRAGDLSAVYVPGIEDEAFRDLARAWASARDDLRHARQRLKSFLLVHGVHYVGRADWGPAHRRWLSKYSFESPWRQLAFDEHRRTIEDRQAQCERLESALKEAVTEWKLYPVVEALQAMRGIQFITAVGLISELGDLTRFEHPRQLMSWFGITPSEYSSGGSRHQGSITKAGNSYARKLLVEAAWSYRHPARISPAIQKRQENLPRPVIDRAWDAQLRLCKRYRKLQAKGKNVNITIVAVARELAGFIWDMGRIAMSVAQQPQCHK

SEQ ID NO: 220838 - protein, 462 aa, unidentified
MKPFYMGIDVSKGYADFVIINPKKKPVTQGFQLDDTFDGHKALYNIVARFLSNHPDSRLFAGMESTGGYENNWYNSLVAFQGSLNILTARLNPLGVKHNSQAGLKKNTTDKISAQNVAEYLVAHPEKVNYQQQDQLAGLRKQWGFIQMLTKQRTQFINQFKGLLYSSNPELLRYCQTETPAWILKVAVTYPSAARLKRAKAKTITKIPYVTLKKAQQIVSDAQRSVASATDTTTEQLIVATAQQVIHLNKTIDAQTRRMIEACAMPEVELLKTFAGISNKSAIGLMIEIQTVERFANAKKLASFFGVHPVYKKSGDGVGGIKMSKQGRKAPRHILYMSTLAAIKCNPLIKQIYEKHQKNGKHNMSAMGVCMHKILRIIYGMLKHQKAFEPQIDIANQHRSVNGRNAAPRKNEARRFQAYDIKAPVSRRQTIKRLERDRSHSVLDTKSGITVPIPVGDSIAKM

SEQ ID NO: 220839 - protein, 415 aa, unidentified
MEAMEVLHEHVAGIDVHRKSLSVCVRHIGVDRRVRQEVRTFGTMTRDLLELRDWLQAEGATHVAMESTGVLWKPVYNLLEGRVEVLLVNARHVKQVEGRKTDVKDCQWLAQLLSCGLLRASLIPPKPQRELRDLTRTRSQLVGERTRVVNRLHKVLEDANIQLGAVASDILGVSGREMIEALIQGEQDPEKMAQMARRQLRGKIPQLRLALEGTISEHHRFLLRLHLQQYDEIENWIGQLTEQIEKVCIPFAPALEKIAAVPGYNERAAQDLVAEIGTDMSRFPDDDHLCSWAAICPGNHQSAGKQASGRTIQGNRWLKTVLCQSAWAAARTKGSYFGAQFHRLAGRRGKKRAVLAVAHSQLRVIYHLLSSDQSYQDLGADYFLKLNGGRAAHYHRRVLESMGYMVIPPEADKAA

SEQ ID NO: 220840 - protein, 329 aa, unidentified
MCIRDRFDAENQPAWRKKLSRRQLESVIARQAPTLIAMEACASAHHWARRFSQYGHQIKLLPPQHVKAYLRGQKNDYNDAQAIGEAACHGAIRGVVVKTVEQQDQQAFHRLRRQLKGEQTRLINQLRGLLGEYGLVIASGIHHASKAIPQMLADTENGLTPGLRALVQRQYERYVALREELAWYDQQLEQAASTNPRIKHLQTVPGFGPVNASVLCSWLGDGTQFRRGRDASAALGLVPRQHSTGGRDRLFGITKRGDSEVRTMVVHGARAVVSRAKGKTDRLSLWINQLVERRGFNKAAIALANKMIRIAWALIVRGESYRCAANPVS

SEQ ID NO: 220841 - protein, 345 aa, unidentified
MNCKRIGIELAKNVFQIHGVNARDEVVVKKQLKLNQMIEYFSALPPCNIAMEACGTAHYWSRTLASLGHHVKLIAPQHVKPYVQRGKNDANDAAAICEAASRPHMKFVATKNEAAQAMQLVHRARSVTIKARVALLNEIRSTLAEFGIVCKALGATCTRTTLIDTMRNESRVFPAPLSELLHLLADRLTNLDAEMERFDLMLNTHVKTSAVVKRLIAVEGIGPITASAMECAAVDANMFKTGRDFAAWLGLTPRQNSSGGKTKLSGITKHGDSYLLTLLIQGAQNVVRYCVNKTDERSLWIQSLLLRRHNNVVAVALANKTARIVWSLLTKGEDYRPPRLITLEA

SEQ ID NO: 220842 - protein, 342 aa, unidentified
MEHFAGLDVSVKETSVCIVDDRGRIVREVKVASEPDALLSVLTNPTYHFKRIGLEAGPLSQWLFSVLAEAGLPVICVETRHMQAVLKSQINKTDRNDARGIAQMMRAGLYRPVHVKTLRSQKLRMLLTHRKLLQSKAIAIENDLRATLRNFGLKVGIAGRVKFEARIKELVENLPDLVVLVEPLLIVRRVLREQIVILHRRLLAIVRDDDVCRRLMTVPGVGPVVALTYRATVDVPARFRKSKAVGAVFGLTCSKYQSGEVDRNGRISRCGDEMMRVMLYEAAQSMLRSKKWSWLKAWAMQIARRRGMKKAIVALARRLAVIMHRIWVDGTEFRWTRETVAA

SEQ ID NO: 220843 - protein, 394 aa, unidentified
MTQVTMIGCDLHDRTMLLQTAVGKEKPEQRSFPNDFFGRKAMIGYLFGRARESGSGRIVFVYEASGQGYGLYDLLTIEGIECFVLSPTHIPRSAKSKRQKTDSKDALKLLELARGHILAGNELPVVWTPPQLLRDDRELVRGRLEAAEACTRVKLKILSLLKRHGMELPQWFSKSRSWTKRFVQWLKGEAERMAATVTPILLSLIERFETLRRQMVALERHIRHLCKTPRYKVPCEKLRELMGVGLITAMTFLTEMGDLTRFSNRRQVAAYLGLCPSSFESGEADDRKGHITRQGPGRVRKVLCQAAWAAIRTDPQTRKVWKRIKRGSSRRGKKAVVAIMRRLGIHMWHVALSAGVDSKLEQPPTPPPRWTSARAQQKGTAPFTSPSPRPQARG

SEQ ID NO: 220844 - protein, 451 aa, unidentified
MVQKKRRRRDALEVRNPNAAGIDIGSRQHWVAVAAHRDPQPVRWFGTTTTELVRLADWLASCGVTTIAMESTAVYWVPLYEVLEERGFEVFLVNASYARNVSGRKSDVKDCQWIQQLHTYGLLRASFRPSAPIAELRSYMRHRDMLVASAARHIQHMQKALLLMNVQVHHAVTDITGVTGMAIVRAIVAGERDPAVLATHRDPRCHATAEQVADALRGNYRPEHLFALEQALRLYDTYLELIAECDSRMDAVLQALAQRCSPPPEPAPPPKRRGRPRGSLPTFEIRQPLHRLCGGADITQLDGIAPHTALQLLSEVGTDPSRWPTAKHFTSWLNLAPPTKITGGKPLRAQRPARKNRAGEILRMAAVSVGRTASALGAFYRRIAASRGKGKAVVATARKLAVIIYHLLRGAPFRPTSLAAYDERYRDHVLRRLRNRAKSLGFDLTPLPAET

SEQ ID NO: 220845 - protein, 412 aa, unidentified
MNKRVEKACGIDVHQAFLAATILTSSGIKDTREFSTCLDGLLDLKTWILENRCQRVAIESTGIYHIPTYTILEGEVETIVANPLQIKSIPGRKNDDIDSEWIAEVCLNGPIKPSYIPGKEIRGLRELTRSHVKFTHTRTVLKNKVHKILQRAGVRISGVLSDIFGKSGIIILNGILDGKAIEQISSELNDKRIKKRMPELKDAIKGELSQNDIFVIKECLETVKFLDAKIKEFDSRISQSLSEMQREQEILMSIPGIGFTISAAAIAEIGDIKVFPRPKNLVSWGGLAPAVDESAGKSSNGHITKHGNKYLRTILVLAANSIAIGKPNKLRFFYQRIKGKKGHKKAIVALARKLAAIIHHLLSNNEKYSEEELKEKKVIFPKFVPVQDLNLDEMIELLCEAGYTVNKNSSAG

SEQ ID NO: 220846 - protein, 344 aa, unidentified
MAKANTLTVGIDLGDQFSQVCVLDEEGEVVEESKIRTTEEAFRRRLAGLEPVLAVMEVGTHSPWVSRLLGSLGHECLVANPASLHRKGRKKSDKIDAEKLARWARADPDMLEPVQHPGADIQADMAVVHSRRALVEARTKLINRTRGLVKSWGARLPRCDADYFCERVAPHVPPELRTAVEPLLATIASLTAQIGVLEEQIEGLAMKKYGEATKRLTQVKGVGTITALTYVLTLQQPERFARSRQVGPYLGLAPRLDQSGESEIEHRISKAGNVYMRLLLVQAAHHVLERGPDTDIKRWGLRKAEGGKRAKKRAVVAVARKLAVLLHHLWQSGEDYQPLRQTAA

SEQ ID NO: 220847 - protein, 422 aa, unidentified
MRSVALDVHLDFCEVAIVEDGEVRSAGRIETKPEQIELFASSLGPDDRVVLEVTGNAWEIARTIEPHVAEVLVVSPSDTGIRQARAKTDRLDARTLARLLAAGSPDGVWMPDRWTWVMRRRLSRRSQLVWARSRAKNQVHAVLMRQLVGRPPVADLFGVKGRRWLSELQLAPEESETVSAAMRQIEFFEKEIAEVEQLIALAAMESAEIKRLMSVPGVNVIVAASFMAAIGDIHRFQSPRKLVGYLGLDPRVHQSGVGPASHGHISKHGSVRARHALVEACWTTVRQPGPLHAFYQRIRARRGHSVAIVAAARKLASLFWCLLTRGEDYAYQQPSLTRKKLRRLQIAAGAERYTPKASGIWSANDAVREAERELARQAEVAYARTVRDWHAAQAVKVGASVTPGRASKKPSKGEAARQTTSP

SEQ ID NO: 220848 - protein, 366 aa, unidentified
MKRSITPIGTPVGIDVHKRRCKVVEFRRGEIKVRKPMGNTREEWLELLTELPPEAEIGLEVSTAGYFAMSVLEAAGGRERAHWVHTAGIDSNRRQKNDRLDAERLARKLAAHHLDPLPEAWFPPPEIRALRLRARQRCWLALLRTQAKNHVQSLLEMHGLQIPGSDPFGAAGRRWLAEQKLPAPLAESIPQTLRLLALLEEEIHTSEQYLQAADAQFPELPLLRTIPSIGPILAPVIGSEIGTIERFRSAKALANGTGLVSSFYDSGEVKTTGPITHQGSRWLRWALLTAANVAIQGRNPFARRYHRLRRSKKPNVAKAAIAHSLARCVYGVLKHGCPYREDRWGRKVGALEPETRAGARSTKTAL

SEQ ID NO: 220849 - protein, 343 aa, unidentified
MTTYYIGADVHSNSTEMAIEKGKKIVASYIVPTTIQALSNILDSLQGKKQLAIEEGPMAGWLYRNLNKKVDKLIVCDPRRNKLIDCDGDKDDKIDASKLALLLRGGYLREVYHSEDDDRAELKNWVSLYNDRVCDAVRHINKIRARCRMHGVRIRRFVLRNPSHRSKWLSEIKHPALAKQLKMLWVGYDAIAEQTRMAKQQLIQLSKRYDIIRFWRKLPGIGLIRAVTLFAYLDTPWRFKKKNKLWKYCGVGLQRTTSGTDKKGRPKPAKLQLPWAVNRTLKNVALGAATSVINQEGNVFRVYYERMLSGGIMPSNARHAVSRKILTVMWGMWKTNSRFDEDL

SEQ ID NO: 220850 - protein, 386 aa, unidentified
MEPTSIHPTAVRTDLGAIFVSLELSRSTWLVTSLSPGSGEKMSKHVVDGGNVAELLDRFEQLQQKARLRTGKSFPIVTIQEAGLDGFWIHRVLEANGVESYVVDAASIATSRRRPKTDKIDGEALTRALLAFKRGEPRVCAMVRAPDPEDEDRRRICRERKVLIAERVRHVNRVKGLLFAQGISGYQPLRKDRRKRLEELQTGDGREIPRHLKAQVNRELDRLELLLEQIATVESERNSLLSTHEQPAVEAITPAAMLLSLKGVGAEFAAVLWTEALSRHFDNRRQIAAYAGLTPTPWMSGTIDHEQGVSKAGNPRLRTTMIQLSWLWLRNQPASALSRWFVDRVQSNGGRLKKAAIVALARKLLIALWKFVTAGVVIEGAVMKTA

SEQ ID NO: 220851 - protein, 336 aa, unidentified
MEKYKIFVGIDISKAWLDVAIKNETVSICQRFDNCKKGYRSMLGWLKTFARPMQMILCMEHTGVYGMLLWEYLVNQKLHFVVESGLQIHRSMGIRRGKSDKADAELIARYIKLHHTETRQYHVPNQVIKRLKILFAYRERLLKVQHLLTVSSKEISTFMSKEICKEMTVDSNKLTAIISDRITRVQKLIEKIVDSDPETRRIYQLIKSVPGIGPITGVYLIIVTQNFTVINDSRKLSRYGGMSPEKNESGIVKRKSKTSSIGNKKLKALLTSCAGTIIQHNVEAREYQRRKIDQGKHEGVVINNLRNKILHRVCAVVNRGTPYVDIKKYKRLEKVA

SEQ ID NO: 220852 - protein, 410 aa, unidentified
MEILYDRCCGIDVHKKLIVACFKCGKKQEIRTTGTTSDEIRDLTQWLLDGKCQMVAMESTGSYWKPLYNIFEILGLDVIVANARDIKNVPGRKTDVGDAEWIADLLKHGLIRASYIPSREQRELRELSRYRQSLIGERSRELNRLQKMLEGGNVKLASVVSDVNGRSARNLLKAMLESDSPLTEDRVSQLVHGRLQSKVDAIVKAMNGFFTPVQKALIRKVVDHIDDMTKRIGEMDDMLREYLQPYEEAIAKLDEIPGIARRSAETILIEIGLDMTRFPSAGHISSWAGLAPGNNESAGKRRHSRTVHGNSTLKSALVQCAKVASKCKCYFRAQYQRIVIRRGANRATVAVAHSMLIAIYHMLKDNQAFRDLGEDFYMAFNREKKINRYLKQLQKLGWMPDMTNAALATA

SEQ ID NO: 220853 - protein, 350 aa, unidentified
MEHIIGIDVASEVCSVVVMNQAGKLMMNTRVATSESNLRELVKSVKRPRQVVFEECGQAAWLYTVFEAISDDVFICNPKKNRDLSGHSKTDDNDALNLAERARIGALSRVWHGGRSLQALRDRLRDYQSLTSQSTALKNKLKAVFRNRGIAVGNKAYVPDSRIEIVKCLPHQALRSRVCHLGEVLDVVTQQRADAEIELVKTARKSPMFHSLTSMPRIGNILGATILAEVGTPDRFRTRKQFWSYIGLAVTTFETSQFYADERNFIRKKDRKTRTRGLVNQYNSALKFTFKHVALDLSRSDWKHEFIRLQKSNVSEANARLTLARKAAAIALRLMKTGELYDEALVFARK

SEQ ID NO: 220854 - protein, 374 aa, unidentified
MGLDRDRIHGGADMAQVRSWVGLDVQASKVVAAVVDRETGELSVRRLSGVTGEVVAFCAGLPGWVQVAYEAGPSGFALARALTAAGVGCVVAAPGKIERPAQDRVKTDRRDAERLVRLLMVGGLHRVRVPSEGEEALRDLVRAREDVRGDLMRARDRLSKLLLRHDVRFDGTAGAWTTRHRDWLGRVVLAGPAQLTLLDYLGAIDALLVRRDTLEGHIERLVPASPWAEPVARLRCLRGIDTLSAVGLCAEIGDWHRFERAGRVMSYLGLTVSEDSSGERRRQGQITKTGSRHARRLLVEAAWHYRRPPAKSHALKRRQAGQHAHVLALSWKAQQRLHQRWQRLERERGKRRTIVAVAVARELAGFCWAIATAD

SEQ ID NO: 220855 - protein, 355 aa, unidentified
MNSSKYIAMDVHTATISVAVRDAAGKLIMESVIETKTSTILQFIQGLRGDLHVTFEEGTWAAWLYDLLKPYVTNVVVCNPRRNALLKEGSRCDRIDARKLAELLRTNLLRPVYHGEKGLRTLKELARAYLTISKDLARVMNRVKAIYRGWGIPCGGKSVYHPRHREEWLSKITQASVRRRAELFYKQLDALVLLRKQARQELLAEGKKHQAWKWLRSIPSLGPIRVAVLMAIVQTPHRFRSKRPLWKYSGFGVVTHSSADHRYVQGQLERSKKPVSVRGLDPDHNHDLKDLFKGAATHASTRKGPFLEFYEALVAKGMRPEMARLTLARKIAVITLTVWKKGVAFDAKYLKPQTA

SEQ ID NO: 220856 - protein, 424 aa, unidentified
MSKKKSSLAGLQALYARVCGLDVHKKVVVACVRILDPKDGTVQSTLRKFGTMTADLIELRQWLAEARVTNVAMESTGVYWQPVFNLLEGHFQTWVINAQHIKKVPGRKTDMKDAEWIAQLLQCGLLRPSFVPDRQQRELRDLTRQQTKLVQQRNAVDNRIQKVLETANIKLGSVASDVLGVSGRKMIEALMAGEKDVTVLAELAQRKLRDKIPELQRALEGELTEHHRFLLRQLLGQYDFLEKEIASVSERLGAVAPPSFRAAVEQLDAIAGVGERGARALLAETGTDMSRFPTHKHLASWAGRCPGNHESAGKRRSGKTPAANRHLDAVLTEMAHAAVRTKNSYFKAQYHRLAGRRGKKRAIGAVKHSLLVTVYFMLRDNKPYKDLGADYFDKLNPQQRIRYHVRRLQELGQEVELSPMADAA

SEQ ID NO: 220857 - protein, 367 aa, unidentified
MKKVSTAAVKTTKNFSQPKLTIGLDLGDRNSWYCVLDESGQIQLEQRVRTAATALREVFSEMPRSRIALEIGTHSPWICRLLSELGHEVIVANARKVRLIAESRKKDDRMDARTLARLARIDPQLLYPVKHRSTQAQADLMRIRARAGLVRARTALVNTARGLAKSYGERLRGCNVRNMNSEKAEGLSPELQTALEPLLNAIESLSERIVEYNERIEKLAQDSYPQVALLKQIKGVGTLIALTYMLTLEDPHRFRKSRDVGCYLGLQPGRRNSGKSEPQMHISKEGDPYLRTLLVQGAQHILGPFGIDCDLRRWGLKLAERGGKSGKKRAIVATARKLAVLLHRLWVSGEVYEPLHNSNQRALPAAA

SEQ ID NO: 220858 - protein, 355 aa, unidentified
MNQEKYIGMDVHQATISVAVMDARGKLIMECILETKAGTILEFIGGLQGSLSVTFEEGTSAAWLHDLLKPHIAHLIVCDPRKNALLKDGSKSDRIDARKLADLLRLNRLNPVYHGEHGVRTLKELGRSYSTITQDLTRVMSRIKALYRSWAIPCSGSTVYAPRHRAEWLAKIVEPGVHLRAERLYQQLDLLQPVHQQARHDLLVESHRHPAVKLLRQIPAIGPIRAALLVALLQTPHRFRTKRQLWAYSGFALETHDSGEYRMVRGKLRRNRERLTVLGLNDNHNHDLKNLFKGAAISASTRPGPLYDFYVGLLQKGMRPTMARLTLARKIATITLTMWKKGVDFDAKQLNRQAA

SEQ ID NO: 220859 - protein, 399 aa, unidentified
MLHDHPSVGPTAILTQFGAIFVSLELSRSKWVVTSLSPGNGERMSQYSLTAGDIGGLLARFADFKRKARERTGSDYPVITIHEAGLDGFWVHRVLRNEGIESHVVDAASIATSRRRRRAKTDKIDGEALLRALLAFKRGEPRVCAMVVAPSPEEEDRRRLCRERQTLIAERIIHVNRIKGLLFAQGISDYAPLRRDRRKRLEGLRTGDRRSLPVHLKTQVSRELDRLELLLEQIGKVEAEQEALLAVESKVASGQEPRNREPRNREPCNAVTMLLAVKGIGEHSAAILWSEGLYRQFANRRQVAAYAGLAATPWRSGAVVHEQGLSKAGNPQLRTTMVQLAWLWLRHQPQSALARWFRARGERGRKGSIVALARKLLVALWKYVTHGVIIEGAVMKPAA

SEQ ID NO: 220860 - protein, 424 aa, unidentified
MKVTYQTCCGVDVHKSFLVATIVKTTGGIEPSYQKKRFSTFNNSILEFKQWLLDNDCHDVCMESTGKYWVPVFNLLEDDINVVIANPKWVKAVKGNKDDTKDSKWIGDLFRLGLVKGSYIPCKKVRILREYTRYRYKLVSCRSSEKNRYQNALTVCNVALDSVVSDIFGKSSTSIIDYLLEQSGSSINHEEIASKLLRSLKSKEDAVIESVEGYQMTDAQKYRMRLVRAHMDYITAEINDVDKMIENMISSNTDFENAVQFLCTIPGVKRDSAITIISEIGTDMSQFSSSRRLCCWAGLTPGSNESAGKKKSVRITRAGVYLKPALVQCAHAAVKSDKSPYYKKKYESLVKRRGKKRAIIAIARMILTAIYQMLSTGEQWNPSDLYKIDMPVALVEKQKAKAIKQARKLLQREGLLPPDEPLAS

SEQ ID NO: 220861 - protein, 345 aa, unidentified
MDQISRIGMDTSKHIFQLHGVNAAEAPVLRKKLRRKEMVSFFEKLAPTVIGIEACSASHQWARLLQSFGHSVKLIAPQLVKPYVKRGKNDAADAEALCEAMSRPTMRFVPVKTAEQQAALMLAGVRDRLIRNRTQLSNAIRGYAGEFGFTAAKGKAHLDPLLERIQADESLPALARELFAAQAKEYAQLQAQIDEVDARLMTWHRADECSRRLAKIPGVGPIGAVLLTMKTPEPELFRSGRQFAAWIGLTPKDHSTAGKVRLGVITRAGDDGLRSVLVVGATAVIQHAQRGGRPSLWLTELLKRKSPKLAAVALANKMARIAWKLMVTGENYAAKAVPTALAGAG

SEQ ID NO: 220862 - protein, 343 aa, unidentified
MYYIGLDVHKKTISYCVKDAAGHVHREGKMGSTRRELDAWIQTLPQPRMMAMEATIFTGWIYDYLLPHAEKVKVAHPLMLRAIAASKKKNDRIDAGKIADCLRCDFLPECHMASTEIRDRRRTLRYRHLLVRQMVQMKNRISGLLMESGVSYDKQRLHKMGYFTELFSTNEEISDSIRPLLRLGREHILRGQRLDRALIRSLERDPLLSERLRRLRTIPGVGSITALTWALEIGDYTRFQSVKEAISYCGLCSAEKSSADKVMRMPISKQRNKHIQHVLVEAAKLAPRYSHELALLREKEIQRGNKNRATLAVARKLVAYMLAVDRRKQDFVPAEELAAKAVA

SEQ ID NO: 220863 - protein, 344 aa, unidentified
MYFIGVDHHKQVSVMTVLDEDGRELKNGRVANLRRHVERFLEGYRPFTAVLEAGRSSYVMADLLRELGGEVKIANALQVRAIAHARIKTDKRDSRTLAQLLRADLIPEIYQRGEWNRRAQRVMRLRAYWVRKQTEVKNKIRALLAQQREEVRLEVEKREGGLFSSKGMEFLSTLPLEGQDKMVLDDLLQGCRETEAHIKKSDGLVKALYGEMQEAVRIDTVPGFATTLSVLVAVEIADVRRFPRPADLHSYAGVIPSTYSSGERTSHGHITKQGSAWLRWAALEAVYPAIKKDLGLRTLYGRLARRKGPNVAKIAVARRLLTIVYRVLTERRDYIPGLMKQSAA

SEQ ID NO: 220864 - protein, 317 aa, unidentified
MSKSELFIGIDVSKSELEMAARPEGKAMTFANTEDGIAFLIDFLKPLCPSLVVLEATGGLEISLVNALAIKEIPVVVVNARQVRDFAKAIGRLAKTDRIDAEVIAQFAETLRPPVRPLKDEETQRLHALNSRRRQLVGMIRSEQNRLSSAPKWTQKEIQNHLRWLRKALGKIDKDIADLIKGSPMWREKEAILRSFKGVGPVTSASLLAGVPELGSINSKPLSALIGVAPLNRDSGQWRGKRAVWGGRDNVRSVLYMATMSAIRFNPIIASFYKKLTAAGKPHKVAMTACMHKTLVILNSMIKNKTYWNPLVCEKCL

SEQ ID NO: 220865 - protein, 434 aa, unidentified
MQEVTDEPLYRDRVCGIDIGKAQMAATIRVPSEKNPARRMSETRMFGTTKAGVLELADWMRVWQVGAAVMEATSDYWKPVFYRLEAEGFECVLADAKQVRNLPGRPKRDPSDSQWLACCFERGSVTSCFVATPEFRIIRLHTRRRRDLTGERTREKQRAEKLLEDAALKLSSVLTDLHGVTGRDIMDRLIAGERDPKVLAECARTRARRKIPQLREALEGAEFFTEYHARLLRSILDRIDAITAEIDQLSRVIEELLAPYEEQLQQAESMPGWERRAAQDVIAETGVDMTRFRTGGHLASWCGRTPLDKQSGNRKGQRKHKRGNKYAGAVLGETAVAAGKTHTREGTRHRKIARSRGKAKAVVATGNTQMKVFHALLSSPGTRYEDLGPDWDTDERRTARRLSKLVGELGAMGYEVTLCRRQDPRPEPEPATQA

SEQ ID NO: 220866 - protein, 357 aa, unidentified
MNTVMNYIVKNKEIFIGLEDSKKTWKICARSGKVTVHEASMPAEYEVFKSYLNHQFPECTIQVMYEAGFRGFELHDQLKEDGFDCIVTPPHTVMQEKTLQQKNDRTDCRRLAKNLENGDYHICYVPERKLREDRQISRLYEQNKRDINRECNRIRRTLEFHGLDRGFPSGAWYRSHYINAGKSIAEMNISLELKFSFSTMFNKLFYLWDIQKQVLKELQRLAKSEEYRNRVELLNSAPGIGILTAIRLVLEWGDISRFHSKAEFSSFLGLIPSEYSSGEKEHKGHITKQGNRLVRSWLTECSWRALKYDPVLLVKFNAVVRSNGSRKKAIVAVARKLANRLRYLLIHNTPYVIGLVH

SEQ ID NO: 220867 - protein, 394 aa, unidentified
MKLVGIDIGKNKHFFCVMDKDTGELSVNPVSFSNNKEGFDFLINKLKPYSKESILIGMEDTGHYHFALLKYLLNDGFTVALINPKTTDFTRKMQGGITKNDELDTLTICDVLDTPERKKQYRITKVNSFDLYEQKQLTRHHHHLKEELNVYTNRLQKCIDIVFPEFNSLFKSKYGSVYMNVLKTFGSAESIANTDIRTIRKCFDSNGRGRYISLTPEQLKECARSSIGISSVAEVIQIKHLISQIELINEQITEIDKKIEEFSVKNNSPILTIPGISHFSGTSILAELGDISNYKKPSQIIKFAGIAPVHYESSQFTAQHTAITKKGSKYLRKTLYQIILPVIHNNPVFKQYYELKISQGKGHRCAQGHCVRKLLRIIYHLLSTGKKFDPKLLR

SEQ ID NO: 220868 - protein, 320 aa, unidentified
MSKKKSKSFIGIDVSKQQLEVAAHESDYQFRCRNKMSAFGELIAELISLRPALIVLEATGGLERAVVSALQASGLPVVVVNPRQVRDFAKALGQLAKTDRLDARVLAHFAAAIKPPLRPIKSKEEQELDALTGRRGQLVEILADEKNRRAAASSDTVREQIKHHIDWLEDRIAELDQQIKALLQTSSPWQIKDQILRSVPGIGPVASFSVIAGLPELGTLNRQQISKLVGVAPLNRDSGQQRGTRHIYGGRAGLRRVLYMAALTAARHNAVIKEFYQRLRRNHKPFKVAITACMRKLLAIINVMVRDSTCWKTKVQPVSA

SEQ ID NO: 220869 - protein, 345 aa, unidentified
MLHAGLDLSRRKVDVCLLSGAGEIVDEWASPPDADGLRGLGARAAMWGGPVRGVIESMNGARFVHDRLEEHGWDVLIADATKVKGLAPLACKTDKIDARVLATLSARDLVPEIWLPDPSVRRERELARFRLHLVRHRTTLKNRIHAALVAFGHPCPVSDLFGHAGRELLDRIELPEPWRNVDVSLALIEELDVRIGELTVALKRQGADHRYIPVLVTAPGIGWINAYTIACEIGDITRFASPAKLCGYTGLCPRVKQSGAVDARGPISKNGPKYLRWALFEAALNACRHPYYAERYQHTKRRLGRQRGPKVAQIDLARRLTEAIWHMLTTNQPFAPAGAPFRLAA

SEQ ID NO: 220870 - protein, 335 aa, unidentified
MDHIAIDLGSRESQVCVRSSDATVIEELRLSNRALDAYLAQRPPSRVIVETCAEAFATADMAKRHGHDVKVVPAMLARTLGVGARRTKTDRRDAQALSEVSCRVELPSVHIPTAEARRLKSECGMRDALVRARTMLVNCVAGWLRTQGRRIKRGVPTTYGSRIRRAMTCVPGEVERMLAGIDALTLQIKEAEKSLTQVAKSDAVCTRLMTVPGVGLITAVRFRATVDAIERFGSAHALQSYLGLVPGEKSSSERKLRLGITKAGPTAMRWTLVQAAWCARRARRRDPMLAWYDEIQKRRGKAIAVVALARKIAGIMFAIWRDGSTYNPLHASRTT

SEQ ID NO: 220871 - protein, 352 aa, unidentified
MKKYSQVIPKGKTLFVGLDLHRNSWHLTVVAEDEIIFSFNMPPEPDTLLKFLSRYQKNVIRVVYEAGCFGYSLYRLLNDSGIHCIVTPPTLVPIECGNRVKTDRRDSKKLALLLSKNMLKEVWIPSKQLLAHRQVLRTRQQLMKDRIRLQQRILGELCFHGVPVAKPRGPWSAKFIKQLKDIIFADSYLQQSFWVKLEQLDQQNLSLEQQTSLLKELSKNELYAKHCQLLQTVPGIGLISAMTIVLELGDISRFGKAEQLAAYAGLTPAQYSSGEHIRMGRITRCGNSSLRAILTEVSWTAIRKDPELKAVYDNIRSRREAKKANIAVARRLLLRCRRILLDQRPYIIRQAA

SEQ ID NO: 220872 - protein, 345 aa, unidentified
MDTHKDLHVAAVVDELDRVLASECFATTQHGYKQMLTWMRSFGELTRVGIECTGTYGAGLLPYLDQAKVTVLEVTAPDRSDRRKRGKGDTLDACNAAHAAFAGVRTVTPKKRDGMVESLRLLKVCRKTAIQARRVTLQLIQSTIVSAPDELRESLRKLTRMQLIRMLAASRPDLSDYRQLASAYRIALKTLSRRYLELHDEIADLDVMIAGLVDDLAPDLVSRNAIGYETAAQLLLTAGDNSDRFRSESSFAALCGVSPVQASSGKVSRHRLNRGGDRAANSALHIIAIGRLRTDARTQAYFSRRIAESHSKLEAIRCLKRYIAREVYGIIQSRNRTTNQVAIST

SEQ ID NO: 220873 - protein, 442 aa, unidentified
MPENKPLFDLVVGLDRSDRKADLHLIETATGQTQSLTLDTSPEKLRFWLLELRQRYPQATVAICLEQPAGHLIAFLETYSWLKLYPINPISLQKYRETFVTSRAKDDGKDARYLAQLLLTHPNQFQAWQPPDSRTRLLQQLVAHRRAVVDERTALTNRLQGLLKTYFPQALDLCGEDLWRPLATAFLLKWPTLTAIQKARPQKVKEFYHLQGSRSQKLIEQRLERIEQAVAVTDEPAFNQTLALRVQLICRQLQDVGRTIQQFEEQIATTFQSHPDREIFASLPGAGPVLAPRLLAACGAERDRFGRASNLPCHTGIAPVTKQSGKSRHVHRRYLCPKFERQTFHEFAKESILWSRWAAAYYSQQRAKGSPHHTAVRALAFKWQRIIWRCWQSRTPYQEQIYEAALRKNGSELADLLDQIEVGKNPVNNSKKTAKKTTPEKI

SEQ ID NO: 220874 - protein, 404 aa, unidentified
MELTAIYRCVAALDIHQAKLTVCILCEDENGEIITDLKEFGGFKKDRVAMAAWVASFHPNLVVMESTGIYWKSPYAALEKHGLKIEVVNARHVKQVPGRKTDIADAHWLAILARNGLLRGGFVPPVQFRELRLVSRQLQKMTGILSGEKNRLHKVLSDTGVRLSVVVSDLHGKSARAMIKGLLAGETPQHVLQYASNRLKATEEELLDALEGDMSAHHHFVMTEMMAHIEELEARIKTFQQYLLQGLAPYRTILQSLQTIPGLDETGAALLLVEIGDDMSAFGSPARLASWAGVCPGNNESAGKKKSGKARKGNPYVRRVLCEAANAASRTRCCLQDKFKGIMLRRGRKRAIFAIAHKLLKTVYLLIERSDYYRDADTDYEALSVQRNAPRWIKKLKQYGYITA

SEQ ID NO: 220875 - protein, 323 aa, unidentified
MAVVVGIDIAKRSFDLAVLQPNGKYRTKGKLSNDPSGFAIFADWLQKHAEPGAWIVMEATGIYHEALAEHFHALGYRIAVLNPAQIARYAQSQLQRSKTDKLDAKLIATYGQRHVDSLRDWHPEPVSIRTLRALTRRLEDLQSLRQMELNRLEVSPKKVQDSIRAVLQRLDEQIAWTLEQIKRHIDDDPDLRSKRHLLVSIDGIGDKTAALILAELGDIDRFADARAVTAFAGLNPRLQESGVARGHTRISRTGSARLRSALYLPAVVALTYNPAIKAQAERLKARGKKGKQTVCAAMRKLLTIAYGVLKSGKPFDPSLAIAR

SEQ ID NO: 220876 - protein, 416 aa, unidentified
MAIKPKRYGPIKSDIVVVGIDVAKRRHFAAIRLPDGSISRPFGFANNRGGFERLVDRAIAALDSSGADVVRFALEATGHYGHALQHFLLAGGWPVDGVNPAHTKKVKEVLDGSPEKSDRKDAILIADLAAQGRCRPVSAPIGVYAELRRLGKLRDQLSTERTRYLNRYTGLVDLVFPELTELVYNVNCPTIRNLLMEFPTASAIAQRQFRRIRRLLYTWSIGHFDEARCRQIYEASKQSVGVKDGAEAISLQMRLTLHSLQTIESHLAEVEAAQANGLKEISYAQHLLTIPEISTVTLATVLGETGDLSQFRSASALIKLAGLNLYSISSGTFCGRTRISKRGRPLLRKIIFLAALRLSKEGRPLDEFHGRLVERLANPQVAIACSRKLLRLMYAMVRDGVDYQPGLLAVADQEAA

SEQ ID NO: 220877 - protein, 331 aa, unidentified
MPTYYLGLDVHKVRTQYCVMDPAGGILKEGSVPTEEVAAVVPDDDSAIVLEATGSWHFAYDALVATGALVKLAHPARVKAIASARVKTDRIDARILAHLLRTDLIPEAWAPPQTTRELRDLVRLRWRFVSQRTTAKNRISNLLARECLRFAGTDMFGKSGRAWLATLDLAPHTRGMIELLLVSIDEADHHVEALTARLHERLDGDVDMYLLMSIPGVGFITAATLVAELGDWRRFSRAKQVSAYFGIVPSVRASASVAHYGRITRQGSSHARRALVEAAHVAKRLPGPVRHHYLSLVKRRGKKVAVVAAARVLLELSWTLLRKGEVYRAAA

SEQ ID NO: 220878 - protein, 341 aa, unidentified
MKQFIRIGVDLAKNYFQVHALANEGGPAVTRKLKRSKMHEFFAQIEPCLIGMEACGSAHYWARELETMGHEVLLMPPAYTKPYVKRGKNDAVDAEAICEAASRPGMRFVPIKSAEQQATLMLHKTRELLVKQQTMSVNALRSHLSEFGIVVAKGIGRVDELLELAESDTTLPEVARAAVKILAQHLEGLDKSIDDLEKQIGRAHEQSEMSRLLDQVPGVGKIIASVISASVPDPSVFKSGRDFAAWLGLTPRQNSSGGKQTLGGITKQGNRYIRKSLVLGATSLLHVLGKRKGALRDWIVALLAKKPARLVTVALANKLARIVWAMMKTGECFRAEMFAKA

SEQ ID NO: 220879 - protein, 395 aa, unidentified
MSAEGEAIRSNDYRKDTTVKAPFTRPAAVLGLDVGKSSHWACLIDRDGEVLASAPVRNREAELDALFASAPAGTLVVVDQFRNIGSLAVRRARAAGLGVAHLPGLAASRAAGLFAGEAKTDERDAAVIARTALGVPDSLSGVPGRGEALEAARALSSQRDHVVACATRDKNRLRAVLLESCPALEAAVDLSDRRWLELLAGFGGAWGIARSGAGGPRAEAAGEAAAASTAPPPALVEAENRQVRFLAARISEALDEAGALEAETAALLEGDETYACLLTVPGIGPRTAAQLAVSVDIGRFPDHDHLASYCGIAPRVRSSGTSVRSVRASRRGDARLKSLLIFSCNSLVRSSGRYGEYYRACRARGMGHGRALKAVARKRLRAIYAVMRDRVPYRE

SEQ ID NO: 220880 - protein, 346 aa, unidentified
MEHYVGLDVSLKLTSICIVDRTGKVEREGVVASDPEAIATFIKLHAPHLVRIGLETGATSTWLWTELNKIGLPVICIDARHAKAVLKMQINKSDRNDAAGIARIMQCGWYKEVCVKDLDSHATKALLVSRALLVKIKRDIENQIRGLLKNLGLVIGRAKMNMFAVRAAQLAEDRSELFAAVDPLLKAREAVEQQIVDLDRKVLRLARNNAQVRRFMTAPGIGPVTALCFLATIDDPARFKRSRSVGAYAGLTTRRYASGEIDWTGRISKCGDKMLRSYLYEAANVLLTRVAKWSALKAWGIRLAKRSGLRKAKVAVARKLAVILHRMWIDGTEFKWSSKDAADQPA

SEQ ID NO: 220881 - protein, 343 aa, unidentified
MTYYAGLDVGLRRTSICVVDETGRQAHASEVATDAEVIVKALAKLKRKQVTVGLETGQLSIFLTKALRAKGWKVVCMDARQVAAALSTQVNKTDRNDARGIAHLLRCGLYREVHVKSDAACDRRIVLASRRQLMTQVAGLESTLRGLLKIHGVVLGPANRLAFLPRVRKVMKGLGDGARTGLEALLSSLEHMRSVLASLDRQVRNGAKEDARSALLMTMPCVGPLTSTSLVTVLDDATRFKASRSVGAYLGLTPRQYASGETQRQGRISRCGPAECRSMLYEAAHCLLHFYKGPSHLKRWGERLAKKKGMKRAIVALARRMAVIMHRMLITGEPFDDARLKPA

SEQ ID NO: 220882 - protein, 333 aa, unidentified
MTSKGQEKMNHPVAHASDEITIGVDISKERLDAYLHPKGVARQFTNDRKGHAQLIAWAAPYQPTRLVFEATGRYHRALEMALGKAGLPAVKINPLQARRFAEATGKRVKTDPIDAAMLARFGVTMRPEIPPAKDETIDVLAELLAARRGLIKDRTAASNRGKSLTLPMLKRQCEQHRKQIDNQIAAIDREWMSVLAANPTLKTRLDILLSIPGIGPATAIALLVDMPELGTMDAKQAASLAGLAPVTRQSGTWKGKSFIQGGRACIRQAIYMPALVAMRFNPPLKEKYEALRHAGKPAKVAIVAIMRRIVILANALIRDNRKWTLDMAAAGAK

SEQ ID NO: 220883 - protein, 340 aa, unidentified
MGMVGGLDVHRGQVTVDWVDHDTGESGKGRITPATRQSFARWLDRFAGREIELVVEGCTGWRFIAEECQRAGVKVHVADPAEAAHLSRSNKRRAKTDRIDARKLRELAERGEVPDSWIPPFHVLEVRTKVRLYHDLIDERSSWQHRIAATLFHLGADKQEKLLLGDRSRLHASDALTPAARDAIETALRMIETLDGEVERLRAELVAYSHRQAGCVELAKEFGIGPLTAVTVWSELGDTRRFSSSDDAVRHTGLDITVYSSDGRRVRGHITRQGSPLLRWAMFEAARHACKPTSPDHDYYLEVAERLGKKRAALSVARKLTRRCHHRLRALGDDAFAPAS

SEQ ID NO: 220884 - protein, 402 aa, unidentified
MNSVGIDISKGRSTVAVMRPFGEVVISPFEVRHTDSELSELARQLKSLDGETRVVMEATGNYHTPVAKLLHDAGLYVSVVNAKLVHGYGNNDLRRVKTDKKDAVKLANYGLDRWLTLPRYVPEEDTRLLLKNCYRQYRQYSKVQTVLKNNLISLLDTVFPNVNRLFSSPIRGDGSEKWVDFVAEFWHCRCVSEKSEKAFTNKYQRWCKTHGYNFSEAKAHTIHAEASGHIGIMPKSETTKLLVEQAVVQLRATSAALIALKREMLTLAAQLPEYPVVMGMFGVGPTLGPQLIAEIGDVRRFYSKKALVAYAGLDAPPNDSGDVTGRHKSMSKIGASSLRRTLFLVMGIYLQNAPLDEPVYQFMDRKRAEGKPFRVYMMASANKFLRIYYATVKAYLESLEQV

SEQ ID NO: 220885 - protein, 347 aa, unidentified
MRFYTKQHKMYCGIDLHARTMYVCILSQAGEIMVHQNFTANPETFLKVIAPYRDDVVVAVECIFTWYWLADLCVREGIPFVLGHALYMKAIHGGKAKNDRIDAQKVAVLLRGGMLPQAYVYPAEMRATRDLLRRRIHLMRKRAELLTHVQQTNSQYNLPDIGKKIAYKTNRAGVAERFADPAVQKSVEVDLALIDYYDQLLRDLELAIVKTAKQHDANTLYLLQTVPGIGKILSLVLLYEMHDIARFPRVQDFVSYCRLVKCAKESAGKRYGTSGTKIGNAYLKWAFSEAAVLFLRNNPVGQKYLTRLEKKHGKGKALTVLAHKLARAVYYMLKRGTAFTMDKFLHG

SEQ ID NO: 220886 - protein, 331 aa, unidentified
MDEVRRFVGIDVAKAALDVFIGSAGAAFSVANDEVGIRELLRQLEPADFVILEATGGLETPVASALAAAGIAVAIVNPRQVRDFARATGKLAKTDRLDAEVLARFGEAVRPEARPLADEQAQALEALVTRRRQLVEMLTAEKNRRARAPKVLHRSIDEHIRWLEKRLSGFDDEVGQLIRNTPLWRERDELLRSVPGVGKVLSSTLLAQLPELGMLNRKQIAALAGLAPFNRDSGSMRGSRCIWGGRAQVRRVLYMATVAGVRSNPTVRTFYLRLRANGKHAKPALIACMRKFLVILNAMLHDKTHWQTPALTSPTSPLSPLLGAVSEHGCW

SEQ ID NO: 220887 - protein, 428 aa, unidentified
MKYNKNEKLKQITDETLIVGVDISKDFHVARALDFRGIELGESITFDNDHMGIDSFLEWASDLRIKFDKSTQIIGMEPTGPYWFNLARLLQSVDLKVVTVNPHHVKKSKELDDNSQTKTDYKDAKVIAQLVKDARFASPNILDGIYEDLRNYKKVKELITKDLVASKNQVHNWLVRFFPEYHKVFKNWESQSFMHILRTYVYPCVIAKYSPEELYEELPKKIRKGSGKNKIIRLVSVCKTSIGCLEGHKSAAFELRNLLNKYEIAKQELEMVSEEMKELCGDMEETKLIGEIKGLTVKTACDIVSELGDIRSYSHPDQLIKMAGLSLMENSSGKKKGQTTISKRGRSGLRKALYLAIFSLIRHNQGFKELHKYYTTRAQNQLKGKQSMMALARKLLRIIFACVTKSESYDGQKMLDDIHRPEEFLAIA

SEQ ID NO: 220888 - protein, 339 aa, unidentified
MNQHNLIAIDLAKNVFQVCGMNARQKVTFNKQLRRSELAMFMQHQPPLEVVMEACYSSHYWGRCFEAMGHTVKLLPAQHVAPFVRGNKSDHNDALAIAEAAHRPNIKSVAIKSAEQQDIQALHRLRERHVSQRTALINQTRGLLSEYGIVAPLGHKAFCVLLREISQPVARQLSAQLKTHINQIADEYYRETDRIKEMTDTLKALAVANPLCERLLTIPGIGVINATAIVSAIGNGSQFANGREFAVWLGLTPRQSSSGTTFTSGGITKRGNRYLRKQLVHGARAVLSRSKLKTDPLSRWINQLVARRGVQKACVALATRLARIAWVVLQRQENYKALP

SEQ ID NO: 220889 - protein, 393 aa, unidentified
MIYVGVDVASEKHDVAICNAEGELLCDVFTILNNREGFNTLIAAITKFSGKKDFSDTKIGLEATGHYSNNILSFLSQKRLCVKVFNPLVVSNLRKSATLRKTKTDKSDAKFLAKMLLSDHSKPYKESIPQIAELKTLTRHRKRLVAEISKHKLHISRLVTIIFPEYHGLFSDLYGRTSVTVLEEFGCATELANANIIRLTNIIWKTSKHRLGREKADEIRNFARVSVGNCNRGELFELKHHLSILKILKCQKHELENEIKLIMDELNSPIMTIKGVSYGTGAAILAEIGDVHNFQNASKLLAFAGLEPSNYQSGKFTANKTPMVKHGSKYLRYAFMQAASSVSRHNSGFYEYYGKKSVEGKHHYVVLSHVAKKLVRMVFSMLKYNTEYAPLIA

SEQ ID NO: 220890 - protein, 367 aa, unidentified
MIVNEVAKNVEKIISIDTAKNSFQVLVVNQKTGKKKNTKVQRSKFVEYILKQGPCLIFMESCSASQHWARLFESFGFTVKLIAAQHVKAFLRNRRVKNDERDAEAIYTCGIQPDTKFVRIKTVEEQTVALLHTLRKAAVSQRVELSNRIRGILAEFGIVVARGRGSFNSEIEALFNECEKIHDVNLRVAISSLFEDYHYLEQREKELSEKIESLNKDNELVKIALTCPGVGSLTASAIVAEVGDASQFRNGREMAAWNGVVPSQHSTGGRSTLGGITKTGNRYLRTLLAQCACAVIQNASRHLEQGKDTHLDRFALRLKLNGKPAKKIMIAVANKIIRILWAMLTQRKTFENKAEETSDISAELQLA

SEQ ID NO: 220891 - protein, 363 aa, unidentified
MTAWLQFLLENRKVYHAMSKIYQEVNMKYVGLDIHKEFCVATEMDEEGNIIRDGRIETSREAIEEFFSSVERGKVAIESTGIWDYIYEILDVLGLEVKLVNPVKARAIAAAKIKTDKVDATILAHLLRSNLIPEVYIGNREMRELKRLINERLLMKKIGNQIKNRIRSELLRRGIRPEMNIFTKKGEQYLRALRINSIIRELRVLESVEKEIHSIDEELLEYYENNEDAQLLATIPGVGYYTALTLAAVIGDINRFPSSERLSSYFGLVPSTKQSANTVYRGPITKEGSSTVRWLLIQCAWVHVTHCTDSFLTKFYQRIAKKKGKRKAIVAMARKMTRVIYWMLKTKEPFHVEGYKIRDIHAE

SEQ ID NO: 220892 - protein, 339 aa, unidentified
MELHAVGIDLAKSVFQLHGANAHGKTVLQKRVSRAKLMETVAQLPPCLIGIEACQGAHQWARRFEALGQTVRLISPQFVTPYRRGNKNDGNDAAAICEAVTRADMRFVPVKQAHQLDVQAVHRARDRIVKARTALINQIRGCLAEHGIVMPQGSNKVRQRLPEILEDAENGLSGLARQTYHLLLEELQALDARRAQFDAVLKQAFKSDEACQRLETIPGVGILTATAMVAAVGGAREFKNGRQMAAFLGLVPRQHSSGEKQRLGGISKRGNTPLRTLLIHGARAVLRFAGTKTDVRSRWLQALVARRGMNIAAVALANKTARTCWALLAKGECYRPASV

SEQ ID NO: 220893 - protein, 457 aa, unidentified
MTGKNKPVQSRAMFPIHPRAAAIDVGAKMHVAAVGPDRASEPVRTFGTFTDDLHRLADWFQECGIETVAMESTGVYWIPVFEILEQRGFEVLLVNARDAKHVPGRKTDISDAQWLQRLHEFGLLRASFLPKGEIAALRAYLRQRERLVELSASHIQHMQKALMQMNVQVHHVVSDIMGVTGLRILRAIVAGERDPGVLAANRDRRCRADVETIQRALTGTWRAEHLFALEQALALYDTCQEKVVACDKKIEATLKRIEAQSAKPVGELPPARSTKRQPNAVDFDVRTALHAVLGVDLTQIHGLGPYLALKLVGECGTDLSAWPSAKHFTSWLGLAPSNKISGGKVLSSSTRRTNSRASSLLRLAAVTVGRTDTALGAFFRRLSSRVGKAKAVTATARKIAVLFYNTLRHGMDYADPGASYYEERYRQRVLTNLQRRAKSLGYVLQQADAAPAANGVS

SEQ ID NO: 220894 - protein, 366 aa, unidentified
MEKIMTPIGTPVGIDVHKRSCQVVEFDHGGIKVRKSMTNTREGWLEMVAELPPDAEIGLEVSTAGYFAMSVLEEAGWRERAHWVHTAGIDSNRRQKNDRLDAERLARKLAAHHLDPLPEAWFPPPEIRALRLRARQRCWLALLRTQAKNHLQSLLGMHGLQAPGTDPFGAAGEKWLAEQTLPLPLGESIPQIQRLLQLLEEEIEVSEKYLQAVDGQFPQLPLLRTIPGIGPILAPVIWSEIGTIERFRSAKALANDTGLVASYYDSGDVKVSGPITRQGSRWLRWAFVTAANVALQHRNPFARRYHRLRRSKKPNVAKAAIAHSLARCVYGVLKHGCPYREDRWGRLVGVLEQEARAGARSTKTVV

SEQ ID NO: 220895 - protein, 395 aa, unidentified
MKTAASTFSPEELSIKYVCGIDIGSQSCVGCILRSDKSVIVKTLPFANARQGWQLWEEKLSQLDAAPSQILIGMEATSRYGENLYHELEQRGYVLRLLHPGQTHQFHQQQGLRAKTDRLDAMTIARVLLSGEARAGYVPSERIATYRELVRLHTQLSDETAAYQNEIQALVVVLFPEFTQVFADPCLPTALAVLKAFPSAQAVVEAGVEPIAVLLHQMPAHFGRPTAQKLVAFARKSGSSGRAVAGRSMSLRILCDQLEHTQANLARLEAEIEQLLTNDPGVKGIQQVPEFGPKTVAVLRAELGDVERFARTDEVIAYGGMDIEIKESGLWKGKAKLSKHGSGLLRRMLYLAALRSIHLEGSAFGAYYRRLVERGLKKGSALIVTKGIKWPPKKP

SEQ ID NO: 220896 - protein, 329 aa, unidentified
MSQCTPALRGSQSGDTYWGVDVASQKLDLACYGQDQLRSFANDQEGIAQVVQILRHQPVDRIVVEATGGYENPLVTQLVAAGLPVVVINPRQARDYARALGILAKTDALDARVLARFAHDVRPELRQFPSENERFFADLVTRRRQLVDLRTAELNRRQQIARPELTASIEAVLTVLNQQLAEVERQLARLIQDNLHWKAKDKLLQSVKGVGPATSRALIAELPELGTLTRRQIAKLAGVAPLNRDSGKFRGKQVIGHGRSSVRTSLYMAAFNAKRSNAQIRAFYQRLRAAGKPFKLAMTACMRKLLSVLNAILHTNTPWRNPLLTPENS

SEQ ID NO: 220897 - protein, 415 aa, unidentified
MKEEEDKVKRYYLGVDWSDEFHQVWAIDPEGKKVIEKKVLETVDGLSEFGRWLDECRAKGIELWAAIEKPAGRIVDFLLDHGVVVYPVNPKALDRVRDRFRMSQSKSDSFDAYVLAEYLRTDHAHLRALAPSSEQAQELKMLTRDHHRLGRHKTRILNLLDRTLKEYYPRPLEVFSDLESKTALDFLTKYPTPEALSNLNRRQWNRFAKRDHHLGEARCTELWEQLNQPQLKVPEHVVRAKAQLLTVLVVQLKTLIQAVESYSERVQSFFASMPAAELVHSLPGGKSGTILPMLWAELGDAKSRWESFKHLQAEAGAVPVTKSSGKSRVVVFRYACNKLMRYASYWMSFNSLNRCEWANKYYRDQRAKGHHHPQALRALAAKWLKIIFVMWRDHKPYDENYHLANITRQQMRQAA

SEQ ID NO: 220898 - protein, 379 aa, unidentified
MHHNTLFVGMDVHKESFTLCCYCAATEKFFRIQKISPDSSLVLKYLKSAKEFYDVNAHIVCGYEAGCLGYSLFRELSAAGVECVILAPSTIPTEKGKKRLKTDKRDAMRIAQCLANGTYSPVHIPSEETEEIKDYIRMRNDHKLALKRIKQQINAFCLRHKLQYVTGKHKWTQKHIDWLSKLKLNDMQREILNEYLLTLNHLIERIALMDKRIEELSQKPEYKDKAKKLSCFIGIKTITAMTVLAEVGDFNRFADAGHFASYLGLIPGEDSSGEKQHRLSITKAGNTQVRRLLVEAAHCYNRGQIGYKSKDLKERQSGCSAESIAYADRANVRLRKRYFQFVRRNKNPNVACVAIARELACFIWGMMVNKYDRSPQIVP

SEQ ID NO: 220899 - protein, 336 aa, unidentified
MRSIGLDVHRDFCEVAIAEGGALRSAGRIETTPAALRLFAESLGSEDSVALEATTQAAQVARLIEPHVARVVIANTRKLAAITQAKAKTDRLDARTLARLLASGYLEQVWAPDEETRSLRRLVARRSRLVRARTRAKNEVHGVLARNLCPRPPVTDAFGKAGRRWLSTLVLPDDEQLTLEGCLRQIDFLDEEVGAIERKIAERALQSVDIRRLMTVPGVNVQTAAAFVASVGDIGRFSSPRKLVSYLGLDPRVRQSGSEVARHGHISKAGSAEARHMLGEVAWKVMMTPGPLRAFFERVRSRRGPQVAATATARKLVVSSGTCSRGKRTMRSRARR

SEQ ID NO: 220900 - protein, 343 aa, unidentified
MEYFAGLDVSVKDTSVCIVDDTGKIVREVKVASEPDALLPVLTNPAYHFKRIGLEAGPLSQWLFSALAEASLPAICVETRHMRAVLKAQINKTDRNDARGIAQMMRVGLYRPVHVKTLRSQKLRMLLTHRKLLQSKAIAIENDLRATLRNFGLKVGVVGTVKFEMRIKQLVENVPDLAMLVEPLLIVRRTLREQIGILHRRLLVIVRDDEVCRRLMTVPGVGPVVALTYRATVDVPARFRNSKAVGAVFGLTPSKYQSGEIDRTGAISKCGDEMMRMMLYEAAHIMLVRSTKWSWLKAWAMQIARRRGLKKAVVALARRLAVIMHRIWVDGTEFRWTRETAAA

SEQ ID NO: 220901 - protein, 339 aa, unidentified
MFVGTIGTRQADLDRLIRRLQGKAAELRFAYEAGPSGYGLYRYLTRKGLACDVVAPSLIPRRPGDKVKTDRRDAVELARLFRSGDLTAVHVPTVEDEAIRDLCRARDAARVTLKNARLRLKAFLLRLGLHYVGRADWNAAHKRYLAKVVCPTPAQQIVFQEGIRAVDEQVDRLQRIEAELLALAPHWGRYPVVQALQALRGVQWIVALTVVAELGDLTRFDNPRQLAAFVGLVPSEYSSGTARRLGGITKAGNGRARRVLVEAAWAYRHPAKVSLHIQQRIDQLPKALQDLGWKAQVRLCKRYRRLVARGKHPNVVVTAIARELIAFMWAIARAMPGHA

SEQ ID NO: 220902 - protein, 369 aa, unidentified
MANRSMFVGLDVHKDTIDVSSADGGRAGEVRHYGVIASDVEPLEKVRLALRAPGRVLHFVYEAGPCGFGIYRHLTGRGEDCVVVSPSMIPKRSGDRVKTDRRDSQMLARLHRAGELRAIDVPDDTDEAMRDLVRAREDAVAVGIQAKYRVKAFLLRQGRRYPGRDGWTLAYRRWLADLSFPSTPQHVALQEYRDTIDETERRLERLTEQLRQLVPTWRWAPVVAALQALRGISFITAVGLVAELGDLRRFRQPRELMAYLGLVPSEHSSGPSVRRGGITKAGNPHVRRLLAEAAWAYQGLPRIGRQHLYRQEALPKVVCDIAWTAQLRLTARFRRLVARGKAKPNVATAVARELTGFIWAIACEVTPAP

SEQ ID NO: 220903 - protein, 407 aa, unidentified
MIFVGVDWAEAHHDVHVMDEDARRLGGGRLPEGVEGITRFHELVFAHVEEPSEVIIGIETDRGLFVSALVAAGYAVFAVNPMSTSRYRERHSSSGAKSDPGDAKVLADMVRTDRHNHRLVAGDSETVEAVKVLARAHQSMIWSRGRQTNALRSALREFYPAALVAFDDLASQDALEILRIAPTPTLGAALSKAKIASALRRGGRQRRIEQRAEEIQSALRSPQLSGSVVVASAMGVSVSATVAVIAAMVDQIAHLAKELEAGFEQHPAAKVVRSLPGLGTVLGARVLGEFGDEPDRYANAKSRKNYAGTSPITRASGTKRVVLARYARNHRLADAIYQWAFASLNASPGARAFYDAHRVAGDTHHAALRSLGNRLVGILHGCLANDALYDERVAWEHRSDNKSAEAA

SEQ ID NO: 220904 - protein, 411 aa, unidentified
MDRVIIGVDPHKLSVTIEARDNREILRATGRFGTDARSYHQLLKVARQWPERVWAVEGANGIGRPLTQRLLASGEQVLDVPARLAARARVSGTGQGRKTDAADAHAIVMVALRDKGLREVTADPELAVLRMLCDRRDELSRARNQALNRLHRLFLDLLPGGAPVKKSVSQYQVLLATVRPRDLAGKTRRRMAAEELEDLHRLDAKLKSMKAELKTAVAATGSHLMDIHGIGPAGAARILADVGDIARFPDRNHFASWTGTAPIDASSGQHIRHRLSRAGNRRLNHVLYIAGIVQLRHDTAGRACHRRKLAAGKTPMEAMRCLRRRLSDAVCRQLAADACSQANASPGGHPGASVQSSAAGLSPDTGTSDQPLPGPAYPTLPPPGEGLKTPAAPVPATPRQLRDRALDKTPS

SEQ ID NO: 220905 - protein, 412 aa, unidentified
MRVLHERCCGLDIHKKFVVACLLETDPDGTIRKDIRTYSTMTNDLLALCAWLGAEHCTHVVMESTASFWRPIYNLLEGHVELLVVNAYHVKAVPGRKTDVKDAEWLADLLRHGLVRASFIPSPVQRHQRDLTRYRIHLIEERARLTNRLQVVLEDANIKLAAVVTDVRGVSARAILQALLGGETDSHILAELARGRLRAKRELLAQAVVGRFAPHHAFLVSEQLAQLDYLEEAIARVSAEIEQQLAAEGEAVALLDSIPGVSLRTAQVLIAELGSDLSRFPSAQHLASWAGMCPGNAQSGGRRLSGRTRTGNAWLRRTLVEIAHVAAKTKDTYLAAQYRRIAARRGKKRALIAVGHSVLVMIYHILTKRVPYHELGAQYFDERERDHVQQRLVHRLERLGYAVTLTTPQPTP

SEQ ID NO: 220906 - protein, 428 aa, unidentified
MSENSTTHPEPEFVGFVGIDWADQKHAWCSQRAGATQREQGELEHTPEMVEAWVSQLAQRFGPGPIAVAVEQGKGALVFMLNQYEGFHLFPVPSTMSASMRKSLYPSGSKDDPRDAELLLDLLLQHRKKLRRLMPDKEVTRRIQNLVEERRTWVDENTTQLNRLTGYLKVYFPQMLEWFEKLDTKLVCDFLERWPSLEELQKVAPAELRKFFRQRRGRHQELTERRLEGIRPAMPAIRDRAVLEAKQAMVQVSAQLLRTLLEGIANLDSKIEEAASAHPDFFIFKSLPGAGSALAPRLLAAFGSQRDRYGSAEEVQKHSGIAPVMERSGKKKWVHFRWACPKFLRQSFHEWAGHSISQSAWARAYYQQQRGRGKDHHAAVRALAFKWIRILYRCWQDRVAYDENKYLAALARRGSPLSFVLTVTAPTL

SEQ ID NO: 220907 - protein, 339 aa, unidentified
MKLYGGIDLHSNNSVLVLIDEQDKVVYEKRLDNKLELILDELKKHQKHVIGLAVESTYNWYWLVDGLMEAGYLLHLVNTAAVKQYDGLKYTDDRHDAKHLAHLLRLGILPQGYIYPKAQRAVRDLLRKRMQLVQQQTANVLSIGSLITRLTGRGPTCRHIKQMTDEELSHMGIEGEWKLALNANLSVLHCLSDQIKAVEKVVLARVKPEPGFTSLLSVAGVGEILGMTIWLETGDIGRFKQVGNYASYCRCVGSQKLSNGKKKGQGNHKNGNKYLSWAYVEAANFGRRYYAPIDRFYQRKRARTNAIVATKACAHKLARASYYVLRDQVPFDIERAFST

SEQ ID NO: 220908 - protein, 353 aa, unidentified
MTSVTDLREVVDVVIGVDTHVHTHSAAAVDARTGGVLDEITVEASADGYARLVEFANEHAALRAWAIEGTGGHGAGLTRHLARREEVVVELDRPQRPRRRNGAKSDPLDAIRAAREALSRAKFGSPRGSGDRQALSVLLAARRSAVNASTDAQRQVFSLVIAAPEPIRERFRGQKLPVMIRTAASMRLNSAWDTETTTTVVVLRSLARRARMLAEEAAQHEKAIRVIVRAWRPDLLAQPGIGPIVAATVLCAWSHPGRVHSEAAFAMLAGAAPIPASSGQVTNRHRLNRYGDRQLNRALHTIVLSRIRYDQATQTYVARRTTEGKTTREIKRCLKRYIARDLFRLLEHQHTTA

SEQ ID NO: 220909 - protein, 423 aa, unidentified
MMKLKYSICCGLDVHKNVIVATIVTTNKDGISEYLQKSFSTINSDIQRFHNWLIENNCYHVCMESTGKYWIPIFNYLENDIDVCLTHPKYVKAIKGKKTDKKDSKWIADLYKFDLVRCSFIPPKDFRQLRELSRYRFKLVCMKSSEKNRIQNCMTISNVGIASVLSDPFGKTATEIISYLLEHTADSMDEKAVRKLIKKGAKSKSDEIIEAIKGYTIETDQAKKLELARGHLEYLDDMITQTEVELYVRIKPYYEFVEFVSTMPGMTELSSTIVLAETGVDMDIFDDAKHLCSWCGLSPANNESAGKKKSVRIAKAGDYLKPMMVQCALAAIKSKKQPYFAIKYGRIKKRRGHKKAIIAIARMMMVCIYHMVSEKKPFTPTDYEELMDPQNHVESVVLNENNVFAYLESLGYDRSKLVKRNDN

SEQ ID NO: 220910 - protein, 453 aa, unidentified
MAQGSGLTRGDRNRNRRIAALREAVRRDRAVLAIDLGEDKQVAVLLDHEGRALARKIVKAKAHQLAGLLAWAAERAVKAGFPGLTVACEPTGHRWKALMGLADSAGHGFVCVQSLAVARAREGDDYTRDKTDHRDAYLIGKLVIRLDCYLPERADEAWARLRHLGARRFAQVADVTSCMQQAGDLLGCAWPAPLAAAARPLESVTWLAGMAVVTGRCCGQPGRLRTMGYEKFLAAVRRELPRWGGKYVRHSIVRGLWEALGDTGGVAAQRRGALERLHLLLDDWRALRARLADTEARMTGLLDDLGLTALVTSIDGVSALSGAVMLAETGDLTRFTSGRAVVKHAGLNPSEHTSATISGQTRISRRGRPALRSAAWRAVWGALRHNKVLAAKHAHLTGRDGNRLADGQARTACAAALLRWLWAVITAGQAWDARIAAGQIPAPGRAVTCAAAA

SEQ ID NO: 220911 - protein, 318 aa, unidentified
MGSMDKGNPSTTIAGIDVGKRQLDVAVHGRDQQHQVTNDPAGWETLVGWLDERGIKRVGLEATAGYERGIRARLEAAGLEVVVHQPLEVKLFARLKRRRAKTDRLDAALIAAATAQVDTVRAAQDPRLAELAERLTAYEQVSDQAAQLKTFMEHVALPDLVASLGEQIQSLSRLKARLAREILAAIKAWPDLLARWSLLQSLPGVGPVVAASLVVRMPELGAMRRGQPAALTGVAPFDRQSGQWRGQSFIGGGRSRPRRMLYLAAVAAKRFDPGFKAFADRLLAAGKPPKVAIVAVMRKLIEAANLVLARQQPWLRHV

SEQ ID NO: 220912 - protein, 363 aa, unidentified
MNATTVAVDLAKSVFQVAVADANWMPIESHRLTRAQFERWFANREVGRVVMEACGSAHHWARWLNGLGIEVRLLPAAYIRAYVKRNKTDAADACALLEAARCADIVPVQVKSVEQQALQGLHRIRSRWMGTRTSRINTLRGFCREFGLIVPQGARTGVEAMSRALADPHSAVPPLIRETMKLLIEEIRLLEQRIAQLEGELTRLARQSLACTQLLTIPGVGLLTATAMVAATGGGVAHFKDARHFASWFGLTPKEFSSGSTRKLGRISKKGDRYLRMLLTHGARALLRAAELARRAGKTLDGLRTWATEVQARTHHNKAACALANKLARVCYAVLRDHQPYGNPQPRPEKKLTRQALRLLPDC

SEQ ID NO: 220913 - protein, 430 aa, unidentified
MKSNTQNAKIEAITEKTLVLGIDVGSEMHYARAFDYRGIEYSKKPFKFSNTEAGFATFKEWILDLKERHEKDKVVPGMEPTGHYWFNLGKFLQDNEMKPVLVNPHHVKKSKELDDNNPTKNDRKDPKVIAGLVREGRYMIPYLPEGVYADLRTASNIRFQLQAELTRIQNRISRWFNIYFPEYKTVYGKPDAKSGMLILKAAPLPEDILTLGIDGVNQIWRDAKLRAVGKARAKTLIEAAEHSVGSKEGAVSARMEIRMLLEDYESRNIRLQEVMALIEGLVKQIPMAEKLLEIKGVGIRTVSGFLAEVGDISRFNNPKELQKLAGLALVENSSGKHKGETTISRRGRKRLRYLLFEVAMSLVAKNPEFRELHNYYTTRRLNPLKKMQSLMAIAAKLIRVFYAMLTKGVDYDPKKMVSDIRRPAAYLQAA

SEQ ID NO: 220914 - protein, 401 aa, unidentified
MRFFVGIDWATQAHAVCVLDDTGHIHWQDSVRHTAEGLAELLGHLRRFGRRGPVRIALERPSGLLVDTLLAAGFEVTPVHPNALKASRPRYSAAGGKSDPGDAFILADVLRTDGHRFQPLRPPSDDTRALRALVRGRDDLVAQRVALANQLRALLERFWPGAAAIFADVDSPIALAFLTRYPTPQSAAHLGEKRLARFLRQHAYCGRRPVTDLLARLRQAPPSQVGEAEAEASAEVVRALVAVLSPLLAHLQQLSAAIDAALPQHPDGPLVQSLPRSGTVNAAQILAELGDDRARFASDEQLAAEAGLAPVTHASGKHRAVAFRWACNKRLRRALTTFADNSRHASRWAALVYQRARARGCRHQHAVRILARAWVRILWRCWQDRAPYDVTRHRAAQAIAA

SEQ ID NO: 220915 - protein, 395 aa, unidentified
MTKVRTWAGLDVHAAATVACVVDVPSGEMSVQRLAGRTSEVTAFCARLPAPVRVAYEAGPTGFELARALAAAGVACVVAAPGKIERPAQDRVKTDRRDAERLVRLLMIGGLHPVRVPSGEEEALRDLVRAREDIRGDLMRSRHRLGKLLLRHDVRYDDTASAWTTAHRAWLSRVDLGERAAQATLLDYLGAIDALVIRRDTIERMIAELVPHSPWAEQVARLRCLRGIDTLSAVGLCAEIGDFSRFDRPGKLASYLGLVPSERSSGQTRRQGAITKSGSRHARRLLVEAAWHYRRPPRRGTTLQRRHEGQPAQVLAISWKAQQRASTTSGAASTASAANAKRSSRSPSPATSPASAGRSPPPLRRLDRPHPCHCSAEEAAEPARPPRARAPAVEL

SEQ ID NO: 220916 - protein, 366 aa, unidentified
MIKTKIKCKVMKKFLIGIDISKEKFDVTVIKSLGEGFECEQVHYDVYDNKVRGYSAMLKDMTTLGVRCGDSLFCMETTGAYELHLCDYLYGKGYDVWRESALQIKWSTGVAKSKNDKADSERIARYALRHQDAAVLYVPVNETLRTLKALSLYRERLVDERRAKEVSIKEIRATQKMNGDLQWIRTNSEQSVKRLKKDIMECEERIMAVIEGDEELKRTYGHITSIKGIGAVNAVAMIVSTGNFKTIPTARKAASYYGIAPFFAQSGSSVHHRKNVSNLSNRRLKGTLTQAAMCAKRFNEDMKAYYDRLLAAGKPRRVAVNDVRNKLVRIMYAMVQNDCDYEPKHEVRRTERVLQTTERHIDKAVG

SEQ ID NO: 220917 - protein, 366 aa, unidentified
MKIGPVAIERIQIFKESQRTIGMDLGDRSSQYCILNEAGEVIWESKLPTTPKGIEEVFSRIPRSRMALETGTHSPWVSRQLTELGHEVIVAHARNVRLIGESSRKDDRLDARTLARLARIDPGLLSPVRHRSAKAQIHLTVIRARATLVSARTALVNAARGLTKSYGARLPKCGSEQMNREIAPGLSQELREALDPLLAEIESLNERIAEYDRRIEKVAKEAYPEAALLRQVKGVGPLIALTYVLTLDDPHRFRRSRDAGCFLGLRPGRRNSGMSEPQMHISKEGDRYLRTLLVQGAHYILGPFGQDSDLRRWGLKLAKRSGKNAKKRAVVAVARKLAVLLHKLWISGEDYEPPRNNNHKVVAAVA

SEQ ID NO: 220918 - protein, 350 aa, unidentified
MSHKSTPSTISTIGIDIGKNSFHLVGLDQRGAIVLQQKVSRAQLERRLANIPRCLIGMEACSGSHHIGRQLAALGHDVRLIPAQYVKPFLKGYKNDYRDAEAIAEAVQRPTMHFVAIKTPEQMDLLALHRVRSRLVGQRTGVINQIRGFLIERGIIVRQGVVPLRKALPDILSSQTGPLSPRMIGLITDLAQDWRRLDERIAAVSAEIEALAEQDSSCQRLMTVPGIGPIISSAVVAAIGNGAGFKQGRDFGAWLGLVPEQESTGDRTILGKISKRGNKYLRTLFVQAAHVVLVRRPSAAMRGLWPWIEQASKRLHRNMLAIALANKLARIAWAVLARGHEYQPRITAHA

SEQ ID NO: 220919 - protein, 410 aa, unidentified
MTKEDFIYVGIDLHKETHTAVMIDCYNQKLGEITFPNRPADFPKLVTKVKKCNTDAKEVVYGLENAYGYGRPLAVWLIDKGYFVKDVNTAISHRQAKHRGAMYRKSDSDDAEAIALATLNMLDKLPDACPNDAYWSLGQLVHRRDNIMKQRTRLVNQLHEQLCIAYPSYKQFFNDISRPTALYFWEHYPSRKYLKGKSVEDLRTELVPVSHNRCSTKNCEKILDAVASDKVKNNAYQDAGDMVTLSIVSDLQHYDSQLAEVDKMLEQMYKMLGCTLTTIPGVNVITAVKILAEIGDIKRFSNANKLAQFAGIAPLHLSSSGKGKDVATKQGNRRLQATIYFLAIQMVQVSSKGTPRNSVVRAYYEKRKAEGKTSQQALICISRRLISIIYGMLKHGTEYRMPVVESAGEK

SEQ ID NO: 220920 - protein, 385 aa, unidentified
MKRQLDLHGNVVASFCPTTLDALTVSRRGAHREASCQMDTIGLDLHKRESQLCIGHADGTITEQRIVTSRERFTAVLGNRPRARVLLEASTESEWVAQHLEGLGHEVIVADPNYAPMYATRSRRVKTDKRDARTLMEACRAGTYRLAHRLSAPRRHVRAELAVRDAVVRTRTRYVALAKALVRRDGLRVPSSAAERVGAHLQALPLSPALAGELTPLLTLLPPLNATIAAADQRIAELEQTDPIVALLMTAPGVGGVTASALVATIDDITRFRSAHQCEAYLGLVPGERSSGEQRRIGPITKAGNRRTRWLLVEAAWRILRSQDPASAALRTWALTIAARRGKRIAVVALARRLAGIVYAMWRDGVPYDGTKIRAPRRARGSQAS

SEQ ID NO: 220921 - protein, 318 aa, unidentified
MNTKINQSINVGVDTGKTQLDIHIRPLDLFFSVENNDKGIKKALKTIKSHCPERIVIEATGRLEMPFVLACAEAQLPIVRANPVHIKRFAGAIGRRAKNDRLDAELIAHYGEEIKPAFTVIKPKNIRLMSDLVIRRNQLLSMQTMEKNRIQILPASLHPTIKPMLTTIKNQITKLEEKLVKLIEDSPEYQAKNTILQSVPGIGNIAAASIISNVPELGYITNKQAASLIGVAPITRESGRYKGKRVIQGGRAQVRTVLYMAMMSAMQCNPVFKATYARLVAAGKPKKVAIIACVRKMVVTLNSMLRDGAMWDENTAKN

SEQ ID NO: 220922 - protein, 315 aa, unidentified
MSSQVFVGIDVAKAQLDIALRPTRERWAVPNDDPGIAALVAQLQAVQPTLIVLEATGGYQRAVVAALAAAGLPLAVVNPRQARDFAKATGQLAKTDALDARALAHFAEAVRPLPRPLPDAQAAELRALLVRRRQLIAMRTAEHNRLGSASRRLQADIQAHITWLNERLAALDDDLDTTLRASPVWREHEALLRSVPGIGSVCTRTLLLELPELGALSRQRLAALVGVAPFNRDSGTLRGSRTVWGGRAHVRATLYMSALVAVRYNPVLKAFYERLRTAGKAAKVALTACMRKLLTILNAMVKHHTTWQPQEVANA

SEQ ID NO: 220923 - protein, 421 aa, unidentified
MENTAARKRKQVPEGYLIIGVDPHKKRHAAVAITQDFTIRDKFKFDNTREGLEVLVRRVRMEMVKAGCRGVMFAIETGGHYWRNIAYFLDDQGIPFRFINQYTLKRRREGKDLNHKKNDYRDSEVAAQLLCTGEFTETKVPQGVYAELRTAHNAYRRLVKERTRITNLVKGLLDGLFPEFTEVFKDPCGLTALSVLSTCAIPRVIAGMTEDEFVAAIEAKHLRRLMRKKLGALHNAAMTSIGIVAGARSVSSEISFLVEKHELIRRHICFIERTLVNLVDEAEEGKYLLSIRGLNYVAAAGLLAELGSFKLYRTAKQMIKMAGSNPTESESAGKRGPHTPMSKQGRPVLRYCAWTAVIPMLRFNSDFRAWAKQRRERPAHANPLNGREVVGAALNRLLRLAFAMVKNQTYYLSPQLVQVTG

SEQ ID NO: 220924 - protein, 351 aa, unidentified
MSQTPRTSITAVGIDIGKNSFHIVGQDDRGAIVLRQKWSRSQVEARFANMPPCLIGMEACVGAHHLSRKLKALGHDARLMPAKYVRPYSKGQKNDFRDAEAIAEAVQRPTMKFVATKTADQLDLQALHRVRERLVSQRTGIINQIRAFLLERGIAVRQGQRSLRAELPRILATPPDVLSPGMVRVIEGLAADWRWLDERIEGLSREIEELAKRDAGCERLMSIPGIGPIISSAMVAAIGTGDGFAKGRDFAAWLGLVPRQISTGDRTILGKISKRGNRYLRVLFVQAAWVVLVKVKPTRWEGHGLKHWIEAASKRLHHNVLAVALANKLARIAWSVLARGRAFESSKLQAA

SEQ ID NO: 220925 - protein, 339 aa, unidentified
MKVTTLGIDLAKSIFRLHGVDGRGAVVLRRQVTRKQLLPFLAKLSPCLVGMEACAGAHYWAREVEKLGHTVRLMSPHFVAPYRKSQKNDGNDAAAICEAVGRPSMRFVPVKSAAQQDVQALHRIRFQLIKWRTALANEIRGLLGEYGIVVARGIGPLRRQLSLILEDGENQLSGFFREMLGEMAERFKLVDQRIRQYDLKVDRVFGQDERCQRLAKVEGVGSLIATALVAAVGNAHDFKNGRELSAWLGLVPRQHSSGGRNVLLGISKRGDRYLRTLLIHGARAAVRVVERRRDHRSIVINRLKLKRGPNVTAVALANHNARVLWALLTRGEEYRPRCA

SEQ ID NO: 220926 - protein, 370 aa, unidentified
MRTLFVGLDVSKDDFKAAVKDDRNNLVMPPKSYKHDRSGLESFDRNVDEIKERFECNAIFGMEATGIYHLSLYQHLMDRQVHVKVFNTLELKRFKGRIRKTKTDELDAIAIAEALLLVREPSYHPTSEPELIHLRELCRLRDRLVKLASRCKIHATRDMDVLCRGYVNLFDDIFSPSSIAVLKASVRKTRLFKTDVRELTDILSRFMSRSGSEDKAKKLSNLFKNTVIPEHMREICILEIHILIQQYEVLKQQRKRIEDRIENCIEKINPWMITVPGIGPLTAGVILGELGDICRFNSPDQLTAYSGLDPSVMESGRSRRTGHISKRGSPILRETLYNAAFAAIRVNPVCKQFSTVPSPHQPENLITSAL

SEQ ID NO: 220927 - protein, 417 aa, unidentified
MENFAALIAIDWADKKHAVSLYDETAEGREQTTIKHTPEALNDWALALRTRFQGQPIAVCLEQSRGPLIYALLKYDFLVLYPINPATLAKYRQAFSPALGKDDPSDADYLLDLLQHHRERLTPWRPDDEKTRTLRYLVEQRRRLVNDGTRTTNRLTALLKSYFPQVLNWFSELRTLIVCDFLDRWPTLEAVQRTRPTTVNMYLRSHHSVRRETNERRLAEIKTAVPLTTDLAVLNSSKLIVKGLTAQLRTTIKALAELDRHIEALCQTHQDYELFSSLPGVGSIYAARLTAAMGSDRSRWTRVEDLLCFSGVAPVIERSGKQNWIRWRYFCPKFFRQSFVEYAEQSIQHSFWARAYYSMQRAKGKGHYAAVRALAFKWIRIIWKCWQTRTPYNEVIYLESLRKSGSPLLKFAAEHQA

SEQ ID NO: 220928 - protein, 325 aa, unidentified
MKAQIGIDVSKATLDVCYLEDIQTLRIKRQTFDNTSKGFKQLIRWLKKVTQQAYDKIQITLEATGVYHLKLANYLQSQQLKVCVINPLQAKYYAKGLGMRAKTDRLDSIMLSRYGWERAPLEWQPAPQEIVELKALNSRLDAVKKDIRREQNRLESAETANQCKAVIKLIKQSIRRMEKQVEKIVELIDELIQSNEQLKTNRMLIETIKGIGEVTSRYLIAEIYVGRFESASQCAAYMGLVPVPEQSGKTNKVKLSKAGNRQLKAKLYMAAISAKQHNPVLKEHYDRLIARGKSKMSALCAVMRRLVQICFGVIKHQKEFCLQVS

SEQ ID NO: 220929 - protein, 402 aa, unidentified
MNMNAVGIDVSKGKSTVTVLRPFGEVAASPFDVIHNDSDLKKLVELIKALPGESKVVMEYTGTYFEPIAQFLHNNGIFVSVVNALLVHDYGGNSLRKVKTDKKDALKLASYALDRWTELEEYIPADEQRKTLKLLNRQYNQSIKIQTMIKNNLISLTDSVFPGINKLFTSPERQSDGHEKWVDFLKAFPHRNSVAKLYLSSFKAKYKSWCSKNKYNYTDSKAEEIHAYARSVIAVLPLNDSIQLLVAQAVTQLNTILETVSSIRREMDRIASSLPEYETVMAMYGVGKVYGPQLIAEIGDTRRFRNRRAITAFAGLDAPPYQSGQLDVASRHISKRGSSALRKVLFQITEIFILNKPEDEPVYQFIDKKRSEGKHYYSYRIAAANKFLRIYYAKVNQVLDAR

SEQ ID NO: 220930 - protein, 414 aa, unidentified
MLGQAKQRTYCPTDFDIFLGMDVDKKSIDFTCSDSQKLLRSVHIPNHSESLVRYVQKHFPNQRVLFAYEAGPTGYGLYDGLRAAGFSCLVTPPSMIPTAPGQRVKTNRLDSKKITEALRAGQLKSIHVPSLTYRHLRHLVKVRDLVVRQIGGTKCRIKALLLFEGIPFPEARAKSYSWSRSVVVQLQKLSCSGAVRFRLDRLLEALEFQRQQYLKVTREIRSFCRQDPELKRSVSYLVSIPGIGQIVAPHLLARIGPGQNLQEHRVHELAAFLGWVPTERSTGDRVRRGSITRGGDSRLRSKLVQSAWTAIRQDPELREFYRSVYRRHPQPVAARKAIVAVARKLTTRIFAVLKEQRPFILRPQIHSRPLLPGEIGPRESLDDKQKEEDRDLPSFAPETEVPGPSPQRGASKPV

SEQ ID NO: 220931 - protein, 348 aa, unidentified
MKNKSFVGIDISKNVIDVSIFREDTNIKMFPHEVFNNTRKGFGDMCSWLKKSRVVLSQALFGMEFTGCYSLDLEKFLTSKNYSFCMLSTRIVKHHPMGTIDKRDKNDSAKIADFLYRYDGTECAKPYKLPSKAMQQLKQLVNERKFLVEQRTNFMNRMQMFETKEDSAMYESYIKKLNHDIEKIDQEECELMSKEEDVFDTFQNLLTIPGIGLVNATNIIAITRNFTAFDTARQYARYVGVAPCSHTSGISVKWRARPSAHCNGQVKADLSMAALRAVEYDVEMQMFYNRKLGGRKDSDTKRKALNAVKFKLIRRMFAIGKQKRKWEVLNTSDDRKNLHIEKSKASEL

SEQ ID NO: 220932 - protein, 368 aa, unidentified
MMGWMAPLRHLRAKLLSDRESAANEEPSMGEVTTIGLDLAKHVFQVHGVDAEGATVLRKQLRRAQVLTFFSRQPRCLVGLEACATAHYWARELRALGHEVRLMPAQYVKAYVKRNKNDAADAAAICEAVMRPTMRFVPVKTADQQAAVLLHRGRERLVRQRTGLVNALRGHLAEFGVIAPQGLRNVGKLVAIVRDEGDGRLPDLARQVLAVLAAQIEQLEAAVAALEKQLIAWHKSNPVSQRLASVPGIGPIIATAIAATVTEPSGFRSGREFAAWLGLVPRQNSTGGKNRLGRISKRGNQYLRRLLINGASANLLRSKATNADPWVIGLRRRRPSLVVAVALANKTARIAWAVMHRQENYRRVAAAA

SEQ ID NO: 220933 - protein, 391 aa, unidentified
MVCVGIDVAKDKHDCFILSSEGEVLADVFTISNNMEGFRCLLERIQACTTAQDKIKVGLEATGHYSYNILGFLLDNGLPTYVINPLHTNLYRKSLSLRKTKTDHVDAQTIAAMLMSDVDLKPYTDTAYHNEELKSLTRYRFDKVKERAKLKSSIARLVCILFPELEKLVPTLHMASVYALLDEFPSAHQIAVAHLTRLKALLLDSSKGHYKRDMAVKIRETARASIGSKMPAKSLELRHTIRLIRELDTEIEEVEATIQSIMDELNSPITTIPGIGTRMGAMILAEVGDFSRFESPDKVLAYAGLSPSTYQSGQLTNCHAHMEKRGSRYLRYALFNAAKFVCHWDPTFAAYLAKKRAEGKHYNVAISHAAKKLVRLIYALEKSGEPYRLAA

SEQ ID NO: 220934 - protein, 440 aa, unidentified
MSIDTTLTHNFRRNPTMKFKMQTKQNQLIERISVKHLVVGVDIAQQFHVARAVNFRGIVVGDPLTFKNSEEGFASFLKWIKNLQRLNNLDEAIVGMEPTGHYWINLSKWLSKQDIEVVTVNPHLVKRNKENRDNTQSKTDKKDALVIADMVKNGYYSEVRYTSEPFEKLRVLISNRDVVVKRLVSSINQLNRWVDIVFPELRQVFKDIKAKGAIATLRLFPSPMDLETLQPHEVIAGWKSIMKRQPGLKKALLLLQLAKKSVGTRQALDAYKFHLEQLLEEYDLAVTQLERVEQLVTEALNKIPFAKKLLTIKGISEISLAGILGEAGDLSGFSHGNSLLRHAGLHLAEASSGKWKGQIVISKRGRSRLRRFLYLATMSLVMNNPEFQALHSHNVKVKKMKKMKSIMKLIGKLARIFVGISRRNESYCPDKVKSFSPLAA

SEQ ID NO: 220935 - protein, 424 aa, unidentified
MKVTYQTCCGVDVHKSFLVATIVKTTGGIEPSYQKKRFSTFNNSILEFKQWLLDNDCHDVCMESTGKYWVPVFNLLEDEINVVIANPKWVKAVKGNKDDTKDSKWIGDLFRLGLVKGSYIPCKIVRILREYTRYRYKLVSCRSSEKNRYQNTLTVCNVALDSVVSDIFGKSSTSIIDYLLEQSGTSINHEEIASKLLRSLKSKEDAVIESVEGYQMTDAQKYRMRLVRAHMDYITAEINDVDKMIENMISSNSDFENAVQLLCTIPGFKHDSAITIISEIGTDMSQFSSSKRLCCWAGLTPGSNESAGKKKSVRITRAGVYLKPALVQCAHAAVKSDKFPYYKKKYESLVKRRGKKRAIIAIARMILTAIYQMLSTGEQWNPSDLYKVDMPVALVEKQKAKAIRQAKKLLQREGMLPPDEPLAS

SEQ ID NO: 220936 - protein, 381 aa, unidentified
MQKLNDLSRSLAPLKPDGTLIAVIEMSQSSWLVAGIVPGVERQPLKKLAADEIALLKLLHRWREEAEKAGRKIERIAVAFEAGRDGFWLARWLRTRGIEAHVIHASSVAVSREHRRAKTDRLDTELLKRAFLGWLRGERDHCKMVAIPTSKDEDAKRPSRERESLVEEQTRIVNRMKATLIRLGIRGFNPKLKKAAGRLEDLRTPEDEPIPPNTMAELRRDMDRRRIRQIEEARLDRLKQMPGDGPHAMLRLLARVVGVGIETADMLVQEVLARNMRDRRAIARYAGLTGSPDESGTKRREKGLARSGNARVRRGMIQLAWRFLLFQKNSALAQWFRTRTENARGTRKLMIVALARKLLIALWRLVREGVVPDGVVLRPAQ

SEQ ID NO: 220937 - protein, 416 aa, unidentified
MEIVYERVAGIDVGKKEIAVAVRTPGPQPGQRRQVIRKYKTFWQALLEMSGWLLKEQVTHVTMEATGIYWRPVFHALCQATDVEVLLVNARHVKNVPGRKTDAKDAEWLAQLLECGLLRGSFIAPAQIAAIRDLTRYRKKLIASRGSEVQRLSKVLEDGGIKIDSVASSLTTASARHMVEALIAGERDPKVLAQLAMSRMRGKIPELEQACVGRFGDQHALLARLHLEHIDHLSAMIDELDHRIATMTVPFAAQTQLLTTIPGIGERAAQVIISEIGVDMSRFPTAAHLASWAGLCPGNNESAGRRISGRTRKGNREIRDLLTECACSAARTNTYVGARYRRLHRRFGKQGGGKAAIAIAHTLIVIIWHVLHDNADYHDLGADYFTRRYDNPDAKQNRLIRELQNLGLQVEVHPAA

SEQ ID NO: 220938 - protein, 343 aa, unidentified
MQTITTIGLDIAKSVFQVHGVDATGQVVIRRQLKRRYVLAFFQKLSPCLVGIEACASSHHWSRELQALGHKVRLIPPAYVKPYVKRQKNDATDAEAICEAVTRANMRFVPTKTPEQQGGLVLHRTRHLFIRQQTAVINAIRAHLAEFGIVAPVGRHGVEELLNVVADPNDKRVPEMARACLLAFGAQLRRIKEQVLEFDRLIRAWHRSNEVSVRLDEAPGIGPVLATAVVATVADPKSFRSGRNFSAWIGIVPKQHSSGGKNRLGNISKQGDRYLRGLFVAGALAVIRYAKIHGAKHRPWLTALLERRPTKVAAIALANKLARMVWAMMVKGERYKEPVALAR

SEQ ID NO: 220939 - protein, 357 aa, unidentified
MPAHTKSAKSKTQIAVIGIDIGKNVFHLIGLDRRGAIVLKCKLSRGQLENRLANTPACLIGMEACVGSHHLSRRLIALGHDARLMPAKYVKPFLKGHKNDYRDAEANAEAVQRPTMRFVATKTVEQLDLQALHRMRARLVRERTATVNEVRAFLLERGIAVAKGIQRLRKALPEILARHAGLLLPRMIRIIEALAADWRRLDHRIEEISNEIEDLAQKDAPCKRLMTIPGVGPLISSATVATIGGGDMFSKGRDFGAWLGIVPKQLSTGGRTILGRISKRGNTYLRTLFVQAARVVLIKRQSWERYGLKPWIEAAARRLHSNKLAIALANKLARIAWSVLRHGRNFEVRHADEPQHA

SEQ ID NO: 220940 - protein, 348 aa, unidentified
MSEAYDGPQVVGMDLHRRRSVLVRMTADGRKLETARIINSPAELRRVIARAGKRPRVVLEATYGWYWAADTLAAAGAQVHLAHPLGVKAFSYRRVKNDEKDAADLADLLRMGRLPEGWIAPAEIRELRELTRYRIKLVRLRTSCKDQVHAILAKLGVPVTCTDIFGAWGSTWLDGLALPQPYAGKAASLRSLAGELTTEITMLEAAIAGLLAHHDGYHAVQALPGIGPVLAAVLVAEIGDITRFPGPARLCSWAGLTPRHRQSDAKVTRGHITKQGSPLVRWALVEAIQHVPAGHPLRQRKDDILARRGTQAKNIAKVAAARQLLTWVFYAMRDGQVRALATATQKAA

SEQ ID NO: 220941 - protein, 306 aa, unidentified
MFVGIDVSKARLDVHVLPGGEAFAVARDGQGLEELIARLSQAPVATVAVEATGGFETIVAAALAGARLPVAVINPAQVRAFARALGQRAKSDPIDAAVIARFAQATRPEPRALPDAATEALAELVARRRQIVAMIGAERQREKRASRRMQRSIARVVVVLVRELADLDGEIGSRLRDSAVWRETEDLLKSVPGIGDVTARTLIAELPELGRLDRRQIAALAGLAPWTRQSGQWKGKSLIGGGRASIRSALFMAAMVAARFNPVLKAFHQRLISAGKPKMAALIAVARKLLTILNAILRDKTPWQNA

SEQ ID NO: 220942 - protein, 344 aa, unidentified
MQIARIGLDLAKYVFEVHGVDCRGKTVLRKTLRRHAVSAFFANLPPCLVGLEASNGAHFWAKALSDLGHDVRLISPQFVTPYVKSNKNDRNDAEAICEAVGRPNMRFVPIKSAEQLAVQAVHRIRSRLVADRVRLVNQVRGLLAEHGIVVAKDIANLRRALARIVDDNEDRTLNPLVRGLMAELREELTELDTRIAGYDRKIRELYRNSQICQRLGKVEGIGPVTATALVAAVGDRRSFKNGRQFAAWLGLVPKQRSSGGRARLSGISKRGDRYLRTLLIHGARAALGRVRDKQDPRSLWLGKMRQRRHPNIVAVALANKNARIAWSLLTSDSVYDADLSVRAA

SEQ ID NO: 220943 - protein, 403 aa, unidentified
MSSSVALAPAAAVVAVDVGKTTAAVLVTDAARRRLLGPLEFPMTAAGLGRVISQAQAMVAGTPLIRVGVEAAGHYHRPLAAPSVWPGWEVVELNPAHVSEQRRVMGRRRVKTDALDLEAMTELLLAGRGLVVTEPPKLIGELTAWAAHRHRRVATRAATKNQLLGQLDRCFPGLTLAVPDVLRTKVGRLVAEHFADPRRLAGLGASRFIRFAAVRGLQVRRPVADRLVAAAHDALASADAAVARQVLAADLALLASLDEQVQAAETRMAELVPASPFAPLLSVPGWGVVRAGNYGAAVGDPARWPGHRQLYRASGLSPAQYESAGRRRDGAISREGSVQLRRALIDLGIGLWLSEPAAKRYGQALRARGKNGGVIACAMAHRANKIAYAMVRDQTGYQPLRWA

SEQ ID NO: 220944 - protein, 432 aa, unidentified
MNPISVSSPPSKVAAWVGLDWADQQHLVCLYDVGTGQTELSTLDQKPEALQSWLSQLRQRFGGQPVAVVLEQARGAVIYALLSVDFLVLYPVNPQSLASYRKAYATSGAKSDSADAVLLMEMVRNSPQRFRCWTPDDADTRSLQLLTQNRRQLVNQCTAFTNQLTGLLKSYYPQVLELAGELDSLQACDFLEKWPTLEALQQARPAQIRKLYLDYGKPRPESLEQRLEQIRQARPLTTDPAAVLSGTMMVRALIELIRPLLATLERFDQQIAALFRKHPDRLLFESFPGAGAVLAPRLLAAFGTDRDRFESAQDMQQLSGIAPVTEQSGKQRWVHWRWACSKFLRQSFHEFADHSRKWCGWAKALHQRLRRSGKGHHAAVRVLAFKWIRILFHCWKTRTVYDEQIYLKSLEKRNPTLWTEAQAMPLRKKKLA

SEQ ID NO: 220945 - protein, 381 aa, unidentified
MTTTATPNAHDTTPGRALFVAFELSEKPWKLGFTTGHGQKPRERSIAARNQTRVLQEVAQAKRRFGLPETAPVFSCYEAGREGFWLHRFLEAQGIPNHVVDSSSIEVNRRKRRAKSDALDVRKLLSMLMRYAHGERDVWRVVRVPSVEAEDQRHLHRDLETLKQERASTTTRIKGLLSSQGVRLTSVNKLPEQLEALRLWDGSPLPSGLRRRVLRVYAHHQFLSEQIAALEAERRARLQSAHDASIEKVHQLMQLRGIGINGAWLLVMEFFGWRELKTRREVGGLAGLTPTPYQSGESAREQGITKSGNRHVRWMTTELAWSWLRYQPESALSCWFRERFGGGGKRMRRIGIVAVARKLLIALWRFLETGVIPQGAELKAA

SEQ ID NO: 220946 - protein, 400 aa, unidentified
MRVIFGIDVSKASSEVAILVNGEKIHGYTIPNDAIGFNRLLGDLRTVYQPEIVFEATGVYSRRLQAFFEDNSYAYIRLNPLESKKQLDSLRVRKTDKIDAEKLATSQFILNRKPSYVQEALYQELRDLSRFYQNLTEDIVCSKNRLHKVLQVTFPELENILSSPTGKQYWNLVMAFPCNSFVLELDDAALRAIIRQSTSKRISEKRVTYLVDKLTKLANHSYCAVKKTSPMMEEVKYYAGELLRLSEYRQSVLEEMITLAQPLPEYEILLSIPGIAETTATSIIGELGDIRRFHSANQINAFIGIDLRHYESGNFLAKEHITKRGNPYARKILFKCIHNIASASHTNPCHIADFYEKRKRQSQVTSTKPHTIASIHRLIRTMYYLITHNKLYDYTSTQNR

SEQ ID NO: 220947 - protein, 429 aa, unidentified
MTRISAGVDVSKNRSTVCIMDQDGKFIMRPFLVWHSTEELDFLADTLKRLNGEVRVIMESTSIYQYPIALHLKEKGIFISIVNAYKVKKFANTDFRGGKTDKKDSRTIASYGISYWDKLVEWQIPKDTYFNLDLLNRTYMNAKKHRQIILQELQHYIDCAMPGMDKELHSLNLNTKKDFMLDFVEKFWHRDEIVNMTEAEFTEVFTAWAKKKGYRPVEGKAAKIYAIAKSCIPYYPANPTVKTILQCIVDKLSGVNRTLVTIVTQMIEEAKKLPEYQIVREMPGVGDPLAARFFGSAGDIRRFKNSKALVAYAGIDSPPDESGDFSSTHRHITKKGSKVFRDTGYEIMMALRAQKRTWEKVRKNPDVYDYMLRKEAEGKPPKVAKIAALNKFLRIIYARIKELYDNMALAERAKTKTRSKTRAKTKVTA

SEQ ID NO: 220948 - protein, 357 aa, unidentified
MNTAQTTQTTSTTIGIDLGDKSNETCTLNEAGEIIDRGSVLTNQAELIRFSKANRGATIIMEAGSHSPWISRLLEGRGHKVIVANPRKLRAIYDTDNRNDQRDAELLARIGRFDRKLLYGIEHKSELHQRALKIIDARDALVCARVKLINHVRGSLKSLGIFLPSGCSTETFARKATEHLEARDYALVAPVLETIAELTERIKSEDKHIDTMIKEDYPEAQRLLEIPGVGPITALAFVLIVGSPDRFKTARDVGPFLGLVPGRDQSGDSDKPKRITKAGNRMLRRLLVSCAQYQLGPFGPESALKQAGERKAKKGTKIAKRKAVVMTARKLAVMMLALWKDPEARYLPFPQPTKRAA

SEQ ID NO: 220949 - protein, 315 aa, unidentified
MDDTIAQTLGVDISKDTLDVYLHPTGKTQRFQNTPRGFASLLSWLKDIAVRRIVYEPTGAYHHGFERRLAQAGLPLVKINPRQARRFAEAIGAHAKTDAVDAAMLARLGAMLEPPVRPAISQALDDMKELHVARQALIKDRVAAQNRGHIRRSALLKRQAADRLRQIDRQIAAIDAALMTLLKSEPALKTRFDILTSIPSIGETTALAILIEMPELGHIEHKCAASLAGLAPMARDSGQRSAKRFIRGGRCHLRQALYMPALVAIRFNADFKAKYKALVAAGKPPKLAITAIMRKLLILANALLRDQRAWTTKLA

SEQ ID NO: 220950 - protein, 350 aa, unidentified
MVIIGCDYHPGFQQIGFVDTETGDYGEQRLEHSEGAEKFYRDLAAQGKKVRVGMEASGHARWFERLLAELTFELWIGDASEIRAKRVRKQKTDRQDAQHILQLLMENRFPKIWVPSGENRDLRQLLWHRHRMVQMRTRIMNQLQAVALNEGLRCKKRLWRQHGREQLESFRLAPWASRRREDLLQLLDRLNPTITDLTQVIEQEVEKCAEARRLRTHPGVGALTALAFVLIIGRAERFQCGKQIASYLGLVPLEDSSGNRRRLGHITKQGSSMLRFLLVEAAQVTARSIPEWRSKYFHLAMRRGRKIAKVAMARRLAIALYWMWRKGWNYEQSRKFGSHAGQLGTGDGVQ

SEQ ID NO: 220951 - protein, 372 aa, unidentified
MPDVSSNAPTDVRLWVSMDLHKLSIVAAMLPPTGGQPELQRIETTRAAIRRFIERLGGPEGLAVCYEAGPGGFDLLRVLSELGVACDVVAPSLIPVRAGDRIKTDRRDAKKLVRLYRGGQLSYVQPPTPETEGLRDLMRCRDDLRRARTSARHRVSKQLLRHGRIYREGKSQWTKMHRTWIERQRLDDLLAQSALEQMLIHLDGLDRQLDALDRDLELIARGERWAQTVQILTRFRGISTRTALGLIAEIGDFTRFGHPRELCAWLGIVPTEYSSGEQRHRGHITKTGNHHARRLLIEAAWAYQHRPRRPDNGPEPDARAWQAQIRLHRRYHHLTTERGKRSTVATVAVARELAGFLWAAATHQPFALEAAA

SEQ ID NO: 220952 - protein, 360 aa, unidentified
MVPTMTYAGLDVHARSTHAAAVEVRTGELRRARFAGGVTEPLAWLAGSPGPVHACYEAGPTGFGLYRAAVEAGLRVEVVAPSKTPRAPGDRVKTDRKDAELLARLLLAGQLRPIVVPSCEVEAARHLCRAREQVRGDLMRCRHRVSKLLLLHGRVYGEPTTWNRPHRQWLARQRFDQPATELAYLDTLAAVDGLVARKTVLDERLSHLALDGEWGPTVARLRCFRGIDTLTALVLSLEIGDFARFARPGQLASWLGLVPTLDQSGESRTSGAITKCGSSFARRLLVEAAWQYLRQPRIGATLQNRQLGQPAHVLQIAWRAQYRLHDQLMRLRSRGKPGNVATVAVARELACFLWAAALAE

SEQ ID NO: 220953 - protein, 320 aa, unidentified
MDAVLGIDIAKAKFDVALLRSEGKLRRKSCPNTPAGFAELTQWLGRQGAPLVHASLEATGTYGDALAHYLHDAGHVVSLLNPAVTHAFAASQLARAKTDRIDAELIARYTATQHPAAWTPAPREVRDLQALVRRLDALQGMKTQETNRLEAGPVVAAVRTSIETILATLTAEIKAVQRQIRDHLDQHPGLRTQRDLLTSIPGIGEATAVVLIAELFDKRYSSARQAAAFAGVVPRVCESGTLRAHGRLVKIGPGRLRKALYFPALTALRFNPTLRALQIRLRAAGKPNMVIVGAAMRKLIHLAFGVLKSGRAYDATYARP

SEQ ID NO: 220954 - protein, 335 aa, unidentified
MNGGGIPWSYTRSALISGKTVFHLVGLDLRGEVVVHKKFSRKQLLHFTANLQVKLIGMEACGGSHFLGRALREQGHEVRLMPAQYVKPYVKTNKSDYIDAEAIAEAVGRPKMRFVPIKTDEQLDLQSLHRVRERWVMRRTAVINQIRGLLLERGITLRQGRGHVDAALPGILEDASAMLSGALRMLLAQLKLELDHLQMRIDEADAIIKKVAGENEACRRLVAIPGIGPVTATAIIAAIGNGAAFKKGRGFSAWLGIVPGEYTTGGKQKLLGISKRGNSYLRRLFVQGAGAVLQQRAKQSSALSAWLARLTRMAWAVLAKNEPYRPPMLVGAATA

SEQ ID NO: 220955 - protein, 370 aa, unidentified
MKHFIIFVGLDVHKDTIDIAITESGNNKEVRHYGKIDGNLAALDKAVRKLQSKGAELHFAYEAGPCGYDIYRHLTKQGFTCIVVAPSLIPKKSGDRIKTDRRDAMSLARLYRAGELTSVYVPHEDDEAMRDLSRAREDAINASRTARQRLGAMLLRLGYRYHRRTMWNDSYFRWLSTIKMPHPAQQIAFQEYIHAIVECGDRVDRLTEQIQKLIPDWRLAPVVRALQALRGVSLMVATTTIAEIGDLSRFANPRQLMAYLGVVPSEHSSGKKEKRGGITKTGNGHVRRALVEAAQAYHHQARVSRPLLVRQEGLPDSIRKIAWKAQVRLCGRFRKLMGRGKSRNKVVTAIARELSGFMWAIAKEVPVQFA

SEQ ID NO: 220956 - protein, 456 aa, unidentified
MKIPQSTIRLLTGRLVKILLNREVSTMKSNTQNAKIEAITEKTLVLGIDVGSETHYARAFDYRGVEYSKKPFKFSNTEAGFVTFKAWVLDIKEKHGKDKVIPGMEPTGHYWFNLGKFLQDNEMKPVLVNPHHVKKSKELDDNNPTKNDRKDPKVIAGLVREGRYMIPYLPDGVYADLRTASNIRFQLQAELTRIQNRINRWFNIYFPEYKTVYGKPDAKSGILILKEAPLPEDILTLGIDGVNQIWRDAKLRAVGKARAKTLIEAAEHSVGSKEGAVSARMEIRMLLEDYESRNIRLQEVMGLIEGLVNQIPMAEKLLEIKGVGIKTVSGFLAEVGDIRRFNDPKELQKLAGLALVENSSGKHKGKTTISRRGRKRLRYLLFEVAMSLVAKNPEFRELHNYYTTRRLNPLKKMQSLMAIAAKLLRVFYAILTKGVGYDPKKMVNDIRRPAAYAQAA

SEQ ID NO: 220957 - protein, 354 aa, unidentified
MNIKYIGLDVHKETISIAVMNGDGKLVMESIIETKAITILQFIQGLRGDLHVTLEEGTWAAWLYDLLKPHVTELVVCDPRKNALMKQGNKSDKIDARKLADLLRGGYLCSVYHGENGLRTVKELARSYLTISKDLSRVMNRVKALYRSWGILCGGQQVYAPRHRSEWLNKIGEAGVRRRAEFFYQQLDALRALRQAVRRDLLAESRKHSATKLLRQIPYIGPIRAALLIALIQTPYRFRTKRQLWTYSGLAIETRDSAQHRYVAGQLRRSKKPQQVRGLNQNHNHDMKAIFKSAATMASSREGPFNDFYQGLLRKGMKPAMARLTLARKIAAITLIVWKKGAHFDAEQLKPQAA

SEQ ID NO: 220958 - protein, 304 aa, unidentified
MGVDVAKDELVIYHAETDRLEAIPNTKAAIKKWLKELPAPVDVAIEATNIYHQEFADLAYAQGCVIYMIGGYELSHYRKGVKVRAKTDALDARLLARYLNNEGHQLHPWTPPSPLYCRLISLFRRRAALVQARVSLKQSWSNEPLLKTAFEHQIKAMQRLEILLEKTIQTQLEAAGLGAQLKRCMKVEGIGLLSGARLLTSFQRGDFRNADAFIAFLGLDLRISDSGKKKGRRCLSKRGDPEARRLMHNAAMSARRTAAWKGFYEALRARGLSTTEALVALARKLARVVFALLKNQSEYLPKGI

SEQ ID NO: 220959 - protein, 367 aa, unidentified
MKKVSTVAVKRSRKISEQKLAVGLDLGDRSSWYCVLDESGAVVLEQRLSTTPKAMGEVFGGMPRSRIALETGTHSPWISRLLEELGHEVIVAHARKVRLIGESRKKDDRLDAQTLARLARIDPGLLCPVKHRSAQAQADLTVIRARAGLVRARTALVNTARSLAKSYGERLRGCNVRNMNPEKAEGLSPELQAALEPLLAGIEGLSEQIRESNQRIERLAEESYPQVALLKQVKGVGTLIALTFLLTLEDPHRFRKSRDVGCYLGLQPGRRNSGQSEPQMHISKEGDPYLRTLLVQGAQHILGPFGVDCDLRRWGLKLAERGGKSGKKRAIVATARKLAVLLHHLWVSGQVYEPLHNSQRSALETAA

SEQ ID NO: 220960 - protein, 344 aa, unidentified
MSKIVADLSAVTTVGVDLAKHVFQVHAVDASGKVIAAKALRRRDLLAFFASLPPCLVGMEACGSAHHWGRELMALGHQVRLIPPAYVKPFVKRQKNDANDAAAIYEALSRPGLRFVKVRSIANQAVLMQHKAREMLVAQRTQLFNGLRGHLAEVGVIAAQGGCNMRSLGALIYEGDPAIPEAVRTSLMPLVAQIGHLDEAIKAIDADMAVQAKADPVSNRLMTIPGIGPVTASALVATIGDPASFSGPREFAAFLGLVPRQHSSGGKARLGRITKMGNNYLRKLLVVGAHAVLHHQARHDDPLRNWARKLLATKPFKLVAVATANKLARMAFALMNQNTRYAGA

SEQ ID NO: 220961 - protein, 456 aa, unidentified
MAQAKRSRPSRDITPIHPGAAAIDIGATMHVAAVELDQDPEQPVRSFGTFTGDLQRLADWFASCGVQTVAMESTGVYWIPVFEILDQRGFKVVLVNARDAKHVPGRKTDISDAQWLQRLHAYGLLRASFRPKGEIATLRAYLRLRERLLDYTASHIQHMQKALTQMNLQLHHVVTDITGVTGMAIIRAIVAGERDPATLAAMRDPRCHATVETIRQALVGNDREEHIFALTQAVELYDFYQAKVAECDTRIQAVLERLRQAAPISAGKLPPARHKTKQPNALAFDVRAMLHGLLGCDLTQIHGLGPSLALKLVGECGTDLSAWPDAKHFTSWLCLAPSNKISGGKVLSSRTRRSGSRAAALLRLAAVTVGRTETALGAFYRRLSARVGKAKAVTATARKIAVLFYNTLRHGMSYADPGASYYEERYKRRVLTNLERRAKSLGYVLQEVSAPALGVS

SEQ ID NO: 220962 - protein, 342 aa, unidentified
MQVTTIGLDIAKNVFQVHGIDAAEKVVVRKQLRRSQVLAFFKALPPCLIGMEACATAHYWARELTKLGHRVRLMPAKDVKAYVKRNKNDAADAEAICEAVRRPTMRFVQTKSAEQQGRLMLHRVRDLLMRQRTQVINALRAHLAELGITAAQGTAGLKELLKIIASDADERLPVDAHASFVVLAAELQAMQTLVGSLEKRIMAQHRGNEASKRLETIPGIGFIGATAIAATVTDPTAFRSGRDFAAWIGLVPRQDSTGGKQKLGPISKQGDRYLRRILVVGAHAVLRYAKQNPEKYPWLTQLLARRPFKVVAVALANKMARMAWALLAHGGTYRAPALAAAA

SEQ ID NO: 220963 - protein, 404 aa, unidentified
MWYAGIDWADDHHDAVVLDHEGQLLTTLRVAHSVTGLAELTTALTRITGPDAKDQLSCIVETNHGLLITALLEAGFAVYPVNPKTVNRRRGAAGAKTDQIDAYLLAKLGRSDLADLRRLVPDSPVVQELKALTRDQDGLIQSQTRLLNQLTACLKAYYPVALLLFSKLHQPSALAFLRAYPKPEAARTATQADILQTLLAAGHTRTAQVVPKIWQRLQQPALSADAVTTRTKARLMLALVAQLEPLLAQIAAYDEEITRLFVSHADHALFASLPRAGRRLAPRLLAEIGDDRGRYDDAVGLQAVAGTAPVMFQSGAYAKAHRRWACMKPLRNALQLFAWQSTLEEAWALHYYQQKRATGKSHAMAVRALANVWVRIIYAMWRDRKPYQAQTFIGAQQQHQRQAA

SEQ ID NO: 220964 - protein, 389 aa, unidentified
MTIVEAARGVTGGVDTHLDVNVAAALDPIGGLFGTAAFPTTPAGYRDLLSWLRSFGKVGKVGVEGTGSYGAGLSRYLRSSGVAVIEVNRPNREERRRSGKSDPLDAIEAARAALGGKAKSIAKSRDGAVEGIRALVVAKRSGRVARTAALVQMRQLLVTAPDQLRSRLRNLTVHALVTEAARLRPARRGDPVLNATKASLCSLARRAQSLDDELAELDGRIEALLMAHCPELLGRFGVGPDTAAALVVCAGDNAERLHSKPAWAHLCGVAPVPAGSGKTSGRVRVDYAGDRQANAALWRIVMVRIAHHPETTAYFARKVQEGRPKHEVIRLLKPLCRPRGLPLPASRLKTATGGLAHPLTIALRADFPATRRPLVRNQSAKRGLIGACP

SEQ ID NO: 220965 - protein, 340 aa, unidentified
MQQITTVGLDIAKNLFQVHGADAQGRPVLKRKLARGKVLEFFADLPACLVGLEACAAAHYWARELAKLGHEVRLMPPRYVRPYVKTNKHDAADAEAICEAVQRPGVRFVPVKGEDQQALLMLHRVREQLLKQRTATTNALRAHLAEFGVVAARGRRGLRELPAVVADPEDRRLPPLARELLQALAEHLRGLEERTAEIDRRLLEAARADAACARLAAVPGIGPVVATALVAAVGDARTFASGRHLAAWLGLVPRQHSSGGKERLLGISKRGDAYLRRQLVHGARALVRVSPGREGGLRTWINGLLARRPFNVVVAAVANKLARIAWVLLSRGETYRAAAA

SEQ ID NO: 220966 - protein, 343 aa, unidentified
MSIVGGFDVHRRQITFDYLDADTGRVYRGRIAPACRAVLRRWLAERFAGRSDVEFAVEGCTGWRFVVEELEHAGIEASLAEPADTAAARGRKRRAKTDPADAAHLRELLAASRLPTAWIPPVQVREMRAILELYKDLRDEHTAWVQRIHATLFHQGVPGLGNGGVSAAAGRARLRAGEGLSPAGHQAVMVALRVLDALDVELDALRRQIRAFANRQPGCAALQAQYGVGPIAATAIWAMMGDTRRFSASRQAVRHTGLDVTVYSSDGKRAPGHLAKQGPPLLRWALYEAACLAAHTRAPDHDFYTGVKERIDHKRAAISVARKIARRSHHILRELGEQAYAAA

SEQ ID NO: 220967 - protein, 312 aa, unidentified
MAKFPNHPSGHKALVAYLLRGGGRVRVCLEASGNYSLDLALTLQAHRQVEISVINPRRARRFAESLGERSKTDPVDARVLCEYAARMPWVRWQPPSPVALHLRALTRAIADLGVIHTQQNNRAYAAAASQALPVLVVKEMQRHKKYLEQRMTRLRREAVRLIACDPELERRFRLMLTTIGIAETSALQILGELAVLPDMLDARQWVAFSGLDPRLFKSGKSVEKRPRISRSGSRHLRRALYMPALVALRRDPYLRVFYQNLLARGKARLQAVVAVMRKLLHALFAMFRSNQPYDGSKLCAVELAVHAIAACA

SEQ ID NO: 220968 - protein, 453 aa, unidentified
MVQRKRKISLKPGKSREALTITHPNAAGVDIGSSSHYVAVPPDRDDEPVREFPSFTVDLNALADWLDACGVDTVAMESTGVYWIPLYELLESRGFTVLLVNARHVKNVSGRKSDVLDCQWLQQLMTYGLLRGAFRPPDTVCALRALWRQRGMLLRSQGKHVQHMQKALAQMNIQLANVISDVVGETGQKILRAIVAGERDGQVLAAMKNVRIRATADEIAKSLQGNWRAEHLFALKQALGMFDFIGTQLAECDREIEGQLQSLQVHDGEPAKGKKRGRARNAPKFDLRTQLFRMCGVDLTRIDGIDVTTALAVISETGADMSRFPTAGHFTSWLGLCPGTKITGGKVMSGKTKRVANRAAQALRLAAAALRSSQSALGAYFRRMCGRMDKPKAVTAAAHKLARLIYTMLTKGEEYTDQGQDYYEERYRERVLRQLALRAEKIGMKLVANEQPV

SEQ ID NO: 220969 - protein, 351 aa, unidentified
MLIMGVDYHPSFQQIAFFVEETGECGERLLNHSEGEAENFYRDLKQRGISVRVGMETTGYSRWFERLLAELGFEVWIGDAAEIKTRRAKKQKTDRQDAQLLLTLLLEGRFPRIWVPNPENRDLRQLLWHRHRLVQMRTRIMNQLQALAMNENRCWKGKLWSERGRAELEKLPLACWASRRRQELLELLDRMNPNIEKLTAAAALEAKKRPEAVRLMTHPGVGPLTALAFVLIIGTPERFGCAKQICNYVGLVPSEDSSGGRQRLGHITKQGSSLLRFLLVEAAQAAVRSNADWRRRYRHLAMRRQRNIAKVAMGRRLGARLYWMWRNGREYSPSLEFGSHAGELDPGNGGR

SEQ ID NO: 220970 - protein, 410 aa, unidentified
MDTIVERCCGLDVHQATIVACLLVGRASQKPRKAVKTFRAMTQDLLALRDWLLSEGCTHVGMESTGVYWKPVHAVLEGAFQIVVGNARHIRNVPGRKTDVKDSEWIADLLRHGLIASSFVPPKPIRELRDLLRYRRKVVESRAAERNRLLKLLETANIKLASVAANVFGVSGMLMLNAILKDDSSPAQMAQLAKGRMRGKIPELKLALEGSVQEHHRFLLRLQLRRLKRADEDLAELEQRIDERLEPYREQQALLVQIPGIDRIGAAVIIAELGTDMTVFHSAKHLAAWAGVCPGNNESAGKRKNDRVRSGNVHLKTALVEAANAASRKKGSYLKDKFFRLKARRGHKRAAMAIAHKILIAAYHMLSTGSAYKDLGEPYLDRVAKHRVTNQLVHRLERLGYDVQLIQKVA

SEQ ID NO: 220971 - protein, 343 aa, unidentified
MQTITTIGLDIAKTVFQVHGVDAGGQVIVRRQLKRRYVVPFFQKLSPCLVGIEACASAHHWSRELQALGHTVRLMPPAYVKPYVKRQKNDATDAEAICEAVTRASMRFVPTKTLEQQSGLVLHRTRHLFIRQRTSVINAIRAHLAEFGIVAPVGRHGVEELLTVVADPSDKRVPDIARACLLALGDQLQSIKKQILEFDRLIRAWHRSNEMSMRLEAAPGVGPVLATALVAAVADPKSFRSGRNFSAWIGMVPKQHSSGGKNRLGNISKQGDRYLRGLFVAGALSVIRYAKIHGTKHRPWLTSLLARRPTKVAAIALANKIARMVWAMMARGERYKEPVALAR

SEQ ID NO: 220972 - protein, 333 aa, unidentified
MNYIGLDIHKKNTQACVKNDMGKVLMNVRFPSDSKDINEFLDKIEPLGAASIVMEATGFCMYIYDIIEARGHDVKVAHPFKVKALTAGRAKTDKNDAEMLAELLRLNAIPESYIPPKELRELRELTRFRQSLVRSSASIKNQVHAILAMRGIKTPPPLRSHFSKKHVKWLRSLEIVQLDDFLDIMALIDTKTAKADEDIGRICHDDEDVQRLKTIPGIGDVTATSFVAEIGDIHRFDSPEKLASYAGLTPIVRQSGEKTWAGPISKRGNATLRYLLIEAAYSHVNSSKESKLTRFFERKSQAKGRKKAIVATSRKMLDVIYYMLKRGEAYHAH

SEQ ID NO: 220973 - protein, 374 aa, unidentified
MEWSGRAPAPPVTNLARGSKDKEHAMSQNLNSAVAVIGIDIGKNSFHVVGLDNRGAIVLRQKWSRGQVEARLANMPPCLIGMEACVGAHHLSRKLKGLGHDARLMPAKYVRPYSKGQKNDFRDAEAIAEAVQRPTMKFVATKTADQLDLQALHRVRERLVSQRTGIINQIRAFLLERGVAIRQGLRFLRAELPRVLAKPSDVLSARMVHVIESLTEDWRRLDERIDQLSGDIAALARQDAGCERLMSVPGIGPIISSAMVAAIGAGEVFSKGRDFAAWLGLVPKQISTGDRTILGKISKRGNRYLRVLFVQAAWVVLIKPMSWDRHGLKRWIEAAKKRLHRNVLAIALANKLARIAWGVLAGGRTFEASKLQIA

SEQ ID NO: 220974 - protein, 387 aa, unidentified
MRRQSRIRRRPVMGERNTTDVGLDTSKNSIQVAMLLPGGDKAVEWEIANEPRAVRRMAKRLKREAVGELRVGYEAGPCGYVLQRQLRELDVNCVVVAPSLIPVKPGDRVKTNRRDAKKLAVMLRAGALTEVHPPTPEEESVRDLCRCRDDIREDLIRARHRLGKMLLRRGWTYPGKAWNDPHRRWLRNLALEHDADRAVFDDYLRAIEHLEERLCAIEITIEATSHREPYREPVAWLRCFRGIDMVTAMSLVAELHDFGRFQSARELMSYLGLVPSENSTGDRQRRGAITKTGNKQARRLLIEASWHYRHKPAVGHKLRKRREGQPGWVIALADRAQARLHRRYWRLVTHGKAHNKAVTAVARELSGFLWATLREHGAAKRSGASVG

SEQ ID NO: 220975 - protein, 520 aa, unidentified
MSTPRTRRRRPHRGPSGSVGKPRGVLHPRVQQVGPEHFGIVCFDCAKARSKFLLADFYGRVLIPPTHVEHNRPALDAAVAQVRQAFADHQLRDGLVAIERTGRYHRHVQRAFAAAGFETRIVHPFATKHYRQPVDPGNKTDDADLGALHRATVTGCALLEATRDEAWTTLQLLVRHRRDLVRKGAALNCQIRDHLEAALPGFAACFDKLWDSPIPWHLLGHYGTAEQLQATGLTTLCQSLREAGIRFQQRTVQAVLDWAARAAPGDVAAAQHLRIALALYDDRQRKTLEIQALERDIAGRLVQTPYVLLLSFPGVNVVRAADFGGEAGPIEHYANAKAISGRAGLRPARYQSDRVDQANGPLIRHCNHALRAAVLGVADNLVTCNHHFQALATRWAAQGKDPRHTRVKVALRFCRIAFQMVAGRQVFRHPGLQGRHYVLDKLNAFHRGHDTPMPDVLRDLQAALGQVPVREHAAEAKPLQEELQRIQDGRRRGPQLLGDILPIVLARLGVGVVQSEASGE

SEQ ID NO: 220976 - protein, 412 aa, unidentified
MLKIVYPICCGIDVHKGFIVACIASTNEQGVTTYQSKRFSTFTNDLRRCAVWLAQNHCKDVCMESTGKYWIPVYNILEATCTIVLAHPKYVKAIRGKKTDQKDAKWIADIFKHDLVSGSFVPPADVRQLRDLMRYHWKLTNFTTGEKNRAQNCLTVSNIKLDDVFSDVFGKAASAITTRLLESSEPFDVAPYLTKNIKAPVEKIQAAVDGEMCAEQAEKLRIIRSHMDALELCKLNLQSLILTTAEKYLPQLNLVTTAPGIQAFSAIGIISEIGVDMSVFPTSKHLCSWAGLTPQNNESAGKKKTTRISRAGAYIKPLLVQCALSAIKAKRFPEVRRRYLAIKKRRGHKKAIIAIARMLLTAIYNMLKKNEPYNPELYCKADRPPAHREVSLEEAIYIIQRQGYLVTAPPIS

SEQ ID NO: 220977 - protein, 367 aa, unidentified
MKKISTVTAEKVEKNASQKLTIGLDLGDRFSWYCVLNEAGEVVLEQKVATTPKAMKEVFGGMPRSRIALETGTHSPWVSRVLSELGYEVIVAHARNVRLIGESRKKDDRLDARMLARLVRIDPQLLAPVKHRSAQAQADLMAIRARAGLVRARTSLINTARGVTKSYGERLRGCNPRNMNPEKAQELSPELQAALGPLLGEIESLSERIGEYNERIEQIGKESYPEVARLKQVKGVGTLIALTYVLTLEDAHRFGKSRDVGCYVGLQPGRRNSGQSEPQLHISKEGDPYLRTLLVQGAHHILGPFGADSDLRRWGLKLAERGGKNGKKRAVIAVARKLAVLLHRLWVSGEAYEPLRNQRQVALPAAA

SEQ ID NO: 220978 - protein, 358 aa, unidentified
MQRNKKTFKGQNIYIGIDVHKKNWQIAVITESGYTERLSTAADAKALFKFLKSHYPDGNYRAVYESGFSGFATHYALSELGISCVVAHAADIPSSQYELTMKSDRIDAEKLARALRAGLVRGIYVRPKDNLDDRGVLRIRKTIQIQVGGYKTRIKHLLHSNGVELPERFSRSGTHWSRAFIAWLREDVRLLSDTRRSLDLLLLQVETLRANLLEATRRVRALSMTDRYREGCALLMGIPGIGLTVAMTILTEVCDIGRFGNERQFASYLGLVPTSHSSGERVSHGEMTFRGNKHIGPLLVEASWVLIVRDRELGRMYTEYRWRMAGQKAIIKIARKLSNIIFAVLKTRKAYEPYRRDA

SEQ ID NO: 220979 - protein, 359 aa, unidentified
MDLHKRTSTFCVKDDDGNRMMEKKILTDRTQVTELIRSLPSTNISVALEPVSQWYVFADLLQNLGCDVHLAHPMKVKAIASARIKTDTIDASVLCDLLRSNLLPEAYFSPPGVRSWKEVVRHRASLMNVRTQVKNKIHAILHKHALIHKFTNLFGVGGRRWLQSLTLPSPFKENLGQYLTLIDQLTEAIAVAEERVKATVKSDANAELLTTIPGISFVSALTIMGEIGNIRRFPSAKKLMGYAGIVPSIYSSGDRVRHGRITKTGSKWLRYVMIEVAQHQQMCKKIPGFGAYYLALKKRKGTNPATVATARKLLAVIWRMLMDKRPFSVDPPDRHGDVSTSKTETPKGLAKIISSPPVG

SEQ ID NO: 220980 - protein, 417 aa, unidentified
MEIVYERVAAIDVGKKIVAVAVRTPGERAGKRRQEVRKFNTYYRTLTTMVAWLVSERVTHVTIEATGVYWKPVFHALCEAERPLEVLLVNARHVKNVPGRKSDALDAMWLAELTECGLLRGSFIPPPQIAAIRELTRYRKKLIEARTSELQRLAKVLEDGGIKIDSVASALTTLSARDMIEALINGERDPAVLADLARGRMRSKIPDLRLACAGRFGDQHALMCTLHLEHIDHLADMIARLDTRIDEASFPFARQTELLATIPGISERAAQVIISEIGVDMARFPTAAHLASWAGLCPGNNESAGKHRSGKTRKGNTALCTVLTECAWAAGRTSSYVGAQFRRFHRRFGKKGGQKAATATAHTLIVIIWHVLAETTAYRDLGADYFTRRFDHPDARKRRLIRELEALGHKVTIEPAA

SEQ ID NO: 220981 - protein, 350 aa, unidentified
MSNVTVIGIDIAKNFIQIHGEDVHGKTLLKKRVARDNFLNFMVNLPKCLVGMEACGGAHYWARQLIELGFNVKLMSPVKVKKYVENNKNDANDAKACAEAVSRSHMQFVSAKTQVQSEIQSLHRVRSYYLKQRTGLMNMMRGILLEEGIAIPQGKASLFKKIRILLAPENDSLTPKSRNLFENLYEDLKRLDEKIDQHTSTLKKLSEEDEYCKRISTLPGMGPISSTAIIAKIGNGSEFKKGRELSAYLGLVPKQNSSGDKIRLQGISKHGDRYVRQLLIHGGRSTIRSAMKKNEITGLFEKQDEHSQWIRELAQRIGMNKTCVAIANKNARMIIALLKNKTCFQPALAH

SEQ ID NO: 220982 - protein, 406 aa, unidentified
MDVVYTHVCGLDVHKKNVVACVITPETKEIRTFSTMTDDLILLVDWIKSKGCTHVAMESTASFWKPIYNLLELEEIQTLVVNAKHMKNVPGRKTDVKDAEWIAGLLRHGLLQGSFIPNRDQRELRELIRYRRSLIDERAREVNRVQKVLEGANIKLSSVASDVLGKSGRAMIEAMINGEENPELLSELAQRRLKNKKADLQRALKGLMGNHQKLMLAAQLRHIDFLDEEIGRLDEEIKRRMLPFEEDLELLDTIPGVARRTAETIAAEIGTNMDQFPSAAHLCSWAGLCPGQNESAGKRKSGTTRKGNKKLRSALVEAARAAGRTKNTYLSSQYHRIAARRGANRAAVAVAHSILMIAYYILKRRQPYIELGPNYYEERKRDTIIRQSLKRLESLGLKVTVESTAS

SEQ ID NO: 220983 - protein, 416 aa, unidentified
MDVVHERCAGLDVHKKTVVACVLRSAPKGVIDKEVRTFGTMTADLEALREWLVECGCTHVAMEATGVYWKPVYNVLEQSEALTLLVINAQHLKTVPGRKTDVKDAEWIANLLRHGLLRASFIPDRHQRELRELVRYRTALIHQRAAEVNRLQKTLEGANIKLAAVLSDVTGVSGQRILEALLEGESDPQQLAELAHHRVLKHKREALEQAVVGRLSDVLRFVVQQQLQHLHDLEAQIAACDAKVEDLLRPFDAELERLRSITGVGPRTAQIILVEVGMAIERFPTARHVAAWAGMCPGNRQSGGKRQQARTRKGSPWLRAALAEAAWAASKSKDAYLPALFRRLSARRGKKRAIVAVGHSILVTAYYLLTRATMYQDLGETYFDQRDRQNVVRRSVRRLQALGYTVHLESAKSEAA

SEQ ID NO: 220984 - protein, 350 aa, unidentified
MIIIGCDFHSRFQQIAMLDAQTGEVIERRLEHENGEARKFYAGLPTPARVGMEATGYAQWFERMLAEQGHQLWVGDAAEIRAAMVRKQKTDSRDACHILDLLLRDKFPRIWIPSTDERDVRQLLRHRYKLVCLRTSLKNQLHAMAMGHGICRKKKLWTAVGRKELQGLSLGPWASRRRQQLLDLLDQLEPVLEELDRAVIQEAEKRPAAVRLMTQPGVGPVTALAFVLTIGPVERFPKSRKLVSYLGLNPSEESSGGRQRLGAISKQGNSMLRFLLVEAAQTASIYDPELRRDYQRLKFRRGRGVAKVAIARKLAVRLYWMLREQPSPVPPAPMQGSPAVSVVGESLSCF

SEQ ID NO: 220985 - protein, 353 aa, unidentified
MRWIGMDVHRWFALIAVVEAGVCRDEGRIGVRPEDLRAWAEEFLEPDDEVVLEATTSSDALAVMLRGVVARVVVSNQRKTRAIAEAKVKTDKVDARILAQLLAADFLPETWVADERTSRRRRLVARRVHLVKQRTRLKNRVHAILSRNLAPSCPHSDLFGGAGRRWLAGQDLPGDERRSVEALLRQFDFCGSELAEVERDIAADALDDPVVARLMTVPGINVTVAMSIVAAVGDFSRFESPDRLVSYLGLNPRVSQSGDGPARHGRITKAGRGQARGMLVEAAFTAARAPGPLRAFHRRIHQRRGFQIATVATARKMAVLCWHLVTKGEDYAFARPSLVTHKRRSLELAAGSE

SEQ ID NO: 220986 - protein, 322 aa, unidentified
MSVSVLGIDIAKQKFDIALLVDGKTKHKACKNSVEGFSALMIWLEKQGVQKVHACLEATGNYGEELAIYLYEAGHTVSIVNPVRIKGFGQSELIRTKTDKIDAALIARFCLAMKLGPWSPPSPEIRSLRAQVRRVDSLIDMRSQEKNRIGTEHESVSPLIKGHIDYLDKEIEKVREQIADLIDRDPDLRKKKDLLASIPGTGTATIPHILAELDDLEKFNHVRELVAFIGLAPKETLSGSSIKGKPRLCKIGHARLRKALYMPALVSIQCNPLMITFYNRLKEKGKNGKVIVCAIMRKLVHLIFGILKSGKKYDPNYKPAFA

SEQ ID NO: 220987 - protein, 345 aa, unidentified
MDIKTLGIDVGKTWFHLIGCNRAGKPVAKHKFNRGQLVQFVANLPVCRIGMEACPGAQHLARVFQRHGHDVRLMAPKFIKPYLKSHKNDFNDAEAIAEAVERPTMRFVSVRSNEQMDLQAVHRIRERLVGERTAVINQIRAFLIEYGLPVKEGRASLRRDLPGILEDAENGLSPRMRQLIASLREHWHALEALVAQHTREIELVAKRHDDCRRLVTVPGIGPLGATALVAAVGNGAAFKKGRELAAWLGLVPRQHSTGGKPTLLGISKHGNRYVRMLLIHGARSCLKSLNRENHELGLWMTQLEERSHRNVVAVALANKLARIAWAVLARHEVYRSSTAAAASPR

SEQ ID NO: 220988 - protein, 342 aa, unidentified
MEQYVALDVSLKEISVCIVDSNGEVVFEGKTAAEPAILVELIRSKAPQVKRVGLETGATSPWLFHALASAGLPVVCMDARHAHAALSIRPTKSDRSDARGLADMLRMGWYREVHAKSVTSHERRTILGARHQLVTMRSELDAQIRGILKTFGLILGTGNKDTLIQRAEKLAAGHPVMSGLVAKLAEVRRHVTSQIAAIDRDIRHLVHTEPTLKRLMSVPGVGPITALAFLSAVDDPRRFKHARDVGPYLGLTPTRYQSGETDRQGRISKCGDTFTRTCLYEAAHVLLTRVQRFSPLKAGGMRLAKRIGGRKARIAVARKIAVILHCIWTDGTEFWWTRDKAA

SEQ ID NO: 220989 - protein, 334 aa, unidentified
MNMIYIGIDVSKNTFDVAIVDNNKITNKQFNNAADGFKLLLNEVGLIISNKNDALDRSDQLFTMEATGIYSLELAKYIYKHKQQVIVVNPIKTHAFMKMEMSRNKTDKADSVAIAKYSKYLVDNGDFEKFLFTPKSDTFEALQFLVTRLDQLSNNKTREVNRLGASINKSVTRSLKRSIKSIDGEIVKIKQEVTKVIEKDKDLKEDIELLESINGIGLMTAYSILAYIGDMSLFSNSKQITSYAGLNPSIEQSGTSINRSSLSKLGNRRLRKALYMPAVTAIRYNPVLKKMYNKLLAKGKAKKLAIAAVMRKLLVLAYGVLKSREPFDPNYCGT

SEQ ID NO: 220990 - protein, 313 aa, unidentified
MEATALFVGIDVSKDRLDVHVHGRDEWFDVPRDTEGIAALVERLRALTPQIIGIEATGGFENVVVASLAVAGLPVVVVNPAQVRAFANALGKRAKTDAIDAAVIARFVAATQPEIRPVKDEETRLLADLVARRRQILAMIKAENQRRANAPPRMQKSIDRLLKALGREIDSVNGDIDTGIRNSALWREKENLLRSVPGVGPTIARTLIAELPELGTLDRRAVASLVGLAPWTRQSGRWRGKSFIGGGRANVRSALFMGALVAARHNPVLREFRNRLVAQGKPKIVAIVATARKLLTMLNAIIRDKTPWQKQNA

SEQ ID NO: 220991 - protein, 362 aa, unidentified
MIQGPKNPFARRPQMRFYTKQHKFYCGIDLHARTMYLCILDQEGKILLHRDIKTDPDVFLKTIAPFREDIVVAVECIFTWYWLADLCDREAIPFVLGHALYMKAIHGGKAKNDKIDAYKIAALLRGGMMPMAYVYPSDMRSTRDLLRRRTHLARKRAELIAHIQNTNHQYNFPDMGRISRKCDRNKAGVSEHFTDPSVQKSIDLDVALIEHYDKLLNSLEQELSNIAKVHDADSYFRLRSIHGIGRILGLTILYEIHDINRFPSVQDFVSYCRLVKSAKESAGKIVGSSGKKIGNAHLKWAFSEAAVLFLRGNPEAIKYRAKLERKHGKAKSLTILAHKLARAVYNILKKKEVFQPKVFFAK

SEQ ID NO: 220992 - protein, 355 aa, unidentified
MDSKKYIGMDVHKESISIAVRNGAGKIVMECVIETKASMILQFIDGLRGDLQVTFEEGTSAAWLYDLLKPHVTKLLVCDPRKNASMREGNQSDKIDARRLAELLRLNHLSPVYHGEHGLRSLKELVRSYLTITKDLVRVMTRVKAIYRSWAIPCTGKQVYAPRHRVEWLGKIGEPGVRRRAEFYYQQLDALRLVRQEVRRELLAEAKKHKAWKLLCQIPSIGPIRSAVLLGILQTPHRFRTKRQLWTYSGFGIETQSSADHRKVDGQLERVKKQSSIRGLNRNCNHDLKNLFKGAAIVASSKPGPFQEFYTALVTKGIRPEMARLTLARKIATIVLIVWKRGACFDAQHLKPQTA

SEQ ID NO: 220993 - protein, 287 aa, unidentified
MALYAGIDLHSRNTYLGIMNSNLRRVFKKRVANDLELILKTLDPFRHDLIRIVVESTYNCYWLVDGLMDAGYGCLHLANPSAIKQYEGLKYKDDVHDAFFLTHLLALGILPEGYIYPKKDRPVRDLLRKRSFLVKQRSSHILSLQSMIERNTAQRLNSNKIKDLNSWDLERVLQEEYVVLAAKANNHTIKFLSEQIRQIEVAVKEKVKLTRPFKLLLTVPGIGDILAMTIMLEVGDINRFGKVGNFASYCRCVSSQRTSDGKTKGRGNRKNGNRYLKKPLKMCLPVS

SEQ ID NO: 220994 - protein, 341 aa, unidentified
MKTNRTVVGVDTAKRVFQLHWVDMETGEIVDLRLTRAKFLEHFANRAPCVVGMEACGGSQHWARRLRELGHEVRLLPAKLVRPFVGGNKSDTHDARAVWTAVQQPGVRTVAIKSEEQQAVLALHRIRQQLVKFRTAQINGLRGLLAEYGEVMPQGRAGIARGIAVALGRVSERLPAMVVETLREQWARVVQLDEEIGEIERRLKLWHRDNAASRRIAEIPGVGVLTATAVVAAMGDPVAFRSGREFAAWLGLVPRHEGTGGRVRLLGISKRGDKYLRTLLIHGARSVLTNSKAPPAWAVRLAERRPPNVVTVALANKTARTIWALLAHDRAYQANFVSQPA

SEQ ID NO: 220995 - protein, 380 aa, unidentified
MRQVCGLDVHKDSVFVCIINENGVVFQEKYGVLTPELEQMLAKMLEYHVEEVCMESTSIYWMPVWRVLENYVSLKLVNPYFIKQLPGKKSDVKDAEWIATCLLKDLIKGSYVPDDLIQQLRQYDRRISDLNAECVRKLGKLDAALQRCNIRISNYVSTTDGKSYKEVVRLISEGTRDPAELTKVIHGRTINRVGKDVILASLTGVISNTDIDVIRQLREEVALAERHKDECQSKMDAICQQYFPQQLKNLQTIPGIKGRSATAIIAEVGTDMSSFEDAAHLVSWCGLKPRNEESAGKIKARSTTHGNRYLRKTLIECAWAASKTQGCYFNKFSYHQVVVRRKNKMKVQVAIARKVLTAVWYVMHDNVAYRDFTPDIAPAE

SEQ ID NO: 220996 - protein, 259 aa, unidentified
MKVFYLGVDVSKKKLDLCLRSNGKDILYDVIPNDLSSIKSWLTRTFEKFFLSEDSLVVCAAEHTGQYTYPLVCATKSIGVYLCLEDAAKIKYCHGIPRGKNDKIDACRIAMYAERYNDCLQPYTASELIIQKLKNLSTERSMLVADRAKYQSQLKDQVDYMEHSIYIAKCNRVEGIINTFTDYIAQIDLEIKELINQAPVIAHQMDLLMSVDGVGERVALKMIMETDAFTSFTDPRKFCCHAGVVPFVYVSGSSQRSKK

SEQ ID NO: 220997 - protein, 353 aa, unidentified
MNTIKYIGLEVHKLITVIAVLNEKGKQIMMTRIKTDAENFRDFFRGLSGDTHVVLEEGGWSAWLYHLIKPLVTRVVVCETRHNKLIGDGNKSDDKDAFALAELLRLNAIKVVYKGDLQQSQIRELFRSYDNLVSDATRAQNRLKAIYRGRGLDCSGVRMLRLDRRAEWLATLSDQAARTRADLLLQQLDTLQALRKQAKANLIAACKQHRDYERLLTLPGFGPIRVASLLAIVGNPHRFRNKRQFWPYCGLAVVTRSSADYIERNGQIVKKPAKAVTRGLNPNHHPQLKAVFKGAAITARQTQEFKDYYDQLIQRGLKPALALVSLARKLAAVTLASWKQEEVYDPKKVFAEA

SEQ ID NO: 220998 - protein, 343 aa, unidentified
MEHYAGIDVSLESASLCVVDATGRIVREAKVASEPDVLIAWFCGLEFAVTRIGLEAGPLSQWLYAGMRDAGLAVELLETRHVRDAFKAMPVKTDRKDARGIAQLMRLGWFRSVHCKSLPAQEVRALLTARKLLQTRNHDVEMSLRGVLHGFGLKVGPTTPRTFVGRIRELAAGHGTLSTVAEALLAARSMLFEQCQKLEKRLRSLAREDGRVQLLMTAPGVGAIVALTYASAIDDPGRFRSSKAVGAHFGLTPKKYQSGETDVTSRISKIGDGGVRTALYEAANVILTRPVKGSTLKSWGMRLAARTGMRKAKVALARKLAVVLHRMLADGTEFLADKAAVAR

SEQ ID NO: 220999 - protein, 383 aa, unidentified
MKAVCGLDVHKDSIFLCILHSDGELFEQVFGVLTFQLEEMRKLLQKHHVFEVCMESTSIYWIPIWRVLSPHFTLRLVNPYFIKQLPGHKSDVKDAQWIAECTMKELVRGSFVPPEIIQQLRQYDRRIFDLNVEIVRKVSKVDGVLQRCNIRLSNYVSNIECKSYRDVVRRLSEGVTNPNELMKLVHGRIVNRHGVETILASLTGVVSQAEIDVLRQLHEEIDIAESHRNECQQRMLEICEKHFPEELERLQKIPGIKERAATSLIAEIGTDMSKFETANHLASWSGLRPRNDESNKKIKSRKITHGNVYLRNTIIQCAWAASRQKDSFFSRFSYHQTIVRRKNKMKVIVAVARKLLIAVWHVLHDKTDYVDFKPDREESANNG

SEQ ID NO: 221000 - protein, 363 aa, unidentified
MRDYIRDAVGLRISEFDLFVGMDVDKHRIAVTVNDRDSSIKSLCIPYDAGNLLSFIRNEYPSRRVLFVYEAGPTGFGLHDAITRAGYPCVVASPGNIPSAPNDRVKTNRLDSRKLATSLAGNGLKCVHVPSEPIRQLRSLVHLRYTYMQDIRAYKCRIKAYLLKEGMAFPPCPKGGHWSRSVIAALRNMDCDPVSGVVIHSMLDHLEHLKKQLSLAEVALKSFVSGDEELSRCVGYLMSCPGIGWRIACYTLARLGDWKHLGRSYEAGAFFGLVPCENSTGDRTDRGRITKGGDPRLRSMLIQGAWAAIRKDSELKAFYERICENHPKRLAARVAIVAVARELAERMCSVLKQQRRYDLRIAA

SEQ ID NO: 221001 - protein, 402 aa, unidentified
MSSVFVGIDIGKKKHQSALMGEKGETLARTLSFTNSLAGFQSLLKQLDPWSKEDILIGLEATGHYWLDLYTRLVDTGYSVVVINPLQTDGIRNMYVRKTKNDRCDAVIIADVLRFGRFRKSSVPEEDIAQMKALSRLRTGMVQSMSNVKRQIVAILDRLFPEFEACFNDIFSKSSMAVLDEFADPEELARCPLEELADLLFEKSNGRLGAAKAEHLKETASRSFGTGYAKRSMKFELKLLLEQVRFTQEQILEIEVKLKELMKDHQLITTIPGISDILGSAILGEIGDISRFENPKQLVAFAGLDPSVHQSGNFNATSMHLSKRGSPHLRRALYIAAHVARIHDPVLKEHYEKLINRGKHHRQAQNAVAAKLARIVFSILYFKEPYDIEKLRSKPKLEEMSA

SEQ ID NO: 221002 - protein, 347 aa, unidentified
MDHVGLDLGKRESQIAILAEDGELINMRIRTERRRLVEMFGRRPKARILMEASTESEWVARCLEDLGHEVIVADPNYAPMYAQRTRRVKTDRRDAHALAHACRAGTYRPAHRTSTERRELRARLAVREAVVRTRAAWITRIQSLVRREGCRFRTGAPETFLTGVEELALPPALMTVIAPLVELLGPINKQIAVLDEELERIVAADEVARHLTTVPGVGPVTATAYVATVDDVTRFRGAHQVEAYLGLVPSEWSSSEVQRRGHITKAGNSRMRWLLVQAAWCILRRRKRPQTAALRDWAERIAGRRGRSIAVVALARRLAGILFAIWRDGTVYDATKVRGPLPARRAA

SEQ ID NO: 221003 - protein, 412 aa, unidentified
MEVLYESCCGIDVHKSSVAVCVLLEQKHKPQKHLRRFGCTTRDLRELTEWIRSFGVRHVAMESTGVYWKPVWNVLEEHFHMVLANAQHIKAVPGRKTDMMDCQWIAELLRHGLLRGSYVPPLLTRDLRDLTRTRTTLSQEQSRISNRIQKLLESANIKLASTVTHTMGKSGQAILDAIVRGEDSPEELAGLALGKLRSKIPQLQLALEGRIRDHHRFLLGSLLREYRFLEAEIQTLDTRLQHLGAQHQELADAVERWITVPGVERVAAWTLVAEIGPDMTAFPSAAHLASWAGLCPGNHESAGKRLSGKSRNGSPWLRRMACQSAWAAVRTKNCYLSTQFKRLAARRGSKRALIAVAHSLLVIGYHIQSKGCVYQELGGDYFDHLHAERLKRHLVKRLESLGLSVTLQPQAS

SEQ ID NO: 221004 - protein, 346 aa, unidentified
MQVTTIGLDLAKSVFQVHGVDAEGTVVVRKTLRRAQVLSFFAQLPPCLIGMEACGSAHYWARELSKLGHAVKLMPPSYVKAYVKRGKTDVADAEAICEAVTRPTMRFVPIKSAEQQGVLMLHRSRAILMRQRTMTVNALRGHLAEFGIVASQGTKGLWALVDRVFGADADQSLLPAAARIALGTLVSQIRHLHMQIKAIEAELLAWHRTSEASKRLETIPGVGFITATAIAATVTDPSHFTSGRQFAAWLGLTPKANSSGGKERPGRVSKMGGKYLRTLLVVGATSVIRYARGKGSAGAVWVNGLLAKKPSRLVSVALANKTARIAWALLVREEVYRAPAISAADA

SEQ ID NO: 221005 - protein, 419 aa, unidentified
MKRMIKRCAGLDVHQATVVACVLIHEGRKPPRSEVRSFGTMTYELQALRDWLAAERVTHVGMESTGVYWRPVYAVLEGHFELIVGNARHMRNVPGRKTDVKDAEWIAELVCCGLVRPSFVPPKPLRELRELLRYRRKLVEAQAAERNRLQKLLETANIKLGSVATDVFGVSGRAILRALIDDTASPEEMAELAKGRLRSKRVELAHSLKGQVEDYHRFLLSMQLRRVEDTEQYIEQLDQRIAEKLVPYQGAMALLMQIPGVDWVVAAVLIAEIGTDMSVFISVYHLAAWAGLCPGSHESAGKRRNVSVRKGNMHLRTILVGAARAAARTKGSYLKDKFHRLKARRGVKRAEVAIAHKILVAAYHMLSRGVGYRELGEAYLDQIDQTRTAANLKRRLERLGYVVSLQPKEAVPNPVKAAA

SEQ ID NO: 221006 - protein, 337 aa, unidentified
MAKEKAVRWVGVDVSARWVDGSRAAADEPVSARQFANTPAGHGELASWLTQGGRRARVVLEATGLYSLDLALRLQRTARIEVMVINPRASKEFAGAWGQRARTDASAAQGLREYAARMPFTPWTPPGPQALALRTIMRRVVALIEARVQERNRLHALSATEALPAVVRTDIRQHIRTLERRIARLEHEARALVEPAPALRAGFRHLCSVKGIGRRSALMILAEVAVLPGELTARQWVAHAGLDPRPIRSGTSVHPPVRMSKHGNVYMRRSLFMPALVAVRRNSAVQRFATELTARGKAPLQVLVAVMRKLLHAIYGMLKTDTDFDGEKFRRSAHAEG

SEQ ID NO: 221007 - protein, 343 aa, unidentified
MEHYAGIDVSLERSSVCVVDSSGRIIREIKVASEPEVLVGFFAGLGVAVTRIGLEAGPLSQWLHAGLTGAGFEAVLLETRHVKAALSAMVVKTDRKDARGIAQLLRMGWYRPVHCKSPPAQEIRALLVGRKLLQGKLLDVELSIRGILRGFGLKLGEVSKGRFVARVRELIAGQPMLERVVEPMLRAREALRAEYQVLHRAVLAIVREDAACRRLMGVPGVGALVAITFTSAVDDPARFRRSRAVGAHFGLTPKKYQSGETDVTGGISKVGDAMVRTALYEAANVMLTRAGRFSTLKRWALGVAQRRGMRRAKVALARKLATVLHRLWVDRSEFRFGKEVAAA

SEQ ID NO: 221008 - protein, 349 aa, unidentified
MGEVSTIGVDIAKSVFQVHGVDADGTVVIRRRVGRAKILEFFSKLRPCLVGMEACATAHHWARELKKLGHDARLMPPTYVKAYLKRGKNDAADAAAICEAVTRPSMRFVPIKSVEQQSTLMLHRTRDLLIRQRTQLINALRAHLAELGLVAAKGREGLCQLVTVVTECGDERLPSNARFACQAIVGQLHAVQTQISGLDKRITQTHRANPDSKRLDAIPGFGVILSTAVVATMTDPKAFKTGREFAAWIGLVPRQNSTGGKDRLGSISKQGDRYLRRLLVVGAISIVRTARMWPDKYPWLIELLGRRPAKVVAVALANKMARVAWAVLAKGETYRAPTRLSNAAITGAA

SEQ ID NO: 221009 - protein, 329 aa, unidentified
MEHHAGLDVSLEETSVCIVDGAGKIIRETQVASEPEALVGYFSALEITVVRIGLEAGPLSQWLHAALTEAGFEVVLLETRHVKAALSAMTVKTDRRDARGIAQLLRMGWYRPVHCKTLPSQEVRAIITARKTLLGKLIDIELSMRGILRGFGLKVGAVTRKSFEIRVRELMEGQLTLTAIMEGMLNSRATLITEVSKLHKAILRIARADGVCVRLMTAPGVGALTALIFKTAIDDPTRIAKSRDVGPLFGLTPGRYQSGETDIIGRITKVGDVMVRTALFEAATVMLTRSTKKSQLKSWALDVVKRRGIKRAIVALARSAWCCTGCGSI

SEQ ID NO: 221010 - protein, 351 aa, unidentified
MIIVGVDYHPSVQQVAFLDTETGETGERRLNHSDGEAERFYRDLQRRQFSVRVGMEATGHARWFERLMAELKFELWIGDPARIKATRVRKQKSDRQVAQLLLRLLVEDRFPRIWVPSRENRDLRQLIWHRHRLVQMRTRAMNQIQATAMNEGMRRKKTLWSKAGRKQLESLLLAPWATRRRQELLDLVDRWNVTIAELSTAIEQEARKRPEVLRLMTHPGVGPITALAFVLVIGSPDRFACGKQIGSYLGLIPCEDSSADRQRLGHITKQGSSLLRYLLAEAAQAAVRWDPSWRRRFGHLAMRRDRRIAKAAMARRLAVSLYWMWRKECDHQQTLQFGSHAGELGFVHGVK

SEQ ID NO: 221011 - protein, 377 aa, unidentified
MSKIRFVGLDVHADTIAVAVAEPGGEVRSVGIIPNRLESIRKMLGKLGPAQHLKTCYEAGPTGYVLYWQLTQLGVVCEVVAPTLVPTKAGDRVKTDRRDAEKLARCYRAGELTAVWVPDAAHEALRDLVRAREAAKKDQLRARHRLGKFLLRHGRRPTHAGKAWTKKYLEWIKTQVRFDQPALEATLAHYLQEVDHAADQILKLEKAIDEAVAQASPEIRSVIEALQALRGVAQMTAATIVCELGSLSRFPSPRQLMGYSGLVSREHSSGNRIQRGAITKTGNAHLRRVLVEAAWAYQHRPNVTGFLLRRQKSLALSDQVKQMAWKAQYRLHKRYQAFALRGKNKNQIVTALGRELLGFVWAIAVHTEAQHKLRKAA

SEQ ID NO: 221012 - protein, 402 aa, unidentified
MAYDFVIGMDVGKYFHHACVLDPQDRQVLSKRINQHEGSLRKLFGTYLADNAPVLVVVDQPNNIGRLTVAVAQAMGADVRYLPGLAMRQLSRIHVGNSKTDVRDAYVIAHAGLNLPDALRSVDRVEEVFLQLKVLNGIDEDLARAYTRLINQMRSALVGTYPAFEHVLHGQMIHRKWILHLLAKYGGPTKIRRIGKARLAAFARGHRARNPEPVIDAMLAAIHSQTVSIAGAEYAELGVAMSAKDALAKLEHRKEIEAQVLELIQDIPQTEILLSMPGIGPRSAAQILMTVGDMSDFPDAAHLASYAGLSPRTNQSGTSIMSNSPNRAGNKKLKNALWQSSCASIRFHERSRQFYERKRKEGKRHNAAVVALARRRLNVLFAMMRSGELYRDISTVQEAAAA

SEQ ID NO: 221013 - protein, 345 aa, unidentified
MPIVGGLDIHRKQLTFDYLDTVTGEVKRGQVAPADRVHLRAWLVRFAGRDDVAFALEGCTGWRYVAEELAGAGVAAHVAEPADTAFARGRKRHAKTDKTDSRHLRELLAEGRLPECWIPPSVILECRALLETYHDLRREHTAWVQRIHAVFFHQGAPALGEAALRTGRDLQAVRASAAAYLSPAGQLQVATALEMTGALEARLEVLRHELLDAARHLTGAKVLAARLYGVGPVTALAMTCWLAGEGRFSSSRKAVRFAGLDITVYSSDSRRSPGRLSRQGPAVLRWAVFEAGKTHARASAPDHAYYAAVKDRKDGKRAALSEARKILRQACHILAELGDDALTAA

SEQ ID NO: 221014 - protein, 450 aa, unidentified
MMDMDPRCWPASDPKTNQGDYKMNSNQNERINQITSSTLIVGVDIAKFKHVARAQDYRGVEFGKPITFENNREGFELFVGWFQKISTEQGLQDVIVGMEPTGHYWLNLAHFLKEKQVKYGVVNPLHVKKSKELDDNSPTKNDVKDAKVIAQLVKDGRYAVPSLPQGVYAELREAMKIREHLTTDLCVVQARVHNWLDRYFPEFLTVFKDWECKSAIQMLSLYLLPHELVSLPDEMLLKHLREAAKRGLGLGRIKNLKAAASRSVGIKEGSELAKMELKLLLAQYEWHHNKLEELESKLDELLKQIPHVQQLLAFRGIGRDTIAGFLAEVGDIGQYRHPKQISKLAGLNLKTNSSGKHTGQTKITKRGRKRLRALLFRVMMPLVAKNAAFKALHEYYTKRHVNPLKKMQSLIALCNKLIRVLFGILKKGHEFSEEKMIQGIPRFAELPQAA

SEQ ID NO: 221015 - protein, 337 aa, unidentified
MEDIIYDHYIALDWSIINMAIARMTKKSNKITVIDVPSDIVEIKVYLKNLRGTKILTIEETTTTQWLYTELKEYVDKLLICDPLRNRLLSEGPKTDKIDASKLVQLLKANLVKEVYHSTDRFLYLRRVVSGYEDLVKAGVRLKNQRYALLRACGKKGSKDKGSKLESQGDQFVLECLDRQIEAYTNEKKGYEEEFKRLVSKYPEIKQQKSLPGIGDINAVKIVSRIVTPHRFINNGHYLSYAGLIKLDRISGGRSYGKKTPRFCRQLKSVYKSGVLAAIGGNNPINDYYEYLIKEKGYPEYNARHKACRRLAILSLGVFKSGKKYLPYRRDHVEAIN

SEQ ID NO: 221016 - protein, 462 aa, unidentified
MKHKAKSQAMHSGLAVVNPNAAAIDIGATMHVAAVGADRASDPVRSFGTFTADLHRLADWFAECGVKTVVMESTSVYWIPIFELLDERGFEVILVNARDAKHVPGRKTDVSDAQWLQRLHSYGLLRASFRPKGEIVELRAYLRQRERLLDTAASHIQHMQKAMTEMNLQLHHVVSDITGATGMRIIRAIIAGERDPAVLASMRDTRCHSSAEVIEKALTGHYRGEHLFVLEQALALYDVYQQKVAACDIRIESVLKELSSIRGRKEDARADGSGSSRRRSRQSNGPDFDVGEALHSLLGKDLTRIHGIGPYLALKLVSECGDDLSAWPSAKHFTSWLCLAPSNKISGGKVLSSRTRRSGSRAASLLRLAAVTIGRTETALGAFYRRLSARAGKAKAVTATARKIAVLFYNALRHGMDYVDPGASYYETRYRERVVKNLHRRAKAFGFVLQAADVPVPEQAVS

SEQ ID NO: 221017 - protein, 407 aa, unidentified
MVAVMIGVDPHKGSHTAVVISAAEEPLGEIRVRASAGQAEKLVAWAAGWPDRTWAVEGAAGLGRLLAQQLVAAGEQVLDVQPKLASRVRLLQAGDTNKNDPNDALSVAVAALRSRTRRQVTAEDYRAVLKVWSKRHRDLSRLRNQVACRLHAVLCDLVPGGHPKEITAAHAARILEQAAPSGPVAVARAELAAEFLEDMRRLDAQLRDTRKKLAAAVKASGTTLTGVFGVGPVIAGTIIGDVGDVARFPGRDHFAAYNGTAPVEVSSGNRKIHRLSLRGNRRINHAIHMAAITQIRHRHSDGRAYYDKKIAGGKTHKEALRSLKRQISNAVFACLQVDAKQAAAASAKGPGGQPGNGSASSVAGSHPARQLFGKATPGPGTTLRPATRRRSTPPPKPASTKKIQATT

SEQ ID NO: 221018 - protein, 345 aa, unidentified
MDIMYYIGLDVHKKTISYCVKDASGQIHQEGKIGATRCELDCWMKTLRQPWTVAMEATIFTGWIYDHLLPHAAQVKVAHPLMLRAIAAAKKKNDRIDAGKIADCLRCDFLPECHIASTAIRDRRRTLRYRHLLVRQMVQMKNRVSGLLMETGVSYNKQRLHKVGYFRELLSSHQQVQESIRPLLKLSRDTIVRLQKTEYALVSSLQRDPLLADRVQRLKTVPGVGPITALSWALEMGDVSRFRSIRQAISYCGLCGEEKSSADKVMRTPLSKQRNKHIQRVLVEAAKLAPRQEHDLALVYQREKEKGNANRATLAVARKMVAYLLAVDREQRDFVPAEDHRRAAA

SEQ ID NO: 221019 - protein, 350 aa, unidentified
MTTIARRITGGVDTHLDVHVAAALDERGSQLGVESFAATAAGYQELLGWLEEFGSVELIGVEGTGSYGAGLTRHLLAHEVAVVEVDRPNRQRRRRKGKSDPHDAVAAARAAQGGEATGSAKTRDGNVEAMRVLRVARRSARGNRTQAINQMRSLISTAPEELRAELRNLSIYNVLTLASAFRHTGRTDVTTVTKLTLRTLARRALSLEEEVKEIDRLLKTLVAETAPELNAIDGVGTDVASAILVAAGDNPERLKSESTFAKLCGVSPLDASSGKQQRHRLNRSGDRQANSALWHIVFTRMVKDPRTKHYIERRMKEGRTKKEAIRCLKRYVAREVFAALPRSQFALDNP

SEQ ID NO: 221020 - protein, 416 aa, unidentified
MNAVGIDVSSRKSTVAVLRPLGEVVCLPFDVTHDIAGLASLVEKLKALDGETRVVMEHTGRYYEAVEKALHEAGFFVCAVNPLLIKEYGANSLRRVKTDKADAVKIARYALDNWADLRDFTPMDAIRYDLKTLNRQFQLASKQRTASANNLIALLEQSFPGIRKCFDSPVRSDGTQKWVDFAHSFWHVDCVRKQPFAAFCERYRKWCKRHAYFFKLSNAEEVYALAKRAVVLTPKSKVVKVLVQEAANQLSSISRSVEVYRAEMDRLAAMLPEYPVVMAMYGVGKSYGPQLMAEIGDVRRFERKEALVAFAGIDPMPNQSGDKNVRSNKSSKRGSPYLRKTLFNVIRTYLQCAPQDEPVFQFLNRKRAEGKPFYVYMLAAANKFLRRYYAKLRDYFASLDTLQPVAPIPTILKATL

SEQ ID NO: 221021 - protein, 349 aa, unidentified
MLIIGCDYHPSVQQIAWVDTESGECGEQRLAHSGGEAERYYRGLNGQRVRVGIEATGHARWFEGLLTELKYELWVGDPAQIRAKRVRKHKNDREDARLLLKLLVEDRFPRVWVPSAENRDVRQLLWHRHRLVQMRTRVMNQLQAIALNEGVRRRKGLWSQRGREQLESLTLANWATRRRKDLLDLLDRLNPRIEGLSEAIEQEAVQRPEVKRLMTHPGVGALTALAFVLIIGSPERFRGGKQIGSYLGLAPCEDSSADRQRLGHISKQGNALLRFLLVEAAQAVVRFDPEWRRHFLHLAMRRHRAIAKVAMARKLAVGLYWMWRKGWDYQQMAQFGSHVGEPVTGHGVQ

SEQ ID NO: 221022 - protein, 343 aa, unidentified
MQTITTIGLDLAKSVFQVHGVDAGGQVIVRRQLKRRYVVTFFQKLSPCLVGIEACASAHHWSRELQALGHTVRLMPPAYVKPYVKRQKNDATDAEAICEAVTRANMRFVPTKTSGQQSGLLLHRARHLFIRQQTSVINAIRAHLAEFGIVAPVGRHGVEELLNVVADPNDKRVPEIARACLSAFGAQLRSIKEQVLEFDRLIRAWHRSNELSMSVDEAPGVGPVLATALVAAVADPKSFRPGRNFSAWIGLVPKQHSSGGKNRLGGISKQGDRYLRGLFVAGALAVIRYAKIHGTKHRPWLTALLARRPTKVAAIALANKIARMVWAMMVKGERYKEPVALAA

SEQ ID NO: 221023 - protein, 342 aa, unidentified
MKKIFIGIDVSKETIDVSFVESDFQQQPKYLAQYPNSKKGYRSMVRDLKHALRDTNTGQWLFCCETTGAYDKQMCHWLVENEMHVWRESALQIKQSLGIRRGKNDKADSMAIADYARRHPDKINFFKIPNKELAALKDLFMYRQNLVDKLKGVKNRQKAMKSQGDAVSKAAKFICRDTNNEIKRLERSIAECENAMMEVIRSDEQLERNYEHVKSIKGFGLVVTVALMVFSGNFQNIPTANKMATYCGVASFRNTSGTTINSRQDVRHLSNRRLKGLLSMAARSAIQHNDAIQRYYQRKIDQGKLYGVAINNVKNKLIHIAYALVKSNQDYQTEYMFNEDAV

SEQ ID NO: 221024 - protein, 415 aa, unidentified
MERILERCCALDVHKDQVTACVHVPDQEGKRSELRAQFSTMTAELLALRDWLQGLGVTHVAMEATGVYWKPVYYVLEDDFELWLVNAQHVKNVPGRKTDVQDAQWLCQLLEHGLVRSSFVPPKPIRELRDLTRYRKSLTWERSREANRLQKQLEDANIKLASVATRVLGVSGRAMLEELCRGNNDPEALAQLAKGKLRAKLPALRQALEGRFSNHHALLVSHLLAHIDYLDETIASLSAEIEERLRPFERELELLETIPGVGRLTAEVMLAELGPDMSRFPSDRHAASWAAVCPGHDESAGKRRSGKTRKGNRWLRTALIEAANSASGRTRGTYLNAQYLRLRSRRGHAKAIVAVAHSILISAYHVLERDQSYEELGGDYFTRRVDTEHLTRRLVRQLERLGQTVTLTPSTAETG

SEQ ID NO: 221025 - protein, 435 aa, unidentified
MKSNTQNAKIEAITEKTLVLGIDVGSETHYARAFDYRGIEYSKKPFKFSNTEAGFVTFKEWILDLKERHEKDKVVPGMEPTGHYWFNLGKFLQDNEMKPVLVNPHHVKKSKELDDNNPTKNDRKDPKVIAGLVREGRYMIPYLPDGVYADLRTASNIRFQLQAELTRIQNRISRWFNIYFPEYKTVYGKPDAKSGILILKAAPLPEDILTLGIDGVNQIWRDAKLRAVGKARAKTLIEAAKHSVGSKEGAVAARMEIRMLLEDYESRNIRLQEVMTLIEGLIKQIPMAEKLLEIKGVGIRTVSGFLAEVGDISRFNNPKELQKLAGLALVENSSGKHKGETTISRRGRKRLRYLLFEVAMSLVAKNPEFRELHNYYTTRRLNPLKKMQSLMAIAAKLIRVFYVMLTKGVNYDPKKMVNDISRDQQFIYRLRKKDK

SEQ ID NO: 221026 - protein, 367 aa, unidentified
MIILAIDLGKFNSMCCFFDTQTQKYSFWRAATTRQYLRTLLEKFPVDLVVMEACGPSGWITDLCREMGKQTLVCSTNEEAWRWKNVKRKTDKDNALKLARLAMLRHLKPVHVPAPATREHRGLVKCRKTLDRRIGRIKSTIRSLFANHGIEIPRGAKAWFSGRGELNAYRQPLAECSLEELWRGQLDLELTQLDALTEQLAAVEKRLEAMAKDDDRIRRVRTIPGVGRKTAEALVTALDDVDRFENARQVSAYLGLVPRQYQSGETDRNGRITKRGSSLVRTILLECAWASLKYNPWSRTVFARIAGGQKNRRKKAAVALARKIAVVAWSMLKHGTDWDPTRLEIDLEAEPAASAATGPKIRAAGNA

SEQ ID NO: 221027 - protein, 342 aa, unidentified
MMKLYGGIDLHSNNSVFNIIDETGHVVLKKRMANDLENILLLLQPYADTLTGLVVESTYNWYWLVDGLMEANFKVHLANTAAIQQYSGLKHGDDESDANWLANMLRLDVLPEGYIYPKEQRMVRDLLRKRLQLVQQSTQHILSVQGLYVRHLNKRLASNKIKQLTVEQLAVDFTDLNVRLAVKGNITVQRCLREQIHEIEKSLKQQLKLKEAFVQLTSIDGIGLILALTIMLETGDISRFSKVGQYASYCRCVNGARYSNGKKKGKSNTKNGNKYLAWAFIEAANFAIRFNGTVKKYYQRKRAKTHMMVAKKAVAHKLARACFYVLRDQVEFDVNKAFGYST

SEQ ID NO: 221028 - protein, 443 aa, unidentified
MSELAVLDPRAAFVDVGSEKMHVSIAGGPPALFGTVTSQLHALRDYLAEHQVRSVAMEATGVYWLPLYGVLEAAGMEVVMVDGRQTRNLPGRKTDMKDCQWGATLHAHGLLRAGFVPPANIRRLQDYLRLRGDHIAAAAGHVQHMQKALERMNIKLHEVISSLTGASGLTVIRAILAGERDPQVLLGLCDIRIRNVKAERVVESLRGDWAEEHLFALAQAVQSWDHYQGLIAACDRQIAVVLRQMPDAKVPPPAASTKAGKPRTRPGVNAPDIADLREILAQICGAKDLTTLPAHSEYSVLQLIGEVGTDLTKWRTEKHFTSWLGLAPGSAQSGKRKASVKRRRNRAGQIFCVMARALARSKYVALGGFYRRMAARRGGLVANKALARKLATLFWRVMVKGLDFVETGVAQYEAKVLETKHRILHRLARQLGQKLVPNPAAVV

SEQ ID NO: 221029 - protein, 346 aa, unidentified
MLHVGLDLSRKRLDYHLLGESGETVEVGAAPPDADGLRTLAARLHEYGRPLRAAIESMTGARFVHDQLELHGLEVEIADAVKVKGLAPLACKTDRIDAWVLAELSRLHLVPAIWLPEPEVRAERERARFRLHLVRHRSSLKQRVHATLLTHGRPCPVSDLFGVRGRELLTRLALPEPWAGTVEASLRLIDELEREIAACEAELKALGVEHRCVPLLLTVPGIAWVLAYTIAAEIGDIARFSSPAKLAGYTGLCPRVYQSGESDRRGPLSKMGPRYLRWALIEATTHASRHPAYCERYERTKRRLGKQRGPRVAQVDLARRLAEAIWHMLTRNQPFAPAGATAPMTA

SEQ ID NO: 221030 - protein, 312 aa, unidentified
MKTICGVDISKARLDACIEPGTLRGSYTNDVAGIAELAAFCRQHQVELVVMESTGGYERRAFVLLSEDGLPCAITNARNVRLYAESMGVPEKTDRIDASMIARFARHKDLQPMPLPSPAQRRLKALVARLRQLTDDLIVQKQRRSSVRDDVEMLASIDEVIALLKRQSRAIEGEIGSMIDDDPLWAHLSQTFRSIKGVADRTVAWLMAELPEIGTYSNKAIAKLVGVAPIANDSGPRRGKRPVRGGRPGVRSIMFLVAAIAARYDQDLGRFRDRLLAAGKEKMVVRIALARKLLVRLNAKARDARAAFANAT

SEQ ID NO: 221031 - protein, 357 aa, unidentified
MSSKHNGAIASVIGIDIGKNSFHIIGQDQHGAIVLRQKWSRGQLEARLANVPPCLIGMEACVGAHHLSRKLQALGHDARLMPAKYVRPYSKGQKNDFRDAEAIAEAVQRPTMKFVATKTAGQLDLQALHRVRERLVSQRTGITNQIRAFLLERGIAVRQGLRFLRAELPRILATRADVLSPRMLRLVEDLAGDWHRLDERIEGLSAEIEALARQDKGCERLMTVPGIGPIISSAMVAAIGTGDAFSKGRDFGAWLGLVPKQISTGDRTILGSISKRGNRYLRALFVQAAWVVLVKLRPDQWQSYGLKSWIEAAKKRLHHNVLAIALANKLARIAWAVLNKGRAFECVKTDETASQPA

SEQ ID NO: 221032 - protein, 340 aa, unidentified
MTITTIGLDLAKSVFQAHGVDVTGENVLVKKLHRKQMIPFFSKLKPCLIGIEACATAHYWARTLIAMGHEVKLMPPSYVKSYVKRGKSDALDAEAICEAVQRPTMRFVPVKTVEQQGILAAHRTRSLLVRQRTMAANALRAHLAEFGLVANPGIANLLKLTEQVFSEETSLPGYAQRALSVLIRRLAELTEEIDVLDEELKAWHTNNEVSRRLAAIPGIGVITATAIAATVTDPDQFKSGRQFAAWLGLTPQQHSTGGKTRLGGISKQGERYLRRLLVVGATAVMRHSKNKDTPMASWINVLMEKKPFRLASVALANKLARIAWVILTRGETYQPYKQAA

SEQ ID NO: 221033 - protein, 372 aa, unidentified
MMTDQPALQVTAGVDTHADMHVAAVLDHLGRELGHRQFDTTTAGDLELHAWIAGHGPIDRVGVEGTGMYGAGLTRMLTARGVTVVEVDRPDRKARRFQGKSDPVDAYAAARAAQSGRAAGTPKTRTGNVEMIRMLHVARGGAVKSKTIAWNELKALIKTAPAPLREQLRDLDGAALLDRCVGLRAARGPAPHHGPHAKRRRPGMLADPTAACKRALAVLAHRIHALQDEIADLDDDLRPLVEQTAPTLLGLFGVGLDVAARLLAAVGDNPERLRSEAAFAHLCGVAPIPASSGKTNRHRLNRGGDRSANHALYTIVMSRLRYDERTQAYKTKRAAQQKSNKDIIRCLKRYIAREVHHAILTDLGVASTSEQP

SEQ ID NO: 221034 - protein, 424 aa, unidentified
MKFKMQDKQNQLIERISDKHLVVGVDIAQQFHVARAVNFRGIVVGDPLTFENNEDGFTILLHWINKLKRTNNLVTTIVGMEPTGHYWINLSKWLFEQNIDVVTVNPYHVKRNKENRDNTQSKSDKKDALVIADMVKNGYYSIVHPTSESFEELRVLMSNRDVIVKRLVSSINQLNRWVDVVFPELRQVFKDVKGKGAIATLRLFPTPMELRSMQPQNVVIGWKSLMKRQPGLKKAQLLIHLANRSIGTKQALDAYKFHLQQLLEEYDLATTQLERVEQQVTEALKQIPYAQQLLTIKGISEISLAGILGEAGDLSGFAHGNSLLRHAGLHLAEASSGKWKGQIVISKRGRSRLRRFLYLATMSLVMNNPEFKAIHAHNVKVKKMKKMKSIMKLVGKLARIFVGIAKRNESYCPEKVQPLTTLAA

SEQ ID NO: 221035 - protein, 439 aa, unidentified
MSKLPELDARAAFVDVGSEQMHVSVAGGPPQVFGTVTSQLEALRDWLLAQGVRSVAMEATGVYWLPLYGVLEAAGLEVLMVNGRQMRNLPGRKSDMKDCQWGATLHAHGLLRAGFVPPAHIRRLQDYMRLRTEHVTSAAGHVQHMQKALERMNIKVHDVISSLTGVSGLAMVRAILAGERNAERLLALCDKQIQRNKAERIKEALRGTWAKEHLFALRQALQSWEHYQRQITECDRQIEALLKEGDDGDAPPGTSTKARKPNNAGTNAPQIPHLREMLMRICGCDLTVLPAHTEYTVLQLVGEVGTDLTKWPTEKHFTSWLGLAPGSHQSGKRNRSVKRKRNRAGRLFCVMARSLARSKYIALGGFYRSMAARRGGLVANIALARKLAVLFWRVKVKGMDYVERGLHDYEAKVLQTKQRALRSLAKQLGQQLVPLSATA

SEQ ID NO: 221036 - protein, 405 aa, unidentified
MQVYIGIDWSESKHDVAIMNEASALLAQFWIKHTPEGFSQIIHQSHNLGIEPESAIVGLETAHNLLIEFLWARGFAQVYVVPPGVVSSSRGRFRQSGANSDEYDAMVIADLLRTDRHRLYPWHPDSLLVQQMRADVSYYRHLTKTSTQQSNRLRSVLLRYYPAALKVFSSLKTQITLQFLQHYPTPEAAKALTFAEFETFAREQGYTRTSNLTACFARLQAPYPQATEETMLVYENETVQLAQSLALSQQQRKATLRRLRSRFDEHPDAAIFDSMPGVGEFLAPALLAKFGDDRQRFPTAATIQALAGTCPVTRKSGKRKSVRFRHACDKEFRHIAQQWARFSLKQSVWANTYWSQKQPRSRSENHAYRCLANRWLAILWKCWQTHRPYDEAYHMQQRTLRSQPR

SEQ ID NO: 221037 - protein, 351 aa, unidentified
MPHKTAATVAHTIGIDTGKNTLHLIGLDDQGAIVLREKIARGRIAARLANVPRCLIGIEAGMATHYVARELGALGHDVKQVPPAYSKPFRQGHKNDFRDAHAIAEAVQRPSTRCVPVKTDDQLDLQALHRVRSRLVGQRTAVINQIRGFLLEHGIAVRQGLRFLRQQLPDILAKRSDVLSPRMIRIMEDLSGDWRRLDERIEHITKEIEVLAGTDVNCGQLMTVPGIGPIVASATVAAIGNGAAFARGRDFAAWLGLVPKQMSTGDRTILGRITKRGNRYLRMLFVQGARAILLRPKSWAKHSFGPWLTTAARRLHRNILTIALANKLARIALSVLIQGRSYETRIVLAAA

SEQ ID NO: 221038 - protein, 465 aa, unidentified
MTPHKDFFLHPRPPTSPPPQPPALTGSLQVFNPHAAGIDIGEAEHWVAVPPGRDPQPVRRFGTFTTDLDTLADWLIDCGVTTVAMESTGVYWIPLFELLEARGVQVLLIDPRQAKRAPGRPKTDRLDCQWLQRLHAYGLLAGAFRPDDQVCVLRAYLRHRQMLLTYAAHHIQHMQKALQQMNLKLTQVVSDLTGVTGMAILKAIIAGERNPQHLAKLRNPHCHHDADDIAKALQGTWRAEHLLALQQAVALYEFSHQQLALCDQQIKRHLETFADKSAGQPLPPKGRRHKKTNEPRFDARTPLYRMAGVDLTTLEGIEENTALVILSEIGTDMHRWPSVKHFCRWLGLCPQHKISGGKVLSRRVRPGAHRVTVALRLAARSLHHSQSALGAFFRRMKARLGTPKAITATAHTLARLVSSLLQHGSAYVQQGVDAYEAQYRERKVPSMAKHAKVLGYTLVPLPLQG

SEQ ID NO: 221039 - protein, 337 aa, unidentified
MLYVGLDAHQKRSSLCILNEDGKVVKQEQVNGPWPRVVDRLAKLNQPFRLCFEASCGYGYLYDRIAKLPMASQVTVAHPGQLRLIFKSKRKFDRVDALKIGKLLYLDEVPRVHVPNLDVRGWRKLIEFRQTLLGRRTAVKNQIRAMLRGNAIPAARWQWSKKAIVALRQVELPTDAEKLAMDLAIEELSELTAKVKRVEKELAKIAAGHPGMTLLMTVPGIGIRTAEAFLAYVDDVRRFARGRQVGAYFGLVPRLDSSAGKDRYGHITGDGPPTVRKLLCEAAWIAVRRDPQVKARFERIAGDDPDRRKIAIVAIAHYLARVMAAMLRSGEVWRKPA

SEQ ID NO: 221040 - protein, 319 aa, unidentified
MDATSRSVVGIDVAKDSWDMMILPEEKGGTFASDAKGLRQLLRQLPEAGTCLIVIEATGGYERKLVAELLQANHCVAVVNPRQVRDFARAMGILAKSDRLDARVIAMFGQHIQPRQLEKAPENQAELEQLVVRRRQLIDLRTAESNRLELTTLKLIRKGIKKMIGQFNRQIEQIEGEIAKLIQADDEWRRKKDVLTSVIGVGEVTSVCLIAELPELGRLNRQEISALAGLAPFNRDSGKWKGKRSIWGGRASVRSVLYMAALSAKRWNPVIRQFAQRLEKSGKPFKVVITACMRKLLVILNTMVRTNTHWNSDFTNQPS

SEQ ID NO: 221041 - protein, 338 aa, unidentified
MKYSAIDLHSNNNVLVVSDEADQVLVEKRLPNELNRVLELLAPHRDELAGVVVESTYNWYWLVDGLMAAGYCVHLANTGAIKIYDGLKHSNDETDARHLAHLLRLGILRSGYICPPAERALRDLARRRLQLVRSRTAHILSVENQLTRQTGRTIRSNDVKRLDAQALTAFGLPEDVTRGMSANVAVVQTLTGEIEKLEARLLEAVKQMAGWDLLNSIPGIGKILATIILLEIGSIGRFTDVGNFASYARCVDSSRLSNGKKKGEGNTKNGNKYLSWAFVEAAHFAMRYCPEAKRFYAKKFAKTNGAVATKALAHKLARACYHMLKTGQPFDVKRCFAG

SEQ ID NO: 221042 - protein, 357 aa, unidentified
MESTITAPSTQPQVTVGVDTHKHVHVAHAVDQLGRPLGSHRIAVNALGYRELVSWARRYGPICQVGIEGPGHYGAGLARHLRAEGIHVTEVGRPKKQRRARYGKTDEHDAAGAAAIVLAGEALGEPKTADGPAEMVRILRVARASAVRARGKAFLALKDLIVTALEELREELSGVYRKTLIYACRMLVIPEMPCTPTDATKIALKSLAARCYELDAETERLGHQIDVLTAAAVPALRSVYGVGPDCAATLLSATGDNPHRLRSDAAFAKLCGVSPIEASSGKVVRHRLNRGGNRDANRALHTILVVRMRRHQPTRDYIARRLADGKTRKEAMRCLKRYIAREVFHALQESSETAPPT

SEQ ID NO: 221043 - protein, 411 aa, unidentified
MSSINNEVVAGIDVHKAMLAVVVARPEQNETEYLSRKFGAGRWQLKELIDWLLELRVQRVAMESTAQYWKPIWYALEPYFHLILAQPRSTAAPRGRKMDFADARRIVRRLLADDLTISFVPEAEQRRWRLLTRARTTAMQQITRLRNQIEGLLEEGQIKISGLLSDLLGLSGWRMLQALSKGESDPEVLAKLAHEHVHASQQQLREALDGRMDNAHRLLLRQSLDLIDQLRKQTEELDQEIARLLEQEQDAIGRLCAVPGISLTAAFQVVAEIGPQARTFASPGKLASWAGLCPGREESAGVSVSNRCARGNRTLKRVLTQCAWAAVRNKKSQFSRLFQRWRSVIGARKAITAVAHRMLLVIWKLLHEGQVYTDPGCQLSPETIRRRMLKCVKGLEALGFCVVIRTANAPA

SEQ ID NO: 221044 - protein, 405 aa, unidentified
MSQEQRIVIGGVDTHKDVHVAAVIDDRGKILDTSSFKTTTAGYRQLLTWLRSYGDLQRVGVEGTGSYGAGLAHHLAAAGVEVVEVNRPNRQLRRRRGKSDPVDAEAAARAVLNGEATIVPKAGESLVESIRVLRVAFTSARNSRTRVALQIRDLIVTAPDQLRSVLGPLSTKERVARCARFRVCGDLADPTEANRRALRTLARRYLALSEEMDDLRLALDDLTARANPALRAMKGVGPDVAAILLVAAGDNPERLRNEASFAAMCGVSPIEASSGMTVRHRLNRSGNRQANHALWRITTNRLITDDETRAYATRRTSEGKSRREIIRCLKRYIAREVFRTLTRPEAIPCGVDLHDARITAGFNLNQVAAVLRVDPTRVSRLERALDFDRDLADRYAAWLTAQNAA

SEQ ID NO: 221045 - protein, 454 aa, unidentified
MRKPQVIPDEDHEVVYERVAAVDVAKASGVVCVRTPDPARPGRYVNQIWDNVPATRARITELGQELLRHQVQMVTLESTSDYWRIWYYVLESTGLAVQLVSASQAKNLKGRPKTDKLDAMWLARLTQRGMLRPSFVPPAAIRAVRDFTRARTDLVRERTRCLQRLEKLLEDAMVKITSVAKEGMKAKSAVAMVAALIAGERDPRKLADLARGRLRAKRDALAEALDGMFDSHHGVIAQALLDQVAFLDQRIAQMEAGAIEALAQVEESWGVDATGETGPGCGTGPDSLVLAAAYRLAEIPGISVWLAIVIIAEIGLNMAAFPTPAHLVSWTGLCRSAAQSGTRHGKGKQKKGNSYARAAAGQAAIGAFGTATFLGERYRRIARRRGGAIAQVAVARSIMIIVWHLLSDPAARYRDLGPDWHDTHVNRDKKIRNHIRGLQALGLTIAITADEQAA

SEQ ID NO: 221046 - protein, 366 aa, unidentified
MKELTSNSESQSEKALAKIILLGLDVHADSITVVRQIDGGMPQPAQKFSAAGLLEWVRRQREQAEVVWSCYEAGPFGYGLHRQLEALGVYNLVVCPQSWDELSTGVKTDKGDARALCVRLALYAAGNRRIFTVVRVPTPEQERARAETRLRDQLRRTRQRIEAQGRSLLLAQGHHVSGRWWQSAAWLQLQRTLPGWLVELLEPLRECIVKAHQKTERLTQTVEEAAKGSQPVGLGALSSEVIDREIGEWSRFSNRRQIASYTGLCPGEHSSGGSRRRGSVTKHGNPRLRHTLIETAWRLIYYQPHYRAVQRWIAVLSAPARNAAARKKAIVAIARQLAVDLWRIRTGRVAAEALGLHLNATQEVLN

SEQ ID NO: 221047 - protein, 318 aa, unidentified
MTSPAPALYVGIDVSKDALDVHVRPTGLAFRVANDEEGIADLLGRLQDLRPAALVLEATGGYEVPVVAALAAAGLTPAVVNPRQARRFAEGVGRLAKTDPLDAAVLAHFAEAVRPEPRPVPDAEARALGDLLARRRQLVQMRVSEQHRLPTAAGAIRKNIRRHIDYLDRQIQGIETDLTAAVQASPAWRARDELLQSVPGVGPQVSRTLLAELPELGSASGRQVAALCGLAPFNRDSGRRQGPRSIYGGRSHARAALYQAALVAMRWNVPLKGVYEGLLARGKAKKVALIAVARRLLVILNALVRTGSPWQEKLAVGT

SEQ ID NO: 221048 - protein, 339 aa, unidentified
MELYAGIDLHARNSYFAVVDAAGARVLLKRVANDSESVFSVLEPYREQLRGVVVESTFNWYWLVDGLRDGGFTVHLANPSRMQKYSGLKHADDKSDAVWLADMLRLGILPEGYIYPHQDRPVRDLLRKRMHLVRLRTSLINSLQNILARNGPARLGASKIKQVTQDHISPLLEGDDDLAMSGRVSKQIIDYFTAQIGTIEKFVEARVEVKQEYDLLRTIPGVGMILSLTIMLETGPIGRFAKVGNYASYCRKVPVCWTSDGKKKGDPNKRNGNKYLAWAFSEAAELARRFDATVKAYYNRKACKTNFMVAHSALAHKLARAAYYIMRDQVPFDKERLFA

SEQ ID NO: 221049 - protein, 410 aa, unidentified
MEVLYQRCCGLDVHKETVVACLRVVSGGEVVREVRTFETTTASLMALSEWLAENGCTHVAMEATGVYWKPVWHILDDGDFQLILANAAHVKNVPGRKTDVNDATWLADLLAHGLIRASFVPDTQTQELRTLLRTRKQLVREKSSHILRVQKTLEDANIKLDSVITDIIGMSGRAMIEALIAGESNPAKLARLANYRLRASQEKLREALRGRVTKHHRFLLRLHLNQIDALDASIATIDQQVEAGIAPFRIAVELVTSIPGVSDLGAQVIVSEIGTDMSRFPSEGQLISWAGMCPRNDESAGKRRSNRMRKGAPWLKTTLVQCAWAAVRKKDSYLKAQFLRIKARRGPKKAIMAVAASILTAIYHMLKDGTLYQDLGSNHFQSRSKGQQTKRLVKRLADLGYDVALTPLAS

SEQ ID NO: 221050 - protein, 415 aa, unidentified
MQEEAYAIYVGVDWASEAHQVAIVDAACDLRIQERVPHTGAALTQLAEELGHRAGGEPGRVAVAIEVPRGPVVETLLERGLHVYALNPKPLDRFRDRYSMAGAKDDRRDARVLAEALRTDRPAFRRLQIDEPAVIRLRELARLDAELQQERTRLANRLREQLQRFYPQLLAFCPAADEPWLWTLLDLAPTPAAGRRVSPAQLGRVLRTHRIRRLTADALHAQLQTPALRVAPGTAEAASEYLALLLPRLRLVHAQHRACEQRLDRVLAELAEPAPGQPTEHRDVTILRSLPGVGRGVAATMLAEATPLLATRDSHGLRTQMGLAPVTRQSGKHVEVSMRYACNQRLRYAAYHWGRTSVQCDPHSRAHYAQLRQRGHAHARALRGVVDRLLRVLVVMLETRTPYDPARRRPLEQTA

SEQ ID NO: 221051 - protein, 343 aa, unidentified
MRKQLYAGIDLHSNNLVVATVDQSGKRLGHRRLPCSLDEVLGYLAQDIPGKIKEIAVESTYNWYWLVDGLQDSGYQVKLANPAGMVQYNGLKAANDKTDAYFIAELLRLGILPCGTILEPSARAVRDLLRRRQLLVSKRTSLILALKNQYIRTHGQNLPLARVKSSSPEEMAVLFENCHERLAAEITKAEIDHLDESIKRIEKACWQQAQKVQGYQSLNTLPGIGRVLSGVISLETADISRFASPENYASYCRTVAAKKESNGKSKGENNAKCGNKYLAWAFIEAANLARRYDENARRWFDRKAARTSKIVATKALACKLSKASWHLMRHGGSYDPARLFGAT

SEQ ID NO: 221052 - protein, 363 aa, unidentified
MEVAKEGRYVGIDMGKTGYVLRMIDGKGRITGWEGKTTREGRRELYRRLRPEDRVAIEACNLAFIMNTEFRELTGTEFYILNPGKLYQIYMTDKKTDKEDALKLAKEIRDKPEADLPRVFAPTEEMKEMRKVVSEYREIVRLHTQRVNRLHTVYEHCGITDMKRSDLKTRTNREKNLGLLCGYEREEAERLMQVIDLLEAQKNELEKKIREAENTNEKVQAVEQVPGVGKITAYAFVASVGSADRFSSVAQVSSFLGFVPKIDCSSQTSHYGHITKKGNPYLRGLLVQAAWVLVRSKSGGALKEKYHDLVLHGLSRKKAIVAVARKMAELMYTLLKNNSRYEPRKFVAPLSRTERLAKLAVAG

SEQ ID NO: 221053 - protein, 350 aa, unidentified
MMPDSNRSVVCGVDTHKDQHVAVVLDATGQLLGQRSFATNSSGYSSLLDWCMTFGSIAAIGIEGSGSYGAGLNRHLTARRVVVHEVMSPKRQTRRRHGKSDSIDAEAAARTVLAGHDLITPKSADGHVETMRALRLTRHSAIKSRDSATNQLHALIVTADDDLRQRFASLPIAKIVALILDDGRFVDPADGYLRAMSSLAGRWRQLDNEAKELARALTELVAQSAPAGLLDEQGVGSDVAAALMIAAGDNPHRLRSEASFAALCGVSPLDASSGKQQRHRLNRGGNRDANMALWRIVLVRLRWDPVTRCYLDRRIAEGKTKREAIRCLKRYIARDIYKILTGTRTPQLAT

SEQ ID NO: 221054 - protein, 493 aa, unidentified
MLSVLPVMFFAVLQEGRWPPGPAWLLPPVEVDDLGGGVHRAREVLSETLIRGPTTAWPWRNARQFDGRQVCITWMREYDTDAQASRTEGVESTMFDTSDVDVFFALDVGKTAHHGHGLTPAGKKVFDKPLPNSEPKLRAVFDKLTAKFGTVLLIVDQPASIGALPLTVARDAGCKVAYLPGLAMRRIADLYPGEAKTDAKDAAVIADAARTMPHTLRSLALADEITAELTVLVGFDQDLAAEATRTSNRIRGLLTQFHPSLERVLGPRLDHPAVTWLLERYGSPAALRKAGHRRLVEAIRPKAPRMANRLIDEVFEALDEQTVVVPGTGTLDIVVPSLARSLGAVHDQRRALEAQINELLEEHPLSPVLTSIPGVAVRTAAVLLVTVGDGTSFPSAGHLASYAGLAPTTKSSGTSIHGEHAPRGGNRQLKRAMFLSAFAALHDPASRTYYDKCRARGKTHTQALLRLARHRISVLFAMLRDGTFYEHRAPRLA

SEQ ID NO: 221055 - protein, 370 aa, unidentified
MKKKVLYVGLDVHKKTTDVAIAPGRSNGKVRSYGKIDSTVDALNKLIKKLEDGDKQLRFVYEAGPCGYQIYRHLDAKGIECSVVAPSLIPRRSGDRIKTDRRDAVNLARLFRAGELTSIYVPTVEDEAMRDLVRCRDDMKRFERKARQRLLSFLLRHGYQYSGKRNWTKGFYNWLATVKFTHSAQQVTLQEYIEAANECSERIKRITEQIQVHVEEWSRARFVKAYQALRGVSLIVSTTVAAEIGDMRRFPTPKQLMAYLGLIPSEHSSGKTVRRGPITKTGNSHVRRSLIEAAWTYKMQARVSTILLKRQQGLPKSVCDISWKAQTRLCARYRRLMARGKTKQTVITAIARELSAFIWAIDKEMQVAHE

SEQ ID NO: 221056 - protein, 361 aa, unidentified
MTGTVTWAGLDVHARSTHAAAINVMTGELVRARFGAGLEEPLAWLAGLPGPVKACYEAGPTGYGLYRAARAAGVEMIVIAPGKTPRGPSDRVKTDQKDAELLARLLLAGSLTAVKVPPPEFEAARDLMRAHDACRRDLMDARHRVSKLLLRYGRVYPEKTTWTVRHRSWLGRQQFDQAATELAYLDALACVDAISARKSALALRLSELALDERWWPTVARLRCFHGIDTLTAFALHLELGGDWQRFARAPQLAAWLGLTPTLSQSGESSRQGHITKTGSVLARRLLVEAAWHYAREPRQGVALTARQAGQGAHVLQISHRARQRLHRTHRKMRSRGKPGNVCVVAAARELSCFLWAAAVAD

SEQ ID NO: 221057 - protein, 366 aa, unidentified
MEKSSTAFVGMDVHKESVEIAIADAKEARHYGRVGGDAASVDRAVRRLRSVHRKPVFVYEAGPCGFWLYRRLRAQGLECMVVSPSMTPRNAADRVKTDRRDALKLARLARAGELEAIYVPDAKDEAMRDLVRAREDAVSMQRQARQRLQALLLRNEIRYVGRSSWTRAHRRWISGLKLPHPAQQIAFEEYVQACEECERRVERFEQAILGELQHWRWRQAVEQLQALRGVSSLHAVRIVAELGDFQRFETPRKLMGYLGMIPSEDSSGKRRRQGAITKAGNSSARRALVEAAQAYAHPARVSWVIARRQVNASKRACDIAWRAQLRLCARFGRLAARRLPRNKVVVAVARELAGFVWAIAREVKPL

SEQ ID NO: 221058 - protein, 430 aa, unidentified
MEEVDEQELHVERIAALDLGKAVLEACVRVPHDSRPGRRMQEVRTYPTTTAALLEMADWFRCWGVTRVVMESTGDYWKGAYYLLEAEGFECWLVNARDVKNVPGRAKTDKLDVVWQAKVAERGMCRPSLVQPKPIRELRNLTRYRRSLTRDRTREMQRVEKLLEDAQIKLSAVVSKLFGVTGRLILDALVAGQRDPRVLAQLAKGRLRSKTAQLREALRGFFTDHHGAILAMMLANIDRLSAQITTLDTMIEQAITPFIHQAQQLAQITGAGPIAAQELIAEVGVDMGRFPSAAHLVSWAKFCPSTHESAGKRKNKGRAKGNPWPAATLGNIAATVARTGEGFLGARHRRIARRRGPQKAIVATGNAILTIVYHLLSDPTAQFHDLGANYFTTRIDNNRRARSLAAALQAVTGQKITIRDGQAVIEAQAA

SEQ ID NO: 221059 - protein, 384 aa, unidentified
MQKPNDLNQSRIVLKQDSTLIAVIEMSLRSWLVAGIVPGVERQPLKKLAVDESALLKLLNRWREEAEKAGRRIERITVAFEAGRDGFWLARWLRARGIEAHVIHASSVAVSREHRRAKTDRLDTELLKRALLGWLRSERDHCKMVAIPTTKDEDAKRPSRERQSLVGEQTRIVNRMKAALIRLGIRGFNPKLKKAAGRLEDLRTPEGEPIPPNTLAELHRDMQRRRLVSDQIRQIEEARLERMEQAPGDRPHAMVRLIARVIGVGIETADMLVHEVLSRKLRDRRAVARYAGLTGAPDESGSKRREKGLAKAGNARVRGGMIQLAWRFLLFQKNSALAQWYRTRTEGGRNRKTIIVALARKLLIALWRLVTTGEVPAGVVLRAA

SEQ ID NO: 221060 - protein, 343 aa, unidentified
MVAQLLAIPAEGPVWDQAVMGWTPPRRRWCARVVAFLTTEQEASVSEASTIGLDLAKRVFQAHGADASGKVVFRKRLRREQVLAFFAGRAACVVAMEACSSAHYWAREIGELGHTVRLIPPAYVKPFVKRQKNDATDAEAICEAAQRPTMRFVSVKSEVAQANAVVFRTRDLLVRQRTQAINALRGHLGEHGVVVAKGPSHVAKLIAHLEDPATGLPEAARTVLRVLTASLQFLSERIDLLDREIARRAREDKEVRRLTTIPGVGPVIATALAALAPPADAFRRGRDFAAWVGLTPSQHSSGGKQKLGATSKMGERTLRRLLIIGASSVVQKAIKHGTPSGPG

SEQ ID NO: 221061 - protein, 332 aa, unidentified
MKKLLLHFIGVDVSKLTIDVAIIKNNDNTRIYALKLANDASGFKELKKWMAANQVTFLETVFCIEHTGYYSKPLAKFVIAESGNLWMEMSLKIIRSLGVQRGKNDKLDAKRIALFAQRNIEDFVPYQPPRPVIENIKTLLMLRDKLIESKNALLVPVNELASIDKASGKIALKTIRPAMDAIEKNITEIDTQIDGIIAADDGLGQLFKLVTSVPGVGRITFFYLLYFTNEFKNYSEAKQLACYCGVVPFEHTSGSSVKGKPKVHNMANKQLKKLLHMCALCAVTYYPEFKMYYERKVAEGKNKMLVLNNVKNKIVLRIAAVIKNNTEYKIAA

SEQ ID NO: 221062 - protein, 343 aa, unidentified
MNVTTVGIDLAKNVFSVHGVDAHGKVVLKKTVSRGKLLECFANLPPAIIGMEACSGAHHWARALRSIGHDARIIAPRFVIPYRKSGKNDGNDAEAICEAVGRPAMRFVPVKSVEQQAVLCLHRIRSAVVAERTAQINQLRGLLSEFGLVMPRGRYPAQHHIPDILEDAENGLPGLVRRLLHDIYQRIQALNQQILAYDREIENLARHSESARRLMSLPGVGAVTATALVASIADPKQSDNGRQLAAWLGLVPRQYSTGGRTRLGRITKQGDKYLRTLLIHGTRAVLAALRDKQDRTSCWLRELIVRRGYKRAAVALAAKNARIIWAMLVRGEAYRITPAGQTA

SEQ ID NO: 221063 - protein, 349 aa, unidentified
MNYYKANHAYYCGVDLHARTMYLCIVDGDGKNVLHKNIKTKPELFLAELAPYRESLVVGVECMFCWYWLADLCEEEGISFVLGHALYMKAISGAKSKHDKRAAERIAMLLRSGMFPQAYVYPKSYRATRDLLRRSMHLMQKRSELLSPIKNTKHQYNLPDFEKRISYKRNRLALDTYFADLDPSMQLSMQMNVRLIDTYDDLLRETELHLTHHAKACEPQAYYLLRSIPGVGEILALVMLYEIESIERFAKVGNFLSYSRLVRAQKESAGKRTGYAGSKIGNRYLKWAFSEASVLFLNQSSEALTYKQSLEQKYGKPRALSMIAQRLGRTVYGMLKHNHAFDLNRFLPA

SEQ ID NO: 221064 - protein, 424 aa, unidentified
MKVTYQTCCGVDVHKSFLVATIVKTTGGIEPSYQKKRFSTFNNSILEFKQWLLDNHCHDVCMESTGKYWVPVFNLLEDKINVVIANPKWVKAVKGNKDDTKDSKWIGDLFRLGLVKGSYIPCKKVRILREYTRYRYKLVSCRSSEKNRYQNALTVCNVALDSIVSDIFGKSSTSIIDYLLEQSGTSINHEEIASKLLRSLKSKEDAVIESVEGYQMTDAQKYRMRLVRAHMDYITAEINDVDKMIENMISSNPDFENAVQFLCTIPGVKRDSAITIISETGTDMSQFSSSKRLCCWAGLTPGSNESAGKKKSVRITRAGVYLKPALVQCAHAAVKSDKSPYYKKKYESLVKRRGKKRAIIAIARMILTAIYQMLSTGEQWNPSDLYKIDMPEALVEKQKAKAIKQAKKLLQREGLLPPDEPLAS

SEQ ID NO: 221065 - protein, 441 aa, unidentified
MLKEINIHAGAVDVGSETFHAAVYDGPMKVWGTFTRDLQAVLKFFQENGVRTVAMEATGVYWMPLYEALVQGGLQVCMVNGAHVKNVPGRKTDVADCQWLAQLHAHGLLEAGFVPAAPILRLRDYQRLRQDHIEMGSQHILHMQKALERMNVKVHDVLSQWTGWSGLQIIQAILQGERDPAKLADLCDSQVLIKKRDPLIESLRGDWKEEHLFALRQGHEGWQFYQGQMAACDQQMGVLLEQMAAALPEVPEDKLLPLRERKRVHHNPPQITRLYETLVRLCGGNDPTRLPTVTEYMVLQLVSETGLDMTRWPTCKHFTSWLGLAPGSRQSGKNRGRHKRFRGRAGRIFCVAARSLARSQHLALGGFYRRLRATCGGQVANLASARKIAELYYNTLRHGSAYVEQGLKAYEEKYRRDSIRRLQAAARKFGLEISESAPASA

SEQ ID NO: 221066 - protein, 335 aa, unidentified
MQVVYERCCGLDVHKETVVACVITPRGKEIQTFSTMTNNLLELADWLSELEVTHVAMESTGVFWKPIYNLLESDFEAMVVNAQHIKAVPGRKTDVKDAEWIAELLQHGLIRASFIPDRPQRELRGLVRYRRSLIHQRGQVVNRIQKVLEGANIKLSSVATDVVGASGRAMLQAMVNGTEDPKALAEMAKGRLKNKRPELEEALKGLVNDHQRMMLDSLLRHLTFLDEEIERLDAEVARRMLPFEETIQHVMEMPGMGRRNAEEVLAEIGTDMSRFPSANHLASWAKMCPAITKARENVKAEAPGMLIPGFAPLLSKPPGLQAAPKRRIFQPNIVA

SEQ ID NO: 221067 - protein, 394 aa, unidentified
MYIIGIDIGKNHHEASIVSPEGKQIGHSLRFATTHKGADSLMSFIFNNIGNSSCIFGMEATGHYWYPIYSFLKARGYTIYVINPIQSDSLRKMYIRQTKNDSIDSFLIAEVIRFGQFTTTSMADENILAMRQLCRYRDSVISSRTEIKLRISTIMEQIFPEYEKQFSSLWLSTSMGILEKYLTPENIENAPIDELFEIIKDKNKSHNKLTMKKAISIREAAADTFGIKIAQDAFSFQLKQLIDRMNFLDKQIEALDCQILEYYEKFDCYLHTIPGIGMIAAATILAEIGDINRFKSSSALVAFAGIDPTVRQSGEFSSTHNHMSKRGSPYLRHAIFLVATTCSFHNSPLNAYYKKKRDQGKHHLTATGAVARKLTTVIYAVLRDSKPYEPKSFC

SEQ ID NO: 221068 - protein, 342 aa, unidentified
MKMTTVGIDLAKTVFQIHGEDDHGKPVLRKKLDRSKMLEFFIQLPPCLIGMEACGSAHYWARKLTAMGHTVKLMAPQFVKPYVKTNKNDVADAEAICEAVSRPNMRFVPIKTDEQQAVLALHRVRQSFLKVRTAQANQIRGLLSEFGVIIPQGIAHIARRLPEIMEKSDLPGSFRELLQRLYDHLKALDKQVDEMDAKIQQWHRESERSRKLAEIPGIGPITATALVASIGDARSFRNGRQLAAWLGLVPRQHSSGGKSVLLGISKRGDTYLRTLLIHGARAVIRFAENKPATCWLNKLINRRHKNIAAVALANKNARIVWALLTRDEQRFRADYAPAAPGL

SEQ ID NO: 221069 - protein, 410 aa, unidentified
MLFIGDDWAEAHHDVELVDQTGRVLVRRRLLEGVEGISALHALVADHLGDDDEPEDVVVGIETDRGPWVQALLAAGYTVYAINPLQAARYRERHSTSGAKSDPGDAHVLAELVRNDRAHHRPIAGDSEQAGHLKVLARSHQNLIWSRQRQANLLRSTLREFYPAALQAFSTDLVGRDALAVLAIATTPSVGKALSEQQVERALRAAGRQRNLTSTAKKICAALRTEQLTAQPLVTLAYGATVSAAVAVLTELTRQVELLGKQVEVSFGQHPDAKIYQSQPGLGPILGARVLAEFGDDPERYADAKARKNYSGMSPITRASGTRKIVLARYARNQRLSDALYLQAFSALSTSPGARNYYDAQRARGATHHQALRALGNRLVGILHGCLRHKTTYNEDTAWPTTTQQESAAA

SEQ ID NO: 221070 - protein, 400 aa, unidentified
MDPVIGLDIAKGESQVQAFLQRKETFKQSFKFTHDLPGLQTFYSFYQELEEASGQPPAVIFESTGHYHEPVLQFLENQDIAYYLINPVVSFEARKMSLRQVKTDKADAYHLGELYYKEDLEIYQRKTEKALNLRLLTRQHSALTDSYVQIKLQFQVALDQVFPEYHSVFSDLYGKLSLKTLLSYPTALDVHRVSEESLAEEMGQFGARRSYDWFLNKAQQLKEAARRNPYQAQISHGQLVSLNMYIHMLFQYQTHLAELLKEINALSKSFEEYRLIQSVPGIGDKIAATILSEVGDINQFEHPKKLVAYAGLDPSVFESGKFKASINRITKRGSSRLRQTLYTAVQCGLAKQRNKKLTAFYHRKRNEGKPHKVAIIACANKLVHWIHAMLKRQEVFVDQV

SEQ ID NO: 221071 - protein, 351 aa, unidentified
MPRTTTLHAVTAIGIDMGKNTLHLIGLDARGAIVLREKVARGRIALRLANLPPCLIGIEAGMATHYVARELAALGHDVKQVPATYAKPFRQGHKNDFRDAHAVAEAVQRPTTRFVPAKTNEQLDLQALHRVRSRLVSERTAVINQIRGFLLERGIVVRQGLRFLRQQLPDILAKRADVLSPRMVRIVADLANDWRRLDERIETVTDEIEALAKSDDSCRRVMTVPGIGPIISSAMVAAIGNGVAFARGRDFSAWLGLVPKQMSTGDRTILGRISKRGNGYLRMLFMQAARVILLRPANWPKHGFGAWLARATQRLHPNVLAAALANKLARIAWTVLAQERTYESRVTKAAA

SEQ ID NO: 221072 - protein, 410 aa, unidentified
MEAIIERVAGVDVGQATVVATVLVGAAHERARKETRTFRTVTRELLEMREWCLAKGVTHVAMEGTGVYWRPVYELLEDAFEMILGNAQHIKNVPGRKTDVKDSEWLADLARHGLIAKSFVPPKPLRQLRELLRYRRKLMESRTAERNRLLKLLETANIKLASVVTDVFGVSGRLMLDALIEGTATPATMAALAKGVLRKKTRDLEHALEGRVEAHHRFLLGLQLRRLDQADADLAVLDARIDEALTPYQPQCQLLQQIPGVNRVVAAVVVAELGTDMGVFRSAQHAAAWAGVCPGNNESAGKHKGAGARKGNVHLRTALVEAAVAAAHKKGSYLRDKFYRLRARRGTKRAAMAIGHKILIAAYHMLATGLPYRDLGATYLDGVEKRRTTRNLVRRLERLGYEVTLGTKAA

SEQ ID NO: 221073 - protein, 347 aa, unidentified
MTYFAGLDVSLEETAICVVDETGRIIKELRAASEPPALIAALTGLGLPLERIGLEACSLTAWLHDELRTAGLPAVCIETRLANAAMKTMPNKTDRNDARTLAQIMRTGWYRQVHVKSRQSRLWRSLLVARRTVLNEMRAIENVVRAILREGGIKLGTPARAAFAGRVREMAGDDPLILPLVTPLLAILATMLEQLNRLTRQVLVIVRGEAACRRLMSVPGVGPITALAFRATIDQPERFRHSRNVGAHLGLTPSRYQSGETDIQGKVSRCGDELARTALYEAAHSLLTRSRKWSSLRAWGMQVAKHRGMARARVAVARKLAVILHRMWSDGIEFRFGKEPTAAVAAA

SEQ ID NO: 221074 - protein, 341 aa, unidentified
MDKELYIGVDVSKKTLDLAYYDGETIDWKNAHIKVSNDDAGFKKIGSWIAKVGKNFDTFLFCMEYTGLYNQNFRLWLESKEYIYGMVEPRKMHHFEPDLDDDQRSLDRIKTDELDAFRIAIYCEQNHKKILRNPSKLPSPVYFKLKRLLAERKQNTKQSTLYKQQLHDICAYDTDLSVERKKLLLKNMNENQKAIDREIDSYMDEDASISKNYDLLTSIPGIGRIIALETIVLTENFTAISNPRKYACYIGIAPFKKESGTSVRKRTTVSKKGFSEAKADLSIAVLSAIRNNPSIRDYWIRKRKEKCGGIVLNAIKFKLVLRMFAVIKRGTPYVETDAYKN

SEQ ID NO: 221075 - protein, 458 aa, unidentified
MGRNKSRNKDRGTISVVHPNAAAIDVGATMHTAAVNADRAPEPVRSFGTFTTDLHRLIDWFAECGVDTVVMESTSVYWIPIFELLDARGFAVFLVNARDAKHVPGRKTDVSDAQWLQRLHSFGLLRASFRPKGQIAELRAYLRQRERLLEYGASHIQHMQKALTEMNVQLHHVVTDITGVTGLRIIRAILAGERDPAVLAGMRDRRCHATVETIEKALAGNYRVEHLFALEQALALYDTYQQKAFACDARIEAVLKELSVHRGRKEGQLPAARQNRSSQQNSLLFDVRAALFALLGKDLTQINGLGPYLALKLIAECGDDLSAWPSAKHFTSWLCLAPSNKISGGKVLSARTRRSGSRAAALLRLAARTVGRTDTALGAFYRRLAARIGKAKAVTATARKIAVLFYNAVQHGMNYVDPGASSYETRYRARVIANLHRRAKAFGFVLQPVDPLPGVAVS

SEQ ID NO: 221076 - protein, 348 aa, unidentified
MKNKSFVGIDISKNVIDVSIFREDTNIKMFPHEVFNNTRKGFGDMCSWLKKSRVVLSQALFGMEFTGCYSLDLEKFLTSKNYSFCMLSTRIVKHHPMGTIDKRDKNDSAKIADFLYRYDGTECAKPYKLPSKAMQQLKQLVNERKFLVEQRTNFMNRMQMFETKEDSAMYESYIKKLNHDIEKIDQEECELMSKEEDVFDTFQNLLTIPGIGFVNATNIIAITRNFTAFDTARQYARYVGVAPCSHTSGTSVKWRARPSAHCNGQVKADLSMAALRAVEYDVEMQMFYNRKLGGRKNSDTKRKALNAVKFKLIRRMFAIGKQKRKWEVLNTSDDRKNLHIEKSKASEL

SEQ ID NO: 221077 - protein, 425 aa, unidentified
MNYKQNEKINQVKESTLVVGIDIGRTTQHARAFDWRGIELGKVFPFSNSREGFESFKAWMQHLQDKYKKLDAIVGIEPTGHYWFDLGAYLEDEGILLVMVNPYAVKQTKELDDNSQSKNDRKDPKVIAKLVTEGRYSAPYTPDGVYADLRIMVANRKRLIREMTQIKNRFARWFAIYFPEYTDVFGDYEAQSSMLLLKKVCTPEAIVELGAEKINQIWRDAKLRAVGMKRATTLCETAKRSIGLKKGSSAARYEMKLLLEDYEYKKAQLDAVMEEIEKLCRKIPESEQMLAIKGIGVITVAGFLAEVGDVRRFESPRQIQKLAGLSLRENSSGKHKGQTTISKRGRSKLRAVLFNAAIPLIAKNPEFKSLHEYYTTRANNPLKKKQSVIAISCKLIRVFYAILAKGVTYDAQKLISDIHRQPQAA

SEQ ID NO: 221078 - protein, 429 aa, unidentified
MKIIYPRVCGIDVHKKFIVAVICISESVEPVYLKKRFSTFHNDLIRFRNWLIQNDCQNVCMESTGKYYIPVYNVLESHISNIVVANPKWVCAVKGEKDDDKDAKWIADLFKFGIVRSSFIPQKDFRILRELTRYKYKLVNMRSSEKNRYQNALTSGNCKLDMVFADVFGKSASNIIDLILSDNPYTDEDILSKVHKNCKASPDMILNSINGTDLTPVQKSRIELVNDHIKQLSSNIQRLDKLIDLMIEPYEDYISFLCQIPGVSRNSAIIILSEIGVDMNQFTSTRRLTSWAGLTPSSNQSAGKKKSVRISRAGVYLKPCLVEVAHAAVKDKNHPYYANKFNKISKRRGKKRAYIAIARKILVAAYHMLLTGEIWNPADLSEVETPVEQRIKYVKNNLKSDIKQLLDIGLTVEELTLMIQQNANIIATQ

SEQ ID NO: 221079 - protein, 350 aa, unidentified
MSKQSDWLTLKLSTLMDIRHCIGIDVSKNTLDWAVYTNKGIIWQTQSENSPTAIRAMIKQLQALPDFDRSNCVVCMEHTGLYNAHALEVFFQAQLPIWLEASLHIKQAGGLQRGKSDSTDAQRIAEYAYRFQDRTRLWKPARPVMKKLAEFTRLRQRLQLMVSQLKVPLNEQKRFGDKALTTQLGQHCRNSLKALRSDLKGVEKAIKQLITDDPTLKALFELVTSIPGIGQVVATELILASDEFKAIDDPKKLACHAGVAPFEHSSGSSVRGKTRVNHHARKSLKTLLHMAAMSALQVPGELQEYYQRKVTQGKNKMLVINALRNKLIHRVYAVVKRGKKYDKTHALALA

SEQ ID NO: 221080 - protein, 385 aa, unidentified
MQRNDLSQSLTAFDQNSTIVAVVELSLESWLMSGLVPGVKRQPLKKQPADPERLLALLERWRQEAIKAGHAVKRIVVAFEAGRDGFWLARWLRSHDIEAYVIHASSIAMPREHRRAKTDRLDTEVLMRAFLGWLRGEARHCRMAAIPTLAQEDAKRPSREHQSLVTERTRLVNRMKATLVWLGLPRVNIKLRKAAEHLAALRTPEGEPLPPNTLAELHRDLERFAMIRAQIKAIEQARLQRLKAAPAQGTHPMILMLAKILGVGIETADMLVHEVLARRLRDHRAVARYAGLTGAPDESGSKRREQGLAKAGNGRVRRGMLQLAWRWLMHQKDSALTQWYRSRTADGRKDTRKTMIVALARKLLIALWRYVTAGEVPRGVVLKAA

SEQ ID NO: 221081 - protein, 461 aa, unidentified
MTLNDDVLIAVDPHKASNTAAVLDPVTKTVIEAARFANTADGYAQLTAFTSRWGQRRWAVEGCFGAGRSLAQRLVADGELVLDVPAKLAARVRVYSRGHGRKTDKDDAVSVGLAALDGTGVTLVACDDATVSLRLLCDRREELTAQRTQAACRLHRLLAELTPGGMRRELSANKAQALLARIRPAGDVATVRVHIARDHLADIRALDARIKYLGGQIAALVTASGTGLTGLFGIGPVIAGRLLAEVGDVARFATKDTFASYNGTAPIDASSGEQVRHRLSRAGNRRINHALHMMAVTQIRYPATPGRLYYERKRREGKTPKEALRCLSGGCLTRSTISSSPTGGAQSERADHLRPRRRRGLHPPHQRPAHTRPHHPPGPYTARHHRVHRAGLERRPPRRHRDPRRQHPPPPRPPRPGRNRQLKRQPLDREEPIWSVFGIGGTRSAGVTRCRCGAIQPVQHA

SEQ ID NO: 221082 - protein, 340 aa, unidentified
MEKSEQTQPYLWILGIDVSKESIDACLVRQSDGQLFEQKFHNNLSGFRHLKAWCKQLQCECDNHTLCCMEHTGLYTRLLVHYLISRDVGVWLESSLQIKRSQGLVRGKSDKIDAQRIARYAHVYQNKAQVMQISVLTLEKLKDIQANRRRLMNALQSLRTSLEELKQFDAGTAKVMEKVNREAIRGLEKSLDKVDEAILTSISEDQELKQKYDLMLTVKGVGKVLAAMLLVYTHGFNRLTDSRKLACYSGVAPFVYESGTSIRGKTGVSKFANHELKRVLHMAAISSVQHNPDLHEYYQRKVQEGKNKMSVINAVRNKLLHRIVAVINRGTPYELHLKNN

SEQ ID NO: 221083 - protein, 338 aa, unidentified
MKPVARIGLDIAKNTFQVHGVNAHGAVVMRKQLSRGEVLRFFANVPACVVGIEACAGSHYWARELKGLGHDARLMAGQFVAPYRKSGKNDANDAEAICEAVGRPNMRFVPIKNEEAQAVLTVHRARQLLVSERTALANQIRGLLGEFGIVMAAGLAPLRRRLAQIGAGQQTLPVLARETVGELHDRLRLFDACISQYDKKIEVIARGSEPARRLMRVEGVGPVTSTALVASIGDARAFTNGRQFAAWLGLTPSQHSSGGKSRLGHISKRGNVDLRTLLIHGARSVLQFTSKKVDRKSVWVEALKARSGTNVAAVALAAKQARIIWALLARGTEYQPAT

SEQ ID NO: 221084 - protein, 482 aa, unidentified
MKKRNIFQNRSQQLLALFEKAGNRLKMMCVPIDYAKKDHMVMFCNGYGDIVRKPFSVKNTLEGVKYLIDQVMRSCRQRRIKKEYVFFGGEDVNSYAENFANALRGKGFLVANVNAHDAKKQRETLQASTDRIDLMGIATMLLNLRAKCNPAQDGIYRNLRTLVRHRKKLVVMKTEVKNRVHTLVDRLFPGFLNEKNTGINPFSKSSLVLMQDRFSAQQIRRRKQATLIKILKRCATPDAESIAAKLHSYAAQVITTPDQYAATLQLSLQHHIKHYRCLQENIDQLLSEIALLLAQTQGAFLTSIKGVGIVLAAGVVSEIGNPFEQKPLNNLTSYSGIIPRVKQSGGIEGHTHTGRVSKRSNHLLKDYVVQSAFQMGRRGPESLFQDYKRREAAGQHADFGIGRRFLRMAMCLMRSSQVYLPPKLRTPEAQMHERAGYYLTMWPLLRDKWKKAHADQVAFTKDQPLGQWRQMIQELYEIKLKL

SEQ ID NO: 221085 - protein, 344 aa, unidentified
MNNYNVSSVITVLGIDLAKQSFQLHGTDKHGKVVLKKKLSRNKLSAFIANLPPCLIGLEACGGAHYWVRTFKAQGHKVRMIAPQFVKPYVKSNKNDAVDAEAICEAVQRPSMRFVPDKSIAQQDIQSLHRVRSQLVARRTAQANQIRGLLQEYGLIIPKGISHVRKAIPLILEDADNTLTCLFRELLNELYDELVHLDDRVNTLEKKLEIISRESDDCQRLLTIPGIGLLTATALIAAIGNISAFNSGRELAAWLGLVPKQHSTGGIPTLLGISKRGNSYLRSLLIHGGRAVVRVAPLYSDKRNTWVNTLSERRGKNISAVAVANKNARIVWALLSNKENYKAA

SEQ ID NO: 221086 - protein, 344 aa, unidentified
MNLRKVLSSEDKGKGIGIEEFEHFVSVDWSQHTMAVAHMTRQSKKPVVFERQAALIDLKKYFGSLRGRTVVTVEETTTAQWLYLELRDVVDRIIICDPLHNRWLCHGPKTDRIDADKLCILLRSGLLKEVFHSADELYELRSLVSAYDDIVRNGVRALNQQSALERGHRDQGKNASFILEHLHKNIEIYHETKEHYESKFEHLARHNKLVKSLLGVSGIGTIGAVKIVATVIDAKRFATRGHFLSYCGLVKHEKLSGGRSYGRRKSRYSHTLKAVYKTAAMAALRGKNPIREYYDYLLGKGIAEHNARHAVARYIARITYGILKTGTRYDPYRWRKIVTKELVA

SEQ ID NO: 221087 - protein, 410 aa, unidentified
MDVFLERCAGLDVHQASVVCCVLIGAPGRKPQKLLRSFGTTTRDLKALQAWLAEHGVTHVGMESTGVYWKPVYAVLEGHVDLTVGNAHHIKNVPGRKTDVKDAEWIAQLVRHGLVAKSFVPPPAIRDLRELVRYRRTLIETRTAMRNRVLKLLEGANIKLSGVASDVFGVSGMAMLEALASGTNNATEMAGLARGRMRRKHAALEAALEGRMREHQCFLLGMQLRTLDTIDQDLEALDARIEAQLEPYQAQHRLLMQIPGVDWVTAASIIAEIGTDMDVFATARRLAAWAGVAPGNYESAGKQKGAGTRRGNVFLKSTLFAAASAAVRTKGSYYRDKYNRLRARRGPVRAIMAIAHKLLIAAFHMLSTGEVFRDLGESYLDQVARKRSTTKLVQRLSNLGYDVMLVPKAA

SEQ ID NO: 221088 - protein, 343 aa, unidentified
MEKITTIGVDLAKSVFQVHAVDASGRVVVARALRRRDMQSFFGRLPPCLIGLEACSSSHHWGRVLSQLGHDVRLIPPAYVKSYVRRQKNDAADAAAICEAVTRPSMRFVPIKSEEQQAALMLHRVRSLLSSQRTALICALRGHMAELGLVAPRAVRNLQPLLDVLADDEDDSLPALARSALSPLADQLASLERQIADLDRQLLEWHRTHEVSQRLAGIPGIGPVTATALAASVTDPSMFASGREFAAFLGLVPRQHSSGGKVRLGRTSKMGDRYLRTLLVTGATALLSHSRTRNGHLDQWARTLLEKGKPTKLVAIALANKMARIAWAIMRRGETFRTESVPA

SEQ ID NO: 221089 - protein, 348 aa, unidentified
MIVIGIDSHKRTHTAVAVDGTGRKLAEKTLAATSAGHLELVRWAGRFAERTWALEDCRHLSRRLSTDLLVAGEGVVRVPPKLMAGARRSSREPGKSDPIDALAVAPPALREDLPVATLDGPDREVRLLVDHREDLVAERTRAQNRLRWHLHELDPGHEPVARSLDRTVVLAALERDLAATPGTVGRIARELVVRIRDLTATINGLEREIERLVADLAPSLLALIGCGPLTAAKLVGETAGIGRFRSRAAFARHNGSAPLPVWSGNTERHRLSRTGNRQLNVALHRIAITQLQREGPGRAYVEHRRAMGNTKPEAIRALRRRVSDEVFRRMSHDEAARAASPSGVAAAA

SEQ ID NO: 221090 - protein, 353 aa, unidentified
MSQQNARVAVVGIDIGKNSFHIVGQDGRGEIVLRQKWSRSQVEARFANMSPCLIGMEACVGAHHLSRRLRALGHDARLMPAKYVRPYSKGQKNDFRDAEAIAEAVQRPTMKFVATKTADQLDLQALHRVRERLVSQRTGIINQIRAFLLERSIAVRQGIRFLRAELPRILAMPPDVLSPRMVRIVEDLACDWRRLDERVEGLSNEIETIARQDAGCERLMSVPGIGPIISSAMVAAIGAGDVFTKGRDFAAWLGLVPKQISTGDRTILGKVSRRGNRYLRVLFVQAAWVVLIKPKIWERHGLKPWLEAARKRLHHNVLAIALANKLARIAWSVLARGRAFEVRKINQAAPQPS

SEQ ID NO: 221091 - protein, 423 aa, unidentified
MEIMHERVAGLDVHKATIVACVRLGTGRKVTRECRTFDTTTDGLRALLAWLVECRCSHVAMEATGIYWMPVWKILGEGDFALIVANAAHIKNVPGRKTDLNDAMWIADLLACGLIKPSFVPEEDVQELRSLLRTRKQLGREQTRHVQRIQKTLAEANIKLDSVLSDIMGASGRRIIEAMIAGVRDPRRLAALANTRIKATPKQLYDALHGRLTDHHRFLLTLHLRQWDSLDATIREIDQEVEARIARMDKEVKAAEAPFRDLIGLLCTIPGVSTLSATTILSEIGRDMSRFPTAGHLVAWAGLCPGQNESAGKRKPARLRKGAPWLKTMLVQCAWAAKRKKDSYYKAQFFRLQSRRGPQKAICAVAASILTAIYHILKNGTEHHDLGADHFNRRSTEGQTKRLVAQLTRLGFEVQLQRTAEAA

SEQ ID NO: 221092 - protein, 351 aa, unidentified
MEDIKYAGIDLHQSTCTICVEDSRGKTLSEATVKTEAEGLRDFFRGIRGTVHVSFEVGTQSAWLYEVLKPIVTSVTVCDVRKQKRRGNKSDRIDARKLARWLRLGELRAVYQGDRNVRKLRDLAHGYLATVSDSIRVMNRIKALYRSWSIGCAGRDVYYKRNREEWLSKFPIPESGVRAKIYYAQLDLLKEQRKEIKKVFLKEARRYPVEKILRGIPGFGPVRSAFAIAVIGTPHRFRTERQLWSYSGLSVVIHSSADHSIISDQIVRKQHKHNTRGLTRDFNRILKMVFKGAATEAIRKDPMKTIYKTKVATGMRPEMAILSIARKLAAISLILWKRGEKFSVEKVIQFN

SEQ ID NO: 221093 - protein, 346 aa, unidentified
MIIVGCDYHPSWQQVAIFDSETGEIAQRKLVHGDGGAEQFYRGLPTPALIGIESCGNSQWFLELLERLGHQVWVGDAAEIRARYVRKQKTDKRDAAHILKLLMEGRFPRVWVPDGEVRDLRQLLIHRHRLVQIRTRVKNGLQHLAMNRGMRKKHGLWTEAGQREFLAMPLSGWADYRRADLLKLLASLEEQIRPLDAAVEKAAWAHDQVRLLMTHPGVGEITALAYVLTIGEVSRFGRGKQVASYLGLIPSEHSSSGKQRLGAISKQGNSFLRMLLVEAAQTAVRLEEGMKKKYQHRCHNQPKAVAKVAAARKLAVRLYWMLRTNTAYPEIVHNESSSGCPMAGAS

SEQ ID NO: 221094 - protein, 350 aa, unidentified
MLIIGCDYHPGFQQIAYVNTDTGELSEARLGHREEAEQFYRDLRTCGLKVRVGMEASGHARWFERLLIELQMELWIGDAAEIRTKRVRKQKTDRQDAQLLLRLLLEDRFPKIWVPDAENRDLRQLLWHRHRLVQMRTRVMNQLHVVALNEGVRRKKALWRPAGRTELESIVLARWAGRRRQDLLDLLDQLTPKIQELTHALETEVEKRPVTRQLMTHPGVGPLTALAFELVIGTPERFHGGKQVASYVGLVPSEESSGDRRCLGHISKQGNALLRFLLVEAAGVTVRSQPQWRSQFFHLAMRRGRKIAKVAMARKLAVELYWMWRRGWDYDEMQQLGSHAGEPGNRHGVQ

SEQ ID NO: 221095 - protein, 360 aa, unidentified
MCRVGKPVISLLSFLTLPINIMVIQSNKAVQLLKSLCAGIDVGANELVLVIRKNGASFKPQMFTNTPADRKRLVKKLVGMPGIVVCLEATGIYHFDLSVALSDAGVALMVVNPKSSHNFAKALMKNSKTDTVDAETLAQYAERMDFVAWTRPADEQIALRSFARRIDALTREKAATKNQLHALSASHETPKAVLRDAKLSISQLEKRIARLSKEALVLIAKHAELERVYLLLTGVKGIADTSAIALMGELLLLPQGLTNREWVKFAGLDPRAHDSGKSVHKLARLSKAGNRHIRSALYMPAMSAKQHDPHVKAYFQHLLDNGKKPLQALCAVMRKLLHAIHGMLRDNTPFDNTRFYAITA

SEQ ID NO: 221096 - protein, 344 aa, unidentified
MEYYAGLDVSLEQTSVCMVDAQGQVLREVKVASEPEALIHFLECQDLEIARVGLEAGPLSQWLHAGLVTAGYEAVLLETRHVKAALSAMTVKTDRRDARGIAQLLRLGWYRPVHAKSASAQEVRSLLTARKLIQGKLLDIESGIRGVLRGFGLKVGPISRGRFEARILELVEGQAMLETVIGSMLAARATLQAEFARLHRTLLALVRNDPVCQQLMSVPGVGAVVAMTFRSGVDDPARFRRSRDVGPHFGLTPRKYQSGEIDVTGSISKVGDRMVRTALYEAASVMLTRSVRMSSLKSWAMGVARRRGAKKARVALARKLAVVLHRMWVDGTSFRWTSQTPAMA

SEQ ID NO: 221097 - protein, 318 aa, unidentified
MVEAPCYIGADIAKDTIEVAYANAMGASLRIENRRTAISAWLRGVPRGTHLALEATGPYHELLCTLAYRRGLVVYLLNPKRTRHYLQAMSPRAKTDRVDAPLIATFLANERPRLRPWAPLRPEERRAWALLRRRAKLVNARQRLEQSLAGLPSLRSTRAALLAELERALGVLDTQLARLLAQDPAHAHLLHDLQSIVGVGTLTSSALLLALKRGTFATSDAFIAFLGLDLRVRDSGNKRGRRRLTKHGEPELRRLLYTAAMAARRTQAWRPVFDHYLGRGFSSIQTLVIVARRIARVAWSLYKHGGSFNPQRLVQGLT

SEQ ID NO: 221098 - protein, 336 aa, unidentified
MSLYFAIDLHSNNNVVVIIDEEDNILFERKLINDLEIVLRVLKPYKKRLFGIAVESTFNWYWLVDGLADAGYCTHLVNTTKVKQYSGLKHTDDRYDAFWLAHLMRLGILPTGYIYPREQRAVRDLLRKRGQLVRHRTTHVLSIQNQYWRNTGIKLKGDYIKRSSDYIEEFGDKNINLALSSNYHIVKALQGQIKLIESQVKRQVKLHSEYELLLSVDGIGYVLALTIILETGDIDRFKKVGNYASYCRCVDSRRFSNAKYKGKGNEKNGNKYLAWAFIEAANFAKRYNEKARRFYQRKKVRTNNIVATKALAHKLARACYYVMRDQVAFDDNKLFE

SEQ ID NO: 221099 - protein, 350 aa, unidentified
MLIIGCDFHTRYQQIAMMDEATGELVERRLDHQRGEAHAFYRSLPKPVRVGIEATGTLHWFERLLAELGHELWIGDAAEIRARAVRQQKTDQRDAAHILNLLLTNRFPRIWVPSPAERDLRQLLWHRHKLVCMRTLVTNQLHALAMSQGLCRKKKLFTRKGRAELGSLVLGPWASRRREELARLLDQIEPSIVELDRAVLNEAKRREDAVRLMTHPGIGPVNALAFVLTIGPVTRFHRSKQVASYLGLNPSEHSSGGKQRLGAISKQGNTMVRWLLVEAAQIAVRMDPELRQDFWRLKSRRGNAVAKVAIARKLAVRLYWMLRSGADYARLVRMQGSPGATLVNASSPLG

SEQ ID NO: 221100 - protein, 354 aa, unidentified
MTASYDYHIGVDYHKSYSHLVVQDSSGKTLRSGRVKNDRQSLDSFLERYRENSHAVVEATRNWMVMYDWLDDICDDVVLAHPLKVKAIADAKIKTDKIDATVLAHLLRADLVPEAWAPSDKARALRVALRERMFYVRLRTMTKNRIVTVFDRYPEQTAQLKKLGDLFGKAGRIQLAQIELSAIDRVQIDRGLAFIGDIDGRIKQSETTIRALTKANANVKLLKTIPGIGEFFARLIEAEIDDISRFRNPKKLAAYAGLVPSTYSSGGKTFHGKIIKQGNKWLRWAFVEAVTPAVASDPELRAHYEHLKIRGTNKARVAIARKLLTIAFQILRDQRAYEPRGTPMESASTISRLS

SEQ ID NO: 221101 - protein, 414 aa, unidentified
MNAAGIDVSSRKSTIAVLRPFGEVVKVPFEVSHTAEGLASLARQLKAIDGETRVVMEHTGRYYESVANVLHESGLYVSAVNPLLIKEYGGNSLRKVKTDKADAMKIARYALDNWCDLRDYTPMDPVRYDLKTLNRQFQLASKQKTASSNNLIALLEQSFPGIRKCFEGPVRKDGTQKWVDFAHTFWHADCVRKLSLNAFAERYRKWCKRNRYQFSTEKTDEVYELAKSAVVLVSKTEVTKVLIKEAANQLTSISRSVETYRTEMNRLASQLPEYPVVMEMYGVGESFGPQLMAEIGDVRRFERKQSLVAFAGIDPMPNQSGEKNVRSNKSSKRGSPYLRKTLFNIMTVHLQRAPANEPVYQFLDTKRAGGKPYYVYMMAAANKFLRRYYAKVRDYLASLDSLPPVDMDSTGLNK

SEQ ID NO: 221102 - protein, 352 aa, unidentified
MTFVGCDFHTRQQHVAVLDTETGEVQACRLAHADQTVEHFYASLPRPVTVGIESTGYAQWFHALMQRQGHTLLVGDAARIRAMVVRKTKTDRRDAAHLLQLLSQDRFPAIWVPDPRVRDLRALVTHRMRLVRMRTMVKNGLHAIALNQRLAAGSALFTRRGRAQLQALTLPPHTTQRRDESLALLTWLDAHIDPLNAQITEAADADDQARRLMTHPGVGPLTALATVLVLGPVARFPTSKHVVSYIGLAPAVDASAEKYRLGHVTKQGNAVLRYVLGQAGQVASRADADLRRLYSAIMYRHGRAKAKVAVARKLLVRLYIMLRDQIDYDEFRARGRPRPCAQPSVAEVAVRT

SEQ ID NO: 221103 - protein, 408 aa, unidentified
MDLTPMHKRVIALDVHQAKITACAVVEHDDGRVEVTKRDFGAFKRDRRALAQWALEMAPEVVVMESTGVYWKSPFAALEAVGLIAWVVNARHVKAVPGRKTDMADAQWLATLARAGLLRASFIPPVQMRQLRLVARQRQKLVGMCSAEKNRLHKVLVDAGIRINVLVADIHGQGARAMVKALIAGQPMHEVLDHKGRLRASRQELCEALSTEQFSAVHRFVAQEIVQHIEQIEQRIARMDQYLLQGLQPWQPQLRLLQTLPGIDEQGAAMLLVEIGADMSVFGSAERLASWVGICPGNNESAGKRKTGRIRKGNAWVRRLLCEFAQAAARTRCALKAKFDALTIRKGHKKSVVALAHKMLRTIYAMLSNGSHYQDKEVDYEALNVQRNAPRWIKMLRKHGFIATPAAA

SEQ ID NO: 221104 - protein, 349 aa, unidentified
MENFIETVGIDVSKDKIDAAIYTNQNTICVSNNRFGFKRLIDWVISTTKLSQFQILYVLEYTGYYSISICRFFDQNEINYSIVPGLEIKRSLGLVRGKDDKIDAKRIALYGYRRIKELIPSRLPSLEIIKLKKLLSLRHLFAKHLAAYRSSKKVCEILIEEFNLNNLTPIYKKSIEYTDAIKTKIDKEMLLIITKNKYLFNLFNLITSIKGIGTVTAIYFIAFTEAFNAFDNPRKFACYCGTAPFPRRSGSASQSKDRVSTLANIRIKAHLGNCVATAIQYNKELKAYYDRRLAEGKHPSIIKNNIKNKLIATVFAVVKRGTPYIETYGIPEYSAHKDSEHKIEVQKIA

SEQ ID NO: 221105 - protein, 347 aa, unidentified
MAITTIDTTRRITGGVDTHGDTHVAAALDPVGGVLGTKSFEASPAGYQELCAWLCDFGEVTSVGVEGTGAYGAGLARFLGRQGICVVEVDRPNRQARRRQGKSDALDAVEAARAVLSGRAVGAKSRDGAVEAIRVLLVTRRSATQGRNKALVQMRHLVLTGPDELRVRFKHLSQAKLVDEAKGLRPLRSPDQVTAATKVALRTLAQRIGALDEERGDIDQLLTPLVAATAPELVALRGVGTIVAATLLVAAGDNPERLHSEAAWAKLCGVAPLEASSGKMTRHRLNTGGDRQANSALWRIVIVRMTCDPDTQAYFERRTKEGRSKREIVRILKRYIAREVYGTLPRP

SEQ ID NO: 221106 - protein, 351 aa, unidentified
MESQQTAYPKLFIGIDIHKRSWKVHCATDLFCGKSFSMNPEPEQLKGYVSKHFPGSDVSTAYEAGCCGYYAHRCFEGYGWRSLVVNPADIHRKGKERHTKTDKIDAQLIARELKDGRLESIIIPDKKREELRSLFRRRNDLVKDFRRVKSYIKMQLLYFGIKEPEEFDNDHWSHKYRKWLDDMVFQYPTAKATLDSRMRFFRFVDQELRDVSTQLRRYCKTHYKKDYTLLRSIPGIGGIVACGILCELGDLRRFNNIKHLAGYVGLAPSVHQSGNNQRTMGMTPRANRLLRSYFVEASWQAIRADPVMQSYYRKHQGKNVKSIIIKVARKLLSRTLAVIKTEVPYTIGVVE

SEQ ID NO: 221107 - protein, 457 aa, unidentified
MEKKGLLGIDVSKGYADFLLLDSSSNVMESSFQLTDNKQGRQKLREIITGWQQQGLEELYCGVESTGGYENNWYSYLKTCFKDSKVYVCRINPRGVKSIGDASLKRTITDAVSAENIATYMISFSKKLDYGIDAAPVNPGFKEGRQHVTYIRMLQKQKVQLNNQLEKLLYQYFGEVLVYCRHGSPIWLLSMLAKYATAAMVIKAGVVKLSAIKNISEEKAKAILVKAKNNAQDVSQQIAHVIMATAKEILHKEILIKEEKEYLAEIYTGSEEVRLLSSIPCIGVNSAVTIALEVEDITRFATVKKLCSFFGVHPTFKQSGDGIWGNHMSKKGRGEIRAVLYMAALTGIRHNPILKQLYARSRSKGMKHYQAMGVVMHKLLRIIYGVLKNKTEFNAKTDDLNQQRSTEKQYEKEQKDKADGIVKKQKKHRFQEVSTDAPISRRAEQKIRKQIASQASK

SEQ ID NO: 221108 - protein, 377 aa, unidentified
MREHNTERTTYIGLDAHKRRHRVAVLLPGEKTFEEWEIPNEARSIKRMVKKVIKMGPRGVCFCYEAGPCGYALQRQIEGLGAKCVVVAPSLVPVKPGERIKTDRRDARKLAKMLASGLLTEVRAPTREEESVRDLCRCREDVREDLTRNRHRMSKFLLRRGMIYPKGKNWTKRHRAWLRSLSFEDRSSQVTFEQYLIGIEQLEERLRGVEAEIETLAQSERYQEAVGWLCCFRGIKTITAMTLLSELHDFRRFHSARELMAYLGLVPSEDSSGDRRRRGSITKTGNRHVRRVLVETGWHYRHLPTVGIDLRRRREGQPGSVISLAEKAQNRLHRRFWYLCNKGKSPNKAVVAVARELVGFIWSVLAVQGQDKEATGS

SEQ ID NO: 221109 - protein, 356 aa, unidentified
MKITTTGIDLAKNVFQVHGVDERGKAVLRKQLKRGQVMTFFVKLPPCLIGMEACASAHHWARQLQTLGHTVKLMAPQYVKPYVKTNKHDVADAEAICEAVGRPNMRFVPIKTVEQQAILAVHRARQGFVKARTAQANQLRGLLAEFGLVLPQGISHIGQRMPAILEAADNGLPGSLRQLLARLLAHWQQLDRQVAQLEGEIQRWHKNSEASQRVAALPGVGALSASALVATVGDGRSFANGRQVAAWLGLVPKQASTGGKPTLLGMSKRGDSYLRTLFIHGARSVLQQVARHPERADPWLKQLLARRPKNVVAVALANKNARIAWALLAHGREYQRSFRPTPPRQLAALASTAVRG

SEQ ID NO: 221110 - protein, 340 aa, unidentified
MKKILFIGIDFSKSKFDASLLKSMSDEEVVSGSFENNRGGYVLFLKWVSDHTRIKKEDWLFCGEHTGLYSRDLAEFLSKKNLTVWLENPYQIKCSCGIKRAKTDKIDALEIARYAYRFQDKCTPYQPVDKAIESLSLLLSYRGRLIKEKVLLEVSAKETRRVISRDTTSRFVFENSMRNIERIKKEIKAVEEKMHQILMDSPLKENYLLTVSVKGIGLVTAVALIVYTNNFSTFNTARQLACYCGVVPFEKSSGTSLNRGKHISHLANRELKTLLTLCARCAIEHDKELNVYYHKKLSEGKEYKVIINNVRNKLIHRIYAVVTHKMPYMENYLNPFRKCA

SEQ ID NO: 221111 - protein, 380 aa, unidentified
MVPLQHHRGTTMDHYAGIDVSLEYSSICVVDATGQIVREDKIASEPEVLIAWFGSLGYALTRIGLEAGPLSQWLYAAMKKAGLAVELLETRHVRDAFKAMPVKSDRNDARGIAQLMRLGWFRPVHCKSIGAQEIRAELTARKLVESKLRDIANSLRGILRGFGLKVGATTERSFPGRVRELVKGHPVLEAIAEALLSVHEVLLREFNGFQKRVQSAACSNVKARLLMTTPGVGPVISLTYAAAVDDAARFKSSKKAGSHFGLTPKKYQSGETDRSGRISKIGDASVRAALYQAAHVILTKPVKGCPELKSWGMRLAKRAGQEKAKVALARKLAVIMHRMLADGIPFNPNAKAERMAATATKAASKVLALPASGTTVAEAV

SEQ ID NO: 221112 - protein, 319 aa, unidentified
MPRIFIGVDVCQQSLDVHIRPLSIRQRFANTADGIAELAAWLRPYAAERIVFESTGPYQKAAVGVLLAEGFPVVVVNARQVRDFAKAMNYLAKTDRIDAAVIAHFGEIAQTTVRPLESQELRDLRELYDRRSQLVRMLAAEKNQRHSATVAQASAKVVKSIDKHIDYLEGHIKDLEQRMERIIESSATFRTRDEILQTITGIGPQVSRTLLAYLPELGRYSRQSIAALVGLAPFNDDSGVHSGQRHIRGGRSKVRVGLYQAAIAAIRHCPRMKAFYAGLKARGKASRVAIIAVARKLLVLANALIRDMVPYKATANSVC

SEQ ID NO: 221113 - protein, 338 aa, unidentified
MNYTTVGADIAKNVMQLYWVDPDSGEVINKAVKRAAFLEHFANCAPCLVGMEACGGAQHWARRLLEMGHQVKLIPAKFAKAFNIRNKNDAADARAIWMATQMPGKSVAVKTEAQQAILALHRIRQQKIKFRTMQMNCLRGLLTEYGEVMGKSRAAVDKAIPGVLERLTDRLPAMLIESLREQWNDLQNLDRQIAEIERRLRAWLKDDEACMTIAAIPGVGLLTSTAAVATMGDPKAFRSGREFAAWLGLVPKQVGTGGKTVLLGISKRGDTYLRTLLIHGARSVLSHSREPGAWIDQLTRRRHRNVVIVAIANKMARTIWAILAHGKPYEKDHASIAA

SEQ ID NO: 221114 - protein, 385 aa, unidentified
MRVVFGIDVSKASSEVVILVNGEKVHGYTIPNDAIGFNRLLGDLKTVHEPEIVFEATGVYSRRLQAFFEDNSYAYTRLNPLESKKQLDSLRVRKTDKINAEKLAASQFILNRKPSYVQEALYQELRDLSRFYQNLTEDIVCAKNRLHKVLQVTFPELENILSAPTGEQYWNLVMTFPCNSFVLESDDATLTAIIRQSTVKRISEKRVTYLVDKLTKLANQSYCAVKKTSPVIEEVKYYAGELLRLSEHRQGVLEEMVALAQSLPEYEILLSIPGIAETTATSIIGELGDIRRFHSANQINAFIGIDLRHYESGNFLAKEHITKRGNPYARKILFKCIHNIASASHTNPCHIADFYEKRKRQSQVTSTKPHTIASIHRLIRTMYSL

SEQ ID NO: 221115 - protein, 387 aa, unidentified
MPQPNDLSKSLVALDHNSTIIAVVEMSQSSWLVGGVVPGIERQPRKKLEPSPERLLALLHRWRDEAIRTGGNITRIVLAFEAGRDGFWLARWLAARGIEAHVIHPSSVAVSREHRRAKTDRLDTELLKRAFLGWLRAERGHCSMARIPTIAEEDAKRPNRERECLVRERTRIVNRIKATLARLGIREFKPTLRKAAERLAALHTPEDPPLPPNVSAELQRDLARLGFVVSQIKEIEKARQRRLEQHSESGPHATVRLLARVVGIGIETADMLVHEVLSRPMRNRKAVARYAGLTGSPDESGAKRREQGLARAGNARVRRGMIQLAWRFLLFQKQSSLAQWYRARTADSRRGTRKTMVVALARKLLIALWRFTTTGEPLEGVILRPAG

SEQ ID NO: 221116 - protein, 338 aa, unidentified
MTIIRIGLDTSKHVFQVHGVDEAEQPVLRRQVRRSEMEKLFAKLPPTRIGIEACGASHHWARVLRGLGHEVVLMPPQYIKPYVKRRSKNDALDAAAICEAMSRPEMRFVPVKSAESQAGLMVLRVRELLVKQRTALINAIRGHAAEFGVTAAKGPVRVVELLRRVAVEESGVPAPARELLGLLAGQLDAVEARLKTLEGQLMAVHKENQASQCLATIPGVGPIGAVSFALTVPDPKAFRSGRHFAAWLGLTPREHSTGGRRRLGRISREGDDTLRRLFVLGATAVIRVAKPGKASPWLLQLLARRPKKLAAVALANNMARIIRAMLVSGEVYRRPYPV

SEQ ID NO: 221117 - protein, 363 aa, unidentified
MRKNNIARRLNGKKRRLTIGVDLGDRNSRYCVLDEEGEVILEGSVATTKKGLAQAFGSKPRSRIALEVGTHSPWVSRYLTELGHEVVVANARRVRLITDSSQKNDRLDAKTLARLARIDPELLSPIRHRSEQAQGDLMVIRARAVLVETRTMLVNSARGLAKSYGERLPSCGTGQVRQELAGPLSEPLQKALKPLLAEVESVSQHIREYDEQIENIAKSRYPETELLKQVHGVGTLTALTYVLTVEDPHRFRRSRDAGAYFGLRPRQRDSGNSRPQLRITKEGDAYVRKLLVQCAHHILGPFGQDSDLRRWGLELAKHGGKNAKKRALIAVARKLAVVLHKLWVTGEVYEPLHVRQQSKRAAA

SEQ ID NO: 221118 - protein, 344 aa, unidentified
MDNQDYAGIEVSKDELLVALRRGEQTLPLKSFPNTPPGHRDLARYLARKGRVVRACLESTGVYGLDLALLLHKRAGVEVMVANPRAVRHFAQALMQRSKTDPLDTLMLLEFAARMPFRSWQPPSSPALHLCALARRIEAIKDLCAAEQNRLHAASVAQALPAVVRQDLRRSIAFHERALARLTTQARKLIAADPLFQERFDYLDSAPGIASTSAIAILAELTMLSPDLDVRQWVAAAGIDPREYSSGSSVHKKTRISKAGNRHLRRALYMPALVAVRHDLHLRAFYQHLLAKGKAKLQALVAVMRKLLHAIFGMFKHHQPYDGSKIYRFQPQDPQPVLCTTEVA

SEQ ID NO: 221119 - protein, 307 aa, unidentified
MFVGIDVAKERLDVHVRPTGESIVVARDSEGVAALAERLKAMAPMLIVLEATGGFEVTVAAALAAVGLPLAIVNPRQIRDFARALGRLAKTDPLDAEVIARFAEAVRPTPRPLPDDQARALGELVARRRQIVEMMTAERNRRHQMTARKRLKAIERHLDWLQKELSEIEQELDQTIRGTPVWRESEDLLKSVPGVGDTLARTLIAELPELGRLTGKQIAALVGVAPFNRDSGQWRGKRMIAGGRAPIRSVLYMATLSATRCNPAIAVFYNRLIELGKPAKLALTACMRKLITILNAILRDRRHWKTA

SEQ ID NO: 221120 - protein, 347 aa, unidentified
MDHIGIDVHKKESQICILAEGGELLEQRIPTQPRRFAEELGARPHARILLESSTESEWVARCLEGLGHEVIVADPNFAPMYATRTRKVKTDRRDARALAEACLLGAYRPAHRLSDAQRHVRARLTVRDTLVRTRTRYISLTRALLRQHGWPVPTGSAEAFPRRVMALPLPGRLRSEVAPLLAVMRHLQQQLAYSDERITAVTQTDGRVRRLRSVPNIGPVTAAAFVAALDDVQRFRRAHEVEAYLGLVPRELSSGETQRRGRITKAGSSRVRWLLIQAAVSMLRLHDPRTAWLREWAGHIAARRGKGIAVVALARRLAGILFALLRDETVYHSARRQPRTMQDAVPA

SEQ ID NO: 221121 - protein, 354 aa, unidentified
MVVVGTDVHKRTHTFVAVDEVGRKLGEKVVKATTIGHHKALAWAREQFGEELLWGIEDCRNLSARLERDLLTAGQSVVRVAPKLMSQARASARTRGKSDPIDALAVAQAVLRNPDLPVAAHDKDSRELKLLVDRREDLVVQRTSTINRLRQRVHELDPAAEPKPGSLHRTKACTTLANWLDTQHGLLAELARDELADVMRLTEAINTLAARIGERIQKVAPTLLTVPGCGELTAAKIFAETAGIGRFKSEAAFARHSGVAPIPVWSGNTAGRVRLNRSGNRQLNAALHRIAITQMRIPDSAGQRYYRRRLTDGKATKEALRCLKRHLARTVYRSLHNDQNSANTHQTPETSLAA

SEQ ID NO: 221122 - protein, 361 aa, unidentified
MSGQNTRTWRRFVGMDVHRETIAICVLDEGGVECRVKRTIASRRQALREWLAAYMDPAVPTRFALEALSPARWVVAELRAAGFDVVLVHPFGVRLIVQSKKKSDRVDARALADLLRLGRLPAAYIATPEEQALRALVRHRESLRAEMTSKKNRIHAILHCNDEHFEGSDVFGKRGRAWLAARAFPEDERFVVDQLLAGIDALERQIAEADERIAARVEDDPFVALLRTIPGVGPAIAPALRAEAGDVRRFERPEQFAAYTGLVPATWESGGSRTGGGITKKGNHVLRWALVYAALHVCRWSAEWKTRYTKLRRRIKKHKARVAMARRLAVAIWHMAKTGEVFRYRERPPKEPKKPKKPKAA

SEQ ID NO: 221123 - protein, 416 aa, unidentified
MNAVGIDVSSRKSTVAVLRPLGEVVCLPFDVTHDIAGLASLAEKLKAIDGETRVVMEHTGRYYEAVAKALHEAGFFVCAVNPLLIKEYGANSLRRVKTDKADAIKIARYALDNWADLRDFTPMDAIRYDLKTLNRQFQLASKQRTASANNLIALLEQSFPGIRKCFDSPVRSDGTQKWVDFAHSFWHVDCVRKQPFPAFCERYRKWCKLHAYFFKLRNAEKVYALAKSAVVLTPKSKVVKVLVQEAANQLISISRSVEVYRAEMDRLAAMLPEYPVVMAMYGVGKSYGPQLMAEIGDVRRFERKQALVAFAGIDPMPNQSGDKNVRSNKSSKRGSPYLRKTLFNVIRTYLQCAPQDEPVFQFLNRKRAEGKPFYVYMLAAANKFLRRYYAKLRDFFASLDTLQPVAPIPTILKAAL

SEQ ID NO: 221124 - protein, 427 aa, unidentified
MSLISADGRYLSDTFEEVFFIMISVGIDVSKGKSTVCAIKPYGEVLMAPKDFRHTKDDLDSLVKQLSRFKEEIHIIMEATGNYHLPVYQYLKSKGYQISIINPLEMKRYRCQGIRNPKTDRIDSLIIAQYGIDFWYRLKPNDDMDEKRKELRLLGKQYTQYMRIRVIRCQDLCHILDRTMPGVYGLLDDFNRNNGQDKLCDFAEKYWHSDNITKYSEKIFVEKYQTWLKKKGYRQNGKEARQLYSIAKNAIPTLDSKLPSTKLLVQEAVNVLREVDSSLYDILNQLKALSKEMPEYGAVLSMKGIGETLAPRFIAEIGDPRRFHSAKALIAYAGIDAPPYQSGQFTGTKRHISKRGDSNLRKLGYELMDSVNKHKSLYGGDPVCEYFIKKRNEGKPYRVAMIAAFNKFLRIYHSKVSAVLSEYDKKK

SEQ ID NO: 221125 - protein, 316 aa, unidentified
MEAPVAGIDVSKDKLIVYFQGKLYEFTNDKRGYEEIRKILPKGCKVGIESTGVYHVNLAKYLNNEYDVRIINPFILKKFKDFRGKKSDKNDAKKLAELVVSMCSGFTTSDARELTSQWDFVTRSIARVKNRLRRDLVLLGYRDSLSKKNLEEVLRGGDSIVLAEVRFLLEELERLEGRKREIEKELEDFVSKDSLIFTIPGIGKTLGCIILARVGDVKRFSDKKRFVAYCGLDPVVESSGKSVVSRGISKKGDAVLRRAFYLAALTAIKVNPVIKRFYEEHKGRLKGKKLITACARKLAVITWAVLYYNKPFDASE

SEQ ID NO: 221126 - protein, 352 aa, unidentified
MLIIGCDFHPGFQQVAIFDKQTGEYQEKRLRHREEAEQFYRSLAGQTVRVGMEACGHYPWFERLLAELGVELWLGDAAKIRASVVRKQKTDRRDAEQLQVLLREDRFPRIWVPTLEERDARQLLVDRHKQVQARTRTKNQLHALALSQGVQRKRKLWTEVGRAELEKLELLPYAASRRQRLLETLDRLEAEITALNRQVEAEVKQRPAAMRLMTHPGVGPVTALAMVLTLGPAARFESGRKVGSYFGLIPSEHSSGGRQQLGRISKQGSSFLRFLLVEAGQSAARYDAELGRFYRRLAVRKHRALAKVAVARKLATRLYLMLRENWNYAQLCKAVVQVSPSHSVDGRQTPTA

SEQ ID NO: 221127 - protein, 401 aa, unidentified
MKTVLSVDVAKNKSMIMLMNSDGEILIDTKEIKHNLEDFEKAKEEIKEINPENLTVFMESTGTYHLPVERYFKENGFNTLVINSLTTKNNYDTIRKTKTDKKDCYRLAKLFFVNEVEYHELSKKDLYANLKAMTRQYFYLLQQNVSCKNRYKRLLNICFPELEKIFKSTRIYDDTALNFIKEFPHAEIVKEKRIDALYNNLYKTNGRNLNFYKRLSETIKIASANSYPGVDKEHKDVKNLSDMAKIVQNNNNVINELRDKMIETAKKSPYYEIINSFYEIGEILTAEILGKLGDITRFDSPKQLIAFCRLDPTIKQSRKSINVKGAISKRGNKYARYILFNCSQMVVKLGASNYPEHPVYIYYQNKKAEGKHYYESLTACSTKILRMLYSMCKNNKQFLEN

SEQ ID NO: 221128 - protein, 408 aa, unidentified
MAVKIAGIDVHKKVLMVVVIDARTPESKPERRRFATMPSELRRLSTWLQEQGVEEAVMESTAQYWRSVWLELEPHMCLHLAQAFYNRAPRWRKHDFKDAERLVRRLIAKELILSFVPDGEQRIWRNLTRMKLQLTRDRVRIQSQIECLLEEMRIKLSIVVSDLLGSSGLHILHALANGETDAKSLALLGDDRLKCTEEQLVEALTGRSHPMHGQMLALQLERLRLLDEQIAKLNSLIAQAMKPHQDAVIRLAEVPGLGIDSAQQVIAEVGVTASTFPSAAEFTSWVGTCPGKEESAEENSSSRSAKGNKYMRRVLNQAAHAAARSKGTHFQAVFRRLLPRLGYQSAVWAIAHRLCRLVWKILHEGIRYIEQGIESEPKLLISRAKYLAKQLRKFGYNVQITAANRAPA

SEQ ID NO: 221129 - protein, 336 aa, unidentified
MSLYSAIDLHSDNNFIVIIDSNDSILFQRRLPNDLGTVLSVLEPYKGGLQGVAVEATFNWYWLVDGLIEAGYTTRLVNTAKVKQYSGLKHTEDRYDAYWLAHLMRLGILPTGYIYPREQRAVRDLLRKRRQLVNHRTIHVLSIQNQYWRNTGIKLKAGYIKRSNDYLGEFEDSNIHLALVSNYEIMQALDEQIGRIETSVKQQIKLRPEYELLLGVDGIGFILAVTIMLETGEISRFEEVGNYASYCRCVESKHTSNTKKKGEGNAKNGNRYLAWAYIEAANFAKRFSAKARRFHQRKKAKTSNVVATKALAHKLARACYYIIRDQVPFDENKTFG

SEQ ID NO: 221130 - protein, 415 aa, unidentified
MQSCLFVGVDTHKHSHTAAVFGSYFNLLTTITFANSFLGFSKFLAKLKKLSNGKTTIFGLEDSQGLGNFLAEFLLKKDFYVVDIDPVTTDRGRRRTAHKDKSDSRDACLIAKTLIREKDSLNKVTINKNSLALRELVKSRELLVVESTRIKNRLHVLIFNKYMEISSVFSDLFSKCALAFFSRYPDPSKLKGESSATLTAFLKSNSKGMHGKKKAMDILSLANTGFTPDILTDARSSIIKKHIERLTCIQEELKDISGMLSELVLKSPYRTLTSVPGINIVTASKIISQVIDIGRFSSPSKLAKFIGVAPVEKSSGRKRKYQKSKHGKRYLYSAIYFIALNHISRTRDQRDNNPISRAYYLKKISEDKTKKEAITCLARRLCDVIYAIMRDGSMYSFSKVKSVRNNCEILETAAV

SEQ ID NO: 221131 - protein, 477 aa, unidentified
MLTIGPQPNHTPILSEFPHEALYVGIDVGKKKHVAGFLSRTLLQRHQRFEGCPALPFEQSREGFHLLVDRMQSYTSLESCYVLLEHTGHYHKLLEQYLQEMDIAVYVVHVQKRQTGMLKTDKRDALNLANTLYSQLELGVQVAEKLSLVRRALPPTKAALQLKGLIRHRYELIQESTQRKNKLTALCDEIFPEFTKVLKDPNSSTALAIRERFPSPHALATASLAALQDVRGNNRSLSDSKLVNLQCLAGQSIGIKDVNRQRGLMLEQSLLIKELRMIQQHLEQLEAEICQIVEQSREGQILMSIPGIGPLSAATLIATIGNIANFSRASELKSYLGWAPTRDQSGTSFDRSSLTSGGSRSTKQTLYLIVWHAIKQKDSEFALLYERLVPLKCIYNDATRRYTGKGKVIGRIAGQMVSMIYGLLMTDYEVTSHLAPGTRPPVPTLYDPEVHKRHRNGQYRALKPRKQKQLLIEQPDM

SEQ ID NO: 221132 - protein, 373 aa, unidentified
MTLTQDATTKLYIGLDIHKRSWSVCIRTDLFDHKSFSMPPEVDALYEYVSKNFKNYEVRLTYEAGCCGFSAARGFMNLGWEVTVVNPADVPHMDKQNYQKTDKIDARNLAKQLQNNTLTPIYIPTEDHEQFRSLLRQRHRVTKLLRKTKTDIKSMLLFHGVKIPSEYDNNNWSINFRAWLSSLKWSNICGASSMRYKLSQYDFVYKQYLDLGTELRAYARKHHKEDYYLLKSIPGIGGYLSAAILAECGDIRRFDNERQFSSYLGLVPGIYNSGGSETNLGITPRCNTILRPYLIESAWVAIRLDPEIQSYYRKNIGKNPKSIIVKIAHKMAKRILSVIKNKEPYKINNNENVDKNIKLPIEAMEAILNQEDD

SEQ ID NO: 221133 - protein, 332 aa, unidentified
MNNCIGIDVSKSTLNIHISKNNQDLQIENTVAAVKKLYTKLKKIYKKELEELVFVYEPTGSYSEMLRKFCADRSIKCFIINPKQFSNYAKALGIEVKNDEVDARVLAQAIVLAKASQIKVPVYDMDVEQIKELMSFYKFTCKQTAQLKGHLESLVAKVGDSFAIKELRKSIKASKEREKRIIEQVHQLIQSNADYKKAYENITSIIGVGQIGGIALLHLFLKYPEANQRQITSLTGLNPIYRQSGSSLQSNYKISKSGSIFYRGALFMGVMTAIRYDDNFKAFYERLKANGKHTTQAQIAVMRKMIIVAHSLYKNDTQYVKKVPNLEEKTMN

SEQ ID NO: 221134 - protein, 360 aa, unidentified
MKIVGVDRHAKQQSIAMLDTETGELIEKVIHHEGNAVREFYSALEGLIVVGIEATGSMQWFLELLDELGVQYRVGHPAKIRAAEPRKQKHERRDARLILELLTANRFPDIWMPSIEQRDLRILLRDRHQWVKMRARLQHTLQSIALNHALRKGTSLWTAAGLEAMRKLPLPPYTSERRNQLLRLYAQLQKRIQELDRQVEEQAQQRPQARRLLTHPGVGPLTALATEVFLGNPSRFTTAKQVASYIGMIPREYSSGQRQRLGNLSKQGNSLLRYLWTEAALHAVPKDPELKRFYRRQLIQKGMGKARVAAARKLGSRLGIMLRDQIAYEEFCRRGKLRQNGEAQAGMPDFNRGPATTVTG

SEQ ID NO: 221135 - protein, 316 aa, unidentified
MANHVTKITFGIDAAKDQHVIYNWQARQTIKLPNQPDDIRSWLKTLHGPVRIAIEPTSHYHLVMVDEALTLGYEVYLINPRQLVHYREAVNVRNKTDPLDAWLLARYLEHEVDQLRPFQPRDPRAQRLWRLILHRATVVKSCQQLKQSFADVQVSIRGVLTQLQNLLVRIDRQILTLIRELGWWAEYRSCLSIPGIGPGNASALVAAYHRGCFAGSDAFVSYLGLDVRIRESGYFKGKRKLTKRGEPEVRRLLFCASHPARHYHRFAEYYQRQLDKGLCKIAARVILARKLARIAFALMRNKETFIKEEKIYCVAS

SEQ ID NO: 221136 - protein, 317 aa, unidentified
MQKTINFVGIDMAKNDFYACLKDTVEPRKFNNDTTGIKSFFKHLLKNDFQKGNTILGVESTASYHLKLCIDTMERDYKIKVINPLIIKKQNQTDLRRVKNDKKDSRLIRFCLIGGAGYLFNNDPEAIILKSLIRQRDSLVFSKLKFTRQQADIRLKEKCLKQSISPVYVEIINVLEEKINLLKTELRLYRPKEQYLLESISGIGPITAASFISEVENINRFKRPEQLVAYAGIDPRVHQSGTSINGKGYISKRGNKILRTRLFNAASVAVLHDNMFKIFFQKKKGEGKPYRVALVATMRKMTHVIHAVWTRGTPFVK

SEQ ID NO: 221137 - protein, 388 aa, unidentified
MYNTQHPFYCGIDLHARAMYVCILNQAGETLLHRNMKTTPEAFLKAIAPYRPDIVVAVECMFTWYWLADLCADEEIPFVLGHALSMKAIHGGKAKNDKIDSQKIAVLLRGGMLPQAYVSPAEMRATRDLLRRRMHLAHKRGELLAPVQNTNSQYNLPALGKNIAYKANRDGVAERFADPAVQKSIEVALSLVSYYDELLRDVALTIVKTAKQHDANTLYRLQTVPGIGKILSLVLLYEIHHIDRFPRVQEFASYCRLVKCAKESNGKRSGTSGAKIGNAHLTWAFSEAAVLFLRENPAGQKFLARLEKKHDKGKALTILAHKLARAVYYMFKRKVAFDMKRFLNDEGRGVGERDVSLDNHGMNLILATLSNASMTASLNAYERLGHYP

SEQ ID NO: 221138 - protein, 378 aa, unidentified
MGAVARTQLRETPVMGNRTCVGLDVHARSVWACAVDDESGEMRTQRISPKTPEIVKWVKALPGDVELAYEAGPTGFGLARALIAAGVRCHVLAPSKMDRPSGDRVKTDKRDCEWIARLVRLGELPIVVIPSEGQEAARDLVRAREDVRADLMRSRHRLSKLLLRQGIVYEDTAWTTAHGKWLRSQSFDKPGVQFAFDEAYDTVLTTLARRDRLDNAILAMAAEPTWAPVVARLGCLRGVGTLTGFGLAVEIGDWHRFTGNSIGSFLGLTPSEHSSGGSRSVGSITKTGNGHARRLLVESSWHHRKPYRLSAEMIHRRDGQSPVVRARADQANRRLNQRWRTFDARKKRPTVAAVGVARELAGWCWSLAVMDGEKTTAP

SEQ ID NO: 221139 - protein, 367 aa, unidentified
MKKVSTVAAKQSRNFSQPKLTIGLDLGDRWSWYCVLDEAGAIVLEQKLGTTPKAMKETFGAVARSRIALETGMHSPWVSRVLSELGHEVIVAHARNVRLIGESRKKDDRIDAQTLARLARIDPQLLCPVKHRSAKAQADLTVIRARAGLVRARTALVNTARGLAKSYGERLRGCSVRNMNPEKAQGLSPELRTALEPLLAGIESLSERIRECNERIERLARESYPQVALLKQVKGVGTLIALTFLLTLEDAHRFRKSRDVGCYLGLQPGRRNSGQSEPQMHISKEGDPYLRTLLVQGAHHILGPFGADSDLRRWGLKLAERGGKSGKKRAIIAVARKLAVLLHRLWVSGEVYEPLRHRKPTAMPAAA

SEQ ID NO: 221140 - protein, 443 aa, unidentified
MEILYRVCCGLDVHKKTVAACLRFASPTGPRAEEIRTFGTTTGELLRLADWLAMTGCTHVAMESTGVYWRPVYQILEGSVDLLLVNAQHIKTVPGRKTDVKDCQWIARLLEHGLLRASFVPPTPFRELRELTRYRRQLIEERAREANRVQKVLETANIKLGDVATDVLGASGRAMLKALIAGERDAHKLAALARGLLRKKEVQLREALVGRVTDHHAFMLQSLLSHIEFLDQEIALFDARIETQTRPFTAALERLDTITGVARRSAEQILAELGDDMSRFPTAAHAASWTGICPGNNESAGKRKSGKTRKGNRWLRTTLIECARGAVRARDSYLAAQYHRIARRRGDKKGIVAVGHSILIVAWHLLRNGGSYRDLGHDYFDRLDRDRLVRYHTRRLTELGVVLPLPRRHRQLRSGPLEGFLSEDQRDSNPCLSRDHVFAHAIR

SEQ ID NO: 221141 - protein, 374 aa, unidentified
MSDHSEAFVAFDTSKLRNAVAIAEGGRTGEVRFLGEIENTDAATAKLVRKLAARYRRLTFCYEAGPTGYGLQRLIARLGHDCVVVAPSLIPKKVGDRVKTNRRDALGLVKLLRAGELTAVWVPDARHEAMRDLTRAREAAVTDLTSKRLQVSSLLLRLGRHYPGKKTWTQAHMNWLTSQKLEHAEQRIAFEEMLLAVRQAQERIARLEQAIRAAVPDWSLSEVVTALMAMRGIDFIAATAFLAELGDLTRFRTARELMGYLGLVPSEHSTGDKVKRAGITKAGNRRARRILVECSWSYRHPPRLGKEKLAKVTAAPRAVQEIAWKAQSRLSARYRALTRRGKRPTVVVTAIARELSGFIWAVNRAAMAHAAPAR

SEQ ID NO: 221142 - protein, 337 aa, unidentified
MGCERIAVDTSKSVFTLHGVDERGRPILRRDLSRARFEEFLGKTPPTELVLEACGSSHHWGRVAQALGHKVRLIPPQYVKPFVKRGKNDRNDAEAICEAASRPTMRSVPVKSAETQAEAMDLSARDLLVRQRTQLANAVRGHAAEFGVIAAKGIAQVEPLLARIAEADMPPAAKETLAHLGRCIEQLDVQLAELGRRLAARHKADPVSQRLAAVPGVGPLTALTVAMTVDACQFESGRHFAAWLGLTPRERSTGGRQRLGGISRAGNERLRQLLVVGAMAVIRHAKPTSKAASPWLLGLLERRPRKLAAVALANKMARTLWAMMANGTAYRRPLQAA

SEQ ID NO: 221143 - protein, 387 aa, unidentified
MPEDAPRPAQAAIRTDLGAIFVSLELSRRAWLVTSLSPGDGEKMSKHSVQAGDIAGLLRRFAQLKEKARARTGRDFPVITIQEAGLDGFWIHRVLQSEGIESHVVDAASILTSRRRRRAKTDKIDGETLVRTLLAYKRGEPRVCSMVKSPTPEEEDRRRICRERRALVAERVQHTNRIKGLLFAQGAFDYEPLKRNRRAHLEDLKTGDGRPLPVNLKAQISRELDRLEVVLQQLQTVDAERDALLEPASEASPAPAAMLSQLKGIGPEFATILYTEGLFRGFDNRRQVAAYAGLAPTPWQSGSVDHEQGVSKAGNPRLRTTMIQLAWLWLRHQPDSALSRWFQDRVQRNGGRMRKTTIVALARKLLVALWKYATSGVVIEGAVLKAA

SEQ ID NO: 221144 - protein, 327 aa, unidentified
MRHVFVGLDLHKAHHTAVIIDCWNERLGEIQIENKPSAFDELMKFVKKHTPKGMTPVYGLEDTGGNGRALAVHLVEKKQIVKEVNSALSYNERKSYATTQKSDSWDAYCIAKVSLSRLDELPDANPQDMYWTIGQLGARRNAIVKHAATVKNQLHQQLSYHYPSYKKFFCDIDGKAALAFWEKYPAPYHLESVGAEELAAYLRKASHNTCSTRKAEEILELVKKDGETKRNYQASRDFLVVNMVQDMKGSRELIKETEAQLRQVLSETDYKLDSMDGISTVTAAELIAEIGDIRRFSSADKLARFAGIAPVRFSSGGNSIRASGKLI

SEQ ID NO: 221145 - protein, 395 aa, unidentified
MDAGGRRLAKARLPEGVAGIARLHAMVGGQLGEDADEEDAGQVAVGIETDRGPWVAALTAAGYTVYAINPLQASRYRERHGVSGAKSDAGDAHVLADMVRTDSHQLRTVAGDSAQAAAVKVVTRTHKTLIWERTRHTQRLRHALRDYFPAALEAFEDLDAPDTLELLARAPDPASAARLTTAQISAALKRARRRGIAGKAERIQAVLRAAHLGQPDIVTAAYAASVRALIAVLATLNEQVKTLQGQVEAYFGQHPDAEIITSQPGLGPVLGARVLAETGDDPARYASAKARKNYAATSPITRASGKKKTVMARYVHNDRLTGALMSQAFSALQASPGARAYYDRQRARGSGHNPALRQLANRLVGILHGCLKTRTRYDEATAWPQYAAKTEKTAA

SEQ ID NO: 221146 - protein, 398 aa, unidentified
MGKGSGVTRGDQRRNARMARLREMVPATSAVAGLDLGERKQALAVTGADGRVLARRSPRVSVHGLGGHLDWAVARARSAGLGGVTVACEPTGSRWMVVQDLCEQRGLPLVCVQPLVTHIAREQQDLAGDKTDEGDCVLIARLARELHCYAPERLAGAWAELRAAGRDRAVQITRATAARQLIRDQLGLAAPALLEVVCEPLESATWLASLEVVLERGILAGTAGMGYEAFAAAVRGRLGGWGGQRLGPAASRVFAGLAAAGGVARMLRAAVRRISGALEDLQHARARRGRLEARMTVLLDELGIDHARICQIPGLTVAGLAAILAETGDLRQYLSSSSVVKHAGMSPARNQSAAFCGKTKMSRRGRPALRLAVWRATWAVLRPLRRARRQAHNLDQPR

SEQ ID NO: 221147 - protein, 416 aa, unidentified
MNDEVYYERCAGIDVHKKLLVVCLRIGRKSEVREFGTLTHEIREIIAWLKTNSCQMVAMESTGSYWKPLYNIFEQEQLPAMVCNAYHIKNVPGRKTDWNDAFWIAKCLAQGLLKPSFVPEREQRELRDMTRFRKSQIEERARNLNRLQKFLEGSNIKLGSWLSDIEGKSASALLELVIRSPDFTLDDVKSRMHGRMKSTPDEIYAALDGYITPTQREFLTHVIDVIRQQSAQIEKTDAMISASLSEEQRAAVSRLDMIPGIGKVSAEQIIAETGTDMSHFRNQHSFSNWTGTAPGNNESAGKRKSGRTVHGNKTLKSTLAQCAKSAVKNKSSFFSAQYARLVSHRGKNRATMAVAHSMAIAIFFVLSGQEFKDLGADYYTQFNREKKINSHIKQLSKLGVEIPNNFLSDLIERPPD

SEQ ID NO: 221148 - protein, 336 aa, unidentified
MSHYCGIDLHSNNHVVVVIDERDKRVFDKRLNNDLGSTLNVLAPYRETLKGIAVESTFNWYWLVDGLQDNGFGVQLVNTAAVKQYDGLKYSGDHQDAFHLAHLMRLGILPTGYIYPKEQRAIRDLLRRRMSLVRSASTQLISVQSQIWRSTGIRIKSGELRKPDFSPPHLDKYTLQAIGAGLAVYQAIQQEINVLEQSAYQAVKLTDAFKILQTVTGIGKILGLTIMLETGDIHRFAGAGNFASYCRCVDATRTSNGKNKGTGNAKAGNKYLSWAYSEAAHFAVRFEPLAQRFYERKKAKTNGIIAIRAVARKLARATWMMLKHQVPYDARLMFPN

SEQ ID NO: 221149 - protein, 349 aa, unidentified
MDKDTMTIIGCDLGDRSSHLCLLDPEGSVLRRAKIGTTKKAFDKFFAGLERSLVVLEVGTHSRWSSALLHELGHQCVVANPRHVRLIYAGTHKNDRLDAEALARLGRLDPTLLRPVEHRSQEAQTELSVLKARDTLVRQRTRLVAAVRGMAKSAGVRLVACDADYFVRKVTLPPALQPALAPMLQSIEGLTAHIKDYDKQMTELCAQHPETHLFQSVPGVGPITALAYALTLERPERFTTSRQAAAFVGLVPKQRQSGRHDPQLGITKAGDRFLRRLLVQCAHCILSARGQDSDLRRFGLRLAAQGGKRAKKRAVVAVARKLAVLLHRLWVSGELYEPFGPVLQHHHAA

SEQ ID NO: 221150 - protein, 285 aa, unidentified
MSNDTRIAVDVAKAVFEIGISDRPGHVSRRERLPRAQFLAFMAQQPAATVVMEACGSAHHWGRKIQSLGHRVVLLPPHHVRPYVRRNKTDRTDTKGILEASRNEEIRPVPIKTVDQQVLTSLHRLRSGWMTERTARLNALRGLLRELGVFIPMGAREVVPAVWSLIEDADSDLPEALRPIFAEACREIGEIEARIKQVERQLEATAEQLPAVEHLRTIPGIGLLIATALVAFLGDIRRFPSGRHLASYLGLTPREYSSGPGGKFDGFWRRPRSHPLARQGTPPPT

SEQ ID NO: 221151 - protein, 351 aa, unidentified
MLIVGCDYHPSVQQIAWLDTESGECGERRLLHSNGEAETFYRKLKEQGVSVRVGMEATGHARWFERLLAELEYELWVGDPAQIKAKRVRKQKNDREDARLLLKLMMEDRFPRVWVPCVENRDLRQLLWHRHRLVQMRTRVMNQLQAVALNEGVRRKEALWSDAGRSQLESFRLGPWATRRRQDLLQLLDQLNSSIAPLTAAVEQQAGQHPDAQRLMTHPGVGALTALAYVLIIGSPQRFRCGKQIGSYLGLIPCEDSGAGRQRLGHISKQGNSLLRFLLVEAAQAAVRSNADWRREFLHLAMRRQRQIAKIAMARKLGVRLYWMWRKGWDYETFLQFGSHVGQPEVGYGVK

SEQ ID NO: 221152 - protein, 408 aa, unidentified
MPRYYLGVDWADRVHQLYGGDENGIKVMEMKVQENPEGLAELGRWLDQSRAEQVELWAAIEKPHGRIVDFLLDHGVVVYPVNPKVLDRARDRFRMSQSKSDPFDAWVLSEFLRTDHGHLRPLAPNSEQAQELKMLTRDQQRMVRHKTRLLNQLKITLKEYYPRAVEVFADLESRIAVDFLKQYSTPTALSKLSRKQWSRFSEQHPHLGQARSTKLWEELKKPQLMIPDHVIRAKAQLLEVLLDQLEASLRAVEKYSDKVERFFASTPAARLVEKLPGGKSGTLLPMLWAELGDAPDRWQSFKHLQAEAGAVPVTKSSGKSRIVEFRFSCNKQLRYAVYWFAFISINRSEWAKAFYRDQRARGHSHPQALRALGAKWLKIIFVMWRDHQPYDETHHLANIARQKLRQAA

SEQ ID NO: 221153 - protein, 431 aa, unidentified
MKTTQNEKIKAITEKTLIIGVDIAKEEHWARITDSRGIEVMKPVKVNNSTSGFENLLEAVAKVKQKCEAEAVILGMEPSGHYWRAMGWYLKLHENAPVLVGVNPYHVKQSRELDDNSQTKSDKKDALTIAHLIKDGRYFDMYLPEGDYAELRVLNGERQRLMKQISRATNTIIAVMDEYFPELAGIWRDVTCATSLEVMKKAAFPAEILSTPKSELTAIIKEASKGTRGERLANELVKAAESSIGVREGERSAKNRLLRLIGELEYYQGLVADVEKELEAVMSKSALGEILQSMDGIGAIISAAFLGEVGDVSRFDDWKQIRRLAGMNLVENSSGQRKGKTTISKRGRPYLRYMLYMAGVSCRIHNAEMNQYYRYLRERPKNPLGKDQALVAVGLKVMRILFYMAKNQEKYDASKALGKLRVEQISSLKSV

SEQ ID NO: 221154 - protein, 466 aa, unidentified
MTAGNKLWRNRKERKEWARRLRSEDPGLEVLHPHAAGIDVGNSAHYAAVRPDRDPEPVRRFECFTADLYRLAEWLQSCGVKTVALQSTGVYWIPLYEILEDRGFEVYLVNARHTKNLPGRKSDVQESQWLLKLHTYGLLNNSFQPPAEIRVLRTYWRQRAEHVSGAATCIQRMQKALTQMNLQLANVISDLSGLTGQAIVRAIIAGERNPQKLAELSHPRIEASQEEIAKSLEGNWRPELVFVLRQEVEMYDTYQRRITECDQQLQKHLASFGDTVLPQSPEAEPRERKAKPTKNAPRFDLGSELKRITGVDLTRIDGIDVMVAQTLLSEVGMDMSRWNTEAHFSSWLGLCPDNRISGDKLLGKGTRRVVNRAATALRLAARNLIRSRSYLGAQYRRLRTKLGAPKAITAMAHRLARLVYRMLKYGQRYVDKGTEYYENRYRQQQIHLLQKKAAKLGLQITVAVQS

SEQ ID NO: 221155 - protein, 320 aa, unidentified
MMAQNDLVVVGIDVAKDKVDACIRRFKLRQTFPNNPQGRRKLIAWLRKYQVGKAVMEASGGYEREWRNVLHHAGIEVRIVDPRRVRNFALSAGRLAKNDPIDAEMIAWFAETFSQAPGQIPDAAREELAGLAKARKALVDVKIRLLAQNEHAAPEPARKAHARVVKSLAAEIAKLEAAISAKVKATPGFAELAEIIESVPGLAQATSAILIAGMPELGQVSDEVAAALVGLAPYDDDSGKRRGERHIKGGRRWVRNALYMPCLGAATQNNPVLKAFYQRLIAKGKEPKVALVACMRKLIIILNTMLARRQKWNPGRHAVA

SEQ ID NO: 221156 - protein, 313 aa, unidentified
MNQPKSNVFVGVDVSKERLDVAVRPSGEHKSFTNDEAGIAQMTDCLGRLSPEMILFEATGGWQMNAVNALAARRLPVVVINPRQVRDFAKATGQLAKTDAIDAGILAHFAEAVRPEIRELKPLEARKLEALNTRRRQIVEMLTAERNRLTTAPEWTRPDIEDLIAFLKKRLATINRDINKLIRQSPLWREKDKILKSFPGVGPVTASTMLSDLPELGSLNPKAIAALVGVAPLNCDSGKHQGKRKIWGGRACVRSLLFMCAKTAVRCNPVIRGFYERLLGAGKLRKVALTACMHKILIILNAMIRDQVCWKTA

SEQ ID NO: 221157 - protein, 365 aa, unidentified
MKKISTVQAHGKNIFKGQLTIGVDLGDRFSAYCVLDESGEIVLEHKVATTPEALKQVFGSMPRCRIAMETGTHSPWVSRLLTALGHEVIVAHAQKVRLITKSRRKDDRLDARTLARLARIDPELLSPVKHRSAQAQLHLTEIRARAVLVGARTALVNAARGLVKSYGERLRKCGTEQFRRETTSGLSTGLREALEPLLREVESLNERIQEYDRRIEKMSKVTYPETALLKQIKGVGNLIATTYVLTLEDPHRFRKSRDAGCFVGLQPGRRNSGESEPQMRISKEGDEYLRTLLVQGAHYILGPFGEDSDLRRWGRKLSARGGKIAKKRAVVAVARKLAVLLHRLWVSGEVYEPLHNNQKEMNAAA

SEQ ID NO: 221158 - protein, 344 aa, unidentified
MDHFAGLDVSVKETSVCIVDDTGRIVREVKVASEPEALLVVLTNPTYHFKRIGLEAGPLSQWLFSALAEAGLPVICVETRHMRAVLKAQINKTDRNDARGMAQMMRVGLYRPVHVKTLRSQKLRMLLTHRQLLLSKAIALENDLRGTLRNFGLKVGMVGKVKFEARIRELVESLPDLAVLVEPMLIVRRVLREQIVILHRGLLAIVRDDEVCQRLMTTPGVGPVVSLTYRATVDIPARFRKSKSVGAVFGLTCAKHQSGEVDWDGRISRCGDEMMRTMLYEAAQAMMRSKKWSWLKAWAMQIARRRGMKKAIVALARRLAVIMHRIWVDGTEFRWKREQAAVAA

SEQ ID NO: 221159 - protein, 407 aa, unidentified
MLFIGDDWAEDHHDVEVQDEQGRVLRRARLPEGMAGITEFGELVGRFLSEDGQAADVLVCTETDRGPWVNALIAAGYRVFSVDPKQAHRHREILSSSGAKSDKGDAHGLADMVRTRGHQLREAGGDSEIAEAVKVVARAHQTMIWERTRHMLRLRAALREYFPAILAVCDMVDLSLTSRPVLVLLGKAPTPELAAKLTARQILPMLKGYRNKDAKAAQIQQILRGEHLGQPPVVTRAYAASVRSSVAVLMVIVEEITHLETEVKAHFGQHPDAEIILSQPGLGPILGARVLAEFGDAPGRYRSSKDRKNYAGTSPITRQSGKMRIVAARYIHNNRLVDALQGQASCAILHDPDVRGYYDQLRARGTKHNAALRQVANRLVGVLHGCLNTRTRYDRNTAWAHRHTAAA

SEQ ID NO: 221160 - protein, 324 aa, unidentified
MHTLGIDIAKEKFDVSLLGGRQAVAGQFDNDTAGFERLQRWLQKRQVAQVHACMEATGAWWEEMALFLHEAGYQVSVVNPKLIKRHAESIMQRNKTDRQDAATIADYCLRQTPELWSPPPEANRRLRALVRHLQSLKEDRTRETNRLKAHVSEPAVRELIEQHLRFLDQQIATLQQEITDHIDQHPNLKEDKRLLTSIPDIGDLTAALFLAEIPDVSRFQQAGQLAAFAGLTPAQRQSGSSIRKPARLVKWGNRHLRCGFYMPALSAHRFNPLIAALRERLLRRGKSKMTVVVACMRKLLHLAYGVLKTRQPFDPYHTVNVQTT

SEQ ID NO: 221161 - protein, 344 aa, unidentified
MEKTTVVGVDLAKTVFEIAVSETPGQVSRKQRLPRSKFISFFTELPPAIVVMEACGSAHFWGRTFEALGHTVVLLPPHLVKPYITRNKTDRADAKGILEAYRNDQIHRVPIKTMAQQTLGAVHRLRSRWIKARTAQVNTARGLLREFGFNIPMGIEHVVPQVRLLIEDADTKVPDPLRELLAAVCNQIELSGQQIALAERQLEVLAEQTPLVERLRTIPGIGLISGTALSAFVGGVDRFPTGRHFACYLGLTPSERSSGTKRRLGSISKLGDIYLRTLLIHGARSVICHAKGAKSNDRLRSWAVQLVGRTRYNKAVAALANKLARIVWAVWRNGRTYESLQPAA

SEQ ID NO: 221162 - protein, 409 aa, unidentified
MRYYLGVDWADRTHAVWGMDEDGTKIAARSVSHTAEGFSEWGRELDEWRAQAIELWAAIERPDGRVVDFLLDHGVVVYPVNPKALDRARDRFRQSGAKSDPFDARVLADFLRTDHAHLRALQPSSEAAQELKLLAEDCQRHIRQQTRLVNQLTATLKAYYPRALEVAELTAVLAREFLQAYPTPEAVTALTERRWQRWARAHRLSEARTRELWAVLQRPQLPVPAHVVRAKVRLMQSLVAQLLPVMAAVAQYRKAIDDFFASMPAAQWMRTLPIGKHGITAPTLWARLGDAPGRWESFRHLQAQAGAVPVTKRSGKQRVVQFRFACDKALRYVVDQVAFLSLLSSEWARAYYDQQRARGHAHRQALRALGAKWLKIIFVMWQRQVPYDEQHHLAMMTRQQLRQHQKEIA

SEQ ID NO: 221163 - protein, 370 aa, unidentified
MKKNSKNSKEKSRQKALQAKSRKMKLTVGIDLGDEWSHCCFLGEEGEIVDECRVKTTREAMKSRFEELKPAVIAIEVGTHSRWVSQNLSEYGHELIVANARELRAITGSDRKSDRVDAEKLARYARVDRRILRPIKHRGEEAQEDLVVIRARAVLVKTRTQIVNSVRGIVKSFGYRMPKCSTERFVKLKNEVPEKLRERLAPLMEVVEQVQKQIEEYDQRVEKLAKEKYPETTVLRQIWGVGEITSVSYVLTIEDKNRFEKSRDVGPYLGLRPRRSQSSESDPELRITKAGDCFLRSLLVECAQRILSKKGPDTALKQFGLRIEARGKKKAKKRAIVAVARKLAVLLHKLWVTGEVYEPFPGGVMEREAA

SEQ ID NO: 221164 - protein, 355 aa, unidentified
MDSKKYIGMDVHKESISIAVMNGAGKIVMECVIETKASMILQFIDGLRGDLQVTFEEGTSAAWLYDLLKPHVTNLLVCDPRKNKSMREGNQNDKIDARRLAELLRLNHLTPVYHGEHGLRTLKELVRSYLTITKDLSRVMTRVKAIYRSWAIPCTGKQVYGRCHRGEWLAKISELGVRRRAEFYYQQLDALRVLRQEARRELLAESKKHESWKRLCEIPSIGPIRAAVLLGILQTPHRFRTKRPLWNYGGLAIEMHSSADHRSVDGQLQRSRKNVLVRGLNRNCNHDLKNLFKGAAAVASSKPGPFQEFYTALVAKGMRPEMARLTLARKIATIALIVWKRGVNFDAQHLKPQTA

SEQ ID NO: 221165 - protein, 343 aa, unidentified
MYYIGLDVHKKTISYCVKDAAGRVCQEGKIGSTRNELDAWIKTLPQPRMIAMEATIFTGWIYDYLLPHAEKVKVAHPLMLRAIAAAKRKNDTIDARKIADCLRCDLLPECHMASTEIRDRRRTLRYRNLVLRQAVQMKNRVSGLLMETGVSYNKLRLHRMGYFAELMATNEEVSQSIRPLLRLCREHIDRSIKMNTVLLTSLERDPLLAERLRRLRTVPGVGPITALTWALEVGDTSRFHNIKQAISYCGLCSAEKSSADKVMRTPISKQRNKHIQQVLVEAARLAPRYSDELALLYERERQRGNGNRATLAVARKMVAWMLAVEKRNKDFVPAGDFKRTAAA

SEQ ID NO: 221166 - protein, 335 aa, unidentified
MYEQYDHYIAVDWAQTNMAIARMTKSSKKMHLTEVPASVNELKVYLKSLKGRKILTIEESSTSQWLYIELKDHVDELIICDPYRNFLLSEGTKSDKIDAIKLVHLLRSGLLKPVFHSTDDLIYLRKIVSAYDDLVKMGVRLKNQRAALFISSGLDRTKDSLTRAEDKFVVDGLDQSIQVYEDEKKRFEKEFDQQLRKHKSLRDLKSLPGIGPLHALKIAAMVVEAKRFPTAGHFLSYCGLIKLDRSTGGKSFAKKQPRCCRLLKNVFKTAALSATADHVNNPMRDLYLFLQNEKRYPEFKARHAVARRIAILAYGILKTGEKYQPERRSIQARAA

SEQ ID NO: 221167 - protein, 381 aa, unidentified
MTTPAARTEYGTTPAGTLWMAFELSEKNWQRGFTTGPAQKPRERTVTALDQERVLDEITQAKRRLGLPEMAPVVSCYEAGREGFWLHRFLEAHGITNHVVDSSAIEVSRRQRRAKSDGLDVRKLLSMLMRYEQGERQVWQVVHVPSVEAADQRHLHRDLETLKRERASTTARIHGLLSSQGLRVTSLTKLPEQLDALRLWDGSPLPSGLRQRVLRVYAHHIFLSEQIAEVEAERRALLQTSTDASIDKIRQLMMLKGIGINGSWLLVMEFFGWRAFKNRREVGGLAGFTPTPYQSGESAREQGISKSGNRHVRWMTTELAWSWLRYQPDSALSVWFRERFGSGGKRLRWIGIVAVARKLLIALWRFLETGGLPEGAVLKEG

SEQ ID NO: 221168 - protein, 345 aa, unidentified
MQSMYYIGLDVHKKKISYCVKDGSGNVHAEGAIPATRSDLDSWMKTLPQPWTAAMEATIFTGWIYDHLKPHAAALKVAHPLMLRAIAAAKKKNDRIDANKIADCLRCDFLPECYMASTKIRERRRTLRYRNLLVHQAVQLKNKISGLLMEAGVSYNKQKLHKVGYFKELLATNPDINEGLRPLLRLCRETLVRLQKTESALVRSLQRDSLLAERLERLMTIPAVGPITALTWVLEVDDVKRFSSIKKAISYCGLCGAEKSSSDLVKRTPISKQRNKHLQSVLVEAAKMAPRLSPELALIYDREKQKGNANRATLAVARKLVAYLVAIDRSQRDFFVVEKENRAAA

SEQ ID NO: 221169 - protein, 365 aa, unidentified
MRKKNRMTICIGIDVHKKKCVATLKRDSQEIVEQTSFYNNGHGIKEFIEHIKLYGESAIAVCESTGNYWIRLHDTLEDNGIDTVLANPIKTKIIAQAKLKDDKIDSNVLADLLRADLVYRSFVPDKEHRELRQIVRTRVDLVATKTSIKNKVHAILAKYDYSCPTNDIFSRKAIEWLKTVELSWIDRMAVDAYLETMFGIEKQIKIFTAKIASISKEDERVRLLMTIPGIDYITALTIVSEIVDIRRFSTPWKLVGYAGLAPSKRESGTTHRIGDSRRITRQGSRWIRFTIVESATTAIIYDNRISKFYRRIASRRGPQKAKVAAAKEMLVIIWHMLTKNEPYRTMNNDLVQRKYKRMERESVLA

SEQ ID NO: 221170 - protein, 459 aa, unidentified
MGMTLGIDLACRAAHVASLAGPDGALVWRGRSFFTRPADLEKLWRDVDCVPAELTVVMEPTRNAWIPVAAWFRRRGAKVVLVPTTQSADLRAYYAKHTKNDRLDSAILARLPLLHPEGLREHVGDGPADPLRRVVKQRSSIAKRRSAIFHRLDAQLELLGPAWYDALGTDYGKATLQFLAHYADPATVIRLGQARLARFLQRYSHGHWREGKAAELIAAAKESLQLWDTDGMDFAELAADIAVEAEQAMMLHAQLADLDERIANLYAEADPAGIIRSAPGVGPVIAGIIAGRLGDPHRFTSLAAVRSYSGLVPKVNQSGKAEHVGGLTKAGDPLLREAMWMAAEQARKLDPQLAAKYKRLMDSERHHGTAVCHIATTLLTRIATSWRNNEPYQIRDLNGTPLTQDEGKRIVQEQYQVNKNPKKQYKRATNHKAGREPQESPSAPTSRPATTKPTSPRAA

SEQ ID NO: 221171 - protein, 411 aa, unidentified
MNPVVGLDISKGESQVQAFLDKGKPFRKSFKVTHTLQGLALLVEFLEVVQKETGLKPPVILEATGHYQTAVVQYLEERGYLLIIINPLISYKAKSSSLRKVKTDAVDAYHLCELFYKEELEPYKKRGVQLLNLRNLTRQHENITGVMIQTKLQFQAILDQVFPEYRGVFGDLYSVVSLLTLKEFPSSEDILEASDEALSNRIKELCKSRSIRWANEKALQLKEAAARNPFEKTVYQSHILSLGMYIDIILQYKEHLSTLESEIDALAKEVEEYNIIKSIPGIGEKIAATIISEIGEIDRFTDPKKLVAFAGVDPSVFESGKFTATKNRITKRGSSRLRHALYMAVRCAIRDCRKSKTSDEIIPRNKKLREFYDKKREEGKPFKVAVIACVNKLLHWIFALLRNKTTFQDIE

SEQ ID NO: 221172 - protein, 450 aa, unidentified
MEETVSMEIVNPHAAGIDIGSRSHWVAVGQSEPDVREFGVFNQDLFALADWLDERKIMTVAMESTGTYWQNLYAVLVARGFHVILCNGKFTKNIKGKKSDVMDCQWIQKLHTLGLLSGSFLPDGQTEQLRTYCRHRSNLLHAAASTSKKMQKYLRLLNFRLDVVVKDICGLTGLLIIRAICQGEKDPQKLASLRHGNCRRSEEEIASALQSNGRKDYLFALGQELETYDHLQLKIGQCDKEIAKMLEEIIGSDDNKREHHIDPKPHKRINKNTPREIDLNLKSYQMFEGTDLLAIEGMSYSTVLALMSEVGIEGIRKFPTAKHFASWLRLAPNNKVSGGKVLSSKVPKGSNRLKIALRNDANAIGNLKESTPLRDFFHRVNFRKGRVSAISATARKLAVIIWNMVVKVPYINPEGYLFLDQKRKLGLVKRIKKQIDKFGLTNEDIGFVNT

SEQ ID NO: 221173 - protein, 273 aa, unidentified
MKQYVGLDVSMEETKVCVLDGAGVVVFEGSVASRPAALAKLLNAKAPHAERIALETGSLSSWLWHELKAAGFPVVCLDARHAKAALSMRINKTDRNDARGLAELIRMGWYREAKVKSMESRQIRALLAARSKLVDLRRDLENQMRGLLKSLGLIIGKSGVRVLPNRIAALLRDAPHLRSLIDPLMTAHSTLAEQIATYDLQVRELAKTDQTIGRLMTVPGVGPVTALAFASTVDDPRRFARATDVGAYLGLMPRRYQSGELDRNGRISKRGDR

SEQ ID NO: 221174 - protein, 368 aa, unidentified
MSTKRRCRMEGSVQERGDTPVFLGVDTHSEAHVAVALDGAGRRLGELAVTNDRVGYARLWDWALGFGILIAAGVEGTGSYGAGLSRFLRARGASVLEVNRTSRQHRRRHGKYDAGDAEAAARQVLSGTASGEPKGADGAAESLRALRVARRSAVKAKTQAANQLHALLSTAPDELREGLRGLSAKHLAAKASRFRCGAGPVDAAAATKLAMRSVARRYQALAEEIAGLDAHIEVLVEEAAPELVALDGVGSDSAAALLIAAGDNPERLKSEAAFANLCGTAPVPASSGKVVRDRLNPGGNRDANRALHVVALNRLRRDPRTQQYVARRTAEGKTKKEAMRCLKRYIARETYRAVLLDAGARIPPGCRR

SEQ ID NO: 221175 - protein, 340 aa, unidentified
MKLYAGIDLHSNNSYVVLSNEEDKVMYQKRLPNEAGVILSELAPYQDQIEGIVVESTYNWYWLVDELKEVNYKVHLANTASIQAYKGLKHTNDKTDAIWLAKLLRLKLLSEGYVYPKEKRGLRELLRRRLVLVRQQTMSVLGIQAMAVRYDNIKINGNKIKELKSAEKKILDCIKDCDVRIAAEAQLKVLHCIVEQIEVLEKTILKKIKKDANFKLLNSIPGIGNILAMTILLETGDVNRFVSPGNYSSYCRCVESKRISNEKKKGENNRKNGNAYLGWAFIEAANYAIRYYEPIKKFYQRKLQKTKRVVALKSIANKLSKATFFILRDGAEFDMNKLFN

SEQ ID NO: 221176 - protein, 406 aa, unidentified
MRGPVITVDVSKGSCHYQPFLENGKPLRKPKVLHDTIEGFNQLMETIEMTREKSSEEKVPVVFEATGVYHRCLQKYLDDNGISYYIISPILSAAYRKTNLHSNKTDPLDCAHIAKAYYCEGNLIPFYKQEDIYVKLQKMNRYYETELIHLKKRKVSFRSFLDIIYPRLDKCFGSNASLYDPIPMEVLKKYPHPSLLLKHREETIVKAIEKKVNHDKKFIEKIVHKMCECARHCYSGAEVTDIEVIKLPEMIEELQDQMNTCNTLLNELICEAEKIPYFNCVVSIVGIGRNLAARIIAELGDMTRFPNRRAISAFAGLNPKILQSGDVDGTHLKISKKGNRHLRCLLYLGATCNYRLRKHDPLYEFNQKKRQQANFPLKPKAANTATAHKLLIMIYAMSQSGESYRF

SEQ ID NO: 221177 - protein, 429 aa, unidentified
MEVVYPCCCGLDVHKKSITACVLWAEAKGKSRKEKKRFATCTHDLLQLADWLEQCGVTHVAMESTGVYWKPVWNILAEQFEVLLVNAQHIKAVPGRKTDQKDSEWIADLLQHGLLRGSFVPPRPTRELRDLTRYRVSLAQEINRIANRIQKVLEDANIKLASVATDALGASGRTMLEAMLAGEQDSARLAEMSKGLLRNKISELKLALEGHVTEHHRFLLRQLYDHLLFTESKRKQIEEEIERRMLPFQSEVARLCTIPGVDRVTAWGLLAEIGLDMNQFPSSAHLASWACLCPGSFESAGKRLSGKMRKGNVSLRRCLSQAAWAISMMKNNYLSALYRRIAARRGAKRAVMAVAHALLVIAFHMLKRKESYRELGADHFDRIDVNRIRHSLVRAWSSAGPQRRMKMDLRWRSVCAATWRQRPSYSGAS

SEQ ID NO: 221178 - protein, 402 aa, unidentified
MNAVGIDVSKGKSMVAIMRPFGEIVSTPFEIKHTASDIHSLVELINSVEGESRIVMEHTGRYYEVLAHQLSEANLFVSAINPKLIKDFDNDSLRKVKSDKADAVKIARYALDKWQNLKQYNVMDELRNQLKTMNRQFGFYMKHKTAMKNNLIGILDQTYPGVNTYFDSPARSDGSQKWVDFASTYWHVDCVRKVSLNAFIDHYQNWCKRKKYNFSQSKAEEIYGKAKELVPVLPKDAITKLIIKQAVDQLNSASTTVESLRTLMNETASKLPEYPVVMAMKGVGTSLGSQLMAEIGDVSRFTHKSAITAFAGVDPGVNESGSYEQKSVPTSKRGSSDLRKTLFQVMDVLIKTHPQDDPVYQFLNKKRAQGKPYYVYMTAGANKFLRIYYGRVKEYLSSLPES

SEQ ID NO: 221179 - protein, 344 aa, unidentified
MTNIQHKETVHEAKPNLFAGIDVGAEELILVIRKNGKPFDPQKFANTPADRTRLMKKLVKLPGIIVCLEATGVYHFDLSLALHDAGVLLMVVNPKAAHNFAKVLMKNSKTDAVDANTLAEYAARMDFVAWTRPSNETIALRSFARRIDALTGQKAAAKNHLHALTATSETPKAVIKDAKLAITQLEKRIDRLTAEALILIGKHPELERILALLIGIKGIGNTSAIALMGELLLLPPELSHREWVKFAGLDPRAFDSGKSVHKKTRISKAGNRHIRSALYMPALSAKQHDPHVKAYFQHLVANGKKPLQAVCAIMRKLLHAIHGMLKHNKPFDNTRFYAIPASSE

SEQ ID NO: 221180 - protein, 342 aa, unidentified
MEISTIGLDIAKNVFQVHGIDAAEKVVVRKQVRRGQVLAFFEALPSCLIGMEACATAHYWARELTRLGHRVRLMPAKDVKAYVKRNKNDAADAEAICEAVRRPTMRFVQIKSVEQQGRLMLHRARDLLMRQRTQVINALRAHLAELGIVAAQGREGIKELLKIIANEEDARLPVDAQASLIVLAAELQAMQTMIGSIDKRIMAQHRSSEASRRLESIPGIGVTGAAAITATVPDPKVFRSGRDFAAWIGLVPRQDSTGGKQKLGPISKRGDRYLRRILVVGACAVLRYARQQPQKYPWLTQLLARKPFKVVAVALANKMARIAWALLAKGGTYRAPALAAAV

SEQ ID NO: 221181 - protein, 319 aa, unidentified
MNKSTLFFGIDISKDSFDVYGKALGHKSYPNTRLGFKSFVKELSVNSHCVMEATGCYHHKLAMFLYEKDITRSVINPLIIKRFIQMKLKRVKTDKSDAFMIYKYACEQPLEQWYPEAEYIVKSKELLSLIQTYSRQSTALKNKLHALENRGHDKGVLIRSIKRQLVQLKKERSLLEQELESLIKSNEAKLLSRLITIPGIGKKTAVLMMVSTSNFETFSSYRQVSSFLGLAPNERSSGSSIRGKSRISKTGDGLLRNHLFMCSFTACIHNPQCKALFDRIVAKGKSKKLALIAVCNKLIKQAFAIAKSGLPYDPNYVIN

SEQ ID NO: 221182 - protein, 342 aa, unidentified
MKQYVGLDVSQKETSVCIVDQVGRSVYEGRVKSDPGALTELLRKRAPHAERIGFETGAMASWLWHELRRVDLPVVCIDARHAHAALSVRMNKSDQNDAKGLAELVRVGWYREVKVKSEESQKVRAILVARSRLVSIRRDIENQVRSMIKEYGLLFRRAIGLQFRNRVTELVAEDHQLRAVIDPLLSIHEHVCRQQTKFDEQVRRLAKADETTRRLMTVPGVGVITALTFRHTIDDPSRFRSASKVGAYLGLTPRRNQSGETDLNGRISRWGDRLLRTYLFEAATVLLYRTKKWSSLKAWGMKLAKRIGMKKAKVAIARKIAVILHCIWVDGTSFEWGRPKTV

SEQ ID NO: 221183 - protein, 384 aa, unidentified
MNKHNILFIGLDTHKEFVEVAYIEDQRGAQAVHFGRVSSAKASITKLARQFQSKYPEATLHFVYEAGPCGYWIYRLLTSLGHCCYVIAPSLIPKKPGEKIKTDKRDALKLAKLLKSEDLTAIYVPEPEDEAIRDLSRARETAMKDLKDAKYQLKALQLRNNINYRGTANWSLKHLRWLTELILPHPSQQIVLQEYLQTISERIARLKRLDNELEHHVKKWRYYPVVKAIQALRGVRLLVAAGVIAELGDLTRFDHPRKLMSYVGLVPSEHSSGGKRHVGAITKCGNGRARRLLVEGAHSYRYPAKISTEMQIRQEGLPKEIIDIAWQAQIRLCSRYQKLMYKGKHNNVVVTAIAREMIAYIWAISREVVLTKVNPKLRLSRVPA

SEQ ID NO: 221184 - protein, 347 aa, unidentified
MRFYTGLHRYYCGIDLHARTMYLCILEHETGRILLHRNVRCEPEAFLRAIEPYRDDLVVGVECIFCWYWLADHCTQHDIPFVLGHALYMKAIHGGKAKNDRIDAHKIATLLRGGAFPVAYVYPRGMRATRDLLRRRLFFVRRRSELFSHIRIVFHQLNLPAPSGQLHYAGNRAGLAQAIPDPVVRTNVEADLTMAARLDEVIRSLERTIRHQAKIDDPDTYKRLQTIPGVGRVLALTLLYELHDIARFPRVQDFLSYARLVKSQKSSAGKVMGTSGAKIGNAHLKWAYSEAAVLFLQKNPRGQRLIHRLRSKHGKGKALSVLAAHLGRASYYMLRRNTVFDMDRFMN

SEQ ID NO: 221185 - protein, 403 aa, unidentified
MNSVGIDISKGRSTIAVMRPFGEVVISPFEVRHTGSELSKLAKQLKSLDGETRVVMEATGNYHASVAKLLHDAGLYVSVVNAKLVHDYGNNELRRVKTDRKDAVKLANYGLDRWLTLPRYIPEEDTRLLLKNCYRQYRQYSKVQTVLKNNLISLLDTVFPNVNRLFSSPIRGDGSEKWVDFVAEFWHCRCVSEKSQKAFTNKYQRWCRKHGYNFSEAKAHTIHAETCGHIDVIPKSETTKLLVEQAVSQLRATSTALAALKHEMQSLASQLPEYPVVMDLFGVGPTLGPQLIAEIGDVRRFYSKKALVAYAGLDAPPNDSGDVTGRHKSMSKIGASSLRRTLFLVMSVYLQTAPLDEPVYQFMDRKRAEGKPYRVYMMASANKFLRIYYATVKAYLESLEHTA

SEQ ID NO: 221186 - protein, 359 aa, unidentified
MNPSTLSSAEVAVTLGVDTHKDVHVAVALDELGGYLGTLSVPATKDGARRLMSWATGLGAFERAGVEGTGCYGAGLARFLRAEGIRVFEVVRPKRRDLRRAGKSDPIDAEAAARAVLAGTVVGEPKGTDGEVEMIRVLRMARRSALKARTQAANQLKALLVTAPEELREELRGLSTIKLVCRASRFRTGESLTGVMVATKFALRSVARRYRHLCEEISELDEQLGRLVAEAAPALVAVEGISTDTAASLLIAAGDNPERLTSESAFAHLCGVAPIPASSGKIVRHRLNRQGNRDANRALYVVALGRMSRDERTRTYVARRTAEGKSKKEIIRCLKRYIAREVYRILVSPLHTSTPISVP

SEQ ID NO: 221187 - protein, 345 aa, unidentified
MEKTKYFIGLDISADDFSASCITTPDNIIFSAQKFQNNLDGFSEFFAFLLSREIKPTETIVCMESTGVYCEGIAYFLYSKGFNVSIEAPHKVKQKIKDTPRNNDFIDSLAIAEYSYRYLDKLPIWKPQVEILQQLKTLLSTREHLVTQKTASENVLKTLKRKYIQTPLALEIYEENIKKFNEQIKQIDKEIKALIEKDDNFKTKIDLAMSVPGIGLLLATNLLVLTDGFTKHLNYKEIASYVGICPYEQISGRTLHKQPRSKRYGPSRLRKLLYLAALSVATYNLNFRKYYLRKVEEGKSKRLVLNNIENKLLKIIFAVIKSGTKYIENYRSVNPIYLKKCLTMS

SEQ ID NO: 221188 - protein, 347 aa, unidentified
MEHVGIDLGMNKSQVCILTEGGELVERSIQTTSERFAAVLGGRPRARVLIEASTESEWVARSLESLGHEVIVADPNFAPMYAQRSRKVKTDRRDARALAEASRLGAYRPAHRMADDRRHMRATLAVREVLVRTRSRWVVLIRSLLRREGLRIRSGKAETFAQRAQSVDLPEHLKCEIAPLLVLLTPLNEQIEVLDQQLVGMVARDAVTTRLTTAPGVGPVTAVCFVSTLDEVERFRGSHQVESYLGLVPREWSSSEMQRKGRITKAGNGRTRWLLIEAAWCILRRKRKPETAALRDWAEKIALRRGRTIAAVALARRLTGILYAMWRDGTDYDPATLTVEGRQKRAA

SEQ ID NO: 221189 - protein, 403 aa, unidentified
MNAVGIDVSKGKSMVTILRPFGEIVSSPFEIKHTSSDIHSLIKLIHSIEGESRVVMEHTGRYYEALAHQLSAADLFVSAVNPKLVKDFNNDSLRKIKSDKADSVKIARYALDKWQSLEPYSITDELRAQLKVMNRQFNFYVKQKTAMKNNLIGLIDQTYPNANTYFNSPTRSDGSQKWVDFVSTYWHVDCIRKMSLNAFVEHYQNWCKRKKYAFNKSKAEEIYTKTKELVPVFPKNEITKHIIRQAVDQLNSTSVTVETIRTLMNETASKLPEYSIVMQFKGIGPSLGPQLMAEIGDVTRFTHKGALTAFAGVDPGVNESGSYAQKSVPTSKRGSSNLRKTLFQVMDVLIKTMPQDDPVYQFMDRKRTQGKPYYVYMTAGANKFLRIYYGRVKEYLSVLPDPS

SEQ ID NO: 221190 - protein, 422 aa, unidentified
MLAESVDEEQVIARVAALDIGKAELVCCVRVPGADGAKRRLQEVSTHSTMTRSLGDLANHLVDLRVERVVMEATSDYWKPVFYLLEAHGLQPWLVNARDVRHLSGRPKTDVLDAVWLCKVAERQMLRPSFVPPRPIRQLRDLTRYRIDLVGVRTAEKNRVEKLLEDACIKLSVVASDIFGVSGRQMMAALIAGERDPKVLAEMARTRMRAKIPQLVEAFTGHFDDHHRFLLAQMLARIDGIDADIAVLDAQIEAHLAPFDRAVERLDEIPGIGPVAAAVIIAEIGVDMTRFPTAGHLCSWAKFSPGIKSSAGKNKGNGSTGHGDRYLARVLGEAAPIAGRTDTFLGERYRRIARRRGKKKAIVAVGRSMLVIIWHLLSDPETRFNDLGADHFARHVNTETKKRNHVRQLEALGYRVTLESAA

SEQ ID NO: 221191 - protein, 344 aa, unidentified
MEKHTVAAVDVAKVVFDVALSDEPGRVRLTRRLPRGGFLLFFGQLPAATVVMEACGSAHYWARRIQELGHQVVLLPPHQVRPYVTRNKTDRTDAKGILEAYRNADIRPVPVKSVPQQVLVTLHRFRSGWLGARTAHLNTLRGLLRELGIVIPVGAEKVLPQVRALIADAGSDIPDALRPVLAAACEEIEALTERIKMAQRQIEAIAEQTPVVDLLWSIPGIGLLIATALVAFVGDIHRFPSGRHFASYLGLTPREYSSGMKRRLGRISKRGDAYIRMLLIHGARSILCHAKKAKEHDRLRTWALELERRVGHNKAAVALANKLARIAWATWKNGRHFESLPKAA

SEQ ID NO: 221192 - protein, 342 aa, unidentified
MKLTTIGIDLAKNVLQVHGADEKGKTVLKKQLKRAQVLAFFANLTPCKIGMEACGSAHYWARKLQALGHRVQLIAPQYVKPFVKRNKNDAADAEAICEAVSRRNMPAVPIKTASQQAILSVHRARQGFVKARTAQANQIRGLLAEYGIAIPQGIGHIAERVPALIEDGENDLPGSFRLLIQRLLDHLKELDRQVGELELEIQRWHRDNAASQKLAKIPGIGPMTASAVVASIGDARNFENGRQLAAWLGIVPRQHSTGGKSTLLGISKRGDTYLRTLLIHGARAVIRVAEHKPGADPWVRSLLARRNKNVAAVALANKNARTIWALLAHDREYEAHYVRAVA

SEQ ID NO: 221193 - protein, 319 aa, unidentified
MSKHSMNCAGIDTGKYKLDVALNGRAARLQVENAAKGHRALSGWLRRHRVKRVGIEASGGYEKEVVRELRRQGFVVVVFQPAQVRAYARFRLQLAKNDKIDATLIAECTAAIKKIHDAPDPRLEPFAEHLTMIEQIGEDVARAKTRLESCRDTHIRRYWREEIARHEKRERLELKQLVAAIRQHPDLAERLGLIVSIDGIGLPTAVSILIRLPEIGSLTREQAAALVGLAPYDDDSGQHFGVRHIKGGRERLRTALYRAALPASFRWNRHLIALYGRLIAKGKLHKVALIACARKLLIYANTVVARGTPWVKRSAGAPA

SEQ ID NO: 221194 - protein, 355 aa, unidentified
MWAGIDTHKDTLAVGVIDEVGRALAVREVANTTAGFVSLERIFAEHQVVRVGIEGSGNYGRAVAAHLVIAGGVEVVEVPPALTFRERGGAPGAGKTDPGDAVAIARITARELRLPPVRLTIGAAADLRALLDYRQQLIDERIRIANRVHVELGGLRPGYQSQLPSLIGRNRVATARRLLRGDTNTRAELTRRRLDRLSRLDVEIAALKTRIAVLVTASGTRLSSLFGVGPLVAARIMAEVVDVRRYRSPDAFAAANGTAPIPASSGRTVRHRLNRGGNRQLNKSLQIIAVTQLRGDTEGRRYYDRKRAAGKTRREAQRCLKRRLSDVVFHLLREDLHALEAQPTQTGQPSSSAAA

SEQ ID NO: 221195 - protein, 397 aa, unidentified
MSNFKVFVGIDISKESFSACAIHSPEEIIFEEKFPMDSHGFKAFIRKLSAFPKESILIGKESSGCYYVNLFVYLSQKNFNCVVLNPLIVKGVQSMEIRKTKTDRSDARRIAFALYTAQHSLPQKSFLSHEFRELARERERLSQQIARLKNDIEKALVVLFPELERRVNIYTEGILRLLEKYPSAWALKAAKTSDIERLLCFKRGRALSVTAQQIKQWAQDSIAQFFPVREILLQSKIKELFFLEEQLEVITEQLKRSCEEAALCQDIEILKSIKGIGDTTAMHFIAEIENINRFSSPKKLIAYCGVDPTVYESGKFKGSSRLSKRGNRHLRRVLWLMAVSVVMYNSYFREYFNRRRQQGLPYKKAILAVAHKLLRVIYAMLKKKTTFKVSHLPSPCM

SEQ ID NO: 221196 - protein, 412 aa, unidentified
MRIIGLDIHRAFAEAVALEDGRLKRLGRVSMRRDLLEKFAAALSKNDVVVVEATGNAAAVAAVIGPHVKRVVIANPKQVRIIAHAKIKTDTIDAGVLAQLYASGFLPEVWIADEATQALRRQVTRRNQIVRQRSRLKNIIQSILHAHLIPACPHQDLCGRTGRTWLAAQKVPEDERLAIDRHLREFDRLGEDLKVVERDLARSTLADQSIKQLMTLPGIHMVVALALKAAVGDIKRFARPQKLASYLGLNPSVRQSGPGPAYHGRITKQGCGHARGMLVEAAWAAARTPGPLRAFFLRVRAKRGQHVAAVATARKLAILVWHLLTKNESYLLARPALHARKLRDLELKAGHKPARGQKGAAHAYNVRSCREEERRFVEQAEAAYTRFVAGWNPRGPKPRTKARTGAANEERR

SEQ ID NO: 221197 - protein, 377 aa, unidentified
MSKIRFVGLDVHADTIAVAVAEAGGEVRSLGIIPNRLESIRKMIGKLGPVGDLKCCYEAGPTGYVLYWQLTQLGVACEVIAPSLIPTKAGDRVKTDRRDAEKLARCYRAGELTPVWVPDAAHEALRDLVRAREAAKKDQLRHRHRLGKFLLRHGKRPQDAGKAWTQKYLNWIRIHVHFDQPALEATLQYYREEVDHIAERIATLEQAIDEAVRQAPAEIRAVIEALQALRGVAQTTAATVVSELGSLSRFPNPSQLMGYSGLVSSEYTSGNRVQRGRITKSGNAHLRRVLLEAAWTYQHRPNVQGRVLRRQKSLALSDEAKRIAWKAQQRLHKRFSALTARGKETNVAATAIARELLGFMWAIAGHAEAQHKPAKAA

SEQ ID NO: 221198 - protein, 345 aa, unidentified
MKITTVGIDLAKNLFQVHAVDERGNAVLRKQLRRLQVAVFFGNLPPCVIGMEACASAHHWGRALQRFGHTVRLMAPQFVKPYVKTNKNDVADAEAICEAVGRANMRFVPIKSIEQQAILSVHRVRQGFVKARTAQANQIRGLLGEFGLVIPQGIINVAKRVPEILEDASNELPVPFRHLIDRLTEHLKELDRQVKEFEKEIIVWHRSSDLSRKLEKIPGIGPLAASALVASIADARSFKNGRQVSAWLGLVPRQCSSGGKATLLGMSKRGDAYLRTLLIHGARSAILAAQHKVDNTNGWLANLLNRRHPNIAAVALANKNVRTVWALLAHGREFKADYVPVRMAA

SEQ ID NO: 221199 - protein, 452 aa, unidentified
MAKKGMRRCDTLPVLHPDAAGIDVGASELFVAVSADRDPHPVRSFPTFTRDLHALADWLEQCGIHSVAMESTSVYWIPIYQILEARGLEVYLVNAQHVKNVPGRKTDVSDCQWLQYLHSVGLLRASFRPPGFICAIRSLWRHRSSLIQMAAEHVLHMQKALDQMNLQIHRVLNDITGVSGLKILDAILAGERDPLTLARLCHGGVKNSEDTIAKSLEGDYRPEHLFALRQSLAAYRYYQNLVLEVDQEIKLQLGELQTAATAERTTPARTKASAYQRRRYEPKTFDLRGELYRVFGVDLTNVPGISAITAQTILCEIGTDVSRFRNASAFASWLGLCPEKKVSGGKVLFTKSRRVRSRVATALRMGAQSLHHAKDYLGEFFRRITRKLGRPQAITATAHKLARIVYHLLGTKEAYNESVFHKSEADTIRRAEYRLRRQAAQLGFQVIPAENG

SEQ ID NO: 221200 - protein, 363 aa, unidentified
MNYVGVDVHKKYSVLCALDERGRKLREARVEGNTGCGFAQFFRSLEGPSKAVVEACWNWGLIHDELEELDQVEEVVLAHPAKTRLIADAQIKTDRLDAHALGTLLRGNLVARAHVPRRQTRSRKNLLRQRLYWARLRTMLRIRIHALLDRQRGLELPQCSDIFGQRGLFFLRQLQLPEPDGMLLREQLALHDLIAQQMKAQEKRIAAEFKSEVIHRQLLSMPGIGTTLAAVIGCEIDQIERFPTSEKLCAYASVVPTTHASGGKVAHGRLLPFCNKWLRWALLEASWVAIGCSPYFGALYQQHRARGKKANTAITIVARRMCRIIWQLLSENRDFEKRPFSHRIGPFPGCSAVRLTARSAHGS

SEQ ID NO: 221201 - protein, 334 aa, unidentified
MNMNAIGIDVSKRKSTVAILRPGGKVVAKPFDVPHLSTDFQSLKVLIKGLDGETRIVMECTGRYYEPVARELSQAGFFVSAVNPQIIHDFQGQDNPLRKVKTDKADSLKIARYTLDSWANLKQYNLMDELRSQLKTMNRQFDFYMKHKTAMKNNLIALIDQTYPGANAYFDSPAREDGSQKWVDFLDTYWHVDCVRKMSLNAFINHYQKWCSRKKYNFSKSKAEEIYGKAKEFIPVLPKDNFTKRIVKQAIDQLNAASQTVEELRSLMNETASRLPEYPVVMAMKGVGPSLGPQLMAEIGDVTRFTHKGAITAFAGVDPGVNDSGDYSQKSVHT

SEQ ID NO: 221202 - protein, 413 aa, unidentified
MRNLLEVCCGLDVHKEILVACMLKGGIEEEPEPIIKEFSTLLSGLDEFKSWLIEHNCHDVAMESTGVYWFPIYNVLESIFYEDGQMNIIVANPHHMKNVPGKKTDIKDSQWIATLLRAGLLAPSYIPPKEIRELRDWTRYRDVLIKELVGHKNRIEKHLQQCGFKLSSILSDIFGMSGYELIGKLCEKGKLTALDVKGCLHGTLRAKSDEVQQAVAGRLSAHDRLFLTNLVKVMEHCRKEIEEAEWHITVYAQKYEPALQLLETIPALQRRASTIIVSELGVDFSMFPTAGHLCKWAGLCPGDNESAKKKKTMRITKGNPRIKSVMVQCAWAATRCKNFFLRDWFYRLRARRGTKKALIAVARKLLAMVWHILTTGEIYEETRYEKTKKNQEDRRKQRLKTEAAKLGFKLVPA

SEQ ID NO: 221203 - protein, 413 aa, unidentified
MEDPFLFFVGIDWATENHQVCVVDRDGKIIAERPVAHSGPGLQQFLTWLQQQIPVPPERVAVAIEMPAGAIIETLVEHNYRAFSLNPKQLDRFRDRHTVAGAKDDSRDAFVLADSLRTDQHCFHPIYLDDPQIIRIRTLSRFEDSLVQDWSRLTSQLREQLHRYFPQLLQLSPAADDVWIWDLLEAAPLPSLVGQLKRQQVQKILSRRRIRRLSAEEVLQQLRIPPLPVAPGTAEAASEACLLLITRLRLLLQQKKEVERRIEEQLSRFCAEEERVEHRDVQLILSIPGIGRVITATMLAEASQPLAQRDYHALRAYCGAAPVTHQSGKRKRQVIMRYSCNQRLRNAFYHWARISVQQDGRSRAHYHRLRSKGHSHGRALRGVLDRLLVMLISMLRHQTKFDPALRQSIPVAV

SEQ ID NO: 221204 - protein, 342 aa, unidentified
MQIRSVGIDLGKTTFHLVALGDNGKVLLKKKFTQKQLITFTANLQTSLIGMEACSGAHFLGRALRAQGHDVKLIPAQFVKPFVKSNKNDFIDAEAIAEAVERHNMRFVPIKTDDQLDLQALHRVRDRLIARRTSVINQIRAFLLERGLVFAKSPIRLKQALPELLENANEDLTSRMRNLVAMLWNEWKELELQIAEMNDEVERIASTDPACVRLRQIPGIGPLVATAIVASIGNGAAFQKGREFAAWMGLVPKQHSTGGKAKLYGISKRGNSYLRKILVHGARAIVLRSKRERIAMGSWMTALENRAPKNVLIIATANKLARIAWAVLSTGQDYRPFPNAAA

SEQ ID NO: 221205 - protein, 354 aa, unidentified
MYFVGLDLGDKYSYIAILDKEGELIEETRLPTTKKSFHQRFSMLPPCRVAMEVGTHSRWSSHLLTELGHDVLVANARKLKAIYHNPRKDDRADAETLARLARLDPELLSPIHHRSPQAQADLAVLRSRDAIVRCRTLLINHVRDIVKASGSRLPSCTADSFAHKVAPDIPEPLLPALAPIIDTIASLTQQIKSYDRKNEELCSESYPETMLLREISGVGPLTSLAFILTLENPDRFHRSRQVGPAIGLVPRRDQSGDQDPQLRITKTGDPYLRRLLVSSAQYILGPFGPDCDLRRWGLKLAERGGKNAKKRAVVGVARKLAVLLHHLWKTGELYDPFYLARKHDQAPEAVPVAA

SEQ ID NO: 221206 - protein, 473 aa, unidentified
MSKGNGMTRGDRRRNARREQLRGMLPRDGAVVGIDLADEKQALAVIDHDVRVLARKTVRVKAFRLGEALDWAVGQARAKGFTSVTVACEPTGPRWLQVQRLCAERGLRLVCVQPLVSHIARQQQDYTAHKTDEADCVMIARLAVELHCYIPEELDEVWAGLRHLGRRRTALITSETASVQRIRDFLSVAWPVVTETCAKPFESMTWLAALQAVTSRCGGQPGELAVIGLEAFTALVRDALPSWGGQRIHGPICKTVFAALTSTEGVVWAHRRGLLRRVAAELGDLHRARAQRQETEAAMTAALGDLGLARLGDIPGLTATGAAAILAETGDPKRYDTSSSVVKHAGLSPSENASGAFDGEAHISRRGRPGLRLTVWRAVWAVLIHNPVMAAKYAAMTQATDQAAADARAGSSGHATSAAEAARRRRAKARVACAAALLRWIYSIVVHGTCWDPGVAAGRKDTLAAPSCQPEAA

SEQ ID NO: 221207 - protein, 381 aa, unidentified
MTGISATISNKQSIYAALELSKNSWLLAIQVPERDNPSLHTIKGGDTDGLMAKLDAARDRVVKLTGQTSTVTLCYEAGYDGFWLARFLEQRGLECLVMEPASLQVNRRARRVKTDRIDVENILHTLIAWSRGERHVCSMVVIPSIDEEDLRRSHRERDRLIRERTAHINRIKGLLFGQGIRGINVKSRYQTLTPAALVTGDGRPLPERLGREITREIERLALVQVQIAEIEHERDKTPTSCEVTERKRHQLLCLKGMGPALSSTLTREVYYRRFANRRQVASYIGITPSAYDSGEGHRSQGISKAGNRLARVAIVEAAWLWLRHQPDSALSQWFHERTQGQKGRIRRVMIVALARKLAIALWRYLETGLIPEGASLKARQR

SEQ ID NO: 221208 - protein, 321 aa, unidentified
MNTFYLGIDVAKAKLDCALRLANGKYKNKVIDNNLPGFKLLSEWLVKQQVTTLQVCMEATGVYWEAVAEYLADQGVLVSVVNPAQIKAFGKSHGVRSKTDQIDAQSIALFCSEHHPKAWQAPTPGERALRAMVLRLEALQVMRTQESNRLLVARDAVKPGIASHIEWLDKEIKALAKKISEHLDSDPGLKDKQALLDSIPGLGERTIATYLAFYANPAGFGNARRAAAFAGLEPRHHESGSSVKHPPRMSKIGHAFLRKAFYMPAMVTLYKTAWGKRFRERLAAAGKPPKLIIGAMMRKLIHVAFGVLKSGKMFDPALHGC

SEQ ID NO: 221209 - protein, 414 aa, unidentified
MQDILDCCCGLDIHKESIVACLLKGPLEAGLKPRSEIREFGTQLKDLLALRKWLEENLSHYVAMESTGIYWQPVYAVLETAFSKDIHLLVVNARHMKQVPGKKTDMRDAEWIATLLRAGLLKGSFVPEQDIRDLRQFTRYRKGLIRDITSQKNRTEKLLQSSGFRLSSFLSDIFGASGLAILEQLVQVGSISQASLELCLKGRARQKASEILSSLNGTLSKPQRRLLKMEMAHLQDLQDNLAEVETEIQTLFSQFEAPIQWLDSIPGIDLTAAYAILAEIGSDLSTFPTAEHLCAWAGLAPGSHQSAGKQKKQRVTPGNNYLKTILCEVAWVIASHKEMYLSGWYWRLKQRTDAKRAIVALAHKLLVIIFAMLKSKSAYDEQKFVQRKAATEQKRVSRMVHELTRLGYAVSVPA

SEQ ID NO: 221210 - protein, 301 aa, unidentified
MDKDSMLFVGLDLGDRWCHLAVLDQEGQMLEESRVPTTPEALRRRFSTLSHSRVAMEVGTHLRWVSQALQELGHEVLVANARKLRVIFDNRRKGDRADANTLARLVRLDPKLLSPIEHRSPQVQADLTVLHSRDALVRTRTLLVNHVRGVVKSTGARISLCSANSFPSRAATSVPESLRPALGPILDTIGALSLEIHGYDRQIEDLCAAKYPDCQRLRSIHGVGPITALAFVLTLENPKRFQKSREVGPALGLVPRQDQSGGSNPQLHITPGLPQGRQDGQDVPASSLGQLSPVHPWALWS

SEQ ID NO: 221211 - protein, 430 aa, unidentified
MKSNTQNAKIEAITEKTLVLGIDVGSETHYARAFDYRGIEYSKKPFKFSNTEAGFVTFKEWILDIKERHEKDKVVLGMEPTGHYWFNLGKFLQDNEMKPVLVNPHHVKKSKELDDNNPTKNDRKDPKVIAGLVREGRYMIPYLPDGVYADLRTASNIRFQLQAELTRIQNRISRWFNIYFPEYKTVYGKPDAKSGILILKAAPLPEDILTLGIDGVNQIWRDAKLRAVGKARAKTLIEAAEHSVGSKEGAVAARMEIRMLLEDYESRNTRLQEVMVLIEELVRKIPMAEKLLEIKGVGIRTVSGFLAEVGDISRFNNPKELQKLAGLALVENSSGKHKGETTISRRGRKRLRYLLFEVAMSLVAKNPEFRELHNYYTTRRLNPLKKMQSLMAIAAKLIRVFYVMLTKGVNYDPKKMVSDIKRPAVYLQAA

SEQ ID NO: 221212 - protein, 343 aa, unidentified
MKISTIGLDLAKLWFQVHGVDATGNVAVRRRLRRSEVLAYFRSLEPCLVGMEACATAHYWARELIALGHEVRLMPPAYVKAYVKRNKNDAADAEAICEAVTRPTMRFVPVKDAEQQSVLMLHRGRSLLVRQRTMLVNALRAHMAEFGITAPQGLVHVEYLATVIDDDGTPLPELARSILRMIVAQYNDTSARIHALERQLAKWHRESRISQLLATIPGVGIMGASAIAATVTDPNLFRNGREFAAWLGMTPKQNSSGGKERLGRTSKRGDKYIRCLLVAGAVAVLRHTRNRTTKDAAWVRGLLARKPTKLAAVALANKTARIVWAVMARGEGYRSKEQFEPAV

SEQ ID NO: 221213 - protein, 341 aa, unidentified
MNSVAIVAIDLGKHTFHLHAQDDRGHELYHKKFNRAGLAMHLASLEPCTVAMEACGGAHYMAREAAKWGHVPKLIAPHLVRPYVKSNKNDFADAMAICEAASRPTMRFVSPKTEAQQALAMLNSQRDAYIKERTASVNRIHAGLLEVGISLSPGFHAIKELPALLEECSFSAQIKQLLLGLRDHFNYLDGQVKALDKQVERQAAEDDLASRLMTIPCVGPITSSVLAAELGNGQQFKCGRDYSASIGLVPKQHSTGDKTVLLGISKRGDRNQRRLLIQCARVYLMGLERQTGALADWVRQLLARHHSNRVVCALANKLARIAWSIAAHHDEFKARPSAMNA

SEQ ID NO: 221214 - protein, 351 aa, unidentified
MYTLGIDLHKKSSVWVLIDEQRTEVWKQNVPCHPDYVSTAVEKIPVSPKEIQVAIEPVAGWRWVSKQLEDVGMKVHIAHPRKIQLIAKSTKKTDNEDAKTLANLLHSGFFPEAHRTSEDMYQLRLLLRERTFIVQYRTSVKNQLHGIATTQGLHLIASGNPLFKKGKADIMAGKNFVLKELHHLEEDLEKRIKPFDEKLREEVKKYSEAIILQTIPGVGYITALTIISEVDNFKRFSTGQKLTSFAGLVPKQRSSGETVRYGSITHAGSAPLRTALVETAMRIREENAPELFAFVKRLTPICGAKKARVALARKLLVIMWKMVTTNTPYNPKFPFSSCTMKVSDLDTGSDV

SEQ ID NO: 221215 - protein, 419 aa, unidentified
MNKLFVGMDVSLNDVKVHILDQEGNDASSRFSVENNPHGCDVIVSRILECCNKYNIQKVFIGLESTSVYGWHLQYYLADHSALKPYQPSITTFNANIINAFKKSLGNLPKNDWIDAFAIAEKLRFGRLPKSCSVDFRYLALQRLTRHRFHIVNSIVREKNYLLSNLFLKFSGLCQNKVFSNNFGATATEIFNEFFTLDDIAARPLDELAGFLVDKSKDRFDDPEATAKLLQEAVRKSYRINATVDDSLNFVIKSCFDNLQSLEKQKKAVEKAIINEVKGFNNEFLCLTSVKGIGPTIAAGLISEIGGISRFDNDNALAKFSGLYWSEYQSADFKAEDTYLKRTGNEYLRYYFIQAADQLRKYLPEFSQYYARKFKESKTHKHKRALVLTARKTVRLVFALLREEKLYKSPIMKGDDCIS

SEQ ID NO: 221216 - protein, 388 aa, unidentified
MQTVADRPEAPNAIRTDLGAIFISLELSRSTWLITSLSPDGGEKMSKHAVRGGDVAGLLERFAQLRKKARARTGKVFPFVVIQEAGLDGFWIDRVLRKEGIESHVVDPASITTSRRRRRAKTDRIDGEALVRALLAYKRGEPRVCAMVKAPTPEEEDRRRLCRERKVLIVERVRHVNRVKGLLFSQGISGYEPLRRDRRKRLDTLQTGDGRRLPDHLKAQVRRELDRLELLLDQIKAVEAERDALLAVQQGAASAPAAMLLNIKGIGPEFAAILWSEGLFRHFDNRRQVASYAGLAPTPWQSGSVDREQGVSKAGNPRLRTTLIQLAWLWLRNQPQSALALWFKERVNRNGGRLKKTTIVALARKLLVALWKYVTAGVVIEGAIMKSA

SEQ ID NO: 221217 - protein, 392 aa, unidentified
MRFVGIDIGAETHLVAAVDEAERVLMPPTKIGEDADGYQRLLERLGEPHDTLVAMEATGHYWTNLFAALAARGFAVALLNPLRTARFASEDLARTKTDAIDALGIARFAAQTRPAATRLPDRVTEELRELVRLRDRLVQDFGDRVRQRHRLVDLGFPEFTRYVRRLDSELAAAILHDYPTAAAFASVSVRRLAALRYDGRHRVGDELAQALLTAAARSVGRHHGEAYRIQVRYACEDLDLLRRRLRTLEGDIERMLDRHEVGSLLTTIDGVGPPTAARLVAELGDPASFRSAGALAAYVGVVPSRRQSGKRSATRAGLTSIGHAALRASLWMPVVTAVRKNPWLRAYYRRLRARGKLPKVALIAAMRKLLVAVYTVAKQRRPFVPALAEARP

SEQ ID NO: 221218 - protein, 411 aa, unidentified
MSSLLQRALPAETLVVAIDPGKVANRVWLVRGEEGLVHDPVSLPTLRAGVDELVRLIAANGCRDEPLIAVEATGSLHRAWTRELERRFPGCVRLLAPSETQAARAQLGSRRFKSDDRDCAALVWLARQGLGRVPDEPALEALLGVVRHRRQLVAELKVLRQRLHDQLNRLCPGLSAPQGHGRVLELLQPSGRAVLACAVAFAGRPPAVRSLLARAPGRLTRSNAAYWVERWRACLAPPSDAELRAQRLGLDLERLDALLSALANADGQLTRLLAQTPGQVLTSLPGVAVVRAAAFAAHSLPIERFPTPERLYSATGLAPASYQSATISRRGGISRQGLADHRDALMAIAWGLSQASPAFRERAQEYRTRGFAPIQTRVALARHACRLCHTLLRTQEPYDEERYRQARRRGR

SEQ ID NO: 221219 - protein, 371 aa, unidentified
MNSIVYVGMDVHKEQYTICCYSYETDKVEYKQIIPSDYKLVLKYIDQVRSRYDGEVTFVCGYEAGCLGYSLYHQLKEHAVDCKILAPSTMAVTNTHHVKTDKKDAANIARCLAFHTYSEVYVPDNDDNDVKEYIRMRDDQKLYLKKVKQQILAFVLRQGKHFECGKTYWTIAHLKWLKTLELSALQRETLDEYLLTYEYLTEKISRFDERIEELASAERYKEKVKHMSCLIGIKTHTALSMIVEVGDFERFEKAPKFASFLGLVPSEDSSDARVNRYSITKAGNCHLRRLLVEAAQSYTRGNVGHKSMALKQRQKRNSPEVIAHADKASERLRRRFYKMTLKKGVNRNVATTAIARELACFIWGMMTEHVS

SEQ ID NO: 221220 - protein, 388 aa, unidentified
MQIAADRPQASTAIRTDLGAIFVSLELSRSTWLITSLSPGGGEKMSKHSVRGCDVAGLLGRFAHLQEKARARTGQRFPIIVIQEAGLDGFWIHRMLNAEGIESHVVDPASIATSRRRRRAKTDRIDGEALVRALLAYKRGEPRVCSMVKAPTPEEEDRRRLCRERKVLTAERVLHVNRIKGLLFSQGITGYEPLRRDRRERLEQLQTGDGHTLPDHLKGQVRRELDRLELLLNQIKAVEAERDALLAAERAAARTPAAMLLDIKGVGPEFAAILWSEGLFRHFDNRRQVAAYAGLAPTPWQSGSVDREQGVSKAGNPRLRTTLIQLTWLWLRNQPHSALTLWFHERVRRNGGRLRKTTIVAVARKLLVALWKYVTAGVVIEGAVMKPT

SEQ ID NO: 221221 - protein, 319 aa, unidentified
MQDAIREPSVFVGIDVAKHSFDMTVLPSGQSASLTYDDAGLEQLLELLRPHGTCLIALEATGGLERRLVGELIEAGQHVAVVNPRQARDFARATGKLAKSDRIDAAGLARFAQQMKPRTVEKTSEKQAELAALVTRRRQLKTMAVAETNRREMARPSKVVKSVDQVLKFLKKEVEQIDAAIAQLITSDDQWRDRAQRYKSVPGIGPATSSTLVAELPELGRLNRREISALVGVAPYNHDSGKLRGKRAIWGGRANIRSALYMATLTAQRCNPIIRAFAERLQKAGKPFKVVLIACMRKLLVTLNAILKSGRPWTAQFAS

SEQ ID NO: 221222 - protein, 442 aa, unidentified
MSETSSEPKFAALVGIDWGDKKHAWALQVEGSSQIERGEMLHTPEAIQEWVAELRRRFPTGCVAIALEQSRGPLVFALSKYEHLVLYPIHPTSAADYRKVFRPSGAKSDGPDAVLHLDMLVRHRDKLRSLHPDTPQTRTLQLLVEDRRQLVNERTRYSNRLRADLKSYYPQVLQWFEDLYTPVALDFLERWPTLEDLQKAKPAMLHKFFQQHRCRDDAHHQARLQAMRTALEATTDLAVITAGRAATCTAVRLLSTLHQSIQEYDRQIDQLAKAHPDFVIFDSLPGAGEVLVPRLIAAFGTQRDRYQHAAEIQQYSGIAPVTQASGQQHWVHWRWSCPKFLRQTFHEWAEKSIPYSDWAHAYYRAQRDDKNKSHHAAVRSLAYKWLRIVFRCWKDRKPYDESIYETALRRHKTAPDPQPSPFELNVRWTSCGSFQKIALKTP

SEQ ID NO: 221223 - protein, 358 aa, unidentified
MEIKHSDVQFNGQDFYLGIDVHHRTWKVTIRTMGMEVKTLAMPPDPRGMHAYMTRNFPGGRYRSVYEAGFSGFWAHRQLTDLGFANWVVHAADVPTSDKERRQKEDVRDSRKLARSLENGELKPIHIPDPGIEPLRSLCRLRDRSTSHIHRLKNRIKGHLKYYGITMLEDSAYRHWSGAFMSRLESLCSEPGPRSDCLAITLEGLREESRRLALITRKLRTHCRAGEAARITSLLRTIPGIGPKTAFTLYTELQDIGRFPNLDKLDSFLGLIPSTDSSGDDEKSTGITPRTNRRMRALLIEASWVAIRYDLELLRAFSQLASRMKKQAAIVRIARKLAARVAYVWRTGTPYKPAVPTR

SEQ ID NO: 221224 - protein, 315 aa, unidentified
MSDMPCFVGIDVAKAQLDIALRPSGERWAVPNDASGVMTLVDRVQALHPTLMVLEATGGLERAVTSALATAGLPVVVVNPRQVRDVARATGQLATTDALDARALAHCADVIRPTPRPLPDAQTQELRALLGRRQPLIGMRTAEQNRLAGTNARLTKDIAAHMTWLNAAIATLDDDLETILRASPLWRENDDLLQSAKGIGPVCARTLLLELPELGTLTRQQIAALVGVAPLHCDSGTLRGRRMIWGGRAHVRTVLYMGTLVATRFNPQIKVFYERLLAAGKVKKVALTACMHKLLTILNAMLKHRTPWQPQEVQS

SEQ ID NO: 221225 - protein, 387 aa, unidentified
MSVDHQPEQTAVRTHLGAIFVSLELSRATWLVTALLPGHGEKMSKHLVRGGDVVELLAKFAELKAKAHLRTGRMFPIIAIQEAGLDGFWLHRVLEGEGVESHVVDPASIATSRRRRRAKTDKIDGEALIRALLAYKRGEPRVCAMVRAPAPEEEDRRRICRERKTLIAERVEHVNRIKGLLFAQGIRDYQPLGRRRRERLDELTTADGRALPAHLKAQISRELDRLELLLQQIETVEAARDALLAQSAEQSSSAPAAMLMRVQGVGPEFAGIIWSEGLFRRFDNRRQIAAYAGLAPTPWQSGAVAREQGVSKAGNPRLRTTMIQLAWLWLRHQPCSGLSQWFHERVKRNGGRLKKPMIVALARKLLVALWRYVTAGVVIEGAALKVS

SEQ ID NO: 221226 - protein, 362 aa, unidentified
MTSRKRKTSATSTDPPTLGEVVLGVDTHGEVHVAAVLCPLGKILGTKSFPATAVGYRRLLAWAGKLGTVRRAGVEGTGTFGAGLSRYLLAQDVEVYEVNRPDRTARRLRGKSDPLDAQAAARAVLSGRATARAKTGDGPVQSARMFKLAKDSAVKARTQAINQLKAVLVVADPALRERLSGLGNRELFRTCARLSPSDGDTVPQATRITLSLLAQRIEHHTRQIDELNQRLTRLVERHAPQLLTPVGIGPDSAVTLLITMGDNPERLSTEASFAALCGVSPIEYSSGRRSSRRLNHGGDRQANAALHRIVFTRLRFDPRTQGYYERRTREGKTRREIIRCLERYAAREVFNLVRPASTGLLS

SEQ ID NO: 221227 - protein, 373 aa, unidentified
MLNLPVFVGIDYHQNMIQVCVMDQQRKILANQAVDNKPQAVHRVVAPFGSNVHVAIEACTGAADFAEQLTAKYNRTVELAHPGYVARMKQTPDKSDWTDAKLLADLTRAGYIPRVWLAPKNIRDLRDIVRYRRGLVDQRKQAKLRIRALMRNHRIVNPCNPWTKAWSYWLFSDSNPASDNAKWILKQHFDQVEHLSQLIIESEKRIQSLVEHDTVVATLMNQPGIGLVTAATLRAIIGHFDRFRTGKQLAHFCAVCPRNDSTGGKTTTGGLIKAGDELLRQVLIESAHRLMRYDPHWRAMAERLRAKGKKTCVIVAAVANRWIRRLFYQMVDSALVGGATVDFSRHGQESTIVTKTPSGGVRRSSRSTRRSST

SEQ ID NO: 221228 - protein, 413 aa, unidentified
MDTLYPCCAGLDVHKETVVACVRTMSGGGKVHQEVRTFRTETSGLLALADWLTDEGVTHAAMESTGVYWKPIWNILEGVLELLLVNAEHIKQVPGRKTDVKDSEWIAQLLQCGLLKASFVPDRPVRELRDLTRQRVQLVRQKVQVSNRIQKTLEDANIKLASVASDVLGVSGRDMLRALVRGESDPVVLAELARQRLRKKIPQLQEALLGEVTEHHRFLLGMLLDQVEFVEAQIARLGQRITEVLPAPFAEAIERLETIPGIDRRAAQNIVAEIGADLKSFPSAGQLASWVGICPGNHESAGKRRSGRTTKGNTWLRVTLVQCAWAASHTKNTYLSAQYKRLAARRGKKRALVAVGHTLLSIVYAVLKKKGTYQELGADYLDRQDKEGLARRLLKRLGKLGLKVTVEPAEAVA

SEQ ID NO: 221229 - protein, 313 aa, unidentified
MMKIICGVDVSKARLDACIEPGTIFASFDNDPAGIAALAAFCRQHQAGLVVMEATGGYERRAFLLLWEAGMPCAMTNPRSVRRYAEAMGILEKTDRLDASVIARFAHAKNLQPTPAPTPAQQRLKALVARLRQVTDDLTVQKQRRASFADNAEILASIDEVIALLKRQSRKLEGEIASMIDDDPLWAQLAEAWRSVKGVAGRTIARLMADLPEIGTYSNKAVAKLAGLAPIADDSGKRNGKRSIRGGRASVRSILFLVARTAAKYDKSLAAFRDRLLAAGKHKMTVRIALAHKLLVRLNAKARDARAQYANAT

SEQ ID NO: 221230 - protein, 315 aa, unidentified
MTQTSITTAGIDTSKAKLDVAVHNRAERWQVANALSGWRVLAANLAKAGVKRIGIEATGGYERGVVAHLSAAGFTVLVLQPIQVKAFGRVHLRRAKNDALDAVLIAACAATLDQPRIAPDPRLAELADHLTFLEQIEEDIARFKTRLEHIDTAGLRRIVNSDIARLKARRAAQIRDIAKRLRAHDDLALRFDLVLSIPGIGERTALALIIRMPELGRISREEAAALAGLAPFDDDSGQHRGSRHIAGGRSRLRRSLFAAALPAAFRWNRALVALYTRLIACGKAHKAALIACARKLLIYANTVVQRGTPWTEKAA

SEQ ID NO: 221231 - protein, 423 aa, unidentified
MNTSTLCVGADVHLKEITLRAVDKFTSDEVIAPFNVANNLPGAQSAASRLAEVATRLGYTHIEIGCEATGMLWIPFYRFLDTCPILEPFDLQQVCFNPKLVSDFKDALVLRGPKNDDRDAFDIAARVQVGHWPDSYVPDDFWQGLRRLTRYRFKLSRNLSQEKMRFQAYAFLKCSDWKRVKTFSDVFGATSAALLTEFTAAELREMTHDQLADLVAHRGRGRFYDPDATARAVQQALRTSYPITPQMDVMVTATLAAGWEHIRAIKRLMKRLDQQISRCIEPVPNPIITVKGLGPVITAGLLAEIVDITRFPEHKHLAQYFGISWTKRSSAGSDTQDSRMTKVGNPYGRYYFVIGADKLRLFNLEYKAFYWRKYNEVPKHQHKRALVLTARKLVRLVHTLLTKNVPYVRPQMTVDLEEVGWLQ

SEQ ID NO: 221232 - protein, 389 aa, unidentified
MLGMSVALQLKASMKNPKADTTDIPNNEIKLFLAIELGKKQWKLCFSEGDKIRHRNVKGGDAKAVIDEIELCKNKFGMPADTPVLSCYEAGRDGFWLHHYLEQNNVINKVFDSSSIEVNRRAKRMKTDRVDAQKLVRLLMRMMLWGESKVCAVVQVPSEEQEAQMRTGRERERLVKERTGHVVRIRSLLKLKGIEVGGLKMIDFRKLRDPMNKSLPEEMIIEMERERDRMQLVEEQIKKVEATQKQSICDDKELSDTKVKVVKLMTLRGIGTQTAWLLAHEFFWRKFKNRKEVGACAGLTGCPYDSGETRQEQGISKAGSRRVRAGCVEMAWNWVRYQPESKLTQWFKQRCGAKPTSRTKRISIVALARKLLIALWKHIELDQLPEGAI

SEQ ID NO: 221233 - protein, 340 aa, unidentified
MEKASMIGLDIAKNVFEVHGRSAAGHVVLRKSLKRGQVEKFFATLEPTSIGMEACGSAHHWARLLGKLGHEVRLMPPAYVKPHVKRNKTDAIDAAACCKAMADEDMRFVPVKTVEQQGALSLHRTRDLLVSQRTQLGNALRALLSEFGIVDGKGRAGLARLVDELRAGTLDLPADALASAMALADQHAALEAATDALERRITAQAKADNKARMLKTAPGVGPLSAHATLATMPDPSLFRSGRDFAAWLGLTPRLHGTGGKTRTGRITRQGNQPLRRLLVLGATAWVSYAKAHPEKASPWLRGMLARRPSKVVAVAQAARTARILWAMLTHNQPYRAPAVG

SEQ ID NO: 221234 - protein, 353 aa, unidentified
MNNIKYVGMDVHKSITVIVVLNELGQFESRSQIKTKGENICDFFRGISGKVEVVFEEGTHSAWLYKLLKPLVASVTVCDPRHNKLIEDGNKSDDEDAETLAQLLRLGAVKAVYKGDDQQQQLKEMCRAYDNLIEDSTRVQNRLKAIYRGRGISCSGRDLYRADQRSDWLAKLSEDAARFRAESLLEQLESLSQLRKQAKQRLLAQARNHADYRILIKLPGFGPVRVAQLIAVVGTPHRFRTKRQFWPYCGYAVVTRSSADYQIVEGKIVKQRKKVSTRGLNRNHNPQLKQVFKGAALTALRHEAIKAHYQRLIDQGTRPELARVSVARKLASIALRVWQRREEFDVKKAFAQD

SEQ ID NO: 221235 - protein, 353 aa, unidentified
MTSLTDLREVVDVVIGVDTHVHTHSAAVVDAATGGVLDEITVEATAEGYAELVEFASNHATLRAWAIEGTGGHGAGLSRHLLEISEIVIELDRPKRAARRNGAKSDPLDAIRAAREAMARPRLGTPRSGGERQALSVLLVARRSAINASTEAQQQVFSLVIAAPEPIRARFRGQKLAAMLNTAAKLRVHSSWDVETNSTVVALRTLARRAHAMLKEARELQKAILTIIRGWRPDLLEEFGVGPIVAATVLCAWSHPGRIHSEAAFAMLAGVAPIPANSGQVTTRYRLNRYGDRSLNTALHTVVQVRIQYQQSTRDYIARRTAEGKTSREIKRCLARYVARDLYRLLESGAATA

SEQ ID NO: 221236 - protein, 286 aa, unidentified
MTITTIGIDLAKNVFAVHGVDQNGKTVLVKSRVTRAALPGLIAGLPSCVIGMEACSGAHYWARLFRQYGHEPRLMAAKFVSPYRMAGKSGKNDAADAQAICEAVRRPHMRFVPVKDESQQAMQCLHRTRQGFIEEKTATYNRLPGLISEFGVIAPQSTDALRRMVSVQKSSLPLQVQQCVDDLLEHVDCIEANIAEYDRILFRMAKTDHRSQRLMELKGVGPTTACALVACIGNAHDFKNGRQLAAWLGLTPSQYSSGGKSKLGRITKAGDSYLRTLLAQGARSVL

SEQ ID NO: 221237 - protein, 318 aa, unidentified
MKPSHAPIKGLSRVVGLDVAKASVTLFDPVGRRTRTVANTFEALIEALRPFADYELMVCEATGGHERAALQAATALGLAAHRADALRVKRYIASLGGAAKTDDIDARWLSRYGQERGSGLRPWQSVDAERDALACLVRHRQDLIDSRTEAKNRRAAPTCQPIAVMLDAQIAFLDGQVREVEKAIAEHLAGSPALQDAENRLRAVVGFGPVAARTLIALIPELGHLNRRQAASLAGLAPHPRDSGKFAGRRRTGHGRKGLRPVLFMAALAAARANPTFKAFAQRLAQAGKPKRLILTAIARKLVVLANAILQNPKPQLT

SEQ ID NO: 221238 - protein, 354 aa, unidentified
MITIGVDAHKRMHVALAVDEAGREVGDWQGPNSESGWQHLAAWASALGESRQWGIEGAWSNGRGLAQHLVGGGEIVYEINARWTAMRRRSAHKPGKTDELDASAIALFVRQETQALPRVLLEEDDTAILELLTFQRESALAEASRLRNQIHALLLQVDPEYKEHLPTINSKAGLDALRNYAPAVDDTIRRERARAVRRLAERLTLALDQEEQLAEEIRQAAKAGFTPLTKLCGINLLTAGRLAAILGPGNRFTSDAQLAAYAGVAPLEASSAGHTRHRLNRGGNRRLNHVLYFIVLTQAHHLPEAKAYLDRRVAEGKSRREAHRALKRFVIRAIWKLWQECQERRKTTICEVAA

SEQ ID NO: 221239 - protein, 410 aa, unidentified
MEVIYERCGGLDVGKDEVVACVRTPNGSGGRRQEIRTYSTFTSRLEELAGWLKEEGVTNVVMEATGQYWKPIWYVLEEQGFELMLVNARHVKILPGRKTDVGDAAWLAELLEHGLLRGSFVPPQAIRELRDLTRYRKRLVQNHGSECQRIQKTLEDAGIRLDSVASDVLGVSGRQMLRALIAGERDPAILAEMAKGRMRSKIPQLREALTGRFREHHALLVRLCLEHIEQIEASIATLDAEVDKVMAPFAVARDLLDTVTGVGKRAAECVIAEIGVEMSVFPTAGHLASWAGSCPGNNVTGGKRRSGKTTKGDVWLQEILVECAWAAAHSRDTYLSAQFWRLARRIGKKKAAVAVGHSILVICWHLLSEGCTYEDLGGDFFAKRDTDRQRQRAIAQLEALGYKVSLQQVA

SEQ ID NO: 221240 - protein, 351 aa, unidentified
MPFKTDTATVRTIGIDTGKNTLHMIGLDEKGTIVLREKVARGRIAARLVNVPQCLIGIEAGMATHYVARELTALGHDVKQVPPAYSKPFRQGHKNDFRDAYAVAEAVQRPATRCVPVKTDHQLDLQALHRVRSRLISDRTAVINQIRSFLLERGIPVRQGLRFLRHQLPDLLATRTDVLSPRMIRIVEDLVGDWSHLDARIENVTDEIEALARDDASCRQLMTVPGVGPIIASAMVAAIGNGTAFAKGRDFAAWLGLVPKQMSTGDRTILGRITKRGNRYLRTLFMQGARVILLRPANWAKHSFGPWLTAAAQRLHHNVLATALANKLARITWTELAQARSYDARVEPGVA

SEQ ID NO: 221241 - protein, 417 aa, unidentified
MPLNVVGAVLFVGIDWASAVHAVCVQDAAGRRVAAFTVEHTAAGLTALVRRLARLGDPDTMPVGIERPDGRLVDALLEAGHPVVPVKPNAIKTWRDGEVLSGAKSDAGDAEVIAEYLRLRHHRLQTAAPYTAQTKALRTVTRTRGDLVDMRTATTNRLGALLDSHWPGANTIFADIESPIALEFLTRYPTARHAQHLTAKRLTAFCVKHGYSGRRTGEQLLTRLRNAPTGAIDEVLCEAVRDAVTALVTILRAVGTALKDLSRSVVAHLGEHPDGEIFTSLPRSGQINAAQILAEWGDCREAYAGPDSVAALAGVTPVTKQSGKHRAVHFRWACNKRFRVAVTTFADNSRHDSPWAATVYAAACARGLDHPHAVRVLARAWIRVIWRCWIDQTPYNPHRHGNAAQLHQSGQTELLAA

SEQ ID NO: 221242 - protein, 336 aa, unidentified
MDPNQHQRRQPHVTPAGVFVGIDVAKDTLDLAHSGSPPEVTTSFPNDAAGHAAVVALLAPLAPAAVVIESTGGLERPLMAALLEAGLPVALVHPGRVRSFARGVGVLAKTDRIDARVLARFGQQAAPRLAERRSRNATELQALVVCRRQLSAARVQQAGRLAATASKAARRAVERVIATLDKQVESLDRQIRALIDADDDFRHLDGLLQSVPGVGPTLAATLAAELPELGTADGGQVSALVGVAPFNRDSGKHTGRRSIRGGRTAVRCVLYMATIAAIRFNPLVRAFAQRLRSAGKASKVVIVACMRKLLTLLNAMARDGLTRDQLDVVKKLATNP

SEQ ID NO: 221243 - protein, 299 aa, unidentified
MNITQIGIDLAKLVFQVHGVDARGKVALRKQLKRSQVNAFFNQLAPCLIGMEACGSAHFWARKLTEFGHTVKLIAPQFVKPYVKSNKNDAADAEAICEAVGRPNMRFVPIKNTEQQALLGLHRARQGFVSERTAQANQIRGLLSEFGLVMPVGIRSIRGKVPGILEDAENGLSDVSRALIARLFEHLCVLDRQVRELEREINAWHCEDTASQRLQAIPGIGPLTASALVASVGDAKVFHNGRQFAAWLGLVPRQSSSGGKTNLLGISKRGDTRKWQHGAIRISQPSPWRTRTHVPFGRC

SEQ ID NO: 221244 - protein, 423 aa, unidentified
MKNSAARKLKQVPKGYLVMGVDPHKKRHAAVAVTQDFTTHSKFKFNNSREGFEIALERARAEMVRTGSRGVIFAIETGGHYWRNLAYFLDERGIPFHFINQFTLKRRREGKDLNRRKNDYRDSEVAAQLLCTGEFTNTKLQHGVYAELRAAHNAYRRLVKERTRITNLVKGLLDGIFPEFTWVFKDPCGLTALSVLYICPVPKNIAQITEEEFVNAISAKHQGRLMRKKLRALHYAARTSIGIEEGAQSVSSEVSFLVEKLRLIRRQICSIDETLTRLVDETEEGKYLLSIIGLNYISVAGLLAELGSFRSYRSAKQLIKMAGSNPTESESGGKRSAHTPMSKKGRPVLRYCAWTAVIPMLRFNPNFRAWAKKLRERPVHANPLSGREIVGAALNKLLRLAFALVKKQTFYQVPQLEIVQVTA

SEQ ID NO: 221245 - protein, 405 aa, unidentified
MQTVYERCCGIDVHKKLIVACFRNGKKAELRKFDTLTHSIKELGNWLLDNGCQMVAMESTGAYWKPLYNILELLGIDVIVVNAHHMKNVPGRKTDVKDAEWIVDLLQHGLLRASYIPNREQRELREIVRYRKNLVEERSREINRLEKTLEGANIKLSSFVSDLTGISSLKLLKQALVGEVNQENIENLIHPSMKPKKSQLVKAMDGVFSSIQKQLVTAILDHIDDMTNRIKNLDNIIDNHMKDYEDAIKKIDEMPGIGKRSAEVILAEIGTDMSRFPSAAHLASWSGLCPGNNESAGKRKSGKTNKGNRYLKSTLIQCAKSASKNKDSFFHAQYQRLVVRRGANRATVAVAHSMLIAIYNMLKNNVSFTDLGSDYYTKFNAESKAKYYMKKLQELGVSVPVSLAI

SEQ ID NO: 221246 - protein, 355 aa, unidentified
MNSEKYIGLDVHQATIVVAVTDSTGKLVMESILETEAATILQFFAGLRGNLAVTFEEGTWSAWLYDLLNPHVEKLVVCNPRKNALLKDGNKSDRIDARKLAELLRGNQLKPVYHGENGVRMLRELSRSYLAIVKDLSRVMNRLKAVYRSWAIPGAGRDVYYRRHRAQWLDKIREAGVRRRAERLYEQLDMLQHLRQEARQELLAESRKHAITARLRHIPYLGPIRSALAVALMQTPHRFRTKRQLWAYSGLALESRISAEYRMVEGQVRRSKKLLSIRGLNKDHNHDLKGLFKGAATMASVRPGPLQDFYQAALAKGIKPTMARLTLARKIAAITLTLWKKGESFDAEKLKSQAA

SEQ ID NO: 221247 - protein, 341 aa, unidentified
MEDDIIVGVDLAKNVFQVHGANRSGAVLFRKKLSRPQFMKFMTAQPSCLVAMEACSTSYYWARTLSDAGHDVRLIPPIYVKPFVKRHKNDAADAEAIVEAALRPNMSFVEPKSAEKQALSMMMRTRDQLIDHRTATVNELRGHMAEFGLIVPVGIKNIERLQELVVADDALPSLASEMASIHFEQIVELTRQIDILTEKIKTYSTSSATVRRLQTMPGVGPIGAMIIETFAPDMATFKRGRDFAAWLGLIPLQRSTGGKSRLGQITKMGQKDIRRALVIGAMSRIAGYARQNSRAEPWLQDKLDRKPKMVAAIALANKMARQIWAMITKAEAYKPQLIAAA

SEQ ID NO: 221248 - protein, 280 aa, unidentified
MNEYDGRQFVGIDLHRRRSVIVRQSESGEQLSAVRIINDPVALGLEIERAGPNPEVVLEATYGWYWAVDTLQAAGARVHLAHPLGVKGFRYRRVKNDVRDAADLADLLRMNRLPEAWIAPPATRELRELVRYRAKIVAVRSGLKAQVHAVLAKAGVLIPVSDLFGVGGRQRLAKVPLGAAYVQRVISLLELIDALDAHETRFSIMVADKLGGHAGYQAIQQLPGVGPILGAVFVAEIGDVHRFADPAHLCSWAGLTPRHHESDTVVRRGHITKQGSRLVR

SEQ ID NO: 221249 - protein, 432 aa, unidentified
MERIRENAAGIDIGARKVFVSVEGKEVKCFFTFTEDFEKLRDYLLENAIETVAMEATGVYWNILYEILEEAGLDVWLVDGGQTKQVPGRKTDVKDCQWIQQLHSYGLLNRCFVADSDIKELRIYQRLREDHIRSASMHINHMQKALTEMNIRLTEVLNQIHGASGLAIIEAILKGERDKEKLLKLCHIKIIKNKKDEVLKSLNGRYTKSGLFALKQAFDSYYFYQNQIKQCDAMLEEVLKRISKGKPNQTISARRKPIRHNKPDIDNLGTVMLKIFDGKDATALSGITDYTWMQLLSETGTDLSRWESEKHYTSWLGLAPGQHTSGKMKKNKRKLGRPKAGQIFRQIAQSLLTSKRIALGAFGRRLSSRKGSPVAIKAVARKLAALYWRIMVKGMDFVEKGIQKYEDQLMVQKQRSIIRLAKELNMQITYNV

SEQ ID NO: 221250 - protein, 344 aa, unidentified
MEIMTIGLDLAKSIFQVHGVDAAGKAVIRKALRRSQVLPFFAKLSPCLVGIEACGTSHHWARELTRLGHDVRLMPPAYVKPYVKRGKTDAADAEAICEAVTRPTMRFVPIKSAEQQAALSMHRARDLLVKQRTQLINMMRGLLAEFGVDIPQGIHRALELARKTVEGEASDLPADAARIIARLSRQALDIHAQLREIERDLLTWQRKSEVATRLMTIPGIGTIGATALAASVTDPSQFRSGRQFAAWLGLTPLQNSSGGKERLGRISKMGDRYLRKLLVVGMTSLLRKAKTKPQASDQRVVNLLARKPARMVTIAMANRTARVAWAIMARGDVYQDNHMPPLAA

SEQ ID NO: 221251 - protein, 386 aa, unidentified
MQKLNDLSRCLTALEPDGTLIAVIEMSLSSWLVAGIVPGVERQPLKKLAVDESALLKLLHRWREEAEKAGRRIERIAAAFEAGRDGFWLARWLRARGIEAYVIHASSVAVSREHRRAKTDRLDTELLKRSFLGWLRGERDHCKMVEIPTMKDEDAKRPNREHDSLIGERSRIVNRMKAALVRLGIRGFNPKLKRATTRLDNLRTPEGEPIPPNALAELRRDMERRRLVNNQIRQIEEERLERIEKTPCDGPHVMVRLLARVMGVGIETADMLVHEVLSRNLRDRRAIARYAGLTGSPDESGRKRREKGLARSGNVRVRRGMIQLAWRFLLHQKNSALTKWFRSRTENARRTRKPMIVALARKLLIALWRLVREGIVPDGVVLRAVQ

SEQ ID NO: 221252 - protein, 351 aa, unidentified
MQYVGLDWAYRRASWCALSEGGAITGEGAVPADEDGLARLVLALGREVSACVEMMSGALWVRDRLSAAGWDVQVAHARKVRDVAPLACKTDKVDARVLAELCRRDRVPSLWVPSLDERALRERLRRRMHLVRLRASAMNRVFGLLTQWGLRIPLDRLRADDAMQLLADRGVEATWRRSIAEALAVIELFDERIAPLERELRQAAKDDGRVILLKTIPGVGDLLGLTLASEIGDVSRFSTPRKLIGYAGLAPRVNQSGDRSRTGALSKAGSRSLRWAAIEAAHASWRPTNPWHQHYSELVKRAGKNPAKPSVARKILTACWHILNRQQPFKPARSQPSGTDVSASSSCFLAA

SEQ ID NO: 221253 - protein, 407 aa, unidentified
MVFVGIDWAEQHHDVCVMSVDGQPLGRARVAEGVDGVARLHALVADHADDPAEVVVGIETDRGLLVTSLVATGYQVYAVNPRAVDRYRDRHAVSGAKSDGGDAKVLADLVRTDRHNHRQVAGDSVLVEAVKVTARAHQSLVWTRQRQVNQLRSALREYYPGALATFGTDLAHPDALAVLATAPTPELGRRLSSARIASALRRAGRVRNIDARAAAIRDGLRVPQLAAPTVVADAYGATAKALINVIAALTVQIAELESALADRFEQHPDADILRSLPGLAVILGARVLGELGDDPNRYANAKARKNYAGSSPITKQSGSRKIALARYVRNRRLADAITWWAFCSLQSSPGARAFYDRRRAAGDTHHKALRALSNRWVGILHGCLRHHTLYDEATAWGHLTESHAAAA

SEQ ID NO: 221254 - protein, 405 aa, unidentified
MSELEKDLVFAGVDTHKDTHTLCLLDHMGRAIGTFRFAADAKGYDALAGKIGGPATCVGVGIEGTGSYGAGLTRRLLELGYCVYEVMVPGRARRKPGRPKRDPADAEVAARQVLARVNLSKPKDQSGWTEELRQLMIARDRLVQATSAMINAAKSLIVTAPEDLRRSLEGLSRKNLRSALSTLDPAAGGIILALGSLGKAWDLQDREADAIEERMKRVLEANAPALLTIYGCGTVSAAALAVAGGGNPERLKSEAEFASLCGVAPLLASSGKTERHRLNRGGDRRANRALYQIAVTRMSYDQRTKDYVGKRKRDGKSKKEAIRCLKRYIAREVFRALRNPLEIKGPSWKDLRPARQALGITLVEAGKALNVGFQRVSYAETGRLMNVRFLEEYDAWLKSQAKRES

SEQ ID NO: 221255 - protein, 351 aa, unidentified
MTVYVGMDVHRKRSQVAVVDDTGAAQRNRNLANDPAQLVPILGVLPPGTPVAFEAAYGWGWLVALLEELELEPHLVHPSRCKAIASARLKNDKVDAATLAQLLRADLLPEAWIAPQQIRDLRALLRHRASLVRLATGLKNRVHAVLADRGISERSSLWTAPGRAWLAGLDLPPIQRAIIQDCCGLLDALATPIARLDGEIAALARPDPRVQALQALPGVGKLTAMTLVAEIGDISRFPTARKLCAWAGLTPQVRNSDRTVRHGHITKQGSRWVRWILQEAAQTAKRHPMFADTYGQLARRRGRNIATVAIARRLLARSFHILTQLEQASLSEKALPGALASLHEPAIRPLS

SEQ ID NO: 221256 - protein, 428 aa, unidentified
MMACSTTTQNGTFVAIDVAKLVHEVLVEPPTGRRQRWRIRNCQPDYETLRDRLRAFETPVLIGFEATGNYHRPLAYYLGQCGFELRLISSLAVARTRDALYNSWDKNDPKDTQVLLHLLKTGVSQRYHDPLVHAMNDLQELAQTHYQVSLRKVQVQHSIMIHYLPLYFPEAERYYTNSRAQWFTQLLHRFPCPAAITRYSQEVFAHEAWTVVGRKVNKRGFLADLYATARQSIGLAVAEDSEAIQMFRVMLAEHQHLCALRAAIEHQADQVLQSHPDYHRLRTLPGVGPILALTILAEAGDLRRFPHHRQFLKFCGFDLSTQQSGQFRGISRLSKHGNARLRYAFWMAANGAVRMRQNTFREKYARYIKADPQNPDRKRKALCAVAAKVARVAHGLIKTGTDYRPYFEALPPSGALRSRGPSRQALTS

SEQ ID NO: 221257 - protein, 310 aa, unidentified
MDIIAVGIDVSKDRLDVAVRPGGETFAVERNAAGLDRLIERLRQLSPALVALEATGGFETIAAAALAAAALPVVVVNPAQIRAFARAVGQRAKTDPIDAAVIARFAEATRPQPRPLPDEATRLLADLIARRRQIIEMIGAESQREKRIAMPRLRKSIRRVVGMLEKELAGLDADIDDAIRGSPVWCEKEDLLASVPGVGPTIARTLIADLPELGTLSRKQIAALAGLAPFTRQSGQWRGRSFIGGGRAPVRTALFMGALVAVRHNPVLKAFFERLREAGKPKMVALVAVARKLLTILNAIVRDKRPWQTA

SEQ ID NO: 221258 - protein, 323 aa, unidentified
MQGKALPDQSAQAQVYVGVDVCKDWLDVYFHPLGKALRIANDRHGLKHLKRACEGVAIARLVLEATGKYHRQAHRSLHAAGLPVAVVNPLRSRLFAEAVGALAKTDRIDARMLALLGARLDPAAAPPAGEAMDGLQELVRARQSAVADKTALSNRAGEAETDFLRVELAQLIAEAERHIARLDEEIGRRIDTDERLAERFRILLSIKGVGPIAAMTLLSCLGEIGACSGKGAAMLAGLAPIARDSGDKNGQRRIRGGRAHVRTALYMAAVAAARWNPDLAAFYKRLRENGKAAKIAITAVMRKIVVLANVLIRENRQWTPTRP

SEQ ID NO: 221259 - protein, 462 aa, unidentified
MRKKNLKCGNGNSSGKMRVTSEMTKINHDVAGIDLGSEEHWVCVPSDRTEENVRRFGVYTGDFYELAAFLRACGVKSVAMESTGVYWIPLYEFLEKEGFEVVLVNARHLKSVAGRPKTDIYDCQWIQRLHSYGLLQGSFRPSDEICELRGLVRHRAGLVEESAMYVNHMQKALQQMNVRLDKAVSDISGKTGTSIIERIIAGERNPKVLAELRDPRVAASKKEIAAALNGNYRNEHLFALRQSYEALGFIHGQMAECDTEIKKVLDGLDRKVDAESVAPPPATRGSKRSDKNQHLFDLRPALYEIYGVDLTQVNGFQTGTVLNILAELGPELCKFPTEKHFTSYLGLCPNREISGGRLLKNSTKKVQSRAAKAFRLAAQTLKNSECYLGKFYRRIKSRAGAPKAITATARKLAVIFYKMVKDKVEYKPLDPSSFERKHRDRALKSLKNRAKSMGFELVPLAS

SEQ ID NO: 221260 - protein, 302 aa, unidentified
MYSVNNQNEINIDVDTGKTQLDIYIRPLDIFFSVPNDEAGIKKAISEFKKYKPTRIIIEATGRLEHAFIVACSKSNLPFVVANPTHIKKFAGAIGRLAKTDKLDAQLIAHYGEAIKPVLSTLKPENLQLMSDLLSRRRQLMTMQTIEKNRLQIMPKEIPSSIKPMLTALKNQLEKIDTKLSKLIKECDEYKAKNDIIQSMPGVGNVVAFNLLSDMPELGYLTNKQASALIGVAPINRESGIYEGKRMITGGRHSHLLKALVPVFIWILSFVPFSNFFCFRVFKILKLAMSQKPYISVFTCKL

SEQ ID NO: 221261 - protein, 358 aa, unidentified
MSEITRVGVDLAKNVIQVHAVDVAGKVVTNKALQRDKFMLWCALLPVGCLIAMEASSSAHHWARKLVALGLDARIIAAHLVQPYRLQGKSGKNDANDATAICEAASRPTMRFVAIKTVAQQGMLSVHRLREGLKEERTACTNRIRGILAEFGLVFAQSSKVLRENLSSVIEDANNELAGIARLVIERAQSQWAELDAHIEWCDQRIAAHIKQDEHAKQATQLLGVGPVTASAVVATVGDFKQFKNGAQFGAWLGLVPKQNSSGGKNNLGSITKRGDMYVRMLLIQGAKAAVLTAHRRDDPISKWAYQLREKSGWQKAAVALANKNARILWAMFARGTPFDAHQVSVKPGTAQAAMSAA

SEQ ID NO: 221262 - protein, 344 aa, unidentified
MDHFAGLDVSVKETSICIVDDTGRIVREVKVGSEPEALLKVLGNPAYRFKRIGLEAGPLSQWLFSALAEAGLPVVCVETRHMRAVLKAQINKTDRNDARGIAQMMRVGLYRPVHVKTLRSQKLRMLLTHRKLLQSKAIAIDNDLRGTLRNFGLKVGMVGTVRFEARIRELVEDLPDLAALIEPLLIVRRTLREQVVILHRRLLAIVRDDGVCRRLMTIPGVGPVVSLTYRATVDVPARFRKSKSVGAVFGLTCSRYQSGEVDWSGEISRCGDEMMRTMLYEAAQSMMHSKKWCWLKAWAMQIARRRGMKKAIVALARRLAVIMHRIWIDGTEFRWTREQAASAA

SEQ ID NO: 221263 - protein, 377 aa, unidentified
MKFCGIDWANDHHDALSIDEQGHQLGAIRVAHSPEGLSQLDAYLARLAGLEGREQIACIVETTHGLLIAHLLEVGWPVYPVNPRTVERRRAPSGAKTDTIDAYLLAKTGRADFADLRRLNPDSEQIQEIKTLTRDQDTLVRAQTRLVNQLTACLKAYYPVALELFSKLQQPSTLKFLRAYPTLQAARSASVEDLTTLLKQARYPGAKLAAQQMAAQLQQPCLQANAVTTRTKSRLMVALLDQLEPLMKQIADYDEEIERLFLMHEDHELFQALPRAGTRLAPRMLAEMGDDRTRYQSASSLQALAGTSPVLFQSGTYQKAHRRLGCIKPWRNALQQFAWQSTLQEAWAKEYYQRKRAQGKSHTVAVRALANVWARIL

SEQ ID NO: 221264 - protein, 412 aa, unidentified
MELLHRRCCGLDVHKETVVACLRLVSDGKVTTEVRTFQTTTADLLRLSEWLAANECTHVAMEATGVYWKPVWRILDDGEFALVLANAMHVKNVPGRKTDINDAMWLAELLAHGLIRASFVPDAQTQDMRNLLRTRKQLVREQSSHVLRVQKTLEDANIKLDSVLTDLMGKSGRAIIEALIAGETNPVKLAGLADRRVKASFEEFREALRGRVTRHHRFLLRLHLNQIDALDAAMATLDAQVEANLGPFRTAVELIGSIPGIKNLGAHVIVSEIGIDMSRFPSAAHLISWACICPRNDESAGKRRSNRARKGGTWLKTTLVQCAWAAVKKKDSYLQAQFYRIKARRGPKKAIMAVVASILTAIYHMLKDGTMYKDLGRNHFDRRSSDQQKNRLVKRLVDLGYVVEIKPLAATA

SEQ ID NO: 221265 - protein, 397 aa, unidentified
MFYLGIDIAKHKHYASIIDQTGKPITKPFPFQNHKEGGQTLLNQIYQYIESPTEILIGMEATGHYWLAVYSFLLDHGFSVIVLNPIQTNAWRKGTEIRKRKTDAIDATMIADIIRFGRFVETLLVDEKMFALKQMSRFRNALVSNMSDLKRKALVVLDQTFPEYQSIFSDVFGKTSSQILLEYASPSDYEQISIDDLTQIIEQTSRNRLGKKTANKLMELASNSFGVTFCKNAFSFQLKMLIEQIRFIEDQIKECEDEMSQLLIDLDTPIMTVPGVGPILGATILSEIGDIHRFDKPSKLVAYAGIDASVSQSGQFESSGMSISKRGSSHLRRALFQAAITAHKHDPVLKAFYEKKRKQGKHYYVCIGAVARKLCYIIYAILKNNKPYEIPQYSKEV

SEQ ID NO: 221266 - protein, 380 aa, unidentified
MTRATRSGEYTEQAGKDLHLAFELGMKDWKLGFTTDLGTKARLRTMPARDLGRLEREIAEAKRSFGLAATVRVRSCYEAGRDGFWLHRYLASRGIDNGVVDSSSIEVNRRMRRAKSDGLDARKLLTMLVRYHAGERKVWSVVRVPTVEEEDRRQLHRELRTLKKERTRTTNRIKGLLANQGIRLEKNGDLRQRLGRLRQWDGAPLPAGLLARLQREWEHAEFLHGKILELERERRQAIVEGRSPAIEKVRQLMLLKAIGPSGSWVYVHEFFGWRRFRNRKEVGAAAGLTPTPYQSGDGSREQGISKAGSRHIRAVAIEMAWCWLRYQPRSKLSLWYQERFGRGGKRARKVGIVAVARKLLIDLWRFLEQGVIPEGATLKA

SEQ ID NO: 221267 - protein, 371 aa, unidentified
MSTPVASQEEVLLMSMEIGNKEWKLRFSNRKREREVTMPAREMDRLRQLVEQAKEKLGMGAACRVVSCYEAGRDGFWIHRCLEKMGIENVLVDPASIEVNRRKKRAKTDRLDAKKLLAMLVRHVIHEEQGMWKVVRVPSEAEEDERRRHREQEHLKGERTTCLARIRSLLVLQGIAPKRLNPDVEQYRDWAGKSLPVALKAELRRHFERLELLEKQIAQLDADRKERVGSGETAGDRATAKLSRVKAIGLETATVLGYEFFGWRKFKNRRQVGSLAGLTGTPYESGDLKHEQGISKAGNPRVRHKMIEVSWLWLRYQPQSELTKWFWAHYGPESHRSRKAGIVALARKLLVALWKYVDFDEVPAGAVLKAA

SEQ ID NO: 221268 - protein, 443 aa, unidentified
MGRRCIGLDVHREFAQIAVWEDGRVRQAGQIALSAEALRAFSDSLGPEDEVAVEATCNTHAIVRLIEPRVKRVVVSNPQKTRAIAEAKVKTDRVDAEVLCQLLAADYLPSVWVADEQTQASRRQVARRAHIVRQRTRLKNQVQSILHRNLVPRPPVADLFGIKGRCWLANQLLPPDEGLAVEALLRQLDFHGQELRIIDAALGRIALASAEVKRLMTIPGVDATIALSIVAAVGDFRRFRRPEQLVSYLGLNPRVRQSGGQPASHGRITKQGRAHARGMLVEAAWVAVKTPGPLRAFFERVRSRRGMQIAVVATARKLACLCWTMIERGEDYAFARPSLTEKKLRKLELRAGMPSRRGQKGKAAAYSLKEVRRRERELAEQAEHAYRQLVADWRAKTPSKTKPGVAAANGTRLQRPSVGQAARQASVPEPALRSGVDHAHAEA

SEQ ID NO: 221269 - protein, 369 aa, unidentified
MKKNNTCQQNPRRRNKVRPGSLTIGMDLGDKTSRYCVLDEQGEIVQEGSVGTTKKALAQKFGSLRRSRMAVEVGTHSPWVSRLLAKLGHEVIVANARQVQLISASSRKTDRMDARLLARLARVDPQLLRPIQHRSEAAQAHLMVIRVRAALVETRTSLVNTARGLAKSVGERLPKCDADQMGVERMEGLPAELQQALRPLLEQIESVTEKIKESDGRIEQIARTEYPETALLKQVKGVGTLIALTFVLTIDDRDRFQKSRDVGCYVGLRPKRSESGESQPQLRITKEGDVYLRKMLVQGAQYILGYRGPDTDLRRWGLGLASRGGKNAKKRAIVAVARKLGILLHRLWVTGEVYEPLRNSQAHARTVAA

SEQ ID NO: 221270 - protein, 370 aa, unidentified
MAKSTPLYVGLDVHKDSIAVAHAAGGRTDPPVFVGEIGTRQADIDRLIRRLQGKAPALRFVCEAGPSGYGLQRYLTTQGWPCDVVAPSLIPRRPGDKVKTDRRDAVELARLSRSGDLTAVYVPTVEDEALRDLCRARDAARITLKDAKLRLKAFLLRLGLHYVGRADWNAAHKRYLAKVVCPTSAQQIVFQEGVRAVDEQVDRLQRIEAELQALAPQWHRYPVVEALQALRGVQWVVALTVVAELGDLTRFDSPRQLGAFVGLIPSEYSSGASRRQGGITKAGNGRARRALIEGAWAYRHPAKVSQHIQKRIDALPKPIQDLGWKAQVRLCKRYRRLVARGKHPNVVVTAIARELIAFMWAIARAMPTRA

SEQ ID NO: 221271 - protein, 410 aa, unidentified
MLFHDAIGIDPDSKGCVACLVKRLGGKITTKTFPLTSRGRESLASFIGSVPDVLVGIEGKRGQSSPIEMFLEERDIAYHTIPALNVSSYRSAMVGQQKSNREDAQAVAEFLLDIEAKGRLGEYARHDKPDTDLRVLARERLRLGQEMTVYENRLWKVIKESAHDMYLALTGSGDEATAKTSITSRRLLRLFIVQPDITRWARLGDDELLEFSGGKKAPGWGNFVTTVRTPLGYGVSIGRGAQVVMRNMAQVLLQLLDQKAQLETELEAAVNERPVVKALRDHYDGIGSFTAALLVSEIISIERFANDDRLASYAGLTKRSYSTGTNLNQRKSASCNKRLKTAFITFAKGYLRCNKDSHLGKYHQQLLKRGMSRMEALMRIARGLTRDFHRQFRALSTGATTEEKKGKSVA

SEQ ID NO: 221272 - protein, 339 aa, unidentified
MSASYDGQQYVGIDLHRRRSVLVRMTETGETLETVRISNDPGYLKQVMDRAGEAPEVVLEACYGWYWAADTLAELGASVHLAHPLGVKGFAYRRVKNDERDAADLADLLRMARLPEAWIAPPLSRELRELVRHRAKLVGLRTNLKCQVHAVLAGAGVVVTSSDVFGPGGRDLLQRVALPAAMRAKVNSALRLIDAITFEIDTFAALVTARLHADPGYAAVQAIPGVGPTLGAVFVAEIADVHRFRRAEQLASWAGLTPKHRESDTKVRRGRITKQGSKLVRWAAIEAVQRVGPHTRIGAFRDQVAERRGRNQAKVAAARELVECVFYALRDHHVRRLAA

SEQ ID NO: 221273 - protein, 412 aa, unidentified
MKVAGIDVHKKVLMIVVVDASRPEEKPARRRFVTMPSELHRLLTWLQEQGVEEAVMESTAQYWRSVWLELEPHMRLHLAQAFSNRAPRGRKHDFKDAERLVRRLIANELILSFVPNGEQRIWRSMTRMKLQLTRDRVRLQNQIECLLEEMRIKLSIVVSNLLGASGLRILHALAKGETDPKKLAQLGDERLQCTEEQLVDALTGRVQPVHGEMLALQLQRLQLIDQQMTELNRMIAQAMKCHQDAVIRLGEVPGLGVDSAQQIIAEVGAQASTFQSAAELTSWVGTCPGKEESAEQNHSSRSAKGNKYLRRVLNQAAHAAVAKKGSHFQVVFRRLLPRLGYQSAIWAVAHRLCRVVWKILHEGVRFIEQGHEVGPREKKKRAQLLARALRKLGYEVTITPTNQVAGRAAVQI

SEQ ID NO: 221274 - protein, 319 aa, unidentified
MAQIDPVVVGIDVAKDKVDACIRAFTLRQSCPSTAQGQRKLVAWLRKHRVAKAVMEASGGYERDWARVLRQAGIEVRIVDPKRVRSFALSAGRLAKNDTIDAEMIAWFAETFRQAAAQMHDAAHEELLGLVKARGTLVDLKRRLQAQNEHAAPGLVQKAHARVLKNLASEIAKLEAAIAAKIKATPHLAERAEIIESVPGFAETTAANLIAGMPELGQVSDDIAAALIGVAPYDDDSGKRRGERHIKGGRRWVRNAIYMPCVGAVTQNNPVLKAFYQRLIAKGKKPKVALVACMRKLIIILNTMIARRQKWNPICHAAT

SEQ ID NO: 221275 - protein, 346 aa, unidentified
MTIVGCDFHPAWQQIAVLDTETGEITEQKLMHGNGEAERFYQRLPAPSLVGLEACGNSQWFVDLLRRLGHEVWIGDAAQIRASYVRKQKTDRRDAAHILKLLVEGRFPRLWTPSAEERDLRQLLVHRHKLVSIRTRVKGGLQHLALNRGLQKKSKLWTEAGQKALRELPLDTWAACRREDLLGLLASLDQQIGKLDAAVERAAEEHPQARLLMTQPGVGPITSLAFVLTLGDVSRFQRGKKVASYLGLIPRERTSGGKQRLGAINKQGSSFLRTLLVESAQSVTRLDEGFRKQYLHRCHRMAKGVAKVAAARRLAIRLFWMLRTNTAYPEIVRIESSPTLAVVGES

SEQ ID NO: 221276 - protein, 309 aa, unidentified
MNTIGIDVSKDTFHAAFNDVHVEVFKNTESGIKNFMEKLESKEETLIGCESTGVYHLLLCETLRKNGWMIKVVNPLIAHRMIQSILRNIKTDKHDALSIRKVLLTGAGYLYTDTPDVVALKMLVQEREALSKMLSMLKHRIHAHDIRARATGLDVHDSFTGPLKLLSYEMREIEKKMSSYAPHIQLLLRSIPGVGKVTAAALVAQIGDIKRFSSPEKLVAYIGLDSRVHQSGTSIHWKGYISKRGSRYLRHVLFNAAFIAKRRNPGLKKYMEKKLSEGKHYFSALCAVERKLVHIIYAVWTRGTPFENR

SEQ ID NO: 221277 - protein, 344 aa, unidentified
MKFIRFIGIDVSKKTLDASIFVADEVINKFPHIQVRNDRQGFKDLLRWTKDQGVKPKDALFGLEFTGYYSDELEQFLTKKQISYTMLPTTVVKHYQRGTRDKNDKIDSAKIADYLFRFNGTECIKLRVLPSKAMQQLKALKSERKFLVQHRVACENRLQVAKSKSEEKHLQKLIDLCKEEIEQVEKQIADVVTSDEEIYTTFRLLNSIPGIGFVNAVNTIANTQNFTAFETARQYAKYLAVAPSEHSSGTSVHWRRRPSPHADLQAKADLSMAALHSIELSAEMRQLYERKLGNRPKDKDIQRKALNAVKFKLIREMFAVVKQARLFELRGLDKAQTKTHSTEK

SEQ ID NO: 221278 - protein, 346 aa, unidentified
MTTKLYIGLDLHSSNTYIGVMDKKMERIFQKRVDNKLDEILRRLEPFKRYTAGVVVESTYNWYWLVDGLMEAGYHVHLSNPSAMVQYEGMKCQDDKHSAFWLAHMLAIGNLKEGYIYPKAERPIRDLLRKRLFLVWNRTSHILSLQAMIHRNTGERFGSEELVKLTEATLQHLLKNEYLVMAAMSDLSGIAQLSEQIKWIQKTAKKVAVLREPFHYLLTIPGVGDILSLTIMYETGNFDRFASDKNFSSYARCVPAVRTSNNKRKGDANRKNGNRYLAWAFAEAAVYARNASARINAYYQRKKAKTNAAVASKAVANKLSKAAYYVMRNRTEYNENLLFGPCRPDR

SEQ ID NO: 221279 - protein, 383 aa, unidentified
MKKNIKTTVMRTARAAALAVARPQPAADGAASITPPYHAVVGLDVGDRQSHYCVLDRDGGVVTEGTVKTTEASLRVLFEGKGRMRLALEAGTHSPWISRLLMALGHEVLVANPRKLRLIAESDAKHDRADAQLLARLAHVGPALLAPIHTRSAQTQLDLTLIRAREVTVQTRTKIVNAVRGMVKSTGHRLPASPRLTFARKATEACPEALQPALLPLLRLVQTLTDEIAAYDRLVVAKARAYPDTEAIQTIHGVGALTAVAFVLVLNNDRSRFKRSRDVGCYLGLKPKQRDSGMQSPQLGITKAGDPLIRRLATQSAQYILGPFGRDSALRRWGLVLASRGGKNAKKRAVVAVARKLVVLMHRIWITQEAYDPMRGVRVRPAA

SEQ ID NO: 221280 - protein, 376 aa, unidentified
MNQHKAFFGLDVHKEKIAVAVAVGRQAPEFQGVILNRPEAIRKWVQAVRQHHPQLEVAYEAGACGFVLQRQLDELGVSCQVVAPSLVPLPAGRRVKTDRRDALLLARLLRSGDLTPVWVPDAEHEALRDLVRAREATVADRLRANNRLRKLLLRHGVQPPPRVKPHTRAYQRWLASVQLPYPTQQVVLEEYRAAVAECQARIDRLEEVLRRAMATSRYAPTMAAFQCLRGIGPLTAVTLVAELGDLRRFKKARALMSYTGLVPSEYSSGDGHHRGPLTKAGNAHVRRVLVEAAWHARHVPRVGLGLKRRQADQPELIRAISWKAQQRLHARYDALVHRTHNAPKSVAAVARELIGFVWAIAQQVPPPTPHPLSLAA

SEQ ID NO: 221281 - protein, 312 aa, unidentified
MTLIAAGVDVGRDSLDVAIAPMGRGFRAPNVAPGIKVVVDRLKRAGVTRVVLESIGAYGQRLVRALAEAGFEVGIVDPRRIKALRLAEGKRAKTDRLDARLIARFALLMSDAARPVPDADAFKLRALSTRRRQLVEMIAMEKTRLKQALDPEIVDSLKAALVALTAERARVDRQLEARARLQPGGERRRELLLSAPGVGPAVAITLLADLPELGTLNRKAVASLAGLAPHADESGTRKGDAHIAGGRPCVRTALYMAALAAVRCDPAFKARYQAMRAAGKPGKVALIAIARHLLLALNAMLAEDRLWTSNPA

SEQ ID NO: 221282 - protein, 408 aa, unidentified
MEILYPRCAGLDVHKDSVVARVRCVSAPQADETRSFATTTGALIELQEWLSTHAVTHVAMEATGVYWKPVWHLLEEHFELVLANAQHIKNVPGRKTDVNDAAWIADLLAHGLIRSSFVPPAPIQELRDLTRTRKQLVREISQHTLRIQKTLEDANLKLSSVLSNVIGASGRAILSALIAGETDPERLADLAQGTARYKRTALIAALHGRITPHHRKLLRLHLDLIAALEAALAELDRDVGKLLAPIRTSARLLTTMPGVSELTAQVVLAEIGADMARFPTPAHLLSWATMCPRNDESAGKRRSTRTRKGSPWLKTALVTAAWAAVRVKNSYLQAQFLRLRARRGAKKAILAVAASMLTAIWHMLKDGVEYRDLGADHFSRRDRSKAILRLVRRLNDLGCNVQPTPQAA

SEQ ID NO: 221283 - protein, 429 aa, unidentified
MTCISAGVDVSKNRSTVCIMDQDGKFIMRPFLVWHSTEELDFLADTLKRLNGEVRVIMESTSVYQYPIALQLKERGLFISIVNAYEMKQFANTDFRGGKTDKKDSRTIASYGISYWYKLVEWQIPKDTYFNLDLLNRTYMNAKKHRQIILQELQHYIDCAMPGMDKELHSLNLSTKKDFMLDFVEKFWHRDEIVNMTEAEFTEVFTAWAKKKGYRPVEGKAAKIYAIAKSCIPYYPANPTVKTILQYIVDKLSGVNRTLVTIVTQMIEEAKKLPEYQIVREMPGVGDPLAARFFGSVGDIRRFKNSKALVAYAGIDSPPDESGDFSSTHRHITKKGSKVFRDTGYEIMMALRAQKRTWEKVRKNPEVYDYMLKKEAEGKPPKVAKIAALNKFLRIIYARIKELYDNMALAERAKTKTRSKTRAKTKVTA

SEQ ID NO: 221284 - protein, 309 aa, unidentified
MDVIVGIDVSKDRLDVHVLPSAASFAVGNDDAGLDELVVRLRAVKADIVAVEATGGYEMLVVAGLSSVGLAVVVVNPAQVRSYANALGKRAKTDPIDAAVIAAFVAATKPDIRPLRDAQSKAFSAIVSRRRQIVQMITAEENRARMALTKETQKSIRRLLAALRRELASLDDELDGRIRASPLWRVREALLTSVPGVGPTTARTLIAEMPELGTLDRRQIASLAGIAPFTRQSGKWRGRSFIGGGRGKVRAVLFMAALVASRHNPVLKAFRDRLVTAGKPKILAIVATMRKLLTILNAIIRDGRPWQSA

SEQ ID NO: 221285 - protein, 467 aa, unidentified
MAARKQKQRRMSAQVVEDEDYQLRYEIVAGIDVAKDSAVVCVRMPPVAGRKHRTSHLQTVPAMVPAITELAAELKELGVQMVSMEATSDYWRVWFAVLEEAGLAVQLVNSSQARNLPGRPKTDKEDARWIARLTEMGMLRSSFVPPPQIRALRVYTRHIWDLTADRTRYWQRLEKLLEDALCKLTSVVSKLAGHQTARAIIEAMIAGERDPQVLAALGRGKMRNDKLPALAEALSGMRFGPQHAHAAASLLRAIDLLEAELQDLQEQVAAHLAAIPTSWGVDGDGVTGPQAGRAGGAAALPAADRLDEIPGLGGEAAIALIAEIGLDMSRFPTPQALVSWAGLTPTARQSGPRKGRGKKGRGNTYAKRIAVLAAYAAANTDTFLGERFRRLASRPGGGGRKKAGCAVGRSILIIVWHLLNDPAARYRDLGPDWHARHTDRSRKARNAQRQLEALGYDVIITLREDAA

SEQ ID NO: 221286 - protein, 364 aa, unidentified
MGLDVHKDSISVAAAEPGRAPGRLIGKVIHDVNKLLKVLAKVGTVEQLHIVYEAGPTGFGLQRALKARGYLCEIIAPSQIPRRAGDRVKTDARDSAQLAECSRAGQLSAVWIPDPEDEAIRDLSRAREDAVNSRVQARHQLKGFLLRHDVRCTGKTSWCGAYYRWLGTLNFGAGAAQTAFTEYWQAVTAADDRVERLTKALEGSITGWRFEPVVGALQALRGVAAITSIGLVAEIGDLARFAHPRKLMGYLGLTPSEHSSGERTSRGSITKTGNAHARRLLTEAAWNYRFKARIGKQAQIRQQTLSEPIRRMAWAAQLRLTQRYAALNARGLQANKACIAVARELAGFIWAIGMQAQREHSGPN

SEQ ID NO: 221287 - protein, 354 aa, unidentified
MKYFAGMDVSLEETAICVVDETGQMIKEARTTSEPDALHALLASFNLPFERVGLEACSLTAWLHGELTSAGWPAICIESRHAKAAMGAMPNKTDRNDARAIAQIMRTGWFKAVHVKTPTCRSWRSLLVARRAVLNQMRTIENVVRAILRETGLKLGTPARKDFIVRAREFVAGEKGLAMMIDPLLEILATMLREFTRLTKQVLVIVRDEPICRRLMSTPGVGPMTALAFRATIDQPERFKKSRDVGAHLGLTPRRYQSGETDIQGRISRCGDELARTALYEAAHSLLIRSKKWSALRAWGMKIAKRRGMARARVAVARKLATILHRMWVDNTEFRFGREQAANPTIKAITVVAA

SEQ ID NO: 221288 - protein, 342 aa, unidentified
MDEVSIIGLDLAKNVFQAHGARSDGTVAFRMKISRAKLIAFFSSVPRCVVAMEACGAAHHWAREIGALGHEVRLIAPIYVKPFVKRNKNDAADAEAIAEAAARPTMRFVAVKSVEKQASGMAFKARDLLVRQRTQAINALRGHMAEYGVVAPNGPVHIARLAQSVSGSDDRLPSAVVGLCKMLLAHIAWLGEQIGLLERELRERARQDATVKRLMTIPGIGVICATALQALAPAAESFARGRDFAAWLGLTPRQKSSGGKTRLGATTKMGQRDLRRLLICGAVAVVRWASRKGAPEGSWLARMMARKPPLVIAVALANRTARIAWALMARGGVYRVPGTVVA

SEQ ID NO: 221289 - protein, 394 aa, unidentified
MRSWVGFDVGKAFHWACVLDDEGEVLFSRRVEANERDIEACCEEIAALGSPGERLVATDLLGGPATLLEAVLLERGERVFHLPGMAANRARDGYRGENKSDSRDARVIADQLRTRWRSLHEVLPRGDEAAELRALVAYRRSLVEEQARLITRLRALLLEVFPGLEAALDLSTDRALLATTRVATPSAARRLGASRLARWLRDRGVRRSEGLAGKVIEAAKGQHRELPAAEAKAALVSEMAAEILRARRRIATLDARLEELMAAKPEAEVVRSMPGMGPLFTAEFLSEVGDPSRFASADALAAAAGLVPATRQSGGASFQRRARRGNRTLKNLLYRSAFSCTVHHAPSRAYYLRKRAEGKPHHRAVIALARRRVNVLWAMLRAGELYREPAPEAA

SEQ ID NO: 221290 - protein, 430 aa, unidentified
MKSNTQNAKIEAITEKTLVLGIDVGSETHYARAFDYRGIEYSKKPFKFSNTEAGFATFKEWILDLKERHEKDKVVPGMEPTGHYWFNLGKFLQDNEMKPVLVNPHHVKKSKELDDNNPTKNDRKDPKVIAGLVREGRYMIPYLPDGVYADLRTASNIRFQLQAELTRIQNRISRWFNIYFPEYKTVYGKPDAKSGMLILKAAPLPEDILTLGIDGVNQIWRDAKLRAVGKARAKTLIEAAEHSVGSKEGAVSARMEIRMLLEDYESRNIRLQEVMALIEGLVKQIPMAEKLLEIKGVGIRTVSGFLAEVGDISRFNNPKELQKLAGLALVENSSGKHKGETTISRRGRKRLRYLLFEVAMSLVAKNPEFRELHNYYTTRRLNPLKKMQSLMAIAAKLIRVFYAMLTKGVDYDPKKMVSDIKRPAVYLQAA

SEQ ID NO: 221291 - protein, 355 aa, unidentified
MTSTQYIGMDVHKESISIAVMNAAGKIVMECVIETKAGMILQFIDGLRGDVHITFEEGTWAAWLYDLLKPHVTKLVVCDPRKNRSMREGNQSDKIDARRLAELLRLDHLNPVYHGDHGLRTLKELVRSYLTITQDLSRVMTRVKAIYRSWAIPCTGKQVYAPRHRGEWLAKINEPGVRRRAEFYYQQLDALRCLRQEVRRDLLAESKKHPAWKRLCGIPSIGPIRAAVLLGILQTPHRFRTKRQLWTYGGVGIQTSSSADHHVVKGQLERKKKHVEIRGLNRNYNHDLKNIFKGAAIVAATKPGPFAEFYAELVAKGMRPEMARLTLARKIATIVLIVWKRGVCFDAQHLKPQTA

SEQ ID NO: 221292 - protein, 445 aa, unidentified
MPQFIGLDIHKTVVAVCVVDPHGTVCTRLRFPLTRTTLAAWASQLTAEDAVAVEATTNTWAVIAVMQQTPARLVVSNPLRTRAIATAKIKTDRVDAEVLAQLLRCDYLPPVWIPDAATLATRRLTTRRSVLVAERTRLKNRLHSVLHHLLLPCPVADLFSRAGLAWLATVALPAAERAAVDADGRLLAAVDQELATLEQTLAEEAAPDARVRLLLTLPGIDVAVATALLAAIGEVSRFPTAARLAAYLGLVPSVRQSASHCYTGHITKQGASHVRWLLVQAAQHLDRHPGPLGAFVRKLQRRKNRNIAIVAAARKLVTLAWHVLRTGEPYRYAVPQTTHEKLARLRRRATGERRRSGPPPGTPRAAAYGTGQRTRRVPTLATVYQQEGLPPLRPAPVAERRVLATNPDVQQFVTSLQVSHRQPRHTGRPLRGEPETPGEDRAQPG

SEQ ID NO: 221293 - protein, 455 aa, unidentified
MPKTTTGDRPELKPVNFGAAAIDIGSRMHMAAVDPTCADTPVRAFGTFTQDLHDLANWFKACGVTSVAMESTGVYWIPAYEILEQRGFEVILVNARYAKNVPGRKTDVSDAAWLRQLHSYGLLRGSFRPDAEIATLRAYLRQRERLVEYAAAHIQHMQKALMEMNLQLHHVVSDITGATGMRIIRAIVAGERNPDVLATYRDVRCHSSIETIRAALIGNDRDEHVFALTQSLELYDTYQAKMLDCDRKLESLIAALTDKGAKPVGKLPRARVKTKQVNTPSFDVRAALYGVLGVDLTEIHGLGPSLALKLIGECGTDLRAWPTAKHFTSWLCLAPGNKISGGRVLSSRTRRSSSRAAALLRLAATTIGRSDTALGAFYRRLSSRAGKAKAVTATARKIAVLFYNTLRHGMTYRDPGADHYEEQYRSRVLANLKRRAKSLGFVLQAVPCDAEVAVS

SEQ ID NO: 221294 - protein, 438 aa, unidentified
MTVTVAIPFYKVVILMMKLKYPICCGLDVHKNVIVATIVITNRDGVSEYRQKSFSTINSDIQKFHNWLIENNCYHVCMESTGKYWIPIFNYLEKDIEVCLTHPKYVKAIKGKKTDKKDSKWIADLYKFDLVRCSFIPPKDFRQLRELARYRFKLVCMKSSEKNRIQNCMTVSNVGIASVLSDPFGKTATEIMSYLLEHTADSIDEKAVRKLIKKGAKAKSDEIIEAIRGCNIETDQAKKLELALGHLEYLDGMITQTEVELYVRIKPYYEFVEFVSTMPGMTELSSTIVLAETGVDMNIFDDAKHLCSWCGLSPSNNESAGKKKSVRIAKAGAYLKPMMVQCALAAIKNKKQPYFAIKYGRIKKRRGHKKAIIAIARMMMVCIYHMVSEKKPFTPADYEELMKPQNHVERVVLNENNVFAYLESLGYDSSKLVKRNDN

SEQ ID NO: 221295 - protein, 353 aa, unidentified
MIVLGADMHKSSHTIAAVAAASGELLGDKTVRVGDRGFAAALDWARGLQDERVWALEDCRHVSGAFERFLLGHGERVVRVATRLMAGERRGGRDRGKSDLIDAMAVGRAALREGVDRLPVAELAGVELDIRLLVDHRERLVRMRTALYNDLLWHLHDLWPEQTFPACALLSKKWTARIARRLARAEQTARVRIARDELRHLRELSDTINLLEAEIADLVAQVAPQLLAEPGFGALTAGKLIGEIAGAQRFSSDAKLARAAGIAPIPVSSGNTNRHRLDRGGNRQINTAIHRVAITRLRCHPETKTYIERKRGEGKTNREALRCLKRHLARRIWHLLQPSPPVLNNTPNINLLT

SEQ ID NO: 221296 - protein, 394 aa, unidentified
MRFAGIDVASEIHVVAVVGENSEVLVKPSSFAEDAAGYRKLFDLLGAPGDLLVAMEATGHYWKNLFAALAAAGFAVALINPLRTHRFAAEDLERTKTDAIDALGIARFAAQKRPATTKLPDAATEELRELVHLRERLLQDFGDRVRQLHRLVDLGFPEFTRYVHGLDSQLASAILHDYPTAAAFHGVSVKRLAALRYDKRHKVGLELAQSLVEAARRSVGHHHGHAYRVQVQYVCEDLDTLRRRLHELDGNIDAKLGEHDVGSLLTTIDGIGTQTAARLIADLGDPAHFRSPGALAAYVGVIPALKQSGKRNGSRAAMTPIGNARLRAALWMPTLTAVRTNPWLRAHYQQLRQRGKLPKVALIACMHKLLFAVYSVAKHRRPFVPKLATTKPST

SEQ ID NO: 221297 - protein, 383 aa, unidentified
MVGIYIGLDVHKSSVYVTAMDEEGNVCESYGIENTESALNAFRSRYLDLRPEIALEVSTSGKYIARKLRDMGFSVHLADPSKLSLIFMTAKKNDREDSYKLSKLLRLKELPEVHLPSRELDDLRSIVRHRKSIGEELNMLKNRVHAILTKHGITIHATDIFGRRGIRSITEESTKLPAMDRIVLSDLMDRISDLKERERMLEDQMAAACEGKNSVRLLMTIPGINLYSASAISSEIDDVPRFPTKEKLAAYAGLVPRQDQSGNRDIKGHITKHGPSLLRFILVTAAHVTIRYSKKMKAKYLSLVRRLGKNRAIVAIARALLECIYVVLTRNIEFEDNTDSLTERKRKVMSMRAKNPRRFKDLEEVEKIFMKNRDQQKTDQLFS

SEQ ID NO: 221298 - protein, 338 aa, unidentified
MKLKRIGVDLAKQVFQVHGVDSHEQVKCRKQLKRHQMLDFFRQLEPCVVAMEACGSAHYWARELGKLGHEVRLIAPQFVKPYVKGGKNDANDAQAICEAASRPIMRYVEVKTVEQQASQSVHRIRGRLIKARTALVNEVRGLLAEFGLIESRKGVAATRELLCRAIDDSDSSMPGSMRELLRGLSEELQGYDERLKKLEQLIQREAREDERVRRLMKIEGLGPISATAIVSAVGDARQFASGRQFAAWLGLVPSQYSTGGKERLGGISKRGDKYLRTLLIHGSRSVLKHCQSKTDKRSDWLSQLMCRRNKNIATVALANKNARIIWAILSKGEQYQPC

SEQ ID NO: 221299 - protein, 313 aa, unidentified
MADGSSVGIDVAKATLEVASSLDRTARWRTTNDETGWAALIAYVQPLQPQVIVLEATGGYEAPAATALAAAGLPVVVVNPRQIRDFAKALGLLEKSDGLDADVLAQFGARVRPAVRPLPDAVQADLQALVTRRRQLVDMLTAERNRVPLARGAVRKNLLAHIRWLEKQLDRTDRDLRAAIEASPVWRVRDQLLQSVPGIGPATSARLLASLPELGTLSHRQISKLVGVAPLADDSGLRTGYRRIRGGRADVRAALYMATLVATRHNPVIRACYQRWRRAGKLPLVALVAAMHKMLIHLNAMLKSNTGWTQTPA

SEQ ID NO: 221300 - protein, 341 aa, unidentified
MRYIGADLHKKSITFCVVETDRQTISVVKRQRIMCCEVHRIEEFLKSHTPCEVTVEATIGYEWFATLAAETAAKVVLAHAGKLRVIAESTRKTDKIDAYVLAEFLARNMIPAAWQPTARVRQHRALVRRRCKVQNRITSIKNTLRGILTRYNKDLSHLFSKVGREHYETIKASLLAEDAWVLDDLFEELKQQTARLKKVDDHLVEFAANAPVKEREARAVLDSMPGVGAVTIDTILAELGDWTRFRNADAVVSYAGLDPGVRESDGHRKDLKISKAGSPLLRWIMIQLAHRMKRTTVRWARAFEQISRRAGKKKATVAIARRLLLVVFAMLRDGRAYQMAA

SEQ ID NO: 221301 - protein, 461 aa, unidentified
MSSKKPEGKRHKSVSTKMEWKAMEVVHPDAAGIDIGGSEHWVAVSPERDPEPVRCFGCFTADLREMARWLVVKGVRSVAMQSTGVYGMPAFEVLQQHGLEVFLVNARHTKNVPGRKSDVQECQWLLKLHSFGLLNNSFQPSDEIRIARTLWRQRGNLVAEASSVIQRMQKVLIEMNIQLSTVLSDISGLSGMSIIGAILAGERDPWTLAALVEPEVKATPEEIAKGLEGNWRKELLFVLRQEVELYRIYQNKIRNCDRELRKHLQSFASVVDLKKQPIGPQPKHKKVAKNAPSFDLRSELYRITGIDWSQVNGINVLTAQTVIAECGADLSGFPSEQQFTSWLGLVPTNEQSGGKILKRRTRKVVNRAATAFRQAATTLLRSQSYLGAQYRRLRTRLGAPKAITAMARKLACLFYRLIKHGQQYVDKGNEYYEAKYRDQQIRALAKRAQKLGVQVVLPALA

SEQ ID NO: 221302 - protein, 273 aa, unidentified
MDAAIIGVDLAKRVIQIHGAEKSGETVYRKKLTREQFYRFMTEIPSCIVAFEACGSANHWARQMELIGHEARLIPPQYVRPFVKRQKNDAADAEAIATAARQPGMRFVSVKTEEQQSKVVVFRGRERLVHQRTELVNALRATLYEFGYVFPIGRASMPRIAALIDDPSADLPSIVRLECQDLLQQIAEKTARIDEKSKKLQEAGAQGEKGKLLQSMPGVGPMTALAVQAFAPEMTQFKSGRDFAAWLGLVPRQFSSGGKARLGRVSKAGQADI

SEQ ID NO: 221303 - protein, 356 aa, unidentified
MNKRTKLNFSGQAIYLGLDVHKKSWSVSIFTQYGEYKTFSQPPEAEVLIQYLERHFPGARYHSVYEAGYCGFWIHDQLREKGIDNIVANPADIPTRDKERRSKRDRIDCRKLARGLRGGEIEGIYTPPRWKLEDRSLIRTRLSMGRKQARCKNQIKSMLLFYGVAIPEQREMGHWSRRFIQWIEGIRMERSSGDMALQLHLEELCHLRQILAKLNRSIVALARTEEYRGWISLLKTIPGISTLTAMIVLTELDEITRFRSIDQLCRYVGLIPDTQSSGEKEHVGGMTRRHHSSLRWLLIEASWIAVRKDPAMMEAFNEYCKRMGKSKAIIKIARKLLNRIRYVLKNQAEYVTGVIE

SEQ ID NO: 221304 - protein, 370 aa, unidentified
MKFEVTKNQLTLKSRTMSKVKELNFDGKTIYCGLDVHKTNWKVNIGMDKMELGGFSQNPNPEELIRHLKKNYPGAEVKVVYEAGFCGFGIQRSLKALGIDCIVVNAADVPSSDKERKRKNDKRDARKLRRELSEGELKHGIYVPDIEMEQARTLVRERHRLVQDQTRCKNRIWHILMFSGIQLGMEQKRWSAKLVKELETLDCPTSLKIALNLALEEYKQIRTIIKQATLAIRKMALEPPFAALQPYLQSIDGIGLISGMVIQTEIQDIKRFRTLDSLCDYAGYVPDISSTNDKDVIKGITHRRNEFLRETIIESSWMLIRKDPAMLMKYQEYAKRMNSNKAIIRIGKHLLSRIRYVWNNKTQYVKGVVG

SEQ ID NO: 221305 - protein, 315 aa, unidentified
MATQTETYVGIDVSKGSLDLGVLEENRTSKYSNTAGGIRELVKAMTEIEPTLIVVEVTGGYERAVLYALFEAGLPVARVSGYRARQYARAKGLLAKTDPLDAINLADYGKAVQPRLFEAKSEQGQCLSGKLARRRQVGEMIKAEKNRLRLAYGDIGASIERVIEFLEGEQKQLDQEIRTLVDNDPEFREQEQLLCSVKAVGPVTAATLLAELPELGKLNRKQIASLVGLAPLNRDSGKRSRYRKTGKGRPAVRSTLYMATLVATKHNPVIRKKYLDLLSRGKVKKVALTACMRKLLTILNAMVRDQEPFRYAIMS

SEQ ID NO: 221306 - protein, 411 aa, unidentified
MIKENYMYVGIDLHKETHTAVIIDCYNQKLGEITFPNRPADFPKLVTKVKKCNTDGKEVVYGLENAYGYGRALAVWLIDKGYLVKDVNTAISHRQAKHRGAMYRKSDSDDAKAIALATLNMLDKLPDACPNDAYWSLGQLVHRRDNIMKQRTRLVNQLHEQLCIAYPSYKSFFNDISRPTALYFWEHYPSRKYLKGKSVEDLRAELVPVSHNKCSTKTCEKILDAVASDKVKNNAYQDARDMVTLSIVSDLQHYDSQLAEVDKMLEQMYKMLGCTLTTIPGVNVITAVKILAEIGDIKRFANANKLAQFAGIAPLHLSSSGKGKDLATKQGNRRLQATIYFLAIQMVQVSSKGTPRNSVVRAYYEKRKAEGKTSQQALICISRRLISIIYGMLKHGTEYRMPVVESAGENR

SEQ ID NO: 221307 - protein, 315 aa, unidentified
MNDQVEHQCVENTVAALSSYLKAVKRRFKVKDASIYLGIENTGRYSWPALRAFSCGELKLHLLSPLHLSKSQGLVRGKSDLVDSQRIARFLKKNLDELSLYQKPREVIEELSLLLARRNKLQKLIKAESATIEEMGQVSKGRVRSFIIADSKKSVLALKKRLQMVELQIENLIAEDQDLKHKVKLLMSIPGVGKILSWYLLVKTNEFKNFDDPRKLACFAGVAPFQHTSGTSVRGRTRVSSFADKTLKRILHLAALRVTQMKGELGEYYRRKVEEGKNKMAVINTLRNKIIHRIMAVIREDRPYQIREKNTLLVS

SEQ ID NO: 221308 - protein, 317 aa, unidentified
MAHSSTMTAGIDTSKSKLDVAVHGRTEHWQVANSLAGWRVLAAKLIEAGVSRVGIEATGGYECGVVGHLRAAGFMVSVLQPVQVKAFGKVHLRRAKNDVLDAVMIAACAAALDQDRIAPDTRLAELARHLTFLEQIEEDIRRFKTRLEHIDEPRLRRLVLGDAARLKARRLAQIRYIARQLRTHPDLATRLDLVLSIPGIGERTALALLIRMPELGRVSREEAAALAGLAPFDNDSGQHRGQRRIAGGRARLRRSLFAAALPAAFRWNKALMALYARLIAAGKAHNAALIACARKLLIYANTVVQRGTPWAEKPLST

SEQ ID NO: 221309 - protein, 392 aa, unidentified
MVGQPQAAKRELFRCRSGSTSQELAELANRLHGLGVTTIVMESTALYWKPVWMALEGEFTLLLAQARSNAAPHGRKSDYADATRLLRRLWADDLRLSFVPDAEQRSWRLLTRTRLQHTREITRLRNQIEGLLEECRIKISGLLSDLLGSSGRRMLRALIVGTVTNPRELAGLADKRLRATPEELERALHGQLGPVHRLLLGQRLDQIQQLEGHIAKLDQCLLDRLTSQRDVIRRLCAIPGIGIEAAQVIVAELGPRAATFPTASDAASWIGVCPGRNESAGHSTSDASPKGNRQMRRILNQCAWAAVRSKDTYWQHLFRKFTPRLGVNKALWAVAHRLLRVIWLVLHEGVEYQERGPSPQDPERLRRRIERALYELRKRGVHYQLTPIAPSA

SEQ ID NO: 221310 - protein, 413 aa, unidentified
MDVLHPRCCGLDVHQSSISACILLREAGRVQKHQRRFGAMTQELQELAEWLRQFGVTQVAMESSGVYWKPVWNILEGQFTVVLANAQHIKNVPGRKTDQKDAEWIAQLLQYGLLRASYVPCEIIRDLRDLTRMRASLSQEASRISSRIQKVLEDANVKLASVATNVLGKSGRAMLEDIISGEDNPELLASLALGHLRVKIPQLRLALEGKIRSHHRFLLRRLLDQIQFVEHEIALLDERLEDIGRQRPDLAQAVARWDTIPGIDRVAAWALLAEIGDNMAQFPTAEHLASWAALCPGNHESAGKRLRGTTRQGSSWLCRMACQCAWAAARTKNTYLSSQFRRLAARRGKKRAIIAVAHTLIVIGYHVQKKQSNYDDLGGNYFDRIHSDGLKRYLVKRLEQLGHKVTLEPMEAA

SEQ ID NO: 221311 - protein, 315 aa, unidentified
MTQTNITTAGIDTSKAKLDVAVHGRTERWQVANALPGWRALAANLAKAGVTRIGIEATGGYERGVVEHLRSAGFTVLLLQPLQVKAFAKVHLRRAKNDALDAVLIAACAAALDPPEIAPDPRLRELADYLTFLEQIEEDIRRFKTRLEHIEEPALRRIVDSDIARLKARKASQIRDIAKRLRAYDDLAKRLKLVLSVPGIGERTALAIVIRMPELGRVSREQAAALAGLAPFDADSGQQRGQRKIAGGRSRLRRSLFAAALPAAFRWNKALIALYTRLMAKGKAHNAALVACARKLLIYVNTVVQRGTPWTEKAA

SEQ ID NO: 221312 - protein, 354 aa, unidentified
MFQNSNSTVAVVGIDIGKNSFHVVGLDVRGAIVLRQKWSRGQVEGRFATMPPSLIGMEACVGAHHLSRKLKALGHDARLMPAKYVRPYSKGQKNDFRDAEAIAEAVQRPTMKFVATKTVDQLDLQALHRVRERLVSQRTGIINQIRAFLLERGIAVRQGQRFLRVELPRILATPPDVLSPRMVRIIEGLAKDWRRLDERIDYLSDEIAAVAQQDTGCERLMSVPGIGPIISSAMVAAIGAGDGFSKGRDFAAWLGLVPKQISTGDRTILGKISKRGNRYLRVLFVQAAWVVLIKPKSWERHGLKPWIEAAKKRLHRNVLAIALANKLARIAWAVLAHGRSFEANKIDDTAAQPA

SEQ ID NO: 221313 - protein, 482 aa, unidentified
MKEPRMKDNRRSPAPRQAAATKHRSWSPLLKRIQPDAAGVDCGATSHYVAVAEDREPQPVRAFSTFTADLHRLADWLVQCGITTVAMESTGVYWIPLYEVLEERGLEVVLVNARQLHNVRGRKSDVQDCQWLQELHSVGLLQASFRPAGEIVALRSYMRHRQSLVEAAATCIRRMQKALTQMNLKLHHLLSDLTGVTGMAIVRDILAGVRDPQALAAHRDGRCKASEQDIAAALTGHYRPEHLFALRQNFAAFEFHQRQIAQCDQAIEAQLASLAESRPPASRELPAARPRVKLSKNEPRGELRAPLHRITGGADLSQIDGIGPYGALQLIAEIGTDMSRWRSEKHFSAWLTLAPNNKISGGRLLSSKTQPSANRAAVVLRRCAMSLTRSATALGAYYRRLAYRLGQPKAITATARKLAILVYRVLGGEMVYRDPGATAYDQLHRKRLINGLRRRAQEFGLSLINLETGEVLDHALVPQSVS

SEQ ID NO: 221314 - protein, 342 aa, unidentified
MRKVYVGLELASRSCVVTAIDTKGRKLETRVLETSERSLIGFVKGLGAKVHVLMEEGEMADWAWRTLLPHAFKVEVADPVRNAWIARDPGKNDRVDSEKLAELARTGNYRPVIHLESLQMVHFKMAVKQYEETTEDVARQKTKIKALYRTQGIITTGNEPWGRRREDFLGSISCGLVPTMLLELEKLDWLMACKARMRRRLAELAKQFPIVARLQAMPGCGLISAVRLVAYIGDPHRFSSKRKLWRYARLGIVRPETGGKPIGRERLDKRGCGSLKDASRTIFNRACATRRDNLIKRSYRRCLANTGNDVHARLTCQRKILAIAWAMWRDDTAYDDNLDIRA

SEQ ID NO: 221315 - protein, 319 aa, unidentified
MSQNDPGVVGIDVAKDKVDACIRAFKLRQTWPSTAQGHRKLVGWLRKHQVNKAVMEASGGYERAWARVLREAGIEVRIVDPKRVRSFALSAGRLAKNDSIDAEMIAWFAETFSEAPSQTHDAAHEELQALVKARLDLIDFRMRLVSRSEHAAPGLVQKAHAHILKSLTSEIAKLEAAISAKIKSTPDFAERAEIIESVPGFAETSSANLVAGMPELGQVSDEIAAALIGIAPYDDDSGKRRGERHIKGGRRWVRNAIYMPCVGAATQNNPVLKAYYQRLLAKGKEPKVALIACMRKLIVILNTMIARRQKWDPSRYALS

SEQ ID NO: 221316 - protein, 460 aa, unidentified
MRTKTRGRPRRKRLEMQVVNPNAAGIDIGSEVHYVAVPPDRDPEPVRAFKCFTADLNRLADWLEQCGIETVAMESTSVYWIPLYQVLETRGFEVILVNARHVKNVPGGKSDVLDCQWLWQLHTYGLLSGSFRPEDRICVLRSYTRQRDNLIKSAGAHIQRMHKALEQMNIQLHKVITDITGVTGMRIIEAVLDGERDPIKLAQLKHRNARSSHETIAKSLEGDWREEHLFSLRQEFELYGIFRQKIAECDRKIEACLNSFESKVDPDHKPLPPYKHGNKKPHGNQPDLDLRNPLYRMIGVDLIVIDGFDVLTVQDIISEVGLDMSKWPTEKHFASWLGICPNNKVTGGRVKDSRSKKVVNRASCAFRMAAQAAGKSHSALGGYYRRTKSRLGPAKANTALAHKLSRIFYRMLRYGTEYVDPGLHYYEQRYRQRVLNNLKTRARLLGYELIQNPELRPAVS

SEQ ID NO: 221317 - protein, 371 aa, unidentified
MPSLKVGLSATAPIGGKERHMPLVVLGVDPHKQSHTATALAVGSHQQLASLRVPASAAGYQQLLGWAEQFRQRRWAIENARGLGCHLAQWLIAHGETVQDVRTTATARVRELSRGRGRKTDALDAAAAAGIAALQGDAGQLQPEDVTVVLALLEERRSNLVGQRTRTVNQLHAVLRELIAGGAPRKLSADKAAVLLSGVRPLTLADHTRKQVARDLVAEIRGLDRRLAAIGKRLHDTVTALRSRLPQTVGVGPVIAGRLLGRTGRASRFPTAAHFATYTGAATLEVASGQHARHRLSRAGDRQLNHALHLIALVQVRTLGCAGYHYFRRKLGEGKTTREALRCLKRRIADHVWRVMLADEQARDRRQLQAS

SEQ ID NO: 221318 - protein, 408 aa, unidentified
MYNAVGIDVSKGKSTITIIRPQGVVICKPFNVSHSAKELRNLTDYIVSLEGETRAVCECTGRYHEPILKAFSEANIFISAVNPKLVKGMGENTLRTIKTDPADSRKIAKYALDNWAELRQYSSMDDTRTQLKALNSQYSFILKQRTAAKANLISLLDNTYPGVNKLFDSPARDDGSEKWVDYAYSFWHADCVRKIGLKAFSERYSAFCKKHHYCVRKNKAQELFEASKELVTVFPKDSTYKLLIQQQINQVNLLSGQLAAIRKEMNDLASTLPEYTTVMGMYGIGETYGPQLIAEIGDITRFSHREALTAYAGVDPGANQSGSRDQKSNRASKIGSSKLRKTLFQIMTTLLQNKPANEPVYEFLNKKRSEGKPYLVYMTAGANKFLRIYYGKIKAYLRELEQAQETAE

SEQ ID NO: 221319 - protein, 323 aa, unidentified
MTRIICGVDIASKSLEARIGLQGAAGSFANDAEGINALGDFCRTHQAELVAMEATGGYEQQAFALLSGQGLAVAILNPRAVRQFAQSMGSLEKTDRIDAGMIAWYAEVKKSPPVCLAPDNQQHLRALVTRLRQLTEVRSAQLNQQRLVTDRKVQASFKKLLTLLARQIGELEQSIAALLEKDPLWRQLDQAFRTIKGVADRTVARLMAEMPEIGTLSNKTISKLAGVAPLANDSGKHQGKRAVRGGRAAVREILFIVASVVGRHEPDFIAFRERLRAAGKPPKVVRIALAHKLLVRLNAKARQVRLRMATLRPNSVVLLAELG

SEQ ID NO: 221320 - protein, 402 aa, unidentified
MFYIIYKDMKKVCGLDVHKDTIFLCILAENGQTFLKEYNTLTSDIEAMRDLIKEQQVSEVAMESTGIYWIPIWRILQGHVEMKLVNPYFIKQLPGRKTDVKDSQWIATVLQKGLIRGSYIPGQHIQELRQYERRYVRICEHVTRLEQAIDRQLHRCNIRITNFTSKVGSVSVMGVVRGLIKGESTSDELIKHIHGRITNKHKEKIAASLQGFVSDSDRFIFRQNYEELELLTRQQQECVKEMENICDSLFKEELKLLCSVPGIQKLSAMTIIAELGVDLKTFLTAASLVGWVGLRPRNDESAKKIKSRKITNGNKYLRRILVQCAWAITRSKGCWLSGKFNELAKRRSQKKALIAIARKLLVIIWHVLSKHEEYKEFKPKLSKEQKQKRIARLEKQILELQS

SEQ ID NO: 221321 - protein, 343 aa, unidentified
MDYFAGLDVSVKDTSVCIVDDTGKIIREVKVASEPDALLTVLTSPRYYFKRIGLEAGPLSQWLFSALAEAGLPVICVETRHMRAVLKARINKTDRNDARGIAQMIRVGLYRPVHVKTLRSQKLRMLLTHRKLLQSKAIAIENDLRATLRNFGLKVGMVGTAKFEARIKELVENLPDLILLVEPLLVVRRVLREQLDLLHRRLLAVVRDDAICRRLMTVPGVGPVVALTYRATVDVPARFRKSKSVGAVFGLTCSRDQSGDRDRPGAISRCGDEMMRAMLYEAAQAMMLRSAKWSWLKAWAMQIARRRGMKRAIVALARRLAVILHRIWVDGTEFCWTREVAAA

SEQ ID NO: 221322 - protein, 351 aa, unidentified
MEEYIAFDSHKHYTWVEHEQVATGRVRQYRLQHAPGAIRRVLAGCEPGTPVALEATANWYWIVEEIEQAGLRPQLVHPRKAKLMMGLMNKTDKLDAHGMNRLQRNGTLPTVWIPPGRLREFRELTRTRVVLVAQRTRWKNRLTATLAKYGAPSSEYSDPYGKGAREELDSRIERLPEQTRWAARQMLAQLDTLSEQILQFEGRLKELVEVTPEMQRLMTLPGVGVILAATIALEIGEIERFPSAEHLASYAGTTPRVHSSGDRVRYGRTRPDVNRYLKWAFAEAGNSVAVNHTRCPARHVSQLYLRLRLRKGHGKAIGAVARHLAEAAFHVLSRQQPYQDPTVRPGRTREV

SEQ ID NO: 221323 - protein, 369 aa, unidentified
MAHSTASLPTPATHTTVELVTTLGLDLSDRVSHFHVLLGDGRTLARGKVLTLREPLSELFAEWKGCRLVIEAGGHSPWISRLGKECGMEVVVANPRRVELISKSDRKTDRTDAETLAELGRSNPKLLAPITHRTKEAQADLAVQRARDEVVRTRTGLINHVRGVLKSHGYRAPSCSPESFGRRAVASIPPELTTALLPMLKLIRDVSAQIKDYDKEIERLGREQYPITQRWQKIPGVGPIVSLGYALTLDDPKRFPRSRKVGAYIGVVPGQKSSGKSNPQMHITKAGDREMRRLLVLAANYILGRFGPDCDLRRFGLKIMGAGNDKVAKKRARVAVARKLAVLMHHLWVTGKTYDPFYLAKKRGEPLPA

SEQ ID NO: 221324 - protein, 349 aa, unidentified
MEQNEVILGVDTHLDTHAGAVISGAGRLLGTLSVTTDTAGYLDLLTWANSFGQLRRAGVEGTGTYGAGLARVLRDHEIEVLEVNRPDRAMRRSRGKSDPTDAENAARAVLAGRATAIPKDQSGAAEAMRAVSVARRSAVKAKTQAINQLRALLVSAPQEIRERLLKVKTAECVEGCARLRSLGKTPVLQTLTTTLRLLAKRWLMLAEELNALDTMLDSLTSQHARRVRERFGVGPQTAAVLVSVAGDNPERLKSEAALAALCGTSPLQASSGKTVRHRLNRGGDRSANNALWTIAMVRMRSDPRTRAYVDRRTKEGMSNKEIHRCLKRYIVRELYPLILADLADSTAAA

SEQ ID NO: 221325 - protein, 351 aa, unidentified
MRTSQNALDTISTIGIDVGKNTFHLVGLDKRGAIVLQQKVTRHQLGRRLSNIPRCLIGMEACSGTHFIARQLAALGHDVRLIPAQYVKPFLKGHKNDYRDAEAIAEAVQRPTMHFVSIKTPEQMDLLALHRVRSRLVRQRTGVANQIRGFLLERGITVRQGFMPLRKALSEILSSKSDALSPRMLNLIGELIQDWRRLDDRIASVSTEIETMVKRDESCQRLMSVPGVGPIVSSAVVAAIGNGTGFKQGRDFAAWLGLIPKQESTGDRTILGKISKRGNKYVRTLFVQAAHVVLERRPRTARQGLWPWIEQASKRLHRNMLAIALANKLARIAWAVLARGHAYQPRIVANA

SEQ ID NO: 221326 - protein, 340 aa, unidentified
MNITRLSIDLAKDVFQLYGVDGKQKCVLTRRITSRAKLIEFISRLKACEIYMEACGSSNYWARTFQGYGHMVKLISPQYVKPYIQRNKNDYRDAQGIMEASFWAGTPYVTPKTVEQQDIQSLLRIRSNYIEIRTTVSNQLRGLMKEYGVFLAAGYQKLKQELPGIFDRNTENGLTPQMKELIEGQYDMLLIFDEKIDKLDIQIEQISKQNEVCQRLQKIEGIGPITALAIIALVGNGQGFKNGRHFSAYLGLVPRQHSSGQKEKLLGISKRGDVYLRELLIHGGRSVVMHCSKKSDARSVWVNKIKDTGGMNKAAVAVANKNARIVMAMLLSGENYQKAA

SEQ ID NO: 221327 - protein, 401 aa, unidentified
MKRACGLDVHKNTIFCATYDGKKHGPVLEYTTLTTSIRAMGTALLSEEVEAIAMESTGMYWIPVWNILEDMGFQLILVNPFLIKQMPGRKSDVKDAQWIATLLHKGLLRSSLVPSKEIRELRTYSRRYIKLQQRQTSVLTDMERMLEMCSIRITSFVSNISGKSVMKVIEQIVHGETTPDILVESIHGRIVNAHTKQNIKESLTGFITEHHRFMLELSLQEYALLVSQGSKCLMKMEELCNEHYKNEMKLLLTIPGISNISAMIVLAETGADMKAFENSGKFSGWTGLRPRNDESAGKYKSTATTKGNRYLRAMLVQIAWAASRTKGTYFKEKFSRLAMRKSRKKALIAIARKVGVLIWNVLYYQQAYNPEKLIVYEPGKLHAKILYHQKEYDRLQKLIQK

SEQ ID NO: 221328 - protein, 422 aa, unidentified
MSPTNILLTQQTLVVGIDIAKRTHYACFVDDRGRVLRKSFPIFQSKEGFQQLYKAIQGAMQAFGKSEVIVAVEPTGHYWLNLAYFLEEHGIPLVMVNPAYVCRSKELDDNLPTKHDAKDALVIARLAKDGRFLVPRLLHEIEADLRVGSTLKEKLRKEQTAVKNAIVRWTDRYFPEFWTVFRDLGKTALSVLEWTPLPADMAGRTAEELIEVYRQSEGMKCPQKAKIQALINAAKDSIGVTEGATMARFEIAALVRRYRQLEAEIAALDAELKALVQTTMEYQWLKTVDGLGDATIIDLLAEIGSFAHYRDPRQLVKLAGLTLKENSSGQRKGQKHISKRGRKRLRSVLFRAMIPLIRHNEAFRELHEYDTTRPVNPLTGKQSIVALCRKLLNVLFAICTKKQAFDAERMKQDILSQVQRAA

SEQ ID NO: 221329 - protein, 340 aa, unidentified
MGEVTTIGLDLAKHVFQVHGVDAEGATVLRKQLRRAQVLAFFSRLPPCLVGLEACATAHYWARELRALGHEARLMPAQYVKAYIKRNKHDAADAEAICEAIGRPTMRFVPVKTADQQAAVLLHRGRERLVRQRTGLVNALRGHLAEFGVIAPQGLRNVGKLIAIVRDEGDARLPDLARQVLQVLAAQIEQLEAAVAAIEKQLMAWHKSNPVSQRLASVPGIGPIIATALAATVVEPSGFRSGREFAAWLGLVPRQNSSGGKHRLGGISKRGNQYLRRLLINGASANLLRSKATKADPWVIGLRRRRPPLVVAVALANKTARIAWAVMHRHENYQRVAAAA

SEQ ID NO: 221330 - protein, 397 aa, unidentified
MYIVGIDIAKRKHEAAVIDGEGTVIIKPFSFTNNCSGYNRLLAMLAKAKLPLDEVSFAMEATGHYWLALFTRLQKEGFRVQVINPVQTNSIRSFYIRQAKTDPRDALLIAEVIRFGHFSESTLHPENIYELRELCRGRHAIVSMQADVKRKVVALLDQVFPEYETAFTNLFGDTSMAILQTCPTPKELSEMRLEELSNLIEVSSHKRFRMAKAQELQALAHGSFGFAMAGDVFSTMIRLYAKHLDFLKQQVREMDRKIAEIMDTLDTPITTITGIGPTLGAYILSEIGDISRFSSAAKLAAYAGIDPTMRQSGEYNGVRNRMSKRGSPYLRHAIWLATSSAVLHDPALKLYFQKKRDEGKPYMASVGHACRKMVSIIYAVMRDNKAYTPCIPNEISA

SEQ ID NO: 221331 - protein, 317 aa, unidentified
MKEKISVVVGIDVSKAILDIGVRPLGRRLRFTNDEAGIVALVAEMRGLSPLLIVLEATGGFETPSVAALAAASFAVAVVNPRQVRDFAKATGQLAKTDTLDANVLAHFAEVIRPVARPIKDADLQALEALITRRRQLLDMVTAEQNRLSMASPHTRKGILHHIAWLKKQLKDIDEQTTRRIKESPLWLVKDQLLQTVPGIGQVTSSTLLVALPELGKLSRREIAALVGVAPFNCDSGTLQGKRPVWGGRAQVRSVLYMATLVAVRFNAVIRAFYMRLCSVGKPPKVALTACMRKLLTILNAMLKTNTPWAQSTPENA

SEQ ID NO: 221332 - protein, 350 aa, unidentified
MERYIGLDVHTQSCTMAVIGSSGRRLRSMVLETNAKTLVESLHSIGGSCRLCMEEGMQCEWLYEVLEPHVEELVVIQPQPRQGTKNDAIDAWHLAEQLRTRSWTKRVIKSPSRFSMLREAVRAYDVATREVTRAKNRLRVLLRSRGIDVDDSIYEPKARQASLKQLKRPQLLRAECLAAQIDALVPAKERAEAWLKEEAARVPEVQRVMTAPGIGPVRAATIVAVVVTPERFRTKQQFWSYCGLGIVTRSSADWEQDGKTRSWRRRKHAQTRGLNRNRHPLLKNAFKGAAMKVLRMSNHPLCLAYEKMLENGTKPNLARLTIARRIASAVLAIWKHKEEYDPEKHGQRAA

SEQ ID NO: 221333 - protein, 339 aa, unidentified
MVIIGCDYHPSMQQIAWVETETGECGERRLMHRAEAEEFYRQLKGKQVRVGIEATGHSRWFERWLAELNFELWIGDPAQIRAKRVRKQRNDRFDAQHILKLMLEGNFPRIWVPTAENRDLRQLLWHRHRLVGMRTRVMNQLQAVAMNEGIRRKKGLWSEKGRQQLESLSLMPWTTRRRQELLQLLDQFDPNIEELSQAIKQEAERIPEVKLLMTHPGVGPITALAFVLVIGTPERFGCGKQVASHLGLIPCEESSTEHWRLGHITKQGNKLLRFLLGQSAQSVARCEESWHRQYAHLSMRRNKLIAKVAMARKLAVRLFWMWRKGWDYPQLKKFGSYVG

SEQ ID NO: 221334 - protein, 370 aa, unidentified
MEQITRAGGVGEARGGAIVRVGADLAKRVIQVHAVDADGRVVCRRALPRDKFIAWCARLPAGCVVAMEISSGAHHWARRLRELGLVPRLMSAQLVEPYRSQGATGKNDANDAAAICEAASRPSMRFVPVKSVEQQSMLCVHRLREGIKADRTACINRIRGLLAEFGLAFAQSPEALRRVLADVLEDARNEMNTLARQAIQRAAEQWLQLDAHLQWCDERIARHARDNPAVKAAAQLMGIGPVGASAAVATVDDFKQFKSGAQFGAWCGIVPRQHSSGGKPQLGRITRRGDSYLRTLLIQGAKSAVLTAHKRQDPISRWAHALRERSGWQVAAVALANKNARILWAVMTRGERFDAHHVSVKPGAPVPTMT

SEQ ID NO: 221335 - protein, 322 aa, unidentified
MSGAVVGIDIAKRKFDVALFLKGKFKHKACMNNKQGFEDLSRWLKKQGVEHVRVCMEATGTYGDELATYLYDAGHLVSIVNPVRIKGFAQSELLRTKNDKVDAGLIARFCVAMNPGTWTPPPPEIRRLQSLVRRADALIDMRTQEQNRLGTTHETVEPSIKEHIGYLDQEIEKLKRQIAEVIDHDPNLRGKRDLLDSIPGIGETTIAVILSALHVFEGVKCVQKTVAFIGLAPKETLSGSSIKGKPRICKIGHARLRKALFMPALVAMRYNPVMIDFYRRLKEKGKNGKVIVCAIMRKLVHLIYGILKSGKPFDQNYKPNFA

SEQ ID NO: 221336 - protein, 361 aa, unidentified
MHVPIRTKGVNAMPSLAERVDVVIGVDTHKYTHTAAAVVAATGAKLDELSIGTDSDGYAALLTWAQSHPGDRVWSLEGAGGYGAGLARFLAAAGEVVFELDRPVRAARRNGAKSDPLDAVRAAREALSREHLAEPKTDGPRAQLAALMAARRSAVEAATLAQHQLHALVIAAPDSLRALFRGQTTAVMLATAAKLRPHTGWDPTTVTTAQVLRRLARRSNDLTEEAAEHEKAITTLVKAWRPDLLELPGIGPIVAAQVLTAWSHQGRIRSEAAFAMLAGTAPIPASSGMLTRHRLNRSGDRQLNRALHVVALSRTRYDQRTRDYIERRRAEGKTDREIRRCLKRYISRQLYRQLEHGGRLA

SEQ ID NO: 221337 - protein, 362 aa, unidentified
MRPAPNMRVGGQAMEHYVGIDVSLELSSVCVVDVGGKIVAEAKIESHPDAIINFLRKLGLSIERIGLEAGPLSQWLHAGLTKGSFETVLLETRHVKAALSAMTVKTDRRDARGIAQLLRMGWFRPVHCKSPGSQEVRALLVARKQLLGKLLDVEFSIRGILRGFGLKMGVVTRTGFEGRVRELCAGQAMLEQIAEAMLAARAALRKEYSKLHKAMLALVRRDAICRRLMSAPGVGPLVAITFKTAIDDPARIRKSKAVGALLGLTPRKYQSGETDVTGHVSCVGDTMARTALYEAANAILSRVTRFSALKRWGMDVAKRRGMKRAKVALARKLGVILHRMWMEGTSFRWTKEASQAPQIARA

SEQ ID NO: 221338 - protein, 347 aa, unidentified
MKILSLDLGKYKTVGCDYEGESGKHRFKGSSTTPAALAQLVREVKPDRVVIEVCNIAGWVCDLLRGMGVAVQVANTSDDAWRWRKVKKKNDRCDALKAAQLSAVNQLREVHIPAIEVRQWRALIAFRQQLVKRRGKVKNHIRDLLLVEGQILPRGAKCWTELGVARLEAMAKPLQEVGMTELWRGQLYMELRQLRAVQQEITVAEEKLDAIAAADPRIALLRTIPGVGPRLSEAIVALLDRPERFRKASEVSAYIGMVPKQFDSGESERPGGITKHGSRLVRSLLVEVAWAGLRYNPWVRQTYQRISGGKKSRKKIAIVAVGRKLLVRCWAMLRDGTSWRAPVIKAA

SEQ ID NO: 221339 - protein, 326 aa, unidentified
MTSLPSPTSDDRINVGIDVAKATLEVAISGHAKTLSFDNDEAGCAALLAELSGLKVGLVLFEATGGFELVCATALQLAGLAVAVINPRQARDFARAMGYLAKTDRIDSRVLADMAGTLVQRGDLSKLVKPLPDAQQLELQGLVTRRRQLMAMKLAEDHRMKMPGVRQRRSLNTIIKALDRELARVDKDLQAFVGANHADLAALLDSVKGVGKATISTLLAEVPELGKLSGREVSALVGVAPINRDSGTLRGKRAIFGGRPDVRRVLFMAALVASRHNPVIRAFYQRLLVAGKPKKVALVACMRKLLTILNAMVRSGKPWDQTLHLG

SEQ ID NO: 221340 - protein, 343 aa, unidentified
MKLMRIGVDLAKNVFQIHGVDCHEKPVWRQRLPRERWLQTVLEKIEPGCEIGMESCGGAHHWARQLEARGFRVKLIAPQFVKPYVKSNKNDANDAEAICEAMSRPSMRFVAIKTVEQQDIQATHRIRSGLIEQRTAKANQIRGLVSEYGLVAPKELLSLRRAIPCWLEDAANGLTLRFRHLLDGLWGDLRALDERVKELDSEISVIAANEPRAQALQQLRGVGPMIATALVVAIGDARQFVNGRQFAASLGLTPRQHSSGGKDRLLGISKRGDTYLRTLMVHGARSALRTAKSKDDRLSQWAVRLAERSHANVAAIALANKTARMAWAMLRNGTHYQPELAAA

SEQ ID NO: 221341 - protein, 412 aa, unidentified
MIAEFHFFLGVDWATEKHQACIMDSQGQVLAQRKIEHSGKGIVEFIGWMEELAQSQVQRIAVAIEVPRGPLVEAFLEHQWAVFSINPKQLDRFRDRHTVAGAKDDSRDALVLADSLRTDQHCFRRVTVDHPDIIRIRELSRTEESIGTDLRRSVNQLYQLLLRYYPQLLQLCSTPDESWLWALLELAPTPEQGAKLKPARIRQLLAKHRIRRWSAEEITEILTAPPLPLAPGSVEAASEHVLLLIPQLRLLAMMRKQVADRIEDLLDTMAASASDAPETKLFRDVSVLRSLPGIGRVVTGAFLAEAAGPLQQRDYYAIRAHGGIAPVTRQSGKSKHVGMRYRCNSRLRNALYHWARISVQHDPRSEQQYARLRAAGRSHGRALRGVADRLLTVLIAMLKTGQLYDPSRRSAA

SEQ ID NO: 221342 - protein, 358 aa, unidentified
MDVIVERPGALDVHNASVMACVRVPAQNGRREEHVEEFSTTTQGLLTLRDWLAAHGVTDVVMEATGAYWKPVWAVLEDDFECMLVNARHVKQVPGRKTDVKDAQWLCQLLEAGLLKASLVPPKPIRTLRNLTRYRKSQIRDRQREANRLHKVMQDTGIKLDCVASDLLGKSGRAMLDALVAGTTDPAVLADLARGQLRKKIPALQEALEGRFGVEHRLVVGRILAHIDFLDESIEQLSEAIEEQIAPFAPAVELLCTIPGVQRRTAEVMIAETGGDMTKFQSAKHLASWAGVCPGNDQSAGKRRSGKTTKGSKWLRGVLIEAAKAAARTKNTYLAAQYGRLRVPAAPTAPASASPTRS

SEQ ID NO: 221343 - protein, 346 aa, unidentified
MEIKRVGVDLAKNVFQLHGADRKGKTVWTRKLSRGKWLRVLFDTVQPGTEIGMEACAGAHHWARQLIQRGYRVKIIPPQFVTPFVKSNKNDANDAQAICEAMGRPNMYPVKVKTVEQQDLQAMHRVREEIKSHRIAKANQIRGLVTEYGLVAPQQLSSLRRAIPDWLEDADNGLTLLFRQLLQGLWGDLYVLDQRMAELDQQIAVIAEENPIAKRLQQLRGVGPLIATALVATMGDARQYGKGRDMAAAIGLTPRQHSSGGKDRLLGISKRGDAYLRCLLVHGARSAVRTAKDKEDRLSRWIISLQARRHPNVVAVALANKMARMAWAMMTRGVDYDPDLAAVSVN

SEQ ID NO: 221344 - protein, 335 aa, unidentified
MKHYAGLDLSMESTQVCIVDDNGRKVVSEKVGSSPEAIAMMLERYGPIERAVIETGRMSPAICLGLRELGVPVACIDARQAHQSLKAMKANKTDPHDAAGLAQLARTGFYKEVHVKSPAAHGVRSVITARSHLVEARVRLDNTIRGFCATFGYRPGAGQGKAFLERIMQAAHIPGLGDAIASLLSVRAELVEQIKEMDRRLRLIASQSQACEILMTIPGVGVQTSAAFAAAVDEAGRFRQSRNAGAYFGLVPRRHQSGELDWTGRITKQGDGSVRKLLYEAANSILTRSRETFALKTWAMKIAKRRGLKKARVALARRLAVIMHAMLRDGTLFQA

SEQ ID NO: 221345 - protein, 412 aa, unidentified
MMNPVIGLDVAKGESQVQAFLDKKQPYKKSFKVAHTLEGLTSLLEFIREIEEVSGERPPIVLESTGHYHVPVVQFFEDRGYLLIMVNPLVSYRAKSSSLRKVKTDIIDARHLCEMFYKEDLEPYKQRGIQLLNLRNLTRQHENITGMYVQTKLQFQSVLDQVFPEYCGVFGDLYSDVSLLTLQAFPTSEEVLATSEETIATKIKELCKSRSQKWANSQSEKLKAAAGRNPFQKTLYNSLTLSMNMYINMLLEYKKHLSNLEDEIDALAKSIEEYKILQSIPGIGEKIAATIISEIGEIDRFNHPKKLVAFAGIDPSVFESGTFKGTLNRITKRGSSRLRHALYMAVKCAIRDCRKKKTRDELIPRNKRLREFYDKKREEGKPFKVAVIACANKLLHWIYALLKSKSNFQDLA

SEQ ID NO: 221346 - protein, 383 aa, unidentified
MKSVCGLDVHKDSVYLCILSEFGELIEKVFGVLTYQLEEMRDLMLHHHVVEVSMESTSVYWIPIWRVLSPHFKLNLANPYFIKQLPGRKSDVKDAQWIAECTMKELIRGSFVPPETIQQLRQYDRRIFDLNEEIVRKLSKLDAVLQRCNIRLSNYVSNVDSKSYKAVVRAISQGITAPEELVKLIHGRIINHHGIDVITASLKGVVSLAEIDMISQLRDELDMAEAHKEKCQARMLEICERKFPEELKRLQTIPGIKERAATSLIAEIGTDMNKFETANHLASWSGLKPRNDESNKKIKSRSITHGNVYLRKTIIECAWAASRTKNSFFSRFSYHQTQVRKKNKMKVLVAVARKMLIAVWHVLHDNTIYIDFTTDRKTSQTRG

SEQ ID NO: 221347 - protein, 426 aa, unidentified
MARCCTIRRMKTALSPKKGIEMEAIHEPCGLDAPKKKVIACIITPKGIVIKTSDTMTGNILEIVDWIAANRCTHVAMESTVVYWKPTSNLLELARVGVMVVNAHHIKTVPGRETDLKYAEWIADLLRHGLLKGSYIPSRPQRELRGLVRYRKSLIEERPREVNRLHKVLEGCNIKLSSVLSDIMGVSGRSMIEAIIKNIDDPQPIAKMAKGRLKSKIESLEQALHGLVGSHQRMILATQLRHIDFLDAEIQRLDREVEERLRPFEEELELLETIPGVGRRSAESIVAEIGFDMDRFPSDGHLSSWAGMAPGNNESAGKRKSGKVRKGNKHLRSTLVQCARSASRTKETYLSAQFRRIAARRGSNRAAVAVGHSILVICYHILKKRQPYYDLGANYFDKRKSTSVLTNAVKRIEALGFKVIVEEKTA

SEQ ID NO: 221348 - protein, 355 aa, unidentified
MERYIGMDVHAASCTLAVISEKGRKLRDFPVETNGQALVEAVRMIPGHKHLVLEEGLQSAWLYETLSPHVDELVVAGITQSQGHKSDKRDAYGLAEKLRVGNLDKSVFKAPRQFTRLREFSRSHMTLVGDVVRGQSRIKSLYRSRGILVSGVNVYGVRHRAQWQQQLCSSAQARAARLYDHLDFLLEQKKQAEVDLLREAKKHPIVRVLETAPGFGPIRAARLVPIVVTPHRFRTKRQFWSYCGLGIVTRSSSDWIQAADGGWIRARVPQTRGLSRQHNHFLKSLFKGAATTVITQLSKDPIYARYERLLDGGTKPTLAKLSLARMIAATVLRMWKDEKEYDPRRGDPSTATREG

SEQ ID NO: 221349 - protein, 341 aa, unidentified
MKQNVCTVGIDLAKKIFHLVGTDITGKSVWRKRLTRHALVPFLAPLPPVTIGMEACGGAHYWARQFHQHGHTVKLMAPQFVKPYVKSNKNDMRDAEAIAEAVTRPTMRFVPLKAVDQQDIQALHRVRERLIGERTALINEVHGLMLEYGIVLPKGVAKFRQAVVEKLEAEKDKLTALSQELFWKLVKEFASLEDQITFYQEKLETLATTHPECQRLMTIPGVGPITATALVAAVGDVGVFKNGRQFAAWLGLVPKQHSTGGQSHLLGISKRGDSYVRKLLIHGARATLRWVKLQTDKRSQWIRGLLGRRGWNRTAVAVANKNARIVWALLSRGGVYGAPVS

SEQ ID NO: 221350 - protein, 379 aa, unidentified
MTRFPAATSDEHTLYAALELSKNSWLLAIQSPGRDNPSLHPIRGGDADGLVAKLDAARKRLAKVSGRVPKVILCYEAGYDGFWLARFLEPHGIDCRVMDPASLQVDRRARRVKTDRIDVENILHTLIAWCRGERHVCSMVVIPSVDEEDLRRSHRERNRLVRERTAHINRIKGLLFAQGIRGINVKSRHKTLTPAELVTGDGRALPERLAREIAREIERLALVQAQIVKVERERDLAPTPCDATERKRHQLLRLNGIGATSAPILAREVYYRQFANRRQVASFIGLAPSPYDSGESRRSQGISKAGNSLVRAIMIQTAWMWLKHQPNSALSQWFHRRTEGQSKRMRCVMIVALARKLAVALWRYLELGLIPEGAIVKTQ

SEQ ID NO: 221351 - protein, 339 aa, unidentified
MHVTTIGLDLAKNVFQVHGITNDGEVAFNRPLRRAQVLTFFEKLEPCLVGIEGCGTSHHWARELIKLGHNVKLIPPVYVKPYVKRGKTDAADAEAICEAVTRPTMRFVEVKTPEQQAILAVHRTRNLIVRQRTQTINMLRAQLAEFGVILPKGVRFAIHFAKQVLNGEPPVLPEVAGDVVFELCEQLLFLHEKVARCFRKMNRIARLEKRVALLQTIPGVGPITASAIVATVGSGKQFNNGREFAAWLGLTPLNKSSGGKEKLGRISKMGDQYIRGLLFLGMTSRIRAIRTEPEKFDPWFADILARKPSRLAAVAMANKTARMIWAVLTRNEPYKMRTV

SEQ ID NO: 221352 - protein, 404 aa, unidentified
MWFIGLDWADEHHDICVITDTGKQIGSLRIAHTPEGFQNLKDFLLSITGPVDKEEIACIIETNHGLLITWLLEAGYPVYPVNPKTIDRHRRPSGAKTDKIDAYLLAKYGRSEMADLRRLEPDSAIVAELKALTRDQDSLIRSQTRLVNQLTACLKAYYPVALKLFSKVQQRCTLAFLQTYPTPQEAMAASAGQIAQVLKEAGHPTAASVAPKILEILHQPQLTADAITIRTKARLMLVLVKQLLPLVEEIAHYDKVIQELFLTHADSTVFRSLPRAGKRLAPRLLAEIGDDPDRYADAASLQALAGTSPVLFESGNYSKPHRRYACSKPLRNALQQFAWQSTQTAGWARDYYRRKRKEGKSHTVAVRALANVWVRIVFAAWTKKEAYQTTTFEAAQLDHARRVA

SEQ ID NO: 221353 - protein, 331 aa, unidentified
MTHTRDHRQDNPAATGDPEAPQPIHYVAVDIAKASLRVQDDLGALEVANNPSGFGRLLEHLQACQNPLVVFEATGGYERGLVEFLGKADIPMAMVNPALVRAFARSEGMRAKTDPIDGRMILAFARSKSLKSNLRRCEQRSRLAALLDRREHLVEQLAREKNRQQNSESAIQASLRRMMKVLAAEIARIEAEIGRLIQSRPDWVAQTEVMTSVQGVGRVTAWALLAYLGEIAEVSRNQAAALAGVAPFNRDSGKLAGKRFIQGGRAKVRRCLYMAAHSAAVWNPVIAQYVARLRQRGKPYKCAIVAAMRKLLIHIQSLLKKAMKNPELSAC

SEQ ID NO: 221354 - protein, 387 aa, unidentified
MARKRTLSTLDTSIAYEAVGLDLAKEDTAISAFGPDHEGPYLIDRMPYDKLYELLADMAPTLVAMEPCSGAHQIAEQIQELGHEVMMISGRHVQAWVKDHCNGQKTDLNDAFAILNLAYDRWLTPIRGKTREECRLLALQASYRQLKGQRTKTMVHVKATLHAWGFPIRAGSFNQKVLHELIDANREAFGDEVAETLHLMINRVRDLDHDIATVLKLLAEDTQRDPRASLLRSIPGFGVLPTSRWCAVVGDIARFDSPKQTMAFIGLVPNNRITGHHTETSSGREARGQGKMSKRGDKMLRSLCILGAASLCLMVRNDRLPDCPFVASIKERLASSRPWFKVLVYVAAKLVRIATALLKYGETFSYEKAGISKAVLKQWELEQAKAA

SEQ ID NO: 221355 - protein, 354 aa, unidentified
MSKTANVQIAVIGIDIGKNSFHVAGHDKRGSIVLRQKWSRGQIEARLANLPACLVGMEACVGAHHLARKLATFGHDTRLMPAKYVRPYARGQKNDFNDAEAIAEAVQRPTMKFVATKTSDQLDLQALHRVRERLVSQRTGIINQIRAFMLERGIAVRQGIRFLRAELPIILASRTDVLSPRMLRVMEDLAGDWRRLDERIENLSREIETIARQDAGCDRLMSVPGIGPIISSAVVAAIGSGDVFSKGRDFAAWLGLVPKQISTGDRTILGKISKRGNRYLRVLFVQAAWVVLIKPMSWERHGLKSWIEAAKKRLHHNVLAIALANKLARIAWAVLAKGRGFEATRTVDGSTQPA

SEQ ID NO: 221356 - protein, 342 aa, unidentified
MNYYVGIDVSLEASSLCVVDGDGKIIREDKVASEPEALITWLRALNLNLARIGLEAGPLSQWLYAALRQAGFAVELLETRHLHNAIKTMPIKSDRNDARSIAQLLRLGWFRPVHCKSMEAQERRAILTARKLLQSKLQDIEFSVRGILRGFGLKVGKTTPARFAGRVKELVAGHPHLEAIAESLLAARLAMLREFNRLEKQVRDMARTDSRARLLMSIPGVGPIVSLTFASAIDDPGRFTSSKQVGAYFGLTPTKYQSGETDIDGRISKIGDASVRANLYEAAHIILTKPLKGCKALKSWAMRLARRAGTKKAKVALARKLAVIMHRMLVDGICFRDAAARA

SEQ ID NO: 221357 - protein, 416 aa, unidentified
MTDQLNIVCGADIHQRFLVATILCRDGRTWTSRFLMNLNGLLDFKSWLISHGCQRVAVESTGRFWIPVHMILEGTIDVIVANAYKIKHTPKKKTDLKDSEWLAELCLNDMIEPSRIFPKEDRELRNLTRTREAYVRDLSKEKNRIHHILESCSIKLASVISDIFGKSGMHILNGLLSGISIEDVLKGIPDKRVRERKAEELRDALMGKLEISDIFLIRQSLRIINQIKMCIEELDREIRSRIASRPMDIKILRSIPGIGMVSAYTILAEIGNYLDFKEPEHLAMWAGLVPSVYQSADKLITGGITKQGSKHLRWILVQVAHAISHAKEGKLKKFFLKIKAKKGYLVAIVALARKVLCLIHHLLVNREMYEDEGRPSKKDVSIPKNMNQGVLTIEDMIQCIAQAGYEVKKINSGVDG

SEQ ID NO: 221358 - protein, 414 aa, unidentified
MNRFCGIDWAEDHHDVAVIDAHGQLVIKRRITDDADGFAELLGMLESVGDTSNDPIPVAIETPRGLLVPALRATDRPIYAINPMAVARYRERHSVARKKSDHADAMTLANILRTDAHMHRQLPADSDLVRSIAVLARAAEDAAWRCTRATQELRALLREYYPTFLEAFAGTVHTNLAKLEAHAVLAIAPTPQQGAKLTKPRIIAALRRAGRQRMLDGTATRIQHALRRPQLRQLLIFEQAIGRQAVALLATLNTECANADNLIAASIEAFRQHPDYQIITSFPGLGDSTGTRVLAEIGDDRRRFADARRLKAFAGSAPITSASGRSTSITHRRVKNNRLAAVGFVWAFAVIPRPDPAKDHYERRRALGDRHAAALRHLFNRFRGQLWHCLQTEQTYNESKAWNSVMTTPVPNAA

SEQ ID NO: 221359 - protein, 338 aa, unidentified
MNYVGIDHHRQYSHMTMMDQEGQVLRSGRVPNLQSEIEKFLEGGEAMEAVLETGRSSYTMVDVLEELGVAVKIAHPNEVKAIARAKIKTDKRDSEVLAHLLRMNMIPEVYRRSAENRQSQRVLRQRAFYVSAMTALKNRVYAFLAQQKEAVRETVARETNIFSEKGQKVLLGLDLAPGEKSLLTALLKTCRHLETRIEESTALVGKLYEESREAQLIRTIPGFGKYLSVLVAVEIADLNRFPDAAHLHAYAGVIPSTHSSGDKTYHGKIIRAGNRWLRWAAVEAVWPAIRADFDLRRFYERLARGKGANKAKVATARRLLTIIYKVLKEGRNYIAYPR

SEQ ID NO: 221360 - protein, 368 aa, unidentified
MNHPTDCPATVETHMSVILPTTLGLDLSDRVSTYHVQRGDGQALEQGKVTTQRESLAALFRRFQGCRLMIEAGTHSPWISRLGQECGMQVFVANPRRFEEIAKNERKTDRADAEILADVGRTRVQHLRSITHRSKQAQIDLSIQRARGELVRTRTALINHVRGVMKSHGYRGPSASAESFARRLSGALPKELDPVLTPLLRLLQDINTQIKQYELQLQAIPRTQPIAKHLQAIPGIGPIGAVTFALTIDDPTRFKRARQVGAYLGVVPSKRDSGDYHPQLHITKAGDREMRRLLVLAAQYILGRFGPDCDLRRFGQKIAGPGGNRAAKKRAVVAVARKLGVLMYHLWVTGEEYDPFYLAKKRGEAVPA

SEQ ID NO: 221361 - protein, 424 aa, unidentified
MKVTYQTCCGVDVHKSFLVATIVKTTGGIEPSYQKKRFSTFNNSILEFKQWLINNNCHDVCMESTGKYWIPVFNLLEDQINVTIANPKWVKAVKGNKDDTKDSKWIGDLFRLGLVKGSYIPCKAIRILREYTRYRYKLVSCRSSEKNRYQNALTVCNVALDSVVSDIFGKSSTSIIDYLLEQSGTSINHEEIASKLLRRLKSKEDAVIESVEGYQMTDAQKYRMRLVRAHMDYITAEINDVDKMIENMISSNPDFENAIQFLCTIPGVKRDSAITIISEIGTDMSQFSSSKRLCCWAGLTPGSNESAGKKKSVRITRAGVYLKPALVQCAHAAVKSDKSPYYKKKYESLVKRRGKKRSIIAIARMILTAIYQMLSTGEQWNPSDLYKIDMPVALVEKQKAKAIKQAKKLLQREGLLPPDEPLAS

SEQ ID NO: 221362 - protein, 312 aa, unidentified
MADQVFAGIDVGKDKLFVNIYLDSQVRDFPNTHSGLERMSRFLIKNAVDLVVMEASGGYERKPASDLRACGLSVAVVNPTYVRRFAQGMGTLAKTDTIDARLIAHFASVKQPKPQAARTVEEEELAALVERREQLVSLLSVEKNRLSKASDYSKSSIQNSIQFLAGQIDTIETEIKVLVAKSPERQAKLHCMSSFIGVGDVTAVTLLTEMPELGNESREHIAALAGVAPINRDCGKMKGKRRTYGGRARVRRTLYLAALSASKHNPIIRAFYERLLAAGKEKMVALVACMHKILTILNAMLKKGELFNPISA

SEQ ID NO: 221363 - protein, 337 aa, unidentified
MKRYLGVDLHRTQFVVCTRWENGEQEIRQWRIGELPKFVEQLRHEDQIAVEAMGTTARFYDAVAGRVARVVVVNPHQFKVISESVKKTDRKDAQALALYLEKDLLPEVRMKPKQNRELMHLAETRDLLVKQRSALKGKINNLLAMQGIELKREALSSKIALERVLALPVSGMVQLELRILVEQIRSLSESIVELDERLEEEGQQLPGYENLTSIKGIGSLSATVLLTVIGKISDFADENKLASYLGLVPKIANSNESERSGRITKQGNKLARTALVQCGLVAKRYSPYLNRFYDRIKQRRGGGKAKIALARKLVKIVYDTLKNQWVFEDFPSFTLAA

SEQ ID NO: 221364 - protein, 414 aa, unidentified
MKSCLFVGIDTHKDSHTAAVLDGYFEVVATISFDNDRAGFARFDEKLKKLSRGRDLVFGLEDSQGLGSFLASYLTGKGYETLEINPVTTDRGRKHTVSHDKSDERDAVVIAKTLIRERTSLHPVRIDRNSIAIREMVGYRQMLVGESTRIKNRLHMVLFNQYKGVLSCFKDPFRKCALAFFLSYPDPSSLKEAGPDSLSDFLKVNSKGMFSKKKARAILSSTDNNIADSLTDTRAHVIAAHIERLLGIGKELKKIKDVLESLVKASSYHSLTSIPGIDIVTAAKIISGVADISRFSSASKLAKFCSIAPSERSTGKKRRYEKSKYGNKSLRSTIYFVALSHISRTRDGRDKNPISRAYYLKKVSEGKTKKEALTCLTRRLVDIIFAVMRDRSIYNFSKSRFTKQHDAKLNTAAA

SEQ ID NO: 221365 - protein, 310 aa, unidentified
MEKVIEYPQIVATGCGLDVHKEIIVGTISRGNQSFETREFGADTSSLTSLRDWCKQAGVTHVAMESTGIYWKPVFNILEEDFEILLVNARHVKNVPGHKTDKKDSAWLSKLLLSGLLKASFIPPQDIRELRDLVRYKKKLIGQVSSEKNRIIKVLEDCNIKLSSVLSDVEGVVGSKVIDAIISGERNVDVLMSFYHGKIKASREEFRKALIGRITPHHIRMLQFHKKRIKDTERFIDDIDYEIDKAAEAYKVEIDLLQTIDGIKKEGAITIISEIGVDMSKFPNEHHLASWAGVSPGNNESGGKKKESKP

SEQ ID NO: 221366 - protein, 391 aa, unidentified
MECPMPQLNDQSRSHTALKQDCTLIAVLEMSQSAWLVAGLVPGIERHPLKKIEPGEAALLRLLRRWQEEATKAGYPITRITLAFEAGRDGFWLARWLRARGIEAHVIHPTSVAVSREHRRAKTDRLDTALLKRAFLGWLRGERGHCSMAEIPTLEEEDAKRPTREREGLVRERTRLVNRIKGALARLGIRGFKPTLRQAPERLSALRLPEGAPLPPNTLAELRRDMARLRFVLDQIREIEAARLNQLEQHPEKGTHTMVRLLARILGVGIETADMLVHEVLSRNLRDRRAVARYAGLTGAPDESGGRRREKGLAKAGNARVRRGMIPLAWRFLRFQPESALTRWYRVRTADARGATRKTMIVALARKLLIALWRWVRSGEPLEGVVLRPAA

SEQ ID NO: 221367 - protein, 362 aa, unidentified
MDVHKDSIVIAVAREGRGEAETWKTIPYDGVKLRKMLKLLAKNGEVLRVCYEAGPTGFGLCRSLCKVGIDCIVVAPSLVPSKSGDRVKTDRRDARKLAHFHRSGDLTEVHVPEEAVEAIRDLERARDDAKCAERVARHQLSKFLLRNERRWDGKAWTKKHLDWIRKQTFAYPAQQRVLEDYVKTVEDLAERVERLTKHMAELVQETTLAPLVQALQAFRGVAMVTAVTIAAEVDDLKRFQTPQQFMSYIGLVPSEDSTGKRRKQGAITRCGNSHLRRVLVEAAWHYRHLPVMSKELRRRNQGVAEGVRRIAWKAQKRLNERMYHLVQAGKCIHKTVVAMARELAGFIWAVGQEENLLEAKSK

SEQ ID NO: 221368 - protein, 390 aa, unidentified
MEARTVNNLLPAASHDDAVGCLVAIELSKKSWIVAVNTPLSDKISRHTLKAGDGKELLDLCERIRTRVARETKRRVEIVSCYEAGYDGFWLHRLLEAHGIRNYVIDPASLQVDRRARRAKTDHVDVERLLRSLMAYLRGEPKVWSVVCVPSVAEEDDRRLNRERGRLINERIQHVNRIKGLLAIHGIYDYQPLRRDRMLRLERLRTAADGQTLPPRLKAEILRELQRLELILGMIKTIEAERDAIASPKTETEHTNAKKIQDLAKIKSIGPEFATTLIGEVLYRSFDNRKQLASYVGLTPAHFQSGAMCRDQGISKAGNGKARTVMIELAWLWLRHQPDSPLSVWFRERVGKLKGRIRRITIVAVARKLLIALWRYLETALVPKGAILKA

SEQ ID NO: 221369 - protein, 343 aa, unidentified
MQVPYHYIGLDIHKRTIAFCEKRADGQTVGAGAFGATGESIQQWAEARSTPWVGGMEATLFTGFVYDVLTPYAVELQVGHPLQLKAISSAKHKSDAIDAETLANLLRADLFPACYMASPLVRELRRVLRYRNFLVRQAVAMKNRTTGILMEVGVQYDSSRIHRQGYFNALLDSLTETPASVRELLRTTRCGIEMFQSAQRRLLEGLKNHDHLRERVTQLMTIGGVGEITALTWALEIDDPTRFPNLKKAHSYCGLCSGRNESAGKNKRAPLSKQRNPHLQSILIEAAKLAPHHNAQLAQLHAAALERGYNRNRATCAVARKLVAYLMAVDKSGLDFEARSVAI

SEQ ID NO: 221370 - protein, 345 aa, unidentified
MPIVGGLDIHRKQLTFDYLDTVTGEVKRGQIAPADRAHLRAWLARFAGRDDVAFALEGCTGWRYVAEELAAAGVAAHVAEPAGTAALRGKKRHAKTDKTDSRHLRQLLAEGRLPECWVPPSRILECRALLELYHDLRAEHTAWVQRIHAVFFHQGAPALGDGTLRTEKDLAALRAAAAAHLSPVGQLQVAVALEVLEALEARMHAVRHQLLQAARHLTGAKVLAARLYGVGPMTALAMTCWLAGKDRFSSARKAVRFAGLDVTVWSSDRKGPPGRLSRQGPPVLRWAVYEAGKTHARASAPDHRYYAAVKDRQDGKRAALSEARKILRQACHILAELGDDALTAA

SEQ ID NO: 221371 - protein, 450 aa, unidentified
MDVLFPNCAGIDVHKKTVVVCCRTTAPDGTVTKETRTFSTMTAELLALSDYLTSKGITHVAMESTGELWKPLYNLQEGNFTILVVNAHHMHNVPGRKTDVKDADWIAELLAHGLLKASFIPSEPQRDLRDLTRQRTILVRERADVVRRLQKVLEWANLKLASVASDVVGVSARAMLEAIVDGQSDVTALAELARGRMRSKRAELEKALEGRVREHHRFLLAKHLLHIDFLDEQLADYDDQIAAHIQAQPPLPPQLPTSEEDEVAAAAGACSPQPDTVRSDAPLTWDEAIAIWDGVPGVGRRVAEQLVAELGVDMSQFPSAAHAASWAKLSPGNNVSAGKRYSSKIGKGNQWLRVTLIQAAHAAVKVKASYFSAFYHRLVARRGAKKAIVAVAHKLLTIAYTLLQKREPYRERGAAALDERRKDQVLHRMQRRFEQLGYKVHLEPITSMAA

SEQ ID NO: 221372 - protein, 312 aa, unidentified
MKTICGVDVSKAKLDVCIEPGAASASFDNTPAGIAELAAFCRQHGVELAVMEATGGYERLAFLLLWETGMPCAMTNPRSVRLYAEAMGILEKTDRLDASVIARFAHAKNLQPTPAPTSAQQRMKALVARLRQLTDDLIVQKQRRSSLLDNAEVLASLDEVITLLKRQSRTMEGEIASMIDDDPLWVHLSDTFRSIKGVADRTVAWLAADLPEIGTYSNKAIAKLVGVAPIANDSGKRRGKRPVRGGRASVRSILFLVAATAARYDKSLGDFRDRLLAAGKEKMVVRIALARKLLVRLNAKARDARAAYANAT

SEQ ID NO: 221373 - protein, 409 aa, unidentified
MEVVITRCAGLDVHKATVVATVRAPGDDGRRRIVTETFGTMTPDLIALREWLQAFGVTHVALESTGVYWKPVYYVLEDAFELLLINMQELKRVPGRKTDVKDSEWLAQLLECGLLRSSFVPPPPIRELRDITRYRVQQTRDRSREVNRLQKVLEDAGVKVTSVLSDIMGASGRAMVEALVAGTTDPQVLADLARGQLRKKLPALQRALVGHFRPVHAFLLQQILAKIDYLDEALERLTAEIDRRVAPFGPMLTALDTIPGIDRIGAISLVAETGGDMEHFPSAAHLCSWAGMCPGHDESAGKRRTGKTRKANRYLRTTLVQAGVAASHKKDSALQALYARVKGRRGHKKAVVAVGHQILEIAYYVMRDGVTYHELGPDYFQRRDRERTARRHVKQLEALGYIVTVQPAA

SEQ ID NO: 221374 - protein, 338 aa, unidentified
MIGVDLAKSVFQVHGASMTGQLKFRKKLSCQGFAEFMAKQPPAIVVMEACGSANYWAREISRLGHEVKLIAPHYVKPFVKRQKNDAADAEAIVIAAQRPEMRFVEPKSMGQQSRAILFRARERLVHQRTELVNALRACLYEFGHIVPQGIHQLGRIQGILDEPNSDLPELMREECGDLMKQIAEKTVRISARTAKIKALAAEADTARRLQTIPGVGPLTALAVEAFAPPMESFRCGRDFAAWLGLVPRQFSSGGKGRLGRVSKAGQSDIRRLLIIGAMSRLNWLGRKSIPESSWLARIAARKPKMLVAIALANKMARIIWALLAKNEDYRDSAQVAAA

SEQ ID NO: 221375 - protein, 334 aa, unidentified
MNYTHYVGIDISKLTIDVVLFSGEDHSNYQHQVFSNDYTGFDKMEKWIRSLTNTALEKILFCCEHTGLYALPICRWMVAKDAKLWVENALQIKRSIGLKRGKSDKADAYAIADYGFSKQYQARLYKQPDANITQLKHLLTQREHLVRHQASFKNSISEFKGFDEQNAAFCIEQNKELIKYYTQKIKDVDEQLAAIVMKDSDLKKKFDLVCSVHGIGKQTALFILIHTKAFTEFDDYRKFACYCGIAPFPYGSGTSIRGRDRISNLANKKIKTLLTMCCLNVLKGENEFQNYYRRKKAEGKSFLSILNAIKNKLISRIFAVIRKGVPYQMELNPA

SEQ ID NO: 221376 - protein, 428 aa, unidentified
MRSYRIAAVDVHKKMLAVVVADVAGGGEYQFERRKFGTTPDQLRALAQWLIQLGVEEVVMESTAQYWKPVWGALERYWKPELQKRDGATEMSGTLHLCQAKSNRGPRGRKNDFADGERMVKRLVAQELVLSFVPDPEQRLWRTVTRRKHQLTRDKVRFQNQLEALLEQAHIKLSSFVSDLLGLSGRRILNAIAEGETDPAALAALADCRLRATPEQLRDALGACTELNGVYRRLLKMALEELKLMEEQMEQLDQEASKLFQHHEDAVQRVAEVPGFGVDSAIQMMAEVGAEAATFKSAEDLSSWVGVCPGSEESAGESKSTRSPKGNSTMRRLLNQAAQAAVKVQGSIFDIVFRKLLPRLGYKQAIWAIAHRLCRLLWMILHKGIRYEERGPAVSAKSQRARAARMIKELKKLGYRIEGGLLPAGTPA

SEQ ID NO: 221377 - protein, 378 aa, unidentified
MLILGCDVGNETHYLRAIDTRGRELSKSAFSFSNNVDGFSKAKEWAVKIAAEYDKKQIVLGLEPTGHYWFCLATWMISNGISVVQVNPYAVNQTKELEDNSQMKDDTKDPKLIANLVKDGNFGMPYLPEQLYADLRRLSMFRDQLNEDRIRSINRLHRELKIYFPEYKEALGKTEGTFSLELLKQAPFPDDLAALKEDGIRQIWHNAKLRGRGYSRAGEILEYAKASVGIREGKETGKLVVQWFVQKILELDEELALIETQINQKCLEIPHTDKVLEICGIGENTLSGMMAEMGDISRFDDVKETQKLSGLGLVASSSGKHKGETRISHRGRKRLRYWLFQAAKSAVAHAEEFKELHVYYTTREQNPLKKMQSLVESR

SEQ ID NO: 221378 - protein, 362 aa, unidentified
MQQSTTIIAFDQHAATTVAAVLLPGQQRPALHELTSDSPTIIRFVERLRRGHQVQCCYEAGPCGFELQRALTARDVPCDVIAPALIPRRAGDRIKTDRRDADQLAVLYRAGALTAIHIPSEQEEAARDLLRCREDIRADLLRARHRLSKFLLRHGRRFTGTKNAWSKAHDAWLRAQTWPLPALDQTHTAYLRAVDEALARLRTVEEDLRTLLTLEPLRARVERLRCFRGIDDLTALTIAAELGDPRRFASAPRAMAFVGLVPSEHSSGTKQARGAITKTGNAHLRRVLVEAAWHYRHRPFVGAALRRRQREASAAIIAQAWTAQQRLYRRYHRLHGRGKPNQQVITAVARELTGFVWAALIL

SEQ ID NO: 221379 - protein, 410 aa, unidentified
MNPLYVGIDVSSKSNVAYLMKPDGSKHSNFSVPNSRDGSRQLVKRILSAITSESLTDLVIGLEATSVYGDNLVCFLREDGSLAPYNKKIHVLNPKQVNKFKLSYNDLPKNDYVDSFVIADCLRFGRINKEVYLDDYRYTALKNLTRARFFAVQNLTREKQRFMNQLFKKYSTMTQEKVFSDTFSTTALAVYESFESAEALANMDLHQLTEFIIEKGKNRFPDPDSVAKAIQKAARSSYRLPKTVNDSVNQVLSISISSMRAMESQIKAFDKAIAEQMALIPNTLTSVKGIGPVYSAGIIAEIGDINRFSTQASLAKYAGLVWSQHQSGDFEAQNTRMIHSGNRYLKYYLCEAALSLVRCDAEYRSFYHRKYKEVNKYQHKRALAFTARKLVRLVFRLLKDNCLYKAPESK

SEQ ID NO: 221380 - protein, 395 aa, unidentified
MKTVCGLDVHKGMILMCILKTNGSKVIQEFSTLTVDVESMRDLMQDHGVEEVGMESTGVYWIPIWRILQGHFELKLINPYFIKQLPGRKTDVKDSEWIATVVQKGLVRGSYVPGRHIQELRQFERRYVRLCEQSTRIEQEIDRQLHRCNIQITNYVSRIGSTSVINVVKAIITGETTAVQLEKHVHGRIKNKHKEKIAASLTGVISSTDRFIFGQNIREYDLILAQQEECQKEMSAYCEKYFKKELLLLCTIPGIQRLSAMIIIAELGVDLRTFATAAALTGWAGLRPRNDESAKKIRSHKITKGNKYLRRILVQCAWAASRQKNCWLKSKYEQLCVRKSSRKALIAITRKLLVIIWNVLSKHETYREFVPNIDPMQRLKKIEYYNKRLQELQIV

SEQ ID NO: 221381 - protein, 405 aa, unidentified
MKVIIERSCGMDVHKDSITACIITPEGKEIQTFSTKTVFLLKLIDWIKEQGCTHVAMESTGVFWKPIVNLLEAESIEFLVVNATHMKAVPGRKTDVKDAEWIAELLRHGLLTASYIPNRNQRELRELVRYRRSIIEERARQHNRIQKVLEGANIKLSSVVSDILGVSSRDMLHAIADGEEDPEKLASFARRTMKRKKDELELALRGYVNPHQRLMIKTILNHIEFLNEQVEKLDREVSQRVTSFQEDVERLDSIPGIATRMAEQILSEIGTDIEKQFPSAAHLCSWAGLVPGHNESAGKRKSSKTKKGNKYLKSALTEAAHSVRGSKNYLGALYRRTAARKGKKRAAISVAHAMLRISYYLLTRKEMYVDLGEDYFEKQKQQFIVRHSVQRLEKLGYTVTITEAS

SEQ ID NO: 221382 - protein, 361 aa, unidentified
MDKDTTYVALDDSKRKIVAGILRPSDTQPELREIANDARQIRRLFERLKREGPVAACYEAGVSGYDLHRQITGLGVACAVIAPALTPRRPGQRIKTDRRDAAKLVRLFRAGELTAIHVLDESEEAVRDLVRCRDDIRRDVLRWRHRVLKLLARHGHAYLTGKNWSHAHWRWIREQRFELPPLQRAFEATVFALEQALARQAELDKELEALAATAPYREPVGWLRCFRGIDTLSAIILLAEVVDFQRFRRPRELMAYLGGETQRRGALTKAGNSHARRVLVEAAWHYRHRPTIGRALANRSQGQPDEIVSHAWRAQQRLHRRYRHLLGHGKRTPVAVAAIARELVGFIWAAMTRHESRRQAA

SEQ ID NO: 221383 - protein, 427 aa, unidentified
MAYRIAAIDVHKRMLAVVVTDVEGKGEYQFERRKFGTTPGELHVLAQWLVQLEVEEVVMESTAQYWRAVWGTLELFWRPARRQREGAHKMSGTLHLCQAKSNHGPRGRKNDFLDAERMVKRLVAQELVLSFVPDEEQRLLRTVTRRKHQLTRAKVGFKNQLESLLEQGHIKLSSLVSDLLGVSARRMLKALAEGETDPGVLAAMADHKLRATPEQLRDALGASSHLSGAFRRLLKLSLEELELIEAHIEQLGREAMELLKGHEEVVQRVAEVPGFGPDCAVQLIAEAGVEAAKFLTAKKLASWVGVCPGNEESAGESQSTRSPKGNRHMRRLLNQAAQSAVKVKGSIFEVTFHRQLPGLGYKQAIWAIAHRLCRLLWLILHKGVRYEERGPAVSAKSKRTRTARMIRELKKLGYRVEGGPLPAVARA

SEQ ID NO: 221384 - protein, 429 aa, unidentified
MNYNTQNAKIASITEKTLIIGIDVGSETHYARAFSWRNYEYSKKPFAFSNDEAGFAAFKEWMDDIVEKHGMEVIIPGMEPTGHYWLNLGAYLQEQGMKPVHVNPHHVKKSKELDDNNPSKNDRKDPKTIAGLVNEGRFSYPYIPTGIYAEIRNLSNLRIQTQEEITRIKNRMARWFSIYFPEIKDVYRNPDAVSGLMVIKQAPLPCDIRELGVEGVNKIWRDARLKGAGIKRATTLVTAAEHSIGNTEAPRSARKEIRNLLEDYEGYKKRMDELMEEIEKTLSEIPYIDKLMEINGIGIKTVSCFIAEVGDIGRFDNPKQVQKLAGYAIVADSSGKHNGESRISHRGRKRLRYALYEAAISVIGKNKEFKKIHSYYRTREKNPLKKMQSVIAVACKLIRIFYTILTKGVDYDGQKMLNDIVRPEIQPAA

SEQ ID NO: 221385 - protein, 467 aa, unidentified
MKHNQQRARSGKKSRGSISLLERIQPDAAGIDCGQNSHFVAVPPDRDPQPVREFRTFTAELHRLADWLAQCGVKTVALESTGVYWIPLYEILEERGFEVLLVNARDVHNVRGRKSDVKDCEWLRELHSVGLLRASFRPAATIVPLRSLMRQRQTLVEEAATRIQRMQKALTEMNLKLHTVLTDLTGQTGLKIVRSILNGQRDPEQLAAHRDHHCHASHQEIVAALTGNYRAEHLFALRQNFAAYEFHLQQIAECDTAIEKLLAKLAEQQPPPSGPLSTPRRKRGSKHAPTFDIRTSLHRLTGGADLSQIHSIGPHAALQIVAEIGTDMRRWPTEKHFTSWLTLAPNNKVSGGRLLTSRTPPSANRAAVILRRCAMSLGRTSTALGAFYRRLAARTGKAKAITATARKLAVLVYRVLSGDLIYNDPGATAYHQLNRARELKSLRKRAKLLGFELVDRSSGEVLLNPVS

SEQ ID NO: 221386 - protein, 412 aa, unidentified
MKDLLEISCGLDVHKDKIVACILTGPLGKPTHSEIREFTTLIPDMTALRDWIVSQNCHHVAMESTGIYWMPIYEILEEAFSGNITLLVVNARHMKNVPGKKTDMRDSEWISTLLRAGLLNGSFIPEKRIREFRDLNRYRKSIIRDITSQKNRIEKFLQSSGFRLSSFISDIFGASGRNIILHLIEHGQIDKTALDSCLKTKTRNRIDEILMSVNGTLSDHQKGFLKILMDHYDSLKEHLAEIETSLEEDMAPFTLQIEQLNSIYGISTTASCAIIAEIGVDMQPFKTAEHICSWAGLCPGNNESAGKRKSTSVTKGNPYIKSMLCEIAWVIAGKRNTYLSAWYWRIKQKKGAKKAIIALARKLLVIIYTMLKQGTLFDESCFETRRKNCEQKQISRYIRELEKHGYTVEIQN

SEQ ID NO: 221387 - protein, 408 aa, unidentified
MIFVGVDWAEAHHDVLVQDQDGRRLSGGGRLPEGVDGIARFRELVALHAEEPGEVAIGIETDRGLFAAALVAAGYQVFAVNPMSTSRYRDRHSASGAKSDAGDAQVLSDMVRTDRHNHRPVAGDSETVEAIKILARAHQSMVWSRCRQVSRLRSALREFYPAALVAFDDLASPDALQVLRIAPAPTAGDALSRTKIAAALRRGGRQRRVDERAAAIQAALRSQQLQPPEVIAAAMGASVAASVAVITEMITQTAILAGQLEAGFKQHPDAKVVRSLPGLGTILGARVLGEFGDAPDRYATAKSRKNYAGTSPITRASGTRRVVLARHVRNKRLADAVYQRAFAALTASPGARACYDQRRAAGDTRHQALRALGNRLVGILHGCLEHHAAYDETTAWPHRAENKIPAAA

SEQ ID NO: 221388 - protein, 344 aa, unidentified
MEHFAGLDVSVNETSVCIVDDTGRIVREVKVKSEPGALLQVLKNATYRFKRIGLEAGPLSQWLYSALAEAGLPVICVETRHMRAVLKAQINKTDRNDARGIAQMMRAGLYRSVHVKTLRSQKLRTLLTHRKLLQSKAIAIENDLRGTLRNFGLKVGSVGKLKFEARIKELVENHPDLAMLVEPLLVVRRVLREQTAVLHRRVLAIVRDDEVCRRLMTVPSVGPVVALTYRATVDVPARFRNSKAVGAVLGLTPCKDQSGERDHTGAISKCGDEMMRVMLYEAAQILLTRTVKWSWLKAWAMQIARRRGMKRAIVALARRLAVILHRIWVDGTEFRWTRQEAAAA

SEQ ID NO: 221389 - protein, 344 aa, unidentified
MSEVITIGLDIAKYVFHVHGADERGRAILSKRISRGKLLDFFAARPSCTVALEACGGAHHWARQLTQLGHEVRLIPPAYVKPFVKRQKNDAIDAEAICEAAQRPSMRFVAVKSEQQQAAGLVFRTRDLLVRQRTQLINAIRGHLTEYGWVAPKGPSHVAMLTDLLEEEEMASSLPEAARAMFRLMLDLLAGLNGKIMDLDKEIARRAREDEVSRRLMTVPGIGPISATAIAALAPPAETFAKGRDFAAWLGLTPLQRSTGGKRKLGATSKMGERTLRRLLIIGSSAVVLQASKRGAPRGSWLEQMLARKPRMLVTVALANKMARIIWALLVKQENYRAPVAAKA

SEQ ID NO: 221390 - protein, 314 aa, unidentified
MPQTPVFVGIDVSRDQLDVHVRPSNEALRVAYDEDGLADLVRQLGELAPTLIVLEGSGGLESRVVAVLGTRGLPVVVINPRQVRDFARATGELAKTDRIDAAMLSLFAERIRPPVRALPDDAVREFESLLTRRRQLIDMVSAERHRLHSARASVRKQIEKHIQWLERQLSQIDRDLDTAIADSPLWKAREDLLRSAPGVGNVVSRTLIGHLPELGALNRKEIAKLVGVAPLADDSGRRHGPRHIWGGRSEVRTVLYMAALVASRHNPVIRSHYQHLLARGKARKLALTACMRKLLVILNAMVRSNQPWSPTVEA

SEQ ID NO: 221391 - protein, 403 aa, unidentified
MTTFFAGLDWASQSHAVCIIDDHGNVRERADIAHTAAGLTQLQRCLVRYERPPLAIERPSGIVVDTLLDAGFTVVPIHPNVVKATRPRYRSHGAKSDASDAYLLADLLRTDGHRFTPLRPQNDDIRALRALVRGRDDLVATRVQLANQLRSLLESFWPGAAEIFADVDSPIALAFIERYPTPESAHRLGPRRLAAFCAQHAYSGRRSAQDLLARLHQAPACVCGEMEIEAKGELARSLARTLAQLVDQIRLLSSRIEHHVESLDDGRIVMSFPRAGRICAAQILAELGSVRERFDNDARLAAEAGICPVTYESGKAKAVTFRWACNQRLRAALTCLADNSRHASAWAAHVYNNARARGCDHPHAVRILARAWVRVIWRAWTDRKPYDPARHRAAQLLAKPAVG

SEQ ID NO: 221392 - protein, 368 aa, unidentified
MSRCTPTGAATITLGVDTHKDFHVGVALDGLGRSQGTLSVAANLAGYKQLVQWASEFGHLEHAGVEGTGSFGAGLTRFLKAEGISVFEVARPKRRDQHRTGKSDSLDAEAAARAVLAGTATGEPKGADGKVEMIRTLRITRRSAVKARAQAANQLQALLVTAPEGLRSEFCPLSTARAVEKASRLRPGATPSDVEAAAKFALRSVARRHQQLSKEISELDEQLDRLVGELAPELVGVEGIGTDTAASVLIAAGDNPERLRNEAAFAHLCGAAPIPASSGKSVRHRLNRHGNRDANRALYVVAVCRMSRDDRTRAYVAKRTAEGKSKKEIIRCLKRYIAREIYRILASPSLGSPSISENLDKHRSITSA

SEQ ID NO: 221393 - protein, 314 aa, unidentified
MADPCSVGIDVSKATLDVAWSTNPTTQWQTTNDDAGWNALVAHVRALAPTVVVLEATGGYEIGVASALSTAQVPVAIVNPRQVRDFAKALGLLEKTDRIDAAVLAAFAARIQPTPRPLPDDLQADLQALVTRRRQLVDMLTAERNRVPLARGAVRKNVVAHIAWLEKQLGHTDRDLRTQIEASPIWRARDHLLQSVPGIGPATSARLLASLPELGTLSHRQISKLVGLAPLPDDSGRRSGYRRVQGGRGSVRSALYMATVSAITHNPTIRAAYRRWRAAGKLPKVALVAAMHKLLIHLNAMIRHQTPWHPPATA

SEQ ID NO: 221394 - protein, 344 aa, unidentified
MNKLSRVGIDLAKNVFQLHGVDQYGKAVWRRRLTRDKWLNVLLERIEPGCVIGMEACAGAHHWARELQAKGFTVKLIAPQFVKPYVKSNKNDANDAEAICEAMSRPSMRFVAVKTVEQQDIQAAHRIRSELIGHRTAKANQIRGLIAEYGLVAPQQLARLRAAVPYWLEDAENGLTSRFRGLLSGLWDDLKTLDHRVAELDHEINVIAQSDPVAKRLQQLRGVGPMVATALVATVGNAEQFANGRQMAASLGLTPKQHSSGGKDRLLGISKRGDAHLRCILIHGARSVIRTAKTKDDRLSQWVTSLAERRHQNVAAVALANKTVRIAWAMLRYGTDYEPGYISA

SEQ ID NO: 221395 - protein, 416 aa, unidentified
MPSAHGTVAGIDVHKKILVVVILRSTDPDHDLATGRFGTTHCGLEQLAAFLRQHGVTEVAMESTAQYWRGVWMALEGEFQLTLAQARSTRAVHGRKRDLADARRIAKRLLANDLTVSYVPPREQRDWRLLSRARVAMQESVSRLHSQIEVLLEQAQIKLSSVVSDILGLSGRRILHALVDGIGDPEQLAALAHHRIRASKEELRDALWGRLTASQRLVLKLYLAQIEQIEKDMAALEKRLALEQSAEQDPIVRLCGHPGISALAAQQIIAEVGPRAAAFPSAGDLASWTGGCPGSNESAGVSTSDRSPKGNRMLRRVMSQVAWAAIAAKGSEPQRRYRKWLPRLGPQKAAWAVAHYILRVVWHILHDGVPYRPPDQTSLDRCSVLRKAKRVIAELRKLGYSVTVTAPSAQAEPVTG

SEQ ID NO: 221396 - protein, 402 aa, unidentified
MNAVGIDVSKGKSMVAIMRPFGEIVSAPFEIKHTASDIHSLVELINSVEGESRIVMEHTGRYYEVLAHQLLEANLFVSAINPKLIKDFDNDSLRKVKSDKADSVKIARYALDKWQNLKQYNVMDELRNQLKTMNRQFGFYMKHKTAMKNNLIGILDQTYPGVNTYFDSPARSDGSQKWVDFASTYWHVDCVRKMSLNAFIDHYQNWCKRKKYNFSQSKAEEIYGKAKELVPVLPKDAITKLIIKQAVDQLNSASTTVESLRTLMNETASKLPEYPVVMAMKGVGTSLGPQLIAEIGDVSRFTHKSAITAFAGVDPGVNESGSYEQKSVPTSKRGSSVLRKTLFQVMDVLIKTHPQDDPVYQFLDKKRAQGKPYYVYMTAGANKFLRIYYGRVKEYLASLPES

SEQ ID NO: 221397 - protein, 399 aa, unidentified
MRQLWAGIDAGKAHHHCVVIDSEGTRLLSHRVANDETELSDLIDDALCLSGGGVVTWAVDLNNGGAALLIALMAEREQRLHYIPGRVVHHAAGGYRGDSKTDAKDAAIIADQARMRRDLHPMRAGDEISIELGILTSRRTDLMRDRTRTINRLRALLGTYFPALERALDISNVKATLILLSGYQTPDGIRRLGQARLQAWLRKRKAYNATQIAAKAIAAAQSQHVRVAGQDVAATTVAKLAVQVMNIDAEMAELDRDIEERFRSHHHAEVIESMPGFGPVLGAEVLAATGGDFTAFGTADRLAGIAGLAPVPRDSGRVSGNLRRPRRYDRRLLRAFYLSAQLSVRSCVPSQTYYARKRAEGKRHTQAVLALARRRLNVLWAMLRDNAVYRPEPTVASAA

SEQ ID NO: 221398 - protein, 318 aa, unidentified
MPEPIVVGIDIAKQTFDAAIGVARSIETFANDDEGHDALRVKLAEHTVDLIVMEATGALERNLACALQAAGFAVAVVNPRQARDFAKAMGYLAKTDRIDAKALAELAQVLSRHPERERFVTVLPTPEQQALQALVARRRQLVAMRVAEHQRLSTSHTAARKSIEAMIEAIRAQLDEVEADLARHIDTYHADLAQRLASVRGIGPATTASLIAEVPELGRLSRREISALIGVAPFNRDSGQMRGKRAIFGGRGQVRRGLYMAALAAIRFNAAIKHFYSRLVAAGKPKKVAIVACMRKLLTILNAMVRTGKSWDDSLHPA

SEQ ID NO: 221399 - protein, 344 aa, unidentified
MITIGIDPHKSSHTAVALDEAGHVLGELRASANKATLRRLQSWAGDWPERTWAIEGAGGLGHLLAQQLVAAGEAVVDVPATLAARSRLLGRGHGRKTDGIDANSVASVAQHHPDLRRVVREDHSAVLRLLSDRRDELAAERRRVVNRLHRLLRDLHPGGAPTELSAETASRLLARTRPQGPADAERKTMARQLLADLRRLDRALADNRLRCAAAVAACGTTLTSIFGISDVLAAKILGHTGDVSRFSSAGRFASYSGTAPIEVSSGEVTRHRLSRGGNRSLNNALHLAARVQIMHPGPGRDHYGRKLAERKSSSEALRSLKRQLAKVVYRHLVADHVTRLANLS

SEQ ID NO: 221400 - protein, 318 aa, unidentified
MLIHYIDIAKRNFVIAVSSLSKTKTETNNPKGIAHTIEYLKKHKVALVVTESTGGLEIPAAKAIRRAGIAVIIANPRQTHQFAQSQPLTKTDAKDAKMPAFFAQMTAQKEDSQTMPYQPPTEAEEVLEALVNRRNQPADMRTAEKNRLHQFHETQVGSVKQLIAHFDRLIDELDKQIDNHTHTHFDGKAQVAEQIKGIGSITTATLMAMLPELRRLSHKRIAGLAGIAPHPRESGETKFKSRCFGGRSAVRKALHMATVAATRFEPLIRDFYQRLLSEGKPYKAAVTACMRKLLTISNARMRDYFAENDTAENGIRTA

SEQ ID NO: 221401 - protein, 380 aa, unidentified
MDVHSSNFTLCSFEPGYGFEADKIFGQTQIKEDIFNSTVKYINKLKSMRPDVDVVCGYEAGCLGYNLHRKLKAKEIESVILAPTTMAVARNSSKKKNDYRDAITIAKCLASSAYKAVYIPDDKDEDVRDFIRMRDDHKTALKQIKQQLNAFCLRHGHHYDKTKWTGLHLNWLRKLELSKLQRETVEEYLVTYETLTSKITALDIRIEDIASEERYAEKVNKLKCIKGIKTHTALSFVCEIGDFNRFKSADKFAGFIGLVPGECSSGNTERMLGITKAGNRHLRRLVVEISNTYRRGTVGRKSAALKERQKDMPKDVVAYADKATNRCQRKYQRMMFKGKNSNQAVAAVARELCCFIWGMMTGHHSRTAQAEASVYRSELD

SEQ ID NO: 221402 - protein, 456 aa, unidentified
MKHNQQRARTGKKARVSSSLLERIQPDAAGIDCGQNSHFVAVPPDRDPEPVREFRTFTAELHRLADWLTQCGVKTVAMESTGVYWIPLYEILEQRGFEVLLVNARDVHNVRGRKSDVSDCEWLRELHSVGLLRASFRPAAAIVPLRSYLRQRATLVEEATTRIQRMQKALTEMNLLVHTVLTDLTGQTGLKIVRSILNGERDAERLAAHRDQRCHASHAEIVAALTGNYRAEHLFALRQNFAAYEFLLQQLTECDAAIEKQLSELAAQQPPPTTALLAPRRKTSSKHQPQFDIRSPLQRLTGGADLSQIDSIGPQTALQIVAEIGTDMRRWATEKHFTSWLALAPNNKVSGGRLLSSRTPPSANRAAVILRRCAMSLGRTSTALGAFYRRLAARVGKAKAITATARKLALLVYRVQRWTSDRKKRPRNGCIALSLSRRTWRQRDVSLCDRNERSTD

SEQ ID NO: 221403 - protein, 352 aa, unidentified
MIVIGADMHKASHTLAAVVAGTGEMLGDKTVPVGPSGFAGALGWARDQGPERVWALEDCRHVSGSFERFLLDHGERVVRVATKLMAGERRGARQRGKSDLIDALAVARAALREGIDRLPTAELPGPELDIRLLVNHRERLVHARTRIYNDLVWNLHDLWPELVLPGSALISKKWQATIGRRLARGEQTTRVRIARDELRHLRDLTHSINALEVDIADLVDEVAPQLVAEPGFGPLTAGKLIGEIAGVGRFSTDAKLARAAGVAPIPASSGKTQRHRLDRGGNRQLNTALHRVAVTRARCHPETKDYVARKRAEGKTHREAIRCLKRYLARRVWHLLQPPDPVLERTLSPSIS

SEQ ID NO: 221404 - protein, 407 aa, unidentified
MELAALYKRVIGLDIHQAQITACALLEEPDGTMRIEQRQFGGFKRDRRELAHWVASLKPEEVVMESTGIYWKSPYAALEAVGIRAKVVNARHVKHVPGRKTDVGDAHWLATLARAGLLRGSFVPPAKLRELRLIARQRQKLVGQLAAEKNRLHKVLTDSGIRLGVVVSDLHGQSARAMAKALIAGQPPHAVLKLASRRLKAGREEIFDALQGELTASHRFVLEELMRHIEEIEARIARFDARLLAELESEHNALALLQTIPGVDLIGAAMLLVEIGTDMDAFGSAERLASWVGICPGNNESAGKRKSGRVRKGNPYVRRLLCEFAHAASRTTSVFKSKFQSLLVRRGYKRAIIAIGHKILRTLFFMLKRREHYRDSATDYEALAVQRNAPRWIKSLIKFGFITPTNA

SEQ ID NO: 221405 - protein, 476 aa, unidentified
MARQGKANAALQIMPQLSHETLYLGIDIGKSAHVAGFISPTLLTRHQRFENCPSLSFDNSRQGFRILVDRISTYVPLTQVYVVLEATGHYHRPLLQYLQELDIPVYVMHVQERPRGMVKTDKRDALGLANMLYNQLEKGVQVADPLQAVRRLAPPTAAAAQVRGMVRHRYELIAESTQRKNKLTAICDEVFPEFTSILKDPNGMTALIIRQRFPTPASLMTASLSALQEARGKARQLSDAKLVELQRLAGQSIGTKDMARLRGLTFEQEQLIEELDLIHKHLEKLEAEMTQVVLSSREGKILLSIPGIGPIQAAVIIAMIGNIANFERPTQLKSYFGWAPTLKQSGKTLDRAKLSPRGVRLMKQTMYLVVWQAIRLDCEWAKIYERLVPIKCSFDERTRRYIGRGKVIGRIAGQMISVIFTLLKSDQELLSKLPAGMMPPEPGLYDPQVHRQHRSGLYQPTSSRERPRKLIQFPPP

SEQ ID NO: 221406 - protein, 419 aa, unidentified
MSFKILKFNCCGLDVHKTWIFACIGITDSNNRTEYKQARFSSFTKGLNELCDWLAKYNCNDVCMESTGKYWIPVFNILEQRSLWVTLSHPKYTKPMKGNKTDRKDAKWICDLYMCGMVKPSFIPPADIRELRDLVRYRFKLTCMITGEKNRAQNCLTVSNLKLDDVFSDVFGKSSRSITEQILQHPGETFDVAPFVNSRCKTPIVEIQAAIDGAISKEQAVKLRQCLDHIDELNKHISEVEQEILRLSDKYEVALNLIRTVPGFDKNPLTAIQVLSEIGGDMSVFPTAKNLVSWAGCCPRNDQSNHKIKSTRISRAGSYFKPVLVQVANALIKSKKHSEFTNRYKRIKARRGHKKAIIAICRMILTAIWHILSDLKPYTPEGFLESRPVKEEKVLSTSQALNLLKQRGYIIKDKPLAVF

SEQ ID NO: 221407 - protein, 362 aa, unidentified
MQERPAVMKNTQHIDDKAIETFIGIDLGGTYSHVCVLDREGEAIDVGRIRTTPEALRKRFGGMARARVVIESGPVSRFVDTELSALGHEVLVANPRKVKAIFGNENKCDRVDAEMLARLGRLDPKLLSPVRHRSEHAQAGLRLVRARDVAVRMRTAQINVVRGISKAAGTKLRACETSRFAEMAMQSLPGEMLAELEPLLHLIEQTSETIAIYDAQLKARADELAPVARRLTAIPGVGLLTAVTFALTVDDPKRFTSSRDVGAYFGLRPRRDQSGDTDKQLPISKCGDKHVRRLLVQCAQHILRKDSKLDSDLRRWGIHVAGESKNGKKRAVVAVARKLAVLMHRLWVTGKDYDPEYQRKAA

SEQ ID NO: 221408 - protein, 413 aa, unidentified
MKKGTTFVALDDSKRKLVVGILQPGAEEPEVREIPNEAKLLRRLFERLRREGPVAACYEAGVSGYDLDRQITGLGVACQVIAPALTPRRPGQRIKTDTRDAKKLVRLVRAGELTAIRVPAEAEEGVRDFVRCREDVRRDVGRWRHRVVKFLDRHGRRYVAGRNWTGRHWTWLRSQRFEIPARQRTLEVSLFTLEQALARQAELDREIEALAQSEPYREPVGWRRCFRGIDTLAAMILLVEIGDFHRFQRPRELMAYLGLGPSEHSSGERERRGALTKAGNTHARRAVVEAAWHYRHRPGLGRALARRSEGQPDACRGHAWRAQQRLHRRYRHLVGHGQRPPGAVAAVARELVGFLWAAMTHRPWWHKSGTSTRPATSHELPERRRPRLAGARLESPRASYATPGPADPDDSRF

SEQ ID NO: 221409 - protein, 337 aa, unidentified
MQHLAIDLGGKESQICVRDSTEKILEERKLPTKRLGEYLAKQPLSRVIVETSAEAFAVADLARHAGHDVRVVPATLAPSLGVGARGIKTDRRDAQVLSEVSCRVELRSVHIPSEQARAWRTLCNSRDALVTSRTKLTNTVKSQLRCRLVLTHKRRSSATPEQIRTLWTELEGHVPAHVERQLRVIETLDEQIGEADKEIRQLAKANATCVRLMTTPGVGPLTAMRFVATLDDVTRFATAHDVQAYLGLTPGEDSSASRTRRTHLTKAGSPQMRWLLVQAAWTALRCAATHPMATWATQVAERRGKRVAAVALARKLAGILFALWRDGTTYAAKRGAA

SEQ ID NO: 221410 - protein, 310 aa, unidentified
MDAIVIGIDVSKDKLDVHVLPAAQAFAVARNGAGIEELAARLAALAPAVVAIEATGGFETIVAAGLAGAGLPVVVVNPAQIRAYAKAIKQRAKTDPIDAAVIAKFARATRPEVRPLPDEATRQLADLVARRRQIVEMMAAEGQRGRRVDHKRVARSIARVRKTLEAELAEVDQEIGDQVRGSPLWREKEDLLVSVPGVGPVVARTLLAELPELGRLERREIAALAGLAPFTRQSGRWRGRSFIGGGRATVRTVLFLAAMTAARHNPTLKAFRDRLVAAGKPKMVALIATARKLLTILNAIIRDNRPWQNA

SEQ ID NO: 221411 - protein, 314 aa, unidentified
MHHVVVAGIDAGQRFLDLGLAPSGQTFRFANTDEDIARLVARLVESGVARVVLEAVGSYAASLVGALVEAGLAVGIVNPRRIKAFRDAEGRRAKTDRLDAQLIARFALVMADAVRPIPDRQAQSLRALSTRRRQLTEMIAMEKTRLKQAREPGVLASHRAAIAVLADACKAIETEIAARIADCQERSRARDLLISIPGIGERVAAILIAELPELGQRDRKTIASLAGLAPHVTQSGNAPPRAAISGGRPCVRAALYMSALVAVRHDPAQKAAYAALRSQGKPAKVALVAVARRMLVTANAMLKTKSPYKPAIVA

SEQ ID NO: 221412 - protein, 354 aa, unidentified
MSQTLKTSVAVIGVDIGKNSFHVVGQDRRGAIVLRQKWSRGQIEARLANLPPCLIGMEACVGAHHLSRKLQMLGHDARLMPAKYVRPYSKGQKNDFRDAEAIAEAVQRPTMKFVATKTAEQLDLQALHRVRERLVSQRTGIINQIRAFLLERGVAVRQGLRFLRGELPGILATRTDVLSPRMLRIIEDLAGDWRQLDERIEGLSNEIETLARHDQACARLMTVPGIGPIISSAMVAAIGSGDVFSKGRDFGAWLGLVPKQISTGDRTILGSISRRGNRYLRVLFVQAAWVVLVRLKQWERYGLKSWIEAAKKRLHHNVLAIALANKLARIAWAVLNKGRAFECIKTDAMASRPA

SEQ ID NO: 221413 - protein, 402 aa, unidentified
MNAVGIDVSKGKSMVAIMRPFGEIVSAPFEIKHTASDIHSLVELINSVEGESRIVMEHTGRYYEVLAHQLLEANLFVSAINPKLIKDFDNDSLRKVKSDKADAVKIARYALDKWQNLKQYNVMNELRNQLKTMNRQFGFYMKHKTAMKNNLIGILDQTYPGVNTYFDSPARSDGSQKWVDFASTYWHVDCVRKMSLNAFIDHYQNWCKRKKYNFSQSKAEEIYGKAKELVPVLPKDAITKLIIKQAVDQLNSASTTVESLRTLMNETASKLPEYPVVMAMKGVGTSLGPQLMAEIGNVSRFTHKSAITAFAGVDPGVNESGTYEQKSVPTSKRGSADLRKTLFQVMDVLIKTHPQDDPVYQFLDKKRAQGKPYYVYMTAGANKFLRIYYGRVKEYLASLPES

SEQ ID NO: 221414 - protein, 400 aa, unidentified
MISVGIDISKGKSTVCLLKPYGEIVCKPFEVQHTEKDLEELANLLQKLDGEIKIVMEATGIYHLPILTFLLEKGFFVSVINPLMMKRFSRDNSLRGAKNDRLDSVMIANYGIEKWYKLKKYEVNDRIYAELRLLGRQYYRFMQTHVKHVQELTHLLDYTAPGLKAMFNSWNEHSNRDKLSDFVERFWHFDLITSLSREEFVEQYLLWAKEKKYHQSRSKAEKVYDLASNGIPTLSSHTPSTQMMIQGAINVLRIVNNSLYYILSRMKELAKSLPEYATVRSMGGVGDSLAPRLIAEIGNVKRLRNGHALVALAGIDPPPYESGQFVGTHRRISKRGSPILRKIGFEVMRVLKSHKEPEDNAVYNYILKKEAEGKNKKLSKIAGLNKFLRIYYVRVMEVYQ

SEQ ID NO: 221415 - protein, 413 aa, unidentified
MNYEPITAVGIDVSKGKSTVAVRRPGGEMVLTPFQVNHDAAGLSCLIKTLRDVGGDIRIVMEHTGMYWRPIALTLKEAGFFVSVVNAMLIHDFSDNSLRKVKTDKADSMKIANYALSFWAELRDYSPEDETRQMLKMQNRLYLRTKKSSVVLRNGLISLLDQTFPGINTLFDSQPKRSNGHFKWVDFAKRFWHKDCVAGISLAAFSDAYRKWCAKSGYRFSLSDAEKFHTAARNAVATFPKNDSVKLLIAQAVDSLNAVYDALHILRGEMLRLASLLPEFDVVMEMQGAGDVTGPQLMAEIGDVRRFTHKGALVAFAGMDAPPFQSGTFDSKSRRISKRGSPHLRKTLFMVASTILQHSDPANPIFQFMDKKRAEGKHFYVYTVAGAAKFLRIYYARVKTHLAMLDSGANSAA

SEQ ID NO: 221416 - protein, 341 aa, unidentified
MDEQTGEVLRARLTPAHEDVVGWLRTLPGPVKATYEAGPTGFGLARALGAAGIECVVAAPSRLLRPSGDRVKTDAKDALHLARLLAVGQVTAVAVPDEETEAARDLVRARDDARADLVSARLRVIHLLLRQGIVYSGGTPWTREHENWLRTHRFPRPALQAAYDAALEALAATEGRRGRLDEAITGMAAASRFTPVIDRLACLRGISTLTGFGLAVEIGDWHRLSATTIGAYLGLVPGEHSSGESRSQHGATKTGNSHVRRLLVEAAWHHRPPYRPSTKLQRRWSRASGPVVAHAAKGNRRLHARWQSFDARRKRPVVANLAIARELAGWCHALAVMEPGS

SEQ ID NO: 221417 - protein, 452 aa, unidentified
MVSKKRKRKALRVCHPDAAGIDIGSNEHWVAVPVDRTDNRVRSFGTFTSQLRQLADWLADCGIRTVAMESTGVYWIPLYELLEERGFEVLLVNAAHARNVPGRKSDVLDCQWLQELHTHGLLRGSFRPEAKIAELRTYTRHRQTLIEEAARQIQRMQKSLDQMNVQVHHVLSDLTSKTGMAIVRDIVAGNHDPERLAQHRDPRCRASLDIIVEALRGHYQPQHLFTLQQALSLFDTYREHLATCDARIASLLGSLASAAPELASSPKPRKSKPVGNQIAIDVRNPLQRLLGGADPMTIVGFGPLTALNLLSETGTDMSRWPTEKHFVSWLNFSPGTRITGGKRISGRRPLSTNRAALVLRQGASSVGRTQTALGAFYRRIAARRSKPIAVVATARKLACAYYRLLRYGGEYVERGADAAERDYQQRRLNHLKRQAKNLGFQLQPIQPEARVT

SEQ ID NO: 221418 - protein, 368 aa, unidentified
MRMSVGVDLHKSQFTVYWRSDDGITGRHERYGTTQDGYRRFEMAVQSVMETGTAVEVAVESTGNTRYFKQRLERCGVPVRVVNTAKFKVVTESVKKTDRHDAATLAEFLEKDMLPEAHLCSPESEELRRVIKTRKTLVETIVTVKNQLHGLLLSLGIESKRGQLQSARERRRVKSVLAAHHVAGNAVEPLFETIDRLSAEVKTLDRVIAEMTEDDEVVQLIKTIPGAGLITAATIRAFTDDISRYPTAGKYAAYAGLVPWVQNSNETIHHGRITKRGPVELRTALVQVVLGMVRVRRRTGTYRIIQRYDRMKRIKGSGRSIIATARQLSEIIYRMLTDGVPFDEMKMVDPVIHRKVVEMQAAAYDVAS

SEQ ID NO: 221419 - protein, 316 aa, unidentified
MYLGIDVSKLTIDCCLIADGQNHQKKFQNNKGGFEQLINWLQSHKVNDKLHCVCEATGTYYEALAEYLYSRYTITVENPRKIKGYAIAELQRSKTDTQDAKLIAQYCQDRKHKLKAWKPPTKEQKQLQEIARYLDYLKQQRATEKAKQHEAPDYIKSHIQTTISNLTAQIQIVEKQLLQFYKDNPSYNNLRKRLKTITGIGEQATAVLLSTYKRHEFKNARQFTAYLGLDPRKFQSGTSVNGKSRISKIGSSEIRKSLYMPALVAYRCNAFPEFVGRLKNKGKHIKLILIAIMRKLAVIAFTILQNGQDFQVERYK

SEQ ID NO: 221420 - protein, 339 aa, unidentified
MEKSLISFTCFIGIDVSKLTIDVTLLNPGEAVKKYKHFTNTASGMQLLNSWLRKIDGFKYPLGIFCMEHTGIYTRTLLDFLIGKKTNVWIESSLQIKKSLGLNRGKNDQIDSLRIAEYSYRFIDKAILAVNNSPELTMLKDILTSRDRLKKSLRSIQVAIKELTRIDAKQGKTLEVLNLQALRGLKNSIQQIEKQMHEEIKKNNQFTEYYNLTTSIPGVGSILAIKLLVYTKAFTRFNNVRQLACYCGMAPFEYRSGTSVRGKVGVSKFANMDLKSTLHLASISAIQHNPELKKYYLRKVEEGKSKMSVINAVRNKLLARVVAVINRKTPYVQSLAMAS

SEQ ID NO: 221421 - protein, 385 aa, unidentified
MSQLNDLSRSLTSLEQDNAIIAVIEMSQSSWLVAGIVPGIERHPLKKLEPNEGELLRLLMRWRAEATKMGCTITRIAVAYEAGRDGFWLARWLRAHDIETYVIHPTSVAVSREHRRAKTDRLDTRLLKRVFIGWLRGEPDHCHMVTIPTLAEEDAKRPNREREGLVRERTRIVNRMKSCLARFGVRSFKPTLRKAPERLAMLVTPEGVPLPANTLLELRRDMARLRFIMDQIKEVEEARGQRLEQAPQEKSHAMVRMLARVIGVGIETADMLVHEILSRSLRDRRAVARYAGLTGAPDESGSRRQEKGLAKAGNARVRRGMIQLAWRFLLFQKDSALAQWYRTRTDSAGKKRKTMIVALARKLLIALWRLVTIGEVPAGVVLRAA

SEQ ID NO: 221422 - protein, 438 aa, unidentified
MSNKVIFNLDELFISVGIDVGADFSWMSIALPNQQFVGKPYKILHNSIDSLTTAVSKIKEAEELYSLESRIFLESTGIYHYPLFCYLRDKGFNCSVINPIITKNSTNINIRKVHNDRFDSKKAALVGLKPDLKVSLMPSDLALNCRNLCREYYDLMDNRGAYVNKLQGELRMAFPQYLGIFSKVTINTSLTLLETYTSPSAFLEADKQEIIDIIKSTARFGLTYAQNKYNAIIQAATDANQFGYIIDSNIKRIRLYISFIRKYDEEINNILESLHELVDANEDSDFVKQIHLIETFKGAGFLSAVSIMGEIGDFSAFSKPKQLFAYFGLDPAVKQSGKFEGTKVQMSKRGSAIARRVIHTLTLQSISISRNGEAKNPVLREYYLKKCDSKPKLVAMGAVSHKVCNMIFAILRDNKPFKIIAPQEHIKQYNAAKCDIAA

SEQ ID NO: 221423 - protein, 408 aa, unidentified
MQVMYPRCAGLDVHKDMVMARVRCVSEPAHDETRSFDTTTSALLELGDWLAEHGVTHVAMEATGVYWKPIWHLLEERFELILANAQHIKNVPGRKTDVNDAAWIADLLAHGLIRSSFVPPAPIQELRDLTRTRKQLVREISQHSLRIQKTLEDANLKLGSVLSDVLGRSGRAILAALIHGETDPEKLADLAQGTARRKRVELVEALRGRIRPHHRELLRIHLNLVDALHQALADVDARVGKTLAPIKDSARLLTTLPGVSELTAQVVVAEIGVDMGRFPTDAHLISWAGLCPRNEESAGKRRSTRVRKGAPWLKTALVTAAWAAVRVKGSYLQAQFLRLKARRGAKKAILAVAASMLTAAYHMLKNGVEYHDLGADHFSRRDRSKALQRLVRRLNDLGCEVQLIPQAA

SEQ ID NO: 221424 - protein, 391 aa, unidentified
MVYLGIDVAKDKHDCYIVNSDGEILANVFTIPNDQAGFNLLLQRLKSVAPDLSKVKVGLEATGHYSYNILGFLLDNGLHTYVINPLHVNLFRKAANIRKTKTDPIDARTIAEMIMSNVVLTSYTAKSYHNEELKSLTRYRFDKVQERAKLKTSVARLVSILFPELDRLVPTLHMHTVYALLAEFPGASQLASCHLARLTHLVSESSKGRYKRDKAIQIREAARNSIGSVISAKSMELKHTIHLIEVLTEEINEIESSIKRIMDADPSPILTIPGISYRMGAMILAEIGDFSRFSSPDQILAYAGLSPSTYQSGKLDNAYPHMEKRGSHYLRFALFNATRFVCNWDPTFAAYLAKKRAEGKHYYVAISHAAKKLVRLIFALVRSGQAYSPAT

SEQ ID NO: 221425 - protein, 370 aa, unidentified
MKKPITFVGLDTHKNSIEVALAAEGREAEVRLYGRIGGDIGALEQLVKKLQSPGVELRFVYEAGPFGYTIYRFLRQRGFHCDVVAPSMVPKRSGDRIKTDRRDARNLARLYRAGELSPIYVPQPEDEALRDLLRGRQDAVNAERRARQQLSGFLLRQGFRYPGKSSWSTAHWRWMADIKMPHAAQQMLMQESIDSVRQCTQRVQRLTEQIQQQLAGWRLYPLVSALQALRGVSMVVAATTTAEIGSLQRFASPRQLMAYLGLVPSEHSSGNTTRRGGITKTGNGHVRRALIEAAQSYSFPARISRAILKRQEGVPEAVCQIAWRAQLRLCARFRRLSAKGKSRNRVVTAIARELSGFMWAIDQQVRLPQA

SEQ ID NO: 221426 - protein, 422 aa, unidentified
MNINTDSKRRQVPDDYLVAGIDPHKKTYTMVLMTREGKVLTSLKFENSKRGFEHAVKRVDDQIIKSGSKGVIYAMEAGGHYWRNLAYFLNKRGMWFCLVNPFTAKRLREGKDINRAKSDMRDARVMAELVISNGIPQTNLPQGIYAELRAVYNAYQRLIKERSRIKSRMKSLLDQLFPEFCQVFDNVCSKTAMQVLGCCLAPVDIARMQEAQFIACIRKGFTGRALKMQSLQKLYQLGKASIGAEEGARGIALELRFMTQRLLLLSEQIEQTKNILQDLLLSIPESRCILSIQGVGHIAAAGILAETGPLQAYRNAGQLIKLAGTNPTSWESAGKRHSITHMSKKGRPKLRSCLWIAAISLLRSNPDFKEWSRIRRERELHLHPLKPRETVGAAANRLLRIIYALVKNGSLYCLSQVNEVLV

SEQ ID NO: 221427 - protein, 409 aa, unidentified
MDQLIERCCGLDVHRDTVVACVRGPGPNGRRQHEVRTFGTTAVELLALRDWLEAPAVTDVAMESTGVYWKPVFYVLEEAFTCLLVNAAHIKQVPGRKTDVKDCMWIAQCLEHGLLRGSFVPPAPIRELRDLTRHRKVLIQERTRAANRLHKLLEDAGIKLASVATNILGVSGRAMLEALVHGTTDPAVLADLARGKLRKKLPALRQALAGRFRPHHAFLVSQLLAHVDYLDEAITTMSEEVEGRLAPFAAQLTQLDTIPGINTRTAEVIIAELGVDMSCFPSDRHLASWAGICPGNNESAGKHQSGKTRKGNRWLRMTLIEAAGAAIRTKDSALGARYRRVMRHRGHKKAVVAVAHAMLRAVYHLLAEGTTYREPGADYYDRHHTHRVTRRAIQFLERQGYRVVLEPAA

SEQ ID NO: 221428 - protein, 319 aa, unidentified
MSFKIFRKNCCGLDVHKTWIYACIGVTDTNGRTDYKQARFSSFSKGLSELCDWLAKYNCSEVCMESSGKYWIPVFNILEKADISVVVAHPKYTKPQKGNKTDRKDAKWICDLFMCDMIKPSFIPPADIRHLRDLVRYRFKLTCMIVGEKNRAQNCLTVSNFKLDDVFSDIFGKSARSITEQMLAHPGEIFDVAPFVHGGCKTPIEEIQAAVDGALCPEQAVKLRQCLNHIDELRLHIDEVEREILCLSDKYQAPLDLIRTVPGFNKNPMTAIQVLSEIGGDMSVFPTAKHLVSWAGCCPRNDQSASKIKSLRHFLNLQQ

SEQ ID NO: 221429 - protein, 347 aa, unidentified
MAHFVGLDVSVKETAVCVVDEVGKVVLEQKVPSEPDDIVTLLTSIGEAYVRVGIEAGPLSQWLVNGLAAAGLPVVCVETRHMQALLKGQQINKSDRNDARGIAQMMRVGLFKPVHVKTLVAQEQRMLLTSRKLLQRKLLDVECDLRGTLRNFGLKVGTVSSRGYEARIRELVEGFPKLAAIVEPLLTVRRVMRQQFAVLHKMLLDTVRHDPICRRLMTAPGVGVVVALTYRATIDQPQRFLHSRAVGAHVGLTPKRYQSGEIDYDGRVSKCGDTMLRTMLYEAAQSLLTHSRKWSWLKAWGMRVAQRRGMRRAIVAVARRLAVILHRMWVDGTEFRWSNGSTVAKAA

SEQ ID NO: 221430 - protein, 422 aa, unidentified
MSSERIDAKEIAAYVGIDWADGEHEVCLMVCDGGPLENSRVKHTPEALREWAHSLRDRFGGRKIAVAVEQRKGPLIYALMSYEWFVLYPVNPKSLASYREAFSVSGAKCDRTDAELLMEMLSSHRDRLRAWVPEEEQTRLLAMLTQERRQVVDDVTKLTNRLGSVLKEYYPQALEWAGELNSVQALDFLSKWPTLDDLKRAKPGTIEKFYTQHGVRNKEKITGRLADIRAAMQLTRDRAVVRALVMKMRVAVDQLRALLKATREFDDEIEKLFDRHPDRNLFKSFPCAGPVLAPRLASAFGTDRGRWGDALEVQAFSGIAPVTRSSGQMRVVEKRLACPQFVRQTFMEYAAQSVKKSRWARCYYQAMRAKGVKHQAALRALAYKWIRIMYKCWKDRVPYSEEAYQAALVRSSSPLVSRLANA

SEQ ID NO: 221431 - protein, 342 aa, unidentified
MEHIGIDLGSRASQVCIRNEVGDIVEEMRCQTDRLVPLLARRPPARVVVETCTEAFRIAGRAQQHGHDVRVVAATLVRALGVGQRGLKNDQRDARTLSEASYRIELPSVHIPSSVSQEVKAICVSREALIKARTQLVSRVRSYARSRLGQPMRATPESLPKKVRRTLLQDAEGLPAHLDRLLVALETLSEQIADADAELKELAAEDARMRRLMTVPGVGPVTAARFVAALDDVDRFPNASSVASYLGLVPGEDTTGFRIKRKRLTRAGAPQVRWALGQAAWSLYLRRPEDPMVQWAKRIAERRGAPVAITALARKLSHVLFAMWKHETTYDPARSARAIVAA

SEQ ID NO: 221432 - protein, 378 aa, unidentified
MIEHTPEALDVWLTELHQKVKGRIAIAVELKKGPVVYALQKYPFITVFPVHALSLARYRQAFSPSGAKDDPQDAELALELMLRYPQKIKAIEPDNADIRLLQQLVEQRRQLVEDKRRFVNRIINTLKQYYPQPLEWFSHRGSLLLCELIIRWPSLQQLKRARRDTIRNFLNAKGGRAMALTEQRVASIDNAIPLTTDPSVIEANALMATALATQIKVVSEIIKTYDERIEALFDTLPDAELFKSLPGMGPCMGPRMLAALGDNRDRFNSAEEIQNYAGIAPVTERSGQKSWVHWRWQCAKFVRQTFVEWAAKTVNSSYWARLYYQGLREKGKSHQSAIRALAFKWIRIIYRCWKARTQYDEAKYLLALEARHSPLLKP

SEQ ID NO: 221433 - protein, 408 aa, unidentified
MQVTFGIDVSKSTSTVCELIGESKNELTITNNRPGFIQLLHELTAFSKHPQIIFEATGVYSRRLQAFLEDYGYEYVVINPLKAKKEMNMGLRYNKTDKTDAYHLALIQRLYRHPVNQSESQTYKQLNALSRFYDQLTSDLVIAKNRLHQALQSTFPEIENLFSSARGKNYWQIVVRYPHCDLVRREDKKQLINWLMSLKGIAFKHALRTADKLIELAYQAYQVVSCSSIEVEQVQYYAHRLLNLSDQRENLIARMVKLAKSLPNHDLENLESIPGFAQTTAVRVLAELGDLRRFSNPNKINAFIGIDPGRYQSGEMDSNLSITKHGNAVARKLLYRAIGQIDNAAKTNPCHIADYYESKKLSSQTKGFKKIAIASIHKLIRTIYALIINDQPYDYNVATHNQKDFSRN

SEQ ID NO: 221434 - protein, 411 aa, unidentified
MEVICRRCCGLDVHKKIVVACVLIWEEGKLSKEIRTFGTMTFELLTLHDWLLAHKVTHVAMESTGIYWKPIFNLLEGNFEVLLVNAAHIKNVPGRKTDVKDCEWIANLLCHGLVKGSFIPPAPIRDLRDLTRYRKSLTDERVREVNRLHKLLESANIKLSSVASNVMGVSGRAMLELLVSGGTDPEVLAELARGKLRKKLPLLREALKGRFRPHHGFLLGQILSHLDYLDEAIEQLSQEVQKQIPPFSKQIDLLKTIPGVEQRIAEGIVAEIGIDMSRFPTHRHLASWAGVCPGNNESAGKHKSGKTRRGDRWLFRVLLEGAWAVTRTEDTYLNSFYHRLVPRRGKKKAVVALVHSMIVIIYHVLKEEVPYHELGTNYFDQVNVTHIKNHHIRRLESLGFKVVLEPLAEAA

SEQ ID NO: 221435 - protein, 386 aa, unidentified
MKIALGLDLADRRCAAHAVPVGRAKKSQKEFLEKFNKDFRRVKTDRDELHRMIDVLRSDGNEIYVLIENSTITHKVYWILVEKGCDVVVAQSADLLRITKSVTKNDDNDAEELAAYMRRRLNGENEFKAVVMAPPEIMSRKMFIRAIYTDKTYLSECKKRVRARLKIMGADLKRDYADISCDRSLMQLRSTADPYLCYEVAVMKETKARIKDGERYISTLFKDDPYYDLLMTIPGFGMEISAYLSTVIIDIDRFDNVKQLEAYTGLVPRQRSSADSDPDCRTTHFGDDWARKFLGYAVRAHVMWAPDSIITQMYNRLRARGKPYKKIITACSRKMVSVIWSVLRNRRPFTTDRNVLQKARGAAAEIEQLESELFEEEIEKKYAEVA

SEQ ID NO: 221436 - protein, 337 aa, unidentified
MKYCGIDLHGNNSWVVIIDEQDRVLYSRRHANDLPRLLAMLEVHRSELSGIVVESTFNWYWLVDGLQEVGYRVLLANTAAIKQYDGLKHRGDESDARQLAHLLRLGLLPQGHIMPKAARAVRDLARKRMQLVQQRTAQILSIESSLSRHSGWKLSSNRIKCLRQADLDEMRLDEMPMLGLKANVAVMQALQTQIDGLEKVLADYCRAEPGYQLLRSVTGIGEVLATVILLETGGIERFAEAGNYASYCRCVGSAHLSNGKKKGEGNTKNGNRYLAWAFVEAANFAVRHCEAARRFYQRKKAARNSIVAIKAVAHKLARACYHMLKTQTPFCVERCFA

SEQ ID NO: 221437 - protein, 387 aa, unidentified
MPQLNDQSRSHTALKPDSTLIAVLEMSQSAWLVAGLVPGIERHPLKKIEPDEAALLRLLRRWQEEATQAGHPITRITLAFEAGRDGFWLARWLRARGIEAHVIHPTSVAVSREHRRAKTDRLDTALLKRAFLGWLRGEQGHCSMAEIPTLQEEDAKRPTREREGLVRERTRLVNRIKGALARLGIRGFKPTLRQAPERLSALRLPEGAPLPPNTLAELRRDMARLRFVLDQIREIEAARLEQLEQHPETGTHTMVRVLARILGVGIETADMLVHEVLSRNLRDRRAVARYAGLTGAPDESGRRRREKGLAKAGNARVRRGMIPLAWRFLRFQPESALTRWYRARTADARGTTRKTMIVALARKLLIGLWRLVRSGKPLEGVVLRPAA

SEQ ID NO: 221438 - protein, 355 aa, unidentified
MNSEKYIGLDVHQATICVAVMDPKGKVVMESILETKATTILEFLAGLRGTLSVTFEEGTWAAWLYDLLKPRVANLVVCNPRKNALLKHGNKSDKIDARKLADLLRLNDLEPVYHGETGVRMLRELARSYLTIVKDVSRVMSRLKAIYRSWAIPCAGRDVYYTRHRGEWLGKIPEAGSRRRAEQLYQQLDMLQPLRQQARRELLAESRKHTITAKLRQIPSLGPIRSALAVALIQTPHRFRTKRQLWTYSGLGLETRDSGEYHYVEGQVRRRKKQVFIRGLNKDHNHDLKGLFKAAATRASVQPGPFQDFYQRSLAKGIQPTMARLTLARKIAAITLTLWKKGENFDAEKLKAQAA

SEQ ID NO: 221439 - protein, 375 aa, unidentified
MQEKLRFLGLDVHAETIVAAIAEPDGEVRSLGTIPNRVESIRKLIKKLGPAEKLRACYEAGPTGYVVYWQLAKLGIQCEVVAPTLVPVKAGDRVKTDRRDAEKLARCYRSGDLTAVWVPDEGSEALRDLVRAREAAKQDQMRARHRLSKFLLRSGQRPPSGVRPWTRPYLIWVAQLRFTQMAQEATRLDYLHEVEHMRERVVRLEEAIAEAVKLASPALQQVINDLQALRGIADISAVTIAAELGQVSRFERAQQLMGYSGAVPSEDSSSKRMRRGSITKTGNAHLRRIVVEAAWSYHRPPCIWYGLRRRQESISEEVKEIAWKAQHRLHKRYMRLAAAGKDKRKITTAVARELLGFIWAIGTRAETIAKQRIAA

SEQ ID NO: 221440 - protein, 406 aa, unidentified
MCCVNLVEVFVPQQLWSGVDAGKTGHHCVVIDPDGTRCLSRKVVNDEIELTGLIDEVLALTDGGEVTWAIDLNHGGAALLISLLLGRGQRLLYIPGRTVYHAAAGYRGDGKTDAKDAAIIADQARMRRDLQPLRAGDEIAVELRILCAARTDLVCDRTRAINRLRAGLLEYFPALERAFDYSTCKAALILLAGHNTPDGLRSLGAIGLEAWLREHKARNASAVAATAMTAAESQRTIVAGQEIGAAMVARLAKEVMRLDNEIGDTETLIEQRFRRHRHAEIILSMPGFGPLLGAEFLAATGGDLAVFDRCDRLAGVAGLAPVPRDSGRVSGNLKRPRRYDRRLLRACYLAAMIATRHDPASRTYYERKRTEGKRHTQAVLALARRRLNVLWAMLRDHKTYQPAPAT

SEQ ID NO: 221441 - protein, 362 aa, unidentified
MVNHIFVGIDLGDKNSVARIAVNRERAERLGFVNNRRGRARLFQELRRRAEAIVGEIVMAYEASSCGFILCDEAEAQGIRCFVLAPTKLEKSVEQRKHKNDDRDADDVLEKLRGHVLAGNRLPTVWIPGRQIRDDRELVRARVEVGEKQARVKTQIQMLVKRHGLEKPSGSGSGWTIRYRQWLKALTEGEALGSGVGAALESLLRQLSFLEAESQRMEKPMQQLAEQTRHKPIIEKLTEEHGVGLITAMVYRTEIGYAGRFGRGRHVGKFVGLTPTSHESGQQQDRKGHISRQGPPRLRKILCQASWVHIQRDPQAKRFYQQLVSRNPKKKKIAIVAIMRRLAVRLWHRMRQAELDMIPIVE

SEQ ID NO: 221442 - protein, 354 aa, unidentified
MTIVAHSRPFVVGVDTHARNHVYAIITAGTGELIATRDFPATGAGINRSIAWVARHTGADLGTLWVIEGTGSYGALLAGAAGAAGYDVAEAARMDARHVVGKSDPLDAHRIAAAVLPLDEQHLRRPRLNEGVRAALRVLVTARDSMTTERTRAVNALTALLRVNDLGLDARKPLTGAQIADVTRWRARDEPLAASIARSEAVRLAQRVTGLDAEIKTNTTRITELVKISDAAPLLQETGFGPVTAAICLTVWSHPGRVRSEAAFASLAGVSPIPASSGNTVRHRLNRGGDRTLNKALHMVALSRMTFDPATVDYVRKRQAEGRTTKEIRRCVKRYLARRIYRTLNAPNPGPCHA

SEQ ID NO: 221443 - protein, 368 aa, unidentified
MPRKSSTAVVTIGIDPGKNTLHLVGLDARGGIVLREKVARARIVSRLANVPPCLIGIEAGMGTHYMTRELLALGHHVRQVPPVYAKPFRQTHKNDFRDAHAVAEAVQRPTTRCVPPKTDEQLDLQALHRVRYRLVGQRTAIINQIRCFLLEHGITVRQQLHWLRHALPDILAQRTDVLSPRMVRILEDLAQDWRHLDDRIEAVSGEIEALSKNTELCLNLMTIPGIGPIISSAVVAAIGDGAAFARGRDFAAWLGLVPRQISTGDRTILGRITKRGNRYLRMLFLQAARVVLLRPKNWMQHSFGPWLAAAAQRLHHNVLATALANKLARIAWSVLVQHRKYEARLSVAATRATVAPKGWFQSILERIE

SEQ ID NO: 221444 - protein, 424 aa, unidentified
MKVTYQTCCGVDVHTSFLVATIVKTTGGIEPSYQKKRFSTFNNSILEFKQWLLDNDCHDVCMESTGKYWVPVFNLLEDDINVVIANPKWVKAVKGNKDDTKDSKWIGDLFRLGLVKGSYIPCKKVRILREYTRYRYKLVSCRSSEKNRYQNALTVCNVALDSVVSDIFGKSSSSIIDYLLEQSGSSINHEEIASKLLRSLKSKEDAVIESVEGYQMTDAQKYRMRLVRAHMDYITAEINDVDKMIENMISSNTDFENAVQFLCTIPGVKRDSAITIISEIGTDMSQFSSSKRLCCWAGLTPGSNESAGKKKSVRITRAGVYLKPALVQCAHAAVKSDKSPYYKKKYESLVKRRGKKRAIIAIARMILTAIYQMLSTGEQWNPSDLYKIDMPVALVEKQKAKAIKQAKKLLQREGLLPPDEPFAS

SEQ ID NO: 221445 - protein, 345 aa, unidentified
MDHSAGLDVSVKETSVCIVDETGRIVREVKVASEPEALLPVLKNPAYHFKRIGLEAGPLSQWLYSALAEAGLPVICVETRHMRAVLKAQINKTDRNDARGIAQMMRVGLYRPVHVKTLRSQKLRMLLTHRKLLQSKAIAIDNDLRGTLRNFGLKVGMVGKVKFEARIKELVENLPDLALLVEPLLIVRRVLREQFVIQHRRLLTMVRDDEVCRRLMTVPGVGPVVSLTYRATVDVPARFRKSKAVGAVFGLTCSKYQSGESERSGRISRCGDEMMRVMLYEAAQSMLLHSKKWSWLKAWAMQIARRRGMKKAIVALARRLAVIMHRIWVDGTEFRWTREQAAAAA

SEQ ID NO: 221446 - protein, 355 aa, unidentified
MSQTPNTAIAVIGIDIGKNSFHVVGHDARGAIVLRQKWSRGQVEARLANIPPCLIGMEACVGAHHLSRKLASLGHDARLMPAKYVRPYSKGQKNDFNDAEAIAEAVQRPTMKFVATKSAEQLDLQALHRVRERLVSQRTGIINQIRAFMLERGIAVRQGIGFLRTELPTILATRTDALSPRMLRVIEELAGDWRRLDQRIDGLSGEIEALARQDQACSRLMTVPGIGPIISSAMVAAIGTGDVFSKGRDFGAWLGLVPKQISTGDRTILGKISRRGNRYLRVLFVQAAWVVLVRIKNWERYGLKSWIEAAKRRLHHNVLAIALANKLARIAWAVLAKGRAFEPTRTDDAGVVQPA

SEQ ID NO: 221447 - protein, 334 aa, unidentified
MKKPYFMGFDIAKASVDFCLLSRCGALLWRGRFDNEPQAIKEFLALVRRRGWKLSQIHFALESSGVYGKRLIAALHEAGLAVSVLNPAQVKFFAISVLRRTKNDRVDAEIIARFCLERKPLSTRPLRPVEEQLKLLVHERDSRVAEQTRERNRAKKDPFQIQLPPLISRQRQHRIKQLQKEIAQMDEAINALIASDEYLSTQSKLLSSIPGIAQNTAAKILSEIAGKEFDSARQLVAYAGLTPSEFRSGARCYGKTHLSKIGNAFLRKALYLPAAVARRWCKPIKPWVSLLEERKLSHLAIRGAIMRKLLHIAFGVLKHQKPFDPSLVFMPKTV

SEQ ID NO: 221448 - protein, 343 aa, unidentified
MDHFAGLDVSVKETSICIVDDTGRMVREVKVASEPEALLQVLGNPIYRFKRIGLEAGPLSQWLFSALAEAGLPVICVETRHMRAVLQAQINKTDRNDARGMAQMMRAGLYRPVHVKTLRSQKLRMLLTHRKLLQSKAIAIDNDLRGTLRNFGLKVGIVGTVKFEARIKELVENLPDLAVLVEPLLMVRRVLREQFSILHRRLLAIVRDDEVCRRLMTIPGVGPVVALTYRATVDVPARFRNSKAVGAVFGLTPSKYQSGEINRTGAISKCGDEMMRVMLYEAAQIMLVRLAKWSWLKAWAMKIARHRGMKKAIVALARRLAVIMHRIWVDGTEFRWTREAAVA

SEQ ID NO: 221449 - protein, 398 aa, unidentified
MTESSDYESVQVFIGVDVGKDTHHAVAINRSGKRLFDKALPNDENKLRSLISDLKQHGQILLVVDQPATIGALPVAVARSEGVLVGYLPGLAMRRIADLHAGEAKTDARDAAIIAEAARTLPHALRTLKLADEQIAELSMLCGFDDDLAAQTTQASNRIRDLLTQIHPALERVLGPRLDHPAVLDLLQRYPSPEKLASLGEKKLAAQLCKLAPRLGKRLAADIAQALAEQTVVVPGTNAAAVVLPRLALQLITLRKQRDEVALAVEQRVLAHPLYPVLTSMPGVGVRTAARLLTEVACRAFASVAHLAAYAGLAPVTRRSGSSIRGEHPSRRGNKALKRALFLSAFAALRDPLSRAYYTRKMSQGKRHNQALIALARRRCDVLFAMMRDGTFYTPQAS

SEQ ID NO: 221450 - protein, 370 aa, unidentified
MDNITYIGLDVHKATICVAVAESGRGGEVRQIGVFENRPELLIKLAARLSKGGRPLSFCYEAGPCGYGLHRLLTGHGHDCIVVAPSLIPIKAGDRVKTDRRDALMLAKLHRAGELTPIWIPDAAHEAMRDLVRARATAGRVLSKARQHLQGFLLRHDQIYRGARAWTLAYRRWLTTVRFAHPAQQIVLQDYIHAVQDAEARLDRLTRQIEELLPNWSMAPVVTALQAMRGIALVVAVTVVAEVGDFRRFANARQLMAYLGLVPSEHSSGASVRRGGITKAGNVLARRVLIEGAWTYRMPARVSRKLHDRNEKLSPAIRDIAWKGQIRLCSRYRRLAAAGKPKVVVTTAIAREMVGFIWAIAGIAQPTLQA

SEQ ID NO: 221451 - protein, 416 aa, unidentified
MNAVGIDVSSRKSTVAVLRPLGEVVCLPFDVSHDADGLASLAEKLKALDGETRVVMEHTGRYYEAVAKALHEAGFFVCAVNPLLIKEYGANSLRRVKIDKADAVKIARYALDNWADLRDFTPMDAIRYDLKTLNRQFQLASKQRTASANNLIALLEQSFPGIRKCFDSPVRSDGTQKWVDFAHSFWHVDCVRKQPFPAFCERYRKWCKRHAYLFKQSNAEEVYALAKRAVVLTPKSKVVKVLVQEAANQLISISRSVEVYRAEMDRLAAMLPEYPVVLARYGGGKSYGPQLMAEIGDVRRFERKQALVAFAGIDPMPNQSGDKNVRSNKSSKRGSPYLRKTLFNVIRTYLQCAPQDEPVFQFLNRKQAEGKPFYVYMLAAANKFLRRYYAKLRDYFASLDTLQSVDPIPTTLKASL

SEQ ID NO: 221452 - protein, 323 aa, unidentified
MTLPKLGIDVSKKTIEVALLRGNKVRHKSFANSPSGFGLLQSWLINQGVNPVHAVMEATGSYGDALAEFLFDTGHQVSIVNPAQVLAFAQSELSRTKTDRVDAAVLARFARSHEPQPWNPPPKEFRELQLLVRHRENLLNYRNQLSNRLTEGRLIPSVAASLETLIAAVDEEIKSVERQIREHIDQNPTLKADVALLKSIKGIGDQTAVHLLAEIRQIHDFKTSRQVIAYAGLSPKNIVSGTSVRGRPRLSKIGNSRIRKALYWPAITALKHNPIVRALGERLAERGKHSLSIIGAAMRKLLTLAYGVLKSGKPFDANYAQSC

SEQ ID NO: 221453 - protein, 340 aa, unidentified
MEIAVLGIDLGKNSCSIVGLDHGGAVVLRRRMRREGVIKLTGKLRPRVVAMEACCGAHHLGRVLRAQGHEARLMSPEYVRPYVKSQKNDDRDAEAIAEAATRPTMRFVDLKSEEQLDMQTLHRARDRLVGERTALINQLRAILLERGITVAQGRRQIERHLAGLNALGGLSQRMRVLIEDMRLQWCELDRRIAELDKEFAEWVRNEEAARRLMTIPGIGILNATALIAAIGRAESFARGRDLAAWLGLVPRQVTTGGKPRLVGISKRGNKYLRKLLIHGARAALPTLLETATPLSAWLRGLVARMHKNAAVVALANKLARIVWAVLRHNETFRFAGSATA

SEQ ID NO: 221454 - protein, 338 aa, unidentified
MSKLKNFVGIDISKLWFDAALIKADNPAQIIHHQFAQKPEGLRKMQEWLFMFDVRIDNETLFCMENTGVYNTGLVNYLVTNKAQFWVEMPLRIKKAGGFERGSDDKTASIKIAWYAMRFRDNVRLWEPADSNMEKIKNLIAQRDRIINAVSQLTVPVKELRDCGCEADAKQLEKIQKSALAALKKTKLNIEALITKIVTQDEIISKKVDQVQSIKGIGPVTAVALLVYTRGFDRFDNAKQLACYCGVVPFKKKSGTSINYKPTVSPFANMKLKKLLHLCALSAIKNDKELRSYFERKVMEGKNKMSVINAVRNKLVHRVYAVLRDERIFEENYVRKCA

SEQ ID NO: 221455 - protein, 340 aa, unidentified
MRKYIRIGVDIAKNCFQVHALESEDCSATKRRLSRSGIVKFLAEVEPCAIGMEACGSAHYWARRFRAMGHEVKLTPPIYVKPYVKRGKNDAADAAAICEAMSRPNMRFVAVKSEDQQATLMAHKTRELLIKQRTMSVNALRGHLAEFGVIAAKGISHVEELLERAAAADLPAMVQATLGVLLAQLRSLDAAIDELERAIVADHRRDPVSRLAASVPGVGALAASAILASAPDPRAFKSGRDFAAWLGATPKQNSTGGKEKFGSITKQGNRYIRRLLVLGAISVLRAAPKRKGALCDWLAALRARKPPKVVAVALANKLARIVWAIITTGEVFRTSIYAKA

SEQ ID NO: 221456 - protein, 392 aa, unidentified
MYIVGIDIGKNHHEASIVSPEGKQIGRSLRFTTTHKGADSLMSFIFKNIGNSPCVFGMEATGHYWYPIYSFIKAKGYTIYVINPIQSDSLRKMYIRQTKNDSIDSFLIAEVIRFGQFGTTSMADENILAMRQLCRYRDSVISSRTEIKLRIGTIMEQIFPEYEKQFSSLWVSTSMGILEKYLTPENIENAPIDELFEIIKDKSHNRLTRAKAISIKEAAADTFGIKIAQDAFSFQLKQLIDRMNFLDKQIEALDCQILEYYEKFDCYLHTIPGIGIIGAATILAEIGDISRFKNSSSLIAFAGIDPTVRQSGEFNSTHNHMSKRGSPYLRHAIFLAATTCSFHNSPLNAYYKKKRDQGKHHLTATGAVARKLTTVIYAVLRDSKPYEPKKFC

SEQ ID NO: 221457 - protein, 427 aa, unidentified
MNVQNDIRLTEFRQLKKEIRGSEKHLIIGIDAAKEKHHAFFGTATGKTLYKRLIFDNNITGFEKLLFQAEAIKTQHGLNYLVFGVEPTANYHKPLGEFLIRHGHTVVLVGSGAVKNNRELLDGRWDKHDTKDAANVADLISQGKFLFYDYPSQKVRDLRNLLSFKKRLKKQDHSLRMRIRNQMIAQYFPEMDRHMHQSMAENLAIIKWCLSPAEIATKEYRDFFLTVTNRDRGMAQQRRLKTIWESAGNSIGCEVGEAVQFEAALLVESLQYIRQLIKETDAKIKEICLNFPEYEYLLSIPGFGPAVSAVTLGALGDPFRFKTAKQVLKMAGLDLSASRSGKNSNNMTPKLSKKGKSDLRYALYQAGLVASTRDKDFISYFTDKLQGRERERGIKTKMRVKLAAKMLTIAWTLMKKKERFDPGYLRS

SEQ ID NO: 221458 - protein, 447 aa, unidentified
MQSKDLNSGIFEILHPNAAGIDIASQMHYVAVPTDRDEQSVRKFGSFTEDLHDMARWLKLCKIDTVAMESTGVYWVQPFLVLEEHGFDVYLVNARHLKHVSGRKSDIKDCQWIQQLHSYGLLNKSFQPEDLMRELRTYVRQRKNLTQGYSTQVLLMQKAFDQMNIKLHNVISDITGKSGLLMIDAILKGERDAQVLAELADRRIKATKEDIVKSLQGIWRQDNLFELKQAYELYLVFRDKIVDCDKQIENVLKQIADQSNETPNSSQKRKANGKNKFNFNASDYFKVISGVDLTEIFGISELSVAEIVSETGTDMTKWVTEKHFTSWLNLAPNTRTSGGKRLKSKPIKKKNKAGQAFLIAASSLKASNNWLGEFYRRIKAKSGSPVAIKATARKLAIIFYRMLKEKVNFSPLPIEEYNQYFKERKLKYINKQATSYGFKLVPLELVS

SEQ ID NO: 221459 - protein, 373 aa, unidentified
MSVTTKYVGLDVSKNKVAVAIADEGRDSSRYWGVIPHTKEALHKLVKQLSTDGVTLKTCYEAGCTGFEMYRWLLEMNVDCDVVAPSLTPTRASDRVKTDRRDALRLAQLLRAGELTNVYVPTVEDEAFRDLVRAREDAKEDLNRHMQRLGKFLLRQQRFPPEKVKPGTAKYDEWLDTVRFSQESQQFAFAEYRQTIRETNQRLARYEKEIEQQAKTSSQAPLIQALQALRGIKLLSAATIAVELGDIAGRFAHPRYVMSYSGLVPRERSTGDSRWQGGLTKAGNSHLRRVLVESAWSYRYTPGVRRALRERLTGLPPGIEAISWEAQVRLHKKYKMMMRQGKHKGVITAAVARELVGFVWAIAQELNKNEKTA

SEQ ID NO: 221460 - protein, 352 aa, unidentified
MLIIGCDFHPRFQQIAYLDKETGEYGERRLNHPDQAAQFYRSLAGQQLQVGLEATGSYGWFRRLLGELGHTMLLGNPVAIHASNPRKQKTDKRDARHLLTLLVEDRFPAVWQPPLENEATRQLLLHRCQLVRLRTRVMNRLDGLAKNEGVLLAQGWSEKRRQAIEGLSLSGWSIERRKDLLKLLDELDRQIRPLDEAVKKAAAENADARLLMTHPGVGPIVSLAYVLTLGDWQRFPRGKQVGSYLGLIPAEDSSSDKRRLGHISKQGNELVRWLLVEAATTAQRYDPSWHRQYVRLSMTKHHGVAKVAIAHKLAIRLYWMLRSGADYKQVKERGSHAGQSACPIGRKTRPIG

SEQ ID NO: 221461 - protein, 410 aa, unidentified
MDVVYERCCGLDVHKKSVVACLIVPGERGKPRKELRTFGTMTDDLLALADWLAAAGCTHVAMESTGVYWQPIWNLLEERFDLLLANARHIKAVPGRKTDVRDAEWIADLLRHGLLRGSVVPDREQRELRELTRYRTALTRERAAEVNRLHKVLEGANIKLAGVASDVLGVSGRQMLAGLVAGTTDAAVLAGLALGQLQKKRPELERALTGRFGPHQRYLVARMLAHIDDLDASLAELSARIQEQMLPFEPAVERLDTIPGVGRRIAEILVAELGTDLRRFPTPGHLASWAGLCPGNDESAGKRRSGKTRKGNGWLRWALIEAAQAASRTKGTYLAAQFRRLAARRGKKRAIVALAHTILVGVYYLLTRSTIYTELGGDYFDLRDREALERRLVYRLERLGYEVSLQPRPA

SEQ ID NO: 221462 - protein, 347 aa, unidentified
MKFYTKQHKFYCGIDLHAKKMYLCILDAEGEIRLHRNIITDREVFLKVIEPYKEDIVVAVECMFTWYWVADLCIEHSIPFVLGHALYMKAIHGGKAKNDKIDSHKIAVLLRGGMIPIAYTYPVKMRATRDLLRRRNHLMRKRAELYAHIQNTRNQYNLPEPLGCIAKPQNRDGIVERFEDPSVQKMIDADLAVIEAYDPIIAKMERDIISMANHHDPVAYALLKSIPGVGKILGLVILYEIENINRFPTVQDFASYSRLVKCSKESNGKKSGTSGKKIGNAHLKWAFSEAAALFLKGNEPGKRYRERLMNKHGKAKSLSILAHRMGRAVYFMLKNKKPFDQDKFLGL

SEQ ID NO: 221463 - protein, 380 aa, unidentified
MAKLRKNKKAHGLVAAPVMEPNAAGVDIGATEIYIAVPPDRDTQPVRRFAAFTEDLKAAADWLERCRIETVAMESTGVYWIPLFQILETRGMKVCLVNARHVKNVPGRKTDVSDCQWLQYLHAVGLLRASFRPSGQVCAVRSLMRYRESLVGMAAVHLQHMQKALDQMNLQLHHVISDLSGTTGMAILDAILCGERNPLKLAQLRDPRIKASPETIAKSLVGDYRREHLFTLRQSVTAYRSYQQLLACCDVEIEQMLGEFPDGAGPDTPVLADPKDRHRPRRNEMKFDLRGHLYRIFGVDLTEVPGLNALTAHTLLTEVGPDLSAFPNVGAFASWMGLCPDNRISGGKVLSSHTRKVNNRAARALRMAAQSLFRSQSWMG

SEQ ID NO: 221464 - protein, 382 aa, unidentified
MNRILKIGMDVHSTSYTLCAMEPVLGGEDRIFANIQVTSDYRNVIQFIDKLKEKLGSSDSYSIECGYEAGCLGYSLYHQLTKSGVKCTILAPTTMLTQQGKRVKTDKRDAVMIAQCLSYGGYHAVHVPADKDVSVKEYLRMRDDHKVALKKIKQQINAFCLRQGYFYAGNKWTIKHLNWLKKLVLSDLYRETLNEYLTSYEEQTAKIERFDKRIEELAEDSDYQENVKKLGCLLGIKIHTALSLIVETGDFKRFRKGNTYAAFLGLAPGESSSGEKINRTGITKAGNSHLRTLLIEAARGMCRGRIGYKSKVLRSRQDGNPTEVIAYADRGNTRMRSKYYRMIRHGKKDNVAVAAVARELACFIWGLMTNNITFKEEGTKAA

SEQ ID NO: 221465 - protein, 469 aa, unidentified
MSKGNGMTRGDRRRNARREQLRAMLPRDGAVIGIDLADEKQALAVIDHDVRVLARKTVRVKAFRLGEALDWAAGQARAKGFASVTVACEPTGPRWLQVQRLCAERGLPLVCVQPLVTHIARQQQDYTAHKTDEADCVMIARLAAELHCYVPEELDEVWAGLRHLGRRRTALITSATASVQRIRDFLSVAWPTVTEACAQPFESMTWLAALEVVASRCGGQPEELADLGVEAFTGLVRSAVPGWGGQRIHGPICKAVFAALTSTEGVVWAHRRGLLRRVAAELGDLQRARAQRQETEAAMTAALGDLGLARLGDIPGLTATGAAAILAETGDPKRYDTSSSVVKHAGLSPSENASGAFDGEAHISRRGRPGLRLTVWRAVWAVLIHNPVMAAKYAAMTQAAGQARAGSSGHATSAAEAARRRRAKARVACAAALLRWIYSMVVHGTCWDPGVAAGRKDTLAAPSCQPEAA

SEQ ID NO: 221466 - protein, 408 aa, unidentified
MKLLVGIDVSSEKLDTCFLDSEDQILLEDSFQNTIIGASKIKELILRFNESIHYNRIIVGMEATSVYSFHPSTFLAEDEDLKSLGIEVVVMNPKAIHRFKGLFDEDKTDKIDAYRIADFLRFDRFNVSLLKEEQYIALQRLTRSRYQLICQLTEMKPHFLENLYYKCNTLTKEIDTSIFGATMMDLLTDSLSLDEIAAMSLEDLAAFLQEKGRGRFSNPGKLAKSISKAIKDSYRLGKVMQNSVDVVLASYAMMIKTIKGQIKTLDKAIQDLIVTLPESQSLLSIPGIGPVYAAGIIAELGQIERFEDEAKIAKYAGLYWKRKQSGNFESERTVMTKTGNHYLRYYLVEAAGSVMRNEPVYREYYLKKYHEVPKHQHKRALVLTARKLVRMVDVLLRNHQLYASERSV

SEQ ID NO: 221467 - protein, 370 aa, unidentified
MNGSIFVGLDVHKATISVAVAEAMRGGEVRNLGIIPNRSDQIDKLAKKLGKGDRQVSFCYEAGPCGYGLHRQLTRLGHNCIVVAPSLIPMKAGDRVKTDRRDAAMLAKLHRSGELTAVWVPDAAHEAMRDLVRARATAMRVLGKARQHLQGFLLRHGRIYAGKKGWTLAYRRWRTTVRFDHPASQIVLQDYIHAVTDAEARVDCLTKRIEELAPQWSMTPFVEAVQAMRGVAFIVAVTVVAEVGDFSRFDNPRQLMAFLGLVPSEHSSGATIRRGGITKAGNALARRALIEGAWTYRMQARVSRKLHDRNERLPQAIRDIAWKAQVRLCARYRRLSAAGKPKVIVTTAIAREMVGFLWAITRQVQLGPAA

SEQ ID NO: 221468 - protein, 404 aa, unidentified
MNNVAGVDVSKGKSMVTVLRPFGEVVAKPFSVGHTGSELKELADFLKSLDGETRVVMEHTGRYYEPVARFLHEEGIFVSAVNPKLIKDYGNNTLRKVKTDKADARKIARYGLDNWAELRQHTLMDTIRTQLKTLNRQQGLYTKTKTMMKNNLIALLDQTYPGVNDLFDSPVREDGSQKWVDFATAFWHVDCVRNMSFAAFTERYRKWCKRNGYNFSQSRAIKIHTEAQDLIAMLPKDALTKTMVRQAADALNAVSKSLERLKAEMRSLASQLPEYPVVMAMRGVGDSLGPQLMAEIGDVTRFAHRGSITAFAGVDPGSDQSGTHEAKSPRTSKSGPPELRKALFLVMDCLLKTMPADDPVYRFMDKKRSEGKPYLVYMTAGANKFLRIYYGRVKEYLASLENAD

SEQ ID NO: 221469 - protein, 441 aa, unidentified
MPPQTRSPESVETTLSPENTTEVRPFHLGLDMSLHTGTACLLDNLGREIVPRWTFRNNRPGAEELTQKVADLLKRHRATILLVGMEATGLYGWHLACFLSDTPLLHPWQARVYVFNPHRTLNFKRALGEPGKTDRVDALVVAQWLRVGHLPAPFAIDTVYGPLQRLTRFRYHLTQTITREKLYTLGLLFLAFSEFGAAAPFKDPFGATSQSVLEELSPDELATKPLEELTNYVARNGRGGFANPDRVAQTLQRAARDSYHLNKVHAGATRLVLSVSLTNIRILTRHLKEVDAAIASELKAIPVAACLLSVPGLGPVYAAGLLAEIQNIHRFPDHAAVAKFAGLTWRSHQSGDFTAEETPLTKTGNTYLRYYLVEGANSVRVREPEFRAYYRVKYDEATKHHHKRAVTLTARKLVRLVDALLRGAQLYVPPGQRHGGRVAPA

SEQ ID NO: 221470 - protein, 325 aa, unidentified
MFLGIDVSKESLDVALLSEAKPTRKPHHKIFPNTPAGHQQLLAWLHQSGTASVHVCLEATGTWAEAIALALHEAGHYVALVNPALIRAFAHSQLLRTKTDKADAQLIARFCAMHQPPLWTPPAPEIQALQALVRRLETLLEMHTMESNRLGAGLSCAAVQTDLEEHLADLQARIKKVRQQIQDHLDQHPDLKSKAQLLESIPGIGAATAALLLAELGDMQQFSNARQVAAFAGLVPRLYQSGSSVQGRTRLSKVGSSRLRKALYFPALAALRCNPLIQAFGQRLAQQGKSKMLIVGAAMRKLLHLAYGVLKSGQPFDPHFAARTP

SEQ ID NO: 221471 - protein, 410 aa, unidentified
MLFIGDDWAEAHHDIEIVDGDGRLLAKRRLPEGIDGLTAMHALVADHLEEDTHPADVLIGIETDRGPWVQALIASGYTVYAVNPLQVARYRERHGTAGAKSDPGDAHTLAELVRLDRAHHRPVAGDSELAEHVKVLARTHQSMIWSRQRQTNTLRSMLREFYPAALAAFGEDLAGRDALAVLAIAPSPQAGRRLARAKIAAALRRAGRQRNLEATAERIQTALRAPQLAAHPGVVGAYTASVQALVAVIAELVAQTEVLRGEVEAGFGRHPDAEIYLSQPGLGPVLGARVLAEFGDDPTRYADPKARKNYSGMAPITRASGTKRVVLARYARNRRLADALYQQAFAALTASPGARAYYDRQRGRGATHHQALRALANRLVGILHGCLRHQTHYDESTAWPAEQIPTSLAA

SEQ ID NO: 221472 - protein, 421 aa, unidentified
MVHLAQEEFAAFVGLDWADAKHDVCLQATGTTRREFLSFEHRPEAIDAWAQTLHTRFHGHPVAVCLELNKGPIVSALRKYDFLVLFPVNPLTLARYREAFIPSRAKDDPSDAELQVELLLKHRDKLKPLQPQSSAMRALTQLVEHRRRLVGDKVRCTNRLTSALKNYFPQVLQWFPDKDTAIFCDCLSRWPTLKAAQLARRSTLEGCFRAHHVPSVDVIAPRLQAVKRAMALTTDDGVIAPNVLLVQALVAQLRVTLQAIADFDTAIAQRAQDHPDFSLFDALPGAGAVFAPRLLVAFGEQRERFSSAEELQKYAGIAPVTERSGKKAWVHWRLQCPTFLRQTFVEWAAESTRHSFWAQVYYQQQRDKGKAHQAAVRALAFKWIRILYRCWQDRTPYDESVYLQALKRRSAPLLHTLAQEA

SEQ ID NO: 221473 - protein, 351 aa, unidentified
MNTQITATPKLFIGIDIHKRSWKVHCATDLSSGKTFSMRPDAELLYEYVAKHYTGYEVSTAYEAGFCGYHAHRCFVGYGWRSLVVNPADIFRRGKERHTKTDRIDALLIARELKDGRLSGICVPDKCREQLRSLFRRRNDLVKDMRQIKSYIKMQLLYYGIRIPQEFDNDHWSHKFRDWLDELDFGYDTGNEVLRSRMRSFRFIDREFREVSTLLRRYTKIHFKKDYMLLRSIPGIGPIVASGILSELGDLRRFGNIKHLAGYVGLAPGIYQSGDTIRHTGVTMRAHRLIRSYFIEASWQAIRTDPVMQGYYRKHHGKNVKSVIVKVARKLLSRTLAVIKTETPYAIGVLE

SEQ ID NO: 221474 - protein, 410 aa, unidentified
MYGKAGPMIYAGIDIAKNDHVVGATDEHGRDASKPMKFANSAGGFDRCVAYLEGLAESKSDLMVGMEATGHYWLPLFCHLQNEGFSVVVINPIRTDAMRRFKGSSRVKTDMIDCVLIAETMRCGDFEPSRLGDESMMELRQLTRLHQELKESVADLKRQVIVALDQVFPEYDSIFSDTFGESSKAFLKRCPTPEECLGIRADSLAGTLAKASHGKLGRKKADEIKSIAKGSCGMRMATSALSFQIKLLIDQIDFIERQAEEVEAKIREGIQEIEPLILTIPGIGHVLGAQIVSEIGDIRRFHSAPAIVKYAGINPSVSQSGKFSSDDNHITKQGSPYLRRALYLAAMGQLKLKTPFYDYYAKKRADGKSHREALIAVSRKLVHVIYAVLSKQQPYDPNVAKSPELASRSE

SEQ ID NO: 221475 - protein, 416 aa, unidentified
MDTMYERCCGLDIHKKTIEACFRSGKKKTHMSFGTTSAELRKLTMWLVENDCQSVAMESTGSYWKPIFNILELSGTDMKIIVVNARHMKNVPGRKTDVNDAEWIAELLQYGLLRPSFIPDREQRELRELSRYRKSLVGERAREINRLQKMLEGGNIKLTSVVSEVTGYSSRRLLDRLLRNDEPMTEDVISGLVHTSLAGKSKELETALDGLLSELQKELLIKVLDHIDDMSRRIADLDDFCRKQMKKYEDALDKLDEIPGIARRTAETILIETGLDMSRFPTAKHFARWAGLAPGNNESAGKRSSGRTTKGNPTLKSTLIQSAKVAARKKNSFFKARYQKIAAKRGANRASVAVAHSMLIAIYHILKSGERFKDLGEDYYNQFNREKKKNYYLKKLTKLGVNLKEATLSISIQTAT

SEQ ID NO: 221476 - protein, 416 aa, unidentified
MNELKCWFVGVDWASESHRVRITDGCGKRLGERDFAHGGAGLAEMAAWLTSVAGADPSAIHVAIEMPHGPIVETLLERGFNVYAINPKQLDRFRDRFSPAGAKDDSRDAEVLADALRTDRRAFRKLALAEPLVVELREWSRMTDDLNGERNRLCNRLREQLWRYFPAMLELEQDLGAEWFLDLWELVPAPDKAVRIRETSIARILKSRRIRRLTAAEVLAMLRQPPVTVAPGTIEAASAHIRVLIERLRVVNRQLKDAHRQLDRLCGLLAEPTESEPGQANEQRDAAILASLPGNGRIVLATLLAEGWEALERRDYHALRTLCGAAPVTKRSGKSRIVTRRLACNPRLRNALYHWARVAAQHDPRSRAKYAALRLRGHSHARALRSVGDRLLNVACAMLRNGTQFNPSLEGQKNAC

SEQ ID NO: 221477 - protein, 336 aa, unidentified
MKKYKIFVGIDISKGWIDVAVKSETVSVCRRFDNCKKGYRSMLSWLKTFASFKEMILCMEHTGVYGMPLWEYLANQKICFVVETGLQIRHSMGIRRGKSDKADAQIIARYIRLHHTETRLYKVPNEVIKRLKIVFGYRERLLKVKHLLTVSSKEISSFMSKSACREMTIDSGKLAAIISERISRIEKVIDKIIEADPETNRIYRLVKSVPGIGPITGAYLIIVTQNFTLINNSRKLSRYAGMSPEKNESGIIKRKAKTSRIGNKKLKALLSNCVGTIIQHDIESREYQQRKIDQGKPEGVIINNLRNKILHRVCAVVNRGTPYVNIKKYRTMENVA

SEQ ID NO: 221478 - protein, 409 aa, unidentified
MKRYYKIKKIDSKTAIVTADIGKTNHYGYISCTTSELKTFRFSNNKESFDGMWKKVEEFKKTNNLEKVVFGFESTGSYGEPLKLYMQHKGAELIQINPMHTKRLKELSDNSPNKTDQKDPRVIADILMLGYGLTTIIAEDKTAELREQVKSRENRLEDINRVKNRIEGLLAKHFPEFLQIMGLRTKTSMYLLKHYPTANSLGKKRINKLARKVYRVSRSQIKYSRLSKLHEAAINSIGVKEGQEAYKKEIRRQLEQVELLERQLSEIEEQIKAIVEQLPENRILQSVKGIGLITAAYLLSEVVDFKAYRVQKEIEKFAGLNLYEISSGKHKGQRKLSKRGRTLLRKALYMVVLNMIKKTGIYYNDYQGYLIRGVKKVEAMVIIMKRLLRMLHALVRDNKMFVENYKTAA

SEQ ID NO: 221479 - protein, 338 aa, unidentified
MKLYAGIDLHASNNYIGVIDDNDNRLLSKKVNNDMVTVLEALAPFKENIEGVIVESTYNWYWLVDGLQEEGYHVHLANPAQIQQYNGKKYTDDKWDSFWLAHMKRLNILPEGYIYPKENRPVRDLLRRRMMYVRQKTSHILSLESMINRNCGLHISNKDIKKLTDADLGTMFEHRSLIYAAKSNLETIRFFDEKIKGIEKEIVSQAELDKDFELLQTMPGVGKILSLTIMLEVGDITRFARVNNYSSYCCCVKSERLSNNKKKGANNSKNGNRYLAWAYIEAAIFAINWYPEIKRYYQKKLAKTNRFVAVKTIAHKLARASYFIMRDKVPFDIKKLFF

SEQ ID NO: 221480 - protein, 390 aa, unidentified
MIYVGIDVAKDKHDCCILNQDADPLFPVFTIENNLAGYEQLYERIQSVSKDLTEIKVGLEATGHYSYNILRSLLDHGYHTYVINPLHTNLYRKGQSLRKTKTDKVDARSIAEMLVTDKTLKPYTNTSYHNEELKSLTRYRFDKVRERAKLKSSIARLVNILFPELEELVPTLHRPTVYALLEEMPGASFVASSNLTHLKSLLEKASKGHYQRDKAIEIRDAAQTSVGSVMPAKSMELKHTINLIRILTEEIDEIESSIKKIVDKYDSPIMTIPGINYRMGAMILAEIGDFSRFNNADQILAYAGMSPSTYQSGHLESSYAHMEKRGSRYLRYALFNATRYVCIWDERFRLYLTRKRAEGKHYYVAISHAAKKLLRTIYRMEMTHTAYQPL

SEQ ID NO: 221481 - protein, 341 aa, unidentified
MAEISMIGLDLAKNVFQIHGVDASGAVVLRRQLRRGQVEKFFAQQAPMLVGMEACAGAHHWARVIGALGHQVRVMPPSYVKPYVKRNKNDGRDAEAICEAMSRPSMRFVAVKSVEQQASLAVHTTRALLVRQRTQAANALRAALNEIGMVAAQGVKGLRQLMQQLETPSAAIPEVMRGALLLLAQQWERLDAAERALEGKIKKAALADQAARRLIEVPTVGPITASATVAKVTDARVFRTARDFSAWVGLTGRDRGTGGKHRVGPISKQGDRMLRTLLINGASSYLRHQKARGMKDPWVRAMLARRPYKVVMVALAARTARIIWALLTTGERYRAPLPAAA

SEQ ID NO: 221482 - protein, 400 aa, unidentified
MLSIGIDVSKGKSTVCGMKPGGEIVYAPFEVQQTREGMSDLVSLLRSSGEEVRAVLESTGSYHCPVVAALLENGIFVSVVNSLRMKRFCSQSIRKVKTDRIDAMQIALYGLAYWQELQPTKLPEDTYRELQLLARQYYQMTSMLIKAKVDFNAICDQVLPGMQELMNDHAGRHKLSDFVLRYRHTTHILEMGETRFRKDYCKWAEKKGYRNCERMAALIFATAQNGIPVLPNAPSTQIVITEATRVLHTVEASRDAILTQMQALAKTLPEYSLVREMPCIGDTLAPRLIAEIGDVRRFHSKRALIAYAGIDAPPYQSGKFCANNRHISKRGNRYLRKTGYEVMQSYVMHKPANDPIFTFIEKKRGEGKSGKLAMVAGLNKFLRVYYGKVTELYRSLPAIE

SEQ ID NO: 221483 - protein, 436 aa, unidentified
MTITTVGLDIAKQVIQVHAVDVRGKPIIRKQLKRHQVLPFFANLPPCLIGIEACGGAHDWARRLMALGHTVKLMAPQFVKPYVKANKHDAADAEAICEAVSRPSMRFVSVKAQEQQALLALHRARQGFVTARTAQANQLRGLLAEFGLVVPKGLAALKRRIPDILEDAENGLPGAFRELLQRLGDHLTELNRQVEDLTQRIEAEHRANPLSRRLAQIPGIGPLIATALLAAIGDIQGFANGRQLAAWLGLVPKQSSTGGKTRILGISKRGDTYLRTLLIHGARSALRAAQRREEPGATWLTRLADRRHPNIAAVALANKNARIAFALLAHDRDYQPGYRPVQATTELIQREPSNPVTAFLPPSAQAIRTDGDPVRPGLGKPARVTALPARRDDEDPTSRFHPGPRATPSARVRMYGCILHCLNIGTDRLAKRGDHV

SEQ ID NO: 221484 - protein, 465 aa, unidentified
MPKKNVTRKSRKRQSHLLKTVQPDAAGIDLGSREHWVAAPPLPDGSPSVERFGTTTPELLRLCQWLKQQHVTTVAMESTGVYWIPLFEILDSHGFEVHLVNARQISHVPGRKTDMLDCQWLQLLHACGLLRGSFRPGDEICRLRALIRERNGIVEQRSDWVRRMQKSLDQMNVCVHHAVSDITGVTGMAILRAIVDGERDPRVLARLRDRRCLKSEEQIVAELTGNWRPEHLFNLGQAFKIYDQLNGVISDYDTEILRCIDSLQSAVCEDSSAPPPASKAKASKISQRGQEPLRQALYRMSGFDLTTIDGIGVDTAAVVLSELGPDLSTFADEGRFVSYLRLAPNMSISAGKKVPGKFKAVSSTRVCNALRMAATTLRTSKTALGAYYRRIAWRKGASVAVFATARKLAQLVYRLIHYGQSYVDVGAKAYEARCAQRRLSSYARALNELGYKIEPLTAQEGLAAI

SEQ ID NO: 221485 - protein, 301 aa, unidentified
MKKFYVGIDISKSKLDVAVYDAEKKKIANKFVIKNEADGIQSLFSTLKKEKINLEDCWFCFEHTGHYGFSLCYELEQICCVYSIIPALQIKLSLGMTRGKNDQVDAERIAMFAYTFRDKLQPSKMSSDCFQKIKQLLTYRNQMVRISTQLQNSLKSHQAVCQLTHFDYVVDEIKKQIIEVKVKIESIDELLMSEIKRDKTLENNFNLLKTIKGIGPIISIYLLVLTQNFESFTDARKFNCYAGIAPFEHSSGSSIRGKTKTSSLRNKTIKSLLFNGANAAALHALLYDALSGHIPENNDRT

SEQ ID NO: 221486 - protein, 417 aa, unidentified
MDVMHARCCGLDVHKATVVACVLTGEAGGRVRKEVRTFGTMTGDLRQLATWLAEEQVTHVGMESTGVYWKPVYTMLEGQFELVVANAQHVKAIPGKKTDRKDAEWLADLLRHGLMPRSFIPPTAQQQVRELTRYRMSLTQEHAAEANRLQKVLEGANIKLASVASDILGVSCRAMLQAMIAGEEDPAVLAGLAKGRMEKKRAELVRALEGRLQAHHRFLLAEQLRHLEALEAGIERVGQEIEERLRPFEAQMALADSIPGIAQDTAQVLAAEVGVDMSRFPSGDHLASWAGMCPGNNESAGRRHSGKTRKGSPWLRSALVQAAWGAAHTKDTYLAAEYARLVGRRGKKRALVAVGHSILLMYHAVLSQKQPYHELGGNYFDERAKETTRNRLVHRLEKLGFIVTLESQEPPPLPAAA

SEQ ID NO: 221487 - protein, 354 aa, unidentified
MLIIGCDYHPSFQQIAFVDTDTGELLERRLEHREEAEKFYRELAVQGMKVRVGMEASGQARWFERLLAELNIELWIGDATEIARKRERKQKTDRQDAQHILHLLLKDDFPQIWVPSWENRDLRQLLWHRHRMVQARTRIMNQLQAVALNEGVRCKKRLWREKGREQLESFRLAPWASRRRHDLLEWLDRLNPTIAALSQAIEQEVEKCPEAQRLRSHPGVGPLTALAFVLIIGKPDRFQCGKQIASYLGLVPLEDSSGNRRRLGHITKQGNSLLRFLLVEAAQVTARSLPEWRSKYVHLTMRRGRKIAKVALARKLAVRLYWMMRKGWNYEQLKKFGSHAGQPGNRDGVKYNIE

SEQ ID NO: 221488 - protein, 428 aa, unidentified
MKYNTQNAKIASITEKTLIVGIDIGSETHFARAFDWRNYEYTKKPFEFSNNKEGFQAFESWMEELSAKHGKTAVIPGMEPTGHYWFALGKFLQDNGMRPVHVNPHHVKKSKELDDNNPNKNDRKDPKTIAGLVNEGRFSYPYIPIGVYAEIRNLSNLRFQAQEELTRAKNRLARWFSIYFPEYKEVYRDIKAVSGRMVLQMAPLPEDIRKLGVEGVNRIWREAKLRGAGMKRAKTLVTAAEHSVGSKESPEAARIELKILLHDIDEYASRVEELLCLLDAKLREIPYIDKLLEIKGIGKITVSGFIAEVGDIRRFDDPKQLQKLAGYAIVANESGKYKGESRISYRGRKRLRYVLFEAALSLVARNPEFRKIYEYYRTRENHPLKKMQSLVAVACKVIRVFYVMLTKGVDYDPEKMMRDIRRPELQAA

SEQ ID NO: 221489 - protein, 332 aa, unidentified
MQMLAIDLGKQSFHIYGITGDGEVVSRKVSRAKLTDAVTKLQPQSVAMEACASSHHWGRVFEGQGYTVHLIHPRFVKPFVKGSKNDAVDAEAIFEAANRPTMRFVPLKSVEQQDLQALHRTRDRLIVQRTALINHTRGLLAEYGVVMPVGASRFRLQIDKMVETAELSELAKNLFLKLAEEYRGLDAKVSALDDMLAEICREDERCKRLTTLPGVGPIVATALVAAVDDGRHFASGRALSAWIGLVPRQYTTGGKPRLGGIGTRANHYLRRQLIHGARSALLRVAKHGDRRSKWAQELQSRAGHNKTLVAMANKTARIAWAMLRSGDNYKMA

SEQ ID NO: 221490 - protein, 416 aa, unidentified
MKLFVGIDVSSEKLDVCFLTDDDQLSILSEISVANDIEGASLTREMILKFNENYLFDQIVIGMESTSMYSFHPSMFFHEDEELRKLNVLVTIENPFRIKQFSRMFDEDKTDRNDALRIADFLRIQRFTISPIKEEKYMALQRLTRTRYQLIKQLTRTKQHFLENLTYKCSTLAREMKDESTSLFSTTIISLMTEDFTLDELAAIPLEAFCDLLQKKGRGRFKQPEKIAKAIQRAIRSSYRLGAVAQESIEIVLGVLVCEMRTLEKNIKELDKAIEQLVIIIPEYQCLTSIPGVGNVYAAGLIAEIGQIERFEDQTKLAKYAGLSWKVKQSGNYQSQNTPLTKQGNRYFRYYLVEAANSVRKYLPEYQSFYQSKCKEVPKHQHKRALVLTARKFTRLVDTLLRNHQLYTPPRSVIDK

SEQ ID NO: 221491 - protein, 343 aa, unidentified
MKLIRVGVDLAKNVFQVHGVDRNEKAAWRRKLMRENWLKVLLETVEPGCEIGMESCGGAHHWARRLQAHGFRVRMIAPQFVKPYVKSNKNDANDAEAICESMSRPHMRFVSVKTVEQQDIQAVHRIRAELSKQRTAKGNQIRGLVAEYGLVAPKELVYLRRALPCWLEDAENGLSERFRRLLHGLWGDLRTLDERMAELDREIAAIAQSDPAAKRLQQLRGVGPIIATALVAAVGTGEQFANGRQMAAAFGLTPRQHSSGGKERLLGITKRGDAYLRVLLIHGARSVIRTSKGKDDRLSQWVTRLAARSHPNVAVVAMANKTTRMAWAMLKNGTDYQPAMVTS

SEQ ID NO: 221492 - protein, 451 aa, unidentified
MAKKKMEMDIIHPHCAGIDIGSRSHYVAVGQALEDVKEFGVYADDLTDICLHLKEHEVTSVAMESTGNYWQNLYVELIKHGFEVTLANGKFTKNIKGKKTDVKDARWIQKLHSIGLLTSSFLPDETTEKLRTYCRQRQNMLTLAAEASHKMQKYLKILNFRLDVVVNDICGLTGMAIITDICQGNLDPEKLSDHRHGNCRKSKEEIAKALKGNNREDYLFGLKQELESYQFYQKKIAECDKQIGAFLKQQINTDPEKKKLKTTDKTHKRINKNAIKGIDLNQAAYQYFGGVDLMSIEGMSHATILSIISEIGPEGFHKFETAKHFTSWLRLAPNNKVSGGKLLSSKTPKGSNRLKIALRNAANAIGNLKDTHLSNFFNRVCYRKGRTVAVSATARKLAVILWNMVVKNMPYKPPTDYLFLDEKRKLGLVKRIRKQITKFELTNQDLGLATT

SEQ ID NO: 221493 - protein, 461 aa, unidentified
MSEENLQMPILNPKAAGIDVGSRSHFVGIGQGNDHVKEFGVYTEDLKKLTEFLLDNGVTTVAMESTGDYWQNLYTELIRNDLEVYLVNGKFTKTMNKKKTDVIDCQWIQKLHSLGLLPRCFLPDEATEKLRTLCRHRGNLIAAKASTSKRMQKYLKLLNFRLDIVVKDITGLTGLKIISEICKGNTDPKKLAEHRHYNCRKSEEEIARALVGNNREDYLFGLKQEYQRHNFLVGQLQQCDVQIASLLEIYIQSMDSIIDEAPTEKPYKRINKNSIKTVDLNIVAFQYFGGVDLLEIPGISHGTVLSIMSEIGPEGLDKFPTSKHFTSWLRLAPNNKISGGKRISSKVPKGSNRLKIAFRNAAYSIARLKDSPLNKFYKRMLFKKGSTKAITATARKLACIVWNMITKKVAYHSQEEYLFLDQKRKKIAQIRKNISKFGIDPNELGIFTRQEYKIAHEKKPQ

SEQ ID NO: 221494 - protein, 337 aa, unidentified
MKYSGIDLHSNNSVVTVTDEEDRVVAEKRLPNDLAKILGLLMPWREEMAGVVVESTFNWYWLVDGLQAAGFEVHLANTTAIKKYAGLKHGGDETDARHLAHLLRLGILPTGSILPPAQRAVRDLARKRMQLVRSRTTHILAIENITARQHGARISSNQVKRLTAETVDQMALPEDVALAIKTNVAVITTLSAQIDLLEKRLQERIGERAEYGLLTSVPGIGQVLATTILLETGPIERFAAAGNFASYARCVDSVRTSNGKKKGEGNTRNGNKYLAWAFVEAANFALRYCAEAKRFYERKRAKTNNVVAIKALAHKLARACFHILNERKPFDVTRCFA

SEQ ID NO: 221495 - protein, 334 aa, unidentified
MKSDGLHIGVDVSKEKLDVYVPAREEGLRPETKEMDNNTEGFRTLRDLARKAGATVCVEPTGGYELELVAFMHKFGVPVAYADALRVRQFAKAEGNLSKNDAIDAALISRFADKIGVRALEPADIDTVELRRKTKFRQTMMDSRTALICRLETEVDADIRSMMKEQIRHLDKLIDKIERSCMETVARNEEKNALRERFTKVGGVGDLTAISVLAGLPEIGKLSDEKLNRLVGISPEQRQSGTKEWQRRIWGGRKDVRNALYMAATASIQWNSILGGYYRKKRAEGHPHKWAMVPTMRKLLSLLNRIARDPNFTPKPEPATTKKNARAGRKKKSA

SEQ ID NO: 221496 - protein, 360 aa, unidentified
MARAGRAAPELRGEIANKPKAVAKLVERLNREFEGEVLLFCYEAGPCGYGLYRQLLALGHDCQVVAPSLIPKKPGERTKTDRRDALKLARLLRAGDLTAVWVPDTEQEAMRDLTRARDDMKSQERKARQQLNAFVLRHGHHWPRGKTRWTQAHHNWLESIRFEQPWLQIVLQEYIDAAKAASRRVADLTDQLMQALPGWSLAPVVDSLAALRGIDKLAATVLLAELGDISRFDSPKQLMAYLGLVPSEHSSGPRRRQGAITLTGNGHARRMLVESAWSYRFPARQTMHLKRKAQHASEQAKAIAWRAQKRLCGRYRQLSQAGKNIKLVCVAIARELVGFIWDIVRHEMPRLEVQVAPTGR

SEQ ID NO: 221497 - protein, 427 aa, unidentified
MTQTIPASTFAATIVLDWADQKHDLWIQAATGGKPEHLILEQTPEAIHEWVAKMGARFPNQRIAIAVETSRGAIISALQAYAFIVLFPINPKMLCSYREAFCVSGAKDDRTDAMLLEEYVRFHFAKLRPLQPDTELTRKLGGLVENRRDLVDERTRLVNQLHSLLKTYYPLMEVLFDDLTTLLATQFLLKWPELASLKKAGAVALRKFFYGHNCRSAQTLEQRLQAVEKAQPLTIDPALIEPAVLKVKALAGMLKVLHEAIAEIEDHTSQAMDAHPDAPLFRSFPGAGPVMAPRLLVAFGTNRDRFENAQETQQFYGIAPVKKQSGQSKVIHMRYRCPKFGRQTFHENAGHALRKEGWTKEFYDQQRERKKGHHAAVRSLSFKLIRIYFRCWKDSKPYDRARYEKALDTHGSPLSAALKNKVSKPTK

SEQ ID NO: 221498 - protein, 358 aa, unidentified
MAKRTTKSENGKQTMLTTRDRVFVGLDVHKKSYHAAVRVNGREVTTRVLAPTAEAVLVFLEPYRSGRLHVVYEAGPTGFGLVRALREAGVSADVIAPSKTPQTPSEENKTDRLDCRQLAFYDEKGMLKTVAVPTAEEEADRQVIRLRDQVVDARRRVKQQIKSFLLQHGVEQPAGLANWSKESVQMLRQLPLVAALRFCLDVMVAELEDFDKLLGQVNREVERLSQEPRHSEAVTRLRKYSGVGVITAMQYRTEVFRPGRFANERQVAAYLGLAPRVSQSGERHRSGPLLKAGHGRLRALLVEAAWIWIQKDETAKATYKRLLQNTGQPNKAITGMARRLAIQLWRTLVPQEERRGAA

SEQ ID NO: 221499 - protein, 344 aa, unidentified
MNSTTIAVDVAKSVFEVAVSIYPGQVHERHRLSREAFGRFLGAHPPATVLMEACGSAHYWARHAQSHGHRVVLVAPHVVRPYVVRNKTDRTDAKGLLEVFRNEDVQPVPVKSTTQQALAALHRLRSTWLATRTARLNTVRGLLREFGLIIPVGAHHVVPHVRAVLEDVDAGIPGLLRPPLAAAVEEIGELNRRIRAVERQLETAAADTLAVGHLRTIPGIGLLTATALVATVGDVARFPSARHFASYLGLTPREHSSGARRRLGAISKRGDTYLRMLLIHGARAVLWHAKAKAAASPDRLRIWALQLERLRGHNKAAVALANKLARIAWAVWRRGTPFAVVPAA

SEQ ID NO: 221500 - protein, 382 aa, unidentified
MSEITIIGVDLAKNVFQLHGVDANHRPVLRRQLRRTQMLPFFAKIPPCLVVMEACGSAHYWAREIGALGHEVRLVPPAYARPFAKRGKSDSIDAEAVCEAGARPSMRFVPVKSPEAQALGALHRTRALLDKQRTMLINALRAHLAEFGFVAGKGVSNVPNLARIVEEAPPSRNARAKARGQLRETFERDQLYLVQLKPIERGLISRLPDIARGALRGLLHMIEQVNLQLGAIEKELRAFHRNNDTSQRLAATPGIGLITATALTGLTPDATSFKNGRHFAAWMGITPRQDSTGGKTRLLGISKAGNGYLRRLLVLGATSMLRSLEGKTTRLALWAQGLLARRPKKVVIVALANKLARIAWAIMAKGEPYRAGTIEAQAGAAA

SEQ ID NO: 221501 - protein, 221 aa, unidentified
MKEVSIIGLNLAKNVFQLHGARSDGSVAFRRKLSRAKLLSFLAATPRCLVAMEACASAHHWAQQIFALGHDVRLIAPIYVKPFVKRNKNDAADAEAIADAASRPTMRFVAVKPVEKQAAGFAFKTRDLLVRQRTQAINAVRGHMAEYGVVAPNGPPPESFAKGRDFAAWLGLTPKQNSSGGKTRLGGTSKMGQRDLRRLLVSGAITQVRWAGARRGRGWRE

SEQ ID NO: 221502 - protein, 355 aa, unidentified
MNSEKYIGLDVHQATISVAVMDSQGKIIMESILETKASTLLEFIAGLRGSLFVTFEEGTWAAWLYDLLKPHVTEVLVCNPRKIALVKQGNKSDKIDARKLANRLRLHDLKPVYHGETGVRMLRELARSYLTVVKDLSRVMNRLKALYRSWAIPCAGRDVYYKRHRSQWLEKIPEAGTRWRAEQLYQQLDMLQHLRQQARRELLVEGRKHAITAKLRQIPSLGPIRSALAVALIQTPHRFRSKRQLWTYSGLGLETRDSGEYHYVNGQVRRRKKQATIRGLNKDYNHDLKGLFKGAATRASVQPGPLQEFYQRSLAKGIKPTMVRLTLARKIAAIALTLWKKGEDFDINKLNSQAA

SEQ ID NO: 221503 - protein, 417 aa, unidentified
MEVLYPRCAGLDVHQASVVACVRIATDARASHEVRTFETTTKGLLALADWLREAACTHVAMESTGVYWKPVWHVLEGDFELVLANATHIRNVPGRKTDVNDATWIADLLAHGLIRGSFVPPAEVQELRDLTRTRKQLVRELARHTQRIQKTLEDANIKIVGVISDILGTSGRAFLEAIIAGQDDPQRLADLARGRLKADREKIVEALRGRVQAHHRFMLKLHLEQIHCLEKAIAEIEGRLGERLEPFRQEVKLLLTIPGISQTAAHVIASEMGLDMTRFASADSLVSWAGLCPRSDQSAGKRRSTRILKGAPWLKTTLIQAAWATARTKNSYLRAMFHRLKARRGAMKAIVAVAAAMLRSAYYMLTRHMPYQDLGPSYFEKKTRTRTANRLLKRLKDLGIEVLQTRITEPSAVPVSL

SEQ ID NO: 221504 - protein, 330 aa, unidentified
MMLHAIDVHKATLELATMYADGESVLQMVRIPACKRTLRSYFRQWPHARHRVVIETTGSWYWIADVLRELGVELKLAHAAKVQAITAAKVKTDHVDVLTLLTMLRLNLVPEAHMISPELRELRDLLRMRLRLIEKRTSSLNSIARLLEKYNCASVEALPELAQVQAGFHRGQISLLAVQTKALEKRIHPQLRSNPEVKRLRRIPGIGRLNAWTLHLEIDGIERFASERKFFSYSRLVPGADNSGGRTRNKRSRAGNRYLKLAFSHAAVRAVQRYAEVGAAYRKKLRKKNKPLAHAWVRKELARIVYHVLKDDVDYDDTFRGVALSRPKRA

SEQ ID NO: 221505 - protein, 414 aa, unidentified
MERLYTCCAGLDVHKQTVVACLLRPEREAEQKEIQTFGTTTAALIALREWLLAAGCTHVAMEATGSFWKPVHNILEGHCTLLVVNAAHMQAVPGRKTDVRDAEWIATLLQHGLLRASFIPSREQRELRDLTRTRTSLIDERSAAVNRIQKVLEDANIKLAGVATDIMGKSGRDILAALLGGEMAASTMANLARGKLRRKRDALEQALQGRMAAHHRMLIALHLEHIDLLEEQIAPLSAEIAERLRPCEAVLVRLETIPGVGRRTAQILAAEMGLDMARFPSAGHLASWAGMCPGVHESAGKRKSGKRREGNKALRRALTEAARAAARTKKKDRMYLRGQYRRLVVRVGKKKAAVAVGHTILRLAYHLLMNETTYQEHVMIQLDERRRAQTQRRALDQLKALGYEVTLTPKEPAA

SEQ ID NO: 221506 - protein, 412 aa, unidentified
MQTLVERGCGLDVHQATVVACLLIVRKDGRVQKQMRTFGTTTRELVSLRQWLLAEGCTHLALESTGVYWKPVYAILEGALEIVVANAQHVKKVPGRKTDVKDAEWLADLLCHGLLRPSFVPPKPIRELRDLTRYRRKLVESQAAERNRLLKLLETANIKLSSVATDVFGVSGRLMLRALIEGKASPQEMAELAKRRLRSKIPELELALEGRVEQHHRFLLELQLERLESAEKDLNTLEQRIQEKLQPYAPQLALLKEIPGVDWTLAAVIIAELGVDMSVFENVSQLTSWAGVCPGNNESAGKRKSSRIPKGNVYLKTALVEAANSAAKAKGTYLRDKFYRLKARRGYKRAAVAIAHKILVAIYHMLSQQVSYNDLGDLYLDHLNKNHLTRNLVHRLERLGYTVTLTAQPQPA

SEQ ID NO: 221507 - protein, 345 aa, unidentified
MNIASIGIDLGKTTFHLVALGERNKVLLRKKFSRPQLLAYTANLPAALIGLEACAGAHFVGTALREQGHQVRLIPAQFVKPYRKSNKNDFIDAEAIAEAVTKQNMRFAQLKTQEQLDWQAMHRVRDRLVRRRTALINEIRGFLLERGITFAAQPIHLRKNLPTVIEDAEQKLSPRLRWLLDRMWQEWKQTETEIQAITDEIERISNEDARCRQLQQIPGFGPLVSTATVAAIGNGSAFRRGRDFAAWVGVVPRQYSTGGKQKLYGISKRGNVYLRRMLIHGARSVLFRVKYDTAGFGQWVHRLAQRAPHNKVIVAIANKLARIAWAVLSSGRDYRHQPLQQLAAA

SEQ ID NO: 221508 - protein, 366 aa, unidentified
MKKISTVATNRNEIFKEHKLTIGLDLGDRSSHYCILDEAGEVILEHSLPTTPKGIHQVFDGIPRSRIALETGTHSPWVSRQLTQMSHEVIVAHARNVRLIGESSRKDDQLDARTLARLARIDPSLLGPVQHRSAKAQIHLTVIRARAGLVSARTALVNAARGLTKSYGERLRKCGTQQMNREMAKGLSQELRDALEPLFGEIESLNERIAEYDRRIEQIAKEVYPEVALLKQVKGVGTLIALTFVLTVDDPHRFQRSRDVGCFLGLRPGRRNSGMGQPQLHISKEGDRYLRMMMVQGAHYILGPFGQDSDLRRWGLRLAERGGKNAKKRAIVAVARKLAVLLHKLWVSGEVYEPLRNNPKVVGQVA

SEQ ID NO: 221509 - protein, 372 aa, unidentified
MIAAFKPTERMEVKKKMAVYVGIDVHKKYCQAALMNDNGHLLQELRFDNTSQGASSLVDLAKSVDSHVKAVVEPSANFWIRIYDKLEEEGVEVKLSNPLRTKAISEARIKTDKIDAKTLAYLLRGDLVAESYVPSRKNRERRALIRHRASLIRMRVEVKNRIHALLDKHELSYKYTDLFGKQGLEWLRSLQLATPDHEILQSSLQVVETLNEQIRSMDIQIAKDATTEDKAKLLMTMPGVDYYAAMVLLSEIEDVKRFSSDEKLVSWVGLAPQVHQSGNSHWTGHISRKGSKRARWILGQCAQSARQHDPRMREFYERIERKHGSSKAIVAVARKMLAIMYVMLIRNEPYRGENRELTEQKHKRLDTLANTT

SEQ ID NO: 221510 - protein, 317 aa, unidentified
MDPIVIGIDVSKDRLDVAVRPTGEHFAVSRDTSGLKALVNRLTPLAPAAIGVEATGGYETVVTAHLATAGLPVVVLNPAQVRHYAQALGKRAKTDPIDAAVIARFVEATKPEPRPLPDEATRHLADLMARRSQIIEMMVAERQRQKRLSAKRIQKSIARLLAALQKELSALEADIDDAVRGSPAWREKEDLLASVPGVGKVIARTLIAELPELGSLDRRRIAALAGLAPWTRQSGKWKGKSFIGGGRSTVRAALFLGAMTAARHNPVLKAFHDRLVAAGKPKLVAIIAVAHKLLTILSAIVRDGKPWQDDTHAPASI

SEQ ID NO: 221511 - protein, 458 aa, unidentified
MFLRTLKCKNHHITPIDTRMYYYDNKGRMTISRKYGTTGPTGCKSRHKPDNYGLCDKVYVAPANRGLLHCGNRAAYNTKGTGRYEQYYNICRNGYTQKQHKAAIKYPDRDNVVEFTIKNTPSDIKRAVKKIARQAPGPVEFCYEAGVCGFSLKRRIEALGFKCAVIAPSLVPVKPGVRIKTDRRDAKKLQEYYSAGLLTEVHAPNEKQEADRELVRLRETARKDVQRAQHHILKFLNRHSYIYHQGNHWTDKHITWLRGINFEEPALNEVFEAYFAQYINCCERLDRCDRRVEALAETDDYREMVGILSCFHGIKTITAISILVEIFDFARFESAPAFMSYLGLTPKEDSSGESEKKGPITKAGNKRVRRLLNETAHHYRHRYVPSKALKKRRESRPQWGIEIADRAGQRLSYRHRYLRARGKILVKANIAVARELAGFIWFTATQYYARKQAQPQKV

SEQ ID NO: 221512 - protein, 371 aa, unidentified
MTISTKFIGLDVHRDTISIAVADEGGGREIRFFGTVANDCEVLRKALASIGKNGATLRVCYEAGPCGFVIYRFLKSLGIDCVVISPSLMPRRPNDRVKTDRRDAQTLARLLRAGELTAVWVPDEAHEAIRDVVRARRQAKQDLVSAKNTLKSFLLRHDRRYPGKAIWGRMHWRWLSDQRFAFAHQQFVYEEYKRRIHELEERCVRLEQVLEEAVLDWPLAPVVTALQALRGIRFIAAVTLVAEIGDLHRFDRPKQLMAWLGLVPAEHSSGTRTRRGELTRTGNAAARAMLIESAWQYRYPAREGRALRERNAGLPDHIRAIAWKAQTRLCAKFRRLAGTGKHAAKIVAAVARELVGFIWDIARHTPVSRLA

SEQ ID NO: 221513 - protein, 370 aa, unidentified
MVQMHAVAGIDPHKKTATVAVIDSCGGRHGCQSFPIDEAGIEELLSFLVDSELIIDRVGIEGSAFLGRPLVLALAAAGYDTREVQANRTAERRSRRRRAKTDTEDAEAIAREALAHADLPPAGKRSTPDEDWEALGAVRNWRESLVLQRVRLLTEAEAVLVVLPVTVRATLPHTSRVLPQLKALVEGSVDLDGLGLADRIKVDRLVASLTDITTLTTRIKELDRKIPALLDRLGCTLPTIHGIGVVTAMDLLVEVGDPCRFTSEAQFARWCGAAPVALSSGEGDGAPRRHRLDLGGNRAVNSILHVVHVTQVRCHPPAKAYMARQTEQHKPKRSARRSHKRHLANVIIRHMWRDASRLSATADQALFSVA

SEQ ID NO: 221514 - protein, 390 aa, unidentified
MIKDTLYVGLDTDKKHIDVAVAEPLPGGEVRYWGKIANEAAALDRLIKRLQRHGRHLVVCYEAGPCGYGIYRRLNDKADVTCQVVAPSMTPRRPGVRVKTNRRDCLMLAKLLRAEELSPAWVPDEAHEAMRDLVRCRGAVVADQMRCRQRIAGFLLRQELHFVGKPWTQKHRAWLGRQVFAAPAHRLMFGEMLEALDQARARLKRLEDHIAELVASWSLAWLVEALQALRGYRLINAVSLVAEIGDPRRFDNPRQLMGYLGLVPSEASTGERVRRGKLTKSGNGRARKTLIEAAWTYSRPAKGPSPRAQRQNDAVRAIADKARHRLTGRYRKLMARGKLAPVAIAAVARESLGFIWAIAHAAHPQAGDNHASIAPGLRRQGRYAPPAAVA

SEQ ID NO: 221515 - protein, 344 aa, unidentified
MHFIGIDLHKRIFTACVLDDNEKVVDELLDIETDEKGLDFLMSRYPAEDCRIVFENLTRAHFAFHYLYDHGYAVDVAHTGHGSLREIACTNLKNDRVDAYKLALVCKDMWAGRRFIRRTHIAECDVMRMKAVIRMCNEYACIRDEMKLRIMEYMNLHNIPEHPKYRDVAGQRYRRYLLDMKDPALTGMVNMMSAAIDEIEAANIEIARFAEMSEDAGLLMTIKGVSALTAVTVVTAIDGIYRFETPERLVSYFGLAVRVSESAGKQKKGHITKEGDPLVRKYLANVVRNHASFCPKADLSMFYKRKSEEMPHWKAVTAAMRKLVCQIWHMLTYREQYRPNVMKS

SEQ ID NO: 221516 - protein, 366 aa, unidentified
MEKIYIGVDFHARQQTICYLKTETGELVISELQHQDKEQVHAFYQQFPSPVIVGLEASGYSPWFEALLEQLGCEVWLGHATEIRRRARWRQKNDRRDAELIWDLMVHDEFPRLHRPAATSREVLRMLRYRQKLIKLRTMAKNSLQAIALQAGLAKGKQLFTAAGQEEFKSAALSPVLQWQREHWFALLRPLNQQLLETMVWFKAQSKDDLRIQRLRTHPGIGLLTALCLLHTLQPVERFRNPRKVAAYAGFDPVERSSAERQHFLGISKAGSRLLRYLLVEAVQTAVRYDEDLKRFYKRLAERRGRPKAKVAAARKLLIRAYIMMRDEIDYAEFRRRAVAARLARTGQGPINVPEVLIGQPASPGA

SEQ ID NO: 221517 - protein, 355 aa, unidentified
MKYYTSTTEYNCGIDLHARQMYVCLMDRQGKKLVHTNVKDNDFTYFLKLIKPYQHSLTVCCECMFGWYWLADACQAAGLPFVLAHALYVRAIHGGKNKNDRVDSEKLTHLLRSNLIPPAYVYPTQMRPLRALLRQRIFYVWRRSELLARIHCHQLAHNRIPAKQSRWTRDDWEDALLKAEMDPLRQLALSNDLAMIRHFDHQIYEVEKELYRQTKQVAAREYALLQTVPGIGENLGLTILYEIGDIHRFPTVKDFLSYCRLVKGTVASAGKIKGLRGAKLGNPYLRWAFGEAAVIAKRDHFRIRPLAQRLEARMEGNKFKANTVLAIKLARSVYFMLKNKTVFDPDRLVAVLAKN

SEQ ID NO: 221518 - protein, 372 aa, unidentified
MTSIIYVGMDVHTTNYTLCCYSMEDDRFFAEVQVEPDAKNILKYLARIEKQQSRDCRIVCGYEAGCLGYSLYHQLHAHGIDCVILAPTTMMTKPGKRIKTDRRDARLISKCLAFHTYSPVYIPTEVDDTVKEYIRMRDDANSALARVKQQIIAFCIRHGKIHDGKSYWTNKHLEWLSSLDLGNKILSEVLQEYLIRYSQLREQVDVYDMRINELAQAEPYRQKVEKLGCFRGIAAHTALSFCVEVGDFRRFATAQQFASYLGLVPGECSSGDKQQYTGITKAGNSHLRKLLVETAQVFGRSATKSGKSVALKERQAKCDSLTVAYADKANARLKKKYFKIAMRSKVNIAKTAVAREMACFIWGMMTDNISCA

SEQ ID NO: 221519 - protein, 313 aa, unidentified
MEAVLECCVGLDVHQETVVACVLFGPLEHKPKKEIRTFGTTTPELLTLADWLEEQKCSHVAMESTGIYWKPVWNMLETGSFQLILANAQRIKNVPGRKTDVKDAEWIGQLLRSGLIEGSFVPPVEIRNLRDLTRYRKKLLQDTTQEKNRIHKVLQDANIKMTTYISDIFGVSGRNILECLLNGEVITAENITKMVKGKIRSKVPGLVDALNNRLHRHHREMIRFSWEHLKYLERTILDVEVIIEQCLTPYRQDIDLLDSIPGVGHTAAAVMIVELGTDMSVFPTDRHVSSWAGVSPGNNESVGKKKIWHHIRE

SEQ ID NO: 221520 - protein, 454 aa, unidentified
MAQRNRAVIPKPGKSRAAALTITHPNAAGIDIGSASHFVAVPPDRDDQPVREFASFTVDLNALADWLQTCGVDTVAMESTGVYWIPLFELLESRGFAVLLVNARHVKNVSGRKSDVLDCQWLQQLMTYGLLRGAFRPAEQVCMLRALYRQRGMLLRSQGRHVQHMQKALTQMNIQLTNVLSDVVGESGQKILRAIVAGERDGQVLGAMKNVRVRASVEQIAKSLQGNWRAEHLFALKQALGAFDFVGTQLAECDAEIELQLQRLQVHDGEPAKGKKRGRARNAPKFDLRTQLFRMCGVDLTRIDGVDVTTALAVVSEVGADMARFPTAKHFTSWLGLCPGTKITGGKVMSGKTKRVVNRAAQALRLAASALRSSKSALGAYFRRMCSRMDKPKAVTAAAHKIARLIYTMLTKGQEYTDQGQEYYEERYRERVLRALSQRAAKLGMQMIPIAQPA

SEQ ID NO: 221521 - protein, 489 aa, unidentified
MKADKFMGRLIPRLKQAKIPRIRDCVVERVWEIIPYQGKIICPYQAETFMKKRRDRVCGADVHKDLIVATITGDDVLPIQENFGTTRAELERFRNWLVANKCEQVAFEATGVYWIPIHDALSQTIDTIVANPLQIKTIPNDKSDSKDSKRIATLCLNGQIKRSRVFAEEDRDLRMMTRARSGYVKTRTQFRNRIHKYLSSSGIKLSSTMDDIFCKSGRYLLNGLADEKPIEEILKGIPSGKIRKKQDLIRAALENRLNETNRMLVRDALELLDNLESKIENLSHEVLKKVQQKSKDLAIVMSIPGIGFISASVILSEIGNYHDFQTPEQLAKWCGLNPGENESAGKKKKCGITKRGSKHIRLVLVQAAQTIANMGKTKLSRFFQRLIKKKERNVAIIAVARKLICLVYHLLINQELYQEDECKKTRKQSQDKSCQAPSFQEEHLTDKVAAIVDAFYHLNARGRKNALMREIADISEIKVGQKRPSKGGG

SEQ ID NO: 221522 - protein, 419 aa, unidentified
MDLTDLTSTDTEPASPAPPPGLVAGVDTHQDTHTLAVLTAQGAVIATSSFPADQQGYDDLTAHLDRFGPLMAVGVEGTSSYGAGLTRTLRQAGYDTVEVLRPSRRVRRHHGKSDPIDAIAAARTVLSGDGVSQAKDTTGPAEQLRLLLAARTRLISAATAITNSIHSLLTTAPEPLRERYRRLDTPALITRLARTRPTRTITTPQQAATSALHHMARTHQDLHHRAERLNQQMHHILTTHYPGLLAVYGAGTTVAAQLAVTAGGNPGRIHNEAAFAHLCATAPIPASSGKTTRHRLNPGGDRRANAALHRIALVRLRHDPTTKNYANRRTQEGKTTKEIIRCLKRAIAREVYRALTQPPPTDTTSTLAAHRKRHHLTQTDVAHALNTYPARISDIENHRRPLPQLTHRYYQYLTTLDTQ

SEQ ID NO: 221523 - protein, 322 aa, unidentified
MNPKNYGGIDVAKKNFVIGIYGQDKTKTEANTPKGHAKAVEYLQKHNVDLVVLESTGGLEVPLANALHAADIRVVIANPQRTHQYAASFSLGKTDHLDAKMLADYAQALDSRKMADDMCYAPPSEEALALEALVKRRSQLVEMRKMEKNRLEQTHTSQKASVVAMIKHLGELIAALDKEIDQSNRGGFNGKGEILSEMKGVGRITCATLLSMLPELGKVPHKRAALLVGVVPPPRQSGEKEKKSGCVGGRMVVRNALYMAALTATRSEPKIKAFYEKLMSRGKAFKVALNACMHKLLRILNARMRDYLASLKETEESELQGA

SEQ ID NO: 221524 - protein, 413 aa, unidentified
MDVVVPRCAGLDISKKDAKCCVRIQGSGSRRTTSTVTTWGAMTNQILALREHLLEQKVTVVVMEATSDYWRPFYYLLEDHMQVMLVNARDVKNVPGRKTDVSDATWLADLGAHGLVRASFVPPAPIRELRELTRTRTTTTQERTREIQRLEKLLEDAGIKLSSVATDITGVSGRLMLQALIDGRDNPVVMADLAKARMRAKIPMLTEALNGHFTAHHGFMTQLFLERIDAHTADIQRLSDRTDEAMTPFLAARDLLMSLPGFSTTVAEVFIAETGGDMSVFPTAGHLSSWAGTAPGSHESAGRVKSTKTRGGNRYLKGALGIAALSATQSKNTYFSAKYRRIAARRGPMKAIVAVEHAMLIAAWNMLTNGDFYRDPGADYFTQRVPAKTKARAIDQLEALGYCVTLQPLADTA

SEQ ID NO: 221525 - protein, 463 aa, unidentified
MAPRSPAPAPPLRDETLGCVHPHAAGVDIGSEELVVAVSPECDPEPVRVFRSFTADLEDLVAWLLQCKVDTVAMESTGVYWIPLYDLLEHHGIVPVLVNPQHVKTVPGRKTDWNDAQWLQKLHTFGLLQASFRPAADMREIRTLLRHRAQLIEHRSPHVNHIQQALKHMNVQLGVVLTDIMGATGQAILRAIVAGERDPVVLAQLRNPACKSPQELLAKALMGTWQDEHIFILRQALELYDFYTGQLQACDQQIEQRMLALSPQVEGAELLEALPAAKPNSKSKNQPAFNARLHLARITGVDLVAVTGLAASTVQTIISEIGTDMSKFPTVKHFCSWLGLAPHNDISGGKVLRRRTLTVKNRAAQAFRMAAQAVSRSDNTFGAFFRSMRARHGPQQAIVATAHKLARVVYHLLTHREAFDPKKVEIDDQVRRERERKRLARRAEQLGYVLTPAVEPGVPAPSS

SEQ ID NO: 221526 - protein, 358 aa, unidentified
MAGKVTETAVVGGVDTHKDLHVAAVVDQNNKVLGTQFFSTTRQGYRQMLAWMTSFGALKRIGVECTGTYGSGLLRYLQNAGLEVLEVTAPDRMERRKRGKSDTIDAECAAHAAFSGIRTVTPKTRNGMIESLRVLKTCRKTAISARRVALQIIHSNIISAPDELREQLRNMTRMQLIRTLGSWRPDASEYRNVTNVYRISLKSLARRYLELHDEIADLDVMIAAIVDELAPELIKRNAIGYESASQLLITAGDNPQRLSSESGFAALCGVSPVPVSSGKTNRYRLNRGGDRAANSALHIIAIGRLRTDDKTKEYVARRVAEGHTKMEAIRCLKRYISREVYTLLRNQNRQINSIPITA

SEQ ID NO: 221527 - protein, 358 aa, unidentified
MVHSSEGTQDMVTIGIDPHKQTHCGVAVDALGSELAQQMVPARRIGFGQLVDWGRGLGDERVWVIEDVRNVSGSLERFLLERGETVVRLPPRLMADLRRGARERGKSDPIDALAIARAALREGVDTLPTARLAGPELEIRLLGLHRERLVDSRTRLINELRWQLHDLWPEWELPLKALIHPSWQTKITRRLQSADPSVRVRIARDMIRRIRELTRTIGALQDELAALVAQTAPQLLAETGIGVLLAAKFIGEIAGIDRFSSDAQLARMAGCAPIPASSGRTDRHRLDLGGNRQLNHAFHLLAFSKIRYDSQTAVYIARQRANGKTKREAIRCLKRHLVRRVYNLLRDPSSVPITVCLT

SEQ ID NO: 221528 - protein, 342 aa, unidentified
MNNSVISIDLAKNVFQVCEFNRYHKSTFNKKVRRNKLLDTVRQLEPKRIVMEACYSANYWGRVFESMGYDVNLIPPHQVKPFVVGNKNDHNDALAIGEASFRDTTVFVRIKTLQQQDMQSLHRIRDRFIKNRTAIANQMRGLLSEYGIIIERRLAVLRKEIPFILEDAEQPLTVIAREFTSTLYEELRRYDELIAEKDQLIKTILETDEAYQRIREVPGVGPIVGSAILSAVGDAKQFKNGRNLAAWIGLTPKQYASGDNSRMTGMSKRGNRNLRRMLLHGARAVVNWSADKTDALSLWIQSLSKRMHFCKVVVAVANKLARMIWAVLAKGENYRAPALPAT

SEQ ID NO: 221529 - protein, 340 aa, unidentified
MQITTVGLDLAKNVFQVHAVNEHGKAVLRKQLRRDQVAAFFANLPACLVGMEACASAHHWARKLEGFGHTVRLMAPQFVKPYVKSNKNDAADAEAICEAVARPNMRFVPVKNVEQQSVLALHRARQGFVKARTAQANQIRGLMGEYGLIVPQGIGHIAKRVPDLIEDASIDLPGSFRLLIDRLLEHLKVLQQQVEEIEVQIKAWHRASDASRRLEKVPGIGPLTATAMVATIGDAKNFDNGRQLAAWLGLVPRQHSSGGKSNLLGMSKRGDAYLRTMLIHGARSVIYRSTQRADADSWLFKLTTRRNKNVAAVALANKTARTIWALLAHDREFKPGYAAA

SEQ ID NO: 221530 - protein, 373 aa, unidentified
MNQDTTYVAFDTSKETLAVAIAESGRRREVRFFGTMASRPEAVRKLVEKLARQHRRLAFCYEAGPTGYGLYRQIRAMGHDCQVVAPSMVPVRPGGHIKTDRRDATTLAALFRAGELTAIWVPDAAHEAMRDLSRGRQAAMEGLRRARQQLLSFLLRHGRAYPTRSHWTRAHRRWLAEQRFEHAAQQIVFEELIQAVEQAQSRRDRLEQQMVALLPSWSLRGVVAALQARRGVASLSAITLMAEIGDFRRFANPRALMAWLGLVPREHSSGATTLRGAITKAGNRRARRVLVEGAWTYRLPARVGLELLRRNRALPETIKAVAWKAQVRLCARYRRLLRAGKPTNVVTVAIARELAAFVWAIATTVMPPFEPTA

SEQ ID NO: 221531 - protein, 341 aa, unidentified
MQITTIGLDIAKNVFQVHGIDAAEKVVVRKQLRRSQVLEFFKALPPCLIGMEACATAHYWARELTKLGHRVRLMPAKDVKAYVKRNKNDAADAEAICEAVGRPTMRFVRVKSAEQQGRLMQHRTRDLLMRQRTQVINALRAHLAELGIVAAQGREGIKELLAIITDEGDERLPLDARTSLIVLAAQLQALQTMIGSIEKRISAQHRANEASKRLETIPGIGILGATGIAATLTDPQAFRSGRDFAAWIGLVPRQDSTGGKQKLGPISKQGDRYLRRILVVGAHSVLRRAKQSPQKYPWLTQLLARRPFKVVAVALANKMARIAWALLAKGGSYRAPALAAA

SEQ ID NO: 221532 - protein, 353 aa, unidentified
MALCAKALVEGVDEFVGIDHHKQRCQVMIKDRQGQVLREGKMPTQRDALAEFLGERNGAVRMAVFEAGPRYRPLYRWLSELVEKPVMANPGRLKIISETAYKDDEIDAEKLTDLGMLGMVPEAYVCSDEAWDWRQLLRQRAALVKMQTTVKNRIHALVDLHSDASPERPEATDLLGKLGLEWLRALELPAADRKRLHQLLEVYEFLHGQIQRSDEEVRKIVKSDVRCQWLVTMPGIGDFLATLILAEVDDIKRFADSKHFVSYTGLVPGRDCSDEIVHHRKMHKQGSKWIRWALVEAAIPATRSNRALKALYDRICRKKGPLAGPNVAKVAVARKLAEIAYRLLAEGRPYEER

SEQ ID NO: 221533 - protein, 429 aa, unidentified
MTLPQPTPEPRVLVAIDVAKQCHDALIEAPGWRRPKRFTVPNQTDELDRFQRYLGSLAFPVHVAFEATGDYHRGLAHVLLRAGFRLNLVSSLALARTREAMHNSWDKNDPKDAQVILHMLRAGQTMHYHDPLANGLNDLQELSKTHFQVSLEKTRTLHRLKTHFFPLYFPEIEPYMHCSRTEGVLRLLHALPTPGCICALSCDQFVRAAWPLIGRKVAKQRLLEEIYRTAQGSLGLPVAPDSEAVAMFRLVLAEMLGLCERRAAIEVRADALLAGQSDYQRLRQIPGIGPINALTILAEAGDLRRFAHHRQFLKFCGFDLATHQSGQYRGQSRLSKHGNARLRCAFWMAAQIAVRMKENSFRYKYERYLRGSPGDPDAKRKALVAVAAKIARVTHSLIKTGADYRPFFEAAVPSGRACSARAVEAHATS

SEQ ID NO: 221534 - protein, 405 aa, unidentified
MTEIEHHDDIEVFIGIDVGKIGHHAVALSRSGKRLLDRSLPNDEAKLRALIDGLKEHGRILLVVDQPASIGALPVAVARDEGVFVAYLPGLAMRRTADLHAGEAKTDARDAYIIAEAARSLPHALRSLRVADTDIAELTMLCGFDDDLAEQITQVSNRMRGLLTQIHPALERVLGPRLDHPAVLDLLERYPSPAKLASLSEKQLANRLVKLAPRMGRSLACEIVQALSEQTVVVPGANAAAIVLPRLAQQLASLRRQRDDVAKEIERLVVAHPLYPVLTSLPGVGVRTAARLLTDVASRAFASAAHLAAYAGLAPVTRRSGTSVRGEHPSRRGNKQLKRAMFLSAFASLRDPASRAYYTRKISEGKRHNQALIALARRRCDVLFAMLRDGTLYCPPSPESCLTNT

SEQ ID NO: 221535 - protein, 386 aa, unidentified
MMAELVAKLSERLGPKPAQENASEGTPQDVPAPNRDRLTVGVDLGDQWSNYCIVGLEGETLGEGKLRTRREDVAELFQALAAARVVIEVGTHSAWVREVVVSCGHEVLVANPRLMDGMKRGKRKNDRIDARKLARLGRVDPQSLFPMKHRSREVRQDLVVLRARDALVSVRTQLINTTRGLVKSMGARLPKCSSPSFPKKVEEALPAEIRETLLPLLRLAEELSDRIKVYDERIEKLGREKYEHTELLRQVKGVGPLTSLAYVLTVENPDRFAKSRDVGAYLGLVPKQEDSGDSQPQLGINKAGDMMLRRLLVGSAHYILGPFGPDTDLRRYGLRLCERGGKNAKKRAAVAVARKLAVLLHRLWVSGEVYEPLRHGTPTAVVQDAA

SEQ ID NO: 221536 - protein, 338 aa, unidentified
MGTYAGIDLHSSNNYIGIMNQDHKRLFGKRLPNCLDKILMVLEPFKADLKGVVVESTYNWYWLVDGLQEHGHRVHLANPSAIKQYEGIKHTDDKWDSFWLAHMKHLNILPEGYIYPKEQRAVRDLLRRRLFFVRHKTANILSLQSTITRNLGIKMSSNAIKKLDMDDARKLFDCSNLAFMAQNNISTIKHLAKIIKGIEKQVKSQIELRKEFEMLTTIPGIGLILGLTIMLEVGDIGRFPKVGNYASYCRCVGSKRLSNGKKKGENNKKNGNKYLAWAYVEAAHFAIRYMAKAQKFYQQKMAKANGAVATKALANKLARASYFVMRDQVPFDENMLFR

SEQ ID NO: 221537 - protein, 367 aa, unidentified
MKKISTVATKQNRNFPEQKLTIGFDLGDRSSWYCVLDEQGEVVLEQRLGTTPKAMKEVFGGMPRSRIALETGTHSPWVSRLLSELGHEVIVAHARSVRLIGESRKKDDRLDAQTLARLARIDPQLLCPVKHRSAKAQADLTVIRARAGLVRARTALVNTVRGLAKSYGERLRGCNARNMNPEKAEGLSPELQRALEPLLAGIETLSERIGEYNERIEKLAQESYPQVARLQQVKGVGTLIALTFLLTLEDAHRFRKSRDVGSYLGLQPGRRNSGQSEPQMHISKEGDPYLRTLLVQGAHHILGPFGVDSDLRRWGLKLAERGGRNGKKRAVIATARKLAVLLHRLWVSGEAYEPLRNRNQRALPAAA

SEQ ID NO: 221538 - protein, 406 aa, unidentified
MKENGKRYIGLDVHKHYLIALGVDENLEVVMPPRRVELSNLESWMKKNLTQQDEVVLEMTTNTWQLYDELAEHAGSVTVVHPPHVALITRSQVMTDKIAASILARLLAKGLLVGIWVPPQEVRELRGLVAQRQKMTRLATQAKNRLHAVIQRHHLLPPAGNPFAKTNNGWWQALPLRKLEKMNLQSDLETLQFAEKQEARLQEEMTGIAAENEEIGRLLHIFGFGVITAVTVYAAIGDISRFEDAEHLVGYAGLGTRVHDSGMTTRTGKITKAGRRDLRVALVEAAHVAANSHPHWKAELARLQPRLGYNKSIVAIARKLLVTVWHVLARKVADRFAEPEKVSKKMLHFAYEVGKANRAGKSAAQFARERLDALDMGQELTSISWGSKKPIPLPPSKLKKGERRPK

SEQ ID NO: 221539 - protein, 353 aa, unidentified
MKECSTVSFKGQMIYCGIDVHKNSWHVSIRHCRQQVEHFSMNPDPKGLAKHLKLNYPDAEYRSVYEAGFSGFEAHRTLCSLGVKNIVINPADVPTSGKEREYKNDSADSRKLARELESGSLEGIYIPEPENLELRNLVRRETKLTGNITRIKNRIHSHLFFLGLKFKSWSGGSLKIMESDAIERHDYALLSDLRELRFLREEKVCVIRNERECLKKLNREKVQENLQSIPGVGFRAAIVLQAELWDLSRFPNKDSLNSYVGLAPHTVGSGEHEVIKFGGNRKKKQLHYILIEASWRAVRFNLEYRARYGAMLVKGATPQRAISIIAKKLLLSIRAVWLQNRNFVELLPRTKEC

SEQ ID NO: 221540 - protein, 329 aa, unidentified
MVTASSLPVVGLDVSKATLAVCYQVNELVKHLEVSNDKAGFQQLVKACGAQCRFVMEATGTYNLALAYYLHEQGGEVAVLNPLVIKRFIQMHLSKGKSDRKDAQWLLRYGQQQPVKVWQPDEKVLVECRQLEQVNEQLLKQKTMVSNSLEALQRQPVISKLALKRLQQTLKTLTQQVALVEAELLTLLEQRFAAQMTLLCSIPGIGRKTAGMLLLFAGGFAHLDNYRQLIALAGLSPREHTSGTSIRGKVRITKMGGGLIRGKLFMCSFSAKKTNLACAALFDRLVAKGKNKKLALIAVCNKLLKQAFAIVKSGVPYQADFSSNLALAS

SEQ ID NO: 221541 - protein, 346 aa, unidentified
MSIVDSSRPITGGVDTHLDAHVCAALDANGGVLGVESFPTTPVGFAQLHTWLCAFGPVARVGVEGTGAYGAGLSRYLQSCGLVVIEVDRTNRQVRRQFGKSDPVDAIEAARAALSGRAAGIAKTADGNVEAIRALLVAQRSGRQARARCLNQIRHLGFTAPDLLREQFRDLPKAHLAARAAALRPRADGDPVLHATKLAMRTLGRRALAIEDDMTDLEHVLAELVTTTAPALLACHGVGVDTAAILLVAAGDNPERVRNEAAWAHMCGVAPLPMSSGKHTRHRLSRAGNRQANHALWRIVFTRMGHDPRTRRYVERRTEEGLSKPEIIRVLKRYVARETYQLLPRS

SEQ ID NO: 221542 - protein, 320 aa, unidentified
MRNTVGLDISKLTFDATAIVGNAEYSAKFDNDSKGLDQFSDRLKSLGCQNLHICMEATGNYYEEVADYFAQYYSVYVVNPLKISKYAESRFKRTKTGKQDAKLIAQYCRSAQESELVKRQKPTDEQYRLSRMIAAYAQIKSECAAMKNRHHAAKDEEAAKAYAEIIKAMNEQLEVLKEKIKEQTEKPKCKEGVKCLETIPGIGRMTAAVLFHHLTSSKFETSNKFAAFAGLSPQQKESGTSVRGKGKLTKFGNRKLRAVLFMPAMVAYRIRAFPGFIKRLEEKKKPKKVIIAALMRKLAVIAYHVHKKGGDYDPSRYKSA

SEQ ID NO: 221543 - protein, 461 aa, unidentified
MTFSPCRVDGLGGGVTGSGGIDRPLIRGMTTGFFAGREALRNVDVAIGAVGRPGEDDRRTSVIDVSGIGAFLGLDVGKGEHHATAVTPAGKKAFDKRLPNSEPKLREVFGKLQAKHGTVLVVVDQPASIGALPLAVARDMGCPVAYLPGLTMRRIADLYPGEAKTDARDAFVIADAARVMPHTLRSVDLEDETIAELEMIVGFDDDLAGEATRISNRLRGLLTQIHPSLERVLGPRVQHPAVLKLLDQFGSPAQIRKAGRRRLVTLTRPKAPRMAERLVDDIFTALDEQTVVVPGTDAAALIVPSLASSLQAVLDQRKLLAARIEELLENHPLSKVLTSMPGIGVRTGARILIDVGDGRSFPSAAHLAAYAGLAPATRSSGSSIRGEQPSRKGNKQLKRAFFLSAFAALADPVSRAYYDKKISQGKHHTQALLCLARRRADVLFAMLRDGTFYEPQPAPSA

SEQ ID NO: 221544 - protein, 371 aa, unidentified
MGDGIRFVGLDVHKRQTVVALADSGREGEVRHYGAVETDRSSIEKLARKLARGGKPLRFCYEAGPCGYGIQRWLTGLGHDCEVVAPSLIPCRPGERVRTDRRDAIKLARLHRAGELTAVWVPEPAHEAMRDLVRARAVAVYAVRRARQQLSGFLLRHDRIYSRKAWTGAHRRWLAELKFEHAAQRIVLEDYINAVGAAEHRRDGLTEQIRELLPSWSLAPIVEAVQALRGVAAIVAIIIVAELGDPRRFDSPRQLMAYLGLVPSEASSGEKVYRGGITKAGNRTARRALIEAAWTYRFPARRSKHLLARCETVPPAIQAIAWKAQLRLSARYRKLVARGKLPTVAVTAVARELVGFIWAIARELPAIPARA

SEQ ID NO: 221545 - protein, 468 aa, unidentified
MNNKGKNITKKMLPVSGLPSEFEQINLNAAGIDIGAQKHYVAVAKGRDPEGRDIRYFDTFTIDLHALADWLKQCGIDTVAMESTGIYWIPLFEILEQNGFDVRLVNPRSIKHAPGRKSDVVDCQWIQQLHAYGLLTSAFHPDDQISVLRAYHRQRTMLVNHAGTHIQHMQKALEQMNLKLTNVISDITGTTGMKIIRSLLAGERDPKKLSKHRDPHCKKSEKEIAKSLHGNWRDEHLFALQQAVALYDFYQTQIMDCDKQIQAQLCRFEDRSDTGELPPAASKSSGSGKKLTFDAREHLYRMAGVDLTQIVGLNTPTVLTVLSEVGLDMSRWPTAKHFASWLGLCPGSKISGGKNFSSKSKPSANRAAHAFRMAAYSLHRSQSAIGAFLRRKKAQLGAPKAITATAHKIARIFYEMLKTRTEYKDLGVDYHQNRYKERMLRNLKHKAKEFGLELVNPNQDQLVMANSE

SEQ ID NO: 221546 - protein, 418 aa, unidentified
MYYLGMDISKKRTDYLVLDSEGKRFQRPFSLENTKEGFKTLAERLKELNLTPDNLLSGLEATGNLWENLYSFLTGKGYKVILLNPYQTNKYHQALRQKATTDQLAALVIADLLRSNRYLSSSVPKEEIEALRELVKLQFQLQEEKKKLSRQIFSLLSVVFPEYEGTALKRVFGIASRKILERWPTAKDLAEAKPKQIEKIVRSIKGNNFNISAIKDLIEAAKNSIYSGRAREVRSFTIRLLLSQLGRTLSSLQQIKERIEKFLSSKDGSSSFPGNNILSIPGVGKGTLATFLAIAGRRGDFFLSAKKVIGYLGFYPQIYQSGEKKRGNIISHQGPNYARKAMYMAAVSCIRHNREMRTLYNKKVSQGKSPKQALIYVAKKLSQMILSMLKTGEPYRPERVFIPPTALPRFIEKNPAYF

SEQ ID NO: 221547 - protein, 369 aa, unidentified
MSEGTTRYLGLDVHKATITVAVAEASGPPTAFGTIANEVGAVRRLVRQLGREAKLVAAYEAGPTGYALHRELTRLGVECMVVAPGLIPIRPGDRRVKTDTRDALGLARLLRSGDLTPIWVPDSEHEALRDLVRARYDGKDDLRRARHRLSKFLLRQGICSPAGIKAWSVRYYTWLRQLSVEQAAAQVVFEDYRAVEQAAQERLRRLEAALRRCAEQSPQLPLMAALQVLRGIAFLSAVTIVAEVGDFRRFSNAPGFMCFTGLVTSEYSSGTSRRQGGITRAGNRYLRHVLVQAAHNARYVPNPQGAVKRRLDGAPPDLVELALEAQRRLHARYRHLDRRIGRPKAVTAVARELAGFVWAVGRRMAEAAA

SEQ ID NO: 221548 - protein, 465 aa, unidentified
MKNKAPKAKKKKQKIDLSQCWELINPNAAGIDIGSREHWACVPAGRTEKPVRPFGTFTADLEALADWFQECNVTSVALEATGVYWIPVFQILERRGFQVILANARQTKNVAGHKTDVMDCQWIQRWHTYGLLQGSFRPKDEYGVVRAYLRYRDELVSARSAQCQHMQKALQQMNVQLHHVLSDVTGVSGLALIQAILGGQRDPVKLAALVDRRVRASQGAIKKALVGDDRTEHLFVLQSAFELYHTYEGKMNACDEQIVRELAQLPDAVGVTAQPLPVRKEGRPARADQMDGQDLRAALYPKLGVDLTAIEGIGSLTALVVLTEVGPDLSRFRSEKHFASWLGLCPDNRISGCKVLGSRTRRVINRVSDALRMAAMTLERSQSALGAFHRRMKARLGAAEAITATAHKLARLIYRLLKYGEAYVRQGMADYEKRFQERKLYALQKTANIMGFQLVAKQPTTESVS

SEQ ID NO: 221549 - protein, 319 aa, unidentified
MAQNEVVVVGIDVAKDKVDACIRAFKLRQTWLSTAQGHRKLVAWLRKHQVNKAVMEASGGYERDWARVLREAGIEVRIVDPKRVRSFALSAGRLAKNDAIDAEMIAWFAETFSEAPSQPHDAASEELQALVKARLDLIDFRMRLVSRSEHAAPGLVQKAHAHILKSLASEITKLEAAISAKIKSVPDFAERAEIIESVPGFAQTSSANLVAGMPELGQVSDEIAAALIGVAPYDDDSGKRRGERHIKGGRRWVRNAIYMPCVGAATQNNPVLKAYYQRLLAKGKEPKVAIIACMRKLIVILNTMIARRQKWDPSRYVLS

SEQ ID NO: 221550 - protein, 423 aa, unidentified
MVSEPFRSLTHFGGFDWAMDEHQFAVIDWEGTVLLNLRFSNDADGWAGLRAKIAAYPRLGVAIETCYGPAVERLLELGVTVYPINPKAAERFRDRKAPAGVKNDPLDAWCFADALRTDGRGWRELRPLDPLTAELRILCRDEIALIEQRTAMVLQLKAALHEYYPTALSAFDDWTSLGAWQFILSFPDPHRLHSAGKRKWEKFLHTHKLYRPETAQKRLDLFAKAKQFASPSQAVTNAKSLLAITLAKQLCLLESQLNEYRDRITELFDNHPDRDCFGSLPGAGAKIAPRLLSELGNDRARFDSHEALQAYAGTAPVTQQSGKRSVAKMRRACNKTLRATVHLWADLSRPLCAWAQAYYQQKKDQGMGHAAALRCLGQRWLKILWKMWQTRTPYDEALHMRNQISHGSWVVSLITSAESPATK

SEQ ID NO: 221551 - protein, 344 aa, unidentified
MKNSNVIGIDLAKNVIQVCKVDKHGELTSNKAISPNKLKELLAKSVPSIVAMEGSGSCHYWGRLAKAFGHEVRVINPKKVKAFLQGQKTDANDALAIAMAATQFGVRFSLIKDEEQQTLQTLETSRKFLDKELTALNNHIRAYVYEYGITMNKGRKSLRETVTLVLDDLDTRLPRCLKNTLRLLWERYQLTLAQLKETKKVKAALVKQIEPCKRLLALESVGEVCAAMLYANIGDGKEFKNGREASACIGVTPKQHSSGGKTHMVGINKKGGNKELRAALYQGALSVITHLPAEPQTVKQAWLIELVKRVGVKRACIALANKTVRTAWALLATGESYQPVLLSK

SEQ ID NO: 221552 - protein, 404 aa, unidentified
MQATPTCAGIDWSWQHHALCIVDDDGRRIEEATVSHTRPGLAKITTLLRRHGVDRVGIERGDGPVVEHLLRDGFEVVVISARQVKSLRARYGSAGNKDDRFDAFVLADALRTDAGRWPLVQPDSDETIALRMLVRARHDLIGHRIAVHNQLLAVLQHNFPGAIGLFSQLDIPISLAFLRRFPTEAKAAWLSELRMAHWLKANHYCGRHTPARLVDHLHDAATGRTAGPAADASELIVLTLVDLLTTLRAQQSDLEARIKEALLAHPDGPIFQSLPRAGVVRAATLLAEIGDCRARFPDPQSLAAAAGVAPSTRQSGKFLNVAYRRGCNKQLRAALVDWAQDTPRANAWARDTYDRARHRGCRHPHAARILAQGWTRILWRCWRDRVPYNPDLHGRLTTLNQKAA

SEQ ID NO: 221553 - protein, 421 aa, unidentified
MSKGRYRTVEVKQADWEAWAAQAAGGTVVFAVDVAKEDFVGRLDIRDGAHLGRVTWRHPEQTSELLAGIARLAAFARVEAVMESSGTYGDALRWQLRALGAEIFRASAKRVHDAAEVYDGVPSLHDAKASDLIAELHGQGHTQVWSEPDAQRRALNAQLQMLYQCKALYQQQLNRLEALLARHWPEALAILGLGSATLHRLIADFGGPLQVHALERQARALMRQTGRTWLAEDKIEAVLKSAGATLGMPCLLEERQRRRWEAKRLLATGEELRRIERLIAAAAGEDALLERMAPVVGAVTGAVLLAAVGNPASYPDAASYLKALGLNLKERSSGKHKGRLKITKRGPSVARFYLYFAALRLIAQEPVVARWFQSKTARPGALKGKQVVELMRRLAKALWHQARGRAFRPERLFDQHAVAGA

SEQ ID NO: 221554 - protein, 472 aa, unidentified
MRIIGMDLAVTGAHKAVVMSGQGAYVSPVLSLRTEPEELARLLKRAREGAPADEPVSVVMESTGHAWLPVAAYLLERDVKVYVVNTQQVVDLRRFYQKHAKSDRIDARVLARLVLVNPEQLHALRPPCGEMLALQRVCKQVVWLTAQETALKNQIIALDRLVWLAGWHGIFPDAFSFAARWCRRHYYHPLRVQHTNPADIQQDWGEAACPQSHEYAWPQALTELAVKVVSVYGDSGRYLDFDGLEAEVLSKQGLLEDMIVETRRLRREVLRPLYYKLHPERHLETLMGVGEDSAAVYLSFIGDPHRFANASAFRSWSGMVPRSSQSGSYEGKGLHISQAGPNLIKYTAFLNADVARRYDPQLAKIYYDQMVHKGRHHGQAVCTVATHLLDRILLVLKQERPYELRDLEGRPLTKVQARALVLARYTVPEAIRARSRHQSQEERRQRRAERPFCHKERESLIVDELRGLASPV

SEQ ID NO: 221555 - protein, 365 aa, unidentified
MKKSSKKQQGATVAESKPAQVVGLDLGDRHSHYCMLSSTGEMMEEGRIQTTLAAMEKHFAGEPRMRIALEAGTHSPWVSRWLKSYGHEVIVANPRKIPTLTKSESKNDRNDARQLARMAAFDPELLHPIEHRSPGRQQDLNLIHTRSVLVRARTMLINSVRGVVKSAGERLAACSSESFPEKVPGAVPPSLKAACIPLLEQIGQMNQAIAAMDKQIEGLDKKYPEIAVLRTAPGVGPVVAACYVLTLDNPQAMETNRQAGAYLGLRPRQQQSGDSNPQCGITKTGNTYLRSLLVQSAQYILGRRGPNSELRCWGLKLAASGGKRGKKRAIIAVARKLAVILLSMWRNRKKFEPFPQPAAPLATAV

SEQ ID NO: 221556 - protein, 453 aa, unidentified
MCLEDRPILEPNAAGIDIGAREIFVAVPPDRDADPVRVFSTFTEDLEEMAQWLVSCGVTTAAMESTGVYWIPAYDVLEQHGVKPCLVDAHGMKNVPGRRTDWHECQWIQFLHSVGLLRAAFRPDGEVCAVRSLMRHRSDLVQMTNQHIQHIHKALTQMNVQIHHVIDDITGVTGLAIVDAIVDGQRNPLELAKLRDPRIKASEETIVKSLQGTWRPEHLFTLKQSRQMYRHYQDQIAACDEEIEKLLVAFQPRVDPAEKPLPPDRKKRKRGRQKKKNAKTKQGFDLRTESYKIFGVDLTQIPGLMAMVLTLFSEVGRDMSRWKTAGQFVSWLALCPDNDITGGRVAWRGMRRVHNRAGELFRMAAYSLHHDKSPLGDYLRRMKSKLGPRGATTATAHKIAIIFYTMVKKQVEYDATLWAERDTQREKRFEAKLKRQAQQLGYKLVPIEEKPAA

SEQ ID NO: 221557 - protein, 346 aa, unidentified
MAKSSVAVLGIDLAKNSCSLVGFDQAGTVVLRRRARRETVVGLTAKLPACVVAMEACCGAHHLGRLLAVQGHAVRLMSPEYVRPYVKAQKNDDRDAEAIDEAATRPTMRFVPLKAQEQLDMQSLHRVRSRLVGMRTMLMNQLRAILLERGLAFPQGRRKFETAVGGLLEDPEARVGARIQSLVAEIREEWAGLDRRIDALDREFIAHAHADEAAHRLVSIPGVGPMTATALRAAVDDGSAFASARDLPAWLGLVPRQHTTGGKPKLLGISKRGNAYLRGLFIHGARAALASLSKAEDATGRWLHGLLARAHYNVVVVALAAKLARIAWARLRKEVSFERRLEPALA

SEQ ID NO: 221558 - protein, 331 aa, unidentified
MKIKDTIGIDCSKLTLDICIHSSQGFEVFKNEKKDFKKMLKWTYKNSPFDKKEILFVFEHTGLYSYELSVFLTKQEVSFLLVPGLEIKKSLGITRGKDDKVDAAKIALYGYRLRDEIEPYELPSEDTMSLKRLLSLRGRLVKQRAGYKTSLKEQKRVLLKSENVLLLETQKKMIAYLSKQIINVEKQMDTIIKNNKGLHEIYKLITSVKGVGTQTALFLIAFTNGFTKFKNARKFGSFCGIAPFPNRSGTSVRGKTKVSHLANKRIKSLLDMCAKSAIQNSLEMKIFYQRRIQQGKNKMSTINIVRNKLLARIFAVVQRGTPYVDMMKYAA

SEQ ID NO: 221559 - protein, 406 aa, unidentified
MKLFVGLDVSSFDIKVCFLDGEGDKLSSFTVDNDLPGATQLRDAILNITQGKHVSELRIGIESTSVYSFHPSMFLHNDESIQALGGQVFVMNPKQIANFKKSYSDMDKTDEIDAFVIADYMRFGRLPMSVVKEEQYVALQQLTRARYQIVRQITQEKQRFLQYLSYKCNTFTEDVESSVFGKAMMDLFLERYSLEELSQMPLEDLADYLREKGRNRFPDAKQVAKSIQKAARSSYRLDKVVEDSIDSILATSITLIRTFEKQIKELDKSIKRIMKGVPQTLQTIPGIGPVFTAGIIAEIGQIERFADEAKIAKYAGLYWRKHQSGRFTADDTSLSRNGNQYLRYYLVEAANSVRRQIPEYSEYYAKKYQEVPKHQHKRALVLTARKFVRLVDALLRKNQIYTPKGA

SEQ ID NO: 221560 - protein, 404 aa, unidentified
MKGPIVSIDVSKGKSDYQAFKEMNVKYTGSRSIKHTKEGFDEIVSLVREMEKKLETEVCVVYEATGVYHRVLKKVLEDNNIKQFIINPLLSAKTRKNDSLRSPKTDKLDPKSIAKTYYSHSLHNSHKPETIYHELRELSRYYEDILVHLRKDKVAFRAQLDVVFPGYDTLYDDLYGPVALAVIEKYPHPEMLQKKKINTVSKVIHSKTCHRQAMSDTMADKAIEYSKTIYSGCDKDDIEVLILQRFIKKLKEDMAEAERTIGEMIKLVQELPDFSIIKSIPGIGDNLAARIIAELGDMTRFKKKNELVAFAGLDPRISESGQNDGDHMHITKKGNKRLRCLLYLAVTCSIRLKRDDNSIKDFYIKKKQQSNPMCSKAAKTACASKLVRIIYSMCKTGELYQYNK

SEQ ID NO: 221561 - protein, 337 aa, unidentified
MCVVKDETGQTTIESKVATRREAIESFVRGLGGRVRIAFEEGSQAQWLYELLRPISERVIVCDPRKIATKGNKDDQRDAERICELLRLNALQPVYHDHADQKLKELVRCYEALVDDSLRVMLRIRAIYRSRAISVKARSAYHPLRRAEWLEQITDGGGRFRAEQLYIQLDHLLELRRRARTMVLRQACNQRAYRLLRTVPGIGPLRAAEIIAIIGDPHRFRTKRQLWAYAGLGVITRSSGEWVPDSGTGRIRRSSRPPLTRGLNRNFNRPLKKIFKMAAHDVTGRPGELDQSYERMIARGMRPEMAYLTLARKIAAIVLAVWKKGASFDSRLIAQSV

SEQ ID NO: 221562 - protein, 264 aa, unidentified
MASAVSIGIDVSKAQLEVALGPEGEVFSVANDAHGINRVSEELSRLAPARVVLEATGGLEIALVAELGARGLPVIVVNPRQARDFARATGQLAKTDTLDARMLALFAERIQPQPRPLPTEHERALKALVARRRELVEMLTAEHNRLGSVPKLLHKEIRAHIRWLENRLKERDRDLDRMLRSSPLWCEREELLRTVPGVGRVLCATLLADLPELGQLNRHAIAKLVGVAPLNRDSGTFRGQRTVWGGRAQVRGRALHGDACGGAV

SEQ ID NO: 221563 - protein, 314 aa, unidentified
MNQVIGIDVSKKTFDVSYSRDQRAVFGNDTPGVAAFIAALEPSDHVVMEATGTYFLKLATRVHDAGFNVTVVNPAVITYFARMRLARAKTDRADAEIIRQYGQHAELPRWAPTEGIFIELNQLDSHLNGLQRDRNAVIGRLEALRQCETISELVAEDLQSQLDDLVVRIKRCEKVLVQQTEHHFPELISLLRSIQGVGKRTAVMFIVLTRGFTRFESAKSFVAYLGLSSFIKTSGTSVRGSGAISKMGNPRMRQLLYMAALTAKRRNRACQEFAQRLTDNGKPPKVVRIAVANKLIRQAFAVCSKQQPYSESYA

SEQ ID NO: 221564 - protein, 443 aa, unidentified
MTRKNQKRFEVVHPDCAAVDVGGSEHLAAVDPAKCADPVQRFSAFTDDLHAMADWFSLMGVKVVAMEATGVYWIPLFEILDRRGFEVYLVNSRATRQITGRKSDVLDCQWILQLMTHGLLRGAFRPSDEVCSLRSLVRQRANKVRDQAKSLNRMQKALVQMNIQLAQVISNIAGVTGMSILRAIVEGERSPDVLARLRDKRVKVDEATVARSLRGNWRAEHLHALSQELAAYDFLEKQIGECDQAIADALDRLPVLQSDVTTPTKTLRSTHRSNEQQLALHQALNKVMGVDLTAIPTIGIDTALVLASELGADLSRFPTSQHFCSWLGLAPPTRISGGKPLPGKSAKVINRSAQALKQAASIARNDKSFIGASHRARLTRMDTCCAIKATAHQLARLIYAMLTKGQPYVEKGIEEFEERSRDRQLRALERKARKLGLQLVKAA

SEQ ID NO: 221565 - protein, 355 aa, unidentified
MYGLKHQKEKHNMDHFAGLDVSVKETSVCIVDNTGRIVREVKVPSEPEALLAVLKNPAYHFKRIGLEAGPLSQWLYSALAEAGLPVICVETRHMRAVLKAQINKTDRNDARGMAQMMRVGLYRRVHVKTLRSQKLRMLLTHRKLLQSKAIAIDNDLRATLRNFGLKVGMVGTVKFEARIKELVENLPDLAVLVEPLLIVRRVLREQTGVLHCRLLAIVRDDDVCRRLMTVPGVGPVVALTYRATVDVPARFRNSKAVGAVFGLTPAKYQSGESDRTGRISRCGDEMMRMMLYEAAHTMLVCSAKWSWLKAWAMKIARHRGMKKAIVALARRLAVIMHRIWVDGTEFRWTREVVAA

SEQ ID NO: 221566 - protein, 373 aa, unidentified
MSEFNKFVGLDVHKSTIAISIASDDGAEVRYFGEIKNTKEALINFANKISQGSLKLSFCYEAGGCGYEVYRHLRNIGHDCMVVAPSLIPKKAGQRVKTDRRDSLNLARLHRAGELTGVWVPDAMNEALRDLTRAREDMKHLQRQAKQRLLAFLLRHGWTYSGKSNWTKDHFNWLETVKFQHAAQQIVFQEYVDTVKFCGRRVESVTQQIEICSRESACWPVIESLMALKGIDLISAATIMAEIGDLTRFDSAPQLMSYLGLVPSEHSSGSSVRRGGITKTGNSHVRRVLVEAAWTYRFPARKTAHTQKRAKVTTEAVQEISWNAQKRLCQRYKELNANGKIKVQTCTAVARELAGFVWAIGQTVPLKQSANVQ

SEQ ID NO: 221567 - protein, 385 aa, unidentified
MLKIVYRVCCGMDVHKSFVVACIAATNEQGVTTYKSKRFSTFTGDLRRCAAWLAENNCKDVCMESTGKYWIPIYNILEHTCNIVLAHPKYVKAIRGKKTDKRDAKWIADIFKHDLVAGSFIPPPDIRQLRDLVRYRWKLTNFTTGEKNRAQNCLTVSNFKLDDVFSDVFGKAASAITARILEDPTEKITDISGFRTKGMKATDEQVLAAVDGEMCAEQAEKLRIIRSHMDSLELCKLNLESLILSTAEKYLPQFNLVMSAPGIQSFAAIGIISEIGVDMSVFPTSKHLCSWAGLTPQNNESAGKKKTTRISRAGAYIKPLLVQCALCAIRAKQFPEVRNRYLALKKRRGHKKAIIAIARMLLTAIYNIRRLRNAKSRINTAFFCC

SEQ ID NO: 221568 - protein, 344 aa, unidentified
MNKNWFIGIDVSKKTLDASIFVAGEVINRFPHVQVRNEKQGFKELLRWAKQQGVNTKDALFGLEFTGYYSDALEQFLTGKKLCYTMLPTTVVKHYQRGTRDKNDKTDSAKIADYLFRFNGTECIKLRVLPSKAMQELKALKSERKFYVQQRVACENRQKVAKSKQEQKHLQQAIDLFNKQIELIERQMAEGVTSDEEIYLTYRRLLTIPGIGPVNAINTIANTQNFTAFETARQYAKYVGVAPSEHSSGTSVRWRGRPSPHADLQAKADLSMAAMRAVEFSCDMSIYYERKLGNRPNDKDVKRKALNAVKFQLIKIVVRQDRIFEQRGLDKAQAETHNTEERVN

SEQ ID NO: 221569 - protein, 425 aa, unidentified
MSCLLARPASTNIDTEGSSIMTVTVFPSRGVAGVVGGVDTHADTLHVAAIDTLGRPLGDREFPTTPNGYRHALAFLTGFGDLTGIGIEGTSSYGAGVTAAARSAGHEVREVIRPQRSVRRMQGKSDPIDAYHAARAVLSGQAATTPKTDDVDAIRALLVTRRSAVKARTAAMNQIHAMLVTASAPLREKYRPLSDKKLIDALAACRPATQHGVGRGVLTALKMLAQRHRFLTDQARELHAQLRDLVADTNLALLSARGVGPVTAAQLLVTAGGHPERLASQTSFAALCGTAPVPASSGKTTRHRLSRGGDRHANAALHTIATVRMSSDARTRTFVTSQRSKGRSNLEILRILKRAIAREIHKLLHQPNTVADISDLRRLRTDKNLPIRTVAHALRTSPIHIGRIERGITRDHEFAERYRDWLTAA

SEQ ID NO: 221570 - protein, 476 aa, unidentified
MKEARMRNNRRALVPTSSGKRPAWSPLLKRLQPDAAGIDCGATSHFVAVPADRDSQPVREFSTVTPGLHELADWLVKCGIKTVAMESTGVYWIPVHEMLEERGLEVVLVNAHHVHNVRGRKTDIQDCQWLQELHSVGLLHASFRPAGAIVALRSYVRHRQTMVEAAATCIHRMQKALDQMNLKLHHVLSDLTGVTGMAIVRDILAGVRDPHKLAAHRHGGCKASEAQIAAALTGNYRPEHLFVLRQNFEAFEFHQRQISKCDQAIDAQLTRLAETCQPPSQELPAARPRCKPSKNEPRIELREPLHRLTGGADLSQIDGIGPYGALQLIAEIGTDMSRWPSEKHFTGWLTLAPNNKLSGKRLLSSRTQPSANRAAAVLRRAAMSLTRSATALGAYYRRVAYRLGQPKAITATARKLAILVYRVLRGEITYQDPGAAAYLQLHRTRLINSLRRRAQELGLSLINLETGEVLDHAVVP

SEQ ID NO: 221571 - protein, 346 aa, unidentified
MVNEGLVLGVDTHKDVHVGVVLDHLGRRVAVRDFPASDEGNAQIVAWLDGLGRLAAAGVEGTGSYGYRLARLLTEHGIAVREVNCPDRSRRRRRGKSDPVDAENAARAVLAGDATAIPKDRRGWVGELRLLLVTRTSAVKARTQASNQARAFLLDGDDQLRGQLHRLRSKHFARGCAELAPASALHRAMAALGRRWLLLDQEARELEAEIVALVGAHAPALLARPGVGGVTAAQLLVTAGANPERLHGHPALAALCGASPVEASSGRTIRHRLNRGGDRAANHALWAIANVRMIYDPRTREYVAKRTATGNNRREIMRILKRYIVRELFPLIIAALHPAAGSPAHS

SEQ ID NO: 221572 - protein, 413 aa, unidentified
MALKIVYPICCGIDVHKTFVVACIASTNKGVTTYKSHRFSTYTKGLKELSQWLCENNCPDVCMESTGKYWIPVFNVLEDSCNITLAHPKYVKAIRGKKTDKKDAKWIADLFKHDLIVGSFMPPLAIRQLRDLMRYRFKLTNFMSSEKNRLQNSLTVSNIQLGNVVSDTFGKSSMNIINRLLVNPQDNSFDIEPLIHGSMKDKLPELELAIDGFITPEQAEKIKVIKHHYEDIKSRKAELENIILSLSVSYTEEINLILTVPSFKNIFSAIAVISEIGVNMDVFPTAKHLCSWAGLTPTNNESAGKKKSVRISRAGCYIKPLLVQCATAVVKSEKHPEIRNRYLRIKKRRGHKRAIIAIARMILTAIYNILKKKEPYNADLYRKADVLPVNREITVEQAILLAKTQGYRIRAAS

SEQ ID NO: 221573 - protein, 450 aa, unidentified
MRSTYAGVDWASEKHDVLIADETGEEILAATFAHDEAGVRGLCRALVRHEVTLVAIERPDGLLVERLLEAGLRILPLHPNQVAATRDRFRVSGGKSDRFDAFVLCELARTDHHRFRVLEPDSDQTKALRALTRAREDLVGTRTALSNQLRAELARFWPGPLGLFRDLHSRISLAFLERYPSPADARGLGEARLHAFLVREHYTGRQQAGQLLAKLRRAPEARVGELELSIRRALVLSLVATIKVINEQIKQLERQIATAIREHPDGAIFLSLFKTPTSVICAAELLAEIGDCRARYPTRDTLAADAGHAAVAIESGKRKAACFRWACNKRLRQAVVTLADTTRHHNPWAQDTYAAARARGHDHPRAIRTLGRAWCRILWRCWQDRMPYDPARHRALQQHITVTIPTPSGPRPDLAATQRMAGAAVTQRAGRRAEREALDDKPTSAITPGG

SEQ ID NO: 221574 - protein, 349 aa, unidentified
MGVLIGIDPHKSVNAAAAIDDQGELAGHETFPANRKGLRALERWAKRFPERRWAVEGAAGIGRPVAQRLAMAGEKVVDVPPKLSSKARLLSTGNARKNDRLDATFTAQAALHNERLAPVLSEDGDDAHVEVLRLLTERREDLVAERTRALNRLHVLLRDLLSDAVSKQLSADAASRLLRRVRPRDEPARTRKQLASEVVRDVRALDRRIADLDERIRQEVEASGTTLTGIFGVGPILAAKIVGIVGNVGRFPSKAHFASYAGVAPIEASSGEVLRHRLSLAGNRRLNTDMHMIAVCQARSDPRGGAYHRKKLAEGKSRREAMRCLKRRVSDAVFGALVADSARASLAPT

SEQ ID NO: 221575 - protein, 345 aa, unidentified
MSMVSGVIGGVDTHADVHVAAAVDTNGGVLGIESFPTDAVGYEALTGWLAGFGPVVKVGVEGTGSYGVGLSRHLHNLDIAVVEVDRQNRHARRRFGKSDPVDAVSAARAALSGTASVTPKGRNGPVEQMRVLLVARRSARRQRNQTLNQLRQVVITGPDEIRARFKDRAKAGLVSEAARMRPRKGNDPVTYTTYVVIRGLARRIKDLNDEMRSIDGALKELIDTTAPSLIECHGIGTDTAATLLVTAGDNPDRLHTERSWAHLCGVTPVSTGSGKTSGRVRLNHGGDRHANAALYRIVLTRMSSDPETRNYVRRRRAEGLSTREVMRCLKRYVARQTFKHLPRAA

SEQ ID NO: 221576 - protein, 385 aa, unidentified
MSQFSGSPQAAIDYNSTIIGALELSEKKWVLAVQLPGVDRHSRHVLDACGERFVSFVERLKARCASAGRKIARVILTHEAGRDGFWLARFLARRGIEVHVMQPSSLPVDRRARRAKTDMIDAEMLLRTLMAWLRGEPRVCSMVPIPSEADEEARRAHREREDLTRERRSIVNKIDGILATLGVKGYKALRRDRREQLNCARQPGGDPIPQKARARIERLLDRLDLVLKLIDQVESARDAVLKKDAPADEAERMIRSLTDLRSIGPDIATLLVREAFVRQFRNRRALAGYVGLGGTPFSSGGSEREQGIGKDGNRRVRAAMVELAWMWLRWQPDSALSVWFRGRVGAMGGRIRKIMIVALARKLLVALWRYVTDGVVPDGAKLKAA

SEQ ID NO: 221577 - protein, 400 aa, unidentified
MLSIGIDVSKGKSTVCGMKPGGEIVYTPFEVQHTREGMSELVSLLRGSGEEVRVVLESTGSYHCPVVAALLENGIFVSVINSLRMKRFCSQSIRKVKTDRIDAMQIALYGLAYWQELQPARLPEDTYRELQLLARQYYQMTSMLIKAKVDFNAICDQVLPGMQELMNDHAGRHKLSDFVLRYRHTTHILEMGETRFRKDYCKWAEKKGYRNCERMAALIFATAQNGIPVLPNAPSTQIVITEAIRVLHTVEASRDAILTQMQALAKTLPEYSLVREMPCIGDTLAPRLIAEIGDVRRFHSKRALIAYAGIDAPPYQSGKFCANNRHISKRGNRYLRKTGYEVMQSYVMHKPANDPIFTFIEKKRGEGKSGKLAMVAGLNKFLRVYYGKVTELYRSLPAIE

SEQ ID NO: 221578 - protein, 350 aa, unidentified
MSQTPKTVGIDIGKNSFHVVGHDERGAIVLRQKWSRGQLEARFANMSPCLVGTEACVGAHHLSRKLKALGHDARLMPAKYVRPYSKGQKNDFRDAEAIAEAVQRPTMKFVATKTADQLDLQALHRVRERLVSQRTGIINQIRAFLLERGIAVRQGQRFLRAELPRILGTPPEVLSPRMVRMIEGLAGDWRRLDERIDGLSGEIEAIARRDVGCERLMSVPGIGPIISSAMVAAIGTGDAFSKGRDFAAWLGLVPKQMSTGDRTILGKISKRGNRYLRVLFVQAAWVVLIKPKIWERHGLKPWIEAAKKRLHPDVLAIALANKLSRLAWSVLTHGRGFETSPITNATAQTT

SEQ ID NO: 221579 - protein, 355 aa, unidentified
MSQEKYIGMDVHQATISVAVMDASGKLIMECLLETKAATIVEFIQGLHGTLALTFEEGTSAAWLHDLLNPHVSRLIVCDPRKAALLKEGNKSDRIDARKLAEMLRTNQLKSVYHGEHGLRTLKELGRSYLTITQDVTRSMNRIKALYRSWAIPCSGSTVYAPRHRAEWLAKIEQPGVRIRAERLYEQLDSLQPLRLQARCELLRESHKHAAVQLLRQIPSIGPIRSALLVALLQTPHRFRTKRQLWAYSGFAVETHDSGEYRSVRGKLQRNRERITVRGLNDNHNKDLKNLFKSAAISASTRPGPLQDFYVALVGKGIRPTMARLTLARKIAAITLTMWKKGVSFDPKQLHRQAA

SEQ ID NO: 221580 - protein, 339 aa, unidentified
MTIVMGLDQHRAQVTAEWLDTCTGELSRSRVAPADRAGVRRFLSGFRGQALEVALEATTGWRFMVEELRAVGAIVHLAEPAETAALRGNKKRAKNDRADARHHRELLMAGRLPESWIPPDHILDLRARVRLRHALGEQRGEWQQRIQSVLYHHGCPQRGDLINAAGLTWLAGQALAVGAREQVTIALKLIDGLDAQLGPLDKSLRAYARRQPGCKALIAAHYGIGPLVAVTILAELGDCRRFSSSREAVRYAGIDITVHASDRRRAPGRLSRQGPPALRWALFEAAQCARRRSSPDHAYYLQAAERLGGNRACLAIARKLLKRSYHTLRELGEEALQPA

SEQ ID NO: 221581 - protein, 345 aa, unidentified
MENMYYIGLDVHKKTISYCVKDGSGRIYAEAEIPATRLDLDMWMKTLPQPWTAAMEATIFTAWIYDHLKPRAAAVKVAHPLMLRAIATAKKKNDRIDANKIADCLRCDFLPECYMASTEIRERRRTLRYRNLLVRQAVQMKNKIAVLLMEAGVSYNKQKLHKVGYFRELLATNQDIDEGLKPLLRLCRETVVRLGKTESALVRSLQRDSLLMERVERLMTIPAVGPITALTWALEVGDVQRFSSIKKAISYCGLCGAENSSANIIKRTPLSKQRNKHLQTMLIEAAKMAPRNSPGLAMLYDREKQKGNANRATLAVARKLVAYLVAVDRRQKDFLVVESENRTAA

SEQ ID NO: 221582 - protein, 437 aa, unidentified
MLPCLNPNAAGVDIGATEIYIAVPGDRDPQPVRCFSTFTEDLHAAADWLKGCHIETVAMESTGVYWIPLFQILEARGFTVFLVNAHHVKNVPGRKSDVSDCQWLQYLHAVGLLRGSFRPEQAVCTVRSILRHRDSLVQMASSHVQHMQKALDQMNLQLHHVISDITGVTGVAILEAILAGERNPHMLAALRDRRIKANADTIAKSLVGDYRREHLFTLGQSLEAFRHYQALIAACDREIAQYLEGFESKVDPPPAPPSPAKDRPKPNDSQPRFDLQTHLHRIFGVDLTKVPGINVLTTQTLLAEIGPDFSRFASGPALTSWLGLCPDNRVSGGKVLSVKTREVKNRAATALRMAAQSLYRSQSYLGHYFRRMRAKLGAPKAITATAHKLARIVYHMVTTRQAYDETICAHNEVQNRQRLEARLRKQARELGLQVVAI

SEQ ID NO: 221583 - protein, 427 aa, unidentified
MNEEKPTRVDEFRQFKREVRSSKQHLIVGLDIAKRKHHAFFGDAGGRTLLKGLIVENSAEGLQHLLTQVRFYMDREGLGKVVFGLEPTSAYHKALAEQLIVNGYLVVYVTNEAIKKNRSLLDGRWDKNDTKDSANVADLVAQGKCHYYDLPEMRLRGLRSLLLVRKRLKKQLHGCRVRIRNNLVAQYFPELDQFWNNATAENLTIVREYLDPATIRRLNCEQFIAKVITHNGGLRQQRRLRHIWEAAGQSIGCRPGPAMKIEAEVMVEMLGSVQSQLDRIEQAIEREAEGFEEYGYLKSIPGFGPYVSAMTLAAIGDPHRFENRSQLIRLAGFDLSASRSGEKSRAAVPVISKKGKADLRYALYQAALVASSLTSHFRAYYSRLLEGRQREVGIRTKMLVKIASKMLVIAWTLMKRKERFNPACISI

SEQ ID NO: 221584 - protein, 337 aa, unidentified
MKFSGIDLHSNNSVVVVSDEADKVIVEKRLPNDLPTILATLEPHRNELAGVVVESTYNWYWLVDGLQAAGYRVHLANTTAIKHYEGLKHSGDETDAAYLAHLLRLGILRTAHIYPKEQRATRDLARKRMQLVRSRTQHILAVENIVARETALPIKSNQVKRLTEKEVLALGLRPDVDLAVQSNVAVIQTLNQQIDKLETRLRERVDQSCEYELLTSAPGIGQVLATTILLETGAIERFREVGHFASYARCVDSVRLSNGKKKGEGNTKNGNVYLAWAFVEAAHFARRYCPEAKRFFDKKRAKTNNAVATKALAHKLARACYHMLKDKQPFDVKRCFA

SEQ ID NO: 221585 - protein, 384 aa, unidentified
MDVLLYCCCGLDVHRDRIEACIQRGIDGEPEVIRQTFGTRKAELQNLAKWLEEHDCYTVAMESTGVYWMPVYETLETQSRYLENLWVVNANHMRNLPGRKSDVADAEWISTLLRHGLLEKSFVPPIAIRDLRECSRLHRTFVQERARYVNRLEKFLQAHGFKFSSVMSDILSVTGRKFLEVLRDTGTLTMEDVERNGRRLKKSADEVASAVCGSLTKAEQRLLGQLLRKVDSCQEDVRSILEDMRLLSSPYQEELAIIDSVPGFDEESAMEIIAEISAEPPEYFSSAERLCSWAGVVPRNDESAGKIKSRKTLHGNRYVKAILCQAAWAAVRTRHSPFHDWFWIHRPKLGQKKAIIAVARKLLKLIYLLLNTKQFYRPPLVAVV

SEQ ID NO: 221586 - protein, 391 aa, unidentified
MIYVGIDVAKDKHDCFITNSDGEVLFKSFTISNNREGFENLFQRIESVSDDLTKVKVGLEATGHYSYNLLGFLLDKGLATFVINPLHTNLYRKSLSLRKTKTDKVDSRTIATMMMSDMNLKSYSDSSYHNEELKSLTRYRFDKVKERAKLKSSVSRLVCILFPELEKLVPTLHMASVYALLSEFPSADAVANAHLTRLSNLLIESSKGRYGKDIAVMFREAARSSIGSHMPAKSLELKHTIKLIRELDAEIEEIENEIKSIMDEIHSPILTLPGISYRMGAMIIAEVGDFSRFDSPDKILAYAGMSPSTYQSGQLDNCYSHMEKRGSRYLRYALYNATKYVCHWDESFATYLAKKRAEGKHYNVALSHATKKLVRTIYAMEKSGQPYQSAS

SEQ ID NO: 221587 - protein, 400 aa, unidentified
MKTKQSSAVMEPASKLINTLNFSNRDLYVGIDVHKMKWQVAVYHDGLILSNVSMNASSDGLIAYLHKHYGNAPFHCVYESGPFGFTLCRRLWAAGIDCIVVNPADIPGTDKEKRRKTDVIDARKLARHHAAGLLTAIHVPSEKLQKQRSIIRFRKKLWGDLVRAKNRLKSELKLHGIQLPEKFDNPHWSHNFMDWISLQAHNDEDLKDTLLLMLEEVQALRLLLLKTERKLRQLMRSDAFKQKSDLLRTIPGIGPLTAMLILLEIGDVSRFKSFDALNAFVGFCPDSESSGERDLHTGISRRRHNALRSELVESAWILISKDAAMFDYYKTLTKRMKGHKAIIRVAKKLLRRIRAVMLSERVYVKGIDGNISAEQIAAPELPPAKPKGRPKKNATAGITA

SEQ ID NO: 221588 - protein, 355 aa, unidentified
MNCQKYIGLDVHQATISVAVMDATGKLVMECILETKASTILEFFAGLRGSLSVAFEEGTSAAWLYDLLKPHVAGVVVCNPRKTALLKHGNKNDRIDAGKLANLLRLDNLEPVYHGQTGVRTLRELARSYLTIVKDLSRVKNRLKALYRGWAIPCGGRDVYYTRHRNQWLEKIPQAGTRRRAEHLYLQLDMLQHVRQQARREFLAESRKHCITAKLRQIPSLGPIRSALAVALIQTPHRFRSKRQLWKYSGLALETRITGEYVFVHGERRRSKKQLSIRGLNKDHNHDLKDLFKGAATRASVIPGPFRDFYQRSLAKGIEPTMVRLTLARKIAAITLTLWKKGANFDIEKLKSQAA

SEQ ID NO: 221589 - protein, 271 aa, unidentified
MYIVGVDYHPSFQHIAFLDQETGECGDRRLDHSDGEAEKFYRELRQKGISMRVGLEATGYSRWFERLLVELGVEVWIGNAAEIKAKRVRKQKTDRQDAQLLLKLLEENRFPRIWVASPENRDVRQLLWHRHRLVQMRTRIMNQLQALAMNEGQRWKHRLWSAEGRALLEKFPLAPWASRRRQDLLELLDRLTPTIDELTAAVEQEAKKWPEALRLMTHPGVGPLTALAFVLIIGTPGRFRRGKQIGSYLGLIPSEDSSGGRQRLGHVSKQG

SEQ ID NO: 221590 - protein, 346 aa, unidentified
MMIIGCDFHPSWQQVAWVDTETGETGEEKLVHERGEAERFYQRLPGPALIGMESTGNCQWFVEMATAAGHEVWVGDAAKIRASDVRQQKHDRRDAALLLQLLLEGRFPRIWTPSSQEKDLRQLLIHRSRLVGLRARVKNELQHLALNRGVQKKRKLWSEAGQKVLREIPVRPWAGRRREDLLKLLAMLNEQVAQLDEAVTKAAEENETARLLMTQPGVGPVTSLAYVLTLGAISRFPRGKQVASYLGLIPREYSSGGHQRLGSISKQGNRFLRMLLVEAAQIAVRCDPQMRNEYIHRCHKKPKAVAKVAAARKLAIRLYWMLRTQKPYPEIVRIESSSRVPLVGAS

SEQ ID NO: 221591 - protein, 339 aa, unidentified
MRFVGADLHKKSITLCVVEVVAGKTVVKNRQRLLCRDVERIERVLAAQRPFHLVVEATIGYEWFAALAEKQAERLVLAHPGKLRVIAESTRKTDKIDAFVLAEFLAKDMIPEAWRPTPRVRQHRSLLRRRCKIQNRITSIKCTVRGILTRYNADQKNLFTKLGWEAAQRHDLLEQERWLLIDLWEELHQQRQRLQKMDARLVEFAAQAPLREAEARAILASMPGVGPVTIETVLAELGDWERFHSADAVVAYAGLNPGVRESDGHRKDLRLTKTGSPLLRWIMIQLAHRLKRTTTRWRRLFEQLSKRAGKKKATCAVARRLLLVMYAMLRDGRAYRMPA

SEQ ID NO: 221592 - protein, 387 aa, unidentified
MPQPNDLSRSLVALDQNSTIIAVVELSQSSWLVGGVVPGIERQPRKKLEPSAERLLGLLHRWRDEAVKAGRKITRIALAFEAGRDGFWLARWLRARGVEAHVIHASSVAVSREHRRAKTDRLDTELLKRGFLGWLRGERGHCTMARVPTIAEEDAKRPNRERECLVGERTRIVNRMKGTLARLGIRNFKPTLRKAAERLGTLHTPEGSALPPNVSAELQRDIARLGFVISQIKEIEEARQERLEQEPETGPHAMVRHLARVVGVGIETADMLVNEVLSRPMRDRKAVARYAGLTGSPDESGAKRREQGLARAGNARVRRGMIQLAWRFLRFQKESALARWYQARTADSRAGTRKTMIVALARKLLIALWRFVTTGETLQGVILRPAG

SEQ ID NO: 221593 - protein, 345 aa, unidentified
MTIVEATRAVTGGVDTHLDVHVAAALDPIGGVLGVESFPTTPKGYRSLVSWLGSFGTIAKVGVEGTGAYGAGLARFLRKAGIDVIEVDRPNRQARRQQGKSDPIDAVEAARAALSGRARGSAKSRDGRVEAIRTLLVAKRSSRDARIRALNQIRHLSFTGPDDLRARLKGLSSDTLAAEAARLRPRRGEPVAFATRVSLATLGRRVLALNEETARLDELLGEFVADVAPGLLEVYGVGVDTAAVLLATAGDNPERLRSEAAFAHLCGVSPIPASSGKTGRHRLHRGGDRHANQALWRIVMTRMAFDPRTREYVERRTKEGLSKREVIRILKRYVAREIYRQLPRG

SEQ ID NO: 221594 - protein, 338 aa, unidentified
MVYGAIDLHMRYSQIRIVDAEGGVLREQRVPTNRERLIRAFEGDGSMRVLLEAGTESEWVAQALEAAGHEVIVADPNYAPMYGEIRRKVKTDRRDVAALAEANRRGWYRATHRVSRAQRAVRQVLRSRRQLVQMRSGAISLIRSLLRQDGYRLPRGCSEQVPARVMALVLPSAVMETLAPLRSIVETLTTEIAAVDARLATQATADPVVGRLQSVPGVGPVVALTFRAFVDDVSRFGGASQVSAAIGLVPREDSSAERRHRGHITKAGPRELRSLLVQAAWACWRSKASGTLRAWVERLAGRRGKRIAVVALARRLSRILFAVWRDQSVFHTVTVAAA

SEQ ID NO: 221595 - protein, 367 aa, unidentified
MKKHSSIDQSLSSTDLSACTTLAVDLAKQVFQVAGEDVLGQVRYEQRIKSREAFYGFLQQLPPHVVVLMETGPGAQAWARQLQDQGNPARILPAGLVATHRSGPKNDRNDALAILRAGRDEKICAVPVKSVSALAMQALHRARQGYVRRRTAVSNQMRGLLLEHGVALAQGDVAISQKIPRVLEDATQPVPGLLRELIDELLAEWRHLGERISVLTGRLEVAANADMTAKRLMTVRGIGPVTATALVAKETKPERFPNARKFAAYFGMVPDQHSSGETVRLGDMTKRGDAYLRSLMIQGAHAVLQQLRPDSQQPDDRRLLHWMSRLGRKEAAIRLANRNLRIVWVLLQNDQTYRRHAGDGQQATMSH

SEQ ID NO: 221596 - protein, 355 aa, unidentified
MTIVANSFSYVIGADTHARTHTLAVIEVNTAARVDTQEFSTTTAGLSRALAWIKRRTENATKVLIAIEGIGSYGARLARVCQDDGLRVVESFPTPARQRRGKGKSDDIDAELIARSVLGAKVKNLRNPRRDTGTRAALRVLISARDLINLERTRSINALTALLRTIELGIDARRALTKKDFVVIGAWRNRAEDIATATARREAIRLAKRVLACDEELVTNRNEITSLVAASPGASLVQEPGIGPINAAAIIAAWSHTKRVHTEASFAALAGVSPVPASSGNTTRHRLNRGGDRRLNQALSSITLTRMSHHEPTRHYVARRKSEGRTTKEIRRCLKRYVARQIYRKLNNQNALDMT

SEQ ID NO: 221597 - protein, 350 aa, unidentified
MHESWRGIELGKVFTFSNSREGFEAFKAWMQHLQDKYRKSDVIVGIEPTGHYWFDLGAYLEDEGILLVMVNPYAVKQTKELDDNSQSKNDRKDPKVIAKLVTEGRYSAPYTPDGVYADLRIMVTNRKRLIREMTQIKNRFAIYFPEYTDVFGDYEAQSSMLLLKKVCTPEAIVELGAEKINQIWRDAKLRAVGMKRATTLCETAKRSIGLKKGSSAARYEMKLLLEDYEYKKAQLDAVMEEIEKLCRKIPESEQMLAIKGIGVITVAGFLAEVGDVRRFESPRQIQKLAGLSLRESSSGKHKGQTTISKRGRSKLRAVLFNAAIPLIATNPEFKSLHEYYTTRIDNPEEI

SEQ ID NO: 221598 - protein, 367 aa, unidentified
MKKVSTAVVRQSRNICPPKLTIGLDLGDRNSWYCVLNGAGQIQLEQGVRTNAKALREVFGKMPCSRIALETGTHSPWISRLLSELGHEVIVAHARKVRLIGESRKKDDRLDAQTLARLARIDPELLSPVKHRSAQAQADLTVIRARAGLVRARTALVNTARSLAKSYGERLRGCNVRNMNPEKAEGLSPELQSALEPLLAEIESLSERISEYNDRIEALAQHSYPQVALLKQIKGVGTLIALTFLLTLEDPHRFRKSRDVGCYLGLQPGRRNSGQSEPQMHISKEGDPYLRTLLVQGAQHILGPFGVDCDLRRWGLKLAERGGKSGKKRAIIATARKLAVLLHHLWVSGEVYEPLHNSSRTTFAAAA

SEQ ID NO: 221599 - protein, 354 aa, unidentified
MASKTKRTTLTFASVGIDIGKEVFHLVGFDTDGKITLRRKIKRQALVSEFQKLPPCIVGMEACLSAHFVSRTLRKLGFEPRIIPAFYVKPFVKGQKNDYNDAEAIAEAALRPNLKPVTEKTQDQLDLQALHRVRSRLVSRRTATINQIRAFLIEQGITVRTGAHSLRNSLFAILDNRADEISPRMNKLIIGLHEDWAGLDERIEAITGEIGMISKGEENCQRLMSVPGIGPIISTAVVAAIGNGDAFGRGRDFGAWLGLVPRQYSTGGKTVLGRISKRGSKYLRTLFIQAAHVILMRPHNWEKFSFGPWLTEAATRLQRNKLATALANKLARIAWSVLANEKTFDTHRQETTAI

SEQ ID NO: 221600 - protein, 345 aa, unidentified
MTQYKRIGIDTSKAVFTLHGIDEQDRPELRINLRRAQMISFFRQLPPTVIALEACGSSHYWAHELTALGHTVRLIPPQYVKPYVKRGKNDRNDAEAICEAAGRPGMHFVPVKSVTQQAQGMVLKVRETLIGQRTALINTVRGHAAEFGIIAGKGAGKIVPLLSAIEQEAAIPPEAKEMFVLLGQQIDEIDARIKAVDAKLNAAHKASEVSQRLATIPGVGPVTALTLAVEIDPAMFESGRHLAAWAGLTPKERSTGGKQRMGGISRAGNERLRVLLVSGATAVINAAMKPGSRQMTDWLRALLLRKPRKLVAVALANKMARTAWAMMKSGETYRRPSAAAGAAAA

SEQ ID NO: 221601 - protein, 366 aa, unidentified
MDTIYIGVDFHARQQTICYLKTETGELVTCELKHQDKQVVRAFYAQFRGQVIVGLEASGYSPWFERMLEELGGEVWLGHATEIRRRARWRQKNDRRDAELILELMLHNEFPRLHRPAVQSREVLRMLRYRQKLIKMRTMSKNSLQAIALQAGLAKRSRLFTKDGQQQLSAAEMSPVMHWQREHWLQLMEPLNQQLLETMVWFKEQSKGDVSITRLRTHPGIGLLTSLCIVHTLQPVSRFRNTRKVAAYAGFDPVERSSAERKCFLGISKAGSRLLRYLLVEAAQTAVRKDEDLKRFYQRLAERRGRPKAKVAAARKLLIRAYIMLRDEIDYAEFRHRAVAARLARRGQGPSNVPEVLIGQPASPEQ

SEQ ID NO: 221602 - protein, 367 aa, unidentified
MDEVSTIGIDIAKHVFQLHGVDGAGEVVLRRRLRRGQVVGFFAALPRCIVGIEACGTAHFWAREIARCGHDVRLMPPGYVKPYVKRNKHDAADAEAVCEAVRRPSMRFVLVKTAEQQAALVAHTVRDLLVRQRTMLVNALRGHLAEFGIVAPRGLQKVDELAAVVADESDERLPASARKALRSLAAEFAALDLRITRLETEIVARAKTDAVARRLVTIPGIGPIIASRLSAMVPDPAIFRSGRDFAAWIGLVPRQSSTGGKPRLGSISKRGNGSLRRLLVGGAMAAMFRSKALQSDPWLCQLRARKPAMVAAVAFANKIARTVWAVMRRNAIWRPAATRSSSRPHQSGAVLAAVKTMPPAAVAFGQS

SEQ ID NO: 221603 - protein, 343 aa, unidentified
MGDVITIGLDIAKSVFQIHGVDADGTVVIRKRVSRAKVLEFFAAVPRCLVGIEACPSAHYWSRKLEVLGHTVKLMPPSYVKAYLKRSKNDANDAAAICEAVTRPSMRFVSTKSEQQQSGLMLHHSRRLLVRQRTMLSNAIRGHMAELGIISAKGRNGTAELLEIIANAKDNCIPAAARFSLEVLARQYIAIATEIGVLEKRIHAWHRSCEESRRLEEIPGVGPIVATALIAEVGDWKAFASGRSLAAWIGLVPKQHSTGGKERLGGISKQGNRYLRWLLVAGAMAVIRYARRHGTKRLWLTRIMERRPIKVAAVALANKIARMAWAIIVRGERFREPRLLLAA

SEQ ID NO: 221604 - protein, 417 aa, unidentified
MISDVKWYVGIDWATQSHCVCLLDAEGKPIGQRDFAHGGAGLAELCDWLLEKTQAAPERIAVAIETPHGPVVEVLVERGFAVFAINPKQLDRFRDRFTVAGAKDDRRDAHVLGNSLRTDTAAFRKIASDNPVTIELREWSRMADELKQERTRLANRLRQQLWRYYPQAAKLTDDVADDWFLALWQKVPTPESAAKASEKAIARILTAHRIRRLDAATALKILRETPLFVAPGTTQAACAHIRSLAARLRLVNRQIKEAEQHLDRLCARIEEEEKASGQNFEQCDVTILRSWPGIGRINLATLLVEAAEPLRNRDYHALRALAGVAPVTRQSGKQRFVVRRLACNRRLQGAVHHWSRVAIQHDAAARQRYDALRQRGKGHARALRSVGDRLLRGLCATLTRRTPYEAGHNSAKTSAKA

SEQ ID NO: 221605 - protein, 339 aa, unidentified
MGLYCGVDLHSNNAVYAVLDETDRQVFKKRLPNDLPKVLEALAPFKADLRAVAVESTFNWYWLVDGLQEKGYPVRLANPAAMKQYDGLKDANDDTDAVFLAHMLRLGILPEGYIYPKGDRPVRDLLRRRMLLVQTRTSIQLSLRSLMTRQTGKNPGWQELRRREPSDFRHMLGGDEVLIFTVEQQMGLIRFLTEKIRLFEKQILERAQLKPEYELLLTIPGVGMILALTIMLETGDIGRFPGAANFTSYCRAAKARRMSNGKCKGDNNGKCGNAYLSWAFVEAVHQALRFCEPARKFYQRKSARRNEALAVKALASKWSKAAYYVMKRQEPFDVKRVFG

SEQ ID NO: 221606 - protein, 401 aa, unidentified
MAAAQETAWVGVDIGKTHHWVCALDADGKRLLSVKVANDEAEILALIATVQGLAGKPIWAVDIIGAPSALMLALLAQAGQSLRYASGRMVAAMSSAYAGEGKTDAKDAYVIAETARLRRDLAVVDQDTDLVRNLAMLTGQRADLVADRVRMINRLRDLMTSVFPGLERAFDYASRKGALVLLTGYASPQRIRRIGHTRLAAWLRQRKVRDSAGVAARAITAAGAQMTVLPGQDLATSIIAELATNILALDERLRSLDAQIAETFDQHPQAAVIQSMPGFGPLLGACLLVGAGDLRAFPSAGHLAAAAGLVPVPNDSGRRTGNLHRPKRYSRPLRHVFYLSAQTSMLRAGPNRDYYLNKREHGRTHSQAIIALARRRVDVLWALLRDNRTWTTSPPVAAQAA

SEQ ID NO: 221607 - protein, 321 aa, unidentified
MQGKAHVDAMAAVYVGIDVCKAQLDIYLYPIGERFSVANDAGGWRCLRRRLGDLTIAVAVMEATSKYHRAVHRHLDAVGICVAVVNPLRARLFAEASGALAKTDAIDARMLALMGAQLDPAGTPPISPAAEATDELVRARSAAVDERVALTNRHDITATPFLRAELIRRIRALDTHIRRLETQISRLIAADPDMAARHAILRSIPGIGPVNAATLCAGLNELGRVDGKQVAALVGLAPFASDSGPKRGHRHIRGGRPHLRRSLYMAALSAIRFNPDMKRFHTNLVGNGKPPKVAITAVMRKLLVLANALVTQNRTWSCRTA

SEQ ID NO: 221608 - protein, 417 aa, unidentified
MSSRQEVYVGLDVARDSMEAVWVDEEGERIGSLSFANDNSGYEEFLGKLHKFREAGDDITVGAEGHAGDLTPLDQYLNDEGFDFLSIHPLKVRRYKDILGQPQKTDNYDAYVVADFLRSREDLLENKPQFDPVIQKVKKLSRTYKDLKKQINRYTNQLDETLTEYFPELLDDFFPDLTTKTTLKLLNEYNSLEKIRETEVEELGKFLDDTSRGYYGEKLASRLIETVKRIDRSPIAESAYRVKLETLTDILLTIKEHTKEIKKKISHLLEDWEDARIVLSLCGAGDITVGRWLGEIESTDRFDGSDPLGLFCGVAPLPHYSGKYSTDKASQRVNKRAKDAIMQIAKSSVQHNPESRRYYNKKRDEGKSHWHAIKCLARQLIRVIYAMLRDRTYYQPNKKSKQQGEEEDKKEVTLNPA

SEQ ID NO: 221609 - protein, 382 aa, unidentified
MIQDTVVGLDVHADSITAAILPPGVDHPEVLTLSGDLMKVRQLFRRISEHGPLRSCYEASGAGFVLQRVLSQDGFPCEVIAPSLIPRKPGDHRKTDRLDAVMLARLYRSGHLTPVHVPTEDHEALRRLLRLRTTYHIYITATMHRISGILRNHGHVFTGGKSTWTKKHRLWLTTLHRSLEGPLATALAIELQHLEYLETQERAMDTQLQNFALTPRYRKYVEALCCLRGVKALTALTLLCEIDDIRRFPSPRKLMAYFGLVPSEHSSGSREYRGSITKAGNTHVRRLLVEAAWNNRHRAGAALILNRRRQGQPPEIVAIALKAQHRLGKKFFRLDQRKHRHVAVTAVARELCGFIWAILMALKAPERYNHRREESTDRRMLV

SEQ ID NO: 221610 - protein, 339 aa, unidentified
MRYIGLDVHKVNTTACVLSAGGKILKEMEVSSNADGLTAIRGYMKDHEYCVMMESSTYAYPVYRYFDDIGVGTHVIHAQSLKLVTDSSKKTDKKDAKTIATVLRLWKIKEFDELKMSYIPTREQCELKDICRYREEISAKIGNESRRIRSHMKRNCLDMPYDLDNLNTNKTREYIKRKWPEDLTLQKRLEGYEMLLKERNSVAKNITSRLRNDPDIELLEAIVGVGRQTAVQLMSMIVNAERFESGEKMCAYFGMVPRVRDSGGKERHGRMTKEGDKMMRMIMERVTLIHVQYCDSAITRYYKRKLPEMGVKKALITASRKMLMAMYAILKTKKPFRTA

SEQ ID NO: 221611 - protein, 392 aa, unidentified
MANIFDTCKSCTPFDQNSTLIAVIELSQGSWLVGGIVPGLERSPAKKLNAKEKREVELLKLLLRWRDEAIKTGREIKRVVVAFESGRDGFWLARWLMAQGIEAYVIHAASTAVSREHRRAKTDRLDIELLKRGFLGWLRGEAGHCKMVAIPTPEEEDGKRPCRERERLIGECTRIVNSMKADLTRLGVSNFNPKLRKAAEKLDAVCTPEGRPIPPKTAAKLRREMVRLHQLKEQIKEIESERLEQIKRAPGEKMHAMILLLTQVIGMGIETADMLVREGLSRRLRDRRAAARLVGLTGSPDESGSRRREKGLARAGSARLRTLMIQLAWRMLIFQKDSALVQWFRARTADGAPKTRKTMIVALARKLFVALWRMVTTGEIPEGFVLRPAMAA

SEQ ID NO: 221612 - protein, 292 aa, unidentified
MKPAVYVGIDVAQEYVDVVVSGKRSAMRVATDGAALETLGQQLIELEPKLILMEASGGFERLPLTVLQAAGLQVAVVNPRQVRDFARSLGYLAKTDAIDARVLAQFAEVLNPQPARLSEEAEEQLRALAVRRRQLIEMIIAERNRLRSAPRTAGRIEEHLRWLEDEVKAIEQELQDLVESDPDMQARAVILRSVPGIGPVLSFTLLSGLPELGRLNRKEIAALVGVAPFNWDSGKLRGKRAVWGGRAHIRSALYMAALVASRCNPVIRALYERLCAAGKPKKVALVAAMRKF

SEQ ID NO: 221613 - protein, 370 aa, unidentified
MKETITSFVGLDVHKDSIAIAVAEAGRQSPRFIGTVVPRLASLHKVLRDIGRASRTLVVYEAGPCGYGLARRLNAEGYSCEVVAPARIARSPIDQRIKTDRRDALLLARESRAGNLVPVVMPDERDEALRDLSRTREDVLAARLRAHQQMKALLLRHGLTCPGRIVWSAAHERTLSTIRLPHPAQQIAFVEYRNAIKDAHERLERLIEALRLQSSQWRMRPLVQALMCLRGFDFIAAVTFVAEIGDPRRFAHPTALMAYLGVVPSEFSSGKSRRQGSITKAGNQHARRMLIEAAWAYCHSPRVSRGLEVRQQGQPKAIRDISWRAQLRLTKRFRHLRMGRKLPQNKVCVAVARELCGFIWDIARQVKPPV

SEQ ID NO: 221614 - protein, 367 aa, unidentified
MKMSVGVDLHKGQFTVYWLSDDRSIEECERYWTDVEGYEKFEGRLKEYVEAGSEVEVAVESTGNTRYFKRRVELVGVVVKVINTQKFKVVNESVKKTDRHDSRTIAEFLQKDMLPESQLCSEESEQLRRLLKSRTLLVRTVVALKNQVHGLLLSNGIDTRRGQLQSKKERRRILDVLAEQGLAGQAVEPLFETIERVENEVKKLEKLLIQRVEGDRVVELLMSIPGTGVITAATVRAYVDDISRFRGYKQFSAYAGLVPWVQNSNARERYGSITKRGPEPLRTALVQMVLGMVRNQRLTGAYHLMLRYQVMKAHKGSGKTIIATARKLSKIVWYMLRNDEPFSPIRMTDPDIRRIIFEMRAAVTEAA

SEQ ID NO: 221615 - protein, 327 aa, unidentified
MTQKAVGIDISKQTFDVFLLAGEKSAKASFDNNKNGFIKFNRWLKKHDAHGAAACLEATGRYGDALATYLFEAGYPVSVVNPIRIKAYARSRMERNKTDAIDSQVIAHFCLTQEPDLWSPPPEHVKELQALTRHLQTLKDERVRLINRLKSGLSSPFVINELQEQKSFLDRRIAKADQVIQAHIATHPDLDKNHSLLQSISGIGVLTASLLLAEIPDISCFETVEQLTAFAGLSPTLTQSGSSINRQGGINKMGRKRLRTSLYMPALVAMRHNPIVKTFAERLQKRGLAKMVVVVACMRKLLHLAFGVLKTRTVFDPYYLVNRQHTA

SEQ ID NO: 221616 - protein, 317 aa, unidentified
MEQRQTNTKIAGIDVGKSKLDGAVHGLEDKTQVANASGGFAELIAWLKARDVGRVGLEATGGYERGIRLALEATGFEVVVHQPIEVRRFAQMKRWRAKTDRLDAQLIAAATAQVEAVRAAQDPRLTDLAERLTAYEQISDQAAQLKTFVEHVTLADLAKTMRAQLRAMIALKAKLAADIVCRIKAHDDLLGRFRLLLSLPGVGPIVAATLVIRMPELGAMGRGQAASLIGVAPFARDSGQYKGLRFIKGGRSRPRRMLYLAALSAKRCDPGLKLFAERLVQRGKPAKLVLVAVMRKLIEAANLILARAHPWMERAQT

SEQ ID NO: 221617 - protein, 370 aa, unidentified
MIHVGIDLHTRNMVNVAINDNAEQIKQAKLPTSRKALYDFFRDFDEPVQAVVECTSSWYWLSDWCRANGVPLTLAHAKMVKAISYAKVKTDKVDARTLAELLRAGLIPEAYQVGPERRALRELTRGRLRMIQRRGKLQSRLWSQAAKYNVHIDRNQWRYPDELVQWLQSQLPEVATVEAELLVDQILQLQSHIHRLEQMIERREAFSGDLELIKPIPGIGLVNGWSILAEIGDIGRFPSDKQFVSYSRLVPGSSDSGGARRHKSGSKDGNKYLRVAFGQAAICAYTHYKPVKQFYRKIKRRSGRHVARAVVAKELAKIVWHVLSKQEPYKGFSRRDPLGKRAAHAGDLSSILAPADKPVRLTGTLRARAL

SEQ ID NO: 221618 - protein, 339 aa, unidentified
MKLYGGLDLHSNNTVINVIDENGKTVFKRRVVNDLELIKKYLAPFYEPLTGLVVESTYNWYWLVDGLMESGYQLHLANTAAIQQYSGLKYGDDDSDARWLAEMLRLNILPEGYIYPKEQRMLRDLLRKRGQLVQQSTKNLLSIQGLYHRHLNFRISANKVKQLTHEEINKHITDPNICLAIESNLIVLTCLRQQITCLEKTLSKQVKLKNEFINLTSANGIGQILGLTIMLETGDISRFDKVGQYASYCRCVSGGRYSNGKKKSKTNTKNGNKYLAWAFVEAANYAIRYNKTIKKYYQRKLAKSHVMVAKGAVAHKLARACYYMLRDDVPFDVNKAFAK

SEQ ID NO: 221619 - protein, 345 aa, unidentified
MEIRTIGIDLGKTVFHLIGVNARGEVVVRKKCSRTQLLRFTSNLRECLIGMEACGGSHFLGRALREQGHDVRLMPAQYVKPYVKTNKNDYIDAEAIAEAVTRPTMRFVPIKTDDQLDLQSLHRVRERWVVRRTAVINQIRGLLLERGITIRKGREHLQASLPHILEDADNKLSGALRALLTQLQWEMQYLHRQIEESNKLIVRIAGELEPCRRLVAIPGIGPVIATATIAAIGNGAAFKKGRGFAAWLGVVPGEHSTGGKQQLTGTSRRGNKYLRKLFVLGAHTVLLQRTKQSSGLSTWLASLTARKRKQVATVALANKMARMVWAVLFKGEAYRPPLSPQTDAA

SEQ ID NO: 221620 - protein, 438 aa, unidentified
MSNKVIFNLDELFISVGIDVGADFSWMSIALPNQQFVGKPYKILHNSIDSLTTAVSKIKEAEELYSLESRIFLESTGIYHYPLFCYLRDKGFNCSVINPIITKNSTNINIRKVHNDRFDSKKAALVGLKPDLKVSLMPSDLALNCRNLCREYYDLMDNRSAYVNKLQGELRMAFPQYLGIFSKVTINTSLTLLETYTSPSAFLEADKQEIIDIIKSTARFGLTYAQNKYNAIIQAATDANQFGYIIDSNIKRIRLYISFIRKYDEEINSILESLHELVDANEDSDFVKQIHLIETFKGAGFLSAVSIMGEIGDFSAFSKPKQLFVYFGLDPAVKQSGKFEGTKVQMSKRGSAIARRVIHTLTLQSISISRNGEAKNPVLREYYLKKCDSKPKLVAMGAVSHKVCNMIFAILRDNKPFKIIAPQEHIKQYNAAKCDMTA

SEQ ID NO: 221621 - protein, 317 aa, unidentified
MQPMYYIGLDVHKKRISYCVKDGGGQVYREGQVPATRLDLDLWMKTLPQPWMAAMEATIFTGWIPDHLKPHAVAVKVAHPWMLRAIAAAKKKNDRIDANKICDCLRCDFLPERYMAPTALRECRRTLRYRNLLVRQIVQTKNQIAVMEAGVSYNQEKLHKVGYFRDLLASNPDINDGLRSLLRLCRETVVRLGKTESALVRSLEQDPLLVERVARLMTIPALGPITALTWALEVGEVKRFSSIKKAISYCGLCGDEKSSANTVQRTPISKQRNKHLQTTLIEAAKMAPRYSSDLAALYELEMPRGHANRATLTVARS

SEQ ID NO: 221622 - protein, 343 aa, unidentified
MQTVTTIGLDIAKSVFQIHGIDAAGDVIVRRKLKRRYVLPFFQKLPPCVVGIEACASSHHWSRELQALGHTVRLMPPAYVKPYIKRQKNDAADAEAICEAVTRPNMRFVATKTPEQQSCLMLHRTRHLFIRQQTSVINAIRAHLAEFGVVAPVGRNGVEQLLDVVADVSDQRLPEIARACLLALGAQLRTLKAQILNFDRQIMACHRSNATSKRLDEIPGVGPALATALVASVADPKAFRSGRDFSAWIGLVPKQHSSGGRDKLGNISKRGDRYLRSLFTAGALAVIRYAKIHGTQHRPWLSALLARRPTKVAAIALANKIARMAWAMMARGERYKEPVALAA

SEQ ID NO: 221623 - protein, 348 aa, unidentified
MSGLSCETNPIERGSPMDAVCTLGIDLAKNTFSVHGIDAEGVVTVRRTISRAKLGELVARLPPCLIGMEACSGAHEWARRFSEAGHAVKLMAPKFVAPYRKSGKNDGNDAEAICEAVGRPNMRFVPIKSVQQQCDLSLHRVRQGFVEERTATLNRVRGLIAEFGYVLPLGSERLCREVRDLLERLPARVASCVRDLLEHAERLRSKALDYEREIRSSVQHNELASRAHTRPGIGPITASALVATVGNGHDFKNGRQFSAWLGLVPRQYSTGGKTRLGHITKRGDPYLRTLLVMGARSVLQRAYRETDPLSRWALALQQRRGYHRACVAIAAKNARVAWALLAKGTAIA

SEQ ID NO: 221624 - protein, 410 aa, unidentified
MRYHLGVDWADQTHAVWVVDERGTKITARTVPHTAEGLSEWGRELDEWRAHGIELWAAIERPEGRVVDFLLDHGIVVYPVNPKALDRARDRFRQSGAKDDPFDARVLADFLRTDHAHLRPLRPSSEAAQELKLLTEDYQRQVRQQTRLVNQLTITLKAYYPRALEVAELTTGLAQAFLQAYPTPAAVAALTERQWQRWARAHRLSATRTRELWEVLQRPQLPVPAHVVRAKARLMRSLVAQLTPVVAAVGEYREAIEDFFARMSTAQWIRTLPIGDHGITAPTLWARLGDAPGRWEAFRHLQAQAGAVPVTKRSGKQQRVVHFRVACDKALRYVVDQVAFLSLRSCEWARAYYDQQRGRGHSHRRALRALGAKWLKIIFVMWQRHASYDEQYHLATMARQQLRQPQTKIA

SEQ ID NO: 221625 - protein, 420 aa, unidentified
MKSWTEITHYAGFDWAKDHHGVVIVDAQGRIVADFEFNHSLEGWKSFGERTSAFADLAIAIETSQGAAVDQLLQRGFTVYPVHPVAAQSYRERKSPTGNKTDHLDAWGLADALRVDGHGWRVLQPTDPMTQQLRLLCRDEVTLIEQRTALVNQLQQALAEYYPAALEAFDDWTKDFTWEFVIAFPTPQSLVKAGKRRWENFLHAHKLWRPQTSEKRLQIFARADQFKASAPIVAAKSQLAVSLCKLLRTLGLQLELYREQIEALFKKHPDHHLFGSLPGAKDFLAPRLLAAIGVNPDRYGSHEVLQCIAGTAPVSYQSGKLHKVRVRWACDKFLRHTVHLWANCFCKASAWGRAYYQQKRDEGMSHACALRCLGQRLLKILFRMLKDKKPYDAELHARNQQKHGSWVLKLANAPVAKPSA

SEQ ID NO: 221626 - protein, 293 aa, unidentified
MTVKTVGLDLAKDVFQVHGISESGRVIFNRTIKRAKLLAFFETLPPCMVGMEACGSSHHWGRQLRKFGHDVRLMPANYVKPYVKRGKTNAVDAEAICEAVRRPTMRFVEIKTEDQQAILSIHRTRDLAVRQRTQLANMIRSLLREFGHILPIGIEAVTAFAKRHLDGDHPDMPEIANGMLGIQCYQFIGLNERISGYSKMIEQHAMLNADARRLMRMPGIGPITASAIVATIGDAKQFRTGRDLAAWLGLTPLNKSSGGNERLGKITKAGDRYIRKLLVVGMTSQRRDGQALI

SEQ ID NO: 221627 - protein, 357 aa, unidentified
MSETATSTDIIIGVDTHKLTHAAVAISALGARLGTMTISANTRGYQALLDWARSLGRIRAFGVEGTGSYGAGLSRFLSEQGYPVFEVNRPNRQIRHQRGKDDMVDAESAARSVLAGQAAAQPKSGTSTVEMIRHLKVARDTAVKARSQAMLVLKAMIVSAPSALRERLDGLTGKMTLLRHLAALRPGPLTSTTASAKASLRAIARRWLALDAEVKDHDASLEQLTQQLAPDLVQAHGMGTGTMAEMLILIGDNPERIHSKAALAKLCGACPIPASSGKTTRHQLNRGGNRQANAALYRVVIVRMRAHQPTLHYVRRRTAEGKSKPEIIRCLKRFVAREIFGYLCRPLRPLQAATATP

SEQ ID NO: 221628 - protein, 377 aa, unidentified
MATNTITWVGMDAHKNSIKVAAWLPEQAEPVEWAEDTTAEAIRRLARRLRRLAPGEVRACYEAGPTGYGLQRLLGVEGVICEVVAPSLTPVKPGSRIKTDRRDARKLGELLRAGLLTEVHPPSETDEALRDLCRCRDDVRVDLLRARHRLSKFLLRRHRIYRQTKHHWGSRHMQWLAELRFDDPMSQATFDSYQLIVHQLDERLGQLDARLAEFGTQEPYREKVAALRCFKGIDTVTAVCLVAELHDFQRFRSPRQLAAYVGLVPSEDSSGERERRGPITKSGNRHVRLMAPPTSARVEPAAARSTRRPAGTRDRDRRPRPGTARGPVPAHERGGQGSPEDHSSHGPRNVRLPVGGPASGGPAHALEVGMSITNPAK

SEQ ID NO: 221629 - protein, 344 aa, unidentified
MQTTEAQSKLYCGADLHGNNVFLTVCDGQGQRVMERRVKANLAAVNAALDPYWERIERVAVESTYNWYWLVDGLRAQGRDVRLANPAKMDQYADLKVADDASDAGWIAEQMRLGILPESYVYPPAVRSIRDALRRRMLIVRQRTQSLLSLEGLFARYALDCPAVAELKGWTAQEVAALPVDGFTRLQVESLLELVRKQDGLARWIEGAVLQAVKPKAEYQRLQQVPGVGPVLGMVIVLESGEFGRFASAGDYASYCRTVKSERWSNGKKKGENNRKNGNRYLAWAFAEAAVYAVRFYPRIAAWYERKKRRRNVPVAMKALACKLAKAAWHVMRGQAFNEAMLFG

SEQ ID NO: 221630 - protein, 348 aa, unidentified
MHIAVLGIDLGKNSCSVAGLDASGRVVLRRRLHRDSVVKLASRLPACVIAMEACCGAHHLGRLLQAYGHVIRLMSPEYVQPYVKAQKNDERDAEAIAEAATRPTMRFVDLKSEDQLDMQTLHRARSRLVGQRTALINQLRAMLLERGIAVAQGRHRLARYLAQALDDGNAEPVPLSLRIRLLIEDMRAQWSELDRRIASFDAEFVAATRSDEAARRLSTIPGIGALNATALVAAVGDARSFARARDLVAWLGLVPRQATTGGRPRLLGITKRGNKYLRTLLIHSARAALPSLATTEGVLGNWLRGLSARAHRNTVIVALANKLARIAWAVLRSTAIYSARISDRPTAV

SEQ ID NO: 221631 - protein, 461 aa, unidentified
MKSNKPAGKRKESAGPKVDWKALEIVHPNAAGIDVGGSEHWVAISPDRDLEPVRRFGCFTADLREMGQWLVEKGVRSVALQSTGVYWMPVFEILEQQGLEVYLVNAQHTKNVPGRKSDVQECQWLLKLHTFGLLNNSFQPTDEIRVARALWRQRGNLVADASSAIQRIQKVLIEMNVQLSNVLSDISGVSGMNIIQAILDGERDPWELAAWAAPGVKATSHEIVKRLEGNWRQELLFVLRQQVELYRTYQEKIRDCDLELRRHLESLGSKVDLEAQPLGPKPKGKKSGRNTPRFDLRTELYRITGIDWAQVNGMDVVTAQTVIAECGADLSAFPSEKQFTSWLGLVPTNEQSGGKILKRRTRKVVNRAAMAFRNAAMTLLRSQSYLGAQYRRLRTRLGAPKAITAMARKLACLFYRLIKHGQQYVDKGMEYYEARYREQQIRSLLKRAQKLGFQLVTTKAG

SEQ ID NO: 221632 - protein, 354 aa, unidentified
MPIVAGVDCHKDSHAIVIVDEVGKVLRSFSIAASAPGYREAMVIARDLGVALWGLEGTGTYGRSFARTLVQESWIVFEVPGIVTKRHRKHGSRHGKSDELDAQAIAEAVLRESDRLPRFREFAEQEALRLRYDQRDRLVRERTSVINRIRCAALRLGIDEVPDDLTAAASLQRMSNVVEPLRGAGLVEDALVEELLFETSTLERLNDEIHRLERVMGPFVARLAPELLELRGISTVTAAGLIGHTGDLANLRDAGAFAMRSATAPIPWSSGRNQAVRINSGGDRQLNGLLHGIALTQVRSTGHPGRRYYERKRTEGKTLRAAMRALKRQRRILSAETVSGAHRRRLRTRRRVGH

SEQ ID NO: 221633 - protein, 373 aa, unidentified
MFRPWRGSKEARRINPNQECLPRFHIHLVEGTVMTVIIGIDPHKASHAAYAIDSNEHELGQLSVRAGQRQLAELLGWAESFAERRWAIESAGGLGYLLGQQLVGAGECVVDVPATLSSRVRVLGTGRSNKNDPNDARAVAIAALRAPALAPVRREDHVTVLRLLAKAHLDAGRARNRACCRLHALAGELVAGGIRKEVVVSQAETLLATIEPTCAAQRQRLELARELLDEVRALDTKLKRSKARITEAVVASATTLTDLYGVGPIVAATVIGYSADVRRFPTAGHYAAYNGTAPIEFSSAGRIVHRLSRRGNRVLNHAIHMAAVTQIRNLQSEGRAYYDTKVAAGKTKREALRALKRRISDRVYRQLIADARK

SEQ ID NO: 221634 - protein, 310 aa, unidentified
MDIITVGIDVSKNRLDVAVRPSGEAFSVERNAGGLEQLVGRLREFGPHLVALEATGGFETIAAAALAAAQLPVVVVNPAQIRAFAVAIGQRAKTDPIDAAVIAHFAEATKPQVRLLPDEATRLLADLVARRRQIVEMIGAERQREKRVTVPHLRKSIARLLKALEKELTTVNTDIDDAVRGSPAWREKEDLLASVPGVGPTIARTLVAELPELGQLTRKQIAALAGLAPFTRQSGQWRGRSFIGGGREAVRTVLFMGAMVAKRHNPVLKAFFDRLVAAGKPKMVALIAVARKLITVLNAILRDSRPWQGA

SEQ ID NO: 221635 - protein, 314 aa, unidentified
MYHYIGIDVSKKVLNVFDGKKDLIFDNKENLSSLKNYLKKKYPDFSSLMILFEATGIYSFYLKAFCATHMIKAYIINPQASHNFAKSLGKRSKTDTTDARTIWAYHKLVNDKDIHIPKVDQVLITLSSYLTSYRLTLKQRLALTNHLEGVKDKTLYRLLKKELERLCKLEQELLIRMDKYIKQYPQLKEDYQRLLSISGIGKKTAISLLTLFHTYPDTNRNQITALIGLDPIQRQSGTSVHGRSRISKHGNQMIRRCLYMPTLSSIKYNHKIKVFYDRLVLKHKPKKVALIAAMRKLLLIAHAVYKNKTVYVPG

SEQ ID NO: 221636 - protein, 315 aa, unidentified
MTSAPVFVGIDVAKDHLDVALRPSAERWAVANDEAGIATLVDRLRALTPALIVLEATGGLELPLTGALAVGLPVVVVNPRHVRDFAKATGQLAKTDALDAAVLAQFAEAVRPALRPLPDAALQELRAWLARRRQLLEMRTAEQNRLGMARPPVRQGIRAHIAWLDRHLAQTDDDLARAIRESPLWRERDDLLQRTPGVGPVLARTLLASLPELGTLNRKQIAALVGVAPLNRDSGTVRGRRRVWGGRAHVRAALYMSALAATRHNPVIRTFYQRLCAAGKAKKVALTACMHKLLLILNAMVKHRTPWEDNFAPTS

SEQ ID NO: 221637 - protein, 392 aa, unidentified
MIYVGIDIAKDKHDCFITNSDGEVLFKSFTISNNREGFETLFQRIKSISDDLTKVKVGLEATGHYSYNLLGFLLDKGLTTCVINPLHTNLYRKSLSLRKTKTDKVDSHTIAAMLMSDLNLKSYSDISYHNEELKSLTRYRFDKVKERAKLKSSISRLVNILFPELEKLVPTLHMASIYAMLSEFPGASHVASAHLTKLANLLSQSSKGHYGKDTAILFREAARNSIGSVMPAKSLELKHTIKLIQELTTEIDEIETAIKQIMDEEIKSPILTIPGISYRMGAMILSEIGDFSRFDSADKILAYAGMSPSTYQSGQLDNCYSHMEKRGSRYLRYALYNATKYVCHWDESFGAYLEKKRSEGKHYNVALSHATKKLVRTIFAMEKSGQAYRVTV

SEQ ID NO: 221638 - protein, 360 aa, unidentified
MQKHIFVGIDLGDKNSVARIAEDQEKSVRFGFVNTRAGRARLFAEAKRRAVAAGGAKIVMAYEASSCGFILNDEAQAMGMGCWVLAPTKMEKSVERRKHKNDDRDADDIVERLRGHVLAGNRLPTVWIPDLETRDDREVLRTRMALSERQTQVKTQIQMLLKRHGLEKPSDLGSTRSKPYRQWLESLSEWESLRWGTRQSLASLLRQLKGIEGEMENLEKLVKQLGDQQRHKPIVEALMKEKGVGLVTALVYRTEIGKASRFRRGRHVGKFVGLTPTSHESGQQNDRKGHISRQGPPRLRKVLCQASWVHVRHDPHAREVYKKLVAKNPKKKKIALVAVMRRLAVRLWHRMREAELQTQS

SEQ ID NO: 221639 - protein, 344 aa, unidentified
MQHYVGLDVSVKETSVCIVDKAGKVMREVKVATKPEAILAVLTEEGLAIERIGLEAGPLSQWLYSALAGAGLPVICVETRHMKAALSAQINKSDRNDARGIAQMMRVGLYRPVHVKTLASQKRRMLLTSRQLLQAKALDIENDLRGTLRNFGLKVGMVGTVKFEARIRELVADHPDLAAIVEPLLIARRVLREQLGVLHRQLLEIVRHDEVCRRLMTTPGVGPVVALTFCATVDVPSRFASSKAVGAAFGLTPRRQQSGEIDRMGGISKCGDGMMREMLFEAALVLMTHSRKWSWLKAWGLKIARHRGMKRAIVAVARRLAVIMHRMWVDGTEFRWTREEAAAT

SEQ ID NO: 221640 - protein, 334 aa, unidentified
MQESCKVTICATVGIDVSKDRLEVVLRCEEREQPRVSANSAAGFRDLHRWLQGQDVQPQQTQVALEATGSYSDAVAQFLYEHDYVVSVLNPAVLVDYRKSVNVRSKTDALDARLLARYAQERRPRGWKPLPEDVQTLRFLLARREDVQHMLQQERNRLHAGRMESWIRTRVQQHVTQLDKELQAVWKRTMDHLKAHPSLKSMWRRLQTIKGIGPIGAAYLLAEVGEIERFDDPRALVSLAGLAVKRHDSGRSVHGKPKIDRHGRTGLRRILYLCAVSALRWDAHMQRFAARLEARGKPLKVVQVAAMRNLLHIVYGVWKHEADYDPTLAFPEVA

SEQ ID NO: 221641 - protein, 336 aa, unidentified
MNENTGWWLGVDVAKSKLDVALLDERGKIKSRVFDNSAKGVGALLAWLGQCGCDLALTRLCMEATGPYSEAVSTTLSDAGWYVSVVNPARIKGFAQSEMSRNKTDKADAALLARFAQAMKPEAWKPPALEVRQLRALVDRLQALKEMQQQEVNRLEAAQNQPGAQASIHSHLQWLRENIKDLERQIDDHIDRHPGLRGDVELITSIPGLGNTTAAKVLAYLGDVRRFKSAKALAAFIGVTPRLRESGSSVHGRSMISRSGHAAIRHSLYMPAMVALKHNPLIKEFGLRLKGEGLAPKAVISASMHKLVRIIYGVLKTRSMFNAQFLTASLDFQDGI

SEQ ID NO: 221642 - protein, 392 aa, unidentified
MAVMIGIDPHKGSHTAVAVGAAEEPLGKIRIRACPAQAGQLVAWAAGWPERIWAVEGAPGLGRLLGQQLVAAGERVLDVQPKLAARVRLLHTGNTGKSDPNDALSVAVAALRSTANREVAADDHATVLKVWAKRHRDLSRAYNQVACRLHAVLCELVPGGVPEEITAGRAGKILAQIRPAGAAGQARCELAAELLADLRHLDGQRREVKKKLAAAVKATGTSLTEVFGVGPVVAATIIGDVVTVARFPARDHFAAYNGTAPVEVSSGEKKIYRLSLRGNRRLNHAIHMAAITQISHAHSNGRAYYERKIAEGKTHKEALRCLKRRISDAIFVRLRADARAAGLGGQPGDLSSSRAAGSHPGHRLFGQATPRPETSLRAKLTPGMPRAPSRAR

SEQ ID NO: 221643 - protein, 366 aa, unidentified
MKKISIVAKRGNEISKEPKLTIGLDLGDRSSHYCILDEAGSVLLEHSLPTTPKGIRQVFSRIPRSRIALETGTHSPWVSRLFTQSGHEVIVAHARDVRLIGESRRKDDRIDARTLARLARIDPQLLSPVQHRSAEAQIHLTVIRARAGLVSARTALVNAARGLVNSCGQRLRKCGTQQVSREMAAGLSAELRGALEPLLREVESLNERSKEYDRRIEEMAKQTFPEVALLQQVKEEGELIALTYVLTIEDPHRFRKSRDVGCFLGLRPGRRNSGQSEPQMHISKEGDRYLRTLMVQGAYYILGPFGEDSDLRRWGRKLAERGGKNAKKRAVIAVARKLAVLLHRLWVSGEVYEPLRNSQKAVRAAA

SEQ ID NO: 221644 - protein, 321 aa, unidentified
MTYVGIDVSKVTFVVAYSSVKTNKTRTFKNTVNGVHEFVQTISASEHNCVLEATGNYSALLVYLLSEAGITISLENPLKIKNFARVMLTVTKTDEIDARLIALYGEKMQPAPYKLRSDAILVLKQKRTVLRQLKKQLVATRNLKGSMEVLPFFDPKCKKTIEKTITFLEKQIKEMEEELASLAQGEYKKQMDLLTSIKGIGVTLAAPLIVATGRFSYFDNAKQLTRYLGLSPTYQQSGTSVNVKGHINRNGDSSLRSQLYVAAFSSLRCNTEYKACFDRLRSNGKPGKVVVIAVANKLVRQAFAVVTQGKPYVDGFKSEKP

SEQ ID NO: 221645 - protein, 391 aa, unidentified
MILAGIDVAKDKHDCFIMNSDGEILVKAFTFSNNLEGFNFLYEKIRSVTKPKDKIKVGLEATGHYSYNLLGFLLNKGLPTFVINPLHTNLFRKSLTLRKTKTDKVDSRTIAMMLMSDVALKPYTDTSYHNEELKSLSRYRFTKVQERSKLKTSVSRLVQILFPELEKIVCTIHMSSIYRLLEEYPGASYIASVHLTKLTNLLMEASHGRYNRNTAIKFREAARNSIGSILPAKSLELKHTIKLIRELTVEIDEIDAEIKKMMDSIASPITTIPGIGYSMGAMIISEIGDFSRFSSPDKILAYAGLSPSTYQSGQLNNCYSHMEKRGSRYLRYALFTVAQKVCIWDNTFAEYLSKKRAEGKHYYVAISHAVKKLVRVIFHLERTGQAYLKAA

SEQ ID NO: 221646 - protein, 324 aa, unidentified
MYYIGLDIHKKTISYCVKDASGQIHREGKIGSTRCELDSWIKTLPQPRMIAMEATIFTGWIYDHLLPHAEKVKVANPLMLRAIAAAKRKNDRIDSNKIADCLRCDFLPECYMASTEIRDRRRTLRYRNLVLKQMTQMKNRISGLLMEMSCNEEVNESIRPLLKLSRETVVRSQRLDYALVHSLERDPLLAERLKRLRTIPGVGPITALTWALEIGDVSRFQSVKQAVSYCGLCSAERSSADKLVRMPISKQRNKHIQQVLVEAAKLAPRYSHELALVYERERLRGNKNRATLAVARKMVAYMLAVERRQQDFVPVGELGGTAAA

SEQ ID NO: 221647 - protein, 313 aa, unidentified
MAMQVERQLIGVDVGKAELVICPQGQDKPFTLANERRGIQRYLKALPGPACFAVEATNIFHLALAEQAHRLGHTVYLIDGYRLNRYREAVGSRAKTDACDARLLVRYLDKERQELRPWSPPSRGYARLQRLLQRRACLVQTKTALSQSLKALPELRPSAQATLRQLERLDGVIKKRITQALKAHGWLHEARRCQAIEGVGPITAAALVMVFHRGRFAHSDAYVAFMGLDVRVRDSGQKKGQRKLTKKGNPELRRLLYLAAMTARRSATWEPFYQRCLDRGMSPIQAFVALARKLARVAFALLKNQTDYVPVAA

SEQ ID NO: 221648 - protein, 343 aa, unidentified
MKLMRIGVDLAKNVFQIHGVDRHEQPIWRQRLSRDRWLQTVLEKIEPGCEIGMESCGGAHHWARQLQARGFRVRLIAPQFVKPYVKSNKNDANDAEAICEAMSRPSMRFVAVKTIEQQDIQATHRIRAGLIEQRTAKANQIRGLVAEYGLVAPKELLMLRRAIPCWLEDADNGLTARFRRLLNGLWDDLRALDDRVRELDGEISAIAASDPAAARLQQLRGVGPMISTALVAAIGDASQFDNGRQLAASLGLTPKQHSSGGKDRLLGISKRGDAYLRTLMIHGARSALRTAKFKDDRLSQWAVRLAERSHPNVAAIALANKTARMAWAMLRNGTDYQPDRAVA

SEQ ID NO: 221649 - protein, 448 aa, unidentified
MVVRDQPWLFLHPKKKGGEAVKKRKKIDHLSTLCVGLDIGSRKNFITAMNFDSERLIDMQSVPNAASGVEQLEAMILAVLAVHAEFRYVLIAMESTSFYGVHVANYLSTSDALKPYHAEVFCLNPKEVANYKKSFAGIGKNDGIDSFVVADFIRVGRISIEPWRGAQYLALQRLTRQRKHISECIAREKNYALNNIFLKFSQFALLDGADTLLSNKFGSTAEAILTEFKTTEEIVNTPLEDLVTFISDHGRGRFAEPEEIARLLQKAARDSYRLDKSLYEPITTSISCSFNCIRANEKQLKALDKAIAELIAGLNPTEYQILRSIPGIGPVYAAGILAEMGSVRCFPDNNSLARYSGIVWKDNDSGEFEAEDRPMNKAGNRYLRYYLIQAAGSVAQYCPEYAVFYQKKYAEVPKHQHKRALALTARKLIRLIFGLLDKNQLYSPAKSK

SEQ ID NO: 221650 - protein, 349 aa, unidentified
MSISMIGLDTAKSVFQLHGVDESGKTVLRRKLQRSEVVSYFEKLPPCTVVLEACGAAHFWARTLIGLGHDAKLIAPEAVRPFVKKHKKNDPADAEGLVTAGNHKGTKFVPVKDTEQQGILSIHTARALLVKQQTMLSNSVRGLAAEFGHTAAKGTEKLAELASEVAADEMMPARARQAIVGLYDQFRALDEGIQTLEAEIVAHAKSNEKARILDAIPGVGPITASLVVATVSDWSVFKTARDFAAWIGLVPRQNGTGGKVRLGKITKAGNKLIRKLLVSGATSMVRRAERWDSAMGRWTASLLKNGRPVRLVTVALANKVARVMWALMTHNDVYRPQGAVKPAAAVAAA

SEQ ID NO: 221651 - protein, 400 aa, unidentified
MLSIGIDVSKGKSTVCGMKPGGEIVYAPFEVQHTREGMSELVSLLRSSGEEVRAVLESTGSYHCPVVAALLENGIFVSVVNSLRMKRFCSQSIRKVKTDRIDAMQIALYGLAYWQELQPTKLPEDTYRELQLLARQYYQMTSLLIKAKVDFNAICDQVLPGMQELMSDHAGRHKLSDFVLRYRHTTHILEMGETRFRKDYCKWAEKKGYRNCERMAALIFATAQNGIPVLPNAPSTQIVITEAIRVLHTVEASRDAILTQMQALAKTLPEYSLVREMPCIGDTLAPRLIAEIGDVRRFHSKRALIAYAGIDAPPYQSGKFCANNRHISKRGNRYLRKTGYEVMQSYVMHKPANDPIFTFIEKKRGEGKSGKLAMVAGLNKFLRVYYGKVTELYRSLPAIE

SEQ ID NO: 221652 - protein, 348 aa, unidentified
MTKVSMIGLDLAKNVFQVHGIDASGKVVVRRQLRRGSMEKFFAELPRCVVGMEACGGAHHWARVLTRLGHEVRMMPPAYVKPYVKRNKNDGRDAEGICEAMTRPTMRFVPVKTLESQAVAVLHRTRRLLVRQRTMSANAFRSALTEFGIVAAQGLKGLRSLMQVLEDPASTIPDKARMPLRVLARQWEALNTDICKLEAEIVRAAKSDEVARRLMAIPGLGPIGATAILAAVPDARVFKTARDFAAWLGLTPRQFGTGGKQRLGGISKQGDRTLRMLLTVGATAHLRYERTRDTKDPWLQALLGRRPFKVAAVAYAAKMARIIWAMLVTGEHYRAPNRRHSGSVQAAA

SEQ ID NO: 221653 - protein, 355 aa, unidentified
MNDAKYIGMDVHTATISAAVRDSSGNLVMEATLETKAETILEFVHGLRGSLRVSFEEGTCASWLHDLLKPHVSEVLVCDSRKNALLKVGNKNDREDARKLSELLFLNKLHPVYHGETGIRTLKELARSYLTLTRDLTRVMNRLKAIYRGWGIACTGQQVYAPRYRVEWLAKITEAGVRRRAEIYYQQLDVLVTLRQEVRRELLAESRKHPAMRLLQQIPSIGPIRAALLIALMQTPHRFRTKRQLWAYCGLALRTYDSGEYRFVGGQLKRSKKAVTIRGLNKNHNHDLKNIFKGAATRAAAAAGPFQNFYEARIANGMKPPMARLTLARKIAAITLLVWKKGVRFDAEQLKQQAA

SEQ ID NO: 221654 - protein, 329 aa, unidentified
MNILAMDLGKSNTVICFYDSESDEHKYGRIKTAPQQIHDLLAEYSPDRVVFEICSAAGWVYDICSGLKLNTQVANPNTQGWRWKNVKSKNDRSDALKLAQLSAMNQLPVVHMPKQSVRQKRAIIQYRQSLVRQRTRIKNSIRAILDKQGQSMPGGMSGWSMASIKRLSAMSFPLDKCDMDNLWRGQLRVELQMLEETESCIAQVDKKLDVLGMQDKDIQLLQTACGVGPRLSEAVVAFMDEPERFKSGKQVGSYVGLTPRQYQSGSMNHQGKISGQGNKVLRSLLVEVSWLGLRHNKWMNETYRRILRGSESRKKIAITAVARKLLVRC

SEQ ID NO: 221655 - protein, 406 aa, unidentified
MSYYYLGIDWATDHHDIHITDDSAEKIDAFRVKHSLAGMETILNHVYRLTTDKKETLFALETDKGLLVNFLLDNGFTVFAINPKSVDRFRDRYDPSRNKTDKIDASILADILRTDRHRFRAILPESESLRELKILTRDHKALIGSRTRLTNQLIACLKFYYPLGLELFCDVKQRICLEFLSSFPNHLRAQRLTLNQLKAFLTKHGYTQPKRTKTIFERIKTPQIPTESFIIRAKSKRMLSLVASIKAANTYINEHEKEITAILKGHPDGGIFLSLPGADITLAARILSELGDNRKRYKNYNDAQCEAGTAPVTKQSGKYRHVIFRRACKKPFRDAMQQFAFSSTRQCQWAHSYYVSQRQRGNTHSQAVRALANKWLKIIYAMWQNKQLYDEQLHLNMLKSHLIKQL

SEQ ID NO: 221656 - protein, 415 aa, unidentified
MLKIVYPICCGLDVHRDFVYACIATTENGITTYKSHRFSTFTKGLRELLSWLLQNNCCDVCMESTGKYWIPIYNILESDCKIVLTHPKYVKAIRGKKTDKKDAKWIADIFKHDLVSGSFIPPADIRQLRDLVRYNVKLTNYTTGEKNRAQNCLTVSNLKLDSVFSDVFGKASSNIIGRILANPSEKISDVSVFRTKGMKATDEEVLAAVDGEMCAEQAEKLRIIRSHMDGLELCKANLMSLILSTAEKYIPEVDLVSTVPGLTAYSAIAVIGELGVDMSVFPTSKHLCSWAGLAPQNDQSAGKKKTTRISRAGVYIKPLLVQCALAAIKSKNKHPEIVNRYNALRKRRGHKKAVIAIARILLTAIYNILKKREPYNPELYRNSDTPPEHRNVTIEEAVFILQRQGYIISSPTSVG

SEQ ID NO: 221657 - protein, 452 aa, unidentified
MAKKREKRECKAVVLEPDAAGIDIGAEEIYVAVPPDRDEESVRMFSSFTCDLQALADWLQQCRIRTVAMESTGVYWIPLFQILEARGLEVYLVNAHYLKSVPGRKSDVSDCQWIQYLHSVGLLRASFRPAMDICAVRSLWRHRGSLLQMASEHILHMQKSLSQMNLQIHHVLSDLTGASGQAILDAILAGERNPVLLAQLCNCRVKSPREKVAKALEGDYRPEHVFTLKQSLDGYRYYQKLIAEVDREIQRLMQTLPSAIEAGQEIPRRTKHSAFQRQGNDPNFDLRAQLYRIAGVDLTDIPGVSALTAQVVLTEVGPDLHRFRHASAFASWLGLCPENRVSGGKILSCKTRKVKNRAALALRLGANSLCRAKGYFGEFFRRMRAKLGTAQAITATAHKIARVLYHVLLTKEPYTETVFHKCDEHAQRRAEMRLRKHAALPGFQIVPVNPAA

SEQ ID NO: 221658 - protein, 353 aa, unidentified
MREDIIRTIGVDLGDKWSHLCVLDEAGEIVSELRIHTTDAGFRGWFSKQPRGRVALEASTHSHWVARLLEELEYEVIVANPRQIPLITRNDRKCDRTDAELLARLARSDPKLLSPVVPRSAQIQADRSLIVSRDVAVRARTMLINHVRGSCKAFGAMLPSCSTPSFAKKVAEYLPEELRAGLEPILALIAQLTKSIRAYLRQIEEVAEERYSAAGHLRQVRGVGPITSLAFVLAIGDPDRFSCSRKVGAFLGLAPGRDQSGGRDPQQRITRAGDPLVRRLLLQSAHYIMGPFGEDCDLRRWAERKCEHGGKSARKRAVVAVARKLGVVMHRIWITGETYEPLRLARERAEAAA

SEQ ID NO: 221659 - protein, 344 aa, unidentified
MGEYVGLDVSKEETSFCVKDEAGKVLARGKVASDPEALFEVLREHCPCPKRIVLETGTLSFWLARALRKRGLPVDVIDARQAHAVMKLQHNKTDAGDAELLAEIARTGFCRAVAVKSEVAQEVRILIKARAHLVRQRCDTQNAIRGLLGSLGLRFPKGSGKLAWRVRTALEARPDLQATFEPLLSTVEALKREIARLDEAVVARAKASPACQVLMSVPGVGPVTALAFAATIDDPSRFAKSRTVGAYLGLTTRRFQSGEMDYSGRISKHGDAMVRSLLYEAANSMLTVVRKAHPLKDWARRIRRRSGHKKACVALARKLAVILHCMLTTGELFRWPEKKDDAMA

SEQ ID NO: 221660 - protein, 338 aa, unidentified
MSIVMGLDQHRGQITGEWIDTDTGELQRTRVAPADRAAVRKFLSRFRGQELEVALEATTGWRFVVEELRRVGAEVHLAEPAETAGLRGPKKRAKGDRADARHLRELLMVKRLPESWIPPDHILDLRARVRLRHTLSEQRGEWQQRIQATLYHHGCPQRRNLMVGDGREWLASQPLPTTAREQVTVALQMIDALDRQMAPVEKELRAYARRQAGCKALMAHYGIGELTAVTILAELGDCTRFSSSRQAVRYAGMDITVHQSDQRRSPGHLSRQGPPALRWALFEAAQSACRQTSPDRDYYGQTAERLGHNRACLAIARKLLKRSYHTLRELGEEALAPA

SEQ ID NO: 221661 - protein, 418 aa, unidentified
MKSIKTKKVTKINDKTVIATLDIGKNIQYGYFRAPNGNDVKPFAFYNSKKSYNEFWQKLCQFKNQEGLEQIVIGFESTGPYAEPLFHFLRKKPVTLVQVNPVHTKRVKELTGNSPNKTDNKDPRVIADVICLGHALTLVVPEGPAAELRRLTQARERAIADRTAIINQLQHLIFVIFPEFLKVLKISTKTGRYFIKHFTTPEKICALGLESVSQIMKKVSRGKLGQDRAQQLHEAARDSIGISEGKQSIVFEIEHLVSRIEVEDQFIDSLEKQMHVYLQQIPYSQNILSIKGLAEVTVAGLIGEVADFNKFDTISEIMKLAGLDLYEISSGNHRGQRRISKRGRPLMRKLLFFAAINAVKSKGIMHHKYHQMLDRGQLKMKALVAISRKLLGLIFAIVRDDTKYVENYSDNYHYKLAA

SEQ ID NO: 221662 - protein, 386 aa, unidentified
MQLLLAGDDWAEDHHDVELMDEAGRTLARARLPGGAAGMARLHAMIGEQLGEDAETAGVRVGIETGRGLWVTALAAAGYTVFGVNPLQVARYRERHGVSGAKSDAADAHTMAGMVRTGAHQLRAVAADSPAAQAVKVVARADKTLIWERTRQVQRLRYQLRGYFPAALEAYADLDSPDALELLARAPDPASAARLTTAQVAAALKRARRRDIAGKTAAIRAALRSPQLAQPPQVTAACAAVVRSLTAVITAVSEQVKVLEGQVQAHFSQHPDAEIIASQPGLGPILGARVLAESGDDPRRYASAKARKNYAATSPITRKSGKRKTVLARYVHNDRLRGALDGQAFTALKASPEPAPTTTSSAHAASATGPRCASSPTGSSASCTAA

SEQ ID NO: 221663 - protein, 386 aa, unidentified
MIYVGIDVAKQKHQIAILDDGGEIYRDNLVIQNNYLGFQKLHEILSHIQTETAQKCQVALEDTGHYSLPLLQFLRKNRYLTYCYNPILIKEFSKVHTLRKTKTDKIDALMIAKKLMVDWEKREKKQNQTSMELKELTRHRRRMGKHQSFLKTQYTRILEKGFPELATYGQVRHSAYMIKILKKYPSPKKIAAAHLKTLSSLLGANNSQLSASKLQQLANESIGYHSEVAELELIQTIEQLYLYEKQIKKVDKRIQEIMDILDSPIVTIPGISYQLGSIILAEIGDIHNFKTSSQLLAFAGMEPSIYESGEGKGKGKMVKRGSPYLRWAMYHAARLVAIYSPTFKRYYKKKQAEGKHYNVVISHLAKKLIRVIFHLLRKEEPYKEAL

SEQ ID NO: 221664 - protein, 278 aa, unidentified
MEQIIRIGMDTSKSVFQLHGVDSGEKPVLRKQLRREGMISFFRKLPPTVIGIEACGGAHHWARLLASFGHQVKLLPPQYVKPYVKRGKNDAADAEALCEAMSRPTMRFVSVKSAEQQAAQMLAGVRDQLVRRRTQLTNAIRGYAAEFGLVAGKGLGKIEPLLARIRTDEVLPTLAKELFEAQAREYARLQKELEALDARLMAWHRANALSRRLAQIPGVGPIGATLLAIKVADASAFKSGRDFAAWIGLTPKNHSTAGKNRLGVITRAGDEMLRSACL

SEQ ID NO: 221665 - protein, 353 aa, unidentified
MKKNIILANTIPAITIGLDLSDRTFQFCELNGAGEIVAEGQRKLDRGTLGQYLAGKPGGARVALETGGHSAWVREQIEQAGHQAVVANARELKAVTGRSQRTDHQDARQLARLARVDTALLNPVELRGAAEQADLFVIRARAVLVEARTMFINFARGITKTLGYRLPASASHRFAERVREAVPEALKPALLPLIEALQEITAQIEECDQKIETLARERYPETRWLKQVSGVGELTALTFVLTVGEPARFEHSREVGPFLGLVPRRRQSGECDPHLRISKCGDRYLRKLLVQCAQVLTGRFGGDCALRQWALDHARGSRTAKKRTVVAVARKLAVLLHRLWHRQEVFRPFPAAA

SEQ ID NO: 221666 - protein, 387 aa, unidentified
MILEAKVASNPAAMRKTFEKMPSSRIALETGTHSPWLSRLLTELGHEAIVAHARNVRLIGESRRKDDRLDAQALARLARIDPKLLSPIQHRSAQAQADLSVIRARYALVRARTALVCAARGLTKSFGDWIRGRSPKGFSLATSEALSPSLQVALAPLLSAFEAITARIRDYDAQIEKLAEESYPETALLKQVKGVGTLIALTYVLTLEDPRRFRKSRDAGCFVGLQPGRRNSGQSEPQMHITREGDSYLRMVLVQGAQHIIGAFRRRFRSAPMGTETGRAWWQERKETGHHRCCTQACSFTPPSLDQLRSIRAPSQHTKAKTRSSIALHKLERTTRNVEFRRLRPWPCPHSINDGVRGRLQKAAPTVTRTPICTEHMRRSPRVRMEG

SEQ ID NO: 221667 - protein, 340 aa, unidentified
MRRFEYNSRGVRKLIKYLTSLNPFIVSMEYTAGLERNLIFALQQHNIPCCCINPYNLKNFTKTMNVRAKTDLISAKLIAQYTKLYKTSPMQKIDKNLIYLKDLVKRHIQLVNILSSEKNRLSGSSLNKKHIMRFIKGVEKSIDENYEEIKKMVESNNEVKKKAEILKTMPGVGEYSSIVLAILLPELGYTTRRQISSLCGVAPYVNQSGKYKGKSYIRGGRKDVRNLVYMVTMAAIRYNPVIKDYYYSLISKGKPKKVAIVACMRKIICILNAMVRDNKVFMADYNKLQKEENKNEGKIIKKVEDQEKHNENIKQSKPLDFNRGVKDVVLVVKSDPIMVT

SEQ ID NO: 221668 - protein, 356 aa, unidentified
METAYDGRQIVGMDLHRRRSVLVRMTEDGRRLGTARITNSPQELRREIARAGRHPRVVLEATYGWYWAADTLEEAGAEVHLAHPLGVKGFSYRRVKNDERDSADLADLLRMGRLPEAWIAPREVRELRELTRYRHKLVSLRTSCKDQVHAVLAKLGIPVTCSDIFGKAGSAWLDGLGLPQPYAGKVTSLRQLTGELTTEITMLTQVIADLLAGDRGYQVIQQLPGIGPVLAAVIVAEIGDVTRFRNAGQLCSWAGLTPRHRESDTKVTRGRVTKQGSRMLRWALIEAVQRAGGDCVTGAVRNAIIARRGKETRNIAKVAAARRLLTLVYYGLRDGQIRCLPAPTPEPPETMPARAA

SEQ ID NO: 221669 - protein, 303 aa, unidentified
MASEDGALEARFANDEQGHGQLAAQLRELKPQLVVMEATGNFQLELSVVLAGAKLPMAVVNPRQVRDFAKALGFLAKTDAIDARTIARFGATVKPEAQPLPDDETLELEALMTRRRQLISMIASEKNRLQALFGPAKKSWAEKSIRDTLSHLVKQLSQLDKDLHKRIERSPVWRAKDDLLKSVPGIGKVTSLTLSIHLPELGTLDRKQIAALAGLAPLNRDSGKVVGKRRIWGGRASVRTALYMACVASLRCNPVIKTLYTRLTQLGRKPPKVALVACMRKMLTILNAMVRDHRPWNHALAGA

SEQ ID NO: 221670 - protein, 349 aa, unidentified
MKIIGCDFHPSYQQIAMLDQGTGEFTEMRLSHQAQGEEARKFYSALHGPVRVGLEASGQSQWFERLLAELGQELWIGDAAKIRASTDRKQKTDRRDAELLLQLLVEDRFPRIWVPTVSERDARQLLLHRAKLVRVRTQIKNQLQALALNQGVQRKWKLWTVAGRKQLESLALLPWASRRRTELLKLLDELDVSITELDEAVCQEANTRPEVRRLMTHPGVGPVTALAFALTLGPAERFRRGKQVGSYFGLIPSEHSSGGKQRLGHISKQGSSFVRGLLVEAAQSAVQREPQLRREYRRLSQRRCRALAKVAIARKLAVRLYWMLREKVDYAQLIRGSHAGQPESSRGRS

SEQ ID NO: 221671 - protein, 419 aa, unidentified
MSKDSVEIAAFIGLDWADQKHAITVQESGSDQRHRVTLDQTPEALQSWIQSLRVRFGGKPVAIAVEQKRGALIYALMHVEFFHLYPVNPVAVAKMRQAFYPSGAKDDPDDADLLLDILISHRRHLRVWTPDDALTRSIQLLTEDRRRVVDERTALTNQLTAALKMYFPQALDWFGELHTARACAFLQRWPSLQQLKQATPSSIRKFYKAQGYRGDEKREQLLANIKKAQPLTQDSAVLLSCSMKVHILVQQIALLTEAIERYDEKIAALFAQHDDSTLFGSFPGAGPALAPRLLSAFGSNRNRFELAAEIQQLYGIAPVTEKSGTGIWIHWRRACSKFMRQTFHEFAGRSILQSQWARAFYDQLCKRGKSHHAALRALAFKWIRIMFRCWKTRTPYDEALYFKSLKLRGSPLADELQAN

SEQ ID NO: 221672 - protein, 410 aa, unidentified
MEVLHPRCCGLDVHKDTVVACVRLVIDGKTVKEVRTFSTTTADLMALSQWLAENKCTHIAMESTGVYWKPVWHILADGKFELVLANAAHIKGVPGRKSDVKDADWVSDLLAHGLIRASFVPDTPTQEMRTLMRTRKQLSREQARHILRIQKTLEDANIKLDSVISDLMGVSGRKMIEALIAGQRDPAKLARLADPRVQASQETLRQALRGRVTRQHRFLLRLHLDQIDGLDAAIAKIDREVEAAIAPFRTAVEQVSSVPGVKNLAALQIISEIGTDMSRFPSDANLVSWACICPRSDESAGKRRSTRIRKGSPWLKTTLVQSAHSAVRMKGTYFQALFHRIRSRRGVKKAIVAVAASILTAIYHMLKDGTMFQDLGADHFDRRTKEQQKNRLVKRLAELGYAVEVAPLPT

SEQ ID NO: 221673 - protein, 410 aa, unidentified
MEVLYPHCAGLDVHKDTVVGCVRHIVNGTVRREVRTFKTTTTELLALSDWLAAEKCTHIAMEATGVYWKPVWHILSDGNFSLVLANAAHVKNVPGRKTDVNDATWLADLLAHGLIRGSFVPDPQTQEMRNLLRTRKQLTRERSRHVQRLQKTLEDANIKLDSEISDIMGLSGRKMMEALIAGESDPEQLARLAHRRIKAPPEALREALRGRITPHHRFLLRLHLQQIDAIDKVIADIDREVDAVVEPFRTTVLLLTTIPGVDELSACVILAEIGRDMSRFPTAGHLISWAGLCPRNDESAGKRRSTRMRKGAAWLKTTLVQCAAAATRKKASYLQAQFHRLRSRRGAKKAIGALAASILTIVYHMLLGGELYRDLGPDHFDRRAKATQTKRLVTRLQNLGYAVQIPPLAA

SEQ ID NO: 221674 - protein, 344 aa, unidentified
MDLGDRNSWYCVLDESGQIKLEQRVRSNAKALREVFGQLPHSRIALEVGTHSPWISRLLSELGHEVIVANARKVRLIGESRKKDDRLDAQTLARLARIDPGFLSPVKHRSAQAQADLMMIRARAGLVRARTALVNTVRGLAKSYGERLRGCNVRNMNPEKAEGLSPELQSALEPLLAGIEELSEQIREYNERIEKLAQESYPQVALLRQIKGVGTLIALTFLLTLEDPHRFRKSRDVGCYLGLQPGRRNSGQSEPQLHISKEGDPYLRTLLVQGAQHILGPFGVDCDLRRWGLKLAERGGRSGKKRAIVATARKLAVLLHHLWVSGEVYEPLHNSRRTAVAAAA

SEQ ID NO: 221675 - protein, 328 aa, unidentified
MVAKVSDVIVGIDVSKETLDAYCAKGQRKQGRTFANSPDGWKLVRGWLKAMGSKQVHVCMEATGRHSLGVALALHDAGHVVSVVNPAQIRDFARTKLGRNKTDKVDAALIREYTELFKPEPWTPPSPAMRRLCELQTMRAGIIRSRAEWKNRIGSGLGDSTATKLAAATIDHFTSQLEAIDRAIGETIEQDAELRGRRDLLLSVIGVGETLAASLMAEMPEPGVLRRSGEMVAYAGLNPSHHRSGTSIDRPTRISKIGNATLRSSLYMPALSAMRFNPAVAILVARLKSAGRLKPKQIVVAAMRKLLVLCFGVLKTGKRFDLAIAMPA

SEQ ID NO: 221676 - protein, 342 aa, unidentified
MKVKAVGIDLAKNVFQIHCVDEQGKVLLRKQLKRSQVASFFANLSPCLIGMEACSGAHHWARKLQSFGHSVRLIAPQFVKPYLKSNKNDAADAEAICEALLRPNMRFVAVKTIDQQALLALHRARQGFVKARTAQANQIRGLLSEYGLVIPQGIGQVTKRIPALIEDASDELPGMFRVLVGRLMAHMKALDEQVAQLEAQIKGWHRENEASRKLERIPGIGPLTASALVASMGQAKSFDNGRQLAAWLGLVPRQRSSGGKPTLLGISKRGDAYLRTLLIHGARAVIRAAQRKPARGGWLHELLKRRNSNVVAVALANRNARIAWALLAHERQFDANYAAVPA

SEQ ID NO: 221677 - protein, 448 aa, unidentified
MECDTFTALIKRRTLTMKFNQSNKQNQRISRISETTLVIGTDIAKHNHVARAFNYRGIELGKRCLFQNDEPGLLNLLAWAESIKQEHGLTDVLLGVEPTGHYWFPLFHFLKQHGIEVVLVNPHHVKKSKELDDNLPTKNDIKDAKVVAKLVIDGRYTQPQLPEGVYADLRVLMNQRDRLCGDLNRVKGRIHNWLDRFFPEYTQVFKDWEGKASLITLQNFPLPQDVIAAGETTIVATWKKNGVSRAVGPKRAELLDRKARKSIGLTEGATAARHELAMYLEQYAMLCRQIEQLMELVADLVEQIPGAAHMMSIPCIGLITVAGFLAEVGDLSGYDHSQQIVRHAGLSLRENSSGLHKGETTISKRGRCRLRALLFRAALTMVAKNPEFRALHMYFTTRRENPLKKKQSMIAISSKLIRVLFELGRKQKNYDASKVLGPHREAQLQAAA

SEQ ID NO: 221678 - protein, 419 aa, unidentified
MDVLYPRCAGLDVHKDTVVAGVRLAGDGPVRTEVRTFSTTTPGLLALSAWLAEHGCTHVAMEATGVYWKPVWHILSDGEFTLILANAAHVKNVPGRKTDVADALWLADLLAHGLIRPSFVPEPATQELRALLRTRKQLVREQASHVQRLQKTLEDANLKLSSVLTQIIGKSGRAILEALIEGEADPDKLLTLVQRGVKAPPEKLRAALQGRVTVRHRFLLRLHLRQVDTLDAAITEIDVEVDRDLDPFRQAVRLLRTIPGVSDLTAQVIVSEIGTDMSRFPTAGHLISWAGLCPRNDESAGKRRSTRLRKGAAWLKTTLVQCAWAGARKKASYLQAQFQRLRHRRGPKKAICAVAASILTAAYHMLRDGTFYQDLGSEHFRRAAPEVQANRLARQIAKLGFTCTILPAALPAAELEVSV

SEQ ID NO: 221679 - protein, 373 aa, unidentified
MSDYSTYVAMDTHKKQHRVALLYSKTGEIQEFTVKNTVKDITKMVKTVKKHSPGKVHFCYEAGVCGFTLKRRIEHLGGRCSVIAPSLVPTKRGDRIKTDRRDAKKLMGQFIAGQLTEVYPPDEEQEAARELTRCRQAAAENLKRIRHQLVKFLTRHGHIYCQGRHWTKKHFEWLRSLEFDLTDLQEVFELYYTELQHCMQRLASLDKQVQQLAERPQYRQVVGLLCCFRGIDILTAITVITEIFEFGRFESPRALMCYLGLVPSEYSSGDHRRSGAITKAGNKRIRRLLVESAWHYRHRPWVSRELKRRRKDQPQWAIDIADRAMARLHRRYWQLLARGKISNKVVIAVARELAGFIWAVLHEYKLRRTGHVA

SEQ ID NO: 221680 - protein, 403 aa, unidentified
MNAVGIDVSKGKSMVTILRPFGEIVSSPFEIKHTSSDIHSLIKLIHSIEGESRVVMEHTGRYYEALAHQLSAADLFVSAVNPKLVKDFNNDSLRKIKSDKADSVKIARYALDKWQSLEPYSITDELRAQLKVMNRQFHFYVKQKTAMKNNLIGLIDQTYPNANTYFNSPTRSDGSQKWVDFVSTYWHVDCIRKMSLNAFVEHYQNWCKRKKYAFNKSKAEEIYTKTKELVPVFPKNEITKHIIRQAVDQLNSTSVTVETIRTLMNETASKLPEYSIVMQFKGIGPSLGPQLMAEIGDVTRFTHKGTLTAFAGVDPGVNESGSYAQKSVPTSKRGSSNLRKTLFQVMDVLIKTMPQDDPVYQFMDRKRTQGKPYYVYMTAGANKFLRIYYGRVKEYLSVLPDPS

SEQ ID NO: 221681 - protein, 452 aa, unidentified
MVQRSGLTRGDRRRNERIEQLRLVVRPDRAILAIDLGEDKQVAALMDHDGRVLGRRTVTVKAFALGALLGWAAGQATRHGFAAVVVGCEPTGHRWRSVMQLADDAGMGFVCVQSLKVHRAREADDYTRDKTDHKDAVLIGKLIARLEGYLPERADVDWARLRHLGARRARLVTEATRCQQQIADLLGCCWPAALAAAAKPLDSTTWLACLSVVVEAGADLTAVAAAGLDAFTTACRARLVRFGVSRLYHRIVQAFFTSLTDPGGVAAQRPGALERAGLVLADWQHTKTRLADVEARMVGVLDALGLTGLVTSVPGLSAVGAAVILAETGDLSRFASARSVVKHAGLNPAENTSATFRGQTRLSRRGRPGLRVAAWRAVWGALPHNSVLHAKFTHLTRRDTDRLVAAQARAACAATLLRWLHAIVTRRQPFHPDIAAGLLRAGGRPTAAAVAA

SEQ ID NO: 221682 - protein, 344 aa, unidentified
MYFIGVDHHKQVSMMTVLDEDGRELRTERILNRRSHVQRFLEAYRPFTAVLEAGRASYVMADLLRELGGQVKLANPLQVKAIAHARIKTDKRDSRTLAQLLRADLIPEVYQRGEWNRGAQRVMRMRAYWVSKQTEVRNKIRALLAQQREEIRLEVEKRETGLFRPNGLQFLGQLALEAPDKLILDDLVQGHRQIQAHVKLTDGLVKTLYDEMEEAARIDTIPGFARTLSVLVAVEIADIRRFPRPADLHSYAGVIPSTHASGNRTFHGHITKQGSAWLRWAVVEAVYPAIRRDLVLLALYKRLARRKGANVAKIAVARRLLTIIYRVLSEKRDYIPELMKQSAA

SEQ ID NO: 221683 - protein, 341 aa, unidentified
MTQEMHVLGIDIAKHVFHAVGMDERGKIVLRKRWSRHDLIPFLAKLPPVLIGLEACGGAHDWARRCRASGHEVKRMAPPCVKPYVKSNKNDRRDAEAIAEAVTRPTMRFVPIKDVDQQDIQALHRVRERLISERTALVHEVHGLLHAYGMVIPKGVAKCRQAVVGKLESEKDQLTPLSQEMFWQLGEEFAALEKQLASDQEKLEALATTHPACQRLMTIPGIGPFRATALVAAVSDASAFKNGRQFAAWLGLVPRQHATGGKERLLGRSKRGDSSLRTLLIHGARATLRWVGRKTDRRSQWVRQLSERRGPNRTAVAGANKHARIVWALLTSHQAYEPAKG

SEQ ID NO: 221684 - protein, 441 aa, unidentified
MAMRRRDEEVVFPHAAGIDVGASSHWVAVPRDATEDPVREFGPMTDDLNAMADWLVASGVDTVALESTGVYWIPVFEVLEQRGLKVWLVDARQMKYVPGRKSDIQDCQWLQKLMSLGFLRAAWRPEGDVCVVRAVARQREILLAEQASWVQRMQKSLVQMNIQLTEVLTDVMGTTGQAIIRAIVAGERDPKALAKHRNRRVKASAEEIAKALTGNWRDEHLFVLCQALAMYDDIARHLTECDSKLQALLRALGQCNVDLGKAPRTGSKLRDQFDARQILANWAGVDLTRINGLGLTAVMKILSELGPDLSRFATVKHFCSWLGLCPGTKISGGKVLCAKTKHSANRVRQALKMAAMSLSHSDSALGAFYRRLCSRMDKPRANTAAAHKLARRVYFMLTRGEDFVDPGQQRYEEQQRQRSIAALKRRAAALGFDINPTPAPA

SEQ ID NO: 221685 - protein, 361 aa, unidentified
MTSMTHDGPRITGGVDTHGLTHHAAVIDSIGRHLADREFEATIRGYRYLLDWMRSHGDLVAVGVEGTGAYGAELARVLTAAGVTVFDVDRPDRKTRRMKGKSDPIDAYAAAMAVLSGRAAGIPKSRDGVVEAVRVLRLARRSAVKARTQAMNQIRGLLVSAPAMLREQVAGLDRAALIRTLARLRPGEDLSRPLAATRGSLRRLARRLQALDTEITELDAEIGPLVKQAAPQLLELFGVGPETAGQLLASAGDNPERMRSEAAFAHLAGVAPIPASSGRTHRHRLNRGGDRAANNALHTIVLTRMRFDERTRAYVERRTKEGLNKKDIMRCLKRFVAREVYRALTTTPTERITQTDLAPAA

SEQ ID NO: 221686 - protein, 339 aa, unidentified
MKEVTIIGVDLAKNVFQLHGAAADGSVVFRKKLTRVQFHKFMSGHPACLVAMEACGSSHYWAREVAQMGHDPRLIAPRYVKPFVKRHKNDTADAEAIVEAALRPTMRFVDPKTPDQQGGAVLFRTRAQFIRQRTEAINALRAHLYEFGYIAPVGVQNVKQLVEIVDADNSDLPALVRFSCRELIEQISRLTERLAVLDKEISRLSGEVARRLRTMPGVGPITALAVETFAPVMESFRCGRDFAAWLGLVPLQRSTGGKQILGKTSKMGQCDIRRLLIVGAMAVVGSSVRRGAPTGSWLEKMLARKPRMLVAIALANKMARGLWAMLTKNEEYRGPVMVG

SEQ ID NO: 221687 - protein, 387 aa, unidentified
MAKVDDLSRSLTALDQEETLICVVELSRSSWLIGGMVPGVERQPLKKLEPDAPGLMQVIKRWRDEAIRAERMITRIVLAYEAGRDGFWLARWLRARGVEVHVIHSTSVAVSREHRRAKTDRLDTAMLMRVFLGWLRGERGHCSMVAVPTIDEEDAKRPGRERESLVGERTRIINRMKAALARLGIRGFKPELRNAPARLETLRTPEEVMLPPNTLGEIRRDMARLDVIREQIKTIEQARLESIGRAPDQPPHAMVRLLARVIGVGIESADMLVREVLLRGFRDRRAVARYAGLTGAPDESGTKRREKGLAKSGNSRVRRGLIQLAWRFLLFQRNSALARWYLERTSGTKGARKTTMIVALARKLLIALWRLATTGLVPDGVMLRPAV

SEQ ID NO: 221688 - protein, 435 aa, unidentified
MTKYYNATVAGIDVAADFSVVTILSPTGDIYQKNVKFAHDLRGMTKLIKLLNKAEEEFGNSPKLFCECTGIYHLTLLHFLRSHQRDISAINPLISHSNKNSDIRVVKNDNRDSLTIAKIGKFQEPKTAMDHPEDFLHLKFLITEYYKRVDDLANQKKSFTNLLYVYYPGLQKAFKNTYCKSGLVFIEHYPTPDSLLAANKKDVIQLLNATARKGLKWAQEKVKLLHEIASEALELGLNYRAFDGKASRFVRSHHFLSEQIEEIREEVNAYIDEMECGPKFREDLRLLSSFKGLGTMTAITILSAIGSHDKFANAQQLGAFFGVDPSVNQSGKFKGDRMHMSKRGTAVGRRVLYSFALQCVKKNQDGRPLNATIHDYYNRQLKHKKKKVRLVAVMHKLLKYIFAVLRDRKPYVVRNPKVHKRMFLEHTAKTKKAAA

SEQ ID NO: 221689 - protein, 458 aa, unidentified
MAARKTKTKVKVKIKTGKIQPALTITHPNAAGIDIGSASHYVAVPPDRDEEPVREFACFTADLNALADWLTACRIDTVAMESTGVYWIPLFELLDARGFKVFLVNARHVRNVSGRKSDVLDCQWLQQLMTYGLLSGSFRPEDQICVLRSLWRQRDSLLKNQARSVQHMQKALTQMNIQLANVISDVAGETGQKILRAILAGERDGHALAALKNGHIVASEEEIAKSLQGNWRSEHLFALKQAMASFDFTGTQLIEVDQEIEDQLKSLETHDGKPGKPKRRGRSRNAPKFDLHAHLFRMCGVDLTRIDGIDVTTAMAVISETGTDMSRFPDAGHFASWMGLCPGTKITGGKVMSGKTKRCANRAAQALRMAAAALRTSQSALGAYFRRMCSRMDKPKAITAAAHKLARLIYAMLTKGEEYVDQGQEYYEKRYRDSMVKNLTQRAAKLGFTVVPAEQAAS

SEQ ID NO: 221690 - protein, 412 aa, unidentified
MESGYRLMVGIDWATEAHQECVLDSQGRLLEQRRVEHRAEAISAMIDRLIGLAGGDPASIAVAIEVPRGAVVEALVERGLHVFAINPKQLDRFRDRHTVAGAKDDRRDAFVLADSLRTDLSAFRRVHLDDAWTIQIRELTRIEENLNTEITRLANQLRDLLLRFYPQLLRLCPAADQPWLWALLKLAPTPAKAQRLRRSSIERLLHQYRIRKWTADQVRSELKTAPLAVAPGVTEATSAHVALLLPRLELLLAQHKLCAKAVQTALNEKISVEEQRREHRDVEILLSLPGVGRVVAATMLAEASQLLAQRNYHALRTLGGVAPVTRQSGKRWAVRRRYGCNHRLSNAFYHWARISSQCDPRAKHHYQTLRQLGHSHGRALRGVADRLLALLVAMLRDQTLYDATRAHAPIAA

SEQ ID NO: 221691 - protein, 416 aa, unidentified
MLGVGIDWAEDADQVVLGRPGDGVIESFSIAHRPEAVARLIERIGALEPDPAEVRVAIETKHGHLVEALVEAGYAVVPVNPDLVARRRGPARKKDDPEDARILCLLAMDRHQALRPLIPHGESAAELRSIARDDERAARDERRLLNRLRADLIAAFPEALAFAGEDLGAPTFLRVLARFQSAEAGRAATDAELEALFRQARHGWPDRAVRKLREALASSQFAPKTYLVRAKADSIRLAATQLLAIGAQRRAWERRMGELLAALSATGGDDQGQAIPDGEIYLSFAGLGTRLAARVAGEIGDHPEQFSSPNSLQCYGGKAPVTRRSGKSEFVVSCRLACNRHLANAVQLWAFCSLRCSGWAREFYDSQRARGKGHQAALRALGNRWLEILWHCLRTGQRYNEATHVANRNRALGRAA

SEQ ID NO: 221692 - protein, 449 aa, unidentified
MYKIGMSLRDVPRIVHAAQATRGRIVKCDKGESARRNSKEALIMQVLYGVCCGLDVHTKEITAALMTGDEVTVRVFGTTTGALRAMVDWLKETKCEHVAMESSGVYWKPVYNILEMEGIPSMVVNASHMKNIPGRKTDVDDAEWIADLLRHGLLRASFIPEKEQREYRELVRYRSSRTEERARELNRLQKMLEGMNIKLGDFISDINGKSAKRLLNLALENDELTDEQIKAASHGGLKASLDELRESLTGIITPMQRELVTMVIKVIKEQTEQIGEVEALIGKYTKDAYEEAAKKLDAMPGVGIKSAQAIIAEIGIDMSRFPTANHLCAWAGLAPGNNESAGKRKKARTRQGNKHIKKTLIQCATSAIKNKNSFYHAQYQRLVVRKGNNKAIVAVAHTMLIAIYYILLGNEFKDLGAHYYTQFNRDKKIKSHLKQLEKLGWTPPETTAA

SEQ ID NO: 221693 - protein, 302 aa, unidentified
MRKIAYLAMDVHANHSVLGEMDFNGNFKGNQDFSTSEQNIIKALSAIKAKEKYMTLEESNLAYWAAQVSSPYVTEVIPCDPKENALIYKSSIKKDKIDTRKLCRLLRLGELKRVYHPENDDRAIFKASALHYIDLRDQQIALKQKIKAMYRHWGIIDVAGQAVYSLEKRHDYLSQVKQLHIRNQLNRLYSLMDETESMQNKALKTMIALGRKYPEIKKFKKIPGIGDISAHVFDAFIQTPDRFTKRSKLWRYCRMGVTDRSSDGKPLGYRRLDRSGISEIKGLIYQAWMSAMRATMKLNNFI

SEQ ID NO: 221694 - protein, 439 aa, unidentified
METMSKSIAPEPEWAAFVAIDWADQKHVWALAEGGSQRRERGELAQTPESVEVWAMDLYRRFGGRPIALCLERKQGALVAMLAKYPHLVLYPVHPKTAAQYRETFCPSGAKSDEGDALLLLDLLLHHRQQLRQLLPDTVETRLLQSLVETRRRLVNERTRQSNRLTACLKIYFPQVLSWFDDITSPLVGAVLERWPILQALRRVHPGTLRKFFHQQNCRDEERIRERIEGIREAMVAVEDEAILEGQSRKGQILVAVIKTLREQIAILDKRIAEVVATHPEAKLFGSLPGVGPVLLPRLIVAFGTQRERFESAEEVARYSGIASRFPVARPKLSACVSLAPQFLRQTFHEWADHSRGKSEWARIFYDVHREQGNDHHATLRSLGFKWIRVAYRCWKNRQAYDEQIHIRSLQRRNSPLAGAFAPATRKEWKPVAGFQKLS

SEQ ID NO: 221695 - protein, 384 aa, unidentified
MDTAATRTRKYSVEGPVLYLAFELGNREWKLGFSIGFGQRPRVRTIPARALEGLQREIELAKKRLGLPETARVVSCYEAGRDGFWLHRYLEEAGIENLVVDSSSIEVNRRFRRAKTDRMDVAKLVDQLMRYDRGEKKVWHIVRVPGVEAEDQRQLHRELADLKAERTQHINRIKGLLAGQGVRLGKIGAGFLKELAAIRLWDGRSIPEGLRARLEREYERLQFIQGQLHELQAERVEAIRRSEKPEVEKVRQLLRLKGIGLNSAWVNTMEFFAWRDFHNGKEVGGLAGLTPTSYQSGDSSRERGMSKAGNRHVRALAIEIAWGWLRYQPESELSRWYQRRFGDGSSRVRRIGIVALARKLLIALWRYLETGLIPQGAVLKTRLI

SEQ ID NO: 221696 - protein, 351 aa, unidentified
MNILAMDLGKSKTVFCFYDSKTGKHKYGKAKTTPQQIHDLLAEHRPDRVVFEICCLAGWVYDICSFLKLDTEVANPNTQGWRWKNVRHKNDRSDALKLAQLSSMNQLPVVHMPRRSVRQKRSIIQYRQSLVRQRTRIKNSIRAILNREGQSMPNGMRGWSMSSIKRLKGISLPLEQFGIDTLWRGQLGVELEMLEKVASCIAKVEQKLDSLGKEDKDIKLLQTACGVGPRLAEALAAFIDEPDRFETGKQVGSYVGLTPRQYQSGDIDHQGKISGAGNKVLRSLLVEVSCLGLRYNKWMNETYHRILRGSQSRKKIAITALARKLLVKCWAMLRDGRPWIEGEIEADKEAA

SEQ ID NO: 221697 - protein, 443 aa, unidentified
MPHVRALTRGDRRRNERLTRLRSIVRREFAVVAVDLASAKQAAVVADHDSRVLGRRMFSGDAWVIDDILDWAGPVAAKAGFAGVVLGCEPTGHRWKPLLDRARARGVELVCVNPMLVHRGREEEDFTRDRSDFKDATIIAKRVAELRCYVPYVLEGHWCRLRHLGARRADQLVAAGSARQRLRDLLECAWPAVLSTASKPLDTLTWRVAMAVSTDPARIMAMGFDAFAAAVRDELPRWGGSRRNLRILRAIFDAARTPGGVATEQAAACERAAYALDDWHHALGQLADVEARMIEVLDTLELSTLVTTITGLSVVGAAAILAETGDPARFDCARTWVKHAGLCPRANESGNFHGITTVSRRGRPGLRTAAWRAIWGALTHNPVYTARYTHLTTRETNPLRPGQARTALAAALLRQLFVVVTRRVAWDPAVAAGTTKEVAPQAA

SEQ ID NO: 221698 - protein, 354 aa, unidentified
MKHLQLKDGDRLRRQCIGVDISKKKFTFCLCQSTEQDLHFYTKPKEFDNSETGFRHLLEWSGKEVDSSVPYSFLMETTGCYHESLALFLARKGMTVIIVHANKAKNFARLNGQRTKTDPVDSRMLATMGCDTPGLKPWPIPDEKYLRLRDMSRLSEQLEKTRTQVLCRMEAVTHSGYVTKSVLRAHKSLLRSIEKVQVANEKDMSELVNGDPVIKAGVDNMESIKCIGKKTAVLVTAETLGFHQMTSAKQVASYAGLDVKKEQSGDAEKKGHMTKRGNAHLRAGLYFPAMVASWSNPQLMEDYKRICASHPQSKNIALVALERKLLCLMYSLWKSGKEWDPEYGQDKKQEEAMS

SEQ ID NO: 221699 - protein, 293 aa, unidentified
MAEQVVVGIDVSKAKLDVAILPSGEQFTVSNDRPGVGQLVQRLTQLGPIRVVLEATGKLEHLAASELAAAGLPVAVVNPGQVRHYAKARGKRAKTDKIDARLIAEFARDLQPEIHPLPDAQTQALAALCQRRNQLLEMQQMENNRLERAPRASQKSIKAVVRFLKRQVEQVEKEIDESIKKSPIWQAKRKLLETVPSIAQVSSSTLLARLPELGQFSRQKICALVGVAPYEDDSGEWHGRRHIAGGRARVRQVLYMAALSAVQYNPVLRDYYQRLLARGVEKKRPSSPSCARC

SEQ ID NO: 221700 - protein, 316 aa, unidentified
MITETTPACHPIWVGVDVGKESLAVYITAENKGTTIPNKAAAIKDFLRRNPNVTLVLESTGGYETEAITLASKAGHTVYRVNARRVRAFMESVGIYAKTDAIDAKALADFAVANAQRLQPFIVPTPEMKKLKQLARRRAELISMRTQETNRLKAPDNACLQSGIKAMLKCLQSQIEATEQQITDLTQSSETLQQKIDVLTAVKGVGQVTATNLLVAMPELGQLDGKQAASLAGLAPFPRDSGKKKGYRRTRGGRVDVRNALYMAALTASRSNQELKTFYIRLIKNGKRPLQALIATARKLLVILNAKLRDAALKTA

SEQ ID NO: 221701 - protein, 393 aa, unidentified
MMISVGIDVSKDKHDCFIASSEDEVLADVFTIPNTLEGFNCLLQRIRNCATPQDKIKVGLEATGHYSYNLLGFLLDNGLTTYVLNPLRTNLYRKSFSLRKTKTDRVDARTIASMLLSDVGLKPYTDTAYHNEELKSLTRYRFDKVKERAKLKSSIARLVCILFPELEKLVPSLHIASVYALLEEFPGAKQIAAAHLTRLKALLETASKGRYKRDMALEIREVARSSIGSRMPAKSLELQHTIRLIRELDTEIAEIEEQIQSIMDELHSPITTIPGLGFRMAAMILAEVGDFTRFDSPDKLLAYAGMSPSTYQSGQLKNCYPHMEKRDSRYLRYALYNATKYVCHWDPAFAAYLAKKRAEGKHYNIALSHAAKKLIRLIFALEKSRQPYSSSAA

SEQ ID NO: 221702 - protein, 315 aa, unidentified
MEDSIAQTAGVDISKDTLDVHLHPAGATRRFANDARGFAALIAWLGGFAISRIVFEPTGPYHHAFERRLGKAGLPLVKVNPRQARRFAEAIGRLAKTDAVDAAMLARFGALLEPPVRPMASQSLDEMKELHIARRALVKDRVAAKNREHTRRSPLLKRQAAERLKQIERQIAAIDAALRSIRDADPVLKARFEILHSIPGIGEATALALLVEIPELGTIENKAAASLAGLAPMARDSGQARGKRFIRGGRAQLRQALYMPALVAVRFNDAMKAKYQAFIAAGKPPKVALTAIMRKLLILANALIRDGRLWTQKLA

SEQ ID NO: 221703 - protein, 424 aa, unidentified
MSKKKGILAGLAALYARVCGLDVHKKVVVACVRILDPKDGTVQSTLRKFGTMTADLIELRQWLAEQRVTHVAMESTGVYWQPVFNLLEGHFQTWVINAQHIKKVPGRKTDMKDAEWIAQLMQCGLLRPSFIPDRQQRELRDLTRQQTKLVQQRNAVDNRIQKVLETANIKLGSVASDVLGVSGRKMIEALIGGEKDVTVLAELAQRKLRDKIPQLQRALEGELTDHHRFLLRQLLGQYDFLEKEIASVSERLGAVAPPSFRAAVEQLDAIAGVGERGAKALLAETGTDMSRFPTHKHFASWAGRCPGNHESAGKRRSGKTPAANRHLDAVLTEMAHAAVRTKNSYFKAQYHRLAGRRGKKRAIGAVKHSLLVTVYFMLRDNKPYKDLGVDYFDKLNPQQRIRYHVRKLQELGQEVELSSTADAA

SEQ ID NO: 221704 - protein, 362 aa, unidentified
MIYSLGADLSKEEFSVCLLRYKLNDQSHHVIARNVFANRPGGHKACLSWLRRHAGQAGSLRVSMEATGVYYEPLALFVQEQAPDIHLSVVLPSKAKRYLQSRGLRSKTDKIDAYGLALMGAERVLAGWAGIDPFWRNLRQLTRTRTSLMDQRTQLGNQWHALAHSGHPAGEAGEALRQTIAAISEQIEGLTQRIYRHLRSRKDLAGQVERLRSIPGIGLLTIATVLAETNGFERFSSLSQLISYSGYDVVIRESGKWAGKPKISKQGSKYIRRAMYMPASVVVRSAKGPIYALYQRQVGTHNIKMKGHVAVQKKLLTYMYTLWNNRQWYDPQVIKGQQRHHQQKIALPEGKATVDTSHAKAS

SEQ ID NO: 221705 - protein, 430 aa, unidentified
MKSNTQNAKIEAITEKTLVLGIDVGSETHYARAFDYRGIEYSKKPFKFSNTEAGFVTLKEWILDLKERHEKDKVVPGMEPTGHYWFNLGKFLQDNEMKPVLVNPHHVKKSKELDDNNPTKNDRKDPKVIAGLVREGRYMIPYLPDGVYADLRTASNIRFQLQAELTRIQNRISRWFNVYFPEYKTVYGKPDAKSGMLILKAAPFPEDILTLGIDGVNQIWRDAKLRAVGKARAKILIEAAGHSVGSKEGAVSARMEIRMLLEDYESRNICLQEVMTLIEGLVKQIPMAEKLLEIKGVGIKTVSGFLAEVGDISRFNTPKELQKLAGLALVESSSGKHKGETTISRRGRKRLRYLLFEVAMSLVAKNPEFRELHNYYTTRRRNPLKKRQSLMAMAAKLIRIFYAMLTKGVDYDPKKMVGDIRRPVVYLPAA

SEQ ID NO: 221706 - protein, 370 aa, unidentified
MATTVRYVGLDVHKESITIAVAESDRSPAQEYTTIANDWPKLLKALRRLSPTLTSLRCCYEAGLTGYELYRRMDEAGIDCMVVAPALVPKQPGNRIKTDRRDAKKLAHFLRSGDLVGVFVPDEECEALRDLERSREDAVRAQRVARQHLQNFLLRNGRPYHGTQWTWQHSDWIRKQKFDNPMLQRVLCDYIKVSEDAAARIKQVTADLEELAQQTSLWPLIKALQAFRGIQVVTAASIAAEIGDFRRFESARQFMAYLGLVPSEYSSGDGNRRGRITRCGNRWVRTLLVESSWHYRLPPKMSRQLRTRNEGVAPGVQRIAWKAQHRLHKRLYRLTSRGKKPQQAVVAVARELAGFLWAVGQEQELLADAA

SEQ ID NO: 221707 - protein, 337 aa, unidentified
MMYCGIDLHSNNSVVAIIDDADRVVAQKRLPNDIAKIVGFLARWQGELVGVVVESTYNWYWLIDGLQDAGLRVHLANTVAIKQYDGLKHSGDETDARHLAHLLRLGILPTGTILPREHRAVRDLARKRMQLVHCCTAHVLAVENIMARQLGGRMSSNQIKRLTGDAIDEMALAADVSLAIKTNVAVIATLQAQIEILEKRLQQRVKPRAQYGFLTSVPGIGQALATVILLETGPIDRFADVGNFASYARCVDSVHTSNRKKKGEGNVKNGNKYLAWAFVEAANFARRICPEAKRFHERKKAKTNNIVATKALAHKLARACYHILKEGKPFDATRCFA

SEQ ID NO: 221708 - protein, 340 aa, unidentified
MNVKTIGMDLAKNVIQIHGADGKGNTVLRKQLKRAQVLPFFANLVPCQVGMEACGSAHFWARKLVAMGHTVQLIPPQYVKPFVKRNKNDAADAEAICEAVVRPNMPGVPIKTVEQQAILSVHRARQGFVKARTAQANQIRGLLAEYGLVIPVGIRHIPSCVALIIDDDENELPMSFRHLLQTLVEHFKALDEQVGQLELEIKYWHRDCAASTQLATVPGVGPITASALVASIGDAKNFKNGRQMAAWMGLVPRQHSTGGKTVLQGISKRGDSYLRTLLIHGARAVIRVSEHKIGADPWLKALVARRNKNIAAVALANKNVRVIWSMLTHERGYVPNYVHA

SEQ ID NO: 221709 - protein, 397 aa, unidentified
MHQIEIQNENEKVMWRGQISNNRKGFDTLLEKLRTIERSNRDKVKGIFMNPTGNYHIPLHHFLESNGYMVIYVDPRVTDYARKMANLGKEKSDTVDASMLASAPWKDKKAFDRHVHRKDAVSGLTRLHQSVTRNITRITNIIGSDLACVFPEFTDMFSDIGSKTSLAILDQFTIPSLIVKAGTDNLLNVMQKTSRNHYRKDDAQKLVELAKESVGIPDTDCVYAFRIRQNVARLISEKKQLKEIEEKILDLTKNDENVKRLDDMKGIGPMNATAIVSEIGDIKQFDSALKLQSYGGKAPMMSGSGGKNKATGISKISNSYLSNSVYESARSLVNHKNEEFLEIYEREIEKGKKKKQAYIVVARRLLYYVYSMMKNEKPYRVRLPKREEGEGDASTGT

SEQ ID NO: 221710 - protein, 350 aa, unidentified
MEYIAFDSHKRYTFASVEEHTGAILRDTRIEHRRGAVKEFLSEWKAGTPVAVETIGNWYWIVDEIEKAGMVPQLVHARRAKMMLASVNKTDKLDCHGLNRLQRTGTLPTVWIPPSQIRDLRDLPRTRMVLSKERTRLKNRIHATLAKYAISIEGTSDLFGKRGREELKKSLDLLPPHSRFSVERLLETLELVQKQIDLFEERMKETFVTSRELEILQTLPGVGFILAVVIFLEVGDIGRFPGASRFAAYSGTTPRVSSSGGKTRYGQLRPDVNRYLKWAFIEAANVICLNHRRRPYRHVSRLYLRIRQRKGHQKAVGAVARHLAEATYWILKKGEAYREPQKKTVSSTKG

SEQ ID NO: 221711 - protein, 343 aa, unidentified
MEVMIGVDPHKGSHTATMLDRTERELTRIKVRAGRRQVEQLLEWANGHEERTWAVECAGGMGYLLSQQLVAAGETVLDVPATLASRVRVLGTGQSTKTDPNDARSVAVAALHAPSLTMVRAADHVTVCRLLAKRHTDAARWRTKLCCRLHALVGELVAGGIDKEVVVNQARSLLDDIEPDGVAAVERHRQAVELVAEIEHLDVVLQDSRTRITAAVAASGTTLTEVFGVGPIVAFMLIGYSGDPTRFTTASRYAAYTGTAPIEFSSGGRVTHRLSRRGNRRLNHALHCAAITQIRHRHSPGRGYYDRKLAEGHTPREAIRSLKRRLSDVVWRHLVADARRVAS

SEQ ID NO: 221712 - protein, 381 aa, unidentified
MGKITRYVGMDVHAATIAVAVVEGRGMPRSLGEIPNRPEAIRRLIGKLGEPSRLRVCYEAGPTGYVLYWQLTKLGVHCEVVAPSLVPVKAGDRVKTDRRDAEKLARAYRSGDLTAVFVPSAEHEALRDLVRAREAAKTDELRARNRLGKYLLRNGQYAPSGCRAWTLTYWRWLRTVKFEHAAQERTLLEYMVEVEHQQQRVERLDGAIDEAVQSAPAHMKAVIEALQALRGVAKLTAVTLAVEVGTFRRFERATQLMSYTGMVPSEYSSGEKSRRGAITKAGNNHLRRVLIEAAWHNRHRPCLSNRQRAVHKHLDPGVIKIAWDAQLRLNARYRRLSAKGKPAGKVVTAVARELVGFIWSVGTRVELELERATGTASTNAA

SEQ ID NO: 221713 - protein, 467 aa, unidentified
MAKVQKSRSKSKSRAQQEHRAKLKPPDGTLGLQVIHPKAAGIDVGNEEHWVAVPPDLDPAPVQSFGCFTRDLQALANWLVQCGIETVAMQSTGVYWIALYDILSERGIRVFVVNAQDTKNLPGRKTDIQECQWLLKLHAYGLLRNSFRPEEEILVMRTYWRQRQQQIEDASRSIQRMQKALTQMNVQLANVISDISGTTGQAILDAILAGERDPKVLAQYRDPRIKASEASVAKSLEGNWRPEQLFILRQELEIYRVYQSKIADCDKQIKKHYATMEQKADPQQLPPVRYNKRPHGNIPEGFDLREQLYRTTGVDLTSIDGINVLTAQTLIAEVGADMSSFATEAHFVSYLNLCPKNKISGGKVVGREKRKTKSRAGLALRLAAGTLLKSESYLGAQYRRLRTKLGAPKARKAMAHKLARIAYRMLKYGQAYVDQGKEFYEQKYRHQQITMLTKKAAALGLQLTHTA

SEQ ID NO: 221714 - protein, 388 aa, unidentified
MNKIIYIGMDVHSSNFTLCSFEPGYGFEADKIFGQTQIKEDIFNSTVKYINKLKSMRPDVDVICGYEAGCLGYNLHRKLKAKEIESVILAPTTMAVARNSSKKKNDYRDAITIAKCLASSAYKAVYLPDEKDEDVRDFIRMRDDHKTALKQIKQQLNAFCLRHGHHYDKTKWTGLHLNWLRKLELSKLQRETVEEYLATYETLTSKIAALDVRIEDIASEERYAEKVNKLKCIKGIKTHIALSFVCEIGDFNRFKSADKFSGFIGLVPGECSSGNTERMLGITKAGNRHLRRLVVEISNTYRRGTVGRKSAALKERQKDMPKDVVAYADKATNRCQRKYQRMMFKGKNSNQAVAAVGRELCCFIWGMMTGHHSRTAQAEASVYRSELD

SEQ ID NO: 221715 - protein, 353 aa, unidentified
MKSRMEFKMQSPVVIGVYIGKEVFHLVGLNTDGTIAFRRKIRRSSLKDVFEQLPPCVVGMEACLSAHFVSRTLRTLGHAPRIIPAIYTKPFVKGQKNDYNDAEAVAEAALRPNLRVVQEKSQNQLDLQACHRVRSRLVSRRTATINQIRAFLIEQGIAVRAGARALRNSLFAILENRKDEISPRMVKLIHGLYEDWCCLDQRIETVTGEIEELSRIEPKCQRLMSVPGVGPLISTALVAAIGTGEAFDRGRDFAAWLGLVPRQYSTGGRSILGRISKRGSRYLRTLLIQAARVLLMRPHNWNRFSFGPWLRAASERLHRHKLAVALANKLARIAWSVLRHDKAFDTHLEIAAI

SEQ ID NO: 221716 - protein, 374 aa, unidentified
MTEHSEVYVAFDSSKLRHAVAIAEAGRSGELRYFGEIENSVAAVAKLVRKLSSKYARLTFCYEAGPTGYGLYRQITSLGHECLVVAPSLIPKKVGDRVKTNRRDALNLAKLLRSDELTAVWVPDERHEAMRDLTRARGTAVEDARAKRQHVSAFLLRQGLHYAGKKNWSQAHRRWLCGLKLAHVEQRVAFEEMLLAVRQAEERIVRLEEAIRAAVPEWSLREVLTALMAMRGVDLVSGSAFLAEIGDLSRFRTPRELMAYLGLVPSEDSTGDTIKRGPITKAGNGRARRILVECSWSYQHPPRVSRDKQAKVDAAPPAVREIAWKAQSRLCRRYRALLKRGKRKTVAITAVARELASFIWSVSRHATTAPVAAS

SEQ ID NO: 221717 - protein, 402 aa, unidentified
MNAVGIDVSKGKSMVAIMRPFGEIVSTPFEIKHTASDINSLVELINSVEGESRIVMEHTGRYYEVLAHQLLEANLFVSAINPKLIKDFDNDSLRKVKSDKADAVKIARYALDKWQNLKQYNVMDELRNQLKTMNRQFGFYMKHKTAMKNNLIGILDQTYPGVNTYFDSPARSDGSQKWVDFASTYWHVDCVRKMSLNAFIDHYQNWCKRKKYNFSQSKAEEIYGKAKELVPVLPKDAITKLIIKQAVDQLNSASTTVESLRTLMNETASKLPEYPVVMAMKGVGTSLGPQLMAEIGDVSRFTHKSAITAFAGVDPGVNESGSYEQKSVPTSKRGSSDLRKTLFQVMDVLIKTHPEDDPVYQFLDKKRAQGKPYYVYMTAGANKFLRIYYGRVKEYLSSLPES

SEQ ID NO: 221718 - protein, 409 aa, unidentified
MEIVHRQCGGLDVHAKTVVACARHVDAADRITREVRTFGTTTAELLALADWLQAQGCTQVVMESTGVYWKPVWHVLEDTCTLVLANAQHVRNIPGRKSDANDAVWLADLLAHGLIRGSFVPPAPVQALRDLTRTRKQLVREGARHLLRIQKVLEDANVKLREVVSDLRGTSARAILKALVAGETDPVRLVACTTGQLRATPAALQAALEGHVTAHHRYLLRLHLVQLDALDAAVRDVEARIGATLGPLAVAVERLTTMPGVSQTLARVIVAEIGTDMTRFPTAGHLVSWAGLCPRLHESAGKRLSTRTRPSAPWLKTNLVQGAWAAIRARDRYFHAQFLRLKSRRGPKKAIVAVAASMLTAAYHMLRNEVPYRDLGADHFDRRDKTKLTNRLLRRLKELGVEVEVRPAA

SEQ ID NO: 221719 - protein, 336 aa, unidentified
MEDYRWFMGIDVSKSKLDITLLEGSEKRHYSVIENNEKSIKLFIKELTAIAGFSLKHCLICMEHTGIYNAHLLTISKAQAWNLCLESAIQIKQSGGLQRGKNDIIDSYRIALYAYKNKSFLKLWEAPREVILKLKKLSGVRERLLQAKVQLERTLKEDKHFQSKHLNTFLGKCCAKSIKAIEGDIKRTEDQIQMVIDADDELSRLFSIIESVPGVGRISATEIVITTNEFKNIHDARKYACYAGVAPFEHTSGSSIRGKTRISKKANLQVKTRLHMASLVAAMHCEELRLYYQRKVAEGKNKMCVLNAVRNKLVHRIFACVKENRLYEKNFAPKLV

SEQ ID NO: 221720 - protein, 356 aa, unidentified
MNEGSWVGLDVHARSVVAGVIDAGSGEVRSLRVPAGCDATVAWLTTLPPPVRVVYEAGPTGYRLARACAEAGISCVVAAPSKIRPAADRVKTDRRDAERLARLLRLGEITPVRVPGPEEEAARDLVRAREDARGDLMRARHRLSKLLLRHGAVYDATAWTRAHDAWLRRQRFQSGPLAIVFDECYGRMLDAKTRRDALDKAIAELAATPPYVDVVERLVCLRGVSTLTAFALTVELGDWSRFRPESLGPFLGLTPSENSSGERRRQGGITKTGNTHARRLLIEAAWHQRRPPRMSVTLERRRTGKSLAVRAQADRSARRLHGRWHALEGRGKPRSIVVVAVARELAGHCWALATME

SEQ ID NO: 221721 - protein, 337 aa, unidentified
MKYCGIDLHSNNSVVVITDEADHVLYSKRHANDLSQILAALAIHRAELSGVVVESTFNWYWLVDGLQDAGYRVHLANTTAIKQYDGLKHRGDESDARQLAHLLRLGLLPQGHIMPKAARAVRDLARKRMQLVQQRTAQILSIENSLSRHTGGRISSNSIKCLQETDLKQMQLGDMQTLGLKANVAVMQALQVQIDSLEKVLAKHCRAEPGYRLLKTVDGIGDVLATVILLETGSIERFADVGNYASYCRCVGSAHVSNGKKKGEGNTKNGNRYLAWAFVEAANFAVRYCEAARRFYQKKKAKRNSTVAIKAVAHKLARACYHMLKTNKAFSVERCFA

SEQ ID NO: 221722 - protein, 363 aa, unidentified
MSHYRVGCDAHRRYSQFAVLDQDGQLRQQTRVDHEPGAIQAFLESLPEGTPVALESVGNWYWIADEIEAAGCLPLLTHAAKAKVMMGNVNKTDKLDAKGLAKLLHLDSLPTVWLPPGEIRDERELHRTRMALSKLRTALKNRIHATLAKYGITSTEHSDIFAGAGKVWLKTTLSRLPPETGRCVTQEIEALDGLQQQITQLEERIRERIALTSSIQLLKTLPGVGDILAIVIEREIGSIDRFCTSGQFTSYAGLVPTVHASGGKTRFGHMRKPSNQYLKWAFIEAANVVVRHRHHPAWKVTYVCQIYDQVSQRKGHAVAVGAVARHLAEGAFWILKRQQPYRPPALRQASPKQVRGRAQLVST

SEQ ID NO: 221723 - protein, 341 aa, unidentified
MKQFIGLDVSLKDTFISVREEGRRVWRGKCPSDPKQIAELIRKRAANAERVVFETGPLSVWFYHALTLEGLPAICIDARHAKAALDMAPNKTDANDADGLAHLAEVGFYREVRVKSFDSMLIRTLVAARSQLLKMTTQLSNQIRGLMKTFGLIVPKGGGRVFEDYVRSLLATNAGLEQIIRPLLDVWRSVRARVAELSKQLVASARASEQCRLLSSIPGVGVVTASSFVAAIEDPENFRKSRSVGAWIGLTTRRYQSGEVDYDGHISRRGDNHLRGLLYEAATVILTRTRADSVLRVWGLKLREKIGFKRAAVAVARKLAVIMHAMLQTGEIFEPSIAAKA

SEQ ID NO: 221724 - protein, 324 aa, unidentified
MQAQTAAPDPLTNSAFIGIDVAKAFCDISVHGDNSHWRFARDEHGLNLLQEKIASLRPALVILEATGGMEMPVAATLAVAGIPVAIVNARQVRDFARACGKLAKTDAIDAAVLAHFAFAVRPPAQSLPDEEAQQLRAFYERRRQLLDMFRAESNRLEAASTIVQKSLQEHIQWLTERINDTDDGIKALIRHSPIWREKDDLLQSVPGVGKVTSATLLAALPELGHLSRQQIAALVGVAPFNRDSGILRGRRAVWGGRATVRAVLYMATLTAARCNPPVRAFYKRLREAGKPSKVVLVACMRKMLTILNAMMKQNTHWKSESVAV

SEQ ID NO: 221725 - protein, 423 aa, unidentified
MSYRIAGIDVHKKMLAVVVSDVEVDGEYQFERVRYSSSPEHLRFLAEWLITQQVEEVVMESTAQYWKPVWGALERYWKPICQEREGAGPMSGTLHLAQAQSNRGRRGRKKDFPDAERLVKRLVADELVLSFVPDTEQRLWRTVTRRKYQLTRNHVRLQNQLEALLEECHIKLSSLVSDLLGASARRMLKALAEGETNPVALAAMADKNLRATQAQLCDGLGACTELKPIYRRLLKMFLEELQFIDQQISKLDQELASLLSRHHDAVVHLAEIPGLGVDSAQQIIAEVGAGAATFPSAKQLSSWVGACPGEEESAEVSKSHRSPKGNRHMRRILNQAANAAAKSKGTIFEIVYRRLVSRLGHNQTIGAIAHRLCRLIWIILHRGVRYEERGPSVSAKTRRHRTNRMIRELRNLGYRVEPLVNTA

SEQ ID NO: 221726 - protein, 415 aa, unidentified
MDVIVDRCAGLDVHKKTVMATVRVPDGRGGRSQVTREFATFAGRLVELREWLVAEGVTQVAMEATGVYWRPVWHVLEEAPGLELLLVNPAHFKNLPGRKTDVKDSEWLAQLLECGLLRGSFVPPADIVKLRDLTRYRSKLIGERVRETQRVQKLLEDAGIKLDSVVTDVLGVSGRQMLEALIAGERDPEVLAEMARARMRSKIGVLREALVGRFNDHHALLLRMHLDHIDELTAMEAHLDGEVDRLMAPFAEAATRLLSIPGVGKRVAEVVVAEAGIDMSRFPTDKQLASWAGLCPGHHESAGKRRSGKARKGNPALRTALCEAAWAASHGKDGYLPAQFRRFKRRFGTRGETKAIFALAHTMIVIVWHVLADNVGYDDLGADFFDRRADSQARQRQLVRQLEALGHKVTLEPAA

SEQ ID NO: 221727 - protein, 481 aa, unidentified
MSKPTQHSKKPGEKKTAAGQGKRSRKKKGMCLEDRPILEPNAAGIDIGAREIFVAVPPDRDADPVRVFSTFTEDLEEMAKWLVSCGVTTAAMESTGVYWIPAYDVLEQHGVKPCLVDAHGMKNVPGRRTDWHECQWIQFLHSVGLLRAAFRPDGEVCTVRSLMRHRSDLVQMTNQHIQHIHKALTQMNVQIHHVIDDITGVTGLAIVDAIVDGQRNPLQLAKLRDPRIKASEETIVKSLQGTWRPEHLFTLKQSRQMYRHYQDQIAACDEEIEKLLVAFQPRVDPAEKPLPPDRKKRKRGRQKKNAKTKQGFDLRTESYKIFGVDLTQIPGLMAMVLTLFSEVGRDMSRWKTAGQFVSWLALCPDNDITGGRVAWRGMRRVHNRAGELFRMAAYSLHHDKSPLGDYLRRMKSKLGPTGATTATAHKIAIIFYTMVKKQVEYDATLWAERDTQREKRFEAKLKRQAQQLGYKLVPIEEKPAA

SEQ ID NO: 221728 - protein, 410 aa, unidentified
MEVLYPHCAGLDVHKETVVACVRHMTDGVVRREVRNFKTMTTDLLALSAWLASEGCTHIVMEATGVYWKPVWHILSDGDFALTLANAAHVKNVPGRKTDVNDATWLADLLAHGLIRGSFVPDAQTQEQRGLLRTRKQLVREKASHIQRLQKTLEDANIKLDSAISDVTGVSGRAMIEALIAGEIDPVKLAGLAHRRIKTPPETLREALRGRVTKHHRFLLQLHLRQIDALDAAIAAIDQEVDADVEPFRGAIAQLTSVPGLRELGACAVLAEIGTDMSRFPSDRHLISWSGLCPKNDESAGKRRSSRMRKGAAWLKPTLIQCAWAAVRKKDSYLQAQFYRLRARRGAKKAIVAVAASMLTAIYHMLKDGTVYQDPGATFFDRRANRAQTKRLVARLHSLGYDVQLTPQTA

SEQ ID NO: 221729 - protein, 445 aa, unidentified
MKQKKILKGTWKKLPKHLGSINQHAAGIDIGSRSHFVAVPEGTDEQPVREFSTFTGDLERLAEWLAVCGVTTVAMESTGVYWIPVFEILESYGFEVRLVNARHVKNVPGRKSDVLDCQWIQQLHTYGLLRGAFRPAEQVCTLRTYVRQRAMLVRSSSSYIQRMQKALAQMNLQLHNVVADITGLTGMRIIKAILAGERSPAVLAAMRDKRCKNSEATIALSLKGHYRPEHLFSLRQAVELYEFHQEKIADCDRQILEQLSCFDSQDAPQGTPPADVGEALQRMSGVDLTSIDGIDTTTALKILAEIGTDMSRWKTAKHFASWLGLSPGTKVSGGKVLSSATKPVANKAAAAFRIAAFTLFNSKSALGAYLRRQRARLGAPKAITATAHKLARLVYAMLTVGSSYVDAGQEYYEERYRSRVVQNLKRKALEMGFELVSRQAVTAPG

SEQ ID NO: 221730 - protein, 438 aa, unidentified
MSNKVFFNLDDLFISVGIDIGADFSWMSIALPNQQFVGKPYKILHNSIDSLTTAVSKIKEAEELYSLESHIFLESTGIYHYPLFCYLRDKGFNCSVINPIITKNSTNINIRKVHNDRFDSKKAALVGLKPDLKVSLMPSDLALNCRNLCREYYDLMDNRSAYVNKLQGELRMVFPQYLDIFSKVTINTSLTLLETYTSPSAFLKADKQEIIDIIKSTARFGLTYAQNKYNAIIQAATDANQFGYIIDSNIKRIRLYISFIRKYDEEINNILESLHELVDANEDADFVKQIHLIETFKGAGFLSAVSIMGEIGDFSAFSKPKQLFAYFGLDPAVKQSGKFEGTKVQMSKRGSAIARRVIHTLTLQSISISRNGEAKNPVLREYYLKKCDSKPKLVAMGAVSHKVCNMIFAILRDNKPFKIIAPQEHIKQYNAAKCDIAA

SEQ ID NO: 221731 - protein, 403 aa, unidentified
MNSVGIDISKGRSTVAVMRPFGEVVISPFEVRHTGSELSELARRLKSLDGETRVVMEATGNYHAPVAKLLHDAGLYVSVVNAKLVHGYGNNDLRRVKTDRKDAVKLANYGLDRWLTLPRYIPEEDTRLLLKNCYRQYRQYSKVQTVLKNNLISLLDTVFPNVNRLFSSPIRGDGSEKWVDFVAEFWHCRCVSEKSQKAFTSKYQRWCRKHGYNFSEEKAHTIYVEASGHIGVMPKSETTKLLVEQAVAQLRATSAALAALKHEMQSLASMLPEYPVVMDMFGVGPTLGPQLIAEIGDVRRFYSKKALVAYAGLDAPPNDSGDVTGRHKSMSKVGASSLRRTLFLVMSVYLQNAPLDEPVYQFMDKKRAEGKPYRVYMMASANKFLRIYYATVKAYLESLELTA

SEQ ID NO: 221732 - protein, 342 aa, unidentified
MQISTIGLDIAKNVFQVHGIDAAEKVVVQKRLRRRQVLEFFKALPRCLIGMEACATAHYWARELTKLGHEVRLMPAKDVKAYVKRNKNDAADAEAICEAVRRPTMRFVRIKSAEQQGQLMQHRTRDVLIRQRTQIINALRAHLAELGLVAAQGNAGVNELRAIVTDEQDTRLQIDARASVIVLAAQLEALESVIGAIEKRIKMQHRSSEASQRVEAIPGIGVIGASAIVATVADPTIFRSGRDFAAWIGLVPRQDSTGGKQKLGPISKQGDRYLRRILVVGAIAVLRRAQENPGKYPWLTQLLARRPFKVVAVALANKMARMAWALLAHGGTYRAPELAEAA

SEQ ID NO: 221733 - protein, 326 aa, unidentified
MKDTIIGVDLAKRVFQVHGAAIAGEVKFRKKLTREQFRLFIAQQRACIVVFEACGSANYWAREVEKLGHEPRLIAPQYVRPFVKRQKNDATDAEAIVIAARQPEMRFVLPKTAEQQAKSVLFRNRERLVRQRTELVSALRSALMDALVQGADCDLPSLIVTECRELLAQIAETTEKITTKTKRLKALADETDMARRLQTMPGVGPLTALAVEAFAPQMGQFRCGRDFAAWLGLVPRQHSSGGKERLGRVSKAGQTDIRRLLIIGAMTRILAHARYKGPAESWIGRMLAKKPKMLVGIALANKMARQLWAMLTRNEDYRDPAMVAAM

SEQ ID NO: 221734 - protein, 460 aa, unidentified
MRVIAVGVDVSKGYSDIKFVNDSKTVLAESGTFDDTAEGHRRLRERFLFLLKKNAGIQFMVGLESSGGLERNWLKFFRGLKVSFPVEVLLLNPLAVRKFFERNLGRNKTDELSAGNIAEYLQMGRRRQEIDYEPELEGSRTLYRCIKKAIGRRVQIQNELQSLLPVAHPELVQFCRDGLPGWIIELLLEYPTVPQLAKARVKSLSTINYITSERAIKLIEAAKESVASLVDEQTGQSIQFLCQEIQHQNEKITGLQAILLESLKDDTAVKIIDGIKGLGMWTAVVLRLEYGNMKRFYSADAAVAYAGLDPRIEQSGDNEHHPGISRAGRKQIRQALYMPALAAVRFNPVIRNFYNRLVAAGKPEKLALVACMRKLIRIVYGCWISGKPFDPNYQSMQNKISNTKTKQPNAPIDSSLDAPISRKEAKRRKAAAMPQNGINHLTRGLGAANSNNKTISNQKG

SEQ ID NO: 221735 - protein, 401 aa, unidentified
MAATAGIDWASEAHEVCVSDEGRVAERFSVDHDEPGMVELARRLTRTGIARVAIERPDGILVERLLATGIEVLAIHPNQVKAARPRFAVAHGKSDRFDAYVLAELARTDAHRFRPLVPDSGETKALKALTRAREDLVGVRVELANQLRAQLEAFWPGALMFSEVDSPISLAFLARYPGPADARGLGERRMAAFLERNSYSGHTDPAVLVARMRAAPEGTVGEVECEARRGLVLGLVAALEPIVGEIAKLTSQIRERLAGHPDAEIFRPLFRDRKTAICPATLIAELGDSRERYPTEAAMAADAGMSPVALESGKLRVATFRRACDKRLRDAMATLADSTRHWHPWAKEVYAGARARGQDHPHAIRTLGRAWIRVLWRCWQDRTPYDPARHGNFSRLQPTGG

SEQ ID NO: 221736 - protein, 401 aa, unidentified
MAAVMIGIDPHKGSHTAVAVGAAEEPLAKLRVRACPAQAGKLVTWAQAWPERTWAVEGAQGLGRLLAQQLVAAGERVLDVQPKLAARVRLLQTENTGKSDPNDALSVAVAALRSKTRREVISDDHACVLKVRAKRHRDLSRARNQAACRLHAVLCELIPGGVPGEITAGHAARLLGQIRPAGAVAQARCELAAELLADIRRLDAQRREARKKLGAAVKASGTSITEIFGAGPVIAATVIGDVRQVARFPSRNHFAAYNGTAPVEVSSGEKKIYRLSLRGNRRLNHAIHMAAITQIRHKHSDGRAYYDRKIAEGKTHKEALRCLKRRISDAIYTRLRADARQAGPEGQPGNHSVSREAGSHPEHRLFGQATPGPETSLRAEAALTPPMPPSEPSAKKTRRAT

SEQ ID NO: 221737 - protein, 350 aa, unidentified
MTMVGGFDVHRKQITFDYVDDDGLVHWGQIRPATRKTLRAWLAEHCSAGDAEFALEGCTGWRYVSEELAAAGVGAHLGDPAEIAALRGRKKRAKTDRADAKLLRTLLLQGRFPESWIPPAHVLEIRSLGRLYCTLMDERRAWQQRIHAHLFHQGCPPIRALLSAAGRAALAHAELSATGRRYVDTALRRIDELSIEIAPLRTQLVNFAKRQPGCQALQGHYGIGWLCAAIIWAEIGDARRFGSSDQLVRFAGLDVTVYSSDDKRSPGHLSRQGSPQLRWAAFEAAKCAARRGSPDCAYYHRLVAKHDGHNGKNPTLAVERKILRRCYHTLRELADAALALPVPEPEEVAA

SEQ ID NO: 221738 - protein, 443 aa, unidentified
MSRRCIGLDVHREFAQVAIWEGGVVRQVGRIATAPEALRLFADSLAPDDEVALEATGNTHAIARLLERRVARVVVANPAKTRAIAEAKVKTDKVDAEVLAQLLAADYLPAVWLPDDETHALRRQVNRRAHIVRQRTRLKNGVHGILHRNLVPRCPAADLFGRKGRAWLAEQALPADERQAAEALLRQLDFHAEELRLIDAELGRIGLAREDVRRLMTIPGVDATVALSIVAAVGDFGRFSRPEKLVRYFGLNPRVRQSGGQPASHGRITKQGRAHARGMLVEAAWAAAKTPGPLRAFFERVRARRGMHIAVVATARKLAVLCWHMITKGQDYAFQRPSLTAQKLRALELRAGMPSRRGQKGKAASYSLKEVRHRERALTEQAEHAYRQLVADWQAKAPKRGEVGAAAANGARLSWPSERQAARQASAPEPALRSGVDHAHRQA

SEQ ID NO: 221739 - protein, 542 aa, unidentified
MRALPFGSRIGFFLETERRKPCHVLVASARLKSRKTFLLQKPNGELTPRVQKVGPEHFGIVAVDCGKVRSRYLLADFYGRAILEPTPLPHTRGDFQAAIERLRQAMSQHDLRDVVVAIERTGTYHRPVQEAFRRSGFETRLVHPFTSKQYRQPADPGNKTDDTDLPAIFRATSQGFGLSEPIWPDDYLTLHLFRRHRSDLVAKNSMLCCQIREVLHAAMPGYAECFSNLWEAPVALALARQTTSVESVRQAGLQGLQEIVAQAKIVCRRDTLHKLLAWSEQAPPGHPHSLDLRRILHSLDDDRRGKTQQILELERTLAHLVVRTPYVLLLAIPGINIVTVADLAGELGPMYFYLNANAITGRAGLMPSRYQSAEVDHANGPLRRRGHRRLRAVLMQTADNLVACNHYFHARAELWYRAGKDARWIRVKIAKIFSRLAFAMVAGRQLFPHPCCQPRHYILGKLLAFHAEHGTNPAETRQDLEAASEHLPAPARAQEARSLQEHLDGLSKRRRGPQALANIIPLVLARLGTMTVESTNNEGAGP

SEQ ID NO: 221740 - protein, 377 aa, unidentified
MSKLRFVGLDVHADTIAVAVAEAGGEVRSLGIIPNRLESIRKMISRLAAIETLKCCYEAGPTGYVLYWQLAQMGVACEVIAPSLIPTKAGDRVKTDRRDAEKLARCYRAGELTPVWVPDADHEALRDLVRAREAAKKDQLRHRHRLGKFLLRHGKRPTDAGKAWTQKYLNWIRIHVHFEQPALEATLKHYREEVDHIAERIAKLEQAIDEAVKQASPEIRAVIEALQALRGVAQTTAATVVAELGSLSRFASPTQLMGYSGLVSSEHTSGNRVQRGAITKSGNAHLRRVLVEAAWTYQHRPNVQGRVLRRQKLLSLSEEAKRIAWKAQERLHKRFTALTARGKESNVAAIAIARELLGFMWAIAVHTESQSKPAKAA

SEQ ID NO: 221741 - protein, 355 aa, unidentified
MNAIKYIGMDVHLATISIAVLDAMGKLIMEVTIATQASALLDFIRGLSGTLYVTFEEGTSAHWLYTLLEPQVAKVVVCDPRQNPRRLGEKKSDRLDARKLAELLRLGTLKPVYHGNALGPALKELARSYRTLMSDTTRVMNRLKALYRARGIRCAGTRVYSPRGRDQWLAQLREPGVRGRAERLYKQLDLLLPLRQEARAALLAESRKHPAQKLLLSIPALGPVRVALLLALLQTPYRFRGKRQLWAYAGLALVTRSSADYRMVEGQLERSRRPALVLGLNANHNHVLKGLFKDAAVTTLTRPGPFKDFYTTRVAQGMKPELARLTLARKIAAITLNLWKKGECFNAQHLKAQAA

SEQ ID NO: 221742 - protein, 338 aa, unidentified
MALYCGIDLHSRDCWLAILDEKLKVVHETKVGNDLQALLQVLEPYREELEGIAVESTYNWYWLVDGLEEAGYQMHLVNTWAVKQWEGLKYTDDRHDARWLAHLLSLKILPVGYICPKQERSVRDLLRRRAFLVRKRTSFLLAMRGAFECRTGKRTTSSEVKQWTAEEIESSLDDAIEALGITCLLQPMKAVDDQIRILEKEALTRAKLRDEFAPLLTVWGIGKVLGLTVMYEVGEIERFKKVGNFASYCRLVKTARLSAGKRKGSGNARNGNPYLSWAFSEAAHFAVRYHPEAKKYFQRKRSKTNGIIAIRTVAHKLARAAYYVMKDQVAFEPEKAFG

SEQ ID NO: 221743 - protein, 343 aa, unidentified
MSNDTRIAVDVAKAVFELAISDRPGHVARRERLPRAQFLAFMAQQPAATVVMEACGSAHHWAREIQRLGHRVVLLPPHHVRPYIRRNKTDRTDAKGILEASRNDDIRPVPVKTVDQQVLTSLHRLRSGWMLERTARLNALRGLLRELGVFIPVGSREVVPAAWSLIEDADSNLPEALRPIFAEACREIREIEARVKQVERQLEAIVEQLPAVEHLRTIPGVGLLTSTALVGFIGDIRRFPTGRHFASYLGLTPREYSSGLKRHLGRISKRGDGYLRTLLIHGARSVLIHARKQQPDRLREWANNLAKTHVHNKAAVAVANKLARIVWAVWKHERPFALMAKAA

SEQ ID NO: 221744 - protein, 451 aa, unidentified
MQNRNVKMEVVNPNAAGIDVGSRSHFAAIGQGAGDIKEFGVYNEDLQQLTKWFADNEIKTVAMESTGTYWQHLYITLQAAGFQVILCNGKFTKNIKGKKTDVKDAQWIQKLHTIGLLTGSFLPDQATEQLRTYCRHRTNLLQQSSDTTRKMQKYLRLLNLRLDVVVKDVTGVTGLAIIDAICKGEKTPEKLACLRHGNCKKSEEEIAKALQSNGRKDYLFGLKQEYQLYVNFQEKMKECDVEIEKLLNEQINNDDERRQHFIDKKVYKKVNKNTPKNLDINLLSYQYFGGVDLLAIEGVSHATALALMSEVGNGIHKFETAKQFASWLRLAPNNKISGGKMLSSRIPKGSNRLKIALRNAANAIGNLKDTALANFFKRIAFRKGRPAAISATARKLAVIIWNMIVKSVPYKQETTYEFLDQKRKRKVQEMKKLIHKFDITTNELGLHISGL

SEQ ID NO: 221745 - protein, 355 aa, unidentified
MDSKKYIGMDVHKESISIAVRNAAGKIVMECVIETKASMILQFIEGLRGDLQVTFEEGTSAAWLYDLLKPHVTKLVVCDPRKNASMREGNQSDKIDARRLAELLRLNHLSPVYHGEHGLRTLKELVRSYLTVTKDLGRVMTRVKAIYRSWAIPCSGKQVYAPRHRAEWLGKIGEPGVRRRAEFYYQQLDALRTVRQEVRRELLAEGKKHQAWKPLCQIPSIGPIRSAVLLGILQTPHRFRTKRQLWTYSGLGIETQSSADHRVVAGQLERAKKQNSIRGLNRNCHHDLKNLFKGAAIVAATKPGPFQEFYTALLTKGIRPEMARLTLARKIATIVLIVWKRGAFFDAQHLKPQTA

SEQ ID NO: 221746 - protein, 387 aa, unidentified
MDVLYQSCAGIDVHQANIVVCILHGPLTSTRPKREMATFDTTTKGLRACHDFLSQFHVEAVGMESTGVYWRPVWHALCDDFELILAQPAHMKAIPGQKTDKKDAHWIAKLTRIGLLPRSFVPDETIQELRELTRQRKHYVESRNRETNRIHKFLQSGGIKLTTYIEDIMGLSGRNLLQLLVDGTPITPRIVHQSVYTSLKKKLPQLLEALDGYFSDHHRFMLKQSLEIYDFYQKQIELLEERITVYLSQYENHVETLDSIPGIDVITASVIISEVGVDMSQFPTSGHLASWAGLCPGNNESAGKKRSTKIRHGNSYLKKCLCQAAFAARNQKGSTLADRFYQIQSRRGSQKATIALAHQLLKIAYILLKEQMTYPEFLAQKRLLGTS

SEQ ID NO: 221747 - protein, 402 aa, unidentified
MNAVGIDVSKGKSMVAIMRPFGEIVSAPFEIKHTASGINSLVELINSVEGESRIVMEHTGRYYEVLAHQLSEANLFVSAINPKLIKDFDNDSLRKVKSDKADAVKIARYALDKWQNLKQYNVMDELRNQLKTMNRQFGFYMKHKTAMKNNLIGILDQTYPGVNTYFDSPARSDGSQKWVDFASTYWHVDCVRKMSLNAFIDHYQNWCKRKKYNFSQSKAEEIYGKAKELVPVLSKDAITKLIIKQAVDQLNSASTTVESLRTLMNETASKLPEYPVVMAMKGVGTSLGPQLIAEIGDVSRFTHKSAITAFAGVDPGVNESGSYEQKSVPTSKRGSSDLRKTLFQVMDVLIKTHPQDDPVYQFIDKKRAQGKPYYVYMTAGANKFLRIYYGRVKEYLASLPES

SEQ ID NO: 221748 - protein, 398 aa, unidentified
MYQQFCGIDISKDSFDITLLNSNGEIKLQDKLLMNRDGFNTLLKYLSSYSKENLLVAMEATGIYHLPLLSFLLENSFKSVVINPILIKSFIGSTTLRKTKNDKKDATSIALFSLKSYQSLHLATTDAIENIKPLIRERETLSKEIARLKTEIKAILTQLFPELSKNTNIFTRSILNLLLKAPSRKAIRNLKKQKIQKILDNTSGNKVRISAQEILSLAKNSIAISDKYLEKVLTSKIRRLIAIQDELSFLDEELQNSLEDTDINDDIEILQSIPGIGSVTSKNFMVEVSSIKKFKSVKQLCAFIGIDPSVKQSGTSINYRGKISKRGNANLRRTIWQMAIGVIRSCDKFNAYFSKKREEGKKFKQAVIAVANKLLRTIFVLLKNKTKFDENLALGVSK

SEQ ID NO: 221749 - protein, 356 aa, unidentified
MTQVKTLDFSGQSLYCGIDIHKKSWSVCLRNQERELRSFSQDPDPWILSRHLKTNYPNASIVIGYEAGFSGYWAQQAFKAEGLECKVIHPSDIPQPDKSRRYKTDKIDCRKLAVELSKGFLNYIHIPLQSTIESRSLVRTRQQLVKDQTRYKNRILAFLTFFGIQVPQGYKNSTHFSKCFVTWLEQLTMAPSSKTALLIKLNVLQSIRAQLLLTNKALRQLAGSELYAPMITLLMSIPGIGIHAAMILATELEDIRRFKSFDHLASYAGFKPDVYSSADKYVIKGITHHCNHEVREVLVEAAWMAIGKDPALTQAYNEYKKRMHYNKAILRIAKKLLSRVRYVLLNNTPYEIALVK

SEQ ID NO: 221750 - protein, 357 aa, unidentified
MEKQNNSISFNNQRFYIGVDVHKKQWTVTIRSNKLALKTFSMKPSAKELSEYMRKKYPGGEYRSVYEAGFCGYSAHRELESYGIKNIIAAPTEIPTSNKEKNEKRDSVDSRKLARELENGSLEGIYIPSQLQQELRSIVRQRFQVINKQTRLKNQIKGYLDFYGHKLPENYQLKYWSKNFIKHLGTLSFSYAIGKEQLAIYLDELTEMRKLLLRIIRQIKNYLKEFSLKEEVSLLCSVPGIGFTTAVTLYTEIIDPKRFSSFDRLSSYVGLVPSIRSTSERETVLGIKFHHNKLIRQLLVESAWIAVRKDPALTLSYNNYLKRMSKQEAIIRIAKKLLSRINYVWTNKKPYVSSVVK

SEQ ID NO: 221751 - protein, 391 aa, unidentified
MVCVGIDVAKDKHDCCILDSEGTTLVDCFTIPNNMDGFKSLLQTIQDCSQKSDKIKVGLEATGHYSYNILGFLLDNDLPVYVMNPLHTNLYRKSLSLRKTKTDRVDAKTIATMLLSDVDLKSYTDTAYHNEELKSLTRYRFDKVQERAKLKQSVSRLVTILFPELEQLVSSIHGTSIYALLSEYPGAKQISEAHLTRLANILVTTSRGHYRKDRATHIRDAARTSIGSVMPAKSLELKHTIKLIQELTSEINEIEDAIRKIMDELKPPILSIPGMGFHSAAMILAEVGDFSNFNSPDKVLAYAGCSPSTYQSGKLTNCYAHMEKRGSRYLRYALYTATKYVCYWNPVFTEYLTKKQAEGKHYNVALSHATKKLVRLIYALQKSGKAYLAVT

SEQ ID NO: 221752 - protein, 355 aa, unidentified
MSQEKYIGMDVHQATISVAVLDSSGKLVMECILETKAATILEFVQGLRGTLSVTFEEGTAAAWLHDLLKPHVSHLVVCDPRKNALLRDGNKSDRVDARKLAELLRGGQLKPVYHGDHGLRSLKELGRSYLTLTQDVSRVMTRIKALYRSWAIPCSGATVYAPRHRAEWLAKISEPGVRRRAERFYQQLDLLQPVREEARRDLLSESRKHPAVKLLRQIPSIGPIRAAMLVALLQTPHRFRSKRQLWAYSGFAVKTHDSGEYRYVRGKLQRNRERITVRGLNDNHNHDLKHLFKSAAISASNRPGPLRDFYVTLVEKGMRPTMARLTLARKMAAITLTIWKKGVEFDAKQLHRQAA

SEQ ID NO: 221753 - protein, 431 aa, unidentified
MKGGDFMKNNFLSTLFVGIDVSSKTNVLCALDFQGDKLLNLKALNNQPGAESILESILDCLNSSSLKYVVIALESTSFYSTHIANFLSSNEVLLAYTPMVYCLNPKTIANYRKSFIDMDKTDPLDAFIIADFARCGRITSQPWRGAQFLALQRLTRHRLHLIESASREKAYMVSNIYLKFSQLAVVKDEDKPFSNTYGATSKAVLTEFLSLDDIAYSSLEDLVEFIKSKGKNRFSNPVETAKLLQKAARDSYRLDKVLYEPLNVSIASSFNVINALDTEIKTIDKAIEKAIKGINTTEYQSLTSIPGIGPVLASGILAEIGSITSFDSNDALAKYAGLTWRINQSGNYTSDETNMTKTGNKYLRYYLIEAANSVKNNVPEFNEFYLKKFGEVTSHQHKRALALTSRKLVRLIFGLLTKNQIYSSNKAGEVQ

SEQ ID NO: 221754 - protein, 414 aa, unidentified
MVEAINKSCGLDIHKLFFIATVLSRSGEKYQQRFDRTDDEILAFKKWVLIEQCDVVACESTSDFWIPIYETLIKHLLVIVGNARDMKALTHKKTDKIDSEFIAQLALNNMVKASRVFPKDHREFRSYVRLRLTLVRKRTDLKNEAHSILGSEMFNLKDVLTDIFGKNGKMILSGISSGKTVDQIIGSLSPNVRKKSAQIREILDREISQSTAIRLHICLKLIEQLDNEIKTLEKEIFNYAYRNHNREMEILMSVPGIREIAAATLIAEIGNFNDFSSGDKLASWLGVVPNVYQSADKFYNGRITKRGSNVARWILTQIAQSAARKKNSKLKEFFNRKRKSIGFAKAVIALARKITTIIWHLVTNDEKYEDETGYEKGEIQKRKIIETEMFSVDERIKIISGIIAIMGKDEREIT

SEQ ID NO: 221755 - protein, 363 aa, unidentified
MNATALSPMVGVDLSKNVFELAVADDAWRVIERARLTRSQFERWFVNRSVRMVIMEACGSAHHWGRWLTALGIEVRLLPARYVRAYVKRNKTDAADAAALLEAARASDIVPVRIKSVEQQALQSLHRTRSLWMSTRTSRINALRGFCREFGIAIATGSRLGLEQIGRVLADPASAVPLLLRDTMRWLVEEIRLLEVRIGQLERELTELARQSPACKTLLSVPGVGLLTATAMVAATSGQVNHFRDARHFASWFGLTPKESSSGMTRRLGRISKRGDRYLRMLLTHGARSVLRAATVAQQRGRPLDALRAWALNVQGRTHHNRATCALANKMARICYAVLRDGENYGSACVHRKLPRETFVLPA

SEQ ID NO: 221756 - protein, 359 aa, unidentified
MYTAGIDAHTSYLVVAVVGKDGGLEEKGRVRVEQPEKLDALLGRYRPLEVVVETSSAWPWLWDRLEPQGITFVLAHAKRLRYIARATYKSDEVDAELLARMHLAGLIPAVHVKAGEQRDWARLVRHRARLVRDRTAWVNRMHGQLHQAGLRTRRGHLLTRKGAKWLRTEAWPQLSGEQRRILRTYRALIRELQPRIRALDQRIEAVARQIPAALLLQTVPGIGPYRSLLIAAETLPITRFASPAKLVSYAGLAPVTRSSGGRTRHGPIPGGANRWLRGALVRSVVSHLRHAPESWLSHYYTEQKSRLGWQVARVATARKLCRALHAMLRTGEVWRNEQPDTETGELHPSHAATTAQDTD

SEQ ID NO: 221757 - protein, 383 aa, unidentified
MRKEADVSPPAETGGGPAHSKVQINGTRKETPAMRSVALDLAVKKISYCEVAVGHVVARRTVTSLSSLKELLGPECLPARIAIEACREAWHVHAELTRWGNEVLLVDTTRVRQLGVGEHGRKTDRIDAEILAKAVEKGSLPKAHLLSKPRQQLRLELSVRRTLVETRSQYVTTIRGLARTHGVRLPSCDTNAFVSHLRKAKLDQNLQELIEPMSQVLEKVDADLARAEMRLQSIVEKDSKIQLLMTVPNVSVVVAAVFVSVIDDAHRFRNAHQVGAYLGLVPSEKSSGEHRRLGSITKKGNSYARTTLMQASWGLIRLGRSDDPLQQWAKAVAHRRGKFIAAVALASPPRETRDCAGRARARAAPSATPCRNTLGDVARRHRS

SEQ ID NO: 221758 - protein, 356 aa, unidentified
MGKNTKVDFTGQDIYVGIDTGKNSWKVSILTNELEHKTFSQPPIPEVLVQYLHRCFPGAKYQCVYEAGYFGFWIHDALREQGVECLVTHPADVPTKDKERRNRNDRVDARKLARNLRNGELAPLYVPTRSALEDRSLVRTRVSMVKKQTRCKNQIKASLSFYGSTPPAEFAKSHWSRRFIGWLESLSFERDSGKQSLQTLLEELKHLRGSIAHLTKQIRNLARQEPYRTQVQLLSSIPGISTLSAMTLLTEIVDINRFKNLDHLASYVGLIPGEDSSGEQERNTGISHRRNAHLRSMLIECSWVAAREDPALLMAFSKLSKRMVKNRAIVRIARKLLNRIRYVLKHQESYETSVVM

SEQ ID NO: 221759 - protein, 323 aa, unidentified
MTCVIGIDIAKHTFDIAKPLERDKYRTKAKVANTPEGFKQFDQWLEKHAEPHCWVLMEATSVYHEALATHLHQQGYQVCVINPARIAKYAQSELRRVKTDKTDAKLIARYAQRHLEELRPWEPEPESIRQLRGLVRRLADLKALAQMERNRLDVSAESAQASIRIHLEHLDGQIALINTAINDHIDNDPDLREQKRLMKSIDGVSDGTAATLLAELGSPLRFDSARQLAAFCGLNPRLQESGIYRGKSTISRTGSGRLRAALYMPALSAMTYNPVIKAMKVRLAERGKTGRLVVCAAMRKLLHLIYGVLKSGQPFDPIRALAH

SEQ ID NO: 221760 - protein, 352 aa, unidentified
MELDKYIGIDVHSSTLVVNARDAYGKVVFQGTVPTSRDGILQCVGGLRGRLHVTFEEGTHAQWLYDVLRKRADDVVVCDPRENRLIQDGSKGDGIDAGKLSHLLRMGAVKAVYHGQHGTATLKELTRHYDGLVEDSVRVMNRIKAVYRSRAITTEGTGVYRPDKRDAFLGQLTEPGARRRAEALCEQLDMVLKLRREAEKAMVTEARHHGIYRQLRSIPQLGPIRIAQLIAIVDTPHRFQNKAAFWNYCGFAVVTHSSAEHRFVDGELVRSRKAIATRGLNKDHNPRMKQIFKSAATKARARGPFAEYYSGLIARGMKPELATIALARKIAAVTLAVWKKGEAFDPKKLKKT

SEQ ID NO: 221761 - protein, 353 aa, unidentified
MTRKRHPHRIYCGIDTHADTHHAAVITDTGILLESRQFDTTTNGYQELTDWIRQHGHPIAVGIEGTSSYGAGLTRHLRSHDIAVVEVPRPNRKLRRNVGKSDPIDAEAAARAVLARNQLSEPKHGDGPIEAIRALRVARSSAVKAATASMNAVRSMIVTAPESLRTHLRGRTTTALLDACIALEPDLTALADPNNATMVALRSLAKRCRELRREADQLKKHLTALVADTAPLTSGILGLGPDTAAALLITVGDNPDRLRSESSFAHLCGVAPIPASSGNTHRHRLHRGGDRRANQALHTAVVVRLKYSDVARAYAKRRTAEGKSMPEILRCQKRYLAREVFSALREDYRALTT

SEQ ID NO: 221762 - protein, 430 aa, unidentified
MKSNTQNTKIEAITETTLVLGIDVGSETHYARAFDYRGIEYSKKPFKFSNDEAGFVMFKAWILDIKEKHGKDKVVPGMEPTGHYWFNLGKFLQDNEMKPVLVNPHHVKKSKELDDNNPTKNDRKDPKVIAGLVREGRYMIPYLPDGVYADLRTASNMRFQLQAELTRIQNRISRWFNIYFPEYKTVYGHPNAKSGMLILKVAPLPEDILTLGIDGVNQIWRDAKVRAVGKARAKTLIEAAEHSVGSKEGEISARMEIRMLLEDYESRNSRLQEVLALIEELVKKIPMAEKLLEIKGVGIKTVSGFLAEVGDISRFNNPKELQKLAGLALVENSSGKHKGETTISRRGRKRLRYLLFEVAMSLVSKNPEFRELHSYYTTRKLNPLKKMQSLMAVAAKLLRVFFAMLTKGVDYDPKKLVGDIKRPAVYLQVA

SEQ ID NO: 221763 - protein, 455 aa, unidentified
MGKRNGLSRGDARRNARLIRMRGVVRHDRAILAIDLADAKQVLALCDHDSRVLARRTVRGRAWQLDGALGWARATAIERGFAGIVVGCEPTGHRWRIVAALCDRLGIDLVCVQPLLVGRAREQEDLTRDKSDPKDAVLIGRLVAGLRCYLPERTDQVWARLRQLGARRQALTTSASASRQQLRDLLECVWPAVLAAAAEPLDSLTWRAAVQVALARTAGDPATLSRLGEARFARAVTRGLARWGAKRRCLRIVRAVWAAATSPQALQVGVDTQRPGALERASLTLDDWHHALGQLADTEQRMTGVLDTLDLTSLVTTIPGLSAVGAAAILAETGDPARFDSARALVKHAGLCPRANESGAFAGTTRISGRGRPALRLAAWRATWGALAHNSVLAARHAHLTTRDHNQLTTAQARTALAGALLRWLWVVVTTRTPWQAAIAAGQLDPRRQVTGPAG

SEQ ID NO: 221764 - protein, 330 aa, unidentified
MKKWKFTLGIDVSKNTLDISCSELNEHIQIRNGTEGFMQFLKWCRRLHIDLKESFLVLEYTGGYEYKLLQFCEAHAIVYARIPGLAIKNSMGITRGKNDKVDSFRIAQYGEEKYKSLQPSKPLNPAIIRLKELLAYRKRLVRENAGYKNSIKGREQMYGKNNKDIIVKSLQQKLKANSKIIENIEAEMMSIVIVDEEMHLNFTLITSIKGIGKVNGLMTIAYTENFSSFSNPRSYAVYVGVVPFDHSSGTSIHGRKRVSHIANKELKQELNQAARSAMVWDEEMNMYAENKMKTKCYKIVLNNIKFKLILRMFAVVKKGEKYVDNYKNVA

SEQ ID NO: 221765 - protein, 355 aa, unidentified
MNKINSNFSGETIYVGMDIHKTSWNLGIHLNDMFIKNVHQKPNPVVMANYLKQHYPGAHYKAVYEAGKFGFWIQRQLTALGVECLVVNPADIPKSQKDSLQKTDPRDARNLGLRLQSGVLRSIHIPGEQQEADRVLFRYRKRIWKDLCRCKNRIKGMLAFSGIDIPEKYDNASWSHNFINWLKDLDCKHVSRRTALNYMISQMEFLRKELLSISNAIRKMMREQRYKTNYYLLRTIPGIGPLTAASILVEIGDVKRFETFYHLNSFVGLLPMEHSSGQSENKLSLTVRKHRQLRSDLVESAWTAKRTDPAMALYFQEQLKRKDPKIIIIKIARKLLNRIRYVLINQQPYEFGIVK

SEQ ID NO: 221766 - protein, 607 aa, unidentified
MSTIASLDRIGVGIDTARYGHRVSFLRPDRKPAAKPLTVMENRAGYQALQDRLNQLHEQQPTAHFHVRIDAAGQYAVNLELFLRGLNLPMTISVGEPKRNKDYQKAHFPKRTTDDTESQAMARFAVVELPNATPAPSTPMILLREVAGRLQSKVKQTTQAINRLHNLLARVFPELATLTEDMSAGWVLKLLDKYPTAERIAQAQIASLEKIPYLSVEQAHAVHQAAKQSVASLRGDLAEALVRDLVNQLRLCQKAEQHLHQLLLEAFADLPASPHLQVLTITGIGEATAAALVAKIVDINRFATPNHLVSYFGVFPEESSSGVDKRGRPLPPGTLIMSPKGNDLVRFYLWNAARNAIQHNPAIRALYRRLRAKGKRGDVAFGHCMRKLLHLVYAVWKTDRPFDKEHFPWEGSSDTQPSATTPPSADAGTTPSGNEKAVGHKRDLPAEEVVTTADSTLEPASPAVKPASQSAAPRPKVDFACVREHVTMEQVLQHLGYFASLRGRGQQRRGPCPVHSQPTAPERTFSVHLGKNAFQCFHAECAVKGNVLDLWAAIHRLPLYEAALDLAETFQVPRNREEEPVKGTSSPRTATAKTSAPAAATATDGAK

SEQ ID NO: 221767 - protein, 341 aa, unidentified
MKYYAGLDISMEATAVCVLDAKGRVIREASVASTPAEVIDFLVGCGLGFERIGLEACPLSEWLYESLASAGFPVVCLETRHLKGFLKSQINKTDRNDASGIAQAVRVDLFKPVHVKTLASRKRRALLSGRRLLGDQIRQVENHLRGMFKAFGLKVGAVSRKGFEGRVVELAGDVPDLQSPVSCLLQARRVLLARFEVLDRAVTQVAGSDPICRRLMTVPGVGPVVALTYRSAMDAPARFVHSRTVGAYFGLTPKRYQSGETDYSGRISKIGDREVRCALFEAANVLLRRSTRPCALKSWGMGLSRRRGRKKAVVAVARKLAAILHRLWVSGEDFRWGNAAA

SEQ ID NO: 221768 - protein, 349 aa, unidentified
MTRFAGLDVSVRETAVCVVDDVGKVLAERKVASEPDDLIQLLRSIGGDYGRIGLEAGPLSQWLVNGLAEAGLPVVCVETRHMKALVEAQKVNKSDRNDARGIAQMMRVGLFKPVHVKTLASQERRMLLTSRKLLQKKLLDVEADLRGTLRNFGLKVGVVSTREFEPRIRELVEGFPRLAAIVEPVLTVRRTLRQQFAVLHKMLLGLVRQDPICRRLMTAPGVGPVVALAYRATVDQPQRFLHSKAVGAHAGLTPKRHQSGETDYDVGISKSGDVMLRTMLYEAAQSLLTHSRGKWSWLKAWGLRVAQRRGMRRAAVAVARRLAVILHRMWVDEADFRWTRDNKLAVLAA

SEQ ID NO: 221769 - protein, 478 aa, unidentified
MQPSQGRFFLYPAQRLLIHFKKYIRFGWLGFAYSRLTCKAVNFGSEMDDPSTIFVWGLVFMNNVNPVVGVDVAKDFCYYCVLSPDGKKYLEPFKAFNTKEGLDFVLEKLKKVEKAFKNRPVIVLESTGHYSTRLVHLFGKNEFEVFLVNPLQSHSIKNSSIRKVKNDKADAEELARLYFVCDLQQHRPFDDSIANLKVLSRAYFSLSEQRISMLNQLTAAVDQVLPGFTRIFNISSKTCVELLARYSSPDALLSSPKEDVASLIRSCSRRSLKYALDKYQLLIQCAKDAKETGITLSALYDVICIYAQNLKYLNDKLTELDEMIQRLAITIPEVSLISSIPGFGKRLSSVIVSEVGDISRFNNAKQLVAYCGIDPSVKQSGNFVGTKNKFTKRGSAYIRKALYIAATISVRKDSKARCVNPVIYDYYQKKIKSKPKKQALGAVMNKLVRIIFSVLKNKHPFVMITPEEQIKLYRSKAA

SEQ ID NO: 221770 - protein, 321 aa, unidentified
MTYVGIDVSKATFIVAYSSAKSSKTKTFKNTTKGVHEFIQTLSANEHHCVLEATGNYSSLLVYLLSRANITVSLENPLKIKNFARVMLSVTKTDETDARLIALYGQRMQPSPYKLRSDAILTLKQKRTVIRQLKKQLIATRNLKGSMEALPFFDPKCKKAIEKTIVFLEKQTKGLEEELAALAQSEYKKQIDLLTSIKGIGVTLAAALIMATGGFTYFDNAKQLTRYLGLSPTYQQSGTSVNVKGHINRNGDSSLRGQLYIAAMASLRCNAECKACFDRLRSNGKPGKVAVVAVANKLVRQAFAVVTQEKPYVDGFKSKKP

SEQ ID NO: 221771 - protein, 398 aa, unidentified
MTESSDYESVQVFIGVDVGKDTHHAVAINRSGKRLFDKALPNDENKLRSLISDLKQHGQILLVVDQPATIGALPVAVARSEGVLVGYLPGLAMRRIADLHAGEAKTDARDAAIIAEAARTLPHALRTLKLADEQIAELSMLCGFDDDLAAQTTQASNRIRGLLTQIHPALERVLGPRLEHPAVLDLLQRYPSPEKLASLGEKKLAAQLCKLAPRLGKRLAADIAQAPAEQTVVVPGTNAAAVVLPRLALQLITLRKQRDEVALEVEQRVLAHPLYPVLTSMPGVGVRTAARLLTEVACRAFASAAHLAAYAGLAPVTRRSGSSIRGEHPSRRGNKALKRALFLSAFAALRNPLSRAYYTRKMSQGKRHNQALIALARRRCDVLFAMMRDGTFYTPQGS

SEQ ID NO: 221772 - protein, 346 aa, unidentified
MKHDKPKGKLAVLGIDLAKQSFQLHGVDDKGNTVLKRKLNRNKLSEFIVKLPPCIIGLEACGGAHYWTRVFELFGHKVKIIAPQFVKPFVKSNKNDSADAEAICEAIQRPSMRFVPVKSIEQQDIQSLHRIRSQIVARRTAQANQIRGLLMEYGIIIPKGISYIRKEIPMILEDAENELSFLFRELLGGLYDEMVHMDNRINIIERKLETICHQNEDCQRLLSIPGIGLLSATAMIAAIGDISVFKNGRELAAWLGLVPRQHSTGGKPTLLGISKRGDTYLRTLLIHGGRTVVRVSEKYQDKRNNWISNLSQRRGKNISAVAVANKNARIVWALLMNKTTYQASMA

SEQ ID NO: 221773 - protein, 348 aa, unidentified
MKILAIDLGKFNCVSCLLDTESNATEFDTFKTYRREFKEILHRTQPHLVVMETCSITGWVHDLCVGQDYPVLVADPSQEAWRWKNVKRKTDKDDALKLAKLAALEQINPVYVPAPETRQYRHLVKYRKVVVGRINRVQNAIRALFDQQGVKIPSGQRAWTVQGIDELGQHRRVLTECDENNLWRGELDLELTMLDQLWEHLATLERKLEILAKQEARIQLLQTIPGVGRKTAEVIVTCLDDPKRFENSRQVSAYAGLIPQQHQSGQTNRLGKITKRGSRLLRTALVEVAWIMLRYNDWAAATYARISGGQKTRKKTAIVAVARKLLVRCWAMLLHNQPWNPELSQATT

SEQ ID NO: 221774 - protein, 355 aa, unidentified
MEQVVPHGWAGVDVGKGHHWVCLIDEAGATLWSTKVVNDESAILEAIAAVLGRAEQVVWAVDITGTAAGLLLALLGAHGQQVRYVPGRTVNRMSGAYRGEAKTDARDAYVIAETVRHRGDLQEVEVPTALVSELRLLVAHRTDLVTDRVRMVNRLRDVLSGYFPALERAFDYAHSRGALILLTGYQTPAAIRARGHSRLLAWLAKRKVRSADQIAADALAAAKAQHTSVPGQDVAASIVADLASQILATDARISDLEARIRETFHAHPQAEIIESLPGMGPILGAELIAAAGDLNGYANAGRLASAAGLVPVPRDSGRRTGNMHRPMRYSRKLRRVFYLSAQASMMREGPNRDFY

SEQ ID NO: 221775 - protein, 430 aa, unidentified
MNSTQNKKIRQVTEKTMIVGIDVGSVKHYFRAFDWRGIELTRRPIPFTNSMEGFNAFHDVVNDLMSKNNLEITLVGLEPTGHYWFNLGQYMNGKNIKFVMVNPHHVHKSKELDDNSPSKNDCKDPKVIANLVRDGRYFYTYMPSGIYAELRNASNRRFTLVEEQIRCKNRIHKWISVYFPEYKGIYTHIDAKGGILLLKNAPTPEDIIEIGVEGIIKIWKDAKLRGNGHKKAITIFNRALNSIGFKEGLTEARIEIKDLIEDYETQTERLERINDLIKNLTLQIKHVDKLLEIKGVGIITVAGFIAEVGDITRFDNSKELQKLAGLELVEDSSGKHNGKTKISKRGRKRLRYLLIQAAISVIGKNAEFKQIHNYYTTRNDNPLKKMQSVTAVACKLIRVFHVVLVKGVSYDASKMLEDIKYPGGAKLIAA

SEQ ID NO: 221776 - protein, 387 aa, unidentified
MINNNQIIRAIGIDVHKDSYSISAFDPQTTNFSAETTVAADSKSVITYLKRLKKEIAVPVTIEIGYEAGPTGFGLKRDLEKAGYTCHVMAPTSIYRPAAGVKVKTDAKDARTLAKAVYWGSYSEVVPLSEEDESYRDYIRMRDDRKEALKKAKQNLLSFLLRKGRKYSGNPWTQKHLSWLKKQEFESPIDKLTIQEYLNEVTRLNDAIVLLDAKIEEFSREDRYKDKVDKLRCFAGIDTHVAMVMITEIGDYNRFTSAEAFSSYLGLCPGEHSSGKSTQKGGITKAGNSHCRKLLCESANSIARTNPYKKSKRLLERQKGISPDIISYADRGSTRIKSKYFNLVEYGKNANVAKAACARELACFIWGMMTEHMESRGEIRETVQQVI

SEQ ID NO: 221777 - protein, 334 aa, unidentified
MQNVALIGIDLGKHSFHIHCQDKSGNALLRKRFTRTKLMQFLVTCPSSVVVMEACAGAHFMARHISDIGHDVKLISPQFVRPFVKSNKNDFIDAEAICEAASRPSMRFVQPRTETQQAMRALHRVRESLIRDKVKTTNQIHAFLLEFGISLPTGDAVIKRLSLVLAEHEIPEYLSRLLMKLHAHYLYLIEQITELESELNQSIKADATAQRIMTIPGVGPITASLLSSQLGDGKQFSCSRDFAASTGLVPRQYSTGGKSTLLGISKRGDKNLRRLLVQCARSFMMRLEHQQGRLAEWVRKQLDNKHSNIVACALANKLARIAWAITVLQKEYQA

SEQ ID NO: 221778 - protein, 348 aa, unidentified
MRFYTISHKHYCGIDLHTKMMYVCILDTDANILIHKNIPTNGKAFLKLIAPYKDDIVVGVECMFSWYWLADLCAEEGIEFILGHALYMRCIHGGKAKNDKVDSEKIARIMRGGDFPLAYAYPAELRPVRDLMRRRSHLVRIKSEIQGHISITNYQYNLEPFEKNIVHKGNREGIADHFTNPSVRLNVETDIAVMDGLHAQIRILENHIIKHAKSYDGRMLYRLKTVPGIGDILALTIMYEILSIERFPTVQHFCSYSRLVKCINESAGKKMGTSGSKIGNAHLKWAFSEAAILFIRGNDRAQKYLAKLTKKFGKGKALSILSHKLGRAIYFMMKRNDVFDMNYFFRTN

SEQ ID NO: 221779 - protein, 422 aa, unidentified
MTEQNNKPRERIFVAIDVAKAKNDVLIEYPDGKRKRMTVVNRMEDFIAFAEHLGTFKKEQCCIGVEPTSNYHRPISYFLKEKGFLLNFVPSIGVARTREAMHNSWDKNDPKDAQVILHMLKIGLVQTYYDPLLNGINDIQELSKTHFLISLRKTKTQHSILNHYLPLYFPEAQKYFSSSRAEWFFRMLHMFPSPHYIKAMGKEEFIKKAWKVSGRKVAKEVFLSDFFETAKNSIGIPVLEDSESLVMFRLVLQEALALCEKRQQLEDRAHEFLKQDPQYKILRSIPGIGPIIALTIIAESGDMKRFSHHRKYLKFCGLDLSTHQSGQFRGQSRLSKRGNSRLRCAFWMAATIAVRMRSNTLRGKYERYIKRDPTSSDLKRKALTASAAKICRVAYSLVKAGKPYRPYFDEAIPSGGIRSVGP

SEQ ID NO: 221780 - protein, 416 aa, unidentified
MRRAAVVYTDIPELHPVHDRVAALDVHLNQITVCVMLREPDGQVRMQFREFGGFKRDRREMAEWIASFQPQAVSMESTGIYWKSPYAALERVGIRAQVVNAAEVAKTPGRKTDMLDAQWLALLTRAGLLRGSFLPVEKLRHARQLARYHTSLVNDLVRQKNRLLKVLADGGMRLSAIVSDPHGKACRAMIDAILDGASPEQAVRHAGRLRATHAELRAALDHELTEVHLHLARQIRQYINFIEASMSDIEAALMQEVLPQGSLIAQLLTLPGIDRLAAAKLLVEIGDDMRRFAKPGRLAVWTGVCPGNEESAGNRKRAKTRKGNCHARRVLIEIAHAAVKTQCYFKDKFQSLKPRLGYKRAIVAIAHKIIKVIYCMLSRGELYRDRSVDFEALQTRRNAPRWIRQLQKHGVLPANA

SEQ ID NO: 221781 - protein, 348 aa, unidentified
MAHFVGLDVSVKETSVCVVDDTGKVILEQKVPTEPADIITLLSSLGVSYGRIGIEAGPLSQWLVNALTVAELPVICVETRHMKALLTAQQINKTDRNDARGIAQMMRVGLFKPVHVKTLVAQEQRMLLTSRKLLQRKLLDLESDLRGTLRNFGLKVGVVSGGRYEARVRELIAGFPRLAAIAEPLLKVRQVMRQQLAVLHKMLLDTVRDDPVCRRLMTAPGVGAVVALTYRATVDQPQRFVHSRAVGAHVGLTPKRYQSGEIDYDGGVSKCGDALLRTMLYEAAQVLLTHSSKWSWLKAWGVRVVQRRGMRRAIVTVARRLAVVLHRMWVDGSEFRWSKDSAAVPTAA

SEQ ID NO: 221782 - protein, 398 aa, unidentified
MTESSDYESVQVFIGVDVGKDTHHAVAVNRSGNRLFDKALPNDENKLRSLISDLKQHGQILLVVDQPATIGALPVAVARSEGILVGYLPGLAMRRIADLHAGEAKTDARDAAIIAEAARTLPHALRTLKLADEQIAELSMLCGFDDDLAAQTTQASNRIRGLLTQIHPALERVLGPRLDHPAVLDLLQQYPSPEKLASLGEKKLATQLCKLAPRLGKRLAADITQALTEQTAVVPGTNAAVVVLPRLALQLITLRKQRDEVALEVEQRVLAHPLYPVLTSMPGVGVRTAARLLTEVACRAFASAAHLAAYAGLAPVTRRSGSSIRGEHPSRRGNKTLKRVLFLSAFAALRDPISRAYYTRKMSQGKRHNQALIALARRRCDVLFAMMRDGTFYTPTAS

SEQ ID NO: 221783 - protein, 558 aa, unidentified
MCLYTLVVSGGTRRTRLITRETWRRLSYDGRRIRKARPTQRWCLMSPLVSVAPGVAASSLVTRVRHVIPFRRMFPNTASLFPDAPGSMEERSMKDNGRRRRHTPRKSPSVLERINPDVAGIDCGASEHFVAVPPDRDPHPVRSFRTFTPDLQQLADWLCACRVRTVVMEATGVYWIPVYELLEARGLDVQLVNAHHVKHVPGRKSDVSDCEWVRDLGSVGLLRRSFRPTDAIVALRGYVRHRQTLVESAATYVQRMQKALDQMNLQLTRVVTDITGQTGLRIVRAIVAGQRAPAQLAQHRDRRCHASAAEIAAALTGNYRPEHVFVLQQNLTLFDACQSHIAACDHAIETQLHEMLAMIPAPATPLPRPRVTRKAQHHDVSFDVRASLHHLTGGVDLTQIDGIAPVTALKLLAEIGTDMQRWPTEKHFTSWLTLAPKNNISGGRLLSARTQSSANRAAAMFRMAAMSLGRTQTALGAFYRRLAARIGKPQAITATARKLAILVYRVLKGDLVYRDPGADQYTAAQRRRVLRHLRRRAEAFGFTLIDRTTGEVLEPIVS

SEQ ID NO: 221784 - protein, 372 aa, unidentified
MASSTYEEEVNNMLNSITLVDPSVKVIVGVDTHKHVHVAVAINLLGTRLGTLSVSADRVGHAELVEWACTFGTLETFGIEGTGSYGVGLASFVLRQAVRVVEVNHCDRRKRRNNGKSDTIDAETAARSVLSGIATAIPKSADGSSEMVRQIKIARDTAVKARSSAIITLKTLIVNAPGELRETLEPLTNSKLIDSCVALEPGDIVNPSASVKHALRALANRWLALSAEIVTHDKVLDTITMAAAPTLRESYGIGPDSAAEMMIVVGDNPERIRSEAAFAKLCGVCPIPASSGVTNRHRLFRGGHRQANAALYRIVIVRMRWHQPTIDYVTRRSAEGLSKKDIIRCLKRFVAREVYHALMTDHHTRNALATAA

SEQ ID NO: 221785 - protein, 461 aa, unidentified
MRIIGLDLALTAEHKALIADAQGQPLAPILRLRTTARDLTRLFQRAREGTTADEPVLLVMEPTGMAWFPVSVFAQRYQVTAHLVNSQQVADLRRYYKKHAKSDRIDVRVLVKLPVVSPEKLYPLILPNADLFACQRGCKELDHLMTLSTAIQNRIQAIDGFAWPGLDAVLSEPFSPLARWFREHWYPPHQVIAAGAPALEQAWQLESAARTITAPEAWATALVRLAQHTLDLYGTDSPYLDYAYLQAEVTREQALLAVVEAHHHTLQLQTVRPLYRQLHPSRHLETLKGVGQDGAAVYLSFIADPNRFADHSHFRSWTGMIPDSKQSGEREAKGLHISQAGPDLIKKFAYLGAETARQWDPQIAAIYYDQMVKHGKHHNQAICACATHLLDRIWTILKEDRPYELRDVDGTPVTVEQARAIIAERYPVPKEVRQRNNQRTRRARVERRVERKEERESRASQ

SEQ ID NO: 221786 - protein, 373 aa, unidentified
MEEGIKFFVALDVHKDSITIGAAEAASRAPARLVGRTPHDLNKLLKVLTKLGAPLEVDVVYEAGPTGYGLQRALVARNYRCQVIAPSLIPRRAGERIKTDGRDTLKLAESSRSGDLRAVWIPDPEDEAIRDLSRARDDAVSARTQARHQLRSFLLRHDLRYPGRAAWTPAFHRWLATLNFGQGGAQTSFTEYQLAVQAADQRVARLTQSLIGSIGRWRFEPVVQALQALRGLAAVSAIGLVAELGDLSRFEHPRKLMSYLGLVPVEHSSGERTARGSITKTGNSHARRLLVEAAWNYRFKPRIGAPAMRRQQALSSDIKSTAWKAQLRLSRRCAALNARGVQRNKICVAVARELAGFVWAIGRQALKGNVPIH

SEQ ID NO: 221787 - protein, 470 aa, unidentified
MQSILGIACGLDIHKDTIEACILVVNGTGEPEAIREPFTTMRGDLMRLRDWLVSHGCLNVAMESTGVYWKPVYEILEEVEGMNLCLTNSHHMRNVPGKKNDIADAEWIASLFMCGLLDKSFVPEKGIRDLREFTRFYMKLTQSRVRLVNRIEKLLQTHGFKLSSVMSSIVGVSSMRILERLCEFGEVTVAYVTYALERGVRKTPEEIAYAVNGKLPLSSRALLRLELDSLNSYDQQLRNVFEEMMRVAQPYRFEIELLASIPGIDILSATYIIAEIGVDMTRFKKGAGSLTNWAGLSPRDDQSAGKIISSKIMKGNSFVKSILCQCAWAATRTRNTRPSNWYWRNVGRLGQKTAIIAVARKLLVYAYNLIATGEPYDYERDVEYAERIEAYKLASAMKRVAESVKKAKSRHFGTSFCDDIIIGDTASEYARITMINDCGLKTPDSPQSAPVSLLSVVGKKGRPKKNPTLA

SEQ ID NO: 221788 - protein, 355 aa, unidentified
MTVTIVEEARPVTCRAAVTGGVDTHADTHVAAALDPVGGLLGVAEFPATTAGYARLLGWLGGFGTVCLVGIEGTGSYGAGLARYVTATGIRVVEVDRSDRQDRRRQGKSDPLDAVSAARAAQSGRASGAPKGRDGAVEAIRALMVARRSAAGERTRTVNQARALVLTGPDDLRARFAKHKPAALITGLAALRPRPGDVAGHATRIALRELGRRAQFLDGQLVRLDELIVPLVTARAPGLLAVYGAGPRTAALLLIAAGDHPERLRSEAARAHLCGVAPIPASSGKVTRHRLNPGGDRQANHALWRIVFTRLGSDAATRAYAERRTAEGKSKAEIIRCLKRYVAREVYRQLRPAVG

SEQ ID NO: 221789 - protein, 343 aa, unidentified
MKITMIGLDIAKSVFQAHGTDANGKCLLKRKLGRSEVASFFGKLERCQVVLEACGTSHHWARVIRDAGHDVKLIPPDMVKPFVKRGKKNDAVDAAAICLAALHPDTRFVPIKNEEQQSLLSLHSTRTLLVKQQTMLVNALRALAAEFGLIVPLGNSRLPDLLAKIETSPDLPDVMKQTVILLFEQYGKLSESIGCLERRIQEHARQDEDARRLLTIPGIGPMTASLIVASVTDIDTFESARHFAAWLGLVPRQHSSGGKVRLGRITKTGNREIRKLLVLGATSMSFRAQKWTSAAGAWLCKLLERRPTRLATVALANKLARIVWALLSRKEIYRPAGRNVAVI

SEQ ID NO: 221790 - protein, 349 aa, unidentified
MTKVSMIGLDLAKNVFQAHGIDAAGKVVVRRQLRRRQVEKFLAALPPGAVVGMEACSGAHHWGRVVQKLGHEARIMPPAYVKPYVKRNKNDGRDAEGICEAMGRPTMRFVPVKSLERQAVLVLHRTRRLLVRQRTMSGNAFRSALAEFGIVAAQGLKGLRSLMELLADPASAVPDAARLPLRVLARQWETLNADICKLETEIVGAAKTDEVARRLMAIPGLGPIGATAILAAVPDIRVFKTGRDFAAWLGLTPRQFGTGGKHSSGGISKQGDRTLRTLLTVGATAHLRYERARDIKDPWLQALLARRPFKVAAVAYAAKMARIIWAMLVTGEHYRAPNRHHSGSVQVAA

SEQ ID NO: 221791 - protein, 393 aa, unidentified
MHSCLAIDVAKGKSMVTLVSSSGEVLIDPYEVNHSINDFSNLLNRINKFKLDNVSVIMESTGIYHRPIERFFLENNFKVFVINPIYGKMKKRNLRKTKTDKEDCFNLVNLFMSNTFKEYIRPNQLYLDLNALSRQYFALDELCVNIKNRYRNLIYLCFPEYEEIFKNNLIYSNIALEFIENYPHADIISNTRIDKLQNFFKKHNFSYWKSKPIKIKEMASKSYPAVNMNDELVSNLSQMARLVNEYQKAIDIIKYKIIFLAKKSKYFEPINSIFGIGEFTTSIIIAELGDINRFNNIKELTAYCGLDPSIKQSGKSVNVHGPISKSGNKYMRKILYIACLNIIRLTAISKQENDIEIYYRKKRNEGKHHYAAIVACTTKLLRKILALCKQLDN

SEQ ID NO: 221792 - protein, 454 aa, unidentified
MGNYGYLGIDISKGYADLFITTLDKRPLETTFRLYDVPESHRQLGGLIDKWLFQQKFDTLFCGVESTGGYENNWVNYLQDLAGSRPIKVTRLNAQGVKSLSDAALKRTITDSVSAENIAMYLIDFHHKIRWLDSSLSTQVYKDGRRHNTLIRMLKKQRIQLSNQLEKLLYQEFSPLLCYCRHGIPNWFLSLLQKYPTQQAIKKAGPVKLAKISGITLDKANALSKKIESDLCPTSSHMGAIIKSTAAQILSLEATITAEKTDLIKRFNGLQDVELLTSITGIGEQSAVEILLEIEDINRFDDAKKLSAYFGLHPVFKQSGDGKWGNHMSKKGRSDIRAVLFMSSLTAIRYSDLFKRIYANARAKGKNHFNAMGVVMHKLLRVIFGVLKHRLPFDAAKDADNRHKAKEKQTEKQTEAIQSKREQSVKLERYNQVDLDQSPISKRHARKRKKEAEP

SEQ ID NO: 221793 - protein, 482 aa, unidentified
MAKRATSTFERLRGGGQLSRQQRREVGQRLNAADPGLEVVHRDAAGIDIGNESHFVAVPTGRDEQAVQEFGSWTGDLQRMAAWLKGCGIRTVAMQSTGVYWIAVQEVLEQAGIEVYLVNARGTKNLPGRKSDVQECQWLMKLHTYGLLRNSFRPPEEIRAVRTIWRQRGRLVQDAGRTIQQMQKALTTMNIQLANTISDVDGVTGLAIIRAILQGERDPRKLAQLRDRRVRASEEEVAQSLQGNWREDVLFELKQVVEGYDFYRKQIAECDEQLQKYLAELPDGKGSTVSKVASEGVSPGSKKKRRKRKSGRKNDPSFNLEGELKRIFGVDLTSIDGINILTSQVILSELGPDLSAFPSEDDFSSWLELVPRRNITGRKVIKQKSRESKNRVADALRMAAESLSDSDSYLGARYRKYRGRMEGKKTVKTMAHYLACLVYRLLTKGQEYVDRGAAYFEKKRTEREMVSLKRKAAELGMQLVPT

SEQ ID NO: 221794 - protein, 343 aa, unidentified
MQATIAVDLAKNVFEIAISRFPGKVSERHRLSRTKFLRFFAQREASRVLLEACGSAHFWARELQKLGHEVVLLPPHLVRPYRGRHKKTDRTDAKALLEADRNEEIQPVPIKTVEQRSVTALHRLRSAWMETRTARLNCVRGLLREHGHFIPLGAKKVVPKVLELIADAENDLPDPMRLALGEACEEIRDLERRCAGVCKQLEALASTTPAVAHLLSVPGIGPLTATAMVAYVGDISRFPSARHFGSYLGLTPRVHATGQRRRLGHVSKQGDEYLRWLLIHGARSCLLAAKRAPKSKPLYTWALEVEKRRGHNRAAVALANKIARIAWTVWREDRDFTLVRQAA

SEQ ID NO: 221795 - protein, 453 aa, unidentified
MCLEDRPVLEPNAAGVDVGAREMFVAVPPGRDENPVRVFATFTEDLERLTDWLEQCGVTTVALESTGVYWIPLFEILEQRRIRPCLVNARHMKNVPGRRTDWHECQWLQFLHSVGLLRAAFRPGQDVCAVRTLLRHRNELVAAASQHVQHMHKALTQMNLQIHHVINDITGVTGLAIVDAILAGQRDGAELAQLRDPHIKADTETIRKSLEGNWRPEHLFTLGQSRDLYRIYQQQIVSCDLEIEKMLPEFEPRVDPAERPLPPDRKRNRAGRKRRKKNGHPHPEFDLRTETYKLFGVDVTQIPGLQENALPLFSEVGRDMWRWPSAGHFISWLALCPDNDISGGKVLWRGGRKVKNQAGHLFRMAAFSLHHSLTPLGNYLRRMKAKLGPKAATVATAHKIAVIFYTMVKKQVEYDETIWDTRDAQREKRLEAKLKRRAKQLGYELVPIEPQAA

SEQ ID NO: 221796 - protein, 324 aa, unidentified
MSKIKEFFGIDISKDVFDVVDASDKHHQFKNDPSGFKEFSKLLSEKSHCVLEATGSYYQGLATWLYDSSIIVSVVNPLSVKRFIQMRLKTSKTDKLDAQMIRMYGDSEQPKLWSPPSKLIIEAAELHKLIELLVRQRAGLKNRLHALESKGITKSLVVTSVRRQIRNLSNEIADLELKLESVIKQYEPDLLTRLCSIPGVGKRTAIYLIVLTQGFTKFESSRQLISYFGLNPIIRESGSSIRGKSRISKTGDNQVRKLLFMCAFTACEHNKACREIYQRLTAKGKSKKLALIAVANKLLKQSLAIAKSGLYYDENYRSVNVNLG

SEQ ID NO: 221797 - protein, 370 aa, unidentified
MSQSSTLFIGMDVHKDTIAVAYVAQDHGAEVTYLGTIGTRQCDIDQLLRKMQSKAKHLIFVYEAGPCGYWLYRYLRKKDYDCWVVAPSLIPKKAGDRVKTDRRDAMQLARLARSGDLTVVYVPKVHDEAIRDLTRAREDAISDLKDAKFRLKAFLLRHDIRYTGRANWGPAHLRWLSEVVCPTPTQQIVFQEYVRAVHEHTERLQRLEQELHEHVKAWRLYPVVEALQALRGVQFTVAVTLVAEMGDLTRFDTPRELMKFLGLIPSEYSSGEQRRQGSITKAGNTHARRVLVEGAWAYRYPAKVSRHLQLRLETQPKIIQDISWKAQVRLCKRYRRLVSRGKHANVVTVAIARELAGFMWAIAREVPITA

SEQ ID NO: 221798 - protein, 341 aa, unidentified
MKNLFIGVDFSKEKVDVAIIFADGLTETAPRVFNEFKTTVSGYKQLVKWVEQNSCGIDSSLWLFCGENTGDYSKGLCNFLYGKGYDMWLENAKSIKDASGLRRLKSDRADASMIAEYAMRNYDKAIMYEPLSESLAQLRELFLYRQMVVRHRCSFQVRRGEKRLTMEKSPVKTMISQSGRHIVSELNKEVEKIDKRIAELIKSDEELTEVFTIVTSVPGIGTQNAVCLMVYTDNFRRFNYDSRKIACYYGLAPFGKDSGTSVHSDPHVHYMANRQIKAMLTQAALAAVNFNPIMARYYMRLVERGKKKQVALNNVKNKLVHLVTAMVRNRQTFTPEYKISA

SEQ ID NO: 221799 - protein, 383 aa, unidentified
MKKTKGTPRKEVSISEKVLHLAFELSQNKWKLGFSNGEKIRTITIAARNLEQVQEEIEKAQVRFKMRGDVRILSCYEAGRDGFWLHRYLLSCGIENVVVDSSSIEVNRRKRRMKTDRVDARKLLMMLMRYHGGERKLWSVVRVPSVEAEDGRQLNRELEALNKERTMHRGRIRGLLIQQGLEVSNPSGKRFLQELASLCTWEGKKLPEDLKERVVREYERLRVVEEQMKLLRKERERRVQSADKSSYRQVAQLRTLYGIGVTSSWDFVMEMFAWREFRNRKEVGAFAGLTPTPYDSGGSQREQGISKTGRGRLRALIIQIAWSWLRFQPRSKLSKWFWQRFGHGGKRMRKIGIVAVARKLLIDLWRYLEYGLIPEGARVRSAI

SEQ ID NO: 221800 - protein, 315 aa, unidentified
MTESQGPYVGIDVSKASLEVAVWKQDESWSSANNPKGISRLIQRLAELHPALVVVESTGGLERPLVAELCFAHLPVALVNPGRVRDFAKANGELAKTDKLDARILARFAEAIKPAVFVLPSEQEQFLSALMTRRRQVVEMLTAEKNRLLSTPVAARNWVERNIASLEQQLAELNQEIDDFISHDPAFHHKEQILRSVPGVGRITAAIMLSDLPELGKLDRKKIAALVGVAPFNRDSGPRSRKRRTKGGRSAVRSVLYMATVCAVRFNPTLKAFYSRLLHRGKEKKVALVACMRKLLTFLNAMIRDSRAWTPGLSI

SEQ ID NO: 221801 - protein, 346 aa, unidentified
MKVTTIGIDLAKNVFQVHGVDERGKAVLRKQLRRKDLVVFFARLEPCLVGMEACTSAHHWARKFAELGHTVKLMAPQFVKPYVKTNKNDVADAEAICEAVGRPNMRFVAVKSAQTQAVLAVHRARAGLVKARTAQANQIRGLLAEFGIVIPQGIAHLAKSIPEILEDAQNGLPGLMRGLIARLSEHLKLLDSRVAELEEQIRSWHRDNEASRKLAEIPGIGPLTASALVASVGDARSFASARQFAAWLGLVPRQRSSGGKPTLLGISKRGDVYLRTLLIHGARTVIRHAEHRAEQADSWLRRVMARRHKNVATVALANKNARTVWALLAHERAYRPDYVSTRAAAQ

SEQ ID NO: 221802 - protein, 385 aa, unidentified
MRNKTFVPREYDVFAGLDVDKKSIAATFSGHQGFIRSLSMPYKVEDLLNHVRNHFADQKVAFVYEAGPTGYGLYDGLAAQGYTCLIAAPSMIPRAPGQRVKTNRLDSKALSESLRGGQLKSIHVPSPLYRQLRHLTQLRDTMMSEAVGMKQRIKSLLLFEGIAFPPAPAGSQWSFIVKAKLRKLPCSNTVRFKLDQLLDSLEFAEKQIFKSTKEIRRFCQTDPELSQCIEYMMTVSGVGWIVASQLLARIGDWRELENIRQLGGFLGLVPMEHSTGDKTDRGPITHTGDGRLRSKLIQASWSAIRKDGELREFFRSVCQRHPRKVASRVAIVAVARKLSVRISVVLMKQRPYEVRKKVHSAPLTQEETSPQGTTRRRAEPGGKNS

SEQ ID NO: 221803 - protein, 403 aa, unidentified
MIFVGDDWAEDHHDVYVMDAEGARLASRRLPEGLSGIRVFHELVAEHVVESSQVVIGIETDRGLWVQALGAAGYQVFAVNPLAVARYRERHQVSGAKSDAGDAKVLADLVRTDRHNHRSLAGDSLEVEAIKVLARGHQNLIWTRTRHTNALRSALREYYPAALEAFDDLADRDALAVLGRAPTPADAAHLSLSKIRSALKRAGRQRNIDARAQEIAAALRTEQLAAPAAVTAAFAATTRAAVGIIIELNRQITELEAELATHFEAHPDADIYRSLPGLGVILGARVLGEFGDDPNRYTTAKSRKNYAGTSPLTVASGKKRAVLARHVRNRRLYDAIDHWALGAINNSPGARAFYHQHRAAGDLHHQALRALGNRLVGILHGCLRHHTHYSEHTAWAHRTATAA

SEQ ID NO: 221804 - protein, 369 aa, unidentified
MSHATAIGLDVHARSIAAVALSRDTGEVAAKTFGYDPASVAEWILSFEDPKAVYESGVTGFHLVRALRSLGVDCVVGAVSKMQRPAADRRRKNDRSDAEFLARQLLAHNVVEVFVPDEGTEGARCLSRALEDLREDLTRAKHRLTHLLIRWGHVWNELTPEGRRKGTWTRAHWEWIRSIDLPDACAQEALDYYVSEVRHIESQKKAVEGRIARHAAEERWRARVEALRCLKGVEAATAFAIVVEAGVFSRFDSARSFSSWLGLVPSERSSGERVRRGGITKAGNSHLRKLLVEASWHYARATKERKRGLCGGAVPSRISNHAAKGVERLVGRRRGFAARRMRPVVANVATARELSCWVWALGRMCEGTL

SEQ ID NO: 221805 - protein, 350 aa, unidentified
MNQLKYVGMDVHKATTVIVILNALGHFQKQVIIKTKADSIREFIKSESGTLHVIFEEGTQSTWLYELIKPLVAEVAVCDVRKHKTGHKGNHADAIDAEQLANLLRLGSVKSVYKGDTQQRQLKELARAYENLVSDSTRASNRLKAIYRARGIDCDGQDIYKPSQRERWLGKLTEPAARFRAQGLLTELETIKKLRKEARVELIKQSKKHPDYKLLIKTPGFGPLRVAQLLAWVGTPHRFRTKRQFWPYCGLAVITHSTAQYKIVNERIEKQRKATATRGLNRNHCPTLKQVFKGAATRALSCEPFKAFYQERIEKGIRPEMARLSLARKLAATVLAIWQRQEVFDPTKVA

SEQ ID NO: 221806 - protein, 348 aa, unidentified
MRFYTKSHKHYCGIDLHAKKMFVCILNAEGAVVLHRNISTSPEDFLRVIAPFREDLVVGVECMFAWYWLADLCSREKIEFVLGHALYMKAVHGGKVKNDKIDSQKIAVLLRGGMFPMAYVYPPEMRATRDLLRRRCFLVRRRADLFGHVHSTAIQYNLPEIPVRLYNEGPRSTVPDHFPDPEVRKIVQIDLAMIDAYDDVIGALEWELEKTSRRQDRRTLMLLSSIHGIGKTLSMVFLYEIHDINRFESVQDFVSYCRLVKCPHESAGKKKGTGGAKIGNAHLKWAFSEAAVSFLRHNHQGKQLVEKLAQKHGKGKALSILAHKLARAIYYMLKNGVPFNLAKFTATA

SEQ ID NO: 221807 - protein, 349 aa, unidentified
MSQPVKPVVVRMGIDIGKSAFHVVGLDFAGKPVFRNRFTRESLIEFLARASPTVVGMEACPGSNWLARKAALSGHEVRIVPAQFDKPFVKSNKTDMIDAETIAEAISRPTMRFAQPKTEAQLDLQALHRVRQRLVSNKTPVINQARAFLLEYGLTISVGAAYFVRDMPSILSDDQNGLTPSMRRLLEELWQEYRSIEARLLQLRQQIESIASADDAATRLTSVPGIGQLTATAITAFAGTGTQFKSGRHLAAWLGLVPKKFSTGGKQCLLGISKRGNPYLRKLLVHGARSCVLHLDRTKDHLGAWIARMEARGIHRNQIIVALANKLARISWAVLTRQGAFYLRQPKQQ

SEQ ID NO: 221808 - protein, 341 aa, unidentified
MRIVYQRCCGMDVHKASVTTCVLLIDEYGEWRSEKRKFRTMTRDLKEMATWLASLRVEAIAMEATGVYWKPVWNILEAENKFHLLLVNAHHVKRVPGRKTDQKDSEWIADLLQHGLLKASFVPPLTIRRLRDLTRMRVKIRKMLATFANRMQKVLEDANIKLGSVASDVLGVSGRHMLHAIVEGQQDPEQLAALAQGRLREKRAELELALEGHITEHHRFQLKFLLEFVQFGENQLSQLEAEIRRLLIHLEPGLVSSEGAVTAELAAPSAGEEAVATAVKSPLQTVVEFWDTIPGIDELTASTLVAEMGANMDQFPSAGHAAKWAGICPGNKESGGKRLSG

SEQ ID NO: 221809 - protein, 388 aa, unidentified
MTCLFCGIDVAKFEHVASIYDPSTGEFLLDSLHFTNNDEGFKSLLAHLNTYKNYEILIGFESTSHYHQTLFHFLTTHHFKCYLINPFITSKFRSFSLRDSKNDNIDSRAIAHFLSFDYQNLIDEKYQINELKELSKSRDSLMTESARMKIKLKSYLDRVFPELEGIVDINRKAIRAILKEYPTAEDIAGVRIDRLKNIASDASQGKFNPSKIERLKEAAKSSVGFYSCAIGLNIQICIETLEQKERQIDVIEKAICSHPTIKDSPLHQLPGINDIEIGYIMSAITSITQFSSPKKLVAYAGLDPKVRQSGTWSAKTTRMSKRGNKLLRYALIWGSYNMTRKGGPMKSYYDQKRSQGKSHYNALGHCAAKLCRYIFWILNHPKEEFKYQ

SEQ ID NO: 221810 - protein, 335 aa, unidentified
MQIKHFIGIDVSKDTLDLSVVVNGNVLTHYCIGNNSKEIKSTVNKIMKTLGGSFEDTIFCMEHTGLYNRPIVKWLHNNHGKMWLESGTHIRKSLGLVRGKNDKIDSSRIAMFAYTNQHKIRLWTMPRHIIEQIAALLSQRARLVKVRKQLTTANKEQKKFLDKDVMHSLNVYTDRTVVVIDKQIEAIEREISALIKEDEKLNRMYQIITSINGIGFVTASYILVTTNEFINISDPKKFACYSGVVPFEHTSGTSIRGKNRVSHIANKTVKALLHLAALSTLNTPGEIQDYYLRKITEGKNKMSIINAIRNKLILRIFACVKQNRKYEKNYCYKFA

SEQ ID NO: 221811 - protein, 403 aa, unidentified
MPAISGIDWAAEWHDVRISDRDGRALAERRFAHDEAGLSGLIALLLCHRVARVAIERPDGLLVGRLLAAGIRVLAIHPNQVAAARERFRAAAGKSDRFDAFVLCELARTDHHRFAALAPSSDETTALRVLVRTREDLVGVRVHLANQLRAELDASWPGARRIFADVDSPIALAFLARYPSPSDARGLGPKRLQGFLARHAYSGRRCAEDLLERLRSAPIAALGELEAEARRSAIAGLVAALAPIVCQISQLTSQIAGAVRAHPDGPIFLSFFKDPKSIVTAAGLLAEIGDNRARYPTADSLAADAGQAPVAKESGKRRHATFRWACDKRLRSHFGTLTDSTRHWHPWAHDVYGRATARGCEHPHATRILGRAWTRILWRCWQDHQPHDPTRHGNLQHLLTTKG

SEQ ID NO: 221812 - protein, 361 aa, unidentified
MTGTMTWVGLDVHARSTHASAIDVVTGELARARFGADCEDVVAWLSGLRAPARVVYEAGPTGFALYRAARAAGVEIEVIAPSKTARPSGDRVKNDRKDAELLARLAMAGQLTAVAVPSEFIEACRHLSRTREQVRGDLMSARHRVSKLLLAHGRVYEGATTWNKAHRSWLGAQRFEQAPTELALIDLLAAVDGLIARKDALDERLSRLASDERLWPTVARLRCFRGVDTLTALAVHLELGGDWHRFASPRKLFSWLGLTPSLDQSGQSKTQGSITKTGSTYARRLLVEAAWHYARPPRIGATVANRQAGQPDHVLQIAWRAQHRLHRLHTRLRERGKPHNVATVAMARELAGFLWAAATAP

SEQ ID NO: 221813 - protein, 339 aa, unidentified
MTVKTVGLDLAKDVFQVHGISENGRVIFNRAIKRAKLLAFFETLPPCTVGMEACGSSHHWGRQLRKLGHDVKLMPAGYVKPYVKRGKSDAVDAEAICEAVRRPTMRFVDIKTEDQQAILSIHRTRDLAVRQRTQMANMIRSLLREFGHILPIGIEAVTAFAKRHLSGDHPDMPEIANGMLGIQCYQLIGLNERIDGYSKMIEQHALLNADARRLMRIPGIGPITASAIVATIGNAKQFRTGRDLAAWLGLTPLNKSSGGKERLGKITKQGDRYIRKLLVVGMTSRAVMAKRSPEKVDLWTAKIIADKPFRLATTAMANKAARAIWAMLTKKQEYRQPAF

SEQ ID NO: 221814 - protein, 324 aa, unidentified
MSKRSIICAGIDTGKRRLDVALENRAQELQVENTAEGHRQLSAWLRKHKVARVGIEASGGYELAVVSQLRRDGFVVVVFQPAQVRAYAMFHLQRAKNDKIDVGLIAACTAVTKKIYPPPDPRLAPFAEIMTFIDQINEDIARLQTRQESCRDDRIEGHWNSEIRRLRALVRVELKQVVAGIRQHDDLAKRLDLILSVDGVGLRTAVAILVRMPEIGSVTREQAAALVGLAPYDADSADYVGQRHIAGGRERLRGNLYNAALPASFRWNPQLIALYERLIAKGKPHKVALVACARKLLIYVNIVVQRGTPWTKEMPALAMARRNN

SEQ ID NO: 221815 - protein, 345 aa, unidentified
MKKGITIGMDLGDKKHQVCILDKTGKIIVEEEVAGTRTAVTKFSKRYRGAVVAMETGPHSRWVSRIAEAEGLEVLVGNARKLRLIWQSRQKSDTRDAVMLARIARMDPELLCPIRHRGEQAQMDLEIIRARDLLVRERTRMVNHVRGVVKSTGERLAVSSAASFGHKAKIPEALNEALQPMLEMIRELTKKISAYDRMVKEAVTDKYPETERLQQVGGVGPLTALAYVLTLEDPEQFAKSRMVGAYLGLVPRLDQSGQIDKQLRITKHGDGYLRRLLVGSAHYILGPFGQDCDLRTFGLKLMQRGGKNAKKRAVVAVARKLAVLLHALWRSGQQYEPKRKQQAAA

SEQ ID NO: 221816 - protein, 356 aa, unidentified
MSKTNPVKIIIGVDTHKEIHVAVAINGIGAHLGTLTIPVSPKGYQNLETWARAFGSIHAFGIEGTGSYGAGLARFLQAKAHTVVEVNRPNRQLRHQNGKSDPLDAESAARAVLGGQANARPKSADSSVEMIRHLKVARDTAVKSRTQAMVTLKTIIINAPAALRQALDRIIGKMALIRHLAALRPGPILSVTASAKAALRAIARRWLTLDAEIRAHDADLEELTASCVPAMLEAHGISTGTAAEMLILVGDNPERIRSEAAFAKLCGVCPIPASSGKTNRHRLNRGGNRQANAALYRVVIVRMRNRQPTLDYVKKRKADGKGKMEIIRCLKRFVAREIFGYLCGARRSLPSISKAT

SEQ ID NO: 221817 - protein, 341 aa, unidentified
MLKFTIGADISKDKINFALRFLNDYLLEKEVENTTSALNKFIKEVQSLVKSKAKEKKSDYSVEFIMEYTGIYGNLLIECLAGHKITMYVVSGLEIKKSSGITRGKNDKIDAQRIADYGIRFTDKLTPYSLCDNTLTELKCLNTKRSQMIKVKVKLTQAKDDNKKFLGKDLVKKLDSFDDPVVKVVDDIIDKIDAEMLVLIKSNAAFYDNFLIAQSVPGVGKMIAIAFICATNNFTTFDSAKALGSYCGVVPFGKESGRYRGKDRISHIANKRLKTLLHLGALSAVGGNNKFAIYYQRKVTDDKKNRMLALNNVRNKIVKTLFACVKNKTNYQSDYSYSAAA

SEQ ID NO: 221818 - protein, 424 aa, unidentified
MDAKNQNSWEQHRYYMGLDWAKKEHAIAVVDGHGRIMVETTIEHTAEGWHRLREKLVDLAGPDLSFVAATIETNRGPAVERLLELGCVVYPINPNAAQCYRSRKTPSGSKTDRLDALSFADALRTDGHGWRPLNPEDPKTQELRLLCRDEMSLIEQRTTLVNQLQQALHEYYPAALEAFDDWTSPSSWAFVERFPTPQALKKTGKRHWEKFLHTHRLYRPETYQKRLEIFASATEFCGSQAVTNAKSMLAVSLAKQLRLLEQQLKAYRERIEALFQDHCDHSIFASLPGIGQKLGPRLLSEISDDRDRFPAYEGLQCYAGTAPVSFQSGQIHRVRFRYACNKNLRAAVHLWANLSRKKCAWAQVYYHQKRLEGKSHACALRCLGQRWLKILWKMWQTKTPYDEQMHTRNQIKHGSWVLALIASK

SEQ ID NO: 221819 - protein, 315 aa, unidentified
MSEPEITKVSVGIDVSKNTLDIAVHETGETWSSPNDSHGCATVAAKLKLLKATSIVLEATGGFETLVTATLSAADLPVIVVNPRQVRDFAKATGQLAKTDRIDCRVLAHFAAAIDPPVRPVKSAETQHLEALLARRRQIVEMLVAEKNRLANHHDRAVVKDLNAHIAWLERRLKSSDDELQRVLKASPAWRERHDLLRSVPGVGPVLSLTLLAQLPELGQLNRREIAKLVGVAPFNWDSGQWRGSRHIWGGRATVRSPLFMATLCAIRINPTIRYFYRRLIVAGKAPKVAITACMRKLLTILNAMVKTQTSWRTA

SEQ ID NO: 221820 - protein, 440 aa, unidentified
MQKVITFEQVNYSAAGIDIGSEKFFVSVDGQQVENFETYTSDYYRCISYLKQHCIERVAMEATGVYWISLYSLLEQNGIKVCLVNPRETRSRKGHKTDVQDCRWIQRLFSAGLLKESFIPQGLLFEIRYLVRERMDIIEMGSTYVNKMQRCLELMNIKLTSVISQIHGKSGLRMIRAILEGERNPGALLLLCDERIINKKANRVLQALEGNYNNTYLFMLKQNLKLWEDHQQQITDIDGCIEQLLLSLTRDKKVDDEKVGRAKKIRHHQPQIKNLHEMMVKLFGVNVSSVSGINNYTLLRLVGETGADMNRFPSVKHFISWCGLAPGHYQSGKFRKNKRMPCSKTGQIFKELAQGLENSKTIAIGSFIRKLKAKRNAPVAYKAGARKIAEAYYNALTKGTDYVEHGIKKYEEKLHQRERAILKKLAKKHNMQILEKEEAA

SEQ ID NO: 221821 - protein, 406 aa, unidentified
MHHLEREVTGGVDTHSEQHVAAVVDEAGRILGTEAFPATGKGYRQLLSWMGSYGCLVKVGVEGTGSYGAGLARYFSDESVTVVEVNRPNRQARRRRGKSDTTDAEAAARAALNGEATGTPKSADGPAEALRALRVARRSAVKARTQAANQLRDLMVTAPEELRVKMRGLRTQERVAICARLRPGSYLEPNEATKAAMRCLARRHQELTVEIEDLDAVIAPLCHHANPALLSALGVGPEVASALLVAAGDNPDRMHSEGSFASLCGSSPVEASSGKVTRHRLNRGGNREANNALWRIVMVRLACDNRTQIYADRRRAEGKSKKEVLRCLKRYVAREVYYLLVSPPVITDVAELRERRVANGITLATVAAQLGTWASRVSALERGLTHNQDLAHRYRDWLDDRARLSA

SEQ ID NO: 221822 - protein, 323 aa, unidentified
MQTPSVVLNIGADVAKNAIVVACSEGSFPVREITNQRTALLAFLNGLPAGSRIGVEATGSYHELFADAAHQLGFLVFLLNPKDTRHYAKAVGLRGKTDRVDAELIARMIAHEHTKLHAWIPPTPQQRELDRLIKRRATLIALREGVEMSLHELGGFAADLKALRTRFNQLIARIDLGVKALIDVSPDRKQHFTRLCTISGVGPVVGTALVNTLERVPVKSADAFVAFTGLDPRPDDSGQHRGKRRLSKRGPAELRRLLYLAAMSAIKTKTWRPLYEHYRAKGLSSTAALVILARRIARTAWSIYTHKTEFDPARLTNPVLRTH

SEQ ID NO: 221823 - protein, 337 aa, unidentified
MTIIRIGLDTAKHVFQVHGVDENEHTVVRRQLRRGEMRKFFNRLAPTRIGLEACGASHYWARLLRGLGHEVVLLPPQYIKPYVKRGKNDANDAEAICEAMSRPGMRFVPIKSAESQAELMLLGVRDLLIKQRTAVINTIRGYAAEFGVIAAKGPVKVAELLQQAHAEEANVPALALDMLRLLAAQLDALGVKLKLLETRLMALHRENPLSQCLASQPGIGPIGAVSFALRVTEPKSFRSGRHFAAWLGLTPKDNSSGGKRRQGRISRQGNEALRKLVVLGATAVIRFARPGHASPWLLNLLARKPKKLAAVALANKMARTLWAMMVSGEVYRRPLPA

SEQ ID NO: 221824 - protein, 312 aa, unidentified
MINQNEISYIGIDVSKMTLDVFILPAKKYLQFTNDCKGIEKLVKKLSLFPQPHIVFEATGGYERPAAEALTKSNFHVSISNPRQVRDFAKGFGKLAKTDKIDAEMIALFSEKVSPEMNVNCDPEQRKLAEYAARKQQLTKMIRMEKNRLEHADQDIKKCIIQVLKLLEKQLEKIISLQQQLINENNSYSRRNEILQSIKGVGPAVSSEIIANLPELGRLGRRQISALVGVAPLNHDSGMMRGKRAVKGGRMSVRCMLYMAVVCGIRYNPVIKSMYERLRSAGKLVKVAMTACMRKLLIIMNAMIKNDEVWNS

SEQ ID NO: 221825 - protein, 388 aa, unidentified
MQTVADRPEAPTAIRTDLGAIFVSLELSRSTWLITSLSPGGGEKMSKQVVRGGDVAGLLERFARLREKARARTGKVFPFVVIQEAGLDGFWIDRALQNEGIESHVVDPASIATSRRRRRAKTDGIDGEVLVRALLAYKRGEPRVCAMIKAPTPGEEDRRRLCRERKVLIVERVRHVNRVKGLLFSQGISGYEPLRRDRRERLDTLQTGDGRLLPVHLKAQVCRELDRLELLLEQIKAVEAERDVLLAAQQVAAPAPAAMLLDIKGIGPEFAAILWSEGLFRHFDNRRQVASYAGLAPTPWQSGSVDREQGVSKAGNPRLRTTLIQLAWLWLRHQPQSALTLWFEERVRRNGGRLKKTTIVALARKLLVALWKYVTAGVVIEGAVMKRT

SEQ ID NO: 221826 - protein, 402 aa, unidentified
MNSVGIDISKGRSTIAVMRPFGEIVISPFEVRHTDSELSELARRLKSLNGETRVVMEATGNYHAPVAKLLHDAGLYVSVVNAKLVHGYGNNDLRRVKTDRKDAVKLANYGLDRWLTLPRYIPEENTRLLLKNCYRQYRQYSKVQTVLKNNLISLLDMTFPNANRLFVSPARADGSEKWVDFVAEFWHCECVSERSLKSFVNKYWRWCRKHGYNFSEEKAHAIYDEASGHIGVMPKSETTKLLVEQAVSQLSATSAALAALKQEMQSLSSQLPEYPVVMGMFGVGPILGPQLIAEIGDVRRFYSKKALVAYAGIDAPPNDSGDVIGRHKSMSKVGASSLRRTLFLIMSAYLQNSPPNEPVYQFMDRKRSEGKPYRVYMMASANKFLRIYYATVKAYLETLEQF

SEQ ID NO: 221827 - protein, 402 aa, unidentified
MATPAQVDVWVGLDVGKGEHFADVLDDDGERLFARAVSNDQADLEALLDRAARHGTPGLVIDQPGSIAQLALAVAARRGVPVAYVPGLVMRRAADLYPGEAKTDRRDAYVLADTGRTRRKQVHWLDAGSDELLAALRVLNGFDIDLAADATRLASRLRDALTSISPALERAVGERLGQPGVRDLLAKYPTLTALRTASQSRIERTVKARSPRIAAKVTAAVAAALATQDVTVPAEAATGRVISELAAELDRVSARRDALAAEIEEAFLAHPFGELLASMPGIGPRTGARILAEIGDGSAFANGSKLAAYAGLAPVTRQSGTSLAGESRSRRGNHRLKNAMFLAAFASLRDPASKAFYDRKRSEGKRHNAALICLARRRCDVILAMLRTRQPYRAGQADLIAA

SEQ ID NO: 221828 - protein, 343 aa, unidentified
MYYIGLDVHKRTISYCVKDAAGHVHREGKIGSTRRELDGWIKTLPGPRMMAMEATIFSGWIYDHLLPHAEKVKVAHPLMLRAIAAAKKKNDRIDAAKIADCLRCDFLPECHMASTEIRDRRRTLRYRNLVIKQMVQMKNRVSGLLMETGVDYNKRRLHKVGYFEDLMSTNKEVNQSIRPLLKLSRETIERGQKLDYALVSSLERDPLLAERLQRLRTVPGVGPITALTWALEIGDFTRFESVKEAVSYCGLCGDERSSADKVLRMPLSKQRNKYIQRTPIEAAKLATRYCHELAVIYEKERQRGNANRATLAVARKLVAYLLAVERRKQDFVPAEEFRSTAVA

SEQ ID NO: 221829 - protein, 322 aa, unidentified
MNKVKGIDISKATFDVFWQENGKNIPAVFTNDPKGFHLFFKSLKPGDHCVMEASGPYYMRLALFLHSKGVIVSVVNPLSVKRFCQMHLVRAKTDKKDAKMIAAYGEMVRPGIWNPEEDHIMEMRDILTTLENYEKQVTQLHNQLEAEKHLPVLSKTAKQSKEKVLRFTEKEIEKLSDELQALAKFHCKDSFEKLQTIPGIGPKTSVMLIVLTNNFEHFEDARKLSAYAGLSPRIYQSGSSIKGKGHICKIGNGRARKLLYLCTWSAQNSNPQCKALKERLEKKGKPIKVIKVAMANKLLRMAFAVAKKNVAYDKNIGLKTCF

SEQ ID NO: 221830 - protein, 309 aa, unidentified
MKYYVGLDVSMKTTFISIVNQEKKIVFESEVITDPCTIFSTIKSTKLDIENCAIESGAISHWLVKELLKRKIPVVCVDSRKMAKILSINVNKTDKNDARLIAEALRCGFYSEVHQKNQEDAEMQILMGTRRTLIEVSTKLKNTIRGHLKIFGIRLGTASNKKFDNLVRSALQNKPEVVQLGLKSLLETFKNTNNEIEFLEKKIEEMAREDEDVKLLTTIPGVGVITAFTFKTCLGDPSRFKRSSSVGAYFGMTPTQYSSGDIVKQGKVSKCGNSEVRSLLNEAAFSIIYSTKSWNRIKRKLFVYHRKTP

SEQ ID NO: 221831 - protein, 327 aa, unidentified
MEPAYIGIDLHKAFFQVCAVNGTGERQWEHRWPTTEGGIAALLTRCDGQSRIAVEASSPTWAFVDRIVDHVGAVHVVDTRKTRIKAGYAAKTDRLDAQRLADALRRDSVVGIYYPPAAIRDLRELGRYRCQLARLQASLKQRLHALLLRQGVAAPRALFTKRGTAWLDGCAVGGWAGHELRGLRQVLTDVRAQLVPVVTAVRTIAATDPIAAALDQRPGFGPVFSVTLRAEVGTITRFPDGAHLASYAGLVPRVERSGGRQWTGPITKTGSPWLRWTLVEAAIHQFRRPDDLGRWARQLAVRKGVLKARVAVARALCDEVWAVWPRA

SEQ ID NO: 221832 - protein, 320 aa, unidentified
MLSFCGIDVSKDRLDVMVLPEGDRSWVPNDVAGWAELVEQLRDCSIAAIGIEASGGYERGAMRALLAADLPVRQVNPFKLRQFARASGVLAKSDPLDARMIASFVATMPTRPAPRQAPAAERLTEMLAVRRQLSAEKVAAENASRLVEDAMLQRLSRRRIARLAADVDVLDQRLVEIVATDVALAHRYRLLTSMPGVGSVLACTLIALLPELGRLSRKQVAALVGVAPYAFDSGALKGRRCIWGGRANVRQVLYMAAMSASNWNPVLKAFHDRLAAAGKLPKVVIVAVMRKMITMLNAMVRDDVLWADRLSGRHIVPTTR

SEQ ID NO: 221833 - protein, 377 aa, unidentified
MEKDSRFVGLDVHAETIAVAVAEPGGEVRSRGTIPNTCEAMRRLVKQLGPPETLRVCYEAGPTGYVLYRQLTALGVPCAVIAPTLVPVKAGDRVKTDRRDAEKLARSYRSGDLTPVWVPDPGHEALRDLVRAREAAKKDQLRARHRLGKFLLRQGRRAPTGSKAWGVKHRAWLQTIRFAHPAQDVTLLDYLTEIDHAADRIVRLERAIATAADVAPAPVRAVIAGLQALRGIAQLSAVSIVTEVGALSRFAKPRQLMGYSGAVASEHSSGSQTRRGSITKAGNAHLRRIVIEAAWAYRHRPAIGGTLRTRQEGLSEEVKALAWKAQHRLHGRYVRLLAKGKAPTQVVTAIARELLGFIWAIGVHIEQHPAGGAPAAA

SEQ ID NO: 221834 - protein, 388 aa, unidentified
MPQQRKPNDLGRSLISLAMDTTLIAVVELSLSSWLVAGIVPGVERQPLKKLKTDENALLALLNRWRDEAVRSGHKISRIAVAFEAGRDGFWLARWLKARDIEAHVIHASSIAVSREHRRAKTDRLDTELLKRAFVGWLRGERDHCKTAAIPSLREEDAKRPSRERESLVGEQSRLVNRMKATLIRLGIRGFNPKLRHAEQRLETLRTPEGEPIPPNTLAELKRDMQRRRFICDQIRSIEQDRLERLERTPDTEPHAMVRLLARITGIGIETADLLVHELLLRNMRDRRAVARYGGLTGSPDRSGGTNREKGMARSGNARVRRGMIQLAWRFLLFQKNSALAQWYRRRTEHAPKARKTMIVALARKLLIALWRLVRESVVPEGVAMLPA

SEQ ID NO: 221835 - protein, 342 aa, unidentified
MDHFAGLDVSVKETSVCIVDDTGKIVREVKVASEPEALLAVLKNPAYRFKRIGLEAGPLSQWLFSALAEAELPVICVETRHMQAVLKAQINKTDRNDARGIAQMIRVGLYRPVHVKTLRSQKLRMLLTHRKLLQSKAIAIENDLRATLRNFGLKVGMVGTVKFEARIKELVENQPDLASLVEPLLIVRRALREQIVILHRRLLAIVRDDEVCRRLMTIPGVGPVVSLTYRATVDVPARFRKSKAVGAVFGLTCSKYQSGEVDRSGSISRCGDEMMRVMLYEAAQSMLRSKKWSWLKAWAMQIARRRGMKKAIVALARRLAVIMHRIWVDGTEFRWTREAATA

SEQ ID NO: 221836 - protein, 346 aa, unidentified
MVEYVGLDVSKEATAYCVKDEDGRVLARGKVASDPNALFEVLKEHCLCLERIVLETGTLSHWLARELGKRGLPVTIIDARRAHAVLRLQHNKTDENDAALLAELARTGFYRSVAVKSEGAQRWRLLLKARAHLVAQRRSRQNVIRGLLGTLGLRFARGSGKFARRVRTLLVERPELALVFEPLLGELAALERSIAQLDRVVAAEAKAQPACRLLMTVPAVGPVTALAYLATIDEVGRFGKSRALGAYLGLTSRRNQSGEMDYSGRISKQGDSLLRALLYGAANSLLTRVRRAHPLKAWARRIKKRTSHKKACVALARKLAVVMHRMLTTGEAFAWPQADTKETATA

SEQ ID NO: 221837 - protein, 323 aa, unidentified
MSLYFVGIDISKYKHDCCIISATDQKVISKFSIKNDKVGFEELITTFNSLSSPEDIRIGFESTAHYALNLELFLENAHHSFMEVNPVLIKEYKKSTTLRRTKTDSVDCESIARWLMTVEYKPHSKGFYHAYSLKSLTRLRDRLVRQRSFYLVKITNVLDHTFPEFKPFFHERLSKTALYLLENYGSAEKIARMNSASYEKLRSISRGKFSPQQFIRLKELAANTVGVNNSIFDVELNSLLTLYKSLVDEIKTLESEINRLVDEVHPHYMSIPGIGPISAAIIYAEYGDISNFSSPNQMLAFAGIEPSVQCSCTVKKQTTENKR

SEQ ID NO: 221838 - protein, 311 aa, unidentified
MRVRADRSQRDRLLPFAQPYALRVWAVEGARGLGALLAQQLVAAGERVVDVRAKLSARVRILDNECSDKNDTHDARSAAIVALRNRKLRAVALEDHAAVLRMHAKRHHELTGLRTQAICRLHAVLATIVAGGLPRNLFADRAALELRRLRPTDAVGQARRQVAIEHLADVRRFDRMLVELRPKIVAAVAVSETTVTDVSGIGVIMAAYVLGYTGDVRRFASKDRFARYNATAPVSASSRPSPHHRLNLKGNRQINYAMHIAAVTQLAHDSPGRAYCDRKRAEGKRDKDAMRALKRRFSDAVYRRLVADARS

SEQ ID NO: 221839 - protein, 447 aa, unidentified
MELLYERCAGLDVHKKNVKVCLKTPGSGGRQNKEIRTYETKTVDLLEMRDWLKEKGCTHLAMESTGVYWKPIYNLLEGDFEILVVNAHHLKTVPGRKTDVKDSEWIADLLQHGLLKASFIPSAPQRELRELTRSRTRLVEERAREVNRLQKTLEDTNLKLGDVVSDVMGKASQLILHAVVNGETDPRRLASFAVGRVRASQQELERALRGNVTAHHRFMLGEHLKQIETLNAAIGRVSLELARRFTPPDDPGADETAQRASLEPSGATHEEAGRLPSSPEMSWQKAAQLIDEIIGISEEAAQGILAEIGIEMEQFPSAQHLASWAGVCPGNHESAGKRLSGKARKGNPWLRRLLVQAASAAGRSKNTYLAAQYHRIASRRGAKKAALAVAHSILVIIYHILRDQSSYQDLGGNYFDERDRQAVQKRLVKRLERMGYQVELQSMAQAG

SEQ ID NO: 221840 - protein, 376 aa, unidentified
MERGSLMLNTTTFVGLDVHARSIKAVALDAMTGEVRSATFAYDAAAVAEWVGSLDPAAKCVYESGVTGFDLQKKLTALGVDCVVGAVSKMIKPSADRRRKNDRNDAEFLARMLSVGNVVEVWVPDDECEAARDLVRALDDAREDLKRCKQRLSKFLLRHGLVFSETTPTGRRKGNWTAAHWAWIRSIEFPEKADDEVLAYYIDAVRQAMENKKRLEKLVEAEASKPRWKKRVDSLRCLKGVDAMTAADIVFEAGEFSRFKNARSFAAWLGLTPSERSSGESVRQGGITKAGNKHLRRVLVESAWHYISASPHPKDLAKGQAPDPAARRHAAKGIRRLVKRREEMLGRGVHKNKANVATARELACWCWAVGRMVENG

SEQ ID NO: 221841 - protein, 310 aa, unidentified
MNRNTGMNAGQIIGTMNDKQVIGLDIAKHVFQLHSVDMGTGEIVNVQIKRAQVLEHFVNRAACLIAIEACGGAHHWARELTAQGHSVRLLHAKIVRPFVSGNKTDATDARAIWLAVQQPGVKFVGIKTAVQQATLTLHRQRELLMKMRTMQTNALRGLLYEFGATFAKGRNALLTDVEKALEDLSAKLPQMVRDSLREQVARIKAMSEDMLAIEKRMGLQLKADPQMQRIAQIPGVGLLTATGAIATMGEASAFKSGREFCAWLGLVPKQTGTGGKVRLGSISKRGDTYLRTLLIHGARSVLAHAKEPGP

SEQ ID NO: 221842 - protein, 369 aa, unidentified
MNTTTFVGLDVHARSIKAVALDAMTGEVRSATFAYDAAAVAEWVGSLDPAAKCVYESGVTGFDLQKKLTALGVDCVVGAVSKMIKPSADRKRKNDRNDAEFLARMLSVGNVVEVCVPDDECEAARDLVRALDDAREDLKRCKQRLSKFLMRHGYAFSETTPTGRRKGNWTAAHWAWIRSIEFPEKADDEVLAYYIDAVRQAMEDKKRLEKLVEAEASKPRWKKRVDSLRCLKGVDAMTAADIVFEAGEFSRFKNARSFAAWLGLTPSEHSSGESARQGGITKAGNKHLRRVLVEAAWHYISASPHPKDLAKGQAPDPAARRHAAKGIRRLVKRREEMLGRGVHKNKANVATARELACWCWAVGRMVENG

SEQ ID NO: 221843 - protein, 442 aa, unidentified
MTTPIPEIVLAIDFSLDTLDTSLRDDSKEWMWMHHAHKNNWPGFQELKRDLLVELNQHDPVKLIIAGESTGPYWHHAFYQFSHDEELRPFSPELALHNPAHIKGYRRSLPERDKADPEDARLIDQYHRAYGVKHPYQFCDRYARLRTYSRAYSRVIHSLASEKAYLLSVLYLWASEYVREKKREEMPFSDRLGATSMYILDEFTDIHAVANIPLPELTELLKQRSHNSFREPESNARRLHQVARHSYPIPEPEADATHQVIHHTLAHIRMLSDNQSAYRQLIEQELDTLPEAKLALDFKGLGSILVAGCLSEIQDTSRFVTGNKFDRRRQEYRPRTYRDGQAAVAKLAGLWWPKRDSGRVQGVQPHLARERNPHLRYWLVQAAHTLRMSQPEYAQFYRKKYREATSHHHKRAIVLTARKAVRLIFALLHKGRQTALQEGLLT

SEQ ID NO: 221844 - protein, 378 aa, unidentified
MRKIALDLGSRKTAYCEVREGQVVGRGTVTDVQSLEPLLGPEQPAAVVAIEACRESWYVHDLLTSWGNQVVLVDTTRSRRLGIGQHGRKTDRIDAEVLALALDRGGIPVAHLLSPHRRELRRRLGVRRALVESRAQMVTTARGLAREQGERLPSCASHHFVSNVRKLQLSTELSTVLEPLLKLLDSINTELESVEEVLAKLCVTEPIISLLATAPGVGPIVAASFVSVLDEAKRFSSAHHVESYLGLVPSEDSSGGKRRLGAISKKGNKYVRALLVQSAWAILRSPHRQDPLRLWAEAVAARRGKPVAVVALARRLVGVLWAMWSKGTAYEPARLAVATSRGLTSSAQTLQFRADALKKAGKKQSMKRLSAQEATSST

SEQ ID NO: 221845 - protein, 341 aa, unidentified
MSIATLGIDLGKTSMHVVGLDASGKPVHRKKLTRTALIRFLSNLAPCRVAMESCAGSHDIARKADAMGHDAVLLPAQFVRPYTKGQKNDNSDAEAIAEAATRPTMPTVSIKDATQQEIQFLHRTRQGWIKQRTETANRVRAMLLEFGITVPKRILNLRRALPGILEDAENDLPDGVRQLVADHWQQLQDLDDRIADITQRIERIPVRDARAARLMSIPGIGPMIATAMVAAVGDGTQFTQGRGLSAWLGLVPQQFTTGGRPRLLGISKRGNRYLRTLLIHGARAVLQQAHRGDDALRRWIQRVNGRVHRNKAAVALANKLARVAWAVLTRGETFRASAAAA

SEQ ID NO: 221846 - protein, 411 aa, unidentified
MEAIVERAAGLDVHQGSVVACIILGAAGRRPTKEVRSFGTMRQDLAALRAWLLERGVTHVGMEGTGVYWQPVHAALEDAFTVVVGNAAHMRNVPGRKTDVKDAEWIADLVRHGLVRASFVPPPEVRVLRELVRHRKALVGTLAAERNRTLKLLEGAGIKLAGVMSSVFGVSGMLMLKALADGTAAPAAMADLAKRRLRRKRDRLALALDAPLAEHQRFLLGLHIRRLEEIGRDLAEVEAAIGAAMRPFAAQRALLLTIPGVDALTAAAIIAEIGVDMAAFGTAQRLAAWAGLCPANHESAGKQKRRGTRKGNSHLKATLVTAAVCGARTRGSYLRDKFHRLRARMGAKKAAVAVAHKILVAAFHLLQRGTVFVDLGAGYLDRVDKHRTAKRLVRRLDALGYDVMLRPKAAA

SEQ ID NO: 221847 - protein, 363 aa, unidentified
MITAWLPKFNVMISSQITATPKLFIGMDVHKKSWTCHFKTDLFDYKTVTMPAEPNCLKEYVFKNFPDHEVSCCYEAGCCGYWIARKLQQLNWKVLVVNPADVPRTSKQNWQKTDKIDCRNLCDHLRKNNLHSIYIPGEEQEQLRSLFRRRNHLSRQLRTIKNHIKSQLLYYGIKLPAEFDNPNWSHEMKTWISKIEWKYSAASLAMQSRLKQLDFIWYETLDISTALRAYCRKHYKKDYYLLKSIPGIGGITAAGILAELGDIRRFNCIDNLAAIVGLVPGIYESSDNKICLGLSKRSNRYIRSLLVEATWVAVRTDMALQAYYRKHSAKEPNKAIIKVAHKLLSRMRAVIITGVPYQTGLIK

SEQ ID NO: 221848 - protein, 395 aa, unidentified
MNKIVHYIGLDVHKDSIAVAIAPQNSTEVRRYGIIGGTLDAVDKLLKRLSQPNIELRLVYEAGPCGFVLCRHLRHKGIHCDLVCPSLIPKKASDRVKTDRRDADQLARLYRAGELSPIQVPDQEDEAIRDLIRARTAAVHDQRRARNRLKGFLLRLGFRYTGKTSWNEAHKRYLSGLLMPRPAQQIVFQEFIHAIDDAAERVARLTQAVEDALPGWKWEPVVRALMSLRGLQVLSGMTVIAEAGDLSRFENPRSLMHFFGLTPSEHTSGDKRVQGGITKCGNAHCRRVLTEAAWHYRLKPLVSEAMQKRQEHQSKEVRLIAWKAQQRLHKRFRQLAVRKKSVVAVTAIARELVGFVWAIACQVKPAPRPPAPEVIRTCQGKVYRLDPEKKMPKTK

SEQ ID NO: 221849 - protein, 340 aa, unidentified
MGEVSTIGLDIAKSVFQVHGVDVAGLVVIRKRVSRAKLLDYFGELPPCLVGIEACPSAHHWGRELQGLGHTVRLIPPSYVKAYLKRSKNDANDAAAICEAVTRPSMRFVPIKTKEQQTVLMLHRTRQLLVRQRTMLSNALRGHLAELGIVSAKGRNGTAELLRIIADGRVSSAVCGILDVLARQYSAISTEIASIDKNIMVLHRACEASRRLAEIPGIGPIGATALVAEIGDWKAFSSGRSLAAWIGLVPKQYTTGGKDRLGSITKQGNRYLRWLLVVGAMAVIRYARKHGTEKRPWLGRLMERRPTKVAAVALANKIARMAWAIMVRDERYREPELLPA

SEQ ID NO: 221850 - protein, 341 aa, unidentified
MQKNSYFIGLDIACDDFVASIYESPEKPVITKEAIENNPDGFSILVSWLKEQGINSSNSVICMEATGVYSEACAHYLFANGFKVSVEPPLKVKRAFDPIGHKTDAVDSRQIAEYAYRYSDELRFWQPKQEIVEKIKQLLTAREQFTKQSTAIQNSIKAYERHVIKVPLIINAHQETLKELKKHIKAIDKELDRLIRQNPTISQITGQLKSIPGVGLLLASDLIAITGAFNDISSHKTLAAFLGICPYQHQSGKSVYRQPHMRNFGPNYARKLLMLAARSCATHNIEFRKYYMRKLAEGKAKQLVLNNISNKIIKIACALIKNNAQYNGTYRSVNPLCFNLA

SEQ ID NO: 221851 - protein, 349 aa, unidentified
MSPKLNAAIAVIGIDIGKNSFHVVGLDWRGAIVLRQKWSRGQVEGRLANLPPCLIGMEACVGAHHLSRKLTSLGHDARLMPAKYVRPYSRGQKNDFRDAEAIAEAVQRPTMKFVATKTAEQLDLQALHRVRERLVSQRTGIINQIRAFLLERGVAVRQGLRFLRAELPRILATPCDVLSPRMVRVLEDLAADWRRLDERIERLSSEIEALARRDAGCERLMSVPGVGPIISSAMVAAIGAGEAFSKGRDFAAWLGLVPKQISTGDRTILGKISKRGNRYLRVLFVQAAWVVLIKPKSWQRHGLKPWLEAAKRRLHHNVLAIALANKLARIAWSVLAHGRTFETSKIHAA

SEQ ID NO: 221852 - protein, 341 aa, unidentified
MAKNVYFVGLDIACDDFVASIYQSPKESIITKEGIENTFEGFNVFIPWLKEHGLSKTNSIICMEATGVYNEAIAHYLVSQGFKVSVEPPLKVKRAFDPVGHKTDPVDSRQIAEYAYRYSDELRFWKPRDEIMEKTKHLLTAREQFTKQSTAIKNAMKAYEKHIVQVPLIVKAHRQTLREIKKHISEIDKELDRIIRQNPSISKMNNQLKSIPGFGLLLSTSLITLTGAFSDISHYKTLAAFLGICPYQHQSGKSIYRQPHMRSFGPAYPRKLLTLAARSVATHNDVFKKYYARKLAEGKDKKLVLNNISNKLIKLACALIKNDSRYTATYRSVNPMFLDIS

SEQ ID NO: 221853 - protein, 311 aa, unidentified
MNTTLCGIDISKDWLDAHIEPMGAANRFANDAAGIADLAAWCQNHDVELVIMEASGGYERLAFLLLWEMGQPCGMANARSVRYFAEAMGFLEKTDRIDAAVIARYGAVKRLKPTPPPSAAQQRLKALVARLSQVGGDLTIQKQRKSTADAETIASLDEVIALLARQSRRLEGEIATLIDDDPLWACLDRAFRSLKGVASRTVARLMAQLPEIGILSNNAIAKLAGLAPIANDSGKRSGRRPVRGGRAGPRGVLFLVASIVAKYDPHLAAFKQRLQTAGKEKMVIRIALARKLLVILNAKARDARNEFANAT

SEQ ID NO: 221854 - protein, 443 aa, unidentified
MSRRCIGLDVHREFAQVAIWEAGVVRQVGRIATTPEALRLFADSLAPSDEVALEATGNTHAIARLLERHVARVVVANPSKTRAIAEAKVKTDQVDAEVLAQLLAADYLPAVWLPDDETHALRRQVHRRAHIVRQRTRLKNGVHAILHRNLVPRCPAADLFGHKGRAWLAEQDLPADERQAAEALLRQLDFHAEELRLIDAALGRVGLARADVRRLMTIPGVDATVALAIVAAVGDFDRFSRPEKLVRYFGLNPRVRQSGGQPASHGRITKQGRAHARGMLVEAAWAAAKTPGPLRAFFERIKARRGMQIAVVATARKLAVLCWHLVTKGEDYAFARPSLTAQKLRRLELRAGLPSKRGQKGKAAAYSLKEVRRRENELTEHAEHAYRQLVADWHAKGPKNPKGVAAANGARLSRPSDGAAAARQDSAPDPALRSGVDHAHPAA

SEQ ID NO: 221855 - protein, 353 aa, unidentified
MAVVAESFDFVIGVDTHAKTHTLAVVTPAGLVGDTGTFPTSSPGLGRATSWVSKHTGGPEGCSRVLVSMEGTGSYGARLAAVLTHAGYQVVEAITPTSRARGSRGKNDPIDAQLAARTVLPVDTSRLTTPRSGNLRAALRVLVVAREEMNGEATRAKHALLALLRITDLGVDARGHLTGGTLTTVAAWRGREEDLATATARTEATRLAKRVLALDLELAGNKTTCQAIVAQMAPRILELPGVGPITAAITLLAFSHPGRIHSEAAFAALAGACPIPASSGNTVRHRLNRRGDRRLNRALHTIVLVRTVYDQTTREYVQRRTAQGRTRREIVRCLKRYVARQLYRTLNTPTAMA

SEQ ID NO: 221856 - protein, 341 aa, unidentified
MSESALIGIDLGKHSFHLHGQDSAGREVFHKKLTRAQMMQFFGNLPNCVVVMAACAGAHFVARQLTAMGHTAKLISPQFVRPFVKGNKNDFVDAEAICEAASRPSMRFVSPKTEAQQTLSVLHRLRESLVHDRTKAANQMHGFLLEFGISLPKGLAIMKRLASILAEHELPVRLTGQLQRLHDHFVYLDEQIKDLDKELAGQLAADDLGSRLLSMPCVGPITASLLAVEMGDGQQYKCSRDFAASVGLVPRQYSTGGKANLLGISKRGDKHLRQLLVQCARVYMQRLEYQKGALADWVRSLLGRRHSNVVACALANKLARIAWAIAAHHTQYETGPDALNA

SEQ ID NO: 221857 - protein, 359 aa, unidentified
MASIPLIPALVTGGVDTHKDQHVAAVVDQDDHVVGTASFPTTRAGYRALSAWMSGFGPLERVGVEGTGCYGAGLARYLRSQGLEVLEVTRPDRTDRRRRGKDDTLDACNAAHAAHTGRRVITPKARDGMVESLHVLREARASAVIAHREALQLLHAQVIAAPEELRDQIRDLTRMRLVRTCAAFRPDPAGFRNPYTATRIALRSLARRALALDEQIAELDALIEPLVRELAPSLLDAIGFGIHTAAQLLVTMGDNPQRVTSEARFAKFCGVAPLPASSGLITRHRLNRGGDRQANSALHLVVVCRLRYDERTRTYAERRTAEGKSKPEIIRCLKRYAAREAYYLIKHDHDHPQRPRTDT

SEQ ID NO: 221858 - protein, 392 aa, unidentified
MESIERYVALDVHKHYVMVAALNAAQEVVLTPRKLSLERFTHWAPEHLTPKDQVVLEATVNAWTLYDQLAPLVHDVKIAHPLLVKLISAARVKTDTRDTLHLARLLAAGLIPAVWVPPPPVRELRMLVAHRQRLVRQRTQAANRLHSVLHAHQIAPPPGRLGSSESPTWWEQLELPAVERLRVQQDRAILQTVERLIAEVDAELTRLSRQDPWQELAPFVLHLPGFAVITTMTVLAAIGDITRFPSAKKLVGYSGLGASVHASGQTYHTGPITKQGRRELRTVLVEAAWSAVTHHPFWKAEFERLVPSLGKGKAIVAIARKLLVVVWHVLTHQVVDRHADRPMVTRKLRRWGAAHGLATSAGLSRGTFAQQVLERLGLRGGETAIAHAGASP

SEQ ID NO: 221859 - protein, 384 aa, unidentified
MSQVNDLSRSLTAFDQSATLTVVVELSAASWLVAGLVPGVDRRPLKKQEPDPVALLQLLERWRAEAVKAGRTVERIALAFEAGRDGFWLARWLRARGIDVHVIHSTSVAVSREHRRAKTDRLDTTLLIRVFLGWLRGERGHCGMVAIPTLEEEDAKRPSRERENLVGERTRIINRIKAALSRLGIRGFKPELRQAAQRLETLRTPEDRPIPPNMLDEIRRDMARLTLVRAQIDAIERARCVRLEQAPVSGPHAMVRLLARVIGVGVETADMLVQEVLSRKLRDRRAVARYVGLTGAPDESGSKRREKGLAKAGNARVRRGMVQLAWRFLRFQKDSALSQWYRARTAGATGARKTTMIVALARKLLIALWRMVTTGEIPAGVALR

SEQ ID NO: 221860 - protein, 331 aa, unidentified
MNYSHFIGIDVSKLTFDASILDPEENELAHRKFKNNPSGIQEMIDWAKAFQADISSTLFCAENMGCYVHQLSMASLEMKFNLALACPLSIKKSLGIQRGKNDRIDARRIAEYAYVHQRQLKTFELPEDALVKVRDMLNLRAVFVKYKVSVTKLIETAEYHYTKEGESPYLSTLKAELEDTTAKIKHIEKEIYEIMSANVSVSANYSLIQSIVGIGQINAATIIVMTENFTKFDSPRKFACYCGVAPFEHTSGTSIRGKTRTSKLAAKDLKVLLTRAAITAMVHDPQIKAYYARKVAEGKHKASVINAIRAKIIYRCFAVVKRQTPFVKLMA

SEQ ID NO: 221861 - protein, 384 aa, unidentified
MVNNSITFIGLDTHKEFFEVAYLQDSREAKPVSLGRINGTKPALQKLVRQFESKYQGSTLHFVYEAGPCGYWIYRFLTSLGHCCYVVAPSLIPKKAGERVKTDKRDALKLALLLRSGDIEPIYVPEPEDEAMRDLSRARETAMKDLKDAKYQLKAMLLRNNIRCEVQDNWSAKHLRWLTELILPHPSQQIVLQEAIQTITERIRRLERLDNELSYHVKSWRYYPVVKAIQAMRGVRLLVAVGVIAELGDLSRFDHPRKLMSYLGLVPSEHSSGGKRKQGGITRTGNTRARRLLVEGAHTYRYAANVSTELQKRQESLSKEIVDIAWQAQLRLCRRYQRLMQRGKHYNLVVTAIAREMIAYIWAIAREVVLTPVNPAKRLSRVPA

SEQ ID NO: 221862 - protein, 347 aa, unidentified
MMIGCDFHAGFAVLAIFDNRTGVQTEKRLAHPQEAVAFYRELQRQGERVRVGMEAGPPCQWFRRLLSECGHELWVGDAARIRAAAVGKKKTDREDAKLILQLLREGRFPRIWVPTEEERDVRQLLLDRHHRVRARTAAKNQLQALAMNQGVQKGRWLWTESGRELLAGLTMSEHTARRRDYLLRRVAELDQQIAAMDVLVAAEVERRPAALRLKTHPGVGAQTALATVLTLGEVSRFHSARAVSAYLGLVPAEYSSGGKQRLGHISKQGSSLMRFLLVEAGQSAVKQDAELKRAYKRLWVRKGNKAVAKVMVARRLAVRLYWMLRQEWTYAELVEHVGKPESSCGKR

SEQ ID NO: 221863 - protein, 429 aa, unidentified
MQNESTPGARGPVFCGVDTHADSHWLCVLDWRGRKVLSRRFPADAAGYEALAGAIAAAGEPACVAMEGTSSYGAGLTRHLASLGMPVREALSPARMQRRRPGQGKCDEADAERAARAAMSGSKLGTPKSQDGWVDGVRCMLAARSGAVKARTSAINTARSLLTTAPEGLRSRFRGMAGPRLMEELPSVRAEGALGAALGALADLWAAARDAALDMERAIEVSLEENCPALLAMYGCGPVSAAKLAVAAGDNPGRLRSEASFAAICGACPIPASSGKTVRHRLNRGGDRQGDSALHEIARQRVMRDPETAEYAERARARGKSDREVMRCLKRYVAREAYRALMRPHEIRRPEDASELVAARRAARVSQVRAASILGTSEKYISMLERGQRELKPIRRAYEAWVEAGLPLDWDRQTFEAERKMNSKKHLAK

SEQ ID NO: 221864 - protein, 337 aa, unidentified
MDRQYVGIDFHRRRSVVVRMSATGEKLSSARIVNDPVAIAAAVAEAGPDPEVVVEATYGWYWVVDLLQANGAHVHLANPQGLNWGQRRVKNDERDAIDLADMLRLGRLPEAWIAPPATRELRELVRYRAKLVALRSGLKAQVHAVMAKEGVLPAQGRMFGPAGNAQLDGMAMADNYTTRVESLRDLIGRYDREVTMLEGEIHRQLRHHRGYQAIQAIDGVGRTIAAVLVAEIGDVGRFRSAEALCSWAGLTPKHRESDTKTTRGPITKQGSRLVRWALIEAVARYHGGPALAPGFRRIAERRGTNKARVAVARKVLTLVYYGLRDGEIRCLAQAQAA

SEQ ID NO: 221865 - protein, 476 aa, unidentified
MNSKTKRANNQVNSVMNIQEQREMVEKANRILSEMRSFTWRDLETQGKFSKNEKLSFISDDMLIVGCDIGSETHYVRAIDTRGRELSKKALAFENDAEGFQKARDWAVQLAAANDKKQIVLGLEPTGHYWFCLAAWMISNGISVVQVNPYAVKQTKELEDNSQQKDDRKDPKLIANLVKDGNYGMPYLPEKVYAELRRLSMFREQLMEDRNRHMNRLHREMKIYFPEYKDAFGKIDGAFCIAVLKEAPFPEDILRLGAEGLRDIWHKAKLRGRGYSRAEEIVKYAETSIGLEEGTAAGKEAVRWFAEKITELDEELAEIENKLEGKCGEIPHAENVLEIPGIGGKILAGILAEMGDITRFDDVKEIQKLSGLGLVSCSSGKHKGETRISHRGRKRLRYWLFQAARSAVAHGEEYKWIHAHYTTRAGNPLQKMQSLVVIACKLLRVIYTMLKTGKKYDPEKLLKDIRYPESVQSVAA

SEQ ID NO: 221866 - protein, 345 aa, unidentified
MNITAVGIDLAKNVFQVHAVDARGKVVLRKQLRRAQVAGFFANMPPCLIGMEACASAHHWGRTFERLGHTVRLMASQFVKPYVKTNKNDVADAEAICEAVGRRSMRFVPIKSVEQQAILSVHRVRQGFVKARTAQANQIRGLLGEFGLVIPQGIYNVAKRVPELLEDASNELPVPFRHLIERLTQHLKELDRQVKEFETEIIEWHRSSELSRKLEAIPGIGPLAASALVASIADAHSFDNGRQVSAWLGLVPRQSSSGGKPTLLGMSKRGDAYLRTLLIHGARSAILAAKNKVDNTEGWLTNLLKRRHPNIAAVALANKNVRTVWALLAHGREFQVDYMPTRMAA

SEQ ID NO: 221867 - protein, 366 aa, unidentified
MEEVITYVGIDAHKRELHVAMLIGAAATPVTWTVENEPKAIERLHRKLERDAPGPVRVCYEAGPCGYALQRQLTKGRVSCVVIAPALMPRKPGDRVKTDKRDARKLAELFRAGLLTEVRPPTPAEEAVRDLARARDDARDDVQRARHRLGKLLLRRGLQFSGRKNWTQAHRRWIKTIQWEHAAERAVVDDYLLAIDQVESRLVDLDVQLTETAQTEPYREPVGWLRCFRGIDTLTAMLILAELHDFRRFPSARALMAYLGLVPSEDSSGERHRRGRITKTGNTLVRRVLIEASWHYQHRPGVGPGLAGRRKGQPARVIAIADKAQQRLCRRFRRLTAKDKPSTKVVVAVARELAGFIWAALQSPAA

SEQ ID NO: 221868 - protein, 337 aa, unidentified
MKPQALATWAAFVGLDWADANHDICLQAAGTERREFLVLEHRPEAIHAWGQTLRTRFHGQPVAVCLELNKGPIVSALRAYDFLVLFPVNPFTLAKYREACTPSHAKDDPTDAELQVELLRTHRDKLTPLSPQSPTMRAFAQLVEHRRRLVGDNVRLTNRWTRALKNSFPHVLQWFQEKDTGIFCDVLRHWPTLKAAQLARRTTLERFFRAHHVRSADVITTRIEAIKSAVALTTDAGSIIPNPLLVQALVAQRRVTVQAIADVDNAMAPCTQGHPDCPVFAALPGAGAVFAPRLLVAFGEQRGHFASAEEHQTYAGIAPVTERSGKKSWVHWRLQCP

SEQ ID NO: 221869 - protein, 382 aa, unidentified
MILFGIDAHKQLHMALALNEAGTILDHWQAPNSLEGWRCLLQWASTFGPARQWGIEGAWNYGRGLAQYLVEAGETVYEINPRWTAQRRRKARKPGKSDHLDALAVAQLVREEATTLPRVTADDETAILDLLVSEREGALAEATRLRNQIHQLLLQIDPEYKAHLPSLKTQAGLQVVRSYTTASQHALNQQRAAVIRRTAERLELALRQAKDLANQIRSRAQVQYTPLTQLCGVNLLTAGALAGILGPGQRFVTDAQVAAHAGVAPLEASSAGQVRHRLNPGGNRRLNAILYRIALTQARCCPAAQTYLARRQSEGKTRREAIRALKRYLVRAIWRLWQECQPGAAHHSHPKRAQAPLYEQVARSGAGPAARRPCSAPGRKAA

SEQ ID NO: 221870 - protein, 405 aa, unidentified
MPMNMQYERAFGLDLSKKTFHGCILDGPDLGSRHFFTGEMGQQGKAKLAGRLCKGDLVLMEAGTASFSLARFLLENTESEVVVLNPAKLYNIFNSTLKTDKSDSEKIAKIARTMPREEWPTVSIPSREEQAERSAVSLEVFLAKEITMLVNRLYALFNSMGHPFVKKSDLKTEESRLILANRLLCEDSLAIEQAIMLSDQIGHVTNQLEQCKQRLRDICLSHPKEALSLLSIPGIGLMTAASQIAFLGDGSRFNSPDSYVNYVGLSERRFDSGNKISKGHISHMGNKCIRRNIIQAAWVAATMLKGNPLSRKYEALRLRGKSKPVAAVAVAKKMTQLSYILVKGNGIYEFTKQQGLAAFQRKLRYHKLAALLDHLPEPIRIEMEEIDRNKRKEAAATTSRPKKLI

SEQ ID NO: 221871 - protein, 370 aa, unidentified
MNETITSFVGLDVHKDSIAVAVAEAGRQAPRFIGTVVPRLASLHKVLRDIGRASRTLVVYEAGPCGYGLARQLNAQGYSCEVVAPARIARSPIDQRIKTDRRDALLLARESRAGNLVPVVIPDERDEALRDLSRTREDVLAARLRAHQQMKALLLRHGLTCPARIVWSAAHERTLSTIRLSHPAQEIAFVEYRNAVKDAHERLERITEALRLQSSQWRMRPVVQALMCLRGVDFIGAATLVAELGDPRRFVRPSALMAYLGLVPSEFSSGNSRRQGSITKCGNKHARRILIEAAWTYCHSPRVSRVLEVRQQGQPKAVRDISWRAQLRLTKRFRYLHRERKLPQNKVCVAIARELCGFIWDIARQVKPLA

SEQ ID NO: 221872 - protein, 317 aa, unidentified
MQTFLNVGVDVAKDAVVVACAAQSFAVHSVVNQRAALLAWLKSLPAGCRIGLESTGGYHEVLADLAYAQGHRVFLLNPLDTRHYARAMGQRAKTDRVDAELIARLIAQEHAHLRPYTPPTANQRKLDRMLRRRAKIVRLKSSLKQTMQNLNGFAAELKAVLLKLEALIDRIDVAMSAIAASSPSHEAAQHRLQTIVGVGPVVGMALTNTLERVPFRNADAFVAFTGFDPRANDSGHKTGRRRLSKRGPAELRRLLFNAAMSAAKTNVWRPIYEHYRTQGWSTTATLVIIARKIARAAWSIHHYHSTFNPERITNQKT

SEQ ID NO: 221873 - protein, 443 aa, unidentified
MSRKKRTHLRGERGQAFADKIRGLPMEQILCVSLDIHKYFHVVMIHNALGEIVTMAFEIDIFQAGFDRLCRAIDEAVARTNAQVVLVGMEPTGHYFENLARHLDQRPQPVTLINSFAVSRNREQQMMRREKDDEIDVAAIGDLLRRGEGTSFQPVSGLYLEMQHLSRVRLSKVKIQTALKNQIIGHLDRIFPGLVIKGKLARERYEPLFVTDFWSCQTLQHLIRVCPDPGKLARMAPQDLRSAFHKQGFVLGPKTAAKIITYAQKVLLPDPEVIAIRCQLLAYDLALLAQVEWLIAELEDRLHTLLQQTPYWVWTRVRGLSLTQVASLAAAIGDPTHYTYAAQVFRRSGLVSGRNDSGTRRHKGKGKRVVKTGDVYLRRALMTAIMSLIRHQPVLHDYFTELHRTKHAGVARVATARRAMGILWAMQRDQHSRTLVLKRGVEM

SEQ ID NO: 221874 - protein, 380 aa, unidentified
MDVHSTNYTLCAMEPTIGAEDRVFGEVQVAPDYKEIIFFIESLKLKLGLENNYSIECGYEAGCLGYSLYHQLMGAGIHCVILAPTTMLTQQGQRVKTDKRDARLIAQCLCYGGYHPVYIPTDEDDAVKEYLRMRDDHKLALKKLKQQINAFVLRHGHLYTGAKWTIRYITWLEKLDLAPMHREILNEYLVSYKEQQAKIERYDKRIEEIAAEARYCEKARYLGCFLGIRTHTALSLIVETGDFNRFAKGNTYAAYLGLTPGEHSSSTNVNRLGISKAGNTHQRMLLIEAANGICKGAIGHKSKELRSRQSGQAADVIAYADKANTRLRSKYYKMIRHGKKKNVAVTAVARELACFIWGMMTGNTSTTSRAGTSVPAVSQG

SEQ ID NO: 221875 - protein, 342 aa, unidentified
MENVSIIGLDLAKNVFQAHGARADGSTVFRKKISRAKLLSFFASVPVCVVAMEACASAHYWARQIGALGHQVRLIAPIYVKPFVKRNKNDAADAEAIAEAACRPTMRFVAMKSVEKQASGMAFKTRDLLVRQRTQTINALRGHMAEYGVVAPQGPVHVERLAEALRDPRGGLPAPVISLCQLLLANIAALAEQIGLLDQELRERARRDQTAKRLMTIPGVGVICAVAMEALAPPLEGFAKGRDFAAWLGLTPRQNSSGGKTRLGGTSKMGQRDLRRLLVSGAMTVVRWASRKGAPEGSWLGRMLKKKPRLVVAVALANRKARIAWALMTKGGVYQAPDAVRA

SEQ ID NO: 221876 - protein, 343 aa, unidentified
MQSITTIGLDIAKSVFQVHGVDVAGQVVVRRQLKRRHVLTFFEKLAPCLVGIEACASSHHWSRQLQALGHSVRLMPPAYVKPYVKRQKNDVADAEAICEAVTRANMRFVPTKTPEQQSVLMLRRTRHLFIRQQTSVINAIRAHLAEFGIVAPVGRRGVEELLTVIADPNDKRVSDVARACLVALGSQLLSLKKQILHFDRMIMVWHRSNATSKRLNYIPGVGPLLATALVSSVADPGAFRSGRNFSAWIGLVPKQHSSGGKDRLGSISKQGDRYLRSLFVVGALSVIRYAKLHGTKHRPWLTALLARRPTKVAAIALANKLARMAWAMMAKGERYRQPAALAA

SEQ ID NO: 221877 - protein, 465 aa, unidentified
MKPNRRLPRKKPAAGSSLLERLNPNAAGIDCGAATHYVAVPADRDPTPVRAFQTFTADLHRLADWLTACGVTTVAMESTGVYWIPLYEILEGRGFDVVLVNARHVKNVPGRKTDVVDCQWIQELHSVGLLRGSFRPTAAITALRAYLRHRETLVQSAATHVQRMQKALVQMNLQLPIVISDITGVTGLRILRDIIGGQTDPQTLAQHRDHRCQASAAEITAALTGHYRPEHVFVLRQNLELFDAYQHQLTACDAAIEAHVLALAAQAPTPARPVPAARTRKTPRNNEPRFEIRLPLHQLTGVDLTQIDAIGPYSALRLLSEIGTDMSRWPTEKHFTSWLTLAPHNKISGGRVLSSQTQPSANRAAAILRMAAMNLGRTDTALGAFYRRLAYRVGKAKAITATARKLAILVYRTLRDGLVYQDPGAAAYDARHRVRVLHRLRQRAAHLGFSLLNRETGELLEGAVS

SEQ ID NO: 221878 - protein, 321 aa, unidentified
MSKAVLGIDIAKQKFQVALLIENKLKHKVCNNSPAGFDALKVWLEKQKAPLLHACMEATSTYGEELATYLHDLGHTVSIVNPARVKGFAQSELIRTKTDSVDAGLIARFCLAMKPEPWQPPSLEIRRLQALVRRAEALINMRIQEENRLGVSHDSVETSIKEHISYLEKEIENVKRDITDQINKDPDLKSKKDLLNSIPGVSDTTSASVLAELHIFERFSCVQQVVAFMGLAPRQNESGNFKGKSRICKIGNSRLRKALYMPALAAIRFNPIIKEFSQRLRNRGKYGKVLVCAVMRKLVHMIYGILKSAKPFNPHFKPNLA

SEQ ID NO: 221879 - protein, 361 aa, unidentified
MAQVRSWAGLDVHAAKVLAATLDSDSGELSVRRLAGATSEVVEFCAALPRPVRVAYEAGPTGFGLARALQAAGVSCVVAAPGKIERPASDRVKTDRRDAERLVRLLMIGGLHPVRVPSLDEEALRDLVRAREDVRGDLMRARHRLSKLLLRHEVRFEGGRAWTQRHRQWLSTIELARRGAQVTLHDYVGAVDALIVRRDTLEATIAELVPASPWAQTVARLRCLRGIDTLTAVGLCCEVGDFGRFARAGQVMSFLGLVPSEHSSGQTRRQGQITKSGSGHGRRLLVEAAWHYRRRPSRGTTLARRQASQDAHVLAISWQAQQRLHRTWQRLDSERGKRPTVVAVAVARELAGFCWAIANAD

SEQ ID NO: 221880 - protein, 341 aa, unidentified
MKQYVGLDISMEETSVCVLDQVGGVTFEGCVPTDPEAIAKLLRRHASNAERIVFETGSLSDWLWHQLRALGFPVICLDARHASAALSMRINKSDQNDAKGLAELARMGWYREAAVKGTESWRTRSMLAARNKLVDLRRDLDNQMRGLCKGLGMVLGRAGSINLARKVNAVLAEAPDLQDIFAPLLLAQSCLTEQIEKLDRELVAMAKDDQTVRRMMTVPGIGPLTALAFVVTIDNPARFRHSADVGAYLGLTPRRYQSGEIDRTGRISKRGNHQARTYLFEAANVLLTVVRQGSALKRWGSKLAKRIGTKKAKVALARKMAVILHAIWTDGTVFQAEMRGA

SEQ ID NO: 221881 - protein, 395 aa, unidentified
MVAALRPMGEVALLPQEFLHTEVGLEQMAYAIIALGEDTRVVMEATGRYHEPVAAALHEYGIYVCVLNPLYIKQSGGGSIRKVKTDKADAMKIAKYGLDNWVDLREYTPMDTVRQQLKLCSRQYNLYMKTVVSLQNNLISLTDKTFPGVNELFSSPERADGHQKWVDFVMTFWHCDCICRVSEKAFTERYQKWCKRKGYHFSTEKALDLYAGSCGHFTTLPKNDNTKLLITTAAQQLLAGKMTLAALRAEMTRLAMQLPEYNTVRAMYGVGETTAAQLMAEIGDVRRFPRRSSIVGFAGVDPGVDDSGKHSAKSVPTTKRGSPHLRKTLYQIVCTYLRKAPANELVYQFLEKKRAEGKPYFVYMTAAQNKFLRIYYARVKECLAAFDAQQDTTQS

SEQ ID NO: 221882 - protein, 349 aa, unidentified
MSEITRVGVDLAKRVLQVHAVDGRGQRITSRALSRDKFLAWCAHLPPGCMLAMEASSSAHHWARRLRGMGLDARIIAAHLVAPYRIQGKTGKNDANDAAAICEAAGRPHMHFVPIKTAEQQSLLCVHRLREGFKAERTACINRIRGLLAEFGLVYPQKPQALRQALPDALEDASNELGAIARMALQRAQAQWAELDAHLAWCDERISAHIKADPQAALAQQLMGVGPVGASAVVATVGDFKQFRNGPQFGAWLGLTPRQHSSGGKNNLGGITRRGDMYLRTLLIQGAKSVVWTAHKRDDPISRWVHGLREKYGWQKAAVALANKNARILWAVMTKGQAFDARHVSVKPG

SEQ ID NO: 221883 - protein, 397 aa, unidentified
MSKAWIGIDGGKTHHWAVAVDETGSTVLSRKVPNDQATIEQLIADTTRLAEELTWAIDLTDSSTAIALALLHRAGARVVYVPGRMVNRAADSYRGEAKTDARDALVIADQARMRRDCTTLVPPAELVAELATLVTHRGDAVGDRARLITRLRVHLTGIFPGLDRALDLRKRTSLVLLARWQTASDVRAAGVKVISAHLIGHGARAADAIADRVMAAAKAQTIAVRGQATTARIVAEIARQILALDKWIKQVDHELAEKVAAHPAGTVITSMPGMGVTLTAEFLVATGDLANFSGPNHLAAYAGLAPIPRDSGRISGNLHRPIRYNRMLRRVFYISAMVAANVPGPSREYYLRKRAEGKRAVQAQIALARRRVNVLWAMVRDQQPYNPTSRTNIPDAA

SEQ ID NO: 221884 - protein, 343 aa, unidentified
MYYIGIDVAKYKHTCFIASETGEVIKSAFDFDNSSLGFAFFKSVISSLDSNQLKIGFESTSHYTANLKQFLSMNGFSFTLLNPYLVKRFSFSLSTRKTKTDKIDAAIIARFLMAVDSKSNTSSSYHINYLLSLSRHKFRLTKSISKAKIELVNLIDQAFPEFPKFFSSIYGKTPLSILAHANSLNSIRNISLSRFNSLHKLSRGRFTFAKLSKLKTAAKSSIGVKSDYLWSLIHLIVKRISFLQNEKDSILFSLSRFQPLLLSPVMSIPGMSFSLAASIVSELGFVSRFPNFRSVIAFAGLDNAVYQSGTDIKYGKISKRGSKLLRTFLFQASQSVIIHSPYF

SEQ ID NO: 221885 - protein, 411 aa, unidentified
MRRVIGIDVHRTFGEVVFWENGRLRHAGRIDMTRTALQGFGKTLLASDEVVVEATANSMAVSRVLAPFVARVIIANPLQVKAIAQAHVKTDKIDAGTLASLQAAGYLPQIWTPDAATERKRRLVARRYQVVRHRTRIKNEVHSILHAHLIPKCPHADLFNARGRAWLTTQQLPDDERAAIDRHVRELDRLAEDLALLDREIAQDAMDDPAINRLMTITGVNLAVAAGIVAAIGDIGRFNSPQKLVSYFGLNPRVRQSGLGVAHHGRISKIGRSHARAMLVEAAWAAAKAPGPLHAFFVRIRARRGHQIAAVALARKLTVLCWHLLTKGEDYLWARPALVANKTRAMQLQAGHPQQKGSRRGPAYAYNIKALRDREMLIAAQAEQSYERFVSQWKARRPKPGARAPQSGRTK

SEQ ID NO: 221886 - protein, 404 aa, unidentified
MTSHCYIGVDPGRFFHGIVIQHADGTEVARRRVPNDETAFASFLAEVETWAIGAGETPLWILECRGGDAVMLTTFLLAHHQAVTALTVHEVAAHRKGRPQAHKTDFIDAWLCCELVRRRSTPPRLLQPIPQVVEELRALTRYQGALIADQTRLINRLRFLLTQYYPEYLQARLFGAVEGDTSLAFLQAHPTPSAALALGVEGLAAFLRQHRYRRQPYKKAQELQGQLQGIRTPRPLEAVYAPLVVDVVTHLQALKASIAKLDGEIERRFFTCAVAPILLSLPGMSRRTGPRFLAEVGTLDRFDSADALATYAGLTPTTVQSEMSKPIHYLGSRCNHYLRRVMWWVALGSLRTPASRRYYDRKIAEGKSHNQAIIALARCQLRVVWAMVTNGVLFDQGRALGQAA

SEQ ID NO: 221887 - protein, 321 aa, unidentified
MPHIHVGIDISQATFNAAFRDGDSKWNEQSFPNTKAGRKKLLAWAGADARFTMEATGYYHVETALFLQKASIVHVCNPMLVKRYSQLRLKRGKTDRADARLIAEFAASNEDMLRPWKPMDGHLGEARGLLTAAKQVQKQIQQTSNTIHALKLTDAGKAAALAMSKLLRTQRAALREIESKIAELVGQEQESKYKAILSVPGIGPKTAAALIVCTNGFADFENAHQLSAYVGLSPRVFESGSSVKGKGHICKLGNPYLRRCLYMCAVSAMICNPVMKAYKDSLSARGKHTTVALVAVANKLLRTAFAVAKNGTHWNPEVKAA

SEQ ID NO: 221888 - protein, 326 aa, unidentified
MNYYIGIDIAKDKFDCLWLRDVDALKIKTKVLPNTTKGFGLLKTWIEKNITSDLNTVCVTMEATGIYHEALCYALHEIGVRVSVMNPAFIRDFAKGLGVRGKTDKKDSMVLARYAALVQPREWKPEPKDVRTLRAMLSRLTSLEKDLQRENNRLEKAEISQASETVIDSLQLMIRSIGTEVARIKKQVDDHIEQNPTLKKNRAILKSIPAIGDVLSREMLALLESKDFTSARQVAAFVGLVPKLWESGKMKGRTTLCKNGSSHLRAVLYMGAIVAIQYNPDIKRQYERLLKAGKTKMQALGAAMRKLVQICFGVLKHQSEYRPQMS

SEQ ID NO: 221889 - protein, 340 aa, unidentified
MKVHVCGIDIGKTVFHLVGLSKEGHIVIKKRFSRRQLVTFTVNLPTCLIGIEACPGAHFLARILLKQGHDVKLMPAEYVRPFVKSNKNDYVDAEAIAEAVQRPTMRFVPVKNEAQLDLQALHRVRDRWMGRKTAVINQLRGFLLEHGITVAAGPAHLKRQIPSILEDAENLLSPRMRMLLLELRDEWNKLEEQIDASNQELAQFAKKEDGCRRLLTIPGIGPLTAMALTAAIGNGAAFRKGRDLAAWLGLVPRQHSTGGKARLLGISKRGDPYLRRLFVHGGRAVLAQVKRERHQFGGWLDRLEARSPRNVAIGAMANKIARMAWAILTSGESYNAAFST

SEQ ID NO: 221890 - protein, 437 aa, unidentified
MNYYNKQVEKSERIKDTTLVVGVDIGSESNAAVLMNKKGEILGKYPKIYNSRKGFDYFKDILNETKNRNEMRDVIIGMEPTGHYWRKIAYFSQAEGCEVRFVRTTALKAQRELDESSPAKSDIKDAVTISNITREGKYIDTVIEDGIYRQLRTLSKLRERIQKYNSASKQALRAVLDDYFPELTKIFWSIDAKGLWKVLENCPFPEDVLRIGVEELTVLIAEGSRKKQKAHDKALKIYEAAKETIGPRNVSQADRYKLRTLLEEVKHSSLKIEGIGEEMKVLVIQVPCTKYLSSIRGIGLISCAVFFGELGNPYNFHNYKQIVKYAGYDPVEFDSGQRVGSERISRKGRYLLRKCLYFMSMRLIYNSAYFKSYYERKIQSKNRFGQLLTKKEALCAVAIKLIKVIFALLRDRRMFSEEVPARSKVYLHNEAKELVLV

SEQ ID NO: 221891 - protein, 338 aa, unidentified
MVYGAIDLHLRYSQIRVIDEDGRVLRDGRVVTSREALVKAFSGLGAIRVLLETGTESEWVAEALEAAGDGVVVADPNYAPMYGEWRRKVKTDHRDVAALAEANRRGWYRPAHRTSTAQRAVRQMLRSRRQLVRMRSGTISLIRALLRQSGYRLGSGPAEQVPTRLARLALPPALADTIAPLRRTLDTLNAEIAALDGRCETQAQGDPVVQRLRTVPGVGPVVALTFRAYLDDVTRFSSASQVSAAMGLVPREDSSAERRHRGHITKAGPSEVRSLLVQAAWACWRSKGSGTLHAWVEGVAARRGRRVAVVALARRLSRILYAIWRDQSVFAAATLATA

SEQ ID NO: 221892 - protein, 605 aa, unidentified
MFPRMETILMPSSSSLASIGVGIDTARYGHRVSFMRPDRQPAAEAFTILENQQGYQELRKRLELLHQQHPQAHFHIRIDAAGQYAANLECFLRSLPLPMTISVGEPKRNQDYQKAHFPKRTTDDTESQAMARFAVVEQPQATLPLPPAMMMLREVAGRLQAQVKQTTQAVNRLHNLLARVFPELATITKNVATAWVLELLDKYPTAPRVAQARLSSLEKVPYAPSDKVKQLHEAAARSVGSLQGELAETLVRELVAQVRHDHKVEQKLRQLLQSAFTNLPPAGYVHLTSIPGIGVATAAVLVAKIIDIDRFETPEDLVGYFGIFPEESTSGVDPLGQPLSPGTQHMCRKGSDLVRMYLWNAAFSAMQCNPAVRSLYRRLRAKGKRGNVALGHCMRKLLHLVFAIWKTAKPFDANHYPWEQALAPSAVGQPAANENAVGHKPEQVAAEKVVTTASAKVESPPQTVNARAPQSMPATERPPIDFAFLRQQITLEQVLRHLALFDDLRGRAPQLRGRCPFHEGDRRRRTLSVHLGKNAFHCFQADCQAQGNALDFWAAYHRLPVYEAALHLADTFHLYQNREEAPVNSPTHRERRGHAKTAVITADGP

SEQ ID NO: 221893 - protein, 406 aa, unidentified
MLYLAIDQHSKQLTVNVRDEAGNVLRRKQVSTRPEATREFLEELRQQARPGGYVTIVEVCGFNDWLLDLLPQCGCREIVLVQPAQRAIRKTDRRDANQLGETLWVNRQRLLAGERVNGLRRVTIPSPTERDNRRLAALRRSTGRELTRVLNRVRALLRRQNLQHACPTKSIQSQAARAWLKELPLSPLDRFERDQLLERWELLARQRTALETELTRRADASPAAALLRTLPGAGAFIALGLAAHVGDVRRFDRPRSLANYLGLTPQCHNTGESGQRLGSITKQGSSLARFLLGQLVLHVLKKDAVMRAWYVQLKRRRGSKIAQVAVMRRLATIVWHLLTRGESYRIGGRPRGAATPQPASLPSETQPVPPRRVKKSAPKSAGKKKSAPKSTRRTKPSRTLGDDAPS

SEQ ID NO: 221894 - protein, 468 aa, unidentified
MVHPDAAGIDLGTREHWVSVGAHRPGENKRAFGTTTPDLHEMVAWLQARGIKHVAMESTGLYWVPVYERLEEAGFSVILADARQTKHTAGRKSDLLDCEWIAQLHAYGLLRAAFRPADAICRLRTLQRHYQTLVAASARSVLHMQKALDGMNLHVHHALSHLAGVSGLAMVDAILRGERDPQQLAALADRRVKKTPAQLAAALTGHYRAEEVFVLGQARASHRHYEEQILVCEHQLAQQVEALAEACPPPPEPAVASGQPAASAAPAQPASGAEPPPAAAGQGKKARRPARAPSAQSQMTAWLQRLFGVDLTALPGLGVLAVLTLLGEIGTDMTRWRHAGAFASWLGLCPNRRLSGGRLLSSGTRQVVNRAATVFRLAARAAGRTDTPLGCFYRRKAAQFGKPKAITATARKLACLVYAMISTRQEYRVIATSAYQKRYDEQRLRSFRKRAHELGYELVERTPAAQAA

SEQ ID NO: 221895 - protein, 338 aa, unidentified
MKNTAKFYIGIDISKDQLDYAILKGKTRMVQGKMSNTIESITAFTQQLYLTHGIKIKDCIFGLEHTGMYGNLLLKALNRAKATIVYENATTIRSSLGNLRGKTDPVDADRIARYLYKCREELKTWQPKRDIISEMAALSSLREKLCSIKNRLSVPLKEFKKFSDSKTYDELKHHCHSSLASLKANLVELDRSIREIWQSDPMLKSKMELMMSVPAIGPQTALQILIKTNEFLDINDPRKFACFCGVAPFPYQSGSSVIRKSRISKMGDRKMKSLLHICAMGSLKSPTEFREYFERKTAEGKHGMLIINAIRFKIILRVFACIRDNRVYQKYYLPTRNE

SEQ ID NO: 221896 - protein, 346 aa, unidentified
MVLIGCDFHPSWQQVSWLEEATGEGGDRELVHAPGEAEKFYQQFAAPACIGIEATSNCQWFIELLARLGHQVQIGDAAKIRAADDRQQKHDKRDARLIVRLMKENRFPRIWVPSSAQRDLRQLLIHRHKLVRIRAQVKNGLQHLAMNQGLLKKRRLWSAAGQKLLCALPLPPWASRRREDLLKLRTELDEKITALDAAVAEAAAQDQGARLLMTQPGVGPITAMAFVLTIGEVSRFPRGKQVASYLGLIPREYSSGGHQRLGSISKQGNAFMRMLLVEAAQIAVRFDPQFRNEYLHHCHRMAKGVAKVAAARKLAIRLYWMLRTNTGYPEVVRVESRPRVPLVSAS

SEQ ID NO: 221897 - protein, 420 aa, unidentified
MKSASNTANSTLLPEYAPNDVTAGIDWARDDHAACIVDGRGRKVATTMVEHTSSGLRDLVAVLGRHGVCEVAIERPDGPVVETLLAAGITVVVISPNQVKNLRSRYGSAGNKDDRFDAYVLADTLRTDRARLRPLVPDTEATVALRRTCRARKDLVAHRVAVANQLRAHLRNVLPCVVGLFAAIDSPIALTFLTRFDTQDKIDRLTVKRLADWLAKQGYSGKVDPAILHQRILDAPRGATGAHGTSQTPITAGYVALLRTLLAQIKELSTQINTQLDAHVDAHIFTSLPRSGRVRAARLLAEIGDCRAKFPTPESLTCLAGAAPSTRQSGRLRTVGFRWACDKQLRDAVVDFAGDSRRANPWAADLYNRAKARGHDHAHAVRILARAWLHIIWHCWQDGTAYDPEAHRALQRVLTQNRAA

SEQ ID NO: 221898 - protein, 436 aa, unidentified
MRGCRCSMVMGFTKPIEHLNLTTKEGDVMNPLYVGIDVSSKSNVVYFMLPDGNKQSNFSVANSHDGSTQLVKRILSAMESNSLDTVLIGLESTSVYGDNLVYFLREDASLASFNRKIHVLNPKQVKKFKDAYNDLPKNDFVDSFVIADCLRFGRINKEVYIGDYHYKALQNLTRARYFTVCNLTKEKQRFINVLFKKYSTMTQEKVFSDTFSTTALAVYDEFESAEALAYMDLQELTAFIIEKGKNRFPDPDAVAKAIQKAAQSSYRLPKTVNDSVNQVLSISITSIKALEAQIKEFDKAISAQMELLPNVLVSIPGIGPVYSAGIMAEIGDINRFANQAQLAKYAGLAWTQYQSGNFEAENTRLIKSGNRFLKYYLCEAAFSLVRCDMEYKAFYHQKYKEVNRYQHKRALALTARKFVRLVFTLLKDNRLYRSAK

SEQ ID NO: 221899 - protein, 419 aa, unidentified
MKNSKSKKVKFINTKTMIAALDIGKNTHYAYFRSPNGKDIKPFPFGNFREDFCKFWTKLSQFKMDHSLEDVVIGFESSGPYAEPLFHYLRKKPLKLVQINPMHSKRIKELTGNSPNKTDKKDPRVIADVISLGHALTLVVPEGAAANLRRLTQARERALKKRTAATNQVQDLVFIIFPEFLTIMKGIATETAFYLLERYPAPEAIVSLGIEPLAAEIRRVSRGKLKRERAEELFNAARESVGINEGKDGILLEIAHLLSQIRNEDKFISDLEKEMEERLTEIPYSRSILSIKGVGIVTVAGLIGEVGDFRKFNTMSEITKIAGLDLYEISSGKHKGRLSISKRGRPLIRKLLFFASINVVKSNGIMNKPYQQMLDRGMLKMKALVAISRKLLGLIFALVRDNTEYIENYDHVHHFKLAA

SEQ ID NO: 221900 - protein, 388 aa, unidentified
MDQTSSSTLSANTLHCALELSKKSWLLAIQFPDREQPSLYPIEGGDTEKLMAKLTAARNCWAKVSGALPVITLCYEVGYDAFWLARFLKARGIECLVIDPGSLQVNRRGRRVKTDRVDVKVLLRTLIAWCRGERHIWSLVRIPSIDEEDLRRSHHERSRLVRERTAHINRIKGLLFAQGIRGINVKSQYKTLAVDKLVTGDGHRLPPRLACEIAREIQRLAVVQAQIAKIERERDTAPTPCEATERKRHLLLQLKSIGPAISALLSREVYYRQFANRRQVGSFLGLTPSPYNSGEEERCQGISRAGSGDVRAIMIETAWLWIRHQPKSALTRWFVERTAGQSTRMRKIMIVAVARKLAIALWRYVEHGLVPQGAILNPPNDRERKMTS

SEQ ID NO: 221901 - protein, 418 aa, unidentified
MKLFIGLDVSSQKLDTCFLTDSKETLFEGSLSNDLIGASEIKQRILDYQETFGFCRIVIGMESTSVYSFHPAMFFYLDEDLKLLPVEVTVENPYRIKQYSRMFDQDKTDKIDAQIIADYLRVDLHTLSPIKEEVYVGLQRLTRSRYQLVTQMVEAKQHFLENLTYKCNTLSKELANEDNKTSIFGASIMNLLTEGITLDEFSEMPLESAAELLQKLGKGRFKNPEQLVKSIQKAVRSSYRLGKVTKNSIDLVLGIIANEIKFLKKQIKEIEKAITALLETIPEAQCLLSVPGLGAVYTAGLIAEIGQIERFDDQSKLAKYAGLTWSKNQSGNSQSENTPLNRSGNRYFRYYLIEATNRVRSTLPEFKEYYQKKKNEVPKHKHKRALVLTGRKFVRLIDALLRNGQFYQPAKSSGNKSR

SEQ ID NO: 221902 - protein, 408 aa, unidentified
MTVVGIDVSKGKSMVAAMKPGGELVTTPYEVKHSGIELSRFALDVLCMEPDTRVVMEATGRYHEPVAALLHSEGIFVSVLNPLLIKQSGAGSLRKVKSDPKDALKIAKYGLDNWSTLREYTPMEAIRQQLKLCARQCDLYSKNIVMLTNNLISLSDKTFPGVNELFSSPEKADGHLKWVDFYRSFWHCDCINRMSPDAFEERYKKWCKRKGYHFSADAADALYAASCGLYTTLPRDNNAKLLVTVATDQLIALRENQSKLETEMLNLCKQLPEYETVMAMYGVGKSTGPHLMAELGDIRRFPRRSSIVGFAGVDPAVDQSGKHSAKSVPTTKRGSPHLRKTLYQIVCTYLKRSPADEPVYQFLDKKRAEGKPYFVYMTAAQNKFLRIYYARVKECLEAFDARQDTVQN

SEQ ID NO: 221903 - protein, 314 aa, unidentified
MTQIICGVDVSSVTLDAAIGPLGAAATFPNTPEGIDRLAAFCGQHQVKLVAMEATGGYERQAFVLLSQQGLGVTILNPRAVRQFASGMGRLEKTDRIDAGIIAWFAEVKRSRPTLMASDSQIHLRALVTRLRQLTALRTAQLNQQRLITEPIVQASFDELLGLLKRQINDLAQQIAARIDQDPLWRELDVAFRSIRGVADRTVARLFAELPEIGTLPNKTVSKLAGLAPLANDSGKHQGKRIIRGGRAQVRDILFVVASVAGRYEPDFIAFRQRLADAGKPPKVIRIALAHKLLIRLNAKARDVRNNTQTSKAA

SEQ ID NO: 221904 - protein, 355 aa, unidentified
MTKVTASFENQTVYVGLDIHKRNWNAAIYLGEQYIRNIHQPPTPQALYHYLQQSYPQAQYVCAYECGKFGYWIQREFKQLGVECLVVNPADIPSTHKDEVYKTDSRDARGIGHALSAGQLKSIYVPYEDQEADRHLVRQRKKIWRDLVRCKNRIKGFLDYKGIEVPTQYGNANWSRNFINWLSKLEFEHSSNRVTLNYLITEMELLRKELLSISNTIRKLMRSKKYKKLYYLLRSVTGIGPLTAAALITEIGDMKRFTSFYHLNSFIGLMPMEHSSERELKGRITVRKHRQLRSDLVECAWTAKRSDAALALYYSEQIKKGKNGKAAIVKVARKLLSRIRWVWVSGEAYQTAVVK

SEQ ID NO: 221905 - protein, 354 aa, unidentified
MIIIGVDFHPEYQEIASVDTDTGEYQEKRLAHPKEAEEFYRSLSCVGQVVRVGMEASGHGRWFERLLEGLGVELWRGDAEVIRAKRGRKQKTDREDARHILKLLLKDDFPRIWVPNWENRDLRQLLWHRHRMVQARTRVMNQLQAVALNEGLRCKKRLFRADGRQQLESFQLAPWASRRRRELLELMDRLNPTIAELSQAVEREAEKCPEAQRLMTHPGVGALTALAFVLIIGETERFQCGKQIAAYLGLVPLEKSSGNRRRLGHITKQGSSIVRFLLVEAAQVTVRSLPEWRSKYVHLMMRRGRKTAKVAMARKLAVRLYWMWRKGWDYEQWQKFGSNVGQPGHRDGVQQNTE

SEQ ID NO: 221906 - protein, 395 aa, unidentified
MYRLLVGVDVSKDLFSASGLGAEGKECFSGTYEMNSHGFSEFLKTLSTHGERLDQMIVAMESTGCYHINLFSFLSSQGIRAVVVNPLLISNFAKLSLRKTKTDKKDALTIARFLLDHHEEISQLSISQDHQDLRDLSRERESLCHLISATKVEIKRVLRTTFAELESIGNFYSGVMLRFLQQYLSARLVGGAKRKAITKALRRPYVGDKLTFSAEDIIKAARNSVAVVSPAKEIIVQGKISTLLHLQERLEKLSKLLTDLCKATRVEDLEILRSIKGVGPNTAVPFLAEVGDVKNFTSSKKLIAFAGLDPSIHQSGKFLGVSKLSKRGNRHLRRAIYLMTTSVVSQNVFFKAYFLRRKKEGLPPQKALFAVAHKLLRVIFAMLSQRTYFNVKEAI

SEQ ID NO: 221907 - protein, 355 aa, unidentified
MSQEKYIGMDVHQATISVAVMDSSGKLIMECILETKAATILEFIDGLRGALAVTFEEGTSAAWLHDLLKPHVSHLVVCDPRRNALLKDGSKSDRIDARKLAELLHGNKLHAVYHGEHGVRTLKELGRSYLTITKDLTRVMSRIKALYRSWAIPCSGTTVYAPRHRAEWLAKISEPGVRLRAERLYQQLDLLQPVRQEARHDLMVESHKHHAVTLLRQIPSIGPIRAALLVALLQTPHRFRTKRQLWAYSGFAVDTHDSGEYRFVRGKLRRNRERITVRGLNHNHNHDLKNLFKGAALSASTRPGPLCDFYVALVKKGIRPTMARLTLARKMAAITLTIWKKGVDFDAKQLNRQAA

SEQ ID NO: 221908 - protein, 355 aa, unidentified
MPMLADCIDAVIGVDTHRDTHEAEIARPTGAPIDICSVGNDSNGYAELLAWIVEHAPGPRIVVAIEGTRSYGAGLARAITAAGLTVIECEQPTRTARRGKGKSDAIDAHLAVLSVLQLDANRLPSPRADGDREALRVLLTAREELTTTGTAQTNRLKALLLTGDDTDRRLARGRLFDASLATIARRRAPRDATREQAVRHAEVRRLAVALRAGQRELKANRAQLQAIVNDLAPGLTDRRGIGPMSAAQAIVSFSHPGRCRSDAAYAALGGISPLEASSGQHKRHRVNRGGDRALNKAIHTIAVTRMRRCPDTRAYVERRIAEGKNPKEIRRCLKRYIARQLYRTLTASMPPAVAS

SEQ ID NO: 221909 - protein, 344 aa, unidentified
MEYSAIDLHLRRSQFRIVGEDGAVVREGKIDTSRADLSRVFGDRPRMRILVESSTESEWVARHLEALGHEVIVADPNYAPLYGSRSRKVKTDGRDTAALTEACRTGIYRRAHRVSAARRAQRQELRVRRHLVQMRSRSIGLLRALLRQDGWRLPRGSAEAVDARLERLRLPTGLATILTPLRTWLKELNALLDAADRAVEAQAAADPVAAHLMTAPGVGPVVALTFEAVLDDPARFGGEAARASAFLGLVPSEDSSAERRHKGHITKTGPSELRALLVQASWVIWRGRSAAGAALRAWAQALAARRGRRIAIVALARRLSRILFALWRDRSNFHVEGGRPLVVA

SEQ ID NO: 221910 - protein, 329 aa, unidentified
MSKEKLDFCFLQNEKNGKEWTLPNTVVTIKSSLKSLLKECSLKFSDILVCAEYTGQYTYPLCCACEELGLDLWLEDPAQIKHSSGVIRGKNDRLDARKIAVYAHRFQDKARLFYMPQANITSLKQLISERDMYIVDKGKYQGQLTDQKRFMASQDYQKKSQRLEKLIKGLEESLAMIEQEIQQLIDNDHTLYNQHKLLCSIDGIGDRTAIKMIVETNAFKDFNNARKFSCHAGVAPFQYTSGSSIRSRNKVSNRADKSIKTLLHMASVVVATRKKDGELREYYLRKVAEGKNKMLVLNAIRAKLVARMFAVIKNNRPYEKNYEYYLQIS

SEQ ID NO: 221911 - protein, 355 aa, unidentified
MNQEKYIGMDVHQATISVAVMDSSGKLIMECILETKAATILEFLHGLRGTVSVTFEEGTSAAWLHDLLKPHVANLVVCDPRKNALLKDGSKSDRIDARKLAELLRGNQLHSVYHGEHGVRSLKELGRSYQTLTKDVTRVMSRIKALYRSWAIPCSGTTVYAPRHRAEWLAKIPQPGVRRRAERLYQQLDLLQPVRQEARGDLLRESRKHDAVKMLRQIPSIGPIRAALLVALLQTPHRFRTKRQLWAYSGFAIETHDSGEYRYVRGKIQRNRERITVRGLNDNHNHDLKNLFKGAALSASTQPGPLRDFYAALVEKGMRPTMARLTLARKIAAITLTIWKKGVSFDAKQLHRQAA

SEQ ID NO: 221912 - protein, 268 aa, unidentified
MNEAKYIGLDVHQATISVAVLDTAGNLMMEAILETKTETILQFIRGLHGSLHVTFEEGTWAAWLHDLLKPHVTEVVVCDTRKTGLGKNRNRNDREDARGLARLLYRNELKSVYHGEHGLRTLRELARTYLAITRDITRVMTRTKAIYRSWGIPCAGQQVYALRYRAEWLGKLAEGSVRRRAEFYYQQFDALAALRHQARYELLVESRKHSAVKLLQKIPSIGPIRAALLVAIMQTPHRFRTKRQLWAYIGLALRTYTSGEYRFEGGQL

SEQ ID NO: 221913 - protein, 356 aa, unidentified
MATEYFIALDVHCAFTELAVVTTSGKLVKRDRSDTSIPAIAKLIDGIRKPRCLTFEEGPLAGWLARNLASRVERLVVCDPRRNHLVAKDGDKDDPIDAEKLAQLFRGGYLRAVHQTDTLDRALVKQHVGFYHTRVRERVRQGNQLVALLRRQGVFVSIDDLIDDADRRSVWRRLPQHKTLLKDLDLLWEEYSLLTVHEATLRSELVRLARRQEPVRRFVDVPGFGWIRAITFYVYIDTPCRFHNKSALWKYCGIGLERRHSGRGPIKVRLVKQANRHLKNVLLGAAKSAVAQVDSPFADKYRYWTQEEGLHPSTARRNVARSLAATLWSLWKTGGEYDPARVCGAGRPTTLKRTTS

SEQ ID NO: 221914 - protein, 411 aa, unidentified
MDVMYARCAGCDGQKKTVVVPVLITDSAGIVKKQTRTFRTMTADLLALDEWLRSLEVMHIALESTGGFWHPVYNLWEEGRTIILVNPQHMKAVPGHKTDVKESEWLADLLRHGLLTASFIPPKPIRQLRELTRYRKTLVQERTREINRLQKGLEGANIKLAAVATDVLGKSGRAMLEALMGGEQDAEALAELARGRLRAKLPDLRLALEGRVQPHHRFLLEQILAHIDFLEASIERIQQEIEQHLRPFEEAMELVQSIIGIQETTAATILAEIGIDLTRFPTAKHLASWAGVCPGNKQSGGKRLSGATTPGNLYLKAALAEAAWAVSHTKDNYLAAQYHRIAHRRGKQKAIVAVSHSILVIVYHVLLKKQPYQDLGGDYFAHLDTHRQERHHVRQLEQLGYTVALTLKEAA

SEQ ID NO: 221915 - protein, 309 aa, unidentified
MIIHPGIIGIDVSKAHLDIFDAGSGRTERFPNSSEAVRSLAERLQARKQAFAIFEATGIYDRHLRSVFDAQGLAYARVNPSRARDFARAAGFLAKTDAVDAKMLAAMGQALAPQPSPSRDTARETLASLHKRRDQLVAMRASERVRFSEAPELGDSLQSHIAWLDAEIARLDASVDAALAMSAELAADTRLLRSAPGVGPVTAATLIALMPELGSLSPKTAAALAGLAPFNADSGQFRGVRRISGGRRRVRQALYMAAVTAVRSASRFKRLYEDMREKGKPAKLALIAIARKLIVTLNAMLRDKVAFQR

SEQ ID NO: 221916 - protein, 343 aa, unidentified
MAAQITGGVDTHLDVHVVAALDELGALVGVESFPTTPVGYRALLGWLESHGEVIVVGVEGTGSYGAGLARHLQREGVAVVEVDRPNRQRRRRQGKTDSHDAVTAARAAQAGDALGAAKLRDGNVEAIRVLRVVRCGAKRDRTRAINQMRSLVSTAPDDLRQQLRGLTIPKLVRRAAAFRPGGRRDVGSATRLALRTLARRVLELDTEVAALDEVLVPLVAATAPELVAQVGVGTDTAGALLVAAGENTSRLRNERSFARLCGAAPLDASSGKQQRHRLSRAGDRQANSALWRIVISRLSHDPNTRRYLQRRLAQGKTKTEAIRCLKRYVARELYYRLPQQPLA

SEQ ID NO: 221917 - protein, 370 aa, unidentified
MLDTTTFVGLDVHARSIKAVSLDVMTGEVRCATFGYDAGAVAEWVRSVDPEARCVYESGVTGFDLQKRLSGLGVDCVVGAVSKMIKPSADRRRKNDRNDAEFLARMLSVGNVVEVWVPDDECEAARDLTRALEDARDDLSRSKQRLSKFLLRHGLVFDERTPTGRRKGNWTRAHWSWTESIRFAEGADNEALAYYVDAVRRAAEDKARLEGLVEAETRKPRWRKRVDSLRCLKGVDTATAADLVFEAGEFSRFRNARSFAAWIGLTPSEHSSGESDRRGAITKAGNKHLRKALVEAAWHYLTCSARPKEPARGQAPDPGARRHAAKGVRRLVERRGALLARGVHNNKANVATARELACWVWAVGLMAEEA

SEQ ID NO: 221918 - protein, 429 aa, unidentified
MIMGFTKPIEHFNLKRKKVITMNTLYVGIDVSSKSNVVYLMLPNGDKHSNFSVANSHEGSTQLVKRILSALTSLSLDTVLIGLEATSVYGDNLVYFLREDASLAPFHRKIHVLNPKQVKKFHDTYNDLPKNDYVDSFVIADCLRFGRINKEVYLGDYRYKALQNLTRARFFAVQNLIKEKQRFMNVLFKKYSTMTQEKVFSDTFSTTALAVYDEFESAEALANMDLHELTDFIIEKGKNRFPDPDAVAKAIQKAARSSYRLPKMVNDSVNQVLSISITSMKALESQIKEFDKAIKAQMELLPNVLISIPGIGPVYSAGIMAEIGDINRFDNQAALAKYAGLAWKQHQSGDFEAEVTRLIPSGNRFLKYYLCEAALSLVRCDKEYSDFYHLKYKEVNRCQHKRALALTARKFVRLVFRLLKDNRLYCPAK

SEQ ID NO: 221919 - protein, 338 aa, unidentified
MPLYGGIDLHANNSMVVLLNEQDQVVYHRRLANHLPTILGQLDPYKADIMGVVVESTYNWYWLVDGLMEADYRVHLANPAAMQQYNGLKYTDDYSDARWLAHVLRLGVLPEGYIYPKAERAVRDVLRKRSHLVRQQTANVLSLQNIIVRNTGVRLSAKRIHALTLEELERLLPESDHILAVTSTLAVVHCLAQQINTLEKLVHTRLKPTPAYEQLQTVDGIGTILAQTIMLETGDMRRFATVGNYASYCRCVQSTKISNGKRKGQGNVKNGNPYLEWAYMEAAQFAIRFSPRVQRFYQRKQAKSHLMVARKAVAHTLARACYYIMRDLLPFDVRKAFG

SEQ ID NO: 221920 - protein, 388 aa, unidentified
MPQQRKPNDLSRSLVALDMDTTLIAVVELSLASWLVAGIVPGVERQPLKKLKTDETALLALLHRWRDEAVRSGRTISRIVVAFEAGRDGFWLARWLKARGIEAHVIHASSVAVSREHRRAKTDRLDTELLKRAFVGWLRGERDHCKTAAIPSLREEDAKRPSRERESLVGEQSRLVNRMKATLIRLGIRGFNPKLRHAEQRLETLRTPEGEPIPANTLAELKRDMQRRRFICDQIQSIERERLERLNRTPDNEPHAMVRLLARVTGIGIETADLLVHEVLLRNMRDRRAVARYGGLTGSPDRSGGTNREKGMARSGNARVRRGMIQLAWRFLLFQKDSALARWYRQRTEHSPKARKTMIVALARKLLIALWRLVREGVVPEGVAMRPA

SEQ ID NO: 221921 - protein, 414 aa, unidentified
MDTEPLVFVGIDWASTEHQVCLTGAGDPVQRAFAHDAGGIGAMVDWLGAQAEQPNQVGVAIETPHGPIVEALMDRGIAVFAINPKQLDRFRDRFSPAGAKDDRRDALVLASSLRTDRHCFRRVEAMDPAVVELREWSRMAEELKGERVRLANRIRQQLWRYYPQALDLADDVGADWVLALWAKAPTPADASRLTVKNVARVLAAHRIRQIAAADALAILQRPALTVAPGTVEAACAHIKATAERLNLVNRQIKGVTQHLNALVEQLAGPEPEPGQEAEQRDAAILRSLPGVGRIILATLLAEAHQAIQARDYHALRTLTGVAPVTKRSGKSRRVEMRQACSNRLRTAVYHWARVATQHDARSRSRYAALRARGHSHGRALRTVADRLLGIACVMLANRTTYDPQHEAARASKIA

SEQ ID NO: 221922 - protein, 412 aa, unidentified
MRLFAGDDWAEDHHDIEVMDEAGKVLAKRRLPEGMAGMAQLHALIGRFLPGDDPDSAEVIIGIETDRGPWAAALIAAGYTVYPVNPLQASRYRERHGVSGAKSDGADAHMLADMVRTDSHQLRPAAGDSPQAAGIKVVARTHKTLIWERTRQVQRLRHQLREYFPAALAAFEDLDAPDALELLAKAPDPARAAKLTRAQVAAALKRARRRTIADKTTVILAALRSDQLGQPAALTAAYAATARALIAVIATLNEQVKALEEQVREHFGRHPDAEIYRSQPGMGAILGARVLAESGDAPCRYRDGNARRNYAATSPLTRASGKKKAVTARFIHNDRLVDALNAQAFAALGASPGARAFYDQLRARGIGHNDALRRLGNRLVGILHGCLKTRTLYDEATAWGHRENLPQSSVAA

SEQ ID NO: 221923 - protein, 346 aa, unidentified
MLHAGLDLSRKRLDVCLLSDQGELVEELTAFPDSSGLKALAQRVESDGEPIRAVIESMTGARFVHDTLERHGWEVEIADAQKVKGLAPLAVKTDRIDARVLALLSHRDLVPAIWLPDPRVRGERELARFRLHLVKHRSQLKNRIHSALMSFGRPCPVSDLFGVAGRDLLAELDLPEPWRGNIDASLALIDDLGTQVVEVDSKLRSSGADHPYVPLLLTVPGVGWVLAFTIAAEIGEINRFETPTKLTGYTGLCPRVVQSGDSDRRGPLSKHGPRYLRWALLEATMHALRHPAYAERYQRNKRRLGKQRGAKVAQIDIARKLTVAIWHMLTHNESFAPRGAAFRLAA

SEQ ID NO: 221924 - protein, 350 aa, unidentified
MEIFTGKPEGVMKLTPVGIDIAKNVFQVHHIDEETGEIVNKPIKRAKFLEYFVNRAPCLIGMEACGGAHHWARQLTRMGHQVKLMPGEYVKAFNIRNKKDPADARAIWLAVQQPSKPVAIKTEMQQAMLALHRTREQLVKFRTMQINELRGLLTEYGEVMAKGRAPLDRAMPDVLARVADRLPAALIDTLREQWNGLTGLDEQIATIERRMREWKKEDQEVKAISEIPGVGLLTATAAVATIGDAKAFRSGREFAACIGLVPKQTGSGGKVKLHGISKRGDTYLRTLLIHGARSVITNAKQPDPWIEQMKKRRPPNVVVVALANKMARTIWAVLAHDRPYQRGYVSTKPA

SEQ ID NO: 221925 - protein, 341 aa, unidentified
MTIGIDLGDIWSHYCTLNEDGEVIDQGRFRSNPSGVDKHFRDLGPARVAMEAGTHSIWVSEQIRELGHEVIVANVRELRAISHSDRKSDKVDAEKIARYARLDPEILRPIAHRTVAQQETLTLIRARDVLVRLRTAAVNSVRGLAKPCGYRLPASSTLTFPKRCQAVLPPGLATALGPLLHQIADMTVKIKEYDRAIKQLTETEYPETQALIKVYGVGQLTALTYVLTLGSKERFQRSRDVGCYLGLRPRRSQSGDSDPQLGITKAGNGYLRQLLVECANHVIGPHGKDSTLRRWGLSLGARGGSHARRRAVVAVARKLAVLLHRIWVTQEVYVPFYEKAA

SEQ ID NO: 221926 - protein, 342 aa, unidentified
MSEIITVGLDLAKNVFQVHGADGAGRAVLRKKLRRTQVLVFFSQLPRCIVAMEACGGAHFWGREIANLGHEVRLIPPAYVKPFVKRQKNDMADAEAICEAAVRPSMRFVSVKSEDVQGAAMVFRVRELLIRQRTQVINALRGHLTEFGEVVPKGAANAARLIAIVEDAASGLPDEARATLLILIETKTRLDGQIGKLDTEIRRRAKENEVARRLMTIPGIGPLIATALVALAPPPETFRRGRDFAAWLGLVPRQHSTGGKQRLGATTKMGERSLRRLLIIGANSVIIKRHVHPLARPGTWLDGMLLRKPPMLVRVALANKMARIVWALMVKNEVYRAPAVAA

SEQ ID NO: 221927 - protein, 392 aa, unidentified
MIYAGVDIAKTDHVIGAVDETGAEAARPMKFKNSEAGFERCIAWLESVAESEDDVFVGMEATGHYWMACFAYLVAAGYRVCVVNPMQVHAMRRLKGLCGVKNDRIDSALIAETLRQGDYDQTGLATDEVQALKRLTRYHQGLKQELATVKTQAICVLDAYFPEYAGLFSDMFGTASLKVLAECPTPSEASRKRTSSIARLLSEGSHGRLGAERAAEIKSAAKSSVGIRLGEDAASFQIKTMVTQVEFLNRTIAKVEREVASLLEKVEPNITTVPGISTTTGAQIVAEIGDVKRFKGAASIVKYAGLNSGVDESGMFSAEGVPITKHGSPYLRRSLWLAANRARQYDPRLKAFYDKKRREGKPHRVAVTAVARKLCHVVYAVMRDGEPYDPSK

SEQ ID NO: 221928 - protein, 340 aa, unidentified
MRLYTGIDLHSSNSYLAIIDETGKRVFKKKALNDAEHILSAFAPYKDAIIGIVIESTYNWYWLVDALIADGYRVHLANPTKIQQYHGLKYSDDQHDAFWLAEMLRLGILPEGYIYPKEDRPIRDLLRKRSHLVKLRTSLIISLQNIICRNNGFRFKTNDVKALNADRVAPFLEQNEDLALAGKVSKESIDFLTRQIKAVENVVEERMELREHYKKLLTMQGVGKTLGLTIMLETGPISRFAQVGNYCSYCRKVSTKWISNDKKKGKGNKKSGNKYLAWAFSEAAEIARRYYPEARAFYQRKMQKTNAMVAHQALAHKLARAAYYIMRDGVPFMPEKIFTH

SEQ ID NO: 221929 - protein, 427 aa, unidentified
MKKADLLSTLFIGIDVSSKENVVCFLDFTSRKPILSFAVTNNQPGAIELSNRIADFMRQRTDLKSVTVALESTSYYGIHIANYLSSSVSLIPFNISVYCINPMLVHGYKKTFVGMSKNDYIDAFAIADFARVGKITSSPWRGSQFLALQRLTRHRLHLAKALTSEKTYMLSNIFLKFSELPLLEKDAQPFSNNYGSTATSVLTDFLSTDEIADMPLQGLVDFIVEKGKNRFTDPLKTAELLQKAARDSYRLDKCLYEPLTIALASSFNVIKAYSKELKIINSAIEQTIKGLDPNSYTVLLSVPGIGPVYAAGIIAELGSIDCFKSQDALAKYAGLTWRESQSGKFRADETSMTKAGNIYLRYYLLEATTHLIWHDAEYNSYYQKKFNEVRLHQHKRALVLTARKFVRLIFGLLAKNQLYSQSREPLT

SEQ ID NO: 221930 - protein, 339 aa, unidentified
MKYTPVGVDIAKYLMQIHFVDEYTGEIIDKQLRRRDFLTFFSNRDPCLIGMEACGGAHYWARELKKLGHEVHLLQAKFVKAFRIGNKNDVMDARAIWMAVQQPGKPVAIKNEEQQTLLSVHRMRTQLVKFRTAQINALHGLLLEFGETVHKGRASLDKAIPEVLERLRITLSPFLISLIEEQYYRLSELDKEIDGLEKQLTEWANQHADCQRIMKIPGVGVLIATAAIATMGDPTAFRSGREFSAYLGLVPRQTGTGGRVKLLGISKRGDAYLRTLFIHGARVATLCTKTPPQWVSELKKRRPVSVAIVGMANKLARTVWALIAHQREYEKDYVSVRPY

SEQ ID NO: 221931 - protein, 342 aa, unidentified
MENFYFTGVDVSKKKLDFCVMFEGKVVHEEETANHQSAIMSLLHHFEEDYGIDNTRMPVCAEHTGQYTFPLACACKTVECKLWLENAAEIKYSSGVQGGGKNDKVDAKRIAIYASRFQDKVRYYEHPTEDIERLKQLESERTLYVTDLTKYKGQMKDQKDYMPKALYERKMKRLQALMDDLKEAIQAITDEMDEVTASCPVLFRQQELLMSIDGVGRVVATNMIIATEAFTRFDDPRKFNCYAGVAPFSYSSGSSQHSKARVSHRADKVMKRLLHLAAVAVTHRVGGELKKYYERKVAEGKNKMSVINALRAKIVARMFAVIKRNEKYKPIYHKKLAKIIVV

SEQ ID NO: 221932 - protein, 390 aa, unidentified
MALFVGIDVAKDKFDACGIGEGGEKVFSLTATMDKKGFENLIFHLRESHSLLLGLESTACYHIALFSYLTAKGYRVVIINPLLIANFAKLSLRKTKTDKKAALTIAQFLMVRKEALEDHPLSVDLMELRDLARRRERLTDQVTKLKGNMKRILSVTFPELEHLTGVFAKSILELLIRFPSADALRKADIETVAALVVPRSWGRKSRAWVETLMTTAASSVGVSSPAKELVLKQDASLLLYVQEQIKETTKVLMGLCTDRMRKDVEILASTKGIGQTTALNFLIEMGGDITLYKNDKKLIAASGLDPSTYQSGKYEGASKLSKRGNRHLRRVIWLMAKGVVFSNDLFRTYFYKRKSEGLCYKMAMLATAHKLIRVMFAMLVHQTCFKQGGR

SEQ ID NO: 221933 - protein, 370 aa, unidentified
MLDTTTFVGLDVHARSIKAVSLDVMTGEVRCATFGYDAAAVAEWVRSVDPKARCVYESGVTGFDLQKRLSGLGVDCVVGAVSKMIKPSADRRRKNDRNDAEFLARMLSVGNVVEVWVPDDECEAARDLTRALEDARDDLSRSKQRLSKFLLRHGLVFDERTPTGRRKGNWTRAHWSWIESIRFAEGADNDVLAYYVDAVRRAAEEKARLEGLVEAEARKPRWRRRVDSLRCLKGVDTASAADLVFEAGEFSRFRNARSFAAWVGLTPSEHSSGESDRRGAITKAGNKHLRKTLVEAAWHYLTCSGRPKDLAKGQAPDRGARRHAAKGVRRLVERRGALLARGVHNNKANVATARELACWVWAVGLMAEEA

SEQ ID NO: 221934 - protein, 445 aa, unidentified
MSESLISAASEPEWAAFAAIDWADQKNFWRLVPAGSQRHEQGELENTPEAVEAWAVALQQRFGGRPIALILEQSRGALVYMLTKYPHLVLFPVHPTTAARYRETFAPSGAKSDPSDTASLLDLLLRHRERLTPLQPDTVETRLLHFLVEQRRQTVDEKTCQSNRLTACLKLYFPQILHWFDDVTTPLVGDLLERWPTLEQLQHAHPGTLRRFFHEHNCRTEKLIEERIAAIYQAIPATQDQAVLEAGKMMTGGLVALLAALRSHIAALDERIADVVSTHPDRLLFASLPGAGPVLVPRLIAAFGTRRDRFQNADEMERYSGIAPVKKASGKTERICFRLACPKFLRQTFHEFASHSIGQSEWAKAYYEHLRNDGKKDHHAAVRELGFKWIRIIFRCWKDGKPYDEQVYQQSLRRRGSLLGGPLALATNVEWKTVAGFQKLSKKNA

SEQ ID NO: 221935 - protein, 339 aa, unidentified
MALYAGMDLHSRNTLIGVINGRFQRVFEKRVANDLSLIMDTVEPFRSELQGIVIESTYNWYWLVDGLMDAGYTVHLATPSANKQYEGLKHTDDRHDAFWLAHLLALGILHEGYIYPKEDRPVRDLLRKRSFLVKHRTAHILSLQSMFERERGYKVKSNEIKRLKAEDIARIFTEEHLLLSAQANRASIEFLGHQIKRIEKAVRKRVKLRKSFEYLLTVPGIGEILAVTIMLEVGDIARFARVGNFSSYARCVSSQKLSDGKKKGQGNRKNGNRYLAWSFVEASHHARRYNERLRSYYQRKCAKRNQAVATKAVCNKLARACYYIIRDQVPFREEALFCS

SEQ ID NO: 221936 - protein, 369 aa, unidentified
MDHHSVAYVGFDTSKTKHAVAVAEGGREGEVRYLGEIEATPAAVERLLGKLAHKYKTLHVCYEAGPTGYGLYRHIRALGYACDVIAPSLVPKRPGDHVKTNRRDAVTLARLLRAGELTAIWVPDEVHEAVRDLVRAREAAARDLRHKRQQVLSFLLRHGRIFTGHRHWSRAHLRWLAGQAFDHPAQQIVFQDQVDAVADAQARLERLDRQLTELVPTWSMAPVVAACQAMRGVSFLVAVTFVAEIGDVRRFESPRQLMAFLGLVPCERSTGDTVRRGGLTLAGNRRVRRALVEGAWSYRHPARITERIRSRLEGLPKAVREIAWKAQVRLSARYRRLIAAGKKAPVAVAAIAREMAAFLWAIGRVVEPA

SEQ ID NO: 221937 - protein, 361 aa, unidentified
MKILALDLGKYILALDLGKYKTVACEYEAESGRHRFATVLTTPKALHDLIVDREPQRVVIEICSIAGWVGDLVRSLGIELQVANTSDERWQWRKVKQKNDRRDALKAAQLSAVNQLGPVHVPELTMRQWRALIAYRSKLVQRRTKVKNHIRDLLLREGQLLPRGRTAWTQAGMATLATMAQPFAVLDSEQLWRGELGIELAQLNELQQQIMTVQAKLDELAAADPRVQLLRTIPGVGPRLAEAIVTMFDDVTRFTTAGQVGAYIGMVPKQFDSGETQRSGRITRHGNRLVRSLLVEIAWASLRHNPWARQTFQRISGGKKSRRKIAIVAVGRKLLVRCWGMLRHQTPWHWQTSVAPQLTDG

SEQ ID NO: 221938 - protein, 333 aa, unidentified
MGFEPEPSKEGSWMMAQNDLIVAGIDVAKDKVDVCIRPLSLRRTFASTAEGQRELAAWLRRKKVGKAVMEASGGYEREWAKALRDAKIEVRIVDPKRVRDFARSAGRLAKNDTIDAEMIAWFAETFGEAPGQAHDAAREELAQVVTARLGLLDLQTKLLNRGEHAGPEPVQKMHARMLKKIALEIAKLETVIAAMIKATPRFAELAEIIESVPGLAKTTSATLIAKMPELGQVNNKIGAALLGAAPYDDDSGRRRGERHIKGGRRKVRNLFYMACLGAATQHNPVLKAFYDRLIAKGKEKKVALVACMRKLIVILNIMIARRQKWDPNLHVVG

SEQ ID NO: 221939 - protein, 431 aa, unidentified
MKVMYERVAGIDVHKDMIKVGVRSPGDKAWTRKTEILEYRTFYGVLQLMAADLRKRAVTHVVMEASGVYTEPVYYALCEQDFERVDVINPAHAKALKGHKTDAKDCARLAELYECGLLRGSYIPAAELKELRDLTRYRVKTVQARTSEIQRLGKALESGGIKIGSVVSDITGKSATAMIEALIDGERRGTVLADLAIGRMRTAGKLADLSMALAGRFTGHHAMLCRLHLDRLAVFDTAVSGLDERITARAVPWRREQDLLMSVPGFGDIVSQVWLAEIGPAPHQWFSTHEKLASWVTLSPGNNISAGKRKHGRTGDAGTYIKPMLVQAAWSAIRTPGRLQARYGRLVRRFGGAKNPAAKKKAIIAIAHTLLKIAYQVLKSGMPYQDLGADFYTQRESPQQRQAYLLRQLEKLNPGCTITISPPEAALTPGA

SEQ ID NO: 221940 - protein, 316 aa, unidentified
MSIAAPTPTVTHYAGLDVAKATLAHHLAGHHHDLPNTPAGHRRLVRLLQRRPGVQLVCEASGGYEQAPVRALWAAGLPVSIVEAGRVRHFARACGQRAKSDPIDAAVIAEFGAAVRPRPTPSPGPVADRLAALVQRRRQLQHTLVAETNRAAHYTDPLLRRQTAQLVRLLRAQIRACETETARLLGQDAELAAKVDRLRLVPGVGPVVAATLVAELPELGRLRDEAVAALVGVAPYDRDSGRFQGLRRIAGGRRTVRGALFMATLSAVRHDRLLRAHHQQLLARGKKPLVALTACLRKLLVLLNRLLKNPNFTLAG

SEQ ID NO: 221941 - protein, 341 aa, unidentified
MTSYVGLDVSLAETSVCVLGGDGRVRFEGKVKTRPEDLIQCLRKYADDAERVGMETGQTAGVLFRALKAADVPILCLETRHAHRALSARTNKTDRNDARGLAELMRVGWYREAWIRGTSANAIRSLLLGRRLLLQTKRTLENTLRGGVKRFGLITTKTAGRTFTHRAASVLDQDPAYAAFAAPILAVLRSVLVQIREYDRQLRGLARRDDTVARLMTIPGIGYLTAMAFYSTIEDPGRFKRSEDVGPYLGLTPRTHQSGEIDRTGRITKTGDGMTRSYLFEAANVLLTRIQRPSALRLWGLRLRDRAGLKKAQVAVARKLAVMMHAIWADGTEFEWGTASA

SEQ ID NO: 221942 - protein, 343 aa, unidentified
MQAVTTIGLDIAKSVFQVHGIDAEGNVLIRRQLKRRYLLAFFEKLQPCLVGIEACASSHHWSRELKALGHNVRLMPPAYVKPYVKRQKNDAADAEAICEAVTRANMRFVETKTPEQQSCLMLHRTRQLFIRQQTSVINAIRAHLAEFGIVAPVGRQGVEQLLAVVTDASDQRVPELARACVAALGAQLRRLKAQILEFDRRIMAWHRSNETSRRLDAIPGIGPALATALVASVADPKAFRSGRHFSAWIGLVPKQHSSGGKDRLGSISKQGDRYLRSLFTAGALAVIRYAKIHGSQHRPWLTALLARKPTKVAAIALANKIARMAWAMMARGERYKEPVALAA

SEQ ID NO: 221943 - protein, 369 aa, unidentified
MQKHITHVALDDSKRTIIAGILRPGAQDPELRQIPNEPRHLRRLFARLTREGAVVACYEAGPSGYDLYRQLTALGVPCQVIAPALTPRKPGDRIKTDRRDAAKLVRLFRAGELTPIHVPDEAAEAARDLLRCREDVQEDLLRWRHRLVKFLARHGRVYREGRHWTQRHWGWLRSQRFALPALARTLAEYRFTVEQLLARAAELEREIAALAETAPYRESVGWLRCFRGIDTLGAMGLLTEIGTFHRFPHPRELMAYLGMVPSEASSGDRERRGGITKAGNTHARRILIEAAWHARHPPRLGAALTRRSQGQPKAVLAQAWQAQLRLHRRYRHLVGHGKRPPVAVVAIARELAGFLWAALTQAAPAAQVA

SEQ ID NO: 221944 - protein, 278 aa, unidentified
MKNVYGIDIAKKSFEVFVIHSDQSHRSSSFENTESGIKSFLKWVKRKSVEGDSIFLMEASGVYYLRLALKLFQSAHCVKVLNPLVIRRFSQMNLKRTKTDRQDAQIIANYGIQYHAQLPDWQPPQKYAFQLRQLITATEQLQKQLSMSHTLLEALCQNPLTDQWLIEQQQSLIEVLQKQLKRLDKQVEKIILAHYEDTYKAILSIPGVGPKTASLFIAITHNFTRFESQKQLASFIGVCPRIFQSGTSVKAKERIVKMGQPLARKLLYMAALTTHVKK

SEQ ID NO: 221945 - protein, 334 aa, unidentified
MEGLDEERRDAPVFLGVDTHSEAHVAVALDGAGGRLGELVVPNDRAGYARLWDWAMSLGILVAAGVEGTGSYGAGLSRFLRARGASVQEVNRTSRQHRRRHGKHDAGDAEAAARQVLSGTAAGEPKGADGAAESLRALRVARRSAVKAKTQAANQLHALLSTAPDELREGLGGLPTKHLAAKASRFRCGAGPVDPARATKLAMRSVARRHQALSGEIAELDAHIEALVEEAAPELVALEGVGPDTAAALLIAAGDNPERLKSEASFAHLCGTAPVPASSGKVVRHRLNPGGNRDANRALHVVALNRLRRDERTRGPTSPGGPRRASPRGRPCGA

SEQ ID NO: 221946 - protein, 369 aa, unidentified
MVFLGVDWAEEHHDVCLLDDEGNRLEKARVPEGIEGVRRIHALVTNHAADPGEVAVGIETDRGLLVGALVGAGYQVYAVNPLAVSRYRERHGVSRAKSDQADAKLLADLVRTDRHNHRQVRGDSEQALAVRVLARAHQAQIAARQRQANQLRNALLEFYPAALNILGTDLDSKMAVALLTIAPTPAAGRKLSRAQIRSALSRAGLQRSLDEKAAAIQQQLREEQLEAPPVVAQAFGAIVSGAVKVNRALNDEISDLETELTASFEAHPDAEIIRSLPGLGVVLGARVLAEFGDDRTRYATAKCRKNYAGTSPITKASGKQKVVLARFVRNRHLADATYLWAFCTLTQSPGATTTRVVPTAPTTTRPCVR

SEQ ID NO: 221947 - protein, 311 aa, unidentified
MTEHTIGVDISKSHLDAFRLEDGATQRFENSAAGFRALQKWLGKAPVARIVFEPTGPYHKAFETALGEKFPLVKVNPLQARRFAEAYGTRAKTDAVDAQMLARMGAAFNLEPQAPCSKETLVLRDLHVARAGLIKDRTRLRNRAQTQDIPLLKRQTKARLTQVERQIAELDAEIAALIEAHGATARNRDILCSMPGIGAVTAAAMLTLLPEIGTLQRKQVASLTGLAPITRQSGQWQGKSFIGGGRKPLRDALYMPALVAMRFNPDLKAKYDALRTVGKPAKVAIVVVMRKLIEMANALVKADRMWAPKTA

SEQ ID NO: 221948 - protein, 373 aa, unidentified
MNACLTPKSTVVGVDVHKYSHTAVAMDCFGQEKARLDFSNERLNDYVLWLRELGDKEDIIVALEDVNGYGFHIVERLSKEKISMRYVPAILTERERKKSIHREKSDYEDAKRVGKVILTKFDETLPAKESIADDQERELSANLDLLTAERRILVQEKTILKNQLHAMLHQIYGDHYGEGFPKVFHKKAIKSFRQKLTQTKFDNPIRVALAGSSIRRFDRLALVEKQLKEIDGSINNIGQKSEAVMALSDNIHGCGIITAASIIAEVTTISRFCDKSRFARYSGIAPIDKSSGRHQRLYTSPFGNRKMNRALHTIALCQIACKGDDRGKIYFKKKLAEGKTKLWALRCLKRQISNKVFQALKEQKRRDRTIQNG

SEQ ID NO: 221949 - protein, 343 aa, unidentified
MNQYIGLDVSMKETAISIREDGKRIWRGKCAYDLQPLAAAIRKRAPHVRRIVFETGPLSVWFYHALTAEGLPVICIDARHAKAALDMAANKTDANDADGLAHLAEVGFYREVRVKGFDSMLIRTLITARRQLLKMRLQMSNQIRGLMKTFGLIVPKGAGSVFERNVRDLLQGEEKLARIVVPMLQAWSNIRHQIAELSKQLAAMARDDQHCRLLMSVPGVGTVTAPAFAVGVEDPANFKNSRAVGAWVGLTPRRYQSGEVDNDGHISRRGDNQLRGLLYEAASVILNRSSDTSTLRTWALELKERLGFKRAAVALARKLAVIMHAMLRTGELFDPHGETQASA

SEQ ID NO: 221950 - protein, 347 aa, unidentified
MLTIGIDTHKATLAVSAIDATGREHRARTFPNDHPGHVKLLHWAQALGAERRFGIEGSGSFGAALARLLVAAGEQVVEVPAILTDRERRHLRRAGKSDPGDALGIARVALREEGLGPIPMPGITEDMKLLVDARDQRVGERTRVANRLHANLVVLAAGYKRAIPNLASVSHRAALAHLLTDLVGVRADLARADLARLLELDAECTALEKRLRSLVRLSGSSLPTITGVAAITAAKLLGETGDPRRIRSTPAFAAMSGTAPIPASSGQTSRHRLNRGGNRQLNRALHTIALVQARTDPRAQAYMARRTTEGKSRLEAMRCLKRHLADVVLRTMLADVERSAAPVKVGA

SEQ ID NO: 221951 - protein, 415 aa, unidentified
MEIVYPRVAGIDVGKKVVAVAVRTPGDQPGQRHQQLRKYRTFYPTLREMVGWLVDQAVTHVAMEATGVYWKPVFHVLCEVESLDVLLVNARHVKNVPGRKTDAKDAEWLAELCEVGLLRGSFIPPKEIAAIRELTRYRKKLTEARTSELQRLCKVLEDGGIKLDSVASSITTLSARAMVEALIGGERDPRVLADLARGVMRKKIPDLTMALAGRFGAQHALLARMHLGHIDHLSGMIQTLDGEIEQVITPFAEQVRRLRTIPGIGERTAQVLVSEIGVDMTRFPTAEHLASWAGLCPGNNESAGKHRRTTTRKGNREVREALVEAAWAASRTSTYLGARFRRLHRRFGKQGGSKAAVAIAHNLLVIAWFLLHDGTDYQDLGADYFTRHDHPDTKKRRLIRELQALGYTVDLTPAA

SEQ ID NO: 221952 - protein, 392 aa, unidentified
MEEKAWAGVDVGKGFHWAHVVDAAGAELLSRRVDNDEADLLALIDEALSLAGEVAWAVDQPGGGAALLLVLLWERGQVVSYVPGLSVDRARDGYRGESKTDRKDARVIADQARMRGDLGRLEPGDDALAGLQLLLARRRDLVADRTRAVTRLRETLLAHFPALERALNLNTRGPLELVARYQTAGAIRRAGRKRVAAYLKKRGVAKADALAERAVAAAKSQSAALPAEDVASEIAAELAGGVLVLKQRIDALDRDLERRFFARPEAQILSSFPGMGPILGAEFLVAVGEVSAFGSADRLAAYAGLVPAAHDSGKRVGNHRKGRGGNKVLKRVFYQSAFSSMRGVPESRAFYDRKRAEGKRHTQAVIALARRRVNVLWAMLRDGTTFETGSTA

SEQ ID NO: 221953 - protein, 343 aa, unidentified
MRTITTIGLDIAKSVFQVHGVDAAGQAVIRRQLKRRYVLAFFQKLPPCLVGIEACASSHYWSRELQALGHTVRLMPPAYVKPYVKRQKNDMADAEAICEAVTRANMRFVPTKTPEQQSGLMLHRTRHLFIRQQTAVINAIRAHLAEFGVIAPVGRKGVEELLRVVADPNDNRVPEVVRGCLAALGSQLLSLKKQILDFDRMIMAWHRSNQTSKRLNCIPGVGPLLATALVASVADPKTFRSGRNFSAWIGLIPKQHSSGGRDRLGSISKQGDRYLRSLFVAGALAVIRYAKIHGTKHRPWLTALLARRPTKVAAIALANKLARMAWAMMAKGERYNYPVALRP

SEQ ID NO: 221954 - protein, 344 aa, unidentified
MGQHYVGLDVSLEMTSVCVLDEAGATVWRGKVGSTPEALATAIRARAPQVARIGLETGPLCTWHWHALRALGLPVVCLDARHAKAALSVQMNKTDANDAYGLAQIVRTGWYKEVAVKSLDSHRLRTLLSSRAQLVDMRRDLGTKIRGVLKTFGKVVGKVGDRGFAARVRELAAGEAGLEEAVSALLAVRERLEQQIEALEARILGFARRSDPCRRLMTIPGVGALTAVSFVAAVDDPARFRRSSGVGAYFGLTPRRHQSGEVDRDGKVSKFGDALTRAYLFEAAGVLLSRVARWSALKAWGARLARRIGGKKARVALARKLAVVMHRVWVDGTEFRWSKEAIPA

SEQ ID NO: 221955 - protein, 403 aa, unidentified
MSIKGAPVMAATVVAVDVGKNTAALSVTDAERRRLFGPVDFAMTAPAVTAVVEQVCAVLPGVAVKVGIEAAGHYHRPLLAAGVWPAGWEVLELSPARVAEQRRVQGRRRVKTDVIDLEAITELVLAGHGVPVTVRAATLTELTGWAMHRSRRVQTRTATKNQLLAQLDRCFPGLTLALPDVLGTQVGRLVAVEFADTHRLAALGVTRFVRFAAHRGLRVRHSAAERLVAAARNALPAPEAVVARQVLADDLALLADLDAQIGAAEAQMARLLPDTPFAPLTTVPGWGVVRASNYGAAVGDPQRWPRARQLYRASGLSPAQYESAGKRRDGTISREGSVALRRALIDLGLGLWHADPAARRYGQQLRARGKKGGVIGCAMAHRANKIAYALVRDQTGYDPSRWA

SEQ ID NO: 221956 - protein, 355 aa, unidentified
MESTKYVGLDVHQEATTIAVMNSAGKLIMESIVETKAITIRQFIQGLHGDLHVTFEEGTWAAWLYDLLKPYVTKVIVCDPRKNTLLKVGNKSDRIDPKKLAELLRNGALSEVYHGENGVRTLKELARSYLTISKDLGRVMNRVKAVYRSWAIPCAGTQVYALCHRSEWLSKITEAGVRRRAEHYYQQLDALQTLRREVRKDLLLESRKHNATKLLRQIPCIGPIRAAQLVALMQTPHRFRTKRQLWTYSGLGLETRDSAQYCYVEGQLQRSKKPQQLRGLNSNHNHDLKNIFKGAATTASVSAGPFHDFYQALLTKGMRPTMARLTLARKIAAITLIVWKKGARFDPQHLKQQAA

SEQ ID NO: 221957 - protein, 391 aa, unidentified
MTYIVGIDIAKFSHECLILNHHGEVVVQSFSFDNNYLGFKMLGTILSRTAHSTQIKIGFEATGHYGNNLKNFLINSGYDFMEIHPVLINRFSKAISLRKTKTDKVDASLICSYLTSVEYKPYSLKSYHNTSLKSLIRTRDSLVKERSLQLQRMTNILDIIFPEFKPFFKHSLKSSTALYILKHYTLPSKIKRMTQSSYAKMASKLRRTISYARFIKLKELANNTVGTEDELLAFQLHSFLNLYNHFDNLIKEIDVLILNEYKKANSYIHTIPGIGEISAATIATEIGDIRKFSNPDKLVAFFGLDPALYQSGETEFTGRMVKRGSSLLRQTIMNCATYCLLHNPPLYDFYRKKRDEGKHHRVALSHVAKKLIRIIFALETKEIEFDFNQMK

SEQ ID NO: 221958 - protein, 323 aa, unidentified
MQGKVSFQEDAMPVVYAGVDVSKEWLDVHLHPLGESRRFSNDKTGIRQLKRLLAGHQPKSIVMEATGKFHRPAHRSLWLDGFAVAVVDPLRARMFARACGYLAKTDRLDARFLALLAESLRPPADTPPSPHVEALQELVNARSAAKCDITALQNRSKTATTALLRGELNRLVRRLEQHVERLDKEIERRVGEDPQLYRKAEILTSIPGIGRVTAPALMAGMDELGSCSGKQAAMLAGLAPIANDSGARTGRRSIRAGRPAPRRALYMAALSACRYNPALARFADTLKAAGKPAKVILVAIMRKLLVLANCLLAHDRIWTPNPP

SEQ ID NO: 221959 - protein, 412 aa, unidentified
MSDGTVSWFAGVDWGSEKHQVCLLDAAGKVVGEREFRHGGAGLAALCDWLVSAAGEPGRVAVAIEVPHGPVVDVLLDRGFAVHAINPKQLERLRDRVSLAGAKDDRRDARVAAGGLRTDPHLFRPIEAGDPAVIALREWSRLAEELQQERMRLGNRIRQQLWRYYPQLLEVSDDVTVEWILDLWTLAPTPAKAARLRASTLVRLLQEHRIRRVDAEKVLGLLRQPAITVAEGVTEAAVLHLRSLGARLRLANREFHQAERKLDALCATLREKTAAAGGAPCDAAVLRSLPGVGTVTLAILLTEAAGPISRRDYPALRTLSGVAPVTKRSGKSCSVTMRYAAQIRLRNAVFHWARVAVLNDPKCRSRYATLRARGHSYGRALRGVGDRLLGVACVLLRRGMLFDPDYGSSAAA

SEQ ID NO: 221960 - protein, 326 aa, unidentified
MVVLLNEQDQVIYQKRLPNHLPTILEPLSLHHGEIEGLVVESTYNWYWLVDGLMEAGYRVHLANPAAIQQYSGLKYSDDHSDARWLAHLLRLAVLPEGYIYPKAERAVRDLLRKRAHLVRQHTANVLSVQNIMARNTGARFSVKRIQELTKQELQSLLTEEPQVLAVTSSLAVLDCLKHQIKTLEQTVHKRLNHTPSYEQLLTVAGIGTILAQTIALETGDIRRFPSVGNYASYCRCVDSNKISNGKRKGTGNVKNGNPYLAWAYMEAAQFALRFQPAAQRFYQRKLAKSRNNTVLARKAVAHKLSRACYYLMRDLVPFEETKAFG

SEQ ID NO: 221961 - protein, 402 aa, unidentified
MAYCGGLDWGSAEHGVCIIEHDSGKIIARFPVAHDAAGIADLMRRLARLARPADLPIAIERPSGLIVDALVAAGHPVVPIHPNVVKASRPRYRAAGGKSDRGDPYLLADLLRTDGHRFRRLMPCSDEIKALRALVRGRDALVAQRLVLANQLRALLDSFWPGAVAIFADIDSPIALAFMQRYPTPDSAARLGEKRIKAFMAQHRYCGRRSASELLARLRRAPPGLAGESEADAKGELVRAWAAVLTVLVAQIAELASRIEHTIGELPDGKIVTSFPRAGRICAAQILAELGDVRERFQAEDQLAAEAGVCPVTHQSGKSRGVVFRWACNHRLRAAVTCFADNSRHSSPWASDIYQRAKGRGCDHPHAVRILARAWVRVLWRAWQDRTLYDPARHRGSRASAA

SEQ ID NO: 221962 - protein, 348 aa, unidentified
MDHIGIDVHKRESQIYILAEDGEIIERRIRTEDERFAAVLGDRPRARILIEASTDSEWVARCLEALGHEVIVADPNFAPMYATRTRKVKTDRRDARALAEACLLGAYRPAHRLSDPQRHVRGRLGVRDALVHTRTCYISVIRALLRQHGYRVPSGSAGSFIDRVRSLPLPGRLRSVVAPLLAVMGHLNEQLAYSDATIEHLAVQDPRVPRLRSVPSVGPVTAAAFLATIDDVGRFPHAHQLEAYLGLVPREYSSGDTQRRGPITKAGHSRVRWLLIQTALSILRRRPPAAEALWTWALRIAGRRGKHVAVVALARRLAGILYALLRDDTVYAPRRPAALPHPVAALHA

SEQ ID NO: 221963 - protein, 399 aa, unidentified
MSVVGWDWASQAHDVTVLNDAGGVLDRWAFPHTEAGWVMTLARLRRHGEPGDLPVIIEKTSGLAVDRLLAAGHPVVPVHPTAFYAARPRWGASGAKSDPGDSYKLADYLRTDGHRLHRLEPADPGLRELPALVRLREDQVRARTAATNQLWAMLGNYWPGPRGLFCSLASDIALAFLTAYPTPQSAARLGQARMAAFLRRNSYRGGKEPAVLLERLRAAPQASVVLPAATLAAMVSAHVQQLRSLQAAITSIERLIAGRVAAHPRARLLGKLPGVGMINLAQLLAEVGPILDRASSAEQAASECGAAPVTRASGKTTGVYFRWAASTRARKAITAFAHNARMQSPWAARLYADARARGKRNPHANRIVARAWIRVIWACWHTAVPYDPAIHHARQRFTT

SEQ ID NO: 221964 - protein, 379 aa, unidentified
MITNTRISPHSFKSGYKDQIEFKIRWDIGLPYKGFSQRNHFNKLKYKVMRIKQTIGIDISKLTFDVRIHSNQMFHQFENTNKGFKKLIKWVNVNNSFLKDETIFIFEHTGIYSYLLSVFLTEQQLSFTLIPGLEIKRSLGIARGKDDKIDATKIALYGYRLRDEIKFYEMPCEDIINLKRLLSLRDRLVKQRAGYKSSLKELSRVLTLKNNKVLLETQEKMIRYLTKQINIIEQNLDSIINSNDTLKNIFKLVTSVKCVGRQTALFIIAYTESFTKFKTWRQFASYCGTAPFPNSSGTSLRGNTQVSHLANKKIKSLLDLCAKAAIQYNPEMKAFYKRRVTEGKNKMSTINIIRNKLLSRIFAVVNRETPYVDFMKYAA

SEQ ID NO: 221965 - protein, 406 aa, unidentified
MSQEKTSPDRFVGLDVHKHYLAAAAVDPDKNEILSPRRVMLARLDNWMRKTLTPRDAVVLEMTTNAFQIYDELRPYVHSVTIVHPPHVALITRAQVMTDKIAARIVARLHAVGLLPSVWVPPTEVRDHRALIAQRTKMVRLSTQAKNRLHAVLHRHHLLPPAGKPFASHNHEWWLELEISELERAHARCDLDTLVFAQTQVAHLEETMTALAAQDDRVVLLRQLPGVGLITALTLLAAIGDISRFPTAKHLVGYAGLGVRVHDSGLTQRSRRITKAGRRDIRSAMVEAAHTAARTHPHWREELARLEPRLGKNKAIVAIARKLLVAVWHVLSEGGPDCFADAEFVARKLLKHAYRLGRAHRSQGQTAPQYVRQQLDRLGLGQDLTAIRWGDRTFPLPPSRLGTESN

SEQ ID NO: 221966 - protein, 352 aa, unidentified
MFYVGLDIHDKRIAICVLNEAGQVARRAQVRTIDEMMRILESLPDRFEVCYEASCGYGHYHDLLRPIAARVTVAHPGRLRLIFRSKDKNDRKDAERLAKLLYLGEAPAVHVPSADVRTWRELITCRGRVIAKRTRAKNSLRTLLRCAGVVPPGRPALWTKNGLEWLRRLELPTPSQQLRRDLLLEEIEALTRQVRRIEQQLNHEAGRSPAVACLRSIPGVGVRTAEAVAAFVDDPQRFGDAKAVGRYFGLVPSQDQSGDRNRLGHITREGPAVVRQLVAEASWQAVRRSPTIRAYFERIRRDDPQRKKIALVATAHYLVRVMLALLKRGTTWEEAVAPTDEPKRAVPAAAAI

SEQ ID NO: 221967 - protein, 380 aa, unidentified
MRQVCGLDVHKDSVFVCILNENGIVFQEKFGVLTPELEQMLSVMLQYRVEEVCMESTSIYWMPVWRVLENYVSLKLVNPYFIKQLPGKKSDVKDAEWIATCLLKDLIKGSYVPEDLIQQLRQYDRRISDLNAEIVRKLGKLDAALQRCNIRISNYVSSTDGKSYKEVVRLISEGIRDPSELTKVIHGRTVNRVGKDVVLASLTGVISDTDIDVMRQLREEVELAEKHKDECQSKMDAICRQYFPDQLKNLQTIPGIKGRSATAIIAEVGTDMSSFEDAAHLVSWCGLKPRNEESAGKIKARSITHGNRYLRKTLIECAWAASKTQDCYFSKFSYHQVIVRRKSKMKVQVAIARKILTAVWYVMHDNVAYRDFTPDIVPTE

SEQ ID NO: 221968 - protein, 345 aa, unidentified
MVEYIGLDVSKEMTAYCVKSREGKVLARGKVETDPDALFEALKEHCPCPERIILETGTLSHWLGRELRRRGLPVKVIDARHAHAVMRLQHNKTDENDATVLAELARTEFYRTVAIKSEAAQMQRILLKARDHLVGARRSAQNTIRGLMSGLGIRFARGAGPFVRRVREILQDRRELATIIEPLLALVEAAEQQIKKLDREVTAHAKSDPACRLLMTIPAVGAVTALAYVLTVDEADRFGKSRSIGAYVGLTSRRNQSGDMDYSGRISKKGDTMLRSLLYGAANTLLTRFRRAHPLKTWARQVKKRTSHKRACVALARKLAVIMHAMLMSGEAFFWPPVNTKEKAA

SEQ ID NO: 221969 - protein, 410 aa, unidentified
MEALLERCAGLDVHQASVVCCVLIGVPGRKPQKLLRRFGTTTRELEALRAWLAEQGVTHVGMESTGVYWKPVYAVLEGHFELIVGNAHHIKNVPGRKTDVKDAEWIAQLVRHGLVAKSFVPPPAIRDLRELVRCRRALIETRTAMRNRVLKLLEGANIKLAGVASDVFGVSGLAMLEALAAGTTDAAEMAGLARGRMRRKAAELEAALEGRMREPQCFLLAMHLRQLEAVEGDLEALDARIDAQLAPFRAQHGLLLQIPGVDWVTAATILAEIGPDMDVFGTARRLAAWAGVAPGNCESAGKPKGAGTRKGNVFLKSALFAAASAAVKTKGSYYRDKYNRLRARRGPVRALMAIAHKLLLAAFHLLATGEAFHDLGESYLDQVARRRSTARLVQRLSNLGYDVTLVPKAA

SEQ ID NO: 221970 - protein, 398 aa, unidentified
MLSIGIDVSKGKSTVCGMKPGGEIVYTPFEVQHTREGMSELVSLLRGSGEEVRVVLESTGSYHCPVVAALLENGIFVSVVNSLRMKRFCSQSIRRVKTDQIDAMQIALYGLAYWPELQPTRLPENTYRELQLLARQYYQMTSILIKAKVDFNALCDQVLPGMQELMNDHAGRHKLSDFVLRYRHTTHILEMGETRFRKDYCKWAEKKGYRNRERMAALIFATAQNGIPVLPNAPSTQIVITEAIRVLHTVEASRDAILTQMQALAKTLPEYSLVREMPCIGDTLAPRLIAEIGDVRRFHSKRALIAYAGIDAPPYQSGKFSANNRHISKRGNRYLRKTGYEVMQSYVMHKPANDPIFTFIEKKRSEGKSGKLAMVAGLNKFLRVYYGKVTELYRSLPQ

SEQ ID NO: 221971 - protein, 391 aa, unidentified
MSMYFIGIDISKYKHDCCIISAANQKVVSKVTIENNKSGFEELLTIINSLSNPADIKIGFESTAHYALNLELFLENSLLTFMEVNPVLISEYKKSKTLRRTKTDSVDCESIARWLMTVEYKPHSKGFYHAYSLKSLTRLRDKLIRQRSFYLVKITNVLDHTFPEFKPFFSERFSKTALYLLENYGSAEKMARMNSVSYEKLRSLSRGKFSPQQFLQLKELAANTVGVNNSIFDVELNSLLTLYKSLNKEIDILEKEIIKLIEEIHPHYMSIPGIGPLSAAVIYSEYGDISNFSNSGQMLAFAGIEPGINESGTESHGGKMVKRGSSQLRYTLINCCLPLIRFDMTFATYYAKKRGEGKPHRVAITHVAKKLIRVIYALERQDIDFNTQKLR

SEQ ID NO: 221972 - protein, 350 aa, unidentified
MDKELYIGVDVSKQTLDLAYYDGESIDWKKAHIKVNNNNAGFKKIGSWVAKVSKGFDIVLFCMEYTGLYTQDFRLWLEEKHYIYRMVEPRKMHRFEPDLDDGLRSLDRIKTDELDSFRIAIYCEQNHRKILRNPSKLPPPVYFKLKRLLAERKQTVKQSVLYKQQLHDICAYDTDLSVERKNGQLKTLNDALKGIDNEIDMYIKEDADISKNFSLLTSIPGIGRVVALETIVLTENFMAIDNPRKYACYIGVAPFKKESGTSVRKGSSVSKKGFKQAKADLSIACLVCMQHIPNIRDYWERKRKEKCSGIVFNAIKFKMILRMFAVIKRGTPYVETDNYRNGKNKQPGVN

SEQ ID NO: 221973 - protein, 344 aa, unidentified
MSLTIGLDIAKHIFQVHAVDDSGEPVVRRKLRRSEVLAFFAKLEPSVIGIEACGTAHYWGRALSELGHEVKLIAPHYVKPYVKRSKTDAADAEAICEAVGRPTMRFVPVKTTEQQAIQMVHRARSMLVRQRTMLVNAVRSHLAEFGLVTGLGLAKTAALVAEVLKAGEDECPIPEIARTVIRCLAQQVAMLDNQIRRLDAELLAWHRTNAASKLLASIPGVGIVTATAIAATVPDPGYFGSGRAFAAWLGLTPRANSSGGKERLGRITKMGSQYIRTLLVVGATAVVRSARIKDGSWLSEWARSLLEKKPARVVTVALANKMARVAWAVLTRGHYFRPSLVAAG

SEQ ID NO: 221974 - protein, 348 aa, unidentified
MTFEGKVVTYAGIDVGKETLDLALLDPASGEVRHHRFRNSERGRSALLHLLSLPQPAAERPHHPAAVHLAAVHLAAVVLEASGVYHIPLLRRLLDAGLPVALANPYQVAAFRKASGVRNKTDRQDALLLARYAAVYSGRLTSYAAAPRVLAELKEVLHYREQLLTRLQQVDNRIEAARWKSSLGCGSVTLAWLEEERDQLRDLLEKAEAEARRLLQVLPEYRVLLTQKGVGLQVAATVLAFLPPELWGRAKQASAYAGLIPEQQHSGSSVRKSRLSRKGPALLRKKLYLAALLASRHDPEMKAFYHRLLAKHKSKKQALVAVAHKILRQLMGKLKAYYREQGREGLVA

SEQ ID NO: 221975 - protein, 412 aa, unidentified
MEVLHARCAGLDISKKDAKVCVRIAGAGRRKTSETVTTFGATTRQILTLREHLVAEKVTCVVMEATSDYWKPFYYLLEDLPGVEVMLVNARHVKNLPGRKTDVADATWLAQLGAHGLVRGSFVPPEPIRQLRDLTRTRTAVIRERTREIQRLEKLLEDAGIKLSSVATDITGVSGRAMLEALIAGETDPAAMADLARKQLRRKIPQLTEALYGRFTSHHAFLARMHLDLIDQHTAAIAQLTDRIEVVIAPFRHFRDLICTIPGIGGRTADVIVAETGADMTRFPTADHLASWAGTTPGNNESAGKVKSSRTRPGNPYLQGALGIAAISIAHTRGTYLAAKYRRIATRRGPLKANVAVQRAVLIAIWNMATTDTEYIDPGGDYFTHLHPDKARVKAVRQLEAMGYHVTLDQAS

SEQ ID NO: 221976 - protein, 323 aa, unidentified
MNKDIKYFGIDISHLVFDVTDSEGNYYQFKNNGSGFKKFDKLLNSQSHCVMEATGYYHYQLAYHLLESGIKVSVENPLAVKRFIQMKLSKVKTDKSDSRLICEYAQQVELKLWQGNSKAGLECLQITRALAIYTKQGTMLKNKLHGEAVLGEPSKAVVRSLKRNLKQVLDEVKSLEARLLHLVKQEHQDLLTRLQTIPGIGLKTAIMLVVLTGGFERFSSAGELCSYAGLTPVIRQSGSSVKGRPRISKIGNQKLRNLLFMCSFNACKYNKACRDLYERIVAKGKSKKLALIAVCNKLLKQAFAIAKSGLIYDCEYKSTLVKN

SEQ ID NO: 221977 - protein, 403 aa, unidentified
MYAVGIDVSKCRSTVAVLEPLGKTVAKPFEVRHTKSGMNDLVNYLNTLGGECRIVLEHTGRYYEPVVRWLSGAGLFVSAVNPKLIKDFDNNSLRRVKTDKADARKIGRFALDKWYMLRQYTAMDNIRTQLKTMNRQMSFYQKQQTAYQNNLIALMDETYPGANKFFTSPKRPDGSEKWVDFIEKFWHVDCVCNLSLKSFTEKYQKWCKKHGYNFQPDKPAEIYNASKELIPILAKDDMTKLFVQQAVTQLNAISKAVEELRQQMDSLASQLPEYPVVMSMFGVGTTLGPQLIAEIGDVHKFTKRSQLTAFAGVDPGVNESGDYAQKSVHTSKHGSPYLRRTLFLIMEVLIKNQPEDDPVYRFMAKKRDEGKPYYVYMTAGANKFLRIYFGKVKEYLNNLPPEE

SEQ ID NO: 221978 - protein, 407 aa, unidentified
MHHQRLVVTGGVDTHGDVHVAAVLDPVGRVLATGSFPATTAGYRQLLSWLCRHGRVVQVGVEGTGSYGAGLARHLARHGVAVVEVNRPDRQARRRRGKSDTVDAIAAARAALSGDATATPKTGDGIVETIRSLQVARRSAVKARTQAGNQIRDLIVTAPDDLRAQLKGLNTVNRVAACARFRPGDYTDPTEGLRHALRHLARRWQALDVEITELDGALKMLTARANPALVAARGVGHEVAAALLVTAGDNPQRMQTEASFAALCGVSPIEASSGKTIRHRLNRGGDRRANNALWRIIMVRLQHDERTKAYVERRTAEGLSIREIIRCLKRAVAREMFRLLTNPPAVPNGADLRTARNTAGISLAVVAEQLGTWPTRISQLERGLQHDLDLATRYQTWLNTKIPAIAA

SEQ ID NO: 221979 - protein, 315 aa, unidentified
METVVDKGCGLDVHKETVVACVMGTGIEKEVRTYGTMTGELLQLKEWLKSLGITHVAMESTGVYWKPIFNILEDSFEVILVNARHIKNVPGRKTDVKDCEWICKLLRCGLVKGSFIPEKDIRELRDLTRYRKKLVQSISSEKNRIQKVLEDANIKLSSVLSNSFGVSGSAIIAELLKGSQSIEEMAGLARGRLGPKKEQIKEALEGHFSDHHRFMIKASLGHINSIELIISRMDSEIDKKIERYRKEYELLQTIPGVKEQGAAAIIAEVGTDMGRFPSEEHLASWAGMSPGNNESAGKKKALTPPTEISASEAHW

SEQ ID NO: 221980 - protein, 342 aa, unidentified
MDQIIRIGMDTSKQIFQLHGVNAAEEPVLRRKLRRTQMIAFFAAQPRTVIGIEAGGAAHHWARTLSAMGHEVRIIAPQFVRPYVKRGKNDAADAEALCEAMSRPSMRFVPMKTAEQQAALMLVSLRDRLIRSRTQLTNAIRGHAAEFGLIAARGVDKIEPLLMRIVDDESLPALARSLFAQLGAEFAQTQARLKQVSAELMAWHRQNELSQRLTQIPGVGPIGATMLALKTPDPGGFRSARHFAAWIGLTPKDHSTGGKTRLGTITRAGDETLRSVLVVGATAVIRQVRRRRGLLWPWLQRLLERKPPKLVAVALANKLARVAWKLMTSGQGYDAARGVRAA

SEQ ID NO: 221981 - protein, 312 aa, unidentified
MYYIGIDVSKKDLSVFDGKKDLKFTNKEGLKSFKKYLKKKYNLSKIAIIFEPTGVYSLYLKEFCAENNIKAYIINPKKSHNFTRALGKRSKTDKIDARILYQFHKNIDLKDIKVPKIDQQAKTLASYLVSYEFVLKQRISLSNHLESLRNKSLISLMKKDLKRAKMLEDKLFHDIKEYVSKNQNLREDYQRLLTISGVGEKTAIALLTLFKTYQGTNRAQITALAGLDPVKRESGTSVKDKAKISKNGKGIYRKIFYLPTICATVHNQKIRVFYQRLLTHHKTKKLAVIASMRKILLIAHAMYRDKTEYIAI

SEQ ID NO: 221982 - protein, 329 aa, unidentified
MFVGLDLHKNYLQTAVMDEQGRILSQERIPNKDESIEEFTEKRLKDSHAEIVIESSSTWYHVYELLSKNENCHVVLSNPVKTKAIASAKVKTDKVDALTLANLLRTGYIPESYIPPRHIMDLRELVRYRTSLVRMRVEAKNKIHAILLQTGTRIKERPFTIGFVEELRRLEDYRIDGYLNVISSLSQQIHTVSNTIKREAVEDESTRLLMTIPGVGYFSALLILSEIGDVNRFPDSHHLCSYAGLTPSTHSSGGVTYHGSITRSGSRYLRWILTECAKAHIRTRRDSQLTRFYTRLAKRSGGSKATVAAASKLLRIVYWVLKEKRPYHG

SEQ ID NO: 221983 - protein, 417 aa, unidentified
MTPIFKPQLYVGIDVSSRDNAVYLMKPDGKKHSSFSVQNNLGGATILSKKVSAALSDEELGHVVIGIEATSVYGENLVRFLKEDGRLGQFERKIHILNPKQVNRFKTSYNDLPKNDPMDAFVIADNLRFGRISAEVPMDDYRYQALKNLTRARFFAMQNLTREKQRFLNQVFTKFSSLTQDKVFSNTFGATSLSVLEEFESTDELCYMNFDELTAFIKEKGRGHFEDPEAVAKALQKAARSSYRLPKTVNDSVNQVMAVSLSGIRALESQIATLDKYIAEQMKLIPNTLTSVKGIGPVYSAGIIAEVGDVNRFRNQASLAKMAGLVWNQHQSGSFEAQDTKLIRSGNRYLRYYLIEAANSLRRCDSDYRRYYSLKFKEVTKFQHKRALALTARKLVRLVYTLLKTNRLYIPPEEFYS

SEQ ID NO: 221984 - protein, 346 aa, unidentified
MNETTTIGLDIAKQVFQVHGVAVDGTVTVKRQLRRSEVIRFFDKLPRCRVGLEACGGAHFWARELTVLGHDVRLIPASYVKPYVKRGKTDAIDAEAICEAVSRPTMRFVPIKTVDCQAGVMLLKTRYLLVKQRTQSINSLRGHLSELGIIAARGTGKVETLIAIIRDKTDERIPAVARRALEMLAEQVEALVRRIATLENEIVSEVRRDDTMRRLATIPGVGPITAATIVALVPDPGAFNSGRHFAAWIGLTPKMHSTGGKERLGRISKMGNPVLRSLLVVGATAVSRHARRGATVSPWLTSLLARRPAKVAAIALANKMARVIWALLTKGGVFTRRPATAAQHAA

SEQ ID NO: 221985 - protein, 407 aa, unidentified
MLLRARVSVSCTDLGLWRAARPLSHRWGVLLQEVARRMKVLHERVAGIDVHKEMIKVAIRSPGEKPWTRKTEILEYRTFYGVLQEMARELRRRGVTHVVMEASGVYTEPVYYALAERDFTEVAVINPAHAKALKGHKTDAKDCTRLAELFECGLLHGSYIPAPELKEVRDLTRYRMKTVQARTSEIQRLAKALESAGIKLGSVASSITGVSATAMIEALIDGERRGGVLADLAQGRMREAGKLADLSMALSGRFTGHHALLCRLHRDRIKMFEDAVAGLEDRIAGKAAPWRRELDLLMTVPGFGDAVTQAWLGEIGPAPHLHFSSHDKLACWVSLCPGNNISARKRKYGRTGDAGTYIKPMLVQAAWSAIRVRGRLQARYNRLVRRFGGDKNPGAKKRRSSRSRTPC

SEQ ID NO: 221986 - protein, 344 aa, unidentified
MNDTTIAVDVAKAVFEVAVSAQPGHVRERHRLSREGFARLLRAQPAATVVMEACGSAHYWGRRAQQQGHEVVLIPPHVVRPYVRGNKTDRTDTKGLLKAFRNEEVRAVPVKSETQQALAALHRLRSTWVATRTARLNTVRGLLREFGVVIPVGARQVVPHVRALLEDADAGIPGLLRPALAEAVAEIGELETRLRAVERHLETAAAGSLVVGQLRTVPGIGVLTATALVAAVGDVQRFPSARHFASYLGLTPREHSSGARRRLGAISKRGDTYLRMLLIHGARAVLWHAKRPSARPLDRLRTWALQLERLRGHTKAAVALANKLARIVWAVWTRGTSFTALPMA

SEQ ID NO: 221987 - protein, 313 aa, unidentified
MTEHTIGIDISKSHLDAFDLEGNEARRFENSAQDVRALQKWLATLAVTRIVYEATGPYHRRLETALSGKFPLVKVNPLQARRFAQAVGTHAKTDAVDARCLARMGAALGLEPDEPVSENLRELRDLQTARAALIEERGRLRNRRLILTSALLKRQTNARLTLVERQLGELDAEIARRIAEDTTSARKRDILSSIPGIGQIAAAAILTFFPEIGTLGRKQAGSLAGLVPHNRESGQWKGKSFISGGRKPLRDALYMPALVGMRFNRDLKAKYLQLREAGKPAKIALVALMRKLIEIANALVKADRFWAEKPACA

SEQ ID NO: 221988 - protein, 435 aa, unidentified
MNGSVGRAIGLDVHRDFCEVAICEAGRVRSVGRIETSPDALELFARSLGREDRVALEVTGGAWEIARIVEPHVRRVIVVSPDDTGIRQARAKSDRLDARTLARLVWAGELDAVWMPDERCRVMRRRLARREQLVRSRTRSKNEIHAVLMRRSRGKPPVSDLFGVKGRRWLAELELPVEEAETVESAMRQIEFLDSEIAAVERLIAREALRSADARRLLTVPGVNVICAAEFLAAIGDIRRFRSSRRLVAYLGLDPRVRQSGSEPARGGRISKQGSASARWALVEAAWSVVRQPGPLHAFSERLRARRGHGKAVVASARKLASLFWCLLTRGEDYAHQQPSLTAKKLRLLEITAGASTLKGKQTGVFATRERMRRAERELAQQAETSYTRMIRDWEAARPAKANGSGASGDGRERDTGARITRPSKGNVARQTTSP

SEQ ID NO: 221989 - protein, 366 aa, unidentified
MDQITRVDGAGQVVRVGADLAKRVIQVHAVDGTGRVVCRRALPRDKFIAWCSRLPSGCIVAMEISSSAHHWARALSGLGLQPRLMSAQLVEPYRSQGSTGKNDANDAAAICEAASRPTMRFVPVKSVEQQSMLCVHRLREGLKADRTACINRIRGLLAEFGLAFAQGPQALRRVLADVLEDGANEMNTLARLVIERAAEQWQQLDEHLAWCDERIAAHLRDNPAVRQAAQLMGIGPVGASAAVATVDDFRQFRSGAQFGAWCGIVPRQHSSGGKSQLGRITRRGDSYLRTLLIQGAKSAVLSAHKRGDPISRWAQALRERSGWQIAAVALANKNARILWAVMTKGERFDAQHVSVKPGEAAIPATA

SEQ ID NO: 221990 - protein, 350 aa, unidentified
MVILGIDAHKQTHTVVVVDERGRKLGERTVKTTTTDHLDLLVWASRFGTERRWAVEDCRHLSRRLERDLLGAGQQVVRVPPKLMAHARTAARTYGKSDPIDALAVARAALREPELPVARLDGPAREIRLLVDHRDDLVAERTRVINRLRWHLHELDPSWQPPARSLSRAPATHLAATEAFISRLDGMVAWLAGQLVARVQELNAQIDQLEADLVPRVRRYAPSLLALRGCGVLTAAKLVGETADIRRFHSKDAYARHNGTAPLPVWSGNKQRYRLSRTGNRQLNLALHRIALTQARHHPDAQRYLARRRGNGNTPTEAIRALKRRLSDVVYRALLADADATDTTNQATAA

SEQ ID NO: 221991 - protein, 377 aa, unidentified
MRHVALDLGSKKTTYCEVSQGEVVQRGAVTQVETLSTVLGPEQPEATVAIEACREAWYVYDLLQSWGNRVVLVDTTRSRQLGIGRHGRKTDRIDAEVLARALERGGIPAAHVLSPERRELRRVLGIRRALVETRAQYVTTVRGLARENGIKLGDCRIHNFAARVRGVMQREPSLQVTEPLLKMLDLVCRELEGVEAELTQLSAREPVIQHLCTVPGVGPVVAAVFVSVVDDAKRFQRAHQLESYLGLVPGEHSSGGKRRVGAITKKGNPYLRGILVQASWALLLGADDDDPLKRWTEAIAARRGKRVAVIALARRLAGILWALWRDQSVYDPQTLGRKAARGLRSLAAETQFRAEALERAARKRFRPQTTREVATLS

SEQ ID NO: 221992 - protein, 386 aa, unidentified
MPHVDDLSRSLTAFDQDSTLVAVIEMSLKSWLVAGIVPGVSRAPLKKLGADENAVLRLLHRWREEATKAGRRITRVVVAFEAGRDGFWLARWLRARGIETYVIHAASVAVSREHRRAKTDRLDTEMLKRAVLGWLRGEPEHCQMAAVPTLPEEDARRPNRERDCLVRERTRIVNRMKSALVRLGIRGFNPKLRKAAERLEELVTPEGEALPLNTLAELRRDLARLALLREQIKAIETARLERLEHAPKEGLHAMVRLIARVVGVGVETADMLVHEILSRNLRDQRALARYAGLTGSPDESGSRRREKGLARSGNGRVRRGMIQLAWRFLRFQGDSALAKWYQARTETAKGTRKTMIVALARKLLIALWRFATTGTVPDGVALRPAA

SEQ ID NO: 221993 - protein, 348 aa, unidentified
MLADQLDYVVGVDPHRDSHALAVVHVVSGAVVFEETVVASGDGYANALKLVDRHAPGRRAFAVEGTASFGAGLTRFLTGRGEQVLEVGRLRRERRSGGKTDALDAVRAARSVLTRERPRTPRAGGERQALQALVAAREGAVNAKRAGLCQLRDLLITTPEPRRSELRPLTRARLLQRLAATRPGGGRDPELRGSMLALRSIARRVLQLTAEERELACEIETITRKLAPQLLDQPGVGPHAAAQLVLSWSHQGRITSEAAFARLAGAAPIPASSGQTIRYRLDRSGDRKLNRALHMILVTRKRSHPATIAYIERRIQEGKTRRKATRSLKRHLARKLYRLLEHGPPLAT

SEQ ID NO: 221994 - protein, 391 aa, unidentified
MKSSHPIDTPAAEAKDGTLYVAFELSKSKWLIGTVLSGESKLSRHVVAGGDTAAVWQLISKKRAQAEKNLGRPVWVVSCYEAGFDGFWLDRWLAGQGVENRVLDPSSIEMPRRARQAKTDRLDLERLMRVLIRHEGGEPRVCSVVRRPSPEQEDARRRSRERERLIGERTAHGNRIKGLLHGQGVRDVEPRRKDFRARLAQARTGDGRVLPDRLVAEILREHARLLLIVEQLAEVEGLMKAEREATVADSRARQVNQMLRLKSIGAVGGETLANEVFWRDFQNRREVGAYFGLVGTPFDSGQSAREQGISKAGNSRARTLAIELSWLWLRYQPDSALSRWFKARVGDQKGRIRRIAIVALARKLMVALWRFLTQGVVPENAIVRAAAPAGR

SEQ ID NO: 221995 - protein, 312 aa, unidentified
MNGKRVIGVDIGKHWLDAAVESSERVGRYSNDAAGIAALIEKLDPAQDVVVFERCGGWERNLEAALADKGVCWAVVHPQRVNAFREAQGIKAKTDRIDARLLRDYGRDQLNDGKLRLGRREDVTLDASMARQRQLKAMLHAENCRLATAALEAVRSSVEHMIAHLEEALAVIAAELVQHEDGHAELAFKEEVLCHQIGVAEHTARGLLAELPELGRLDRKEITALGGLAPRVHESGSIRKRRGLAPGRTTIKVILFNPARTAMRFDPQIKEFCSRLKARGKPGKVIMVAVMHKMLVRLNALLRDAMAQASAA

SEQ ID NO: 221996 - protein, 386 aa, unidentified
MPLAVTKAEAPAAIRIELAAIFVSLELSLSKWLVTSLSPGTGEKMSKYVVAGGDVPGLLDCLADLQRKAKARTGQDFPIISIHEGGLDGFWIHRILEREGIESYVVDPASIATPRRRRRAKTDKIDGEALVKALLAYKRGEPRVCAMVRVPIPEDEDRRRLVRERKALINERIRHVNRIKGLLYSQGIAGFEPLKRDRRKRLDELTTGDGRPLPPAMNAQISRELDRIELLLEQIRVVETARDAMLVAAQATSKAPALLLGLKGIGTEFAAVLWSEGLSRHFDNRRQVAAYAGLAPTPWQSGQVDKEQGVSKSGNPRLRTMLIQAAWLWTIHQPDSALTVWYKARVMQNGGRQKKSMIVALARKLLVALWKYTNAGVIIEGAIVTA

SEQ ID NO: 221997 - protein, 404 aa, unidentified
MSGRKEDFFGPHETYLGIDVGKSFHWAIGLDQSGEIVICRRLENRQADVDALLDEAGSGTLVVVDQKNNIGSLVVRRCRARGVDVGYMPGKTMKKARDMFPGTAKTDRIDAEVIALTAMGMRHVVLPIAETDDLGASLSLLSSQLAYATRCATMARNRLHAVLLESDPAFEAAVDLSSAWQLGVLSALGGAVGVATAGKRRYRALCGRLGAKASARDALWDAAAESAAGWHPEAEDALVRSLAGQVAALNGERTAIEAELADRLAGDETYDCLLTIPGVGAKTATLPVSMGGISLFASDDKLASYCGLAPADSKSGTSIDNSSSSRAGNKQLKNLLIFSCNSLVGTKNRFGRYYEKCRASNMPHNKALKAVARKRLGIIFAIMRDRVPYVEPLAEDVEKPVPAA

SEQ ID NO: 221998 - protein, 416 aa, unidentified
MKQTQNTRGYARYFAIDTHREYHLVGGQNEDQEWVVNPRRVSIEKFPEWAQKNLRAGDIVVLETTTNVWDTYDIVAPLASRVLVANAAAVGEIAGARVKTDTKDIERLLKLLFGGIVPEVWVPPDHVRELRAFISYRNRLVKMATMIRNRLNSLLHKHSLMLPEEGILNQAWWDAQASISALEKMQIRQELGLLDEIKKLQAAVNEELENQSTGELWGKQALQLMQLPGVGVIVAMTVLSAIGDITRFEDAKHLVGYSGLGAGVHDSGKTHKDKHITKKGRKELRWIMVEAAWRAVRMSPYWKEQYEKHLKRMRKPNQAIVVIARKLLVTIWHVLSKEETDVHASEEDLAYKMLLLSWSLNENVRQGLTYKQFAKYALMKLGVEKDITRFVRKDVPRRLSPREEVLARMEELGIAQ

SEQ ID NO: 221999 - protein, 404 aa, unidentified
MKHNGKLFAGLDWASRTHMVCVVDDAGQIKIRFEIANSGKSFAGLVKRLTKLGVEAVAIERCDGPLVEALLDAGLKVVVINPRQVKGLRTRYTGSGAKSDASDAYLLADVLRTDGHRLQALDRDSEATAVLRALSRTRKDLIEARVGLVNQLAAQLERVFPGAIGLFARLDSDVAIAFLRLYPTHQAATKLTQARFAAFLRRIAYCGRKPVEELLARVHEAPAAGLKPAEADGRAVCVLGLLRAIEAVRREERELEAEIIERLDAHADAHIFTSLPRAGHGVRAAAMLAEIGDVRARFPDEESLAALAGVAPVTRASGKMHAVGFRYACDKKLRNAIIDFADDSRRASPWAAKIYNDAIARGKRHPHAVRILARAWIRVIWRCWQDRTAYNPDLHRAAVMLQAA

SEQ ID NO: 222000 - protein, 354 aa, unidentified
MNDEQHLFSQSTHWVGVDVSKRTFDAGLVRHGQKWPATPLAAVPVGSFARTSVGVNDFLQWLDALLAENDPPLGVRVVMEATGRYSSELAVWMLTQRQALAPAIAPPHQTAAFIASMGLRNKTDKLEARALGFYGMERQPPAYQPLTPQEAELRELARYRDFLVRERVAAANRTDETSACKTVRDMEHKRLRLLDGDIKRIEEQMRRHANETPELKRDVELLATIYGVGFITAVTIRVELGDLRRFHKARQLSAYAGLNPSLRQSGSSVNGRPHMNKQGNPRVRQCLYLAAMVAIRGHNDLQRTYLKLREQGKSAMSALGAIMRKLLVLMRAILVSGKPFEPMWKTRPQAAQTP

SEQ ID NO: 222001 - protein, 323 aa, unidentified
MIYVGLDISKHTIDVCELNGDNAKNYQLDNSPVGYDELIKRLNKLTDEIHVCCEYTGIYYYAIANALYQANITISVVNAYSIKSYARLTLSRTKTDKQDAKLIAQYCKINQPEPWQPPKQQAQILKTLTRRLEQLTKLRTMELNRQKVAETCVSESIDIILNALNQEIDRIEQQLQNYINQSAELNNQQQRLTTITGIGKKTANLLLSVLCEIERFPTHNHLVSYLGLSPIIVESGSSVRGKSRISKMGDKFVRKSLYLPAMTVCRRSKLFKPWFEYHQSRGKHPKQIYVMMMRKLIIYAYHVIKHDTCFDPNKIQFHKNNNI

SEQ ID NO: 222002 - protein, 361 aa, unidentified
MTTYLGLDVHAKKTVFMAQDEDGKMLYRGDIMTSRKGFEELFRKLGGELGIKVGLESGTQAFWASEELADLGFQPYVINAGEVRAKSRRPNQKSDSRDAFDICDGLRRDLYVSRIYVPSKKVRRLRKLIQQRRFYVRGMTANVSSTKSIFRGEGIRANDTLGTAVAWKEFISGCPDPFFRKLVKMHFRIWKQLSEEVRRLDKQVKELAIKCFGGVYDRMQTIPGVGPVVAATFLSVIADPARFEQSGQVISYLGLSPSTWDSGDRVRHGPITKRGSSEGRSMLVESAQQSCRPAHPLHPYFTRVMAKHNYNKAMVCVAQRLARIMWRMWIEGEDFNVEKLNIVPIKHEKKVKKHWKIAKAG

SEQ ID NO: 222003 - protein, 346 aa, unidentified
MLYVGLDLSRQRLDVHVLDEEGRTVEVTAVHPDADALGTLAHRVLRHGQEVSAAIESMTGSRFVHDTLERLGWDVAIADAVKAKGIAPLAAKTDKIDAHVLAELARRDLVPEIWLPDPRVRAERERARFRLHLVRHRSALKCRIHATLMTFGHNVPVADLFGVGGRELLAGLELPEPWARTLATSLAMIDELDERIDECGRELIRLGADHPYIPLLLTVPGVGPLLAYTIAGEIGDIRRFASPKKLTGYTGLCPLVRQSGNHDFRGPLAKNGPKYLRWALVEAATHAARDPRYRDRYERNKRRLGRQRGAKVARVDIARQLAEAIWHVLAKNEPFAPAGPAIQLVA

SEQ ID NO: 222004 - protein, 381 aa, unidentified
MTTAATHHANGNTTEATLFVAFELSEKTWRLGFTTGHGQKPRERSVPARDHQRVLDEIAQAKHRLGLAETAPVVSCYEAGREGFWLHRLLLAQGITNHVVDSSAIEVSRRQRRAKSDGLDVRKLLSMLMRYEQGERKVWHVIKVPSMEAEDQRHLHRDFETLKQERASTTTRIKGLLSSYGIRVTSMTKLPEQLDALRLWDGSPIPPGLRRRVMRVYAHHTFLSEQIAEVEAQRRAQVQTSSDASIDKVRQLIQLKGIGINGSWLLVMEFFGWRELKHRREVGGLAGLTPTPYQSGESAREQGITKSGNRPVRWMTTELAWSWLRYQPDSALSVWFRERFGGGGKRLRRIGIVAVARKLLIALWRVLEKGVLPEGAVLKEA

SEQ ID NO: 222005 - protein, 489 aa, unidentified
MNFTALTATVQPNLDVNYIGMDVHSDNVVVCVRRNTINSSGQLVGKTIKTKKVVIKSSQEPLVELLSKYADGQQHIMTAESTFNWYWLADIAEDRGWNFRLADPCTVSQANIKAANDETDAEYLADRLRTGSLKSTSVLPRKLRGVRDLMRHRLRVMQEVSDKKVRLSNLYHNHCAHPMHGKLLTALQDAYDEISVDAVLESGICNNGSELIIGDLLTGLREAEARLAKIEAAVYERIDEVDEYKAERLLLKTSMKGCGDVLSAIIVTEIGDISRFRTMGDFVSYCRLAPTSKLSNGKSKGQGNAKNGNAYLSWALTELATLMARFNEPIRRYLERKQDKTGLRVVAVRSLAAKLARCVYQVLRKNESFDLALAFGGKPTRAPTAFAEKPAAELIQSPQEPEVPPITTAPEPHLQAPLSEAPIVVKEPSPVKAKRGARKKAVSPASSAPAVTAEGRQTARKADRVKARCALTATPPSCAGTSCVKSRRE

SEQ ID NO: 222006 - protein, 380 aa, unidentified
MDVHSTNFTLCSFEPGYGFEADKIFGQTRIKEDIFNSTVKYINKLKSMRPDVDVVCGYEAGCLGYNLHRKLKAKEIESVILAPTTMAVSRNCSKKKNDYRDAITIAKCLASSAYKAVYIPDEKDEDVRDFIRMRDDHKTALKQIKQQLNAFCLRHGHHYDKTKWTGLHLNWLRKLELSKLQRETVEEYLVTYETLTSKITALDIRIEDIASEERYAEKVNKLKCIKGIKTHTALSFVCEIGDFNRFKSADKFAGFIGLVPGECSSGNTERMLGITKAGNRHLRRLVVEISNTYRRGTVGRKSAALKERQKDMPKDVVAYADKATNRCQRKYQRMMFKGKNSNQAVAAVARELCCFIFGMMTGHHSRTAQAEASVYRSELD

SEQ ID NO: 222007 - protein, 398 aa, unidentified
MKSNTQNAKIEAITEKTLVLGIDVGSETHYARAFDYRGIEYSKKPFKFSNTEAGFVTFKEWILDLKERHEKDKVVPGMEPTGHYWFNLGKFLQDNEMKPVLVNPHHVKKSKELDDNNPTKNDRKDPKVIAGLVREGCYMIPYLPDGIDADLRTASNIRFQLQAELTRIQNRISRWFNIYFPEYKTVYGKPDAKSGMLILKAAPLPEDILTLGIDGVNQIWRDAKLRAVGKARAKTLIEAAEHSVGSKEGAVSARMEIRMLLEDYESRNTRLQEVMVLIEELVRKIPMAEKLLEIKGVGIRTVSGFLAEVGDISRFNNPKELQKLAGLALVENSSGKHKGETTISRRGRKRLRYLLFEVAMSLVAKNPEFRELHNYYTTRRQNPLKKMQSLMAIAAKLI

SEQ ID NO: 222008 - protein, 319 aa, unidentified
MNETPVCVGIDVAKATLEVAVRPSGAQWVSANDEAGIQTLLGQLRALAPTLVVLEATGGYEHAVAATLATAGMPVVIANPRQIRAFARATGQLAKTDAIDAQILALFAERVRPTPRPLPDDATQALEALLTRRRQVLEMLVAEKNRLGVARASVRRDISQHIRWLERRVADLDRELHAGVRASPVWRAQDDLLQSVPGVGPVLSYTLLAALPELGTLGRKQIAALVGVAPLARDSGAHRGRRTSWGGRAPVRTVLYMATLTATQWNPVLRHCYQRLRAAGKPHKVALIACMRRLLLILNAIVRTQTPWRATPTAARATA

SEQ ID NO: 222009 - protein, 368 aa, unidentified
MKNYTLEAALTAGAKELKNQKAAKAKRIVMGSDLHLRGCQAARKIDNGPIGPVANFRSQEELLLYVEKQKEQAEEVVLVYEAGPLGYGLYRALKARGVKCYVCAPDSSEQKRKRRKNNTIDTRTLTSNLFNYLNGNERALQLVRVPTEEQEQARLQSRQHDQLVEERKRLGAKGNALLLSQGFGSWKNWWRPKAFSRLSQLVPGRLLELLETWVDLLRKLDEKIGRAKAALAKRCCGPRPKGAGAPSLVQLQSEVLDWGLYSNGRKIGCLAGMVPSEWSTGDSQRRGSITKVGVGAIRRIITEMVWRMILFQPQYKPVQKWQEVLRGSNRGLKKKAVVAIGRQLMVDLWRLQTGRVSAQELNLLMIGG

SEQ ID NO: 222010 - protein, 340 aa, unidentified
MDKPDLCGIDVSAQQLVVMVRRDGKSEAARSFANTKSGHQELKRYLTRQRTGVRVCLESTGLYGLDIALLLQADTRIEVMVANPRAVKDFARALMHRSKTDPLDALVLLEYAARMPFHAWQPPCLAALQVTALGRRIHALTQQCTMEKNRLHAVATTQTTLPLIVRDLRRSIASLQTAIAKLSREAHKIIAANDPLQRRFLLLQSAPGIGPVSALQLLGELSLVPANCDVRQWVAYAGLDPRQHDSGSSVHKKVGISKVGNSHIRRALYMPALTASHHNPHLRSFYQHLQTLGKCKMVALVAVMRKLLHAIFGMFKYDAVFNCDKLYPALSQKEVSAPAR

SEQ ID NO: 222011 - protein, 421 aa, unidentified
MIDHETFTWFAAIDWGTEKHQACVVDVRGGIAGERAFSHDGAGLALLCDWILSIAGNATIVAVAVEVPHGPVVDALLDRGLAVYAINPKQLDRLRDRFSVSGAKDDRRDAHVAADGLRSDRHLFRRLQIADPRLIQLREWSRLAEELQQERVRLSNRLYSQLWRYYPQMLGLSDDLAAGWVLDLWTMAPTPAKAMHLRKTSVAQLLKRNRIRRIDAETVLRALREPAINVADGVAEAATIHIRSLITRLRVVGRELHDAMRKLDELCACLDEPSPTAAEHGGSGRHDVKILKSMPGIGKIILAILLAEASGPLSRRDYQALRTLSGVAPVTKQNGKSRIVVRRYAAHVRLRDAVYHWARVAIQHDPTSRSRYVALRQRGHSHGRAIRGVADRLLAVACTLLQRQTVFDRDFSRAEALTAVP

SEQ ID NO: 222012 - protein, 332 aa, unidentified
MTPSTSPAVSELFVGIDIAKDKLDLGRTSSDSLLTLDNTVDGIARIIRQMRADRPALIVVEATGGLERPLLDALLEADLPVALVNPGHVRHFARGLGILAKTDKIDARILALFARLAAPRLAKKTSAQQSELHALVTCRRQLTDVRTEQTNRRSRTSSKQALKAIDAVLKTIARQIEELDRQIRKLIDSDDDFNSIDKLLQGVPGVGAVLSATLLAELNELGRTDRRCISALVGVAPFNHDSGKMKGRRSIHGGRTSVRNVLYMATIAAIRFNPVIKAFADRLKKAGKLNKVVIVACMRKLIGLLNAMLRDNLEWNQLTVVRNALSPGGGAK

SEQ ID NO: 222013 - protein, 429 aa, unidentified
MKQAVDASERTQAVWEAVIERCCGLDVHQKMVTACLLAGALDEQPGEMLRTFSTTTKGLLELRDWLEEYGCSHVAIESTGIYWRPVFHILEDTVTVLLVNACHMKQVPGRKTDLKDAQWIARLLRWGLLKPSLIPPRPIRDLRDLCRYRKKLTEQASAEKNRINKVLEDANIKLASVVSTVFGVSGRAMLEALIQGVMSPEETADLAKRKLRSKIPQLVEALDGRVNEHHRFLMQMQMEHLEYLEKAIAQLQERIDEKIKPYQEKVDLIRTTPGIDIVAAQHVFAEIGGDISVFPSEGHLASWIGICPGNNESAGKRRSGRTTRGNRWLKALLVQTAHGASQTKGSYLKAFYHRVAARRGKKRAALAVAHKQTAIIYHELLENKPYQELGENFFDHINQKALEQRLVRRLRSLGYRVDLHPEPVTPQCS

SEQ ID NO: 222014 - protein, 339 aa, unidentified
MLAVIGLDIAKRIFQLHSVDPETGEITRLKLTRSEMMPFFANRQASVVAMEACGSSHHWARQLRQLGHEVRLIAAKFVMPFVKGNKSDAADARAIWEAAQRPEMRFVPVKSEGQQAILALHSMRDGLIKARTAQLHQLRAVFYELGIDLPEGRHWCVKHLPIAFERLEGKIPVMVIEALRGQFELIQQLTARADDIERKLDAYRRSDERCDRLLAVPGVGLLTSTAIVAAVGDAREFRSGREFAAWLGVVPRHSGTGGRVRLLNISKRGNSYLRAMLIHCARAVMARQKQHSAWLERLMRERPWNVAVVALANKLARTIWAMLAHGRTYLHDERPVVTA

SEQ ID NO: 222015 - protein, 344 aa, unidentified
MGKHTTIAMDIAKNVFDVAVSDEPGRVRERRRLTRSQMLRFFANREPARVVIEACGAAHALARELEGYGHEVVLLPPGQVRRYVLRNKTDRTDTKGLLEADRNEEIAPVPVKTVAQQALVAVHRLRSGWMATRTARLNAIRGFLRELGVTVPVGATRVLPALTAAMEAGRVPGTLEALLRATADEVRALDGRIEEAESTLKRMSREMAAAVRLQTVPGIGLLTATALIGSVGEPGRFPSGRHLASFLGLVPRESSSGERRRLGSITKRGDGYVRMLFTHGARSVLRAASVKKQNDRLRTWALETQKRKGHNKATVALANKLTRIAWAVWLKDRPYEGRAPEETL

SEQ ID NO: 222016 - protein, 334 aa, unidentified
MQNITLIGIDLGKHSFHIHCQDKSGKALLRKKFTRTKLMQFLATCPPSVVVMEACAGAHFMARCISDFGHETKLISPQFVRPFVKSNKNDFVDAEAICEAASRPSMRFVQPRTETQQAMRALHRVRESLIRDKVKTTNQIHGFLLEFGISLPIGDAVIKRLSLVLAEHEIPEYLSRLLVRLHTHYFYLVEQIAELESELSQSINADDTAQRIMTIPGVGPITASLLSSQLGDGKQFSCSRDFAASTGLVPRQYSTGGKSTLLGISKRGDKNLRRLLVQCARSFMMQLERQHGKLAEWVREQLNKKHSNVVTCALANKLARIAWAITTQKKEYQA

SEQ ID NO: 222017 - protein, 411 aa, unidentified
MDKIYDKCCGIDVHKKLIVACFRCDKKQEVREFGATTRELLELADWLKEGGCEMVAMESTASYWKPLYNILESSDLNAMVVNARHMKAVPGRKTDVKDAEWIADLLQHGLLQPSYIPDKDQRELRELVRYRKSLVGERTRELNRLQKMLEGANIKLSGTVSDINGKSARSILEYLLTGKAIDGAKYDEMYEQKIIAHNLKATKEQIVDDLNGVMSPLQRRMMKELLVHLDELNIHIKNLDDEIDNFMKPEEKQASQAIQDVTGIGNTSAQAIISVIGSDMNRFPTDRHISSWAGLCPGDNESAKKRKSGKTRKGNTLLRTTLITCAHAAVKNKKSYFYAQYMRISAHRGPKRAYVAVAHSMLISIYHILKDGVVFKDLGADYYNQFNKERKIKAYLKKLKALGWEVPVTAA

SEQ ID NO: 222018 - protein, 409 aa, unidentified
MQQLFERVAGLDVHRQTVAVCVRVPSAGEARAQHVRTFGTTAVDLVALRDWLEAHQVTQVAMESTGVYWKPVYYVLEETLTCLLVNAQHVQKVPGRKTDVQDCVWLAQLLEHGLLRGSFVPPPPLRELRDLTRYRKVLIQERTREANRLHKVLEDAGIKLATVATDILGASGRDMLHALVAGTTDPEILADLARGTLRKKLPALRHALAGRFRAHHAFMVSQHFGHLDYLDEAIAALSTRIEEALRPFAQAHQRLDSIPGVGPRTADVLIAEIGVDMRQFPTAQHLASWAGLCPGQNESAGKHRSGRIRPGNRWLRMALIEAASLAARSRTTAFGARYRRIARHRGHKKAVVAVAHAMLLTAYLLLDRQLEYREPGIDYFERRHAERATRRAVRALERQGYRVTLEPAA

SEQ ID NO: 222019 - protein, 338 aa, unidentified
MKTYAGIDLHSSNNFIGVINAKDKRLYSKRHDNRIEDVLKVLGKFKASLQGVVIESTYNWYWLVDGLMDQGYKVHLANPNAIQSYNGLKHTDDKWDSFWLAHLLRLGILPEGYIYPKHQRPLRDLLRRRLMFVRQRTSQILSLQSMITRNRGLNFSGAQIKRFRDEFIDKLFTHRHLVFTAKKNITTIRFLDQIVSEIEIEVASQIKLKKEFISLLTTPGIGNILGLTIMLEVGNIGRFPKAGNYSSYSRCVESKKTSNGKKKGENNKKNGNRYLAWAYVEAANHAIRCCPKAQKFFQRKMAKNERALATKALANKLTKATYYIMRDQVAFDEDKLFG

SEQ ID NO: 222020 - protein, 337 aa, unidentified
MMNDSGTKLAAEVRIEARRFVGIDVSKATLEFAIDDQVKTVVYSNDVAGIKSLLVDLPKFGNIGAIVLEATGGLERVVAMALCAAEYPVMVVNPRQAHDFAKALGFLAKTDAIDARALAQFAQTLDRSEKRDALLLRPPSAEQGALNELVTRRSQLVEIRVMETNRLYGLPKGPVKKSVQSVIKLLDRQIKVLDNDIGGRLDKHFADKLLLLKGLKGVAMGTQAVLMAKLPELGTLDRHAIAKIVGVAPLNNDSGKMRGKRMTWGGRSDVRSALYMAALSAVRHNDVLREFHQRLIAKGKPKKVALVACMHKLLSIMNAILKTGVAWDPQFHVAKNA

SEQ ID NO: 222021 - protein, 360 aa, unidentified
MRIIGCDLHSRQQTLAMLDTTTGEIERTTLKHEEDIVREFYSNLPRPVRVGIEATGSMQWFVNLMEELGIECLVGHPAEIRAAEPRKQKHDRRDADLLLSLLVEERFPAIWLPTKELLDMRALLRHRHQWVRLRVKIQNALQAIALANGLRRGPSLWTQAGQQAIAALPLSPPAAYRRDELQAMYVKFETEIEKLNQRVEQQARERSGARLLMTHPGVGPITALATEVFLGDPARFADSKELASYVGMIPREHSSGGRQRLGGLSKQGNPLLRFLWGEAGIHAVRRDPELKRFYHRKLMQKGLGKARAAVARKLGIRMWIMLRDRIEYHEFCRRGQMRRPVVMPVRGCQQRVMVRKSPAD

SEQ ID NO: 222022 - protein, 445 aa, unidentified
MHHRSLFIYARVSLPQSQGHCFIGFLIYLESEVNSMLNTLFVGIDVSKKSNVVRFTNSHGDTLTVFSIPNNHDGANKLLDKLRNTLTTEDFQAVSIGMESTSVYADHLALLLRNDDFLRKWGVKVHILNAKQVKAFKEAYPELPKNDNIDTLVIADYLRFGRISKEVNLDEKFVALKNLTRARFQVAQNLSREKTRFLDTLFYKFSSLDSSNVFSDTFGATSIAVITDFFSVDDINDMPLEDLAEFLADKGKNKFDDPERIAKDLKAAAKSSYRLSKTVNDSINQLLAVRLVGIRSLQKQIKDLDKAIESYMQLFPAILNSIPGIGPVYSAGLLAEIADIQRFKNHAALAKYAGISWSQYQSGDYQASNTRLILSGNKYLKYYFLEAANKTRMHDAEFKRYYQSKFKEVPKYQHKRALALTARKLVRLVYSLLSTNQLYIPPTSR

SEQ ID NO: 222023 - protein, 334 aa, unidentified
MKKFNVFTGIDVSKSTLDFCIIDAKANVLIQGKTENNSQGIKLLLNHFKKLKVSLNEVLFSFENTGVYSMPLNIFLSERKCDFAEIPALEIKKSKGITRGKSDKTDAKDIALYGLRNLDKITLSSAPQIEILQLKFLFAEREKVIEAIKTFDSTNEAEGFLPNSVFKIVNPINRKILAHLKKALKSIEEKINKIIEQNEKLKQQKALLKSIPGIGDVTALYFLLATKGFSVFKDWRKFACYSGIAPFEYSSGSSVRAITKVNHFADKKIKSLLHLVALNAIKYDAELKEYYQRKRDEGKHTLLVLNNIKCKIVSRAFAVISRESPFVNTYKFAS

SEQ ID NO: 222024 - protein, 407 aa, unidentified
MKPKTNAPHEVRILPQIDKACGFDIHKDKIVLFISDKEGKNQLLIEKTTFTEDLLWIRDLLLKEEVKNCVMESTGVYWLSLFDVLSHSGMNVVVVNPQQVKQIPKRKTDRRDARWLCTLLLNGLVRPSFIASGVQRELRDLCRYRNKRIHEVNRIANWMVKELEKSNIKIRSVLSSITSKSGISMVRLLAAGEKDVAKLKSVCHKRIRDKGELLDKALQGTLSEHGCKMLQMHLEDYDYVQCRIELVNKQIEDLVNQHYSAVMEPLQSISGIASTAAQIIVSEIGDDMSRFPSAEHLTAWCGVAPGNNESADKKRNTGVKKGNKFLKTAMVGAAWAAVKMKNSYWRFLFEHLKKRMKAIKAIVVIARRLLKVVYKHIISKMQYAEKGWEQFAELQRRNGLRKRPVVI

SEQ ID NO: 222025 - protein, 428 aa, unidentified
MTQSEIKSIEFAAYIGIDWADQKHDICLQEAGSKQLESLRLDHKPDSISNWVSELRQRFQGKPIAIALEQKRGALLYSLMHYEFIVLYPVNPRALASYREAFTTSGAKDDPVDAGLLQEMVRLHHNRLRPWIPDDPLTRELCLLVEHRRRLVDDRTRLTNRLQALLKQYFPQALDWAGELDTVRALDFLAQWPQLEALQQATPEQLRDFYQQHYRLREKLSPRLDEISRAQPLTLDKAVITASITMVQTLLEPLRGLIAGIETFDQQIKDCYQQHPDREIFNSFPGAGAVLAPRLLAAFGADRERYQSAEQIQCFSGIAPVTERSGKTKFVRRRLACPKFVRQSFHEFANSSIKWSRWARAYYDQQRRRGNKHHEAIRSLAYKWARIIYRCWQDHQSYDESVYIAKLELRGSPLAKLIPRAVEEAANC

SEQ ID NO: 222026 - protein, 366 aa, unidentified
MKIMHWIGIDDHADKWTIAHFKGEEEKPAGQFELVPDATGYRKLIKFAKELGGEVRIVYEAGPCGYELYRRLSKAGLKCDVAAPSLTPRKPGDRVKTNRRDALKLGRYLRANMLTLIVVPDKARESVRDLVRARQAVQKDLLSIRHQISKLLLRYGHRYREGKTAWTDRFWAWVNKIKLEGEYSQFVLEEMIRTHTQRLERRTRYDQEIEAAAKKPEYASYVAALSVLRGIDRLSAMTILSELGDLRRFATAPQLMGAVGLVPSESSTGDTTTRLSITKTGNAHVRHIAVEAAWQYQRRITTGPKITKRRKDQPKALVDIAEKCDLRLNRKFHRMTSRGKLSTIAAVAVGRELIGFIWAIGQIMHP

SEQ ID NO: 222027 - protein, 344 aa, unidentified
MKLLKQVLGIDVAQKELVVTLGRMHNDLTIELYAYSVFKNTEIGFLKLTEWVNKLTDKEIKVRYVMEATGVYHQKFAYYLEAKKEDLSIVLPNKISNYMRTLDIKTITDKTCSEGIARFGLERKLDNWVKPKEVYSVLKQLTRERRQITDERTIVKNQLHAEQTEVIPHFSSIQRLKRRILFLNTLEKEIKNEIKIYIKEHKDLIADIDNICTIPGVSILTAATVIGETNGFELIRSKKQLTSYAGLDVKEKLSGTSVKGKPTISKKGNRYLRSCLHLPALSTIKWDDNFRNQYARIVVKHGIKMKGCVAVQRKLLELIYVLYKNKTVYDRDYEQKNSVLAQKA

SEQ ID NO: 222028 - protein, 344 aa, unidentified
MQHYVGLDVSVKETSVCIVDKAGKVIREVKVASEPVAILAVLTEEALAIERIGLEAGPLSQWLYSALAEAGLPVICVETRHMKAALSAQINKSDCNDARGIAQMMRVGLYRPVHVKTMASQKRRMLLTSRQLLQAKALDIENELRGTLRNFGLKVGMVGTVKFEARIRELVADHPDLAAIVEPLLIVRRVLREQLGVLHRQLLEIVRHDEVCRRLMTTPGVGPVVALAFRATVDVPSRFTSSKAVGAAFGLTPHRQQSGEIDRMGGISKCGDAMMRKMLFEAALVLMTHSRKWSWLKAWGMKIARHRGMKRAIVAVARRLAVIMHRMWVDGTEFRWTRKEAAAA

SEQ ID NO: 222029 - protein, 452 aa, unidentified
MSTSKTSKSKKMKIPKHLQHINPYAAGIDIGSRSHFVAVPEGLSEQPVQEFSTFTDDLHRMVDWITACGVTTVAMESTGIYWIPVFEILESRGLEVKLVNAHHVKNVPGRKSDVLDCQWLQQLHTYGLLEGAFRPTEQVCSLRAYVRQRMNLVRYGASHIQHMQKALLQMNLQLSNVVTDITGVTGMRIIKAILGGERDPQVLAGMRDRRCKNSENTIARSLCGNYRPEHLFSLKQAVDLFAFYQGQIAECDKEILSQLTTFDAISGTKDDQETKPTKTVDDALRRMSGVDLTRIDGIDTNSALKIIAEIGIDMNRWKSAKHFASWLGLCPGTKVSGGKVLSGKSKQVANRAAATLRLAAFTLFNSKSALGAYLRRQRSRLGAPKAITAAAHKLARLVYAMLKHGTAYIDAGQEYYEERYRTRVVQNLKRKAQELGFALVEVASPQLKTATA

SEQ ID NO: 222030 - protein, 316 aa, unidentified
MVVGSTTDVGLDTSKKSIQVAMLLPGRREPVEWELANEPAAVKRLAKRLSREAVGELRVCYEAGPCGYTLQRQLRAAGVDSIVVAPSLVPVKPGERIKTNRRDARRLAQALRADGLTEVHPPTPEEEAVRDLSRCREDAREDLLRARHRLGKMLLRRGLVHCGKAWTQVHRRWLRSLSFEHEADRAVFGDYLQAIEHLEERLRGLEAKLVTVSEKDPYREPVGWLRCFRGIDILTAMTLVAELHDFRRFQSPRGLMAFLGLVPSENSTGDRHRRGPITKAGNTHARRVLIEASWHYRHRPGVSKSSAHGAKNNPGG

SEQ ID NO: 222031 - protein, 422 aa, unidentified
MCLPFTLTRGLLWFWPEQSRTNGQDTRVPEALQCKQFELANTPMKTELYLGLDVDKEWIVIAVAEWGRNGAVQDLGAISNDLHALEKLLARLRKRYGPDVIIGACYEAGPCGFGIARRLKQLGVECAVVAPSLTPTRTGDRLKTDKRDARKLARLLRAGELTAIYIPEATDEAIRDLCRARSDAVDDRRRSRHRLKAFLLRHGYRYQGRTSWSAAHERYLRELMLPHPAMKVILEEYLISVQLASERIARCEAAMSELLGKWRLEPAVRALMAMKGFQTVAAMIVVSELGALDRFTHPRQVMAYLGLVPSEKSSSNRRRQGAITKCGNAHARWLLVECAQHYAAAPKVSKELSQRQQNQSRAVRTLSWKAQNRLHQHYRRLMARRLLRNKVIVAVARELCGFIWELLRTQECYHAPAPSGMK

SEQ ID NO: 222032 - protein, 387 aa, unidentified
MTNRANDMSRSLAAFDQDSTLVAVVELSKKSWLVTGLIPGVERQPKKKMEPDAEDLLRLLGRWRDEAVKGGRPITRIAVAYEAGRDGFWLARWLESHGIETHVIHSTSVAVSREKRRAKTDRVDAEMLLRVFLGWLRGERGHCSMVAVPTIEAEDARRPGREREALVAERTRIINRMKADIARLGVHAFKPHLRSAPKKLGSVRTPEGVAVPPNTKAELERDMARLAVLREQIAAIEKARLERIKNTPDNGPHAMIRLLARVLGLGIETADMLVNEVMTRRLRDRRAVARYAGITGSPDESGSRRREKGLAKAGNARVRRGMIQLAWRWLTFQKESALALWFKARVDGAPRLRKTMIVALARKLLIALWRMATIGEIPEGVVLRPAA

SEQ ID NO: 222033 - protein, 450 aa, unidentified
MSKRGRSKGKGELRRVNPRAAGIDIGSASHWVAIDPSLTEQPVREFSAYTRDLRALADWLVEYKVQTVAMEATGVYWIALFEVLRERGLEVCLVDARATKQVAGRKSDISDCQWIQELHSYGLLKRAFVPEAQIATLRSYVRQRDRWVADAGRAIQHMQQALELMNLKLTEVVSDITGTTGLAIIDSILAGERDAERLSELRNFRCSRSQEEIASALLGSWREEHLFALAQARDYYRYLGERIAACDARIAGAMAACASSEEPGSPPPKAGKRDSSAHPFGFDAHGHCYRIAGVDLTAIDGVGANTVLTVLSETGTDVSAWRSERAFGSWLGLAPNQRKSGGRVMRSGTKPGAQRAATAFRLAARSLSNSKSALGAFYRRLRARIGAPKAITATAYKIAKLFYRMLKTQRPYQDIGQAAYDERFRARRLRSLSRMAAELGFNLVPTLSGP

SEQ ID NO: 222034 - protein, 338 aa, unidentified
MYYTGIDLHKFSSYLTTVDSTGNIVKHADIKNVNHNFVQYFSDLGNENITTVESTMTWYWLNDLLTSMNIPMVLAHAKYVKAIAYAKVKTDKVDSHTLAQLLRMDYIPAAHKISNENRLLRDALRARLKIVQRHTSVTNSMQLLLAKYNYDSPTQFSGIPEFQYEQLSEVEELLNEQMLELEKQLYPFLIPNDDIQRLLWIPGIGKMNAFTILLEIDDINRFADVKNFFSYCRLVPSARNSGGKSKQRSSKDGNKYLKVAFSDAAIHAVQYYPVIRKYHSSLLRKKNKQIAKTIIAKEIAEIVYHVLKNKTVFNNKFRGQELEHKKSLQWPRVVSPYA

SEQ ID NO: 222035 - protein, 337 aa, unidentified
MEHIAIDLGGRESQICVRASDGTVLAEERWPTGSLKKYLVRRPKSRVVVESCAEAFSVAEAAEECGHEVNVVPATLVRALGVGARGLNTEVRDARNLSEGSCRMARLPAVHIPAKASRERKSLCSLRENLVEVRTKLANGVRGWLRSEGLGSPRVGQPERLWLRVQEHLKQRDRVMPGYVERNLKAINFLTEQIEEADRELGATAKADPTCRGLMTVPGVGPVTAVRFAGAVDQVERFPNSHALESYVGLVPGENSSSERKRITGLTKAGAQKLRWTLIQAAWSARRCRRNDPMVAWALQVEARIPQNALPNPMRSCGNVSSLEHGGLGAPQSPVIQ

SEQ ID NO: 222036 - protein, 324 aa, unidentified
MTLPSLGIDISKLKFDICLSRQGGKFRHKVFPNSPAGFSQLSAWLIKYKVERVHACMEATGTYGEALATYLHEAGHVVSVVNPVAIKAYGQSYLSRTKTDKADATLIAQFCSERCPPEWQPLPAEIRGLQALVRRLDSLLEMRQMEANRLEVSTAAEAVTESLVGHLAFLDEEVARTERLIRTHIGNHPGLQEQRDLLLTIPGIGSTTAAKILGEILDVKLYESARQLAAFAGLVPRLHESGSSIKRKARLSKTGAPRLRKALYFPAIVAIKHNPRIRALAERLKERGKCPMQIIGAAMRKLVHIAYGVLRSGRPFNPELAKTA

SEQ ID NO: 222037 - protein, 367 aa, unidentified
MKKVSTRAAAQSRNISQQKLTIGLDLGDRNSWYCVVDEAGQIQREQRVRTSGKALQEAFGAMPRSRIALEIGTHSPWISRLLSELGHEVIVANARKVRLIGESRRKDDRLDAQTLARLARIDPELLYPVKHRSVQAQADLTLIRARAGLVRGRTGLVNTARGLAKSYGERLRSCNVRNLNPEKAEGLSPKLQAALEPLLNAIESLSERIVEYNERIENLAQQSYPQVALLKQIKGVGTLIALTYMLTLEDPHRFRKSRDVGCYLGLQPGRRNSGQSEPQLHISKEGDPYLRTLLVQGAQHILGPFGIDCDLRRWGLKLAERGGRNGKKRAIVATARKLAVLLHHLWVSGEVYEPLHNSNRTTVAAAA

SEQ ID NO: 222038 - protein, 340 aa, unidentified
MTIVMGLDQHRAQVTTEWLDTVTGEIGRARVVPAHREGVRRFLRRFADQELEVALEATTGWRFVVEELRRVGAEVHLAEPAQTSALRGNKKRPKNDRADARHLRELLMIGRLPESWIPPDHLLDLRAKVRLRHTLVDQRGEWQQRIRAVLYHHGLAHRRELHLLSGEGQAWLEQVELSDAAREQVTVAIAMTDALNVQIAPLDRQLRLYARRQAGCKALMGHYGIGELTSVAILAELGDCRRFSSSRQAVRYAGMDITVYQSDQRRSPGHLSRQGPPALRWALYEAAQVARHAGSPDRGYYDQAAERLGSNRACVAVARKLLMRAYHTLRELGEEALQPA

SEQ ID NO: 222039 - protein, 370 aa, unidentified
MSQSSTLDIGLDVHKDSIAVAYVAEEHGAEVTYLGTIGTRQCDIDQLVRKLHAKAKHLVFVYEAGPCGYWLYRYLTKKGHHCWVVAPSLIPTKAGDRVKTDRRDAIQLARLMRSGDLTPVYVPAVEDEAIRDLSRAREDAIADLKAAKFRLKAFVLRHDIRYTGRATWGPAHLRWLAEVVCATPAQQIVFQAYVRAVHEHTARLQRLVQELQEQVTSWRLHPVVEALEALRGVQFTVAVTIVAELGDLTRFENPRQLMKYLGLIPSEYSSGERRRQGSITKAGNTHARRALVEGAWAYRYPAKVSRHLQLRLEQQPKPIQDISWKAQVRLCKRYRRLIARGKHANQVVVAIARELAGFIWAIAKQVPVKP

SEQ ID NO: 222040 - protein, 594 aa, unidentified
MQVHYDEGVAIHIGPEPCVGVREDGDEASVGEGIGQPLSRESQSPGADAVSSAEGNTFRTHQQGPNDPAWSKNLACADAPCAGTGRSRDRPFGNCRRSASGRRGAVADDARSREVRLCHSSWEADEQSGLDRRGAGGAKGRGQGECEPAKHAPDAEPGKCVTGAGAHTASRNEKRFAVTHPRWEKLWGGAAEVVAPSSSIRTDGGCPVPQVNDLSRSLAAFDPISTLVVVVEMSKTSWLVSGVVPGVERQPLKKLEPDATALLRLIERWRIEAVRAGRPIRRIALAYEAGRDGFWLARWLIARGIEAHVIHSASVAVSRERKRAKTDRLDAAMLMRVFLGWLRGERGHCGMVAIPTMEEEDARRPNRERESLVNERSRIVNRMKSALARLGIRGFKPHLRKAPERLAGLRTAEGTGLPANIIEEFRRDMARLALVREQISSIEKTRAERLERAPDTGPHAMVRLLARVIGIGIETADMLVREILSRKLRDRRALARYAGLTGSPDESGLKSREKGLAKAGNARVRRGLIQLAWRFLMFQKDSALARWYRTRTEGPSGARKTTMIVALARKLLIALWRLVTTGEVPDGVELRPAA

SEQ ID NO: 222041 - protein, 428 aa, unidentified
MDEVNRNRLEEFRQLRQEVRHSEEYLIVGIDIAKDQHHVFFGTATGKTLLRRLVFSNDHEGFRKLLDQTEALRVQHGLKKVVYGMEPTANYHKPMGEYLINLGRTVVLVSGVTVAKNRESLDGRWDKHDVKDSANVADLISQGKCLYYEYPSVELRGLRGLLSLKRRLKKQEQGYRVRIRNHLIAQYFPEMDREYERLGAEGLSIVRWCLPATQMTELDVEPFIERVTSRRITMEKRRRLEEVWEKAAESIGCETVPGVDHEAKVMVEGLKQIREMIKETEDKIEELCEQFPEYHYILTIPGFGPDVSSKVLGAVGDPDRFQNGKQVLKMGGLDLSADRSGKDSDKAIPQISKRGKADLRYALYQAALIASTRNREFMRYYTERLRGRDREKGIQMKMRVKLSAKMLLIAWTLMKKKEAFDPAYLNVD

SEQ ID NO: 222042 - protein, 339 aa, unidentified
MKYIPVGVDIAKHLMQVHFVDEHTGEIIDKQVKREKFLEYFSNREPCLIGMEACGGSHHWARELQKLGHKVRLLKGRFVKAFVMGNKNDVMDARAIWLAVQQPVKSVAVKSEEQQVTLGLHRMRQQLVKFRTAQINALHGLLLEFGETTHKGRAALAKEVPEALERLKERLPLYLINMLDEQYQRITELDEHLDHIEKQLQAVARQNETCQRLLNIPGVGPLIATAAVATMGDASAFKSGREFAAFIGLVPRQTGSGGKIRLLGISKRGDKYLRTLFIHGARAAALLTKEPGPWITELKKRRPASVAIVAMANKLARTVWAIAAHGRKYDKNHVSIRPD

SEQ ID NO: 222043 - protein, 343 aa, unidentified
MDEYDGKQYVGIDLHRRRSVIVRMTPEGERIGPLVRIDSEPFELMRHVASWGEAPEVVLEATYGWYWAADVLAEAGATVHLAHPLGVKGFAYRRVKNDERDASDLADLLRMDRLPEAWIAPPAVRALREQVRHRCKLVALRSGLKAQVHAVLARQGVTPTMTDVFGTAGRKLLDELHLDPPFQARVLSLLRLIDAFTFEIDTVGKRVTAELNHHTGFKAIQAIPGVGPVLAAVFVAEIGDVTRFPSPQKLCSWAGMTPKHRESDTKVHRGRITKQGNRLVRWAAVEAVQRFHLGPLASKKARLTAKRGNNIAKVATARELLTLVYYGLRDGHIRCLTTTPSAA

SEQ ID NO: 222044 - protein, 376 aa, unidentified
MGHDSTVYVGLDVHKESITAAYAVGIGEVELLGKIGTLKTDIDRLCQRMQSKATHVRIVYEAGPCGYGLYRQLVQKGFDCMVCAPSLIPRKPGERVKTDRRDALKLVRSLRAGDLSSVYVPGVEDEAFRDLARAWATAKADLKHARQRVKSFLLSHGVRYTGSANWGPAHRRWISTFAFPNHWQQLAFDECRRTIEDRLGQCDRLEAALREAVVNWRFYPAVLGLQAMRGIQFTTAVGMLAELGDLSRFEHPRQLMAWLGVTPSEHSSGDRRRQGSITKNGNSYARKLLVEAAWSYRYPARVSPDIQRRHEGIPKPIIDRAWDAQLRLCRRYRKLAARGKNVNTSVVAVARELSGFIWDISRLAMSLAIPKDARPV

SEQ ID NO: 222045 - protein, 402 aa, unidentified
MNAVGIDVSKGKSMVAIMRPFGEIVSTPFEIKHTTSDIHSLVELINSVEGESRIVMEHTGRYYEVLAHQLSEANLFVSTINPKLIKDFDNDSLRKVKSDKADAVKIARYALDKWQNLKQYSVMDELRNQLKTMNCQFGFYMKHKTAMKNNLISILDQTYPGVNTYFDSPARSDGSQKWVDFASTYWHVDCVRKISLNAFIDHYQNWCKRKKYNFSQSKAEEIYGKAKELVPVLPKDAITKLIIKQAIDQLISVSTTVESLRTLMNETASKLPEYPVVMAMKGVGTSLGPQLMAEIGDVSRFTHKGAITAFAGVDPGVNESGTYEQKSVPTSKRGSADLRKTLFQVMDVLIKMMPQDDPVYQFLDKKRSQGKPYYVYMTAGANKFIRIYYGRVKEYLASLPES

SEQ ID NO: 222046 - protein, 351 aa, unidentified
MKIVAMDLGKNKTVVCVYDAISGKHCFKTIMTTPQQIHDLIVEESPGRIVLEICSVAGWVFDVAKSLGVEVQVANTNGQAWRWKNTRRKNDRQDALKLAQLSAMNQLRTVHIPVRHVRQKRALIQYRQSLVTRCVEVKNSIRSIFDKEGLPMPAGRGAWTRESMMELKAMALPVNRCNADNLWRGMLWVELQMLLKITQLLKRLEQKLNRAGEEDKRVNLLRTIPGVGPRLAEAVVAYIDNPHRFANCKQVGCYAGLTPRQYQSGDSNRVGKISGQGNNLLRALLVEVSWAGLQHNQWMRSTYQRILRGSPSRKKIAIIAVARKLLIRCWAMLRDNTPWRNDCNNMLDVAA

SEQ ID NO: 222047 - protein, 369 aa, unidentified
MNNNNTLYVGLDVHKESITVACAINSDPVELLGKIGTTPTDIERLCKRLQSKSSQISIVYEAGPCDYGLYRRLVKFGFDCMVCAPSLIPKKPGDRVKTDRRDAIKLVRSLRAGDLSAVYVPGVEDEAFRDLARAWASAREDLKHARQRLKSFLLTHSIHYIGRADWGAAHRRWLSKYTFENAWRQLAFDEHRRTIEDRLAQCERLESALREAVTEWRLYPVIEALQAMRGIQFITAVGLISELGDLTRFEHPRQLMSWFGITPSEYSSGGSRHLGSITKTGNSFARKLLVEAAWSYRHPARISPAIQRRQENLPKPIIDRAWDAQIRLCRRYRKLHAKGKHVNITIVAVARELAGFIWDMGRLAMSTAH

SEQ ID NO: 222048 - protein, 319 aa, unidentified
MQTSTPLHIGVDVAKQELVVACAEGEFSVRKIHNQRSALTAFLKGLPAGSRIAVEATGGYHELLAELAHQRGFVVYVLNPKDTRHYAKAMGLRGKTDRVDAQLIARLLSREHEQLHPWIPPTPEQRQIDQLLKRRAKISCTRASLIQSLQGLSEFSAELKTLKEHLDKLIARIDEKVKRLTESNAERQQSHARLCTITGVGAVVGSTVLNTLERVPLKSADAFVAFTGLDPRPQDSGQCRGRRRLSKRGPSELRRMLYLAAMAAAKTKAWKVFYEHQRAKSLSRIEALVVLARRIARTAWSIFVHKTEFDPKRISIGLT

SEQ ID NO: 222049 - protein, 350 aa, unidentified
MQIIGVDLHTRQQAVAMLNVETGEIVEKTLQHEGESVREFYSTLAGPTRVGIEATGSMQWFLELMEELGIDCQVGHPAKIRAAEPRKQKHDRRDAALVLQLLVENRFPSIWMPSREQRDVRSLILYRHQWVRIRTRVQNALQAIALSHGLRRGSSLWGKAGQQAIASLSLTCYTAERRTALQSLYRQLEEQIDDLNRKVEELAWQRPQARRLMTHPGVGPITALATETFLGEPKRFVDGKAVASYVGLIPSEHSSGGRQRFGRLSKQGNPLLRFLWCEAVGHAVRKDAELKRFYQHKLVQKGLGKAKVAAARKLGIRLWILLRDQIDYQEFCRRGQLRQKHGGAHAGMPA

SEQ ID NO: 222050 - protein, 341 aa, unidentified
MKPNVSTVGIDLAKKLFPLVGTDTTGKIVWRKRLTRHALVPFLAQLSPVTIGMEACGGAHDWARQFHPHGQTVKLMAPQFVKPYVKSNKNDMRDAEAIAEAVTRPTMRFVPIKDVDQQDIQALHRVRERLIGERTALINEVHGLMLEYGIVMPKGVAKFRQAVVEKLEAEKDKLTTLSQELFWKLVKEFVALEDQIVFYQEKLETLATTHPECQRLMTIPGIGPITATALVAAVGDVGVFKNGRQFAAWLGLVPKQHSTGGHSLLLGISKRGDSYLRKLLIHGARATLRWVKLQTDKRSQWIRGLLERRGWNRTAVAVANKNARIVWALLSRGGVYGAPVS

SEQ ID NO: 222051 - protein, 413 aa, unidentified
MEQLIQRCAGIDVGQAESVVCVRVPDTVTGAPAELIATYGTTTPDLLELVDWLRGLGVTHVAMESTGVFWKPIYYLLEDDFTVLLVNAAHIKHVPGRKTDTIDSAWIAQLLAHGLLTASFVPPPPVRELRDLTRYRKALVNEKTAQVNRIHKVLQDSGIKLTTYATDVMGVSGRAMMRALIAGESDSATLAELAKGRMRTKIPNLRKALTGRFREHHRFLLKRMLDHVEAQEADIAALDERIEAALAPFVVQVELLRTIPGVDCRSAQVILAEIGPDMAVFPTSGHLASWAGMCPGQRDSAGKRGSGKTRKGSKWLRGALVQSARSASRSKGTYLSERYRQVMRRRGDAKAIVALGHEILLAAYRVLDTAQPYTDPGPTALSRLTAERQRRQAVRRLQDLGYQVTIAPRTDAA

SEQ ID NO: 222052 - protein, 408 aa, unidentified
MNPLYVGIDVSSKSNVVYFMLPDGSKHCNFSVANSHTGSSQLVKRILSAMTSCSLDTVLIGLEATSVYGDNLVYFLREDAALARFNSKIHVLNPKQVSKFKEAYNDLPKNDLIDSFVIADCLRFGRINKEVYIGDYRYKALQNLTRARYFAVSNLIKEKQRFMNILFKKYSTMTQEKVFSDTFSTTALAVYDEFESAEALADMDLHELTDFIIEKGKNRFPDPDAVAKAIQKAARSSYRLPKTVNDSVNQVLSISITSIKALEAQIKEFDKAIATQMELLPNVLISIPGIGPVFSAGIMAEIGDINRFHNQAQLAKYAGLAWKQHQSGDFEAQTTRLINSGNRFLKYYLCEAAFSLVRCDKEYSDFYHLKYKEVNRYQHKRALALTARKFVRLVFRLLKDNRLYTSAE

SEQ ID NO: 222053 - protein, 428 aa, unidentified
MQVNTNQTRVSIGIDAAVVAAHQVAVRGEVREDFKVRSTLAGLAELTRRLQPYAGAMVVAEPTAGTWLPLAHAVADAGCGIGFVANRDSARLRKAIVGASKTDVIDADMLAHCEEILGVVTAPVPPPGQIALRRAMRRRHTATVDAHRAESRLWALAAWAFPDLWRATGGHTLAQPLLGRWPHLEGLSRARLSSITDLVAAHSRHQDPQRRAERIRDAAAGWARFWQGRLDLDALAWEVAAMLDDITVADQRQTDATRHGIRLWQQHWPDDPVISIPGMGPICSAAIRGWWGDATHFATAKAAVAHTGLNPSMWSSGLTKSPSRRITKQGPAELRLALYQAANVARRHDPQLAERPRRQSDQPQRSHRTRRRTRRPRRHPSPTARPHPTRTAQPDLTSPDNKRSTIPHRSPGRLNAPTHSERATLDNR

SEQ ID NO: 222054 - protein, 322 aa, unidentified
MEVLHPHCAGLDIHKDTVVACVRHMVDGAVKREVRTFKTTTKDLMALSEWLSAEGCTDVAMEATGIYWKPVWHILADGDFKPMLANAAHVKNVPGRKTDVNDATWLADLMAHGLIRGSFVPDEPTQEMRNFLRTRKQFVRERTSHVQRIQKTLEDANIKLDSVITDIMGLSGRRMIEALIAGETDPFALAGLAHRRIKASQAELEAALRGRVSDHHRFMLRLLLQHIDAIDAAIGQIDQEVDAHVEPFRTAIQILSSIPGISDLSAEVIVSEIGIDMNRFPTEGHLISWAGLCPRNDESAGKRRSTRMRKSLPPRRRGAPPG

SEQ ID NO: 222055 - protein, 400 aa, unidentified
MRQQVWAGVDAGKSDHHCVVINVEGIQLLSQRVVNDETALLDLIGAVTALADGGDITWAIDLNAGGAALLITLLIASEQRLLYIPGRTVYHASAGYRGDGKTDAKDAAVIADQARMRRDLQPLRPGDDIAVELRILSSRRTDLVADRTRAINRLRAQLLEYFPALERAFDYSTSKAALILLTGYQTPDGLRRAGPARLTAWLAKRKARNASAVAAKAIEAANAQHSIVPGQNLAATMIARLAKEVMALDTEIGATETMIEDRFRRHRHAEIIVSMPGFGVVLGAEFLAATGGELSAFDSVDRLAGVSGLAPVPRDSGRISGNRKRPRRYDRRLLRACYLSAQIAIRTDTPSRNYYDRKRSEGKTHTQAVLALARRRLNVLWAMLRDHRPYQPTAPNTAAA

SEQ ID NO: 222056 - protein, 343 aa, unidentified
MQTVTTIGLDIAKSVFQVHGVDASGLVIIRRQLKRRYVLTFFQKLSPCLIGIEACASSHHWSRELQALGHTVRLMPPAYVKPYVKRQKNDATDAEAICEAVTRANMRFVPTKTPEQQSCLVLHRTRHLFIRLQTAVINAIRAHLAEFGIIAPVGRKGVEELLHVVADPADNRVPAIARACLEALGAQLRRLKEQILEFDRLITAWHRSNEMSMRLDEAPGVGPVLATAVVATVADPKAFRSGRNFSAWIGLVPKQHSSGGKDRLGGISKQGDRYLRGLFVAGALAVIRYAKIHGTKHRPWLTALLARRPAKVAAIALANKIARMVWAMMAKGERYKEPVALAA

SEQ ID NO: 222057 - protein, 341 aa, unidentified
MKKLCVGIDVAKNKFDVCFTVDGEKYFGYTVFQNSKHGLKDLVTLAKKYKREFKTDKIHFCMEATGIYHYELCEYLQKYSALIVSVVNPYQTKSFAKSLLLRTKTDKVDSKMLAQYCYERKPKATPPISEKIKKLRSLVRLQESEIKKRADEKNRLSAAMDENVREIIREDISFIDNQIKTIEEKIMEVINSDEKLKNDFKLLLTVPCIGEKVALIILSEYYYVEPSEIRPKSCVAHAGLSPRACDSGDRAYGKPHISRIGVSRIRSNLYMPSLIPAHRKNYFSTFYDRLVERGKAPKLAITAVSRKILLTAMGVLKNQKPFDPNWAKKTREEYEKNLKVA

SEQ ID NO: 222058 - protein, 390 aa, unidentified
MYYCGIDVAKRKHAIAFLDEKGQLVQRPFTIENTRAGFDQLRQALVTLDGQILIGLEATGHYWWALYDELTQQAYPVVVLNALQVHAFRQSGVRKVKSDRTDAVWIAEFLRFSQPEPAQPTTTLFLQLKDLSRFRYHLSDQIGDAKRKLLSVLDRVFPEYETLFSSVFLTSSRQLLAQAASAQELAEFDLHELTELLHTASRGRFDRAKAEALHTLAQHSVGVRFLADAAQLQVRCLLAQIDLLEEQRDRVDQALAQLMNQVPQHILSIPGVGPTTGAALLAEIGDIQRFDAPEKLVAYAGIDAAVYQTGQFEARQMHMSKRGSPYLRHALWQAASMAIMHDAELRAYYDRKRQEGKAHGTALGAVCRKLLTRVYIVLKENRPYRIRPAH

SEQ ID NO: 222059 - protein, 357 aa, unidentified
MDKYIGFDIDDKKVVACVLQDDGKDVYATLPLEVMAMRAWLTDQRKSGHKVHLTFEVSGAAGWLYDELVDSVDSLTVSNPSKMTWIFRTTRKTDRIDARKQAVLLKLGEIPAVHMPPKAVRQWRVLIQHRRKLVDARTQTKNRIRMLIKNHGHRQTPHGGSWWKKANRHWMQQLTEQIIETWTAMLTDLLDQLELCEMQITRQTEKLDARLAHHAGAALLQTMHGVGPRTAEAVLAYTDEVERFRRGKDYCAYFGMTPKLDESGSTRRLGHISKQGPSVVRWLIVESAWRAIRKSPSLTAFYERVKHGQDRRKKIAIVATARKMLSVMRAMLNTGEVFNENLVLQQETMAVSKRMCS

SEQ ID NO: 222060 - protein, 420 aa, unidentified
MNNTILSSLFIGIDVDSIYNVVHMMNFNQKDLNHFKVKNDLNGVTAIKDNTIETTKKYNFTNVIFVLESTSIYAFHIATFLSSNEELLIYNPKVYCINPKISCNYRASFADTNKDDFTDAKLLANLARVGRCDKLTPWKGAQFLALQRLTRHRKHLADMLAREKNYILNNIFLKFSGLCTASSSESPFSDMYGATSTVILTEFLSPEDIINTSIEDLVIFVNDKSNNKISNPEETIKLLKQCATNSYRLDKVNLLPINLAITSSLNCIKSFENEIKAVSREIQALIKGFNNEEYICLTSIKGIGPVFAAGIISEIGSIDQFDDDDALAKYAGITWRKTQSGKFESEDNPLTKTGNKYLRHYLIEAANQVRKFVPEFNDYYNKKYNEAKPPKELRAQILTARKLIKVIYALMKNRLLYKSR

SEQ ID NO: 222061 - protein, 430 aa, unidentified
MKSNTQNAKIEAITEKTLVLGIDVGSETHYARAFDYRGIEYSKKPFKFSNTEAGFVTFKEWILDLKERHEKDKVVPGMEPTGHYWFNLGKFLQDNEMKPVLVNPHHVKKSKELDDNNPTKNDRKDPKVIAGLVREGRYMIPYLPDGVYADLRTASNIRFQLQAELTRIQNRISRWFNIYFPEYKTVYGKPDAKSGILILKEAPLPEDILTLSIDGVNQIWRDAKLRAVGKARAKTLIEAAEHSVGSKEGAVSARMEIRMLLEDYESRNMRLQEVMVLIEELVKQIPMAEKLLGIKGVGIRTVSGFLAEVGDISRFNNPKELQKLAGLALVENSSGKHKGETTISRRGRKRLRYLLFEVAMSLVAKNPEFRELHNYYTTRRLNPLKKMQSLMAISAKLIRVFYAMLTKGVDYDPKKMVSDIRRPAAYLQAA

SEQ ID NO: 222062 - protein, 351 aa, unidentified
MKTEHTASPKLFIGIDIHKRSWKIHCSTDISGGKTFSMSPSPEGLKNYVEKYFPDHEVITAYEAGCCGYHAHRSFESYGWRSLVVNPADVHRKGKEKHTKTDRIDAQLIARELKDGRLDGIHVPDMEREQLRSLFRRRNDLVKDYRRIKSLIKSQLLYFGVIVPEEYDNSHWSHGFRHWLDALEFEYSPARATLDSRMRQFRFVDQDLRDVSTQLRRFCKTYYKKDYKLLRSIPGIGGIVACGILCELGDLRRFRSLKHLSGYVGLAPGIHQSGDNLRTTGITRRAHRLIRSYFIEASWQAIRSDPVMQAYYRKHLGKNVKSIIVKVARKLLSRTLAVIKTETPYVVGVLE

SEQ ID NO: 222063 - protein, 388 aa, unidentified
MRRSNQDRIVGLDVHPDSFAGAILQGTDPWKARVVSTSTRVALPLLEKWALRHTREEDILVMEASGNAFCVAERLRALKRKVVILDSHRAGKVGKTYCATDRVDAIKIARIYLSALSPVVWQPDAKTRERREVFSAYQAVVKEGMRLKQQLKSMLNEHCVRLEKGFRLSHPSAIGRLLQRRKWSEAQKMLLSQLHAGLVGARVRRQRLRHYMAQEILAEKELLRLTRLCGINLITLYGLIAAIGEIKRFATARKLSAYFGLNPTVEQSGNYEGSGALKRHGRGAIRALLVQSAKKLLQVDNPLQKWGLALAARRGRNKAAVAIARKLCVAVWHVMQGHVIGAIERIDTLHTKLHKLATELGVPTIKQLGYETKEAFVQKKLYLLRSYA

SEQ ID NO: 222064 - protein, 331 aa, unidentified
MLEKVSARASNEAGTQVPLSVCYEIGYDGFWLARYLIDRGIDTHVLDSSSFRVSRRGRRAKTDRIDVEAMAVTLRAFMAGDKGACREVAIPEPEVEDAKRMSRERTQLARERTRHVNRIRGLLTLHGIRHVKGIWGGEWRSALKGLVTADGRRLGPFLCAELAREFERLHLLLGHMKQLEVERRAATATATAFPSAPKVRLLVTLAGVGEIGATVLVTEVFHRSFKNRRHLASYLGLTPSPYASGESSREQGISKAGNKPARTLLVELAWCWLRYQPGSGLAEWYRRTFGEHSSRVRKVGIVALARKLAIALWRFVEHGVVPAGAVMSPAR

SEQ ID NO: 222065 - protein, 428 aa, unidentified
MNKDFASTLFVGVDVSSKSNYVCAIDYFGNKLISFSTSNNHPGSVYLSSCLLQCLKDNNLSHIVIAMESTSFYSFHLCNFLSADENLIWFKPKVYCLNPKIINAFKNTFVDSDKTDPHDAYTIADFARVGKIKAAPWNGARYIALQRLTRMRLHLVESINREKLYMLSNIFLKFSELAVLDKGEHPFSNTFGATSTAVLTEFLSPEDIANSPLEELVSFVVEKGKNRFSDPNATAKLLQKAARDSYRLDKALYDPLNVSIASSLNCIKAFEKEVKSIDKAIFKAVKALDNYQYECLSSIKGIGPVFAAGIIAEMGDVSKFDDQAALAKYAGLTWRKKQSGNFTAQDTYMTKTGNKYLRYYLIEATGSIIRYNEEYRCFYEKKYKEALKHQHKRALALTARKLVRLVYALLRNNQLYSSSKGDDASKIS

SEQ ID NO: 222066 - protein, 401 aa, unidentified
MALREHRIAVLDRDGEAVGPSFTIAANKDGVATLVQTLAARGATAAQTLIGLEASGHLWENLEAALVGAGYRVLVLNPLQTRRYRDVVRRKAKTDDIDAHLIAGLLRSGAAQASYVPDEQIQSLRELARLRARLLADRQDYLRQLIAQLDVVLPEHRTALGDLLSARARGILAQFPTAPHLAQASPRAIRRAAEDAGTRGFALEDAIAVRDAARQSLYSGKAAAARAQVVRTLVSQLERLTSAMDEVDRAATTLLPPSEPGTGPSDAELLQTIPGIGPQTAATLLGELGALTRFTDARALVAYVGFYPVIHESGDHAAPPRLSRIGPRIARHSLYLAAFNAVRHSGEWRTIYLRKKAQGKTSKQALVVVAVKLLHAVYAMLKHREPYNPSRLLAAPATIGS

SEQ ID NO: 222067 - protein, 352 aa, unidentified
MTVTIVETRTQARAITGGVDTHADVHVAAALDPLGGLLGVQEFRANPAGYARLVEWLGGFGTVCLVGIEGTGSYGAGLARHIAAAGIRVVEVDRSDRQDRRRRGKSDPLDAVSAARAAQSGRAAGAPKGRDGQVEAIRALMVAKRTARSERIQTINQARSLIVTGPDDLRARFTGHSADDLVAELASLRPRPGSMIRYHTLLSLRELGRRAEFLDGQLQRLDALIVPLVTARAPGLLALYGVGHDTAAKLLIAAGDHPERLRSEAAWAHLCATAPIPASSGKVTRHRLNPGGDRQANHALYRIVITRMSSHPATRAYVARRSKEGLSKKEIIRCLKRYVAREVYPHLRPAAG

SEQ ID NO: 222068 - protein, 312 aa, unidentified
MNIIICGVDVSKDWLDAHVRPGAAFARFANDAAGLGELLVFCHGHHVELAVMEATGGYERLAFLWLWEKGLACGIVNPRSVRRFAEAMGTFEKTDRIDAAVIAHYAAVKQIAPTVPPSAAQQRLKALVSRLSQVSGDITVNKQRKSATTDAETLASLSTVLTCLKREEKRLAGEVASLIDDDPLWAKLDKTFRFFKGLADRTVARLLAEVPEIGIVSNKAIAKLVGLSPFANDSGKREGPRNIRGGRAGPRGILFIIARHVARYDPHLFAFAERLQKAGKTKMVVRLALARKLLVILNAKARDARMEFANAT

SEQ ID NO: 222069 - protein, 322 aa, unidentified
MNGPCVAGVDVSMLELEVAVLPHGLRFTVTNDASGWVELVQKLRPWSVAAVGLEPSGGYERGVIRALLAAGLSVRRINPNQLRQFARARGVLAKNDRLDARLIAEYVAIMPTRSVQSDPAAERLAELVTVRRQLCDEHVSVANQVSHLEDAMLRRLSKRRLARLEADIALLDKRLAEMVGSDAELARRYRRLVTMPGVGPTLAYTLLALLPELGQMSRKQLAALVGLAPYDFDSGKLKGLRRIYGGRTPVRNVLYMAALSAGRFNPPLKRFHQRLVAAGKKPKVVIVAVMRKMITTLNAMLRDRADWTARCDTGRHTVPATT

SEQ ID NO: 222070 - protein, 372 aa, unidentified
MGHNTEAFVGIDTSKLRNAIAIADGGRGGEVRYLGEFPATEAAIRKLVAKLATKYRHLTFCYEAGPTGYGLYRLLKSLGHECLVVAPSLVPKKAGDRVKTNRRDAVSLAKLLRAGELTAVWVPDERHEAMRDLSRARQAVKKDLQGKRQQISSLMLRLGRIYPGKTTWGPAHMRWLMAQKIEHREQRIVFEELLEGIRQECERVERLENAIREVLPEWSLAEAVVALQAVRGIDLIAAVGVLAEIGDLSRFQNPRELMGYLGLVPSENSTGDKVKRGGITKAGNGRARRILVEAAWSYRYPPRVSRDKQPKVEAAPRRVREIAWKAQTRLCGRFRSLERKGKRRTVIATAIARELSAFIWAINRELMAHRQA

SEQ ID NO: 222071 - protein, 327 aa, unidentified
MSDLRSPIPILGIDVSKNKLNAAFLREGKCRHKAFPNNSRGFEQLSDWLRGLGVKELHACMESTGIYGEELAEHLHDQGFKVSIVNPARIKGFAQSELIRSKTDKVDASLIARFCAAMRPSLWTPDPMEIRELRSLVRRIDALLNMRQQERNRLDVSNEILKKSIRKLIRYLNKEIEELKDEINKRIERDPELRDKRKLLESIPGVGEATIHIILSHFASTEKFRNAKSLVSFLGIAPRHYQSGSSVSRRTRMSKVGRSSLRKAFYMPAIVALRYNPVLADLKVKLTKAGKHNMLIIGAAMRKLVHLIYGVLKNKIPFDPNFSLKSS

SEQ ID NO: 222072 - protein, 313 aa, unidentified
MQTVLDVGVDVAKDAVVVACARQSFAAHSVANTVAGLRAWLKRLPAGSRIGVEATGGYHQCLADLAHEMGLVVYVLNPRDVRHYARAVGVRGKTDPVDAALVARYVAHEHARLHPYQPLSPQQRKLDRLLKRRAKLVALKTALRLSLQDAPELRTELKATVQRFDALLRAIESQLAALIQQLFPKQRTRLQSIIGVGPVVGAGLAQALSRLPFANVQAFIAFTGLDPRPDDSGHRKGRRRLSKRGPAELRRLLFNAAMAASKTSVWKPLYEHYRNRGWSTTATLVILARKIARIAYALWHGQSEFDPKRLAIA

SEQ ID NO: 222073 - protein, 366 aa, unidentified
MAKKVRSWAGLDVHSAKVVACVVDAESGEMSVHRLPGDTAKVVAFCAGLPGPTRVAYEAGPTGFGLARALVAAGVECVIAAPGKIERPAQDRVKTDQRDAERLVRLLMIGALHAVRLPGVEEEALRDLVRAREDLRGDLMRARNRLGKLLLRYDVRYEGTWDRWTARHRAWLSKVELAERGAQATLLDYLGAIDALTIRREQLETTISELAPASPWAQDIASLRCLRGIDTLTAVGLCAEVGDFARFERPAQLMSYLGLVPSEKSTGEARRQGHITKSGSSLARWLLIEAAWHYRHPPRLGAKLKSRQDEQPAAVIAVSWKAQQRLYQLWRRLDGKRGKRRQLVAVAIARHLAGFCWAIVNTHPTD

SEQ ID NO: 222074 - protein, 457 aa, unidentified
MMKTKRRREQRSMLPVHPDAAAIDIGATVHVAAVGPARDPEPVRSFGTFTGDLHRLADWFAQCGIKTVVMESTGVYWIPIYEILEQRGFEVRVVNARDAKHVPGRKTDVSDAAWLQRLHEFGLLRGSFRPHGAIAALRAYLRQRERLLDYAAAHIQHMQKALTQMNLQIHHVISDITGATGMRIIRAIVAGERDPDTLASYRDIRCHSSAETVRQALIGNYREEHLFALAQAVELYEVYQAKVATCDEKIEGVLERLKQPCRAPAKPLRAARHKTRQPNAPAFDARGALYAVLGVDLTQIHGLGPYLALKLISECGTDLSAWPSAKHFTSWLSLAPGNKISGGKILSSRTRPSGNRAAALLRLAATTVGRTETALGAFYRRLSARIGKAKAVTATARKIAVLFYNAVRHGMDYADPGASYYEERYRQRVLTNLQRRAKAFGYVLQPTEIKVVSMAVS

SEQ ID NO: 222075 - protein, 408 aa, unidentified
MRIIGLDVHRTFAEVAVREHGRVRPAGRISTTTAGLQLFARSLSRRDEVVLEATCNTHAIARLLRAHAGRVVVSNPLRTRAIAEAKIKTDKIDAAVLTQLHASGFLPEVWMPDATTEALRRQVSRRAQIVRHRTRLKNQIHAILHRNLLPRCPASDLFGRKGRAWLATQSLPADERAAVTSLLRALDHAEEDLTELDRGLAGAVLEDAAVRRLMTIPGVDFAVAIGLVAAIGDVTRFRSPQKLVSYFGLNPRVRQSGLQPAQHGRITKQGRAHARGMLVEAAWVAAKTPGPLRAFFVRVRGRRGHQIAAVATARKLAVLAWHLLTKQQDYAWARPSLTEKKRRALELRAGQPAERGQRGRAHAYNLKTLRTRERAIGEQAERAYQTLVTHWRPQQPKRGTGAAKAARR

SEQ ID NO: 222076 - protein, 402 aa, unidentified
MLLTFSFFVGIDVGKWNHHAAFLNSSGTRAAHELAFTNTSEGFKLLLSSLNSFDKTQTVIGLEATGHYWLALFSFLVDNSWTVKVINPMQSDALRNINIRKTKTDRKDSVLIADVLRFGRYTETVLPEEPILQLRELSRCRNGIVESTANLKRKILAILDRIFPEFASCFSTILGTAPTELLQEFADPEELANCNVETLIKLLEKESRGRHSDKKAQELRNKAAQSIGIRMGLDALKFELRLLLQQLDFIKKQTKDIDKFLKKLMKQHEILLSVPGISTVLGAAILGEIGNINRFATPQQLQAFAGMDPSVTQSGNFMGTQGKISKRGSPYLRRALYLAANAARRFDSVFKEHYEKLVARGKHPKQAMGAVATKLLRVIHAVLKSQKPYNPQKLVSFSKTSI

SEQ ID NO: 222077 - protein, 381 aa, unidentified
MTKNIMWVGLDAHKQAINVAVLLGRETKPQEWIVENTPAAIRRLVKKLVREAAGGEVRCCYEAGPCGYALQRQIEAAGPVICEVIAPALIPRKPGERIKTDRRDARKLAELLRAGLLTEVLAPTPEQEAIRDLCRAREDAKQDLLRCRHRLGKLLLRRGLVYSGSKRAWTQAHRQWLNSVKFEHPSDQAVLSNYLLAIEQVEERVKTLEQQLTLAAESESLREPVRWLRCFRGVDTVTAVTLVAELHGIERFTSPRALMAYVGLVPSEYSSAQRTRRGGITKAGNSHARRVLIEATWHYRHPPRISARLSARRQGQPPAVIAIADKAQQRLYRRQRHLATHGKTATQAVVAGARELTGFIWAALLHPRTAPPADQGMRDPQ

SEQ ID NO: 222078 - protein, 384 aa, unidentified
MQASTVDTLTAGHSGTIFVAIELSQKSWLVTMHCPDKDKISRHKLEGGDHAGLLMLIERMRERAARTLGAVPAVVSCYEAGYDGFWLHRLLMAAGITNHVFDPASIAVDQRARRVKTDRIDGEKMLRTLMAYLRGEPRVVRIVRVPTPEQEDARRASRERGRLTKEQTAHTNRIKALLRLVGMAVGNPRRRDWLTWLVKQRDWQGQAVPPQIMAEIKREHARLMLVREQLDALAQAPADLSPAAAQMAQRSELLLRLKSLGPAFATTLTNEVFYKDFRNRREVASYFGLTPSPWQSGGINRDQGISKAGNPRARCAAIEMAWLWLRHQPDSKLTQEYRRRTLNASKRIKRVAIVALARKLIVALWRYLTTGLVPEGAMLKTAEV

SEQ ID NO: 222079 - protein, 325 aa, unidentified
MGRQGFVKTVGATAQDHLRLLKWAVGLAEERLWAIEDCRHLTRRLERDLIAAGESVVRVSPKLMAHVRDSARSYGKSDPIDALAVARAALREPDLPTARLDGVERELRLLVDHREDLVGERTRIISRLRRHLHELDPGWIPPTKLQRDSAFDKVQAHLSGRNDGAIVRRLALGLVEHLRLLTGEIDELTAEITVRVTRIAPSLLAIVGCAAVSAAKIIGETAHAGRFRSKDAFARHNGTAPLPVWSSNKQRHRLSRTGNRQLNAALHRIALTPARCYPPARELLERRTNGGDGGMEALRILKRQRSDVVYRAMLADETDPPTVAA

SEQ ID NO: 222080 - protein, 486 aa, unidentified
MMKNRNIFTRQNQAVLELFATADHPKKVLCVVFDYAKITHTALCCDGTGKVLKSPFPVKNNPEGLEHVLQTVDALCRKHHIGKDHVFFGGEDCGTFALNMVYSLRERGFLVVGVNAADAKKQRENHQASTDKLDLLGIANMLVNKRGAVAGGSIGAQRAMRSLTRHRKQQVRWLTATGNRIHQLVDQLFPGFLDERNSAVPPFSEASLYLMEERFSSRQITRRQDKALLKQLKAKRLQHAEQAIVQLKTYAREVLDHPLELSGMLQSSLSCEVRLYRCIQENIQQVSREIAQQLARTPAAVLTSIRGIGITLAAGVSAEIGPVETQPSLQSLCSYAGIVPRVKQTGGPEKTAQIGRVSRRSNRILKDYIVQCGNHLGLHGPADLMEDHRRRSANGQHADFGMARRFLRIAMRLMRTGECYVPPELQHAATLQELREYYLQLWPGLLDKWVKAKAVDTAFDAENPLGQWRNMIQEMYEIELPLPSQK

SEQ ID NO: 222081 - protein, 404 aa, unidentified
MNAVGIDVSKGKSMVVIMQPFGVIVASPFEVSHTVSELGQLANRLKSLDGETRIVMEATGGYSEPIARFLHEEGLFVSVVHAKLIHGFGNNTIRKVKTDKADATKIAAYGLAHWLKLPRFAPEEDIRQMLKAYNRQYNKYSKLKTTLKNNLISLLDQTFPGVNLLFTSPARKSDGHQKWLDFVSKFWHCECVCELSLKSFTISYQKWCKKAGYHFKEDAALDVYAASCGHVMVMPKTETTGLLIMQAVAQINAVGETLAVVLREMNRLAALLPEYPIVLKFNGVGELLASQLIAEIGDVYRYKKKGSLVCFAGLDTPPYQSGQFESQSRSISKKGSPHLRKTLFQVVDGLIKHSPADDPVFQFLDRKRAEGKHYYSYMTAASAKFLRVYYGRVKEFLNKLNTGA

SEQ ID NO: 222082 - protein, 338 aa, unidentified
MIVIGVDVHKQSLTAVAVDEAGRMLDERTVAGANDGLVGWASSLGSERLWALEDCRQLTAALERELLAAAEELVRVPPKLMAPERRAGRERGKSDPIDALAVARAALREPRLDRPRPGEQLFRDLKLLVNHRDDLVDERRRGQQRLRWHLHQLDPSLPVPAGALDRTVQLERIGRWLSRRQPEAQVRVARELVARCRSLTRTILELDRELEQWIEQTAPALLELPGCGAITAAKLLAEIGPIERFQSDAQLARHSGVAPLEASSGRIRRHRLDRGGNRQLNCALHRIAITQARVHPPGRAYLERKQAEGKSRREALRCLKRQLARTVFNTLKASPALT

SEQ ID NO: 222083 - protein, 357 aa, unidentified
MKIVGVDLHARQQSIAMLDTETGEWTEKVIRHEGNAVEEFYAALEGPVVVGIEATGSMQWFLELLEELGIQYRVGHPAKIRAAETRKQKHDRRDARLILELLIANRFPEIWMPSTEQRDLRALLRDRHQWVKMRVRLQPTLQAIALNHALRKGASLWSTAGQKALQRLPLPPYTSQRRNQLVSLYAALQKRIQELDRQVEEQARQRPQARRLLTHPGVGPVTALATEVFLGDPCRFSHANQVASYIGMIPSEHSSGRRQRLGKMTKQGNALLRYLWTEAAMHAAGKDPELKRFYRRKLIQKGMGKARIAAARKLGIRLWIMLRDQIDYEEFCRRGKMRQNGEAHAGMPDFNSGPALQ

SEQ ID NO: 222084 - protein, 336 aa, unidentified
MIKFKAFAGIDISKKTFDAALVFPETGLVKHLCFSQTKDGFKAFITWLESYQLNFKETLICMEHTGLYTNGIIAYLMDLKASLWVEMAIKIKRSMGLQRGTDDKASSITIAEYAMRFSDRARFWKPVDTRLSRLKDMIVQRDRIVNALKQLLVPIEEMKSCGEPKEARELERLQAPAINGLNKSKEKIEASIRTYITSQEIINKDIQRMCSIKGVGLQTAASLYAYTKGFTMFENAKQLACYCGVVPFSKSSGTSVRFKPGVSPFANRKLKSLLHLCAMSALRWDKEIKAYYERKIVEGKNKMSIINAIRNKLLLRIFAVIRDQRPYVENYQRAGA

SEQ ID NO: 222085 - protein, 358 aa, unidentified
MIHVGLDVHKYFSQLEVMDEEGTTLERRRFYHSNKAAIQDYFSQLPRPLTVALESTSQWFWLYDLLEEFGEVKLVTPNKVRLIAEAKIKTDKVDAHTLAQLERTGFLPTSYIPPREVRDRRELYRYRISLVTIRTGVRNRIHALLDKLGIFHPYSDLFGMRGRQFLESLELRDSYQRVLNGYLRLHDWVDALEKEVRREIKKTMKTDPRALLLMTVPGIGVRNAYLLLAEIGDIDRFLSAKKLLSYASLAPRTRQSAEHRWQGPVGRKGNLYIKWAMVEAAQKATKKDPALAAFYEKLRRKHGPAKARVAVAAKLLKAIYYILKRNETYKFNALSTIHLGKPVKSSGHRTATRRQAVS

SEQ ID NO: 222086 - protein, 457 aa, unidentified
MRRHGGARAAAAGGLKRLRPNVAGIDLGAREHWVCGPAGTDGTANIRTFRTTTPELERLVVWLQEQGVVSVAMESTSVYWIPLYELLEANGIEVVLVNARHLRGVPGRKTDMLDCQWLQTLHSCGLLKGSFRPDESICQLRALQRERANLVAERTRIVQRMQKALDQMNVQVHHAVSDLTGKTGLSIVRAIVDGERTPAELAKLRDKRCKKSPAQIAEHLTGTWRDDHLFNLKMGLRRYDDITRLISEYDAQLSRWIAELQAPERREQTAPTHPNAAKEKAIRARGDGAKRDVLWRFAGVDLTRIDGISASAAEIVLTEVGLDLTKFADESHFVSWLRLSPKLSISAGKPVPKRNKGTGATRVAGVLRMAALALTHSNTALGAYSRRIARRKGGAVATFATARKLAALIFRMLRYGQDYVDEGVAAYEARFQQRRLHQLVETARQLGYQLVPALEAA

SEQ ID NO: 222087 - protein, 426 aa, unidentified
MRVLYDRVAAIDVHKDMVKVAIRVPGAKRGTRKTDVLEFRTFYGVLQAMARELRGRGVTHVVMEASGVYTDPVYYALRELDFTEVMVINPAHAKALKGHKTDAKDAIRLLDLYECGLLSGSYMPSEDLREVRDLARYRMKTVQARTSEIQRLQKTLETAGIKLSSVLSDVTGASAAAMIEALISGERRGSVMAGLAQTRLRTAGKMADLSMALAGRFTDHHALMCRLHRDRITIFDDAVKDLDAKIAPLVARYAREAELLKTLPGFGDVIVAGWLGAIGPAPYQHFATASRLASWATICPGNYMSARKSKGGRTGDGGAYIKPLLIQAAWAAVRVPGRLQARFGRLVRKFGGPRTKGARKRAITAIAHTLLKIAYSVLKTGKPYADLGADFYTRRESPDARQDYLMRQLQKLNPGCVITITPAEAA

SEQ ID NO: 222088 - protein, 389 aa, unidentified
MSQPFDASRSLTALEQDSTIIAAIEIAQSKWLVAAVVPGIKRQPLKKLDADEESLLKLLYRWRKEADQAGHPIKRVVVAYEAGRDGFWLARWLRTRGVEAYVIHPNSIAVSREHRRAKTDRLDTELLLRALLGWLRGEKRHCSMVAIPTIEEEDAKRPNRERDSLVTEQTRIGNQIKAILIRFGIRRFRLKLRKAEQQLKELHTGEGSLLPENTRAELFRHLARLHMVREQIRAIEKARLQKLEANRDRKKSPYAMVHLIARVVGIGVETADMLVTEVFSRQFRDRKAVARYAGLTGSPDESGKRRREKGLARAGNARVRTGMIRLAWRVLRFQGGSALAQWFQTRTADGRGNTRKTMIVALARKLLIALWRLVTTGEMSDGIVLRPAS

SEQ ID NO: 222089 - protein, 366 aa, unidentified
MEAIYIGVDFHSRQQTICYLKTETGELVITELKHQDKEQVRAFYQQFPGPVIIGLEASGYSPWFETLLEGLGAEVWLGDATEIRRRARWRQKNDRRDAELIWDLMVHNEFPRLHQPLAESREVLRMLRYRQKLIKMRTMSKNSLQAIAMQAGLAKGKQLFSSAGLQELQTAPMSPVLQWQRDHWLELLKPLNQQLLAAMGWCKAQSKDEVGIQRLRTHPGIGLLTSLCLWHTLQPVSRFRNQRKVVAYAGLDPLLRSSAEHTICLGISKGGSRLLRYLLVEAVHTAIRYDEDLKRFYQRLAQRRGRPKAKVATARKLLIRAYIMMRDEIDYAEFRRRAVAARLARTGQGPSNVPVVLIGRPASSGA

SEQ ID NO: 222090 - protein, 485 aa, unidentified
MKQTKSSPCGRAIPAHGGQLSRKERRELARQVQSEQVTLQIVHSNAAGIDVGKNTHYVAVPPDRDAESVRYFDSCTDGLQQMVAWLKKCGITSVALQSTGVYWIALYDLLQEADFEVYLVNARYTKSLPGRKSDVQESQWLMKLHTYGLLPNSFRPPQEIRWLRSYWRQRQNQVRSAASCIHRMDKVLTEMNVRLSSAVTDLSGATGLAIIQAIVDGERDPHELAAYRDPRVKATQEEIARQLHGNWQADLLFRLKQELQGYRFYQTLIAECDQELAQLLRAFPDRSAGVALPEETRKNRRKKKRGNSPQFDLRQLLYLMSGVDLARIDGIDVITAMTVVAEAGYDMSPWPTADHFVSWLRLAPDNRISGDKIIGKARTPTQNRLSQALKMAASSLKASKTYLGAQFRRLRARRGPAIAVKAMAAKLARLVYNMLRHGMEYVDRGTEFYEQQQRERRLHALTKNAAQLGFQLVPTELSLAGTGTI

SEQ ID NO: 222091 - protein, 544 aa, unidentified
MATKVKGVKGSTKRRSIGFVQAVLGKPAGIIQPRVQEVGPERFGIVSVDCAKDRSKWMFCDFYGKVLVPPTTVEHRKGDLQAAVATLRQAVQSHRIKDQIVCVEMTGTYHQIVWRTFREAGFETRVVHPFASSHYRTPEHGSIKTDDNDLIAIFRAATNGFGLIEQTKDECHQSLQLLARHRRDLVGKRAKLQCQIRHHLQRCLPGYAALFPSTDLWDHPVGLMVLRFIAEHGGTHRALLEAGVPGVSKWLKEQRCAFQSRSVERIVAWAGDAATGDPMAPVLTRIWQALLVDWNQKTRQIVQVERDLAGLLAKTPWVLLMSHPGINVVSAAEVGGECGPIQHYASPKAITGRAGLFPSRYQSDKVDRGGNLSRFRNARMRSAFLLAADNLIKCNEYWRGKYNLWKSQGHDPRDLRCRVANRFTRTVFHMVAGRKIYAHRSRLERGYVMQKLLEFLRDRDTPSQTILEVLNDAADQLPKTARADEAQLLADIQRKAANSRRAEPQELGKLLIPILERLGVTSPPPELNSTSLEAPEADASVSDR

SEQ ID NO: 222092 - protein, 426 aa, unidentified
MNKVEGIRLEIFRQFKKEIRGSREYLIVGIDVAKEKHHAFFGTATGKTLLKRLIFENSIKGFSRMLSHVEAIQESQGLRKVVFGLEPTANYHKPLGEYLIKCGLMTVLVSGVAVKRNRELLNGRWDKNDDKDAANIADLISQGKCLFYEYPEMWLRDLRSLLALKRKLKKQEHSYRVRIRNQLLAQYFPELDRYSGRPEVEPIVRWCLDPSRIAGLENDQFMNLVAPGRKSLAQHRRLQVIQELAVDSIGCTMGEGAGLEAQVMVDGLRHIRKAVKVTEAKIEEICGSFPEYACLLTIPGFGPDVSSKVLGALGNPHRFSNQKQVLKTAGLDLSANRSGKTSQSAVPIISKQGKADLRYALYQAAFVASTQNIDFMQYYTQQLQGREKERGIKTKRWVKLSAKLLIIAWTLMKKKESFDPRYFNQG

SEQ ID NO: 222093 - protein, 416 aa, unidentified
MFAVGVDVANGRSMVAVLDGMRNMVAKPFEVVHTAQGFAALVEKLRQLDGEVRIVMEHTGRYYESFAMTMHRAGFFVSAVNPLLIKNYQGSINVRKVKTDKADAQKIAQFALDKWTILPHYTPMDTIRYNLKTLHRQFQLASKTKTALSNNLIALLEQSYPGANRYFDSPVRADGSQKWVDFVDTFWHVDCVARSSEHAFVERYRKWCKRHGYVFSEQKAIELHADARQKIPLVPKSDTCKLLVREAVSQLNAVSRTVETYRAEMDRLASQLPEYETVMGMTGVGKSMGPQLMAEIGDLRCFAHQKSLVGFAGTDPIKEESGDKVSQSAPSSKRGSPYLRKTLFVIMTILLQLQPQEDPVYQFLDKKRSEGKPYYVYMTAGGTKFLRVYYGKVRDCLKAKGLWEVPASASQEVNPG

SEQ ID NO: 222094 - protein, 343 aa, unidentified
MQAITTIGLDIAKSVFQVHGIDAQGQVVIRRQLKRRYVLAFFQKLAPCLVGIEACASSHHWSRELKAIGHTVRLMPPAYVKPYVKRQKNDAADAEAICEAVTRANMRFVATKTPEQQSCLMLHRTRHLFIRQQTAMINVIRAHLAELGIVAPVGRKGVEELLDIVANPSDKRVPEVARMCLAVLGAQLRRLKEQILEFDRMIMAWHRSSEASKRLNAIPGVGPMLGTALVASIADPNVFRSGRNFSAWIGLVPKQHSSGGKDRLGSITKQGDRYLRSLFMAGALSVIRYAKIHGTKHRPWLTALLARRPVKVAAIALANKIARMAWAMMARGERYKEPVALAA

SEQ ID NO: 222095 - protein, 485 aa, unidentified
MAAGKTKDKDADGPGGAGAAEVGGYGAEVSEDQVRVVERAAAIDVAKSFGMACTRVPGSRAGRRAQKVWRVEATHREVTALMDHLRAEGIQRLVLESTSDYWRMWYYLAEAAGLEVWLVNARDVKHLPGRGKSDRADCVWLCKLNERGMLRRSFVPPRAVRDLRMLTRTRSRLAQDQARHQARVEKVLEDALLKISVVISDLFGVSGRRFLDALVAGERSPQALAALGDYRLKASREELAEALTGQFRDVHALEIGVHLKILDAINAEIGRLDEEIGKQLARVPRTAPCCVSCGEIGGSHAPGCDAAAMPLLSLAERLDEITGVGIINTRVLIAELGTDPSQFPAPGHAAGWARLTPRTRQSGETAKPGRTGKGNRYLRGALGQCAMTAAKTDTRLGAMYRRIARRRGKQKAIVAVSRVICEIAWILICDPGARFEDLGADYYASRNPERQTRDKIRELKRLNPGMTVLLVPAGQAAVPDAGTAA

SEQ ID NO: 222096 - protein, 391 aa, unidentified
MVCVGIDVAKDKHDCCILDSEGTTLVDCFTIPNNMDGFKSLLQTIQDCSQKSDKIKVGLEATGHYSYNIRGFLLDNDLPVYVMNPLHTNLYRKSLSLRKTKTDRVDAKTIATMLLSDVDLKSYTDTAYHNEELKSLTRYRFDKVQERAKLKQSVSRLVTILFPELEQLVSSIHGTSIYALLSEYPGAKQISEAHLTRLANILVKTSRGHYRKDKATHIRDAARTSIGSVMPAKSLELKHTIKLIQELTSEINEIEDAIRKIMDELKPPILSIPGMGFHSAAMILAEVGNFSNFNSPDKVLAYAGCSPSTYQSGKLTNCYAHMEKRGSRYLRYALYTATKYVCYWNPVFTEYLTKKQAEGKHYNVALSHATKKLVRLIYALQKSGKAYLAVT

SEQ ID NO: 222097 - protein, 430 aa, unidentified
MGLVVQTAIHPEQDDHDMPYEWFVGIDWGSQQHQVCVLDRDRRRVGERAVDHDGASLARLATWLWSMSAGQPQRVAVAIEVPRGAIVEGLLERGCHIFAINPKQLDRFRDRHSVAGAKDDRRDAFVLANSLRTDRPSFRRLQLDAPQLLVLRERSRAEETLREAFRRSANQLRDQLHRFYPQMLQLCSAADETWLWDLIDLAPTPAHVALLNEEHVQRVLKAHRIRRVQAQEVLTCLQAPALPVAPGATEAAQAHCGFLLPCLRVLAEQLQACSQQVSALLHTLAQEPGEGEGPSDVAIVQSLPGVGRKITAWLFAEAAQPLAQRDFQVLRTHGGVAPVTRQSGKRRQVVMRRGCNPRLRQALYHMARVAMQRDAHFSQVYEALRAKGQRHGQALRTIGDRLLRILMAMLRDRICYDASRIHREPVVQRG

SEQ ID NO: 222098 - protein, 313 aa, unidentified
MLYVGIDIAKNKHDVTALNVPGKTVLKPLTFSNNKAGFELLDLSLRQLNQDCLIALENTGHYAFNLLNFLHEQGYKVYTYTPLLIKEFAKSLSLRKTKTNKKDAHGIALKLLSDPNREQFQHDNRQVELKILARHIHRLKKKQSDWKVQYTRCLDIIFPELDKIVGKHSEYTYQLLTCYPNPQKRLEAGFDKLIEIKRLTASKIQDILSVAPRSIGTTSPAREFEIIKHYKRLIDKAETCVNDLMAEFNSIITTVTGIGNRLGAVILAEIQNIHAFDNPAQLQAFAGLDSSIYQSGQIDLAGRMVKRGSPHLR

SEQ ID NO: 222099 - protein, 390 aa, unidentified
MSKDVTTTETEARDPRPRTIFGIDSHARTTTICALVVETGVTETRTFRGNDYAEMSRWMAGEGFPRPAYGVYEAGCTGFVPARLLTSGGVRVVPIAPSKMPTSSESRTRKNDRNDAARLARLALAGELREVWVPSEEVEGLRDLTNALDDLKDQRERAYRRVEALLCRHGVVWDRRTERGTLKKSWGAEFWAWLRAVELPDGISQATLLAAIRAAESAREQYDEMLRRARELAAASSLAGAVEALQCLKCVSFVTALAFCAAVGDFSRFGSGRKVTSYLGFAPSEGSSALSVRLGSMSKCGNRLLRTLLVEGAWSAARGCPARGKACPASVDARVRERARTLSQRLCERRRSMVRRGVAPCKANAATAAELARFMLFLGREQQAIEAAAA

SEQ ID NO: 222100 - protein, 371 aa, unidentified
MAFYSKYVGMDVHKETIAVSVAEALGGEVRYVGEIANTPEAVVKLVRTLRKGDATLLFCYEAGPCGYGLYRQLLGLGQACQVVAPSLTPKKPGDRVKTDRRDSMTLARLLRAGELTAIWVPDEPQEALRDLTRAREDMKYWQRQAKQRLLAFLLRHGKTLSGKTRWTKAHFHWLETLKFDQPVQQIVFQEYVDMILAMIKRVAALDGQVETAGTESVFAPMIEGYMALRGVNRLTATTIVAEIGDFRRFPTAPGLMKYLGVVPSEHSSGQTKSRGGITKTGNGHVRRVLVEAAWTYRHPARKSPLLQRRAEGTSEAVQAIAWAAQKRLCARYRKFEARGKKKVQICTAIARELAGFIWAISKVLPQPAAKA

SEQ ID NO: 222101 - protein, 404 aa, unidentified
MKTVIAFDVSKSNSVIVGYDESRELIFETKFNHTQKGFLLLQEKINFLSKSYGQTPDFVLESTGVYSNCIEQYLSDLNYSYCVLNPLEASFQTKLLRRNKTDISDAHMLAKTHFSTNRRPKYQQDEYYTEMRAMTRHYHDIESERNIYRNKIHKFLQETFPEYEKIFINKSTMFYKIILEFPHADSLIKTSKTIVRNRLKRCTSKNYSIKKLEERAIELKEAASNSVPSVKENSFICKQLKRNVKRILELDEEQKSLIKEMVLLSENKTEYKTLMSIPGIQQTTACRLIGEMGDIRRFKNNKQLNAFVGIDIARYQSGNIHYKDHINKRGNKRLRGILFFMIVSMLGTSKKESNHIVDYYYKLKKQPYSKHHKVATIACINKFLRFTYHLIIHEKLYDYEKATM

SEQ ID NO: 222102 - protein, 428 aa, unidentified
MSNQEIIRRKQFCQIVKEIHKSNEYLIVGIDVAKDKHHAFMGTTTGKSLLRKLIFENNIDGFFRLLKTVEAIKLQNGLSKIVYGLEPTGNYHKPLARHLIRCDCNVVLVTGQAIKYNRQILDGRWDKNDTKDAANVADLVSRGKCLYYDCPSQSIIEVRALLSLRRRLKKEEHSLRMRIRNNLLAQYFPELDSFYSACESETLAIVGWCLTPDTIATMEFGKFFQMVTKTRRGIAQTLRLRKIHGLAIESIGCPMGPASEYEAELLVEKLKQVRNQIKETNDLIEEFCIESPEYSYLLTIPGFGPYISARVLASIGDPFRFENQKQLIKMSGYDLCANRSGRTSDKAIPVISKKGNSELRYALYQAANVAAARVDLFRAYFTKLLIGRERECGIKTKMHVKLAVKMLVIAWTLMKKREVFNPDYLNIE

SEQ ID NO: 222103 - protein, 391 aa, unidentified
MSMYFIGIDISKYKHDCCIISAADQKIVAKVTIKNDMSGFDELLTIINSLSDPEDIRIGFESTAHYALNLELFLENSLLTFMEVNPVLISEYKKSKTLRRTKTDSVDCESIARWLMTVEYKPHSKGFYHAYSLKSLTRLRDKLIRQRSFYLVKITNVLDHTFPEFKPFFNERLSKTALYLLENYGSAEKMARMNSVSYEKLRSLSRGKFSPQQFLQLKELATNTVGVNNSIFDVELNSLLSLYKSLVKEIDTIEKEINKLIEEVHPHYMSVPGIGPLSAAVIYSEYGDVSSFSNPGQMLAFAGIEPGINESGTESHGGRMVKRGSSQLRYTLINCCLPLIRFDMTFATYYAKKRGEGKPHRVAITHVAKKLIRVIYALERQDIDFNVQKLH

SEQ ID NO: 222104 - protein, 353 aa, unidentified
MTYTGIDYHKRYSVACTLDEKGRRLLERRIEHNAPEAFAAYFAELGAPSEVVIEACWNWGTLYDLLEQVPGVTRVVLSHPAKNRIIADAQIKNDRVDAHALATLLRGDFVARVHVPNREVRQRRNTVRQRLWAAKVRTMVRNRIHTVLDRHPGLDRPVYKDVFCQRGVSWMRTAELPAPDRELLTEDLALHTLLERQMAGLERRIEADSATSDDARRLRTLPGVGKVLGPVIALEIDGIRRFRTSDRLCAYAGLVPTTRSSGGKTSHGRMLPFCNHWLKWAFIEAAWVAVGCSDYFGGFYRQHRARGKCANEAITITARRLAKIAWQMLTAQRDYRRVPTKPDPLSPAALATD

SEQ ID NO: 222105 - protein, 355 aa, unidentified
MLSTKYIGMDVHRESISIAVMNSAGKLVMECVIETKASAILQFVDGLRGDLQVTFEEGTWAAWLYDLLKPRVTKVVVCDPRRNALLKEGNKSDRIDARKLAELLYLNKLQAVYHGEHGARALKELVRSYLTISKDLARVMTRVKALYRSWAIPCSGKQVYGPRHRAEWLAKIIEPGVRRRAEFYYQQLDALRSLRREVRRELMEESKKHKAWHLLCQIPSIGPIRAAVLIGILQTPHRFRTKRQLWTFSGLGIEMHSSADHRYVDGQLRRSNRPVSIRGLNQNHNHDLKNLFKGAAMGASSKPGPLQEFYAARLAKGMRPEMARLTLARKIAAITLTVWKKGARFDAQYLKPQTA

SEQ ID NO: 222106 - protein, 403 aa, unidentified
MVFVGIDWAEAHHDVCLLDERGKVLGKRRIPEGLEGVRRLHELVAEHAEEPEQVVVGIETDRGLLVQALLVGGYQVYAINPLAASRYRDRHTTSRAKSDPGDAKVLADLVRTDRHNHRPIAGDSELAGAIQIVTRAHQNLAWSRQRLVNQLRNTLREFYPGALQAFGTDLAGVDAIAILEQAPTPYQGRSISQAKLVSALRKAGRERNLEVKAAELQGHLRAPQLELPPLLTNAYGRSVTASVRLLRQMNLELAALEQELTASFEMHPDAEIYLSLPGLGFILGARVLAEFGDDRTRFDHPKARKNYAGNAPITKASGKHKVVLARVARNRRLADACHLWAFSALTSSPGARRYYDQHRARGKTHNQALRALANRLVGILHGCFSHRQLYREDIAWPTLEAAA

SEQ ID NO: 222107 - protein, 354 aa, unidentified
MSQTSNTAIAVIGIDIGKNSFHVVGHDGRGAIVLRQKWSRGQVEARLANVPPCLIGMEACVGAHHLSRNLASLGHDARLMPAKYVRPYSKGQKNDFNDAEAIAEAVQRPTMKFVATKTAEQLDLQALHRVRERLVSQRTGVTNQIRAFMLERGIAVRQGIGFLRMELPTILATRTDALSPRMLRVIEELAGDWRWLDQRIDGLSGEIGALARLDQACLRLMTVPGIGPIISSAMVAAIGTGDVFSKGRDFGAWLGLVPKQISTGDRTILGKISRRGNRYLRVLFVQAARVVLARIKHLERYGLKSWIEAAKKRLHPNVLAIALANKLARIAWAVLAKGRGFELTRTDDAGVRPA

SEQ ID NO: 222108 - protein, 360 aa, unidentified
MEVGQTVADHGVVGGVDTHKDLHVAAVVDELDRVLESRCFATTRHGYQQMLTWMRSFGQLRRIGVEATGTYGAGLLRYMQNAGVEVLEVTTPDTHDRRKRGKNDDLDAQNAAHAAFAGRRTVTPKSRDGMVESLRVLKACRKTAVAARRVALQMIHNTIVCAPDELRETLRRMTRMQLIRTLAAWRPDLTDYRSVVSAYRITLKSLGRRYLELHDEIADLDTMIVAIVDELAPALVARNSIGHGSAAQLLVTAGDNAERLQAEASFAALCGASPVPASSGKTTRHRLNRGGDRAADSALHIIAIGRLRTDPRTKAYIAKRVAEGHSKLEAIRCLKRYIAREVFSLISQRKREINQGRNAA

SEQ ID NO: 222109 - protein, 345 aa, unidentified
MVYVGLDFHKYFSFVTVMDGQGEILKRARLQNHPDTLLAFFSQLEDEVTVAVEATWNWYWLQELFEDHHIPMKLVHPQRAKAIASARIKTDKIDSEILAHLLRTDLLPEAHIPTRETRLLRERLRYRASLVRLVAQLRNKLHAVVAKNGLRLPSRNILSKKSLAYLREVSLAEAFRQAVDGYLRVVELLRQEIERVSATIASQAQQDPRALWLTELYGVGYYLALLIVAEIGDITRFPRAKSLCAYAGIVPSVHSSGQTYYTSSITKQGSKWLRWALVEAAHHIQSKPPFDRFYQGVKSRRGPKIAQVAVARKLCKTIYHMLREEENALIVGQARWGHGFLKPQV

SEQ ID NO: 222110 - protein, 346 aa, unidentified
MQFYTRQHKFYCGIDLHARKMYVCILDAGGNICVHQNIKTDPEAFLRTITPFREDIVVTVECIFTWYWLADLCQKEGIPFVLGHALYMKAIHGGKTKNDKIDSHKIAVLLRGGMIPMAYVYPEKMRATRDLLRRRNHLMRKRAELFAHIQNTNTQYNLSESFGCIAKPQNRNGIVEQFEHPAVQKSMAVDLEVIRTYDTILADLERTIVKLANHHDPVSYALVQSIHGVGRILGLVMLYEIEDIGRFPRVQDFASYSRLVKCSHESNGKKYGTHGNKIGNAHLKWAFSEAAILFLKGNDPAKRYFDRLIHKHGKAKALSILAHKLGRAVYFMLKNKEAFDQEKFLR

SEQ ID NO: 222111 - protein, 403 aa, unidentified
MNNVAGIDVSKGKSMVSVLRPFGEVVAKPFSIGHTGSELKELADYLKSLDGETRVVMEHTGRYYEPVARFLHDEGVFVSAVNPKLIKDYGNNTLRKVKTDKADSRKIARYGIDNWAELRQHTPMDTIRMQLKTLNRQQSLYTKTKTMMKNNLIALLDQTYPGVNALFDSPVREDGSQKWVDFATTFWHVDCVRNMSLTAFAERYRKWCKRHGYNFSQSKAVEVHAGAQDLIAMLPRDALTKTMVRQAIDALNAVSASLERLKAEMQALAAQLPEYPVVMAMHGVGDSLGPQLMAELGDVTRFTHRNAITAFAGVDPGADQSGTHEAKSTRVSKSGAPELRRALFLVMDCLLKTQPQDDPVYRFMDKKRAEGKPYLVYMTAGANKFLRIYYGRVKEYLASLEGN

SEQ ID NO: 222112 - protein, 318 aa, unidentified
MGTVMNQSSSVYIGIDVSGSALDVAIHDTTEHFRVDNEPVAIEQLVQRLIALSPTLIVMEATGKLELAVLRALCEAGLPAVAVNPRQVRDFARATGSRAKTDRIDAFAIAHFAAVLKPAVRPLTDVQTGQLQALLLRRAQLIEMLVAEKARLERAHAAARDSLNDHIKWLKQQIRVADNDIDSFLRSSPAWRQKEDLLRSVPGIGPGAAATLIAFMPQLGSLNRREIAALTGVAPFNSDSGRHVGKRRIQGGRAVVRRALYMACVPALRFNPTIRAFYDRLRKAGKPFKVAITACIRKLVVTLNAMVRNATPWSSSIN

SEQ ID NO: 222113 - protein, 351 aa, unidentified
MMLIGVDYHPSFQTIAFFVEETGECGEQELNHSDGQAERFYRDLKQRGISVRVGMEATGYSRWFERLLAELGFELWIGDPAEIKAKRVKKQKFDREDARLLLRLLRENNFPQIWVPGPENRDLRQLLWHRHRLVQMRTRIMNQLHALAMNEGYRWKKKLFSEQGRAQLEKLALAPWASRRRHELLELLDRMNPTIAELTAAVEREARKRPEAMRLMTHPGVGPLTALAYVLIIGTPTRFQGGKQIGTYVGMIPCEESSARKQRLGHISKQGNSLLRFLLVEAAQAAARVHPDWRRRYIHLAMRRHKSIAKVAMGRKLAVRLYWMWRNGCEYSQSLEFGSYAGQLGIGNGVK

SEQ ID NO: 222114 - protein, 357 aa, unidentified
MAKRIKQEIERTVGLDVGDRWSQVCVLDQESGEIVEEGRVRTSAEALERRFRGPRLRVVLEVGCQSPWISRLLSGLGHEVLVANARRVALIHGSRNKSDRVDAESLARLGRYDPKLLRAVEHRGEQIQVDRALLKARDVLVRSRARLISHVRGVAKSMGGRVRRASAECFARHAAEDLPEALGPALAPMLEQITGLTATIRGYDRQIEQLAVARYPQTALLRQVDGVGTISSLAFVLKVEDPRRFRRSRTLGAYLGLVPRRDQSGARDPQLRITKQGDPFVRRLLIQCARYILGPFGTDCTLRRYGLRIVARGGKHAKKRAAVAVARKLAVLLHHLWQTAEVYDPLHGIATERDRAA

SEQ ID NO: 222115 - protein, 351 aa, unidentified
MDYRVYCGVDFHARQQTICYLTTEDGVIATQELKHDNKEAVRKFYAQLPGPVLVGLEAGGYSLWFEQLLEELGHEIWFGDATEIRLCARRRQKNDKRDAQLILDLLVRDEFPRIHRQTPVSREILRMLRYRHRLVKIRTMIKNCLHALAIQSGLALKAQLFTEVGLTQLQALTMPPTMQQQREQWLLLLASINQRINASEQWLGQQAVADPRVRRLQTHPGIGLLTSLAVVHTLDPVSRFPNQRKVAAYGGFDPCEDSSAERKRYLGISKAGSKLLRFLLIEAGQTAVKQDAELKRFYQRLAQRRNKPKAKVAVARKLLVRSFILLRDEIDYAEFRRRAVAARLAREAHRL

SEQ ID NO: 222116 - protein, 360 aa, unidentified
MFIERTSVGLDVHARSVVAAAIDGVTGELVQARLAPSHEHIRSWLRDLPAPVAVAYEAGPTGFGLSRALTTAGIRCEVVAPSKLQRPSGDRVKTDAKDAIHLARLLRLDEFVSVSVPGVEQEAARDLVRAREDCRGDLMRARHRLSKLLLRQGIVYSGGQAWTGAHDAWLRRQRFDSPAVQLTFESDYDAVLTVQARRDRLDQAITMMAADSEFTPSVRRLGCLRGVSTLTGFALAVEIGDWHRFTGNTIGSFVGLVPTEYSSGQSRVQGSITKTGNTHVRRLLIEAAWHHRARYRPGKTMRDRWDLASPAARARGDAGNRRLHARWARFIERRKRPVIANVAIARELAGWCWSLAVMDD

SEQ ID NO: 222117 - protein, 401 aa, unidentified
MWCLQAAGSEKRESGELEHTPEAVEAWVGQLCQRFGNRPIAVAVEQSRGALVFMLAKYEPLHLFPVPSTMAANMREALYPSGAKDDPRDADLLLDLLLQHRDKLRGLSPDTEATRRVQNLVEERRKLVDEKTAQINRLTSHLKIYFPQILDWFEHLDTELVCALLEHWPTLEELQKVPPPKLRTFFRKQQCRDQELIERRILAIRQAIPAIRDRAVIKAKSTVVKVIVQLIRSLVKGIADLDEKIEEAAAAHPDFFIFESLPGAGAVIAPRLLAAFGSQRERYGNAGEVQSYSGIAPVTERSGKKKWVHFRWACPKFLRQSFHEWAGHSIAYSVWARSYYQQQRSQGQDHHAAVRALAFKWIRIVFRCWKDGVAYDESKYLASLARRGSPLAALAATAKTL

SEQ ID NO: 222118 - protein, 338 aa, unidentified
MNKLSIIGIDLAKNVIQLHGNDAYGHTRFTRKLKRKEVLDFMVKQPPSIVAMEACGGAHYWARMFQAQGHSVKMIHPQYVKPFVQVNKNDARDALAIAEAAARPSMPTVAIKSIEQQDIQAIHRVRERLVKEKTAISNELRGLLGEYGLVMAQGHKSIRDTVLSILEDAQNGMSMQGREIINDLRDQWLDREQRIGEYDKALKIIAKDNIVCDRLQSIPGIGPVNATLLYSHAGDHNHFSSGRHLSASLGLVPRQHASGGKENFLGISKRGNKHVRKQLVHGARAAYKVLKKEENSSRLGLWVKRMEGKHPNVIIVALANKMARMVWALMKNETVYQA

SEQ ID NO: 222119 - protein, 343 aa, unidentified
MSEVTTIGLDIAKSVFHAHGADERGVMLFSRRLTRGKLLEFFAGQPRCTVALEACGGAHHWARQLQAMGYTVRLIPPAYVKPFVKRHKNDAIDAEAIGEAAERPGMRFVAVKTETQQAAGLVFRTRDLAVRQRTQLTNAIRGHLAEYGWVAPRGKASMTMLADLLEDEMASSLPEAALPMFKLMIDLLAELDERIATLDREIARRAKEDVAARRLMTIPGIGPIAATAIVALAPPVETFRKSRDFAAWLGLAPRQHSTGGKQRLGSISKMGERTIRRLLIIGGSSMVRQACRRGAPAGSWLEGMLARKPRMLVSVALANKMARMVWALLTKNEDYRAPAAVAA

SEQ ID NO: 222120 - protein, 403 aa, unidentified
MNNVAGIDVSKGKSVVSVLRPFGEVVAKPFAVGHTVSELKELANYLKSLDGETRVVMEHTGRYYEPVARFLHDEGVFVSAVNPKLIKDYGNNTLRKVKTDKADSRKIARYGIDNWAELRQHTPMDTIRMQLKTLNRQQSLYTKTKTMMKNNLIALLDQTYPGVNALFDSPVREDGSQKWVDFATTFWHVDCVRNMSLTAFAERYRKWCKRHGYNFRQSKAVEVHAGAQDLIAMLPKDALTKTMVRQAIDALNAVSASLERLKAEMRTLAAQLPEYPVVMAMRGVGDSLGPQLMAELGDVTRFTHRNAITAFAGVDPGADQSGTHEAKSTRVSKSGPPELRRALFLVMDCLLKTMPQDDPVYRFMDKKRAEGKPYLVYMTAGANKFLRIYYGRVKEYLASLEEN

SEQ ID NO: 222121 - protein, 378 aa, unidentified
MTNCTRYLGLDVHAETITAAIAEGRGKIRSLGKFANRPEAVRKLIEKLDGGKNLKVCYEAGPTGYALYWQLTKLGVDCEVIAPSLIPKKAGDRVKTDRRDAEKLAQCYQSGELTPVWVPTLEHEALRDLVRQRAAGKADESRAKHRLVKHLLRRGLREPNESRAWTHPWWRWVQSLKFEHEAQQVALSDCIAEVLHMGERLARLDKAIDRLVASAPPHMQAAIEALQALRGVAKLTAVTIVTEVGTFKRFRRPTELMGYTGLVPSEYSSGQREAKGGITHTGNAHLRHVLGEAAWHARHRPWLNKRLKKLLPTLPAGVAAIAWKAQERLHKKFARMTFHRKHAGTVASAVARELVGFIWAIGSMAENQKVAKTKAQAA

SEQ ID NO: 222122 - protein, 339 aa, unidentified
MQLYTGIDLHSNNSYLAIIDDTGKRIFHLKLFNDPVAINQALAPYEGTMAGIVVESTYNWYWLVDALMTAGYHVHLANPSAIQKYSGLKHADDKHDAFWLAELLRLNILPEGYIYPKEERPLRDLLRKRGHLVNLRTSLLISLKSIISRNCGQTLKANDVKKIREDLVAPLLAGNEDLALAGQVSKEAIDFLTKKIRKIETFIETKVKLQEPYEYLLGLPGVGKILALTIKLESGPIARFPQVGNYASYCRKVCAKWSSNGKAKSGGNKKNGNKYLAWAFSEAAELARRFDPQSRAYYNRKLQKTNFMVAHGALSHKLARAAYHIMRDNVPFMPEKLFG

SEQ ID NO: 222123 - protein, 417 aa, unidentified
MKKRTYRSKEVKQINWNKLKENLSGEKIAVAIDVAKQKQFAVLTNMDGSLSELFRWQHPEETTQMFEAIGALDCPITVILESTSTYGDIFRHQSLLRGFDVHQASAKRVHDAKEIYDGVPSLHDGKSASIIARFYLDGLTKPWRELNENERQLNALRREYEIHQSQYQRNQNRLEAYLSRHWPEVGCLLSYDAVSLEQLLMKYGSPEEVAADAKEAQQVIKKASRGTLKPEKIKAIVQCAKNTLGVPCIEAEKQYLQALATEMNHSRLQRRAAKKALEAEVDSDEQLSEMAKLIGKVTTAVFLSFHLDPRNFECGRSLQKAMGLNLKEKSSGRHIGQLKLTKRGSAKARMYLYFAALRLLQKDPVVKEWYQSKVNPKAKNKTVIAVMRKLSKALWYVAQGQVFDANKLFSVPTKKAA

SEQ ID NO: 222124 - protein, 349 aa, unidentified
MRFYNQQHRFYCGVDLHARTLSLCVLDTDGTVVLHQTLAAGPDAFLKAVAPFRDGLAVACECMFARYWLADLCLKEKIPFVLGHALYMKAIHGGKAKTDKIDAHKIAVLLRGGMLPQAYVYPKGMRETRDLLRRRTFLVRRRAEALLHLVNTNSQYNLPPFPKKLAYAQNREELDLPQRFADLSVRKNVAVDLALIDAYDQQIGDLELYLTRTAKVDDPQAFHRLRSVPGIGKILALILLYEIHDIRRFPEVGQFLSYARLVRCAHESAGKKQGTGGNKIGNAHLKWAFAEAACLFLRASEQAKKWLARREKKHGKARALGALAARLGRTVYHLLRKREVFDSKRFFAS

SEQ ID NO: 222125 - protein, 339 aa, unidentified
MELYAGLDLHSRNTYIGIMDNEFNRVFKKRVPNHLEQILQTLEPFRDQIKGFVVESTFNWYWLVDGLMDAGYSSAHLANPSAIKQYEGLKHSDDQYDAFFLAQLLILGILPQGYIYPKKDRPVRDLVRKRMFLVRHKTAHILSLQSLLQRCCAMKVRANDMRHLTVEELEMWLEEEHLVLSAQANLDSVNFLKQKIKQLEKAIIQKVKLNKAFKYLLTVPGIGNILAMTIMLEVGDINRFSKVGNFTSYCRCVPSQRLSDGKSKGYGNRKNGNRYLSWAFTEAAQLGRRHNERFRRYYNRKVAQANTSLATKALGNKLARICYYIMRDQVPFREELFCH

SEQ ID NO: 222126 - protein, 401 aa, unidentified
MQDTQQHDAVDVFVGVDVGKGQHHAVALDRNGKRLYNKALPNDEAKLRALIAELKTHGRLLFVVDQPSTIGALPVAVARAEGVLSAYLPGLAMRRIADLHAGEAKTDARDAAIIAEAARSMPHTLRSLRLADDQLAELTMLCGFDDDLAAQVTQTSNRIRGLLTQIHPALERVLGPRLDHPAVLDLLERYPSPAALASTTEKTLANRLTKLAPRMGRGLAAEIVQALSEQAVTVPGTQAATIVMPRLAQQLAALRQQRDEVAAEVERLVLAHPLWPVLTSMPGVGVRTAARLLTEVAHKAFASAAHLAAYAGLAPVTRRSGSSIRGEHPSRRGNKVLKRALFLSAFAALRDPVSRAYYSRKIQQGKRHNQALIALARRRCDVLFAMLRDGTIYQPKSAPNA

SEQ ID NO: 222127 - protein, 381 aa, unidentified
MSRQPAAPAAVLSALMKQKLTGKSIEQGSGEGKCNRVLKLGLDMHYRQVTVAMQEEAGAIKAVGRMGHDGFEHWVERKREAGWEIYSCYEAGASGYWLHRDLEQMGVKNLVVAPKAMGQDKAQKTDRRDSAELVDQLDRYLGGNRKALSPVAIPSIEQEQKRALIRYHRQIMADRSRYEARGKGLLCAQGIEVQGKWWQPQAWKELKTHGRFQTWMQTQLQGWRSKLLSAEQEQQKLRKQIEALAPALLPKGVGAYSAVALEYELKGLARFKTARALSSYTGLCPGIHSSDGRGKEGSINRCGNAAVRWNLVEWVWRLLKWQPHYQVVGQLGAALVRSKRARKRLVVKAARQLAIDLWRLETGRITAQELGLVMQPTSKAK

SEQ ID NO: 222128 - protein, 342 aa, unidentified
MNEITTIGLDLAKSVFQVHGADAQGNPVVRRKLRRADVTKFFARLPPCPVGMEACGSAHHWARVIADLGHDVRLVPPAYVKPFVKRGKTDAADAEAICEAVGRPSMRFVPVKSEAQQAAAMVMKTRELLIGQRTRTTNALRAHLAELGIVAAKATKGLGELIAVVRGEDERLPASARFALSILADEIEAIDRRIEALDERITAAARVDETARRLMTIPGIGPIIAATIRARVPDPSVFRSGRHFAAWLGLTPKPHSSGGKERLGGISKMGDAALRSLLVVGATAVMRLAAQGKKAPVWLVALMGRRPFKVAAVASANKMARVVRAILIKGGVHRRPDAAMPG

SEQ ID NO: 222129 - protein, 428 aa, unidentified
MDYTQNAKIAQVTEKTLIIGVDIGSESHYARAFNWRGQEIGKKVFHFNDDVEGYKTFTGWVEAHKVRLRAERVIVGFEPTGHYWFSFGRYVKQMGMMLVLVNPYHVKQIKELDDNSPKKTDFKDPKTIAKLVVDGRYSIPYIPKGVYAELRQAVSSRDRIIKEQNALTNRIKRWLKIYFPEYLKAYTKFSAESGLLLLETAPLPAEIVELGVDGVTQIWRERKLRAVGKKRAMTLVEAAKNSVGIEGGACAKLELQLLLADYRTKQAQLEQVEAVLETEVLKVPHVEKLLAIKGIGLITVAGFLSEVGEIGRFDSPKQIQKLAGLELKENSSGKHKGQTSISKRGRKKLRKIIFQAVLPLIRSNTEFSDVYRYYMTRQKNPLKGKQAVIAVGCKLIRIFYTLLTKGVAYDASRMRTDIIRPMDNAKAA

SEQ ID NO: 222130 - protein, 386 aa, unidentified
MKRNDLSRSLVAFDQASTMVAVVELSFRSWLVAGLVPGLTRQPLKKLGPDAQALLTLLRRWQGEATKAGSTINRIVVAFEAGRDGFWLARWLRARGIEAYVIHPTSIPVSREHRRAKTDRLDTGLLMRAVLGWLRGEPKHCSMAAIPTIAEEDARRPNREHQTLVQERTRIVNRMKATLIRFGIRTFNVKLRKASDRLAVLRSPEDEPLPPNTGAELRRDMARLQLIRDQIKVIEEARLQRLKHAPRKGTHPMLLMLAEIIGVGVETADMLVHEVLSRKLRDQRAVARYGGLTGAPDESGTKRREKGLARAGNARVRRGMIQLAWRWLTHQKNSELAQWYQTRTTGAKPAARKTMIVALARKLLIALWRYVTTGEMPAGVTLHPAT

SEQ ID NO: 222131 - protein, 343 aa, unidentified
MKLSRVGVDLAKNVYQLHGVDRSGKTVWKRRLKRHQWFQVLLDTAGPECEIGMEACAGAHHWGRQLQSRGYTVKLIPPQFVKPYVKSNKSDAKDAEAICEAMGRPNMRFVTVKRVEQQDIQATHRVRAELMTQRTAKANQIRGLVAEYGLVAPKHLSSLRAAIPCWLEDAENGLTGDFRALLQGVWTDLLLLDDRVGEMDQKIKQLADNNEDCVRLQQLRGVGPMTSTAMIATVGDARQYPKSRQMAAAIGITPKQHSSGDRDRLLGISKRGDVYLRTLMIHGARAVVARAKHKDDRLSRWVTNIANKKHPNVAAVALANKTARMAWAMLRHGTDYDPDFAIR

SEQ ID NO: 222132 - protein, 351 aa, unidentified
MSAIPSRRDVILVADYHDQNVVIRWFNEATGEERLLRCRVNPVAIHQVVQRGVREASDTGGRVVWIMESTTGWARVRKLIGQEVRFLVANVLQMPQAPRAYRRKTDKIDTARILREYLAGTLPLSFQPAEPLRAIRRLVALRECLVGRRTAVRNWIDRTLAHETWRSRSGLWSARGMRRLKSLLRLLPDPDRAVFSLKLRELDHLAQLLDQVTQEMLSICNTWPAAQRLDEIPGIGPISAVSILARIGPVERFRRSEALIAFAGLAPGVRESDGARREGRIGGGGTDKHLRHYLIEATFWARRVPRYSATYERVLHRRGPKIARIVVARMLVRSIHAMLRDRVRFDRQRAG

SEQ ID NO: 222133 - protein, 485 aa, unidentified
MNVWQASSSLPSRPALASEEEESVDQMTLGIDVACRAAHQASLADERGGFAWTGRRFRTTAADLERLWAQVPAGAKLTVVMEPTRNAWVPLAAWFRRRGAVVILVPPEQSADLRDYYSKHAKSDHLDSRMLARLPLLHPEGLRPSPGLGPADGLRRATKLRASLVKRRSTILARLDAYLELLGPAWHAALGGDLALNTPLRFLAAGYADPHALRRLGKTRLARFIWRYSHGAWGEQHATRLLAAAAETLQLWDGELSYPDLAEDIATEARLALQITTEIRDLEQKIAALLHDRDPAGIMTSAPGVGVINAAQILARLGDPARFHSLAGARSFTGLIPSLSASGTSGHHGPPTKSGDAPLREALFMAADQARRTDPTLAARYHRLMVHQGKHHNSALCHISTVLLTRIIACWRAGTPYQLRDTDGTPITPTQGRQIISQRYQISAELRAQRRTSHTSTRRRTGEERSRQALRHQPASPHATTRPPA

SEQ ID NO: 222134 - protein, 428 aa, unidentified
MAKSKTQPVIQIDDDALYYERCAGIDVHKKILVVCLRIGRKTESREFGTTTSEIREIVAWLKANGCQMVAMESTGSYWKPLYNIFEQESLPAIVCNAYHIKNVPGRKTDWNDAFWIAKCLAQGLLKASFVPNRDQREFRDMTRFRKSQIEERSRNINRLQKFLEGGNIKLSSWLSDIEGKSAQQLLELVIEKPDFTLDEVKSRMHRQMKSTPKEIFASLDGYLTPTQRTFFAHVICVIRQQTEQIEKTDSLIQAAMTTKQVAAVKALDAIPGIGVISAEQIIAEAGTDMSHFRNQHAFSRWTGTAPGNDESAGKRKSGKTTYGNKTLKSTLTQCAKSAVKNKSTFFSAQYSRLVPHRGKNRATMAVAHSIAIAIYFVLSGAEFKDLGADYYTQFNREKKINSHVRQLSKLGVSIPDDVLRIIAVPAPT

SEQ ID NO: 222135 - protein, 346 aa, unidentified
MDQIIRIGMDTSKHIFQLHGVDAAEQVVLRRKLRRSQVLSFFAKLPPTVIGMEACGAAHYWARELRKLGHEVKLMAPQHVKAYVKRNKNDGRDAEGLCEAMSRPTMQFVPVKSEEQQAALMLAGVREQLIARRTQLCNAIRGYAAEFGLTAAKGLDKIEPLLAWIAQDKTVPAMARELLALQGKDYARLQIELKAIEARLMAWHRANADSRRLAQIPGIGPIGATTLVMKTPDPRAFPSGRHFAAWLGLTPKDHSTAGKTRLGKITRAGDERLRSVLVAGATAVIQQAKHGRGHPSPWLIALLKRKPPKLAAVALANKIARIAWKLMVTGESYDGARMPGASAFAA

SEQ ID NO: 222136 - protein, 416 aa, unidentified
MPDTSIASPFQRYLAIDAHKHYVVVGGLNAQLEIVLPAHRMDIERYPQWAKANLTSKDCLVIEASVNTWDLYDVTAAVAGKVVVAHPLQVKLIASARVKTDKLDVYRLARLLAGDLIPEVWVPPVPVRELRNLVAHRRRLIQLRTMTRNRLHSLAHRHNLVLPEGGAFADKNQNWWKTLELSPVEKLRLQHDVALLEFLGPQIEAIDAELARQSNADPWKDVVPYLMQLPGFGLVVVMTTLSAIGDIQRFLTSKHLVGYSGLGASLHESGETHYTGGITKQGRKELRHALVEAAWTAVSSHPYWREQYQKLSHRMPANKAIVAIARRLLVAVWHVLSERAADRRADPDMVALKLMVWSWKLSEVQRGGLTSRQFVRYGLMRLKIGQEITRIKRMGNRPIASVEEVLGRLPELNLKI

SEQ ID NO: 222137 - protein, 340 aa, unidentified
MVLIGIDPHKATHTAVVVDDAERELARIKVKADRSQVSALLEFADGYRPRRWAIESAGGLGFLLAQQLVRAGEDVVDVPATLVARVRLLGSGRGSKSDPNDALSTAIAALRDPHLRTVMVEDHAMVLRLLADRHQDLTSLRTQAVCRLHALIAAMVPGGVQRRISADSAASRLRTIHPDNTVEAARKEMAFELVADVRRLDNNISEVKKRITAAVAASGTTVTEVYGVGPIVAALLIGHTGDITRFPTKGHYASYNGTAPIEASSGKVVRHRLNQRGNRQLNHALHMAAVTQISRDNPGRAYYLAKIEEGKSTKEARRALKRKISDAVFRQLRDDARPQT

SEQ ID NO: 222138 - protein, 335 aa, unidentified
MQIYGIDLAKEKFDVSFFDLTSKKVSNQPSHKVVTNNLKGIGKFFKDLPSDAVLVAEHTGVYGDTLLKCCMDSNVKIAFVGGYVIHRYRATPDRAKTDVLDCALLRDFGERYPDKLKYKTFPEEALYELRQLARHREMLVEQRKQLITADKSEDCRPIRSLAVKRSMDRIKEMLDTEIAETEKEMLKVINGHESIHHNYELVKSVDGVGLITAVELLVKTENFTKITTARQYAAYAGTAPYEKSSGKMDKGAHISKIGNRRSKTLLYICAESARLHNKEIKLYYERRTLIDKKPRHYVLNAIANKLLRIIFTLVEKGEYYDANFIRQDPRVVKYN

SEQ ID NO: 222139 - protein, 346 aa, unidentified
MSYSTTVGVDLAKNVIQVSVVSGRGKELLNRSLTRKKFSEFLGKQKPALVAFESCATAHYWARAAVRHGHEARIIPAKAVAPFRQGHKTDSNDALAVAEAARQPNIKEAPIKTVEQQGLQAILRARDRLIQECIAQSNHLRGILLEFGIAIPQGFAALLRTLPEVLEDGDNELPDFYRPTLHRLYHRMLELRQDIDAMTKEVGQLVKTHAVCSRFTALEGVGPIGAMSLHATIGSGAAFSKGREASAYVGLTPRQYSSGGKANIVGLSKRVGNRKLRSVLIQGALAYVYRMKEPRSAKDRWLKDLVERAGPRRAAVALANKNVRTAWAMVTQGTEYQRRAQLEMAA

SEQ ID NO: 222140 - protein, 325 aa, unidentified
MQTQTNYTGIDISKSFFDVAVANDGKYKHYKFSNDEAGFKALLRALPEGTHLVMEASGPYYLRLACFLCDSGIAVSVVNPLVIRRFCQMRMSRTKTDKKDAVMIAEYGKTEKPSAWKAPEQHVIQLQQRSALLSNLVKERTALCNQLESFESSGMLDKMLKKTLLKELQHKEELIAQLDKEMEALSTRHYAEMLENLKSIPGMGKKTAMALIVLSGGFERFDDHRKLSSYIGICPRLFESGTSVKGKARICKMGMSRIRAMLYICAWSAKRCNKACRDLYERMTANGKAKKLALIAVANKLLKQAFAIATQKTRYSENYSNITCF

SEQ ID NO: 222141 - protein, 375 aa, unidentified
MGKNTRFVGLDVHAETIAVAVAEGRNQVRSLGTIANRAEAVRRLVGKLGKLTEVKVCYEAGPTGYALYWQLTQLGVHCEVIAPSLVPMKSGDRIKTDRRDAEKLARSYQAGDLTAVWVLDSKHEALRNLVRAREATKEDQLRAKHRLLKYLLRYGQRPVDDARSWTAAWWQWVRSLRLPHPEQNATLLELIIEVDHQGQRIDRFDAAIDQAVEAAPEQLKAIVDALQALRGVAKVSAVTLATEFGCFSRFEKAGQVMTYTGMVPSEHSSGPKTRRGAITKTGNSHLRRVLVESAWHYRHQPKLCKRQKELQSSLSPKIAAIAWSAQLRLHRRYWALQNKSKPSAKIVTALARELAGFVWAIGVETERTLKFSQAA

SEQ ID NO: 222142 - protein, 480 aa, unidentified
MKPKNFKLSVSDKTAGAKIAAGIDVHKYKLEVFVLGRFGREDKPLGEQVFGNNTTGKTELCRYLEKYYPDEIVMEKTGKLSDSVYDAITKHHGWKKDVPRVSIVPPDMIKRYPGEKHTDPNSAYQLARLGISGLLNTIHVTSTSAQQLKTLTRESERYIMQSTALINGMKDMLSGLGYTLPDFTLTSAWGLALLKLLIGDGINGNITKVYELLEAGYVNIHASSQKALIERKVTYLKYSHLSIPPFYARYLQRQLLALEMAEALKGSNLEQIEDTVNETPVLKERVQAIERVAGISSPGAAGIIAEIDSIERFGSWRELASYAGRAVAPDESGTYVGKPHMTKHCNHHLKRIFRQTGITACFILQEDCDIKRYALRQLGKHPRDKMVACANTSAKIVRIVYKILHDNASYDPFHDTARKRGEINPFNPVTKKEQVFRLRAARMRAKMYRKFTRRTMEELPSGELKLMLSRVLEMLDKSLK

SEQ ID NO: 222143 - protein, 412 aa, unidentified
MNSVYERCVGIDVHKRNVVVCAITPDAQGQRQKEQRTFSTMMPDLLRMRQWFQSLNVTHVALESTGSFWKPICNVLEGHMEVLVVNAQHLKAVPGRKTDLKDAEWIADVLQHGLLRPSFVPPAFQRELRELTRYRTSVIEERSRTINRLHKILEDTNIKLSAVASDLMGQSAREMLAALVAGEADPTVLAQLARGKMRAKHDLLVQALQGQFKPHHRVLISEQLAHIDTLDEEIERLSAEIAQRLRPYEAQLKRLETIPGIKRRLAEVILAEIGPDMQRFPSARHLASWAGMCPGNRESAGKRLSGKTRKGSPWLRTALVEAAHAATHCKESYLSAQYHRLVLRRGGKKATIAVGHTLLVIVYHVLADEKDYQELGGNFFDEHDRQAVQKRLVHRLEKLGYEVTLVPTSPAA

SEQ ID NO: 222144 - protein, 341 aa, unidentified
MTAIGIDSHKATLAACAIDELGAPVDERTFSNDPAGHRDLAAWVRRVAPGGVVGVEGSASYGAAAARFLLSDGLMVREVPPQLSRRERIRTRRAGKSDPGDALAIARVTAREVDLPPVRVADRTSEIKLLMEAREDVVAETTRVRNRLHADLVVLIPGYQGTAKHLVAVRSQQAVRQRLRGLAGIQVELARGRLVRLHALDLQARTLQGRTAQLVGPHPLLALPGVGVLTAAKLIAETGDVRRFRSADAFAMLAGVAPIPASSGQVQRMRLNRGGNRQLNRALHTIAMVQAVHHPPAKEYLARKAAEHKSAKEAVRALKRQIVRTVFRLLRDGAEGLAMAA

SEQ ID NO: 222145 - protein, 339 aa, unidentified
MLIIGCDFHPGFQQVAIFDNQTGEIQEKRLQHRAEAEQFYAGLGGQGARVGMEACGHYPWFERLLQECGIELWIGDAARIRASEVRRQKTDRRDAAQLLQLLLENRFPRIWVPSLEERDVRQLLVHRHKQVQARTRTKNQLQALMLSQGVQKKRKLWTLGGRVELEKLELLPYAAVRRERLLAALEQLEAEIAELNRQVEEEVQRRPAAVRLMTHPGVGPVTALAMVLTLGPAQRFQNARQVGSYVGLIPSEHSSGGRQQMGRISKQGSSFLRFLLVEAGQTAARYDPELGRFYRRLAVRKHRALAKVAVARKLAMRLYLMLREDWNYAQLCRAVCRQA

SEQ ID NO: 222146 - protein, 428 aa, unidentified
MNKGRTPIAIIFVLEVHTMTLTCVGIDVSKGKSTVSAYQWGDIVVKKPHDVPHTASALSELADSLKLLGGEVRVVMEHTGRYWLPVAQVLYESGLFVCAVNPKLVRDFGDNKLRSVKNDKADSKKLSRYGLKYWTDLIPYVPTEIAHQKLLEFSRQFDSSNKLLTGLKNNLQAIVDVTFPGVRKLIKSRARDDGHIKWVDFVCTFFHCDYVGKLGEAKFVERYRRWCKRNGYNFTAKGASKIYAAAQDQVPTLPCDADTKLLISENARQLTCVSATVETWRAKLTEIASTLPEYDCVMSMYGCGKTTGPQLMAEIGDPTRFSSKKSLVNFAGIAPGDNQSGDYKPKSSPASKKGSPHLRKTLFQVMSTLLQNSPADEPVYQFLDRKRSEGKNYYVYMTAGANKFLRQYYAKVKAYLNEGSSEQAPLEL

SEQ ID NO: 222147 - protein, 439 aa, unidentified
MILIREVADAPVIMGISKPAGLKSPRGEVKTMNPLFVGIDVSSRNNVVYLMKPDGSKHSSFSVQNNLGGAKLLSEKIVSALHSMQLIDVVIGLEATSIYGDSLVYALREDGSLGRFRRKIHVLNPKQVKKFKEAYPDLPKNDFVDAFVIADHLRFGRIAKEVYMDDYRYQALRTLTRARFDVIQNLTREKQRFANYLFLKCSGMAQDKDIQNTSATTIALMEHFETVDDLANADLDELTAFIAETGRGRFANPNAVAKVIQTAARGSYRLPKTVNDTVNQAISVSIASMRALKEQVKVLDKAIEQQFEIIPNTLISIPGIGKVYSAGIIAEIGDIHRFDSQASVAKFAGLVWLKNQSGEFEAEHSQMIKSGNRYLRYYLLEAANSVRRCDSEFRRYYDLKFKEVNKYQHKRALALTARKLIRLVFRLLKDNRLYIPPEG

SEQ ID NO: 222148 - protein, 451 aa, unidentified
MPKTTSSDRPELNPVNVGAAAIDIGSKMHVAAVNPACTDMPVRAFGTFTQDLHDLADWFKACGVTSVAMESTGVYWIPAYEILEQRGFEVLLVNARYAKNVPGRKTDVSDAAWLRQLHSYGLLRGSFRPGAEIATLRAYLRQRERLVEYAAAHIQHMQKALMEMNLQLHHVVSDITGATGMRIIRAIVAGERDPDVLATYRDVRCHSSLETIRAALVGNDRDEHVFALTQSLELYDTYQAKILDCDRKLEFLMGALTGKGAKPIGKLSRPRVKTKQVNAPSFDVRTALYGLLGVDLTEIHGLGPSLALKLIGECGTDLRAWPTAKHFTSWLCLAPGNKISGGKVLSSRTRRSSSRAAALLRLAATTIGRSNTALGAFYRRLSSRAGKAKAVTATARKIAVLFYNTLRHRITYRDPGAEQYEEQYRSRVVANLKRRAKSLGFVLQAVPCDAS

SEQ ID NO: 222149 - protein, 319 aa, unidentified
MPRTFIGVDVCQDYLDVHVRPAALRQRFANTAAGISELAAWVRPHAAERIVFESTGPYQKAAVGALLAQGLPVVVVNARQVRDFAKAMNYLAKTDTIDAAVIAHFGEVAQTTVRPLESQESRDLRELYDRRGQLVHMLAMEKNQRHSATVAQASTKVLKSIDKHIDYLEGQIQGLERRMDRLIERSETFRVRDEILQTITGIGPQVSRTLLAYLPELGRYSRQSIAALVGLAPFNDDSGTHTGQRHIRGGRSKVRVGLYQAAIAAIRHCPRMKAFYAALKGRGKASRVAIIAVARKILVLANALLRDMVPYKDPANSVC

SEQ ID NO: 222150 - protein, 402 aa, unidentified
MWYIGLDWADTHHDVEVMDEAGKRVATRRFAHSHQGLISMKEFLLSIAPSPEHLACIVETNHGLLITFLLEADIPVYPVNPKSANQLRKTAGAKTDQIDAHLLAKMGRLDLGELRRLEPDSPIVAELKTLTRDQDLLIQTQTRLVNQLTACLKEYYPSALKLFSKLQQHSTLIFLQTYPTPQRAQAASLEEITATLRLAGHTRPKQFAPKMFEELHCPQLVAKEEIVRAKSRLMLSLAKQLLVVIEDLAPYDEEITALFLTHPDQPIWSSLPRAAKRLAPRLLAEWGDARGRYTDANALQALAGTAPVPFQSGNYAKAHKRFACLKPLRDVLYQFAWQSTRKEAWAASYYQRKRAEGKTHSMAIRALANVWVRIIYRMWMAETGYQTETFETAQLSHAKRAA

SEQ ID NO: 222151 - protein, 410 aa, unidentified
MELLHRRCCGLDVHKETVVACLRLVADGKVTTEVRTFQTTTADLLRLSEWLAENDCTHVAMEATGVYWKPVWHILDDGEFVLVLANAAHVKNVPGRKTDVNDAMWLAELLAHGLIRASFVPDTQTQEMRSLLRTRKQLVREQSSHVLRVQKTLEDANIKLDSVLSDLMGKSGRTMLEALIAGETNPAKLAGLADRRVKASPEELREALRGRVTKHHRFLLRLHLNQIDALDAAMAMLDAQVEANLGPFRTAVELVTSVPGVKNLGAQVIVSEVGIDMSRFPSAEHLLSWACICPRNDESAGKRRSNRMRKGGAWLKTTLVQCAWAAVKKKDSYLQAQFYRIKARRGPQKAIMAVAASILTAIYHILKDGTMYKDLGRDHFDRRSTDRQKKRLIKRLTDLGYAVTIKPLAA

SEQ ID NO: 222152 - protein, 342 aa, unidentified
MGKEKQKCGQTVLGADVSLEKFDAGIAVPDSLDDLRSIKVRTFPRSPLGVEQCLEWIDERGGVDSVVMEATGYYSRDLAKWFHEQRPELPVFVVNPFQIKRFGESLGVRTKTDAQDARVIACFGVGRRLWLPHEKAEILRELHRLHKDRTALVNMLKSERLRASGAERDAVAIKVHKSLCEELKRGIETLDQAIQAMVKEQAPLKADVALLKSIPGVGAQTATLILGALGDLRRFDRSRQLAAFVGVSPRQKDSGKSVHGRAVLCKKGSPQVRAALFLSAMAAVRVKGPFKEIFQGLVVRGKARMAALGAIMRRLLVLMRAVLISAKPYDPIDHGKAPAKTI

SEQ ID NO: 222153 - protein, 353 aa, unidentified
MNIIAVDLGKYNSMFCFYNSDTQEQTLAKAPTDRAYFRSVFQSRQPDLVVVEACGPSGWVSDLCEELNITIIVCSTHEDAWLFKNVKRKTDKDDAIKLARLASLGQLKPTHVPNKQMRERRRLIKYRKALVGRVNKNKNTIRAIFANQGIKISSGAKTWHTGRVELDAQRKPLEQCDVSELWQGELDLELTQLDAVTEHLKQVDGKLDGIAKSDTRVQRVMQINGVGRVTAEAIVAYIDDPHRFKNGNQVGAYVGLVPRQYQSGKTDRYGRITKRGPRLLRTLLVECAWCSLQYNEWARETYDRIHHGTQARKKKAAVALARKILIVAWAMMRDESDYDSERNIKQGDSSSTG

SEQ ID NO: 222154 - protein, 399 aa, unidentified
MRIIGMDIHRSFAQVAFLVDGQVTKEARVDLAHDRFLKFAKTLEPTDEVVIEATGNSSAVERVLRPFVKRVAVANPRLVRAIAYARVKTDKIDAVILARLHAAGFLPEVWVPDDDTIRRRRMVTERSGIVEHMVRVKSRIHAILHGNLIPKYEGCLFSKAGRAWLARLPLPSEEQAILARLVAELERVSAQLTEIDKRIAQQALDDPQACRLMTIPGVGTVVALTVLASIGTISRFPTSEKLSSYFGLTPTTQQSGDHPARHGRISRQGNAAARAVLVEAAWSAKMAPGPLRAFFNRVQKKAGAGAAAVATARKLAVLIWHVLSDDRDYAYARPAFTAMKLRKAALKAGAPREYGKAGPGRDYWIKEIRQREAEYVERTERAYERMVEAWKERPSAPAG

SEQ ID NO: 222155 - protein, 340 aa, unidentified
MTHIAMDVHKKRSVSACQTPAAEEPKIVRCYTTRASIAKLLSELPRPWIVCVEATRQSPAVVRWLRELGVDEVQLVDPKGLKAFVKGKPKTDARDAKEMLALLLIGRLPKAYLAPPQVQEVRALTRTRAYVRRGSTSLRNQLRALLNQHGLEVPARDLCGMGAQRQLAESIAQLGPLGQTAAHQLTPLLLGTEQALDVLDGHVREELARQPVAQALMALPGIGPVMALALAAELGEIERFEDVAHLWSYAGLAPRAHDSDEYQGERHLPQRCNKRLRHLTIQAAQAAARSGQSSNARRTYQRLCGRGLHHNTAKVGGARDLLKDIFYCWKRAIAVTPAAV

SEQ ID NO: 222156 - protein, 355 aa, unidentified
MSQQSNNSAIAVIGIDIGKNSFHVVGHDARGAIVLRQKWSRGQVEARLANIPPCLIGMEACVGAHHLSRNLASLGHDARLMPAKYVRPYSKGQKNDFNDAEAIAEAVQRPTMKFVATKTVEQLDLQALHRVRERLVSQRTGIINQIRAFMLERGIAVRQGIGFLRTELPTILATRTDTLSPRMLHVIEELAGDWRRLDQRIDGLSGEIEALARQDQACSRLMTVPGIGPIISSAMVAAIGTGDVFSKGRDFGAWLGLVPKQISTGDRTILGKISRRGNRYLRVLFVQAAWVVLVKIKNWERYGLKSWIEAAKRRLHHNVLAIALANKLARIAWAVLAKGRAFELTRTDDAGVRPA

SEQ ID NO: 222157 - protein, 318 aa, unidentified
MDEAGRETDNIKLPTNGRLIIDYLRNIDGTKKLTFEECELSSWLYGILRDEVDELVVCNPAANTEYKKKKTDKFDARQLAKLLRGNFLVPVFHDGSKREKFRGLMSGYQDLVNDNVRLKNRYKSLFRKSGVRVEGEAVYKDRSLLEKIDRPDFRFIGVQLHYLLERMDESLGIYQKQIARSKNHFEEIKNLMTIPGIGYIQAAKIVAQVVSPERFPDKYRYFSYCGLIRHKKESGQRRYGTQRVWGNRTLKCVYKMAAHSAIKGQSAIRKYYDSLRSKGLDENKAYNAVCRKIAAISLSIWRNNKKYDDSILSDGLIK

SEQ ID NO: 222158 - protein, 410 aa, unidentified
MYYVGLDVHESRSSIEILDCNGKLFKRTEVKGRWPLVIEELKKVPKPFAICYEASCGYGHLYEQFSKLAQEVKVAHPGALAWIFKSKRKHNRIDAIKLAKLLFLDEVPAVHVPSASVRTWRQTIEFRQKLLRSRVMAKNQLRAFLRERGIAAPKNLWTRKSQAWLKTLELEEGEAIRRDLLLDQLEESDQKLKRVDKYLNKIAANHPGVTLLKTIPGVGPRTAEALVAYIDDARRFAGLKRAGAYFGLVPCQDASADKNRLGHITRDGPGTVRKLLCEAAWTGVRCSPTIRSYYQRLTHNDPDRKKIAIVATAHHLVHVAVSMLKTGQCWKESTKENSSPKIHRGGVENPSRPQGFSPPPITTDGSSQASPPPPLSASPFSPEAAEGQGSQRDRLSHEEQPVERPETVGA

SEQ ID NO: 222159 - protein, 341 aa, unidentified
MKNLFIGVDFSKEKVDVAIIFADGLTETAPRVFNEFKTTVSGYKQLVKWVEQNSYGIDSSLWLFCGENTGDYSKGLCNFLYGKGYDMWLENAKSIKDASGLRRLKSDRADASMIAEYAMRNYDRAIMYEPLSESLAQLRELFLYRQMVIRHRCSFQVRRGEKKLTMEKSPVKTMISQSGRHIVSELNKEVEKIDKRIAELIKSDEELTEVFTIVTSVPGIGTQNAVCLMVYTDNFRRFNYDSRKIACYYGIAPFGKDSGTSVHSDPRVHYMANRQIKSMLTQAALAAVNFNPVIARYYMRLVERGKKKQVALNNVKNKLVHLVTAMARNRQLYTPEYKISA

SEQ ID NO: 222160 - protein, 399 aa, unidentified
MGEGMVAGIDWASEVHVACVMDGDGAVASRFSFTHDGAAIGAMAGQLRAAGVAGVAIERGDGPVVEELLSAGLAVFVVPSRQIKGLRTRYGSAGNKDDRFDAYVLADTLRTDGHRWKPLRPDTGPTRALRAACRSRKDLVETRVQVLGQLRANLELAFPGTIGLFTKLYSTISLAFLQRFPTAAKAAWLSPKRLASWLASVGYTGGVSAGILYDRLATAAPGLTGAEGEARGQITLALVSVIGALNTQIAALDAEIGRLFAAHPDRHIFASLPRSGTIRAATLLAEIGDCRQRFPTDDALAALAGACPSTRQSGKRTQAVFRWSCSKKLRAAVMDFANGSRMADPWAAAIYAAAIARGCRHPHAIRILARAWLRIIWRCWQDGAAFDPALHRSRQTATA

SEQ ID NO: 222161 - protein, 408 aa, unidentified
MGPARRCGTVLRCIERSAPMPQKNDLSRSLVAFEQDRTLVVVLEISLSTWLVAGLLPGVARQPAKKLGADEHELLKVIHRWRAEASRAGREIDRICVAFEAGRDGFWLARWLAARGVEAYVIHPASVAVSREHRRAKTDRLDSELLKRAFLGWLRGEPGHCGMAAIPTVEEEDARRPSREREKLVGDRTRIINRMKATLVRFGIRGFKPTLRKASERLEEVRTAEGVPLPENTRAELGRDMARLRVVLDQIKAIQADRLRKLEATPEIGSGPSAMIRLIARIVGIGVETADMLVREVLSRDLRDRQAVARYAGLTGSPDESGSRRREKGLARAGNARVRRGMIQLAWRFLQFQPESGLATWYRERTADRRGSTRKTMIVALARKLLIGLWRLVTTGQVPEGVLLRQGA

SEQ ID NO: 222162 - protein, 347 aa, unidentified
MDHVGLDLGKRESQMAILAEDGELINMRIRTERRRLVEMFGRRPKARILMEASTESEWVARCLEDLGHEVIVADPNYAPMYAQRTRRVKTDRRDAHALAHACRAGTYRPAHRTSTERRELRARLAVREAVVRTRAAWITRIQSLVRREGCRFRTGAPETFLTRVEELALPPALMTVIAPLVELLGPINKQIAVLDEELERIVAADEVARHLTTVPGVGPVTATAYVATVDDVTRFRGAHQVEAYLGLVPSEWSSSEVQRRGHITKAGNSRMRWLLVQAAWCILRRRKRPQTAALRDWAERIAGRRGRSIAVVALARRLAGILFAIWRDGSVYDATKVRGPLPARRAA

SEQ ID NO: 222163 - protein, 410 aa, unidentified
MEPVLTSCAGMDVHEKKVDVCIIHGPLDKPPKYEIRTFSTMTPDLKDLMAWLKKYGVTTIGMESTGIYWKPIFNIMESDFTIVLANPQRLKAIPRKKTDIMDCKRIANLLRYGLLPNSFIPSKEIRELRDLNRTRRKLVGMMTSEKNRLIKVLESGNIKLSSVVSKIYGVSSLALIRSLLEKDKLSREEISQLAKGKLKKKVDLLEKALDGMLTDHHRFLLRMHLENIDYLSKQIEKIDEEIERKMIPFQKESILIQMIPGISEVSASAILAEIGTDMSQFPDEAHLSSWAGVCPGNNESAGKKKSGKTQKGNSFLKGALTEAAWAASKTKDTFYSAFYHNIVRRRGKKRALVALEHRMLIDIYYVLKSGVPYQDIGAEVVRERAMKKREHSMIRSLEKAGYSVIKAEAV

SEQ ID NO: 222164 - protein, 356 aa, unidentified
MSREIKYIGMDVHKEATVIAVLSGGGKLVMESIVETKASSILQFTQGQRGELHVTWEEGTWAAWLYDLLQPQVTRVLVCDPRRNALLKEGSKSDKVDARKLADLLRTGMLRPVYHGEHGLRTLRELGRSYQTISQDLNRVMNRIKALYRGWSIPCAGTQVYAPRYREEWLHKIEHAGVRRRAELLYQQLDGLQMLRRTLRPELLAESRKHKASKLLRQIPCIGPIRAARLLALMQTPHRFRSKRQLWTYSGLGIETRDSAQYRYVLGQLQRTKKPQQIRGLNQNHNHEMKEIFKGAATRASCGVGPLRDFYVALLAKGMRPEMARLTLARKIAAIALTLWKKEERFDAEQLKPQAA

SEQ ID NO: 222165 - protein, 424 aa, unidentified
MKVTFQTCCGVDVHKSFLVATIIKTSSSIEPSYQKRRFSTFNNSILEFKKWLLENECLYVCMESTGKYWIPVFNLLEDEINVTIANPKWVKAVKGNKDDTKDSKWIGDLFRLGLVRGSYIPCKKIRILREFTRYRYKLVSCRSSEKNRYQNALTVCNVALDSVVSDIFGKSSTSIIDYLLEQSGTSIDHEVIASKLLKRLKAKEDAVIESIEGYQMTDSQKYRMHLVRAHMDYITAAINDVDSEIESLIASDPDYENAVELLCTIPGVKYDSAITIISEIGIDMSQFCSSKRLCCWAGLTPGSNESAGKKKSVRITRAGVYLKPALVQCAHAAVKSDKSPYYKKKYESLVKRRGKKRAIIAIARMILTAIYQMLSTGEQWNPSDLYKIDMPVALVEKQKAKAIKQAKKLLQREGILPPDEPLAS

SEQ ID NO: 222166 - protein, 332 aa, unidentified
MENCIGIDVSKASINIHISKNGQDLKVDNNLKGFRSLRAKLKKIYKKEIEEIVFIFEPTGSYSEALRKYCSEQKIKCFIINPKQFSNYAKALGVEVKNDIEDARVLSKALHLAKDDQVKIPVYDEDVERIKELMSYYKFTTKQTTQQKNHLESLMSKAGDSFAIRELRKSIKESKIKERRIIEQIQTIIDTHAKYKNDYENIISIMGIGQIGAISLLHLFLKYPEANQRQITSLTGLNPIYKQSGTSVQSGYKISKTGAKVYRGSLFMAAMCAIRYDANFRTFYERLKANGKQTTQAQIAVMRKLIITAHSLYKNNRKYDVDLNSQKVKIVA

SEQ ID NO: 222167 - protein, 450 aa, unidentified
MSPLALDVVTKTDKTPVLGRMLSKYVGRKTSSIENGITKARNHSRQRGNIMRVVFGIDVSKASSEVAILVNGEKVHGYTIPNDAIGFNRLLEDLGTVYQPEIVFEATGVYSRRLQAFFEDNSYTYTRLNPLESKKQLDSLRVRKTDKIDAEKLAMSQFILNRKPSYVQEALYQELRDLSRFYQNLTEDIVCAKNRLHKVLQITFPELENILSAPTGEQYWNLVITFPCNSFVLESDDATLTAIIRQSTAKRISEKRVTYLVDKLTKLANQSYCAVKKTSPVIEEVKYYAGELLRLSEYRQSVLEKMITLAQPLPEYEILLSIPGIAETTATSIIGELGDIRRFHSANQINAFIGIDLRHYESGDFLAKEHITKRGNPYARKILFKCIHNIASASHTNPCHIADFYEKRKRQSQVTSTKPHTIASIHRLIRTMYYLITHNKLYDYTSIQNR

SEQ ID NO: 222168 - protein, 319 aa, unidentified
MFIGIDVAKAELVVAVHPSEARWTVANDERGVRTLVDRLREITPTLIVLEATGGYELLAVAALAAAELPVVVVNPRQVRDFARATGQLAKTDRLDADILARFAEKVRPALRPIPNADAQELDAMLTRRRQLIEMLGAERNRLGQVFGTGKRAVKKSLKTHIAFLERELHIADSDLSDAVRRSPVWREQDDLMQSVPGVGRVLSHTLLADLPELGRLSRREIAKLVGVAPLSRDSGTFRGRRFVQGGRGPLRGVLYMGALVAARYNPVIRAFYLRLVAAGKPKKLALVACMRKLLTILNVMVRTHTRWIAPIVEEVLVSA

SEQ ID NO: 222169 - protein, 306 aa, unidentified
MDPFFGIDIASDKFDSYNEDFGRANCQNKLLGIGAYLKSLPKGAILALEATGGYGKLLADKAVKAGFTVYMLQPVKVKRFRQSGPDKGKTDRIDARVIHEYIRVYHSRLHPYEPLPKFEARLRKLARTRDGLVRKLASLRTQLRSLGDSPKAIKSTLAGLEKRVLELTTELEGVLASAEDAKVLFTIPGVGTCTVAAVLPALRTIPFKGKYAFDSYAGIDLRPNESGKLKGRRKMSKEGDKHMRRAVFMAALSGTNAKVWKGHYEKLLGEKKLKKIQAINALARKILHTIYGVYKSQTAFAKPPGG

SEQ ID NO: 222170 - protein, 449 aa, unidentified
MTPWAANVDESILKVLTRLRSLPTMTTRQDATPIASWVAIDIAKHHHAVLIETPDGRHQRFRMASTLDDHQRLLDLLQGLPSPVRVAMEPTGDYHRTLAYRLLTHGIEVCLVSSVAGARYREAMFNSWDKNDPKDASVILALLKQGVTQRYVDPLLAGHHGLQELSKTHYQISLARTRLQHSLLTHYLPLYFPEVERFFSASHADWFARFLLLFPTAASIRPCSFEDFQRDAWDAVGRKVNKRAWLRELYDRAQASIGLPIATDSIEIETFRLQLRRYQTLVEQRDALSERAHALLQGRADYEALRSLPGIGPVIALTILAEAGDLRRFGHHRQFLKYCGLDLSTVQSGQFKGHEHLSKRGNARLRFAFWFAATIAVRMRENSFREKYARYIQSDPLNADRKRKALTAVAAKMARVAYALIKHQTVYRCYAEDALPRGSIPLSRAVGTT

SEQ ID NO: 222171 - protein, 338 aa, unidentified
MMYGAIDLHARYSQIRIVDDEGRVVREHRVLTSAERLIGMFDGHGAMRILLETGTESEWVAQTLEGAGHEVVVADPNYAPMYGEIRRKVKTDRRDVAALAEANRRGWYRATHRVSAAQRTVRQILRSRRRLVGMRSGSVSLMRALLRQDGYRLPSGSAERVPARLARLPLSGALTTTLAPLRRMIEALTHEIAEVDARLQTYVATDPVVQRLQSVPGVGPVVALTFRAFIDDVTRFRSAAQVSAAIGLVPREDSSAERRHRGHITKAGPRELRSLLVQGAWACWRSARSASLRAWVERLAARRGRRIAVVALARRLSRILFALWRDGSVFDAATLAAA

SEQ ID NO: 222172 - protein, 394 aa, unidentified
MKLIGIDIGKNKHFFCVMDQQTGEIISQPISFSNDKEGFDFLIQKIKSYSKDSILIGMEDTGHYHFALLKYLLNLQYTVALINPKTTDFNRKIQGGITKNDKLDTINICDVLDTPERKKQYRITKVNSFDLYEQKQLTRHHHNLKEEENVYKNRLQKCIDIVFPEFNNLFNSKYGTVYMNILKMFGSAENIANTDIRTIRKCFEIEGRGNRISLTPERLKECAGSSIGISSSAEVIQIKHLTAQIELIEEQLTEIDKKIEEFSIQNNSPILSIPGISHFSGTSILAELGDISNYSKPSQIIKFAGVAPLHYESSQFNAQHTSITKKGSKYLRKTLYQIILPVIRHNPVFTKYYQLKISQGKGHRCAQGHCVRKLIRIIYHLLKTNQQFDPQLLR

SEQ ID NO: 222173 - protein, 390 aa, unidentified
MAPGDKIIRRPFDVKHTKEELQPLVDEIRVQAKYDEIKVVMESTGVYHLSIAYFLQQNGIFVSVVNALKVANFNKAENFRHTKTDSIDSTNIARYGIAYWAKLPQFDLNGDKYFLLKRLCDAYLNFSEERSRILLQLQSQLEQTMPGIFDLFGGFDINSGKDKLLDFLERYCHIKDIIAKSEAEFVASYCGWAKEKGYRSNESKAATIYAQAKNGIPSIPNNPIVRETIMWYVGLLRRADEALMASLTRMEDIAKDLPEYELVGEMGGVGRVTRVALIAQIGDVRRFKNKHSLICFAGLTPSIHESGKFRASQNHIVKKGPARLRKVLYQVMMSLVMHKIPKDDAVYRFIKKKEAEGKYKKVAKVAGMAKFLRIYYGRVMHLYRDLGLAA

SEQ ID NO: 222174 - protein, 359 aa, unidentified
MGSIAQYVVIRKVAIGVDTHKHIYVVVALDELGGRLGELTVATDRGGADQLERWAVSHGQILALGIEGTASYGAGVTSYLRRQGHRVIEVNRPDRRERRLNGKSDALDAENAARAVLSGRATATPRMADGQVEMIRQIKVAKDTAVKSRSQAMITLKTLVITAPADLREELDGLSKMVLIERCAGLRPGPMTTPLAATKHALRGLARRWQQLHLEIKDHERHLATLTEAVSPAMVAAFGIGPDTAAEMLIVAGDNVDRVRSEPAWAKLCGVCPVPASSGKTSRYRLNRGGHRQANSALHRTVIVRLRFHQPTIDYVVRRTAEGKTKAEIIRCLKRYLAREVWAYLNPERHPVGAPESVG

SEQ ID NO: 222175 - protein, 360 aa, unidentified
MAKARSLVGLDVHATKIVAAVLDAETGQLQVFAMTGENAKAAAFCAGLPRPVRVAYEAGPTGYGLARELIKRGVECVVAAPSKIPRASGDRVKTDRRDAEHLVRLLLAGKLHAVRVPGDEEEALRDLVRARDAVRMDLMRCRHRLSKLLLRHGIRFDDGAAWTQRHRDWLATVTLQWAAAQATLLDARGAVDALAHRRDSLEREIVAMLPSSPWVVQVGRLRCLRGVDTLSAVGLCAEIGDFERFARPGKLMSYVGLVPCESTTGQQRRLGAITKTGSGHARRLLVEASWHYRSRPSVGRALTDRQQSQPPEAIAVSWSAQQRLYRTWTRLEARAKRRTIIAVAAARELAGFCWAITQIE

SEQ ID NO: 222176 - protein, 320 aa, unidentified
MRNTVGLDISKLTFDATAIVGNAEYSAKFDNDSKGLNQFSDRLKSLGCQNLHICMEATGNYYEEVADYFAQYYSVYVVNPLKISKYAESRFKRTKTDKQDAKLIAQYCRSAQESELVKRQKPTDEQYRLLRMTAAYAQIKSECAAMKNRHHAAKDEEAAKAYAQIIKAMNEQLEVLKEKIKEQTEKPNCKEGVKRLETIPAIGRMTAAVLFHHLTSSKFETSNKFAAFAGLSPQQKESGTSVRGKGKLTKFGNRKLRAVLFMPAMVAYRIRAFPDFIKRLEEKKKPKKVIIAALMRKLAVIAYHVHKKGGDYDPSRYKSA

SEQ ID NO: 222177 - protein, 412 aa, unidentified
MNIVYERCAGLDVHKRSVTACASTPDAKGQRHKERESFSTMTADVLRLRQWLAARNVTHVAMESTGVYWQPIYSLLEGHFELLLVNAQHIKVVPGRKTDVRDAEWLADLLQHGLLRSSFVPPASQRQARELTRYRTSLIEERSRAVNRLQKILEGANIKLASVASDLMGASARAMLEALLEGEGDPSTLAELARGRMRSKRDLLAQALQGRFTAHHRFLIREQLAHIDGLEEHIAELSKEIAQRLRPFEAQLKRLETIPGIKRRLAEVILAEIGADMSRFPSARHLASWAGMCPGNNESAGKRLSGRTRKGSPWLRTALVEAAHAAIHTKDCYLSAQYHRLSIRRGGKKATIAIGHTLLVIVYHVLADEKDYEELGGNYFDEWDRQAVQKRLVRRLEKLGYEVMLTPTWPAV

SEQ ID NO: 222178 - protein, 360 aa, unidentified
MGQQVTHPDFTGQVVFIGIDVGNRNWDVELIVNDMFCRRSTFTPDPEKLVGYLHRHFPGARYYSVYEAGYCGFWIHERLVALGVENIVINPADVPTSDKERVHKNNRVDAGKLAWNLARGALRGIYVPERPLLEDRSLVRLRMMVVQKQTRCKNQIKAMLAYYGYRVPDGQCEHYWSRAYIHWIESLKLAQHTGQQTLRMLLDELMFLRAQILELTRRIRALSREQHYQGNVQLLCGVSGIGLITSMVLLTELVDIRRFRTPDQLASFVGLIPGEHSTGEETHETGLTHRRNPFLRHLMIEAAWVAIRTDPALMLAFTMLSRRMKKTEAIVRIARKLINRIRYVLKTGEAYVPSMVSNRG

SEQ ID NO: 222179 - protein, 346 aa, unidentified
MMHAGLDLSRKRLEVALLSEHGEQLEHLAVLPTVDGLQDLAGRAARYQQPVRAAIESMTGARFVHDQLELAGWEVDIADAVKVKGLAPLACKTDKIDAWVLAELSRRDLVPAVWLPDPEIRADRERAHWRLHLVHHRTALKNRIHQTLISFGHPCPVSDLFGVEGRRLLAGLALPEPWRGTVTAALQLIDDLDRQIDQCERDLHDLGATHPDAEWLRTAPGIGWVLAYTIAAEIGDIRRFTSPTKLISYTGLCPFVRQSGERDYRGPLTKHGPRYLRWALIEAAQHAARSPRYQARYEAIKHRLGRQRGGKVATVDVARQLAEAIWYMLTRHQPFAPGGAPRVLAA

SEQ ID NO: 222180 - protein, 366 aa, unidentified
MKKISIVATNRNEIFKEHKLTIGLDLGDRSSHYCILDEVGEVILEHNFSTTPKGIHQVFNKIPRSRVALETGTHSPWVSRQLSQLGHEVIVAHARNVRLIGESSRKDDQLDARTLARLARIDPGLLSPVRHRSAKAQIHLTVIRARAVLVSARTALVNAARGLTKSYGERLQKCGTQQMNREIAKGLSQELRDALDPLLGEIESLNERIREYDRRIEQIATEVYPQVALLKQVKGVGTLIALTFVLTLDDPHRFRRSRDAGCFVGLRPGRRNSGMSQPQLHISKEGDRYLRTMLVQGAQYILGPFGQDSDLRRWGLRLAERGGKNAKKRAIVAVARKLAVLLHKLWVSGEVYEPLRNNHKVVGQVA

SEQ ID NO: 222181 - protein, 346 aa, unidentified
MVLIGCDFHPSWQQVSWLDMETGETGEQKLVHAGGEAKQFYEQLAAPVLIGMETTGNSQWFIELVEDLGHEIWIGDAAQIRASYVRKQKTDKRDAAHILKLMVEGRFPRLWTPDREQRDLRQLVLHRHKLVMIRSRVKNELQHLSLNKGMQRKRRLWSQAGQQLLRELPLKKWAACRREDLLGLLTMLDEQIGKLDGAVQHAAEENPQSKLLMTQPGVGPNTALAFVLTLGDVGRFPRGKQVASYLGLIPREESSGGRQKLGAITKQGNRMLRALLVEAAQVAVVHDPGLRKQYRHRCHQKPKAVAKVAVARKLAVRLYWMLRTNVAYPEIVRIESSSGLALVGAS

SEQ ID NO: 222182 - protein, 384 aa, unidentified
MKKTQETLRIKDSIKEAILYTAFELSHKKWKLGFSNTEKMRTVTIAARDLDQLHKEMEKAKQRFGLEGQIRVVSCYEAGRDGFWLHRYLLSCGIENVVVDSSSIEVNRRKRRAKTDRIDVRKLLHKLLRYHGGEQLVWSVVNVPSEQAEDGRHLHRELEALKKERTMHRNRLKSLLIQQGIVVSNPSSRKFLIQLESFRTWDGKELPTDLKSRIILEHGRLRMVEEQIYALGKEREKRVAAADTDAMKQVEQLMTLVGIGMNSSWKFVMEFFAWREFKNGKQIGALSGLTPTPYDSGASQREQGISKAGNKRIRTLAVEMAWVWLRFQPQSKLSQWYQKRFAEGGKRMRRIGIVAMARRLLIDLWRYLEHGQVPEGARLANIVK

SEQ ID NO: 222183 - protein, 428 aa, unidentified
MDELNRSRLEAFRQLRQEVRHSGEHLIVGIDIAKDRHHAFFGTATGKTLLRRLVFSNDHEGFRKLLDQAEALEVRHGLKKVVYGMEPTANYHKPLGEYLITLGRTVVLVSGVTVKRNRESLDGRWDKHDVKDSANVADLISQGKCLYYEHPSAELRGLRGLLSLKRRLKRQEQSYRVRIRNHLIAQYFPEMDSHYGRSEREGMAIVRWCFPPSMITQIDVDPFIERVTSRRVRMEQRRRLEGVWEKAGASIGCEGVPGVEHEAKVMVEGLRQLREMIKETEDKIEELCRQFPQYQYLLTIPGFGPDISAKVLGAIGDPDRFQNGKQVLKMGGLDLSADRSGKNSDKATPEISKRGKSDLRYALYQAAFIASTKNRDFMLYYTRKLRGREKEKGIHTKRIVKLSAKMLLIAWTLMKKKEAFDPTYLNAE

SEQ ID NO: 222184 - protein, 398 aa, unidentified
MNSVGIDISKGKSMVAALRPMGEVAMRPTEYLHTEVEIERLAYAILALGEDTRVVMEATGRYHEPVAAALHEYGIYVSVLNPILIHQSGGGSVRKVKSDKKDAVKIAKYGLDNWVDLREYTPVDAVRQQLKLCCRQYDLYMKSVISLKNNLISLTDKVFPGVNECFTSPDKANGHQKWIDFITTFWHCDCISLVSEKAFTERYRKWCKRLGYHFTVEKALDLYADSCGHITTLPKNSNTKLLITTAAKQLTAFKCQVAALKAEIISLAKQLPEYDTVVGMYGVGEISAAQLMAEIGDVRRFHNRNALVGFAGVDPIVDESGKDVSKCHPTTKRGSAHLRRTLFQVISTYVKRAPANEPVYQFIARKRSEGKPYYVYMTAAANKFLRIYYARVKECLAD

SEQ ID NO: 222185 - protein, 437 aa, unidentified
MKVLYERVAGIDVHKDMIKVAIRSPGDKPWTRKTEVFEFRTFYGVLQEMARELRRRGVTHVVMEASGIYTEPVYHALCEQDFTQVAVINPAHARALEGHKTDAGDCARLAELFEAGLLRGSYIPPAELKEVRDLTRYRMKTVQARTSEIQRLGKALESAGIKLGSVASDITGVSATAMIESLIDGERRGAVLADLAKGRMRTAGKLAGLSMALAGRFTGHHALLCRLHRDRITVLDEAVAGLDERIAAGAAPWQREADLLTSIPGFGDVVAQAWLGEIGPAPHLHFASHEKLASWVTLCPGNNISARKRKYSRTGDAGTYIKPMLIQAAWAAIRVKGRLQARYNRLVRRFGGDKNPGAKKKAITAIAHTLLKIAYQVLKSGTPYQEPGADFYARRESPQQKQAYLERQLQKLHPGCTVTITISPPEAALTSPVDRAP

SEQ ID NO: 222186 - protein, 425 aa, unidentified
MLAVGIDWSEEFHLVALGRPGEGVFDVRRVEHSPRAVDALVARIAALEPDPAEVRVVIESRHGLLVERLLDAGYVVVPVNPDLIARRRGPAKKKDDAEDARIACLLALDRFERLRPLIPHGEIAGELRAIARDDERAAKDERRLLNRLRQDLLSTFPAALQVAGGDLGAPSFLRLLERWSTAEALRAAGREELAAFARSCRHGWPERFAERVEQALAAEQFQPRPYLVRAKADTIRLTASQLLAIGQQRRAWQRRMGELLLGAPRRGRSKTPRPDEIGKGLPGGEIYLSFPGLGDRLAARVAGEIGDHPEQFESPNAFQCYAGKAPVTRRSGKSELTVCCRLAYNRHLGDAVQQWAFCSLQHSSWARAFYDGKRAQGKGHHAALRALGNRWLEVLWHCLRKRVRYDEAVHVANRERAHSRQLLAA

SEQ ID NO: 222187 - protein, 409 aa, unidentified
MEKTEKRYIGLDVHKHYLIALGVDEGLNVVLPARRVELSRLENWMKKTLTKQDEVVLEMTTNTWQLHDELVEYAGSVMVVHPPHLALITRSQVMNDKIAASILARLLAKGLLVGIWVPPQEIREMRGLVAQRRKMTNLATQAKNRLHAVLQRHHLVPPKGNPFRASNQDWWQSLSIGKLEKLNLQSNLETLQFAEKQVDRMTEIMEGMAAEQEPIGRLLHLPGFGVVTAVTVWAAIGDIRRFAEPKYLVGYAGLGTRVHDSGMTLRTGKITKAGRRDLRTVLIEAAQAAASSHPHWKAELARLEPRLGHNKAIVAIARKLLIAVWHVLAENKPDRFLEPEKVSQKLLRFAYEVGKSNRQGQSAAQFVRQRLDDLQIGQELTNIAWGSKKPIPLPPSSLKTERSDVPNTK

SEQ ID NO: 222188 - protein, 398 aa, unidentified
MLYVGIDIAKHKHDLAVIDTEGTVFVRHLQIQNNREGFTKLQMTLANLQKTTGEDIQIALEDTGHYCFNILRFLRTQGYPTYSYNPYLIKEFAKNQSLRKTKTDKKDALTIARKLRTDLDKQSFSANPSMIELKYLTRHTARLKEDCTRKKVSYTRILAILFPELAPSLGSSSAKHQSHVYAILKEYPSARKLGNAHLTKLTNLISTRSKGRFGKEQAVKIKALAQASIGQESPALEFELLQTIDAIQYITTMRDKAEKEVARLMSEIDSPILTIPGISFKLGSVILSEIRDIKNFRSPNQLLAYAGAEPSISTSGMNQTETGRMVKRGSSQLRWALHESAKLMSIWSPSMRVYFQKKLAEGKHYNVAISHVVRKLVRIIYQLLKDNKPYEEQKMIVN

SEQ ID NO: 222189 - protein, 286 aa, unidentified
MTYFAGIDVSLEESSICVVDAGGKIVREVKVLSEPESLVKFFSEAGLVVSCIGLEAGPLSQWLYDGLTEAGFEVVLLETRHVKAALSAMVVKTDRNDARGIAQLLRMGWFRPVHVKSVAARDVRALLTARKLLQSKLIDVELSIRGTLRGFGLKMGRVSNGRFEARVVELVAGHAMLEQIMAAMLRARDALRTEYAALHRHVLSIARECPIIRRLMTAPGVGPVIATTFTSAVDDPHRFASSSSVGAHFGMTPRKFQSGEMDVNGGISRVGDEAVRTALYQGRTSS

SEQ ID NO: 222190 - protein, 403 aa, unidentified
MDVIAGIDWASEEHRLCLVDSEGRRLLERRVSHDEEGLSGLCRLLGERGVGRVAIERPDGLLVERLLEAGLAVVPVHPNALAAARARYQVGGGKSDGFDAYVLAELARTDMHRLRVIEPDCDETKALRALTRARQELVRARVSLANQLRAELERFWPGAARIFADVDSPIGLAFCERYPSPEDARGLGEKRLQRFLARQRYSGRRSPVELLERLRRAPHGCSGELELEARRTVVLRLVCSLRPLVEGIGRLDSEIAHAVRAHPDGAIFLSLFRDPKTSLTAAELVAEIGDSRARYPGSATLEADAGMCAVAVESGKHRSASFRRACDHRLRDAVATLADASRHHHPWAADVYRRARARGCDHPHAIRILGRAWLRVIWRMWQDHTPYDPARHGGLQRLVAQGG

SEQ ID NO: 222191 - protein, 413 aa, unidentified
MEILYPVCAGLDVHKETVVVCLRRHTGTAPAQQQTRTFGTMTRALLDLADWLAEQGVTHVAMESTGVYWKPIWNLLEGQFELLLVNALHIKQVPGRKTDVKDAEWIAQLLQHGLLRNSFVPGAPQRELRELTRQRRQLIQTRASVVNRVQKVLEDANIKLASVATDVLGVSGRAMLEALVAGQDDPEQLADLAQRKLRAKIPQLRLALQGRVTDHHRFLLRLLLDELTHLEGLIGRVTGRLEETLPASFAEAVERLATIPGINVAAAQNILAEIGTDMDQFGSAARLASWTGMCPGNHESAGKRQSGKTTKGNRWLRATLVQVAWAASHTKETYLSAQYRRLAARRGKKKALVALGHTILGIIYHVLQDQTTYRELGPDYFDHLDTARLTRALVRRLERLGHQVTLQPQQPAA

SEQ ID NO: 222192 - protein, 356 aa, unidentified
MQTQVTKKIDFTGKDLFVGLDVHKKSWSVTIVVDGIEHRTFTQPPDPEALKKYLQRSFPGGNYQSAYEAGYCGYGIHRRLNDLGIKNIVINAADIPTTQKDKLHKRDPVDSRKLARGLEKNSLRGIHVFDRDMEELRSLNRTRFYLMRDLRRSKNRIKSFLMYYDIPLPEEFDNNQWSLKFIAWLKQVKLQTTAGEEAFSHLITSYEHHRQQLLILSRILRLRISQHDKELFNLLKTISGIGPLTSSALITEIGDINRFPHIDDLGSYVGLVPRVRESGETTHTGGITFRCNNFLRVLLVEASWQAIRQDPALMQYYHKHVINSKGHKVIIKIARKLLNRIRYVMRNRQPYVTGVA

SEQ ID NO: 222193 - protein, 360 aa, unidentified
MFSERTSVGLDVHARSVVAAAIDGVTGEVFRARLTPAHEEVIGWLRSLPDPCAVAYEAGPTGFGLARALTAVGIRCEVAAPSKLQRPCGDRVKTDARDAMHLARLLRMDEVTCVVVPTCEQEDARDLVRAREDCRGDLMRDRHRLSKLLLRQGVVYSGGRAWTGAHEAWLRSQRFARPGVRLAFDAAHEAELMSLARRDRLDAAIEAMAADSEFTPVVRRLSCLRGVSTLTAFALAVEIGDWHRFTGASIGSFVGLVPSEFSSGQSRAQGSITKTGNTHARRLLVEAAWHHRARYQPGAVMFARWNQATAPARARGDAGNRRLHARWVTFTERRKRPVVANVAVARELAGWCWSLAVMDE

SEQ ID NO: 222194 - protein, 373 aa, unidentified
MYVGLDVHKDFCQAAFVSSNGEFVKEERFENTCSGLADLAQATKDCEVVMESSNSSMHVYDALSKTCKVKVAHPSRVKAIASARIKTDKIDARILAHLLRANLIPESFVPSPEYRQARLIVRHRASLVEVRTQIKNKIHAILIRDGIKSPFTEKFGREGMLFLKHVDIGEAQRASLDSLLSVLEALSKQVKEADRRVEYHASQDAYAKLLATHPGVGRLTALAAASEICDISRFSSHKKLSSYFGLVPSVYQSGGTDRKGHITKEGSSLMRWLLVQCAWTAVKRSRRFKRKYDKLKKRVGKNKAIVAIARTIAVDMYFMLVKNEEYKEPKEERKRGKPVTSPGTQRPSFRLGSSPRHDPTPCESKQTPKASCA

SEQ ID NO: 222195 - protein, 341 aa, unidentified
MDKELYFGVDVSKKTLDLAYYDGETIDWKNAHIKVSNDAAGFKKIGSWVAKVGKDFDTFLFCMEYTGLYNQNFRLWLESKEYIYGMVEPRKMHRFEPDLDDDQRSLDRIKTDELDAFRIAIYCEQNHKKILRNPSKLPSPVYFKLKRLLAERKQNTKQSVLYKQQLHDICAYDTDLSVERKKLLLKNMQENQKAIDKEIDSYMNEDTSIRKNYNLLTSIPGIGRIIALETIVLTENFTAINNPRKYACYIGIAPFKKESGTSVRKKTGVSKKGFSEAKADLSIAVLSAIKNNPSIRDYWIHKRKEKCGGIVLNAIKFKLVLRMFAVIKRGTPYVETDAYKN

SEQ ID NO: 222196 - protein, 420 aa, unidentified
MVEETEDEEQIVERIASLDIGKAEVVCCIRVPGAGGRRRQEVATYSTMTRSLQRLAERLLELGVTRVVMEATSDYWKPPFYLLEAHGLEVWLVNAKDVKHLPGRPKTDKLDAVWLCKVGERQMIRASFVPPPPIRRLRDLTRYRVDLLGERTAEKQRVEKLLEDAGIKLSVVASDIFGVSGRDMMRALIAGQRDPKALAALARHRLKAKIPQLEEAFTGFFTDHHAYLLAKMLTRIDALDADIADLDAKIDEQIAPFAVAVARLTEIPGIGLTAATAIIAEIGVDMTRFPTAGHLASWARFAPGVKESAGRKKGAGSTGHGNRYLARALGEAALAASRTDTFLGQRYRRLARRRGKQKAIVAVGRSILIIIWHLLSNPDARFRELGPDFYDTRISAGRQIRNHIAQLEALGYKVTLEPAA

SEQ ID NO: 222197 - protein, 351 aa, unidentified
MDVHTIGIDLGKSVFHVVGLDSPGNVVLKRRPSRTQLLEQLANTPACLIGMEACCGAHHLGTALAAQGHQVRLIPAQFVRPFVKSNKNDYKDAEAIAEAVQRPTMRFVPLKTQDQLDLQALHRVRDRLVSRRTAVINQIRAFLLERGITFRRGRKHLQQLMPSLLENAELRVSPLLRPLLEQLWQEWKALAEQIESTSQRIETTAQQDAASQRLQQIPGVGPLTATAMVAAVGNGAAFVRGRDFAAWLGLVPRQHSTGGKATLLGISKRGNPYLRRLFLHGARAVLTQAKRDQLSFRAWMDKLEDRMHRNVAVVAVANKLARIAWAVLSKGVDYRWPSPFQAGEGGPPETA

SEQ ID NO: 222198 - protein, 325 aa, unidentified
MSKVTLGIDVSKDTLDVALLEGEKVLFYQIANDSAGFERLGKWLRLAKGTGIHACLEATGQYGDGIATYLYEQGYAVSVVNPARIKAYASSKLRRFKTDKGDAELIAVYCQKESPALWSPPEESVRELQYLVRHLDDLKKMLQQERNRQKSGVASKRVQHDLAVHIAFLEEQIDSLTRDIQDHIDQHPDLKQQRDLLKSIPGIGKLTAAVILGEIRDIRSFESARQLAAYAGLAPEQRESGTSVRRKPHLSKTGNAHLRKALYMPAVVALTRNPLMVDLRARMEKTGHCTMEIIGAIMRKLLHLAYGVIKIGKPFDPCHAHALPA

SEQ ID NO: 222199 - protein, 389 aa, unidentified
MQAPTVNTPISDGISTIFVAIELSQKTWLVTIHSPDKDKISRHKVPGGDHVSLLALIDRVRDRAARTLGVAPAVVSCYEAGYDGFWLHRLLQAAGITNYVFDPSSIAVDQRARRVKTDRIDGEKMLRTLMAYLRGEPRVVRIVRVPAPEQEDARRDTRERDRLTKEQTAHTNRIKALLRLHGFAVGNPRRRDWLIWLAAQRDWQGQAVPPRILTEIEHEHARLMLVRKQLEALAPAPAAADLTPAAAEMARRSELLLRLKSLGPAFATTLTQEVFYKDFHNRREVASYFGLAPSPWQSGGTDRDQGISKAGNPRARCSAVELSWLWLRHQPDSELSQWFRQRTLNASKRTKRIAIVALARKLMVALWRYLTTGLVPAGAMLKVSGGAMI

SEQ ID NO: 222200 - protein, 423 aa, unidentified
MIYAGVDIAKVDHVIGAVDERGSEACGPMGFKNSAAGFERCEAWLEGVAASPADVLVGMEATGRYWMALYAFLTSKGYAVAVIDPLQVRAVRRFKGLGGVKNDRVDAGLIAEAMRIGQYDPTRLATDDVQSLRTLTRYHQSLKSELAEVKVQCTCLLDAYFPEFSGVFSDMFGAAGRAVLSRSPLPSEVRRRRVDSLQRDISSAARGSRRVDGKAAEIKELAGRSVGIALGERAASLQVRSLVRQMDFLDAECAKIEAEVRGLLDRVEPLVLTIPGVSYATGAQIVAEIGDVSRFRNASALVSYAGLNSSVCQSGMFDSGGGPITKHGSPYLRRALWLAASWARLHDPSLREFYERKRAEGKCHRVAVTAVARKLCHIVFAVMRDQVPYDPSRPGRDPSKHSVSGSQGAAKSKTKTNTETEAE

SEQ ID NO: 222201 - protein, 398 aa, unidentified
MKTTDIDIFLGLDVGKSDHWACAVSKDGTKIWNKTLPNDEAKLTAIYENLSTKGRVLVVVYQPATIGALAVAVAQQLGITVAYLPGLSMRRIADMYPGNAKTDEKDAFIIADAARTMPHTLRSIEVSDEDEATLGMLTGFDLDLARQITQTSNRIRGLLTQIHPPLERILGPWLEHDAVLEVLATWPTPALLKHAGKARIDAKLKKHGARRHTAWASTVIDALDEQSVVVVGTDAAGLVIPHLARQLISLHSQRDDVATHLETMVEAHPLYPVLTSMPGVAVRTAAIIIAETSGKTFTSAAALSSYAGLAPTTRQSGTSIKSERVSHSGNKGLKRALFLSAFAAIRFDPASREYYDRKRAQGKRHNQALIALAHRRLTVLFAMIRDGSLYETPEQKIA

SEQ ID NO: 222202 - protein, 374 aa, unidentified
MDNTITHVAMDTHKKEHKVALHYPGEEQIVRFAIKNTIRDIKKMVSKIKKQAPADIEFCYEAGVCGFILKRRIEALGCKCIVIAPSLTPIKPGDRVKTDRRDALKLLAMFKAGLLTEVHAPDPKQEAARDLTRCRQTAQENLKRIRHQILKFLTRHGYVYTDGNHWTQKHLHWMGGLEFELPSLRDVFDSYFTEMQHCLQRLTSLDKDVKKLAASKPYQKIVGLMRCFHGIDTLTAITVITEIFEFGRFSTPGELMSYLGLTCSEDSSGQNQRRGSITKAGNKRVRRLLIEASWHYRHPYITRSKVLRERRKGQPQWAIDIADKTGQRLRKRYWYLVNHGKSPCVAAVAIARELAGFIWSLFREYEARSSKKAA

SEQ ID NO: 222203 - protein, 486 aa, unidentified
MHPLTTNILELTFDVYRFGFESAGALEIANEYSGLAVAPAHLYCLRRSQACMPHQFNLAYWRDVMNEQEAVVYSVYVGIDWADKKHDVCVQQANSDAREFDVIQHQAEAIDTWVKGLHRRYGGTIAVAVELSKGPIVSALQKYDFIDIFPVNPSTLAKYREAFQPSKAKDDPTDAELAVDMLLRHPEHFKLLKPQSPEMRALATMVEQRRRLVGERIRITNRLRCALKQYYPQVLEWFDRIDTPLFCEFVKHWPTLTQAKRARATTLRRFFHEHHMYHEGVIERRLQAIKSAQPLTLDQAIILPYRVQALVLVEQLELMFKAIGQFDTEIEKLASAHTDYHLFRSLPGAGPSLAPRLLVAFGEQRDRFKSAAEIQKYSGIAPVTERSGQKHWVHWRLQCPTFLRQTFVEWAAQTINKSYWAGEYYQQQRAKGSTYQAAVRALAFKWIRIVYRCWQTGVEYDESRYLKALERNGSPLLKRQNILESA

SEQ ID NO: 222204 - protein, 354 aa, unidentified
MSQKLNAAIAVIGIDIGKNSFHIVGHDHRGAIVLRQKWSRGQVEARLANLPPCLIGMEACVGAHHLSRKLQMLGHDARLMPAKYVRPYSKGQKNDFRDAEAIAEAVQRPTMKFVATKTADQLDLQALHRVRDRLVGQRTGVINQIRAFLLERGIAVRQGLRSLRSELPGILATRTDVLSPRMLRIIEDLAGDWRRLDERIEGLSSEIETLARQDKACERLMTVPGIGPIISSAMVAAIGTGDVFSKGRDFGAWLGLVPKQISTGDRTILGKISRRGNRYLRSLFVQAAWVVLVKVKCWERYGLKSWIEAAKKRLHHNVLAIALANKLARIAWAVLNKGRAFECVKTEETASRPA

SEQ ID NO: 222205 - protein, 348 aa, unidentified
MAIVGGFDVHRAQITFDYLDTDSGETATGQIRPATRPVLRKWLERFEGRDDVAFAVEGCTGWRFVAEELVRAGVEPHLAEPADTATQRGRKKRAKTDRADARLLRELLVQKRLPESWIPPTHVLEVRTLGRLYVALMDERRAWQQRIHAQLFHQGAASVRAMLSPAGQFALAGAELSPAGAQLIETAMSAVDTLTEQILPLRAQLQTIGSNQPGVLALTQQYGIGLLCGTLIWAELGDCRRFSNADQVVRFAGLDVTVWSSDGKRSAGRLARQGSPELRWALFEAAKAAARQTSPDHNYYDAVRDRLGGKRPALSVARKLIRRCYHALRELGDQAWLPAAQPAEQQAA

SEQ ID NO: 222206 - protein, 376 aa, unidentified
MSISKKFIGLDVSKSKIAVAIAEEGREEARYWGTISHTKEQVVKLMHRLRNTEEVALEVCYEAGPTGYVLYRWLLEMDIPCTIVAPSLIPKRAGDRVKTDKRDALRLAQLFRAGELTSIYVPTPEDEALRDLIRAREDAKEDLNRHKQRLGKFLLRHQLTDPKGSKPWSHAYEVWLDTLKFPHDCQRLAFEEYRQAIWETQERIKRYDQEIERQAETHPTQAPLIQALQALRGVQILTATTIASEMIHAPRFPSPTHFMSYCGLVPSERSTGDSRRQGSITKAGNAHLRRVLVESSWSYRYSPAIKKKMRERISGLPPQIQAIAWEAQHRLHKKYKSMMRMGKPKGTIMVAIARELAGFVWAIATEMENMQRKAAA

SEQ ID NO: 222207 - protein, 345 aa, unidentified
MKTFFIGIDVSKEKLDATLIRYESQSDREQQLAYTTVENNPKGFRSLVSWSKKNAGRGVKTDTMLFCCETTGGYDRALCDWLYGNGLNIWRESALQIKRSMGLRKGKDDKADSEMIAYYALRFRSKATLYKPLDGNMRSLRDLFLYRQSLVAERRAKMVSAKEKQHIYSKSKVDNFIYRDAQKAIDLLTKSIQECERRMLEIIKDDEEMYRNYLHLISCKGVGPITSVMLIIYTDNFKGWNAKKMASYCGIAPFYESSGSSVFHKANTSGYSNRRLKGILTQAARSAITHNPTLRQYYLRMKAQGKSYGVILNNVNNKLVHILFSLVLHDCDFELDHEAKRALRA

SEQ ID NO: 222208 - protein, 370 aa, unidentified
MNPIYIGVDFHSKQQTICYLKTETGELVIKELRHQDKEQLRAFYQQFLEPLIIGLEASGYSPWFEALLAELGGEVWLGDPVEIRRRARWRQKSDRRDAELIWDLMVHNEFPRLYQPPLASREVLRMLRYRQKVIKMRTMAKNSLQAIAMQAGLAKGARLFSAAGQEEFRKATMSPVLQWQRDHWFSLLKPLNEQLLATMVWCKAQSKDDIQIKRLRTHPGIGLLTSLCLHHTLQPVSRFRNQRKVVAYAGFDPMIRTSAERAIYLGISKAGSRMLRYLLVEAVHTAVRYDEDLKRFYKRVAERRGRAKAKVATARKLLIRAYIMMRDEIDYAEFQRRAVAVRLARRGQGAPPTTGGLPGVLIGQSTSPGV

SEQ ID NO: 222209 - protein, 412 aa, unidentified
MEGETVIAGVDTHKDVHVLCLLDGLGRKIWSGSFGADPEGYDRLAEAIGDPGSCMVVGVEGTASYGAGLTRRLVELGYNVVEVLRPKRDKVRPGEGKSDPLDAERAARKAASGKGCSVPKSQDGWVEAVRQLYVARRLAVATSTSCVACAKSMLTTAPSALRERFRGRERPKDLMPLLARGRKAGDALEESALASLRSVAAVWKEARSQVESLDERIRALLEANAPALLGVEGCGTTTAAALVVAAGDNPGRLKGEAAFSMMCGASPIPASSGKTDRHRLNRGGNRQANWALYEIAIKRMAYDERTRRYVARRTSEGKSRREAVRCLKRYIAREVYHVLMDPNPDGAAPEGPELAKMRKAMRVTQKKAAAELGLSAATLGHLERGRRRSTKLERRYYELLCELERALPQTAS

SEQ ID NO: 222210 - protein, 411 aa, unidentified
MDAIRICCGGLDVHQETVVACVLKGPLEKRPQSFMRTFGTTTRELLELQDWLREQECREVVMESTGVFWKPVWNLLEGNCELVLANARRVKNMPGRKTDTQDAKWLAQLHRCGLIEASMVPDQEIRDLRDLTRYRTKMVQAVTSEKNRIHKILQDGNIKLTTFISDLYGVSGRALLQKIMNGEVLEEAEVRSLVKTTLKKKVPQLLDALNGKLRRHHREMISEHWEHLTYLEQKIARLEERIEACIGAYGEMIEQIDSIPGIERTSALTIFAEIGPHVAEMFPTDAQFASWAGLSPGNNESAGKRKKAKTKQGNKHLKTALCQAAWANSRSNNRIGQFFRRIRKRRGEKKANVATGHLLTRILHAMMREQTHYKEIDVPLGEGTSSKKTLDTYLTYIRQMGYNVMLQAITE

SEQ ID NO: 222211 - protein, 382 aa, unidentified
MERGSLMLNTTAFVGLDVHARSIKAVALDAMTGEVRSATFAYDAAAVAEWVRSLDPAAKCVCESGVTGLDLQKRLAALGVDCVVGAVSKMIKPSADRKRKNDRNDAEFLARMLSVGNVVEVWVPDDECEAARGLVRALDDAREDLKRCKQRLSKFLLRHGYAFSETTPTGRRKGNWTAAHWAWIKSISFPEKADDDVLAYYVDAARQAMEDKARLERLVEAEASKPRWKRRVDSVRCLKGIDVTSAADLVFEAGEFSRFKNARSFAAWLGLTPSEHSSGESVRQGGITKAGNKHLRRVLVESAWHYLGCSPHSKDLAKGQVPDPAARRHAAKGVRRLVERRRAMLERGVHKNKANVATARELACWCWAVGCMVEGAQGVTAG

SEQ ID NO: 222212 - protein, 339 aa, unidentified
MNSMAVGVDIAKNVFQVHYVDQASGEIVNKAIKRAKFLEHFVNRERCVIGMEACGGAHHWARALKRMGHEVRLMPAEFVKAFNIRNKNDAADAKAIWLAVQQPGKPIAVKTEMQQAMLALHRMREQLVKFRTMQINGLRGLLTEYGEVMSRGRAALDKEIPAALGRIAERLPAALVDTLREQWNGLARLDEQIVEIERRMREWKKEDQAVQAISEIPGVGLLTATAAVAMVGDPKAFRSGREFAAWAGLVPKQTGSGGKVNLHGISKRGDTYLRMLLIHGARSVLTHAKEPGPWVEQIKKRRPTNVVIVALANKMARTIWAVLAHERAYRKDYVSVKPA

SEQ ID NO: 222213 - protein, 377 aa, unidentified
MKKELYLGLDVHKDCIIGAVAEEGRKGEVRETGAISNDLHAVEKWIGRLRQAHGKEVILRACYEAGPCGFGLARRLKQLGMECAVVAPSLIPTRSGDRVKTDRRDARKLARLLRAGELTPVYIPDARDEAIRDLCRARSDAVDDRRRSRHRLKGFLLRHGYRYQGKSSWSAAHERYLRELVLPHPAMKVILEEYLQSIAAAGERIARCEEAMRVLLEQWRLAPAVRALTAMKGFQTVAAMILVSELGEVHRFVHPRQVMAYLGLVPTENSSSERRRQGHITKCGNAHARWLLVECAQHYASPPKVSKELSRRQEGQSQEVRAISWRAQNRLHRRYTRLLARRLQRNKAMVAVARELCGFIWELLRTQPCYQAQSRSV

SEQ ID NO: 222214 - protein, 440 aa, unidentified
MITTLNPHAAGIDAGSTRFFVATPDGAVTSFESHTGDLYRLRDHLLQHGVTTVAIEATGVYWLCLYDILEEAKIAVCVVNGAHVKNVPGRKSDVQDCQWLQQLHAHGLLRASFVPDEKVRALRSYTRLRDDHIRSAAMYVQLMQKALDQLNVKLHTVISQINGVSGLAVVRAILAGERNPANLAALCDVRILKSKRAAVERALQGRWKPEHLFALRQALSGWEFCEGQVKECDAALAEQLRALGDVPPPGHQTAPPAKTGRHHTPDIPNLHAHLLSLSAGHDATVLPGFTDTTWLKAIAEVGTDLSRWPTEKAFCSWLGLSPGKKQSGKLQRRARRRPNTNAGHIFRLAAQSIARSRYLALGGFYRRLKARTNAAVATVATARKIAVLFYRAMRHGAAYVERGLEAYEAAYRQRQQRYLARAAAELGFSLLPVPELSGPS

SEQ ID NO: 222215 - protein, 313 aa, unidentified
MIYSKSLKRSEGMYRCVDLGFHAPALDCTSSLTIDIGKYSIDVCDGLKTFRVKTKELHELLKHNPGRVYLEPSGVYHRPITRFLLKNNIKVFYVNTLKFKQYRDQVRPDHKTDASDAQIMHSYIKSFPDQRRVKKVGHTLEPYLRRYKLLSDALTKYKNFLETSQIDQDQYNTEYLTDKIKELKKEKQSLEKQIEQKIPAKLRKKFGITLTATLLTLDPSRFPTSKHWTSYLGLKLRTYESGTITKNRKITKKGYAEVRRLLYLRVMTLLSTKTEPYHSYFHKIKKRTGIGLKAMTATMRKLAKHFWAETKKS

SEQ ID NO: 222216 - protein, 422 aa, unidentified
MLAVGIDWAEAFHLVALGRPGEGVIEVRRIDHTPGGVEALLAHIATMEADPAEVRVVIKTRHGMLVERLVDAGYTVLPVNPDLIARRRGPARNKDDAEDARIACLLALDRYASLRPLIPHGELAGELRSIARDDERAARDQRRLLNRLRQDLISTFPAALQIAGNDLGAPTILKLLQRWPTAQTLAAAPRHELVAFARAAHHGWPKRLADQVAAALASDQFTPRDYLVRAKADSIRLGATQLLAIGDQRRTWQRRMGALLLGAPRQGRANTPPEDQLGQAFPGGKVYLSFPGLGDRLAARVADEIGDHPEQFESPNALACYAGKAPVTRRSGKTELVVACRLACNRHLAAAVQQWAFCSLRESGRARAFYDAQRARGKTHHAALRALGNHWLEVLWHCLHKGVLYNEATHVANRNRAHGRAA

SEQ ID NO: 222217 - protein, 434 aa, unidentified
MRVTDESKPVLCRSDHQETNMKPIYTCLAGIDVHKKMLAVVVRKLSEGQIVYVQRKFGTTKSEILHLVSWLQQHGVSEVVMESTAQYWRPVWYGLEPHFKLHLTHPLKTRAPRGRKRDFRDAQRLADRWHSGDLEESFVPAAEQRSWRYLTRMRVQSREKLGVIRNQIEGLLEEGGIKLAAVASDIFGVSGWAMLEKISDGVTDMEELLGEARGALRKKRAQLQEALAGRLEPVYRLLLKQHMDQVRLLWKQVEELNEALAEAMKDHVAALHRLIQIPGVDLYAAHELLAEIGPGALAFPSAEQFASWVGVCPGSTESAGINYSRRSAKGNRFLRRLLCQIAWAAIHVKETFFASLFARLQPRIDGKGAAWAVAHRIAKVIWLILHNGVEYEEKGPATISERTLLRKLRRLMREFGKHGIDVKSLLEQDVAAHA

SEQ ID NO: 222218 - protein, 428 aa, unidentified
MSPLLEQSFTAWVGIDWADTKHDICVQAAGDTRRESGCIAHQVAAIDEWANALHRRFGGPIAVALELAKGPIVAALQKYEFFVLFPINPATLAKYREAFQPSGAKDDPADAELALDLLVRHPERFSPLRPQSVPMRTLVSLVERRRQLAGDQNRLTNRLCDMLKQYYPQALEWFDDRGTVLFCDFLERWPTLRSVRQARTAVLETFFHAHHCRSASRISARIESIRSAAALTDDPAIIGPCRLHVLALVAQLRAVLAAIVQFDLEIAAVVHTLPDYALFEDLPGAGACLAPRLLAAFGEQRDRFRSADELQKYAGIAPVTERSGKKSWVHWRLQCPKFLRQTFVEWAAQTITRSFWAGAYYRQQRAKGSSHHIAVRALAFKWIRILYRCWQTRTPYNETVYLNALVKRGSPLLGKQGDSVKMGSCSPV

SEQ ID NO: 222219 - protein, 344 aa, unidentified
MEIHTIGIDLGKTIFHLVGLNQSGEVVVRKKFSRAQLLHFTANRDVHLIGMEACGGAHFLGRALREQGHEVRLIPAQYVKPYVKTNKSDYIDAEAIAEAVGRPTMRFVPIKSDDQLDMQSLHRVRERWVMRRTAVINQIRGLLLERGITLRTGRRHLDEALPAIVEDAEAKLSGALRSLLWQLKLELDQLTIRLEEADALIQQTAQDNEACRRLDAIPGIGPLTATALIAAIGHGAAFRKGREFAAWVGLVPREHSTGGKQKLFGISKRGNSYLRTLFVHGARAVLQFREKQSAGLKAWLAQLTSRAHYNVAAVALANKLARIAWAVLAKGEVYRPPLLAGIST

SEQ ID NO: 222220 - protein, 316 aa, unidentified
MEQPPTGTPVFVGIDVSKDRLDVRLRPSGEAFAVPRDAPGLDRLAAELRGLAPALVVLEATGGFETTVAAALAGAGLPLAVVNPRQIRDFARATGRLAKTDRLDAEAIALFAERVRPEPRPVPDADAQALAELVARRRRVVEMIGMEQNRRRQARAPKVARTIAATLKVLEAQLADLDRDIGDTVRGSPAWRAADDLLQSVPGIGAVVSRTLIAEMPELGRLDRREAAALVGIAPVNRDSGAMRGHRAIAGGRTAVRNVLFMATLSAIRWNPPIKAHYRQLTARGRPKMVAVVACMRRLLGMLNAIIRTASPWRAA

SEQ ID NO: 222221 - protein, 348 aa, unidentified
MTLTIVDGARPVTGGVDTHADAHVAAALDGIGGLLGVSEFPATPAGYARLLGWLGGFGAVGLVGIEGTGSYGAGLARHIAAAGIGVVEVDRSDRQDRRRKGKSDPLDAVSAARAALSGRASGAPRGRDGQVEAIRALMVAKRTARAQRTQAINQARALIITGPDGIRTRFTGQTPAGLIAELAALRPRPGTMVRYHTLLALRELGRRAQFLDGQLGRLDELIVPLVTARAPGLLSLYGVGPDTAAMLLIAAGDNPGRLRSEAAWAHLCAAAPIPASSGKTQNRHRLNRGGDRQANHALWRIVITRMGSHPPTRAYVARRSKEGLSKPEIIRCLKRYAARETYRYLRPR

SEQ ID NO: 222222 - protein, 343 aa, unidentified
MDATTVGIDLAKNVFEIALADERGHIVDRQRLSRARFDRFFDNRATCRIVMEACGSAHHHARRLSSQGHSVVLLPAQYARAYVRRNKTDAADAAALIEASRCPDIRPVPIKSVDQQAIQQLHRLRSQWTAARTSRINFLRGCLREFGVSIPVGAKRAIQAVRDTLSSCNGAVPALLHSSLLELLAEIDALEQRCKQIDRELARLNENDPVVERLLQIPGVGPLTATALRASVVDVQRFPSARHFASWLGLTSREHSSGERRRLGRISKQGDPYLRTLLIHGARAVLLAARSSQRRGSSLDRLRTWALDLQERRGHNKAAVALANKLARIVWATWRFERDFSSN

SEQ ID NO: 222223 - protein, 384 aa, unidentified
MLRKNIVQTLDAATSWKVFGLDLAKHDLAVVAIPADGSEVQYVKRYSYADFLEFTAQIPSATMVFDHFALRLQAQGHTPKTVSGASVKSWITLHMSGQKTDLNDAYALARLSEDPDLKTVRIKSVDQNRLQSLQAMRKQLVEQRTKTIVSIKGIFQCWGILFKKDSRSLKKFKEAADNNKELLGEEVVEAMILQIDSIADLDKDIKHVEELLKKVTMQDPRAQPMLDIPCVGLQTVSRLCAIMGDIKDFETPRSFVAFIGLVPKNMISGNKTTTPSGYEQVGQGKVNRRGDKMARSLIIQCASSMYMNFHKDNFPECALKDWIQKQKDAHKPYGKIMVSLAAKLLRIIYAVLKHGEAFSYEKTGISRSALAALKAAQPAEVGNA

SEQ ID NO: 222224 - protein, 341 aa, unidentified
MKPEMSVLGIDIAKRVFHAVGMDNTGKIVFRKRLSRHDLMPFLAKLSPVRIGMEACGGAHYWARRFREHGHEVKLMAPQFVKPYVKSNKNDSRDAEAIAEAVTRPTMRFVPIKDVDQQDIQALHRVRERLIGERTALVNEVHGLLHEYGIVIPKGVAKFRQAVVGKLESEKDKLTPLSQEMFWKLVEEFAALEKQLAYYQEKLDTLAQTHPECQRLMTIPGIGPLTATALVAAVSDASAFKNGRQFAAWLGLVPRQHTTGGKERLLGISKRGDTYLRKLLVHGARATIRWVGRKTDRRSQWIRQLVERRGKNRTAVAVANKNARIVWALLTSHQDYQPATS

SEQ ID NO: 222225 - protein, 334 aa, unidentified
MKYQHVVGMDIAKDSVQASCFDGTTFLDFSFPNQEKSFLKKVQKSIPKSDPSHILFVMEATGVYHLKLATALYKEGYSVAVVNPFIIKKYAEMLLKRAKTDRNDARLIAQFGFYQEVTLFTPKESLAEEITQVLKGLDQLKKERTTLKNYQEALTHHNEINSVVRDIYQKQLKEVEKAIKTLEAEAKRLVCQYAPKEYQLLLSIKGIGKCSATALLGFLQKMDRFSRGKEVASFLGLAPQISQSGKDKGKAWLSKKGNGYLRRLLYLAALSASRSNVQCRELYQRLLAKGKPKKVALIAVANKLLRQAFAVLKSGCPYDPHYLKLKSNLEVVLT

SEQ ID NO: 222226 - protein, 311 aa, unidentified
MEKQYEVEVGVDVSKKTIDVCSVEGRTKSYNNTQKGIAMMFKEHVVKKALTRVTSESTGAYSNLLIKECLLKKIAVSMVNPLLVKNYIKSFGCLAKTDPIDANYIRKFAVDRNPKRIEARWLDQDRLKQFQRKKKALIKGRAALKASRDKYDEAFILRDISKEITRLGKKISSYEEQMNKLIAKDPNLTAKKEILEQTVGVGPGTSQAILVHMPELGEMCRREVAGLAGLAPYVQDSGLKKGKRFIRGGRTELRTALYMAAVCSIRYNDHLRAFYKQLKARGKASRLAIIAVCRKLLIHLNSELKNKFVRI

SEQ ID NO: 222227 - protein, 355 aa, unidentified
MAVTIVEEARPVTCRTAITGGVDTHADTHVAAALDPIGGVLGVREFPATPAGYAGLLDWLGGFGTVALVGIEGTGSYGAGLARHVAAAGIRVVEVDRSDRQDRRRQGKSDPLDAVSAARAAQSGRARGAPKGRDGAVEAIRALMVARRSAAGERTRTINQARALLLTGPDDLRARFTRHTPAALVTGLASLRPRPGDVTGYAVRVALRELGRRAQFLDGQLERLDELIVPLVTAHAPGLLTVYGLGPRTAALLLIAAGDHPGRLRSEAAWAHLCGVAPIPASSGKVTRHRLNPGGDRRANHALWRIVFTRLGSHPATRAYAERRTAEGKSKAEIIRCLKRYVAREVYRHLRPAAG

SEQ ID NO: 222228 - protein, 341 aa, unidentified
MQITTIGLDIAKNMFQVHGIDAAEKVVVRKQLRRGQVIKFFEAVPPCLVGMEACATAHYWARELTKLGHQVRLMPAKDVKAYVKRNKNDAADAEGICEAVGRPTMRFVGVKSAEQQGRLMQHRTRDLLMRQRTQAINALRAHMAELGIVAAQGREGLKELLAIIADERDERLPIDARASLIVLAAQLQALHTMIGSIEKRLIVQHRANEASKRLQSIHGIGIIGASAIVATVTDPKAFRSGRDFAAWIGLVPREASTGGKQKLGPISKQGDRYLRRILVVGAHSVLRRAKQSPQKYPWLTQLLARRPFKVVAIALANKMARIAWALLASGGIYRAPRLAAA

SEQ ID NO: 222229 - protein, 457 aa, unidentified
MDKSSTKKSNVKKITQFEILRSNVAGIDVSDNGGMMVAYPISETEIVVEEFECYTRDLRRISSTLKSHKIKSVAMESTGVYWIPLFLLLQEDGFEVYLVNSKHVKNVTGRKDDEGDAEWLQKLHRCGLLSASFQPDNQTRTLRSVVRHRDSLVKTRSTYLNRIQKALELMNIKVHTVLSDIDGASGIRIIKAILAGERNAEVLADLCDARVKASREEIIKSLEGFWTEEHLFELSQCYQLYNFHNQMIRECELKIEKILQETIMSKNGGVVPKMAKKLKRKNTYKNDICFDVINYLYMLTMVDIASVEGITGISGVTALSIFAETGPDLSRFKNEKHFASWLGLAPNTKKSGGKIISSRVPKKKHYAGQIFRMAAMSMCHNKGPLGDYYRRIRSTAGKTKAIVAVARKLAVIYYRMMTDKTVYNPQLLSDYQEKYNKRKIKNLEKYLEKLKGMAEAA

SEQ ID NO: 222230 - protein, 402 aa, unidentified
MNCVGIDVSKGKSMIAVMRPFGEVVVSPFEVRHTASELSELARLLKNLDGETRVVMESTGNYHAPVAWLLHGAGFYVSVVNAMLVHDYGNNSLRRGKTDKKDAVKLANYGLDHWLTLPRYVPEEDTRLMLKTCYRQYQQYSKVQTMLKNNLISLLDTAFPDANRLFTSPPRADGSEKWVDFVAAFWHCECVCGLSEKAFTAKYQKWCRKHGYNFSQDKALDIYASACGRFGVMPKTNTAKLLVEQAISQLQTTSAALAALKQEMQSLAASLPEYPMVMEMFGVGPTLGPQLMAEIGDVRRFHSKKALVAFAGIDAPPYQSGQIDVRSRSISKRGSASLRRTLFLVMGVLLQCAPMDEPVYQFMNKKRSEGKPYRVYMMASANKFLRIYYASVKAYLDSLEHD

SEQ ID NO: 222231 - protein, 359 aa, unidentified
MKTLTASTTTIVALDLGKYKSVACLYDGDPAAARFDTLTTGRDELRRLFRRHRPAAVVIEACALAGWVHDLCAALGLACHVANTAAEAWKFKHTKRKTDRDDALRLAQLYALGQLPTVTVPDQQTRQWRALIAHRQTLVGRRVTTQNRIRAILVGQGLAAPRGAAAWSSTGLGGIAQHARPLADCAADELWRGLLLLSLTELRQVRELLDQAEERLDQLARQDAGVQTLQTIPGVGPRTAETVVAYLGDPGRFDSGKQVSAYGGLVPRQYQSGETDRRGRITRRGPALLRKMLVECAWVMLRYNRWAAAVYRRLSHGRARKKQAIVALARKLLVRCWAMLRDGTPWRDDTPHEPEAVPA

SEQ ID NO: 222232 - protein, 341 aa, unidentified
MPYSGIDLHKRSLVIHTLDADGTTTREAQLKSDRGAVLTYFGTLSGPHRAVVECVQSWYWLRDLLGPTGVDLRLAHAKYVKAISYAKVKTDRVDARMLAQLLRTGLVPEAHMIGAEHRETRDLLRSRLQLVTRAVRCRHAVGSLLEKYNVPTPEELPELARMQAALQEEQRTLIRTHVRRVEAVLKTRLLPTPEVQRLVWIPGIGKLSAYALVLEIDTISRFPTVRHFHSYCRLVPGADNSAGKVRHKRSRDGNRYLKQVFHTAAIRAAQYHPEIRQEYRRLSRRKGKIVARALIAKELASIVYWVLRKQEAFNGKFRGHVLTAKPAVWPRLASPESLTDA

SEQ ID NO: 222233 - protein, 457 aa, unidentified
MQGKQKTGRGRSSGQLPTLNEHAAGLDVGSTFHVVAVRGDQDEEPVRTFRSFSGDLHAMADWLGRVGITTVAMESTGVYWIPVFEILEARGFAVLLVNARDVKNVPGRKTDVNDAQWLQQLHQHGLLRGSFRPRDEVVRLRAYLRHRERIVEYAASHVQHMQKALMQMNVQLHHVVSDITGVTGLRILRAIVAGNRAPAELAQHRDVRCAASEETICQALTGNYRSEHVFALKQALELWDFHQAKIAECDSEIETVLTSLNAQRAAPEAPLPPVRHAKARNEPKFEVRSALYTLLGADLSQIHGFGPYTVLKLVAECGDDMTKWPTAKHFTSWLSLAPGNKISGGRVLSSKTRRSSNRAAALLRIAAVNIGKTQTALGAFYRRLAARTGKAKAVTATARKLAVLFYRALRFGMTYADPGAEYYEERYKRRVIDSLQRRARSLGFTLVANPVAVEGVS

SEQ ID NO: 222234 - protein, 366 aa, unidentified
MNTIYIGVDFHARQQTICYLKTETGELVFDELKHQDKQEVRAFYAQFQGRVIVGLEASGYSPWFERLLEELGCEVWLGHATEIRRRARWRQKNDRRDAELILDLMLHDEFPRLHRPAVQSREVLRMLRYRQKLIKIRTMSKNSLQALALQAGLARRSRLFTKEGQQQLGAAEMSPVMHWQREHWLQLMEPLNQQLLETMVWFKVQSKGDVCITRLRTHPGIGLLTSLCIVHTLQPVSRFRNTRKVAAYAGFDPVERSSAEHKCFLGISKAGSRLLRYLLVEAAQTAVRKDEDLKRFYKRLAERRGRPKAKVAAARKLLIRAYIMLRDEIDYAEFRHRAVAARLARRGQGPSNVPEVLIGQPASPAP

SEQ ID NO: 222235 - protein, 366 aa, unidentified
MKKTSTVRVNGNMIFKGHKLTIGVDLGDRWSNYCVLDEAGEILLEQKLATTPEGMKQTFERIPRSLIAMETGTHSPWVSRLLKELGHEVLVAHAQRVELISKSTRKDDRHDARTLARLARIDPELLGPVRHRSAKAQIHLTVIRARAALVSARTALVNAARGLVKSYGQRLPKCGTQQVSRELGAKLNAELREVLEPLLKEIESLNERIKEYDERMEKIAKESYPHVELLKQVKGVGTQIALTYVLTLDDPHRFSKSREVGCFLGLRPGRRDSGQSQPQMHISKEGDPYLRTMLVQGAHYILGPFGEDSDLRRWGLRLAERGGKSAKKRAVVAVARKLAVLLHRLWVSAEVYEPLRNSQKAMRAVA

SEQ ID NO: 222236 - protein, 402 aa, unidentified
MNAVGIDVSKGKSMVAIMRPFGEIVSTPFEIKHTASDIHSLIELINSVEGESRIVMEHTGRYYEVLAHQLSEANLFVSAINPKLIKDFDNDSLRKVKSDKADAVKIARYALDKWQNLKQYNVMNELRNQLKTMNRQFGFYMKHKTAMKNNLIGILDQTYPGVNTYFDSPARSDGSQKWVDFASTYWHVDCVRKMSLNAFIDHYQNWCKRKKYNFSQSKAEEIYGKAKELVPVLPKDAITKLIIKQAVDQLNSASTTVESLRTLMNETASKLPEYPVVMAMKGVGTSLGPQLMAEIGNVSRFTHKSAITAFAGVDPGVNESGTYEQKSVPTSKRGSADLRKTLFQVMDVLIKTHPQDDPVYQFLDKKRAQGKPYYVYMTAGANKFLRIYYGRVKEYLASLPES

SEQ ID NO: 222237 - protein, 460 aa, unidentified
MKSSSKIIKSQAEQSNTNSLPALFPDTAGIDIGSKSHFVAVPADRDISPVREFSAFTGGLLEMVEWLKQCAIKTVIMESTGVFWIPAFELLEGNGFDVKLVNARHVKNVSAHKTDVLDCQWLQQLHTFGLLQGAFRPADQIMPLRSYLRQRAMLIRGASTHIQHMQKALQQMNLLLEQVVADITGLTGMTIIRAILEGERDPAALAQHRDPRCKNSADVIAKSLVGNYREEHLFALQQAVTLYDTYQAQIAAVDLRIEAYLACLERVTDDRPPPAPKRRQSPKHNQPRFDARTYLYQLTGVDLTRIDGIEAGSALALLSEIETEMTRWKTANHFVSWLGICPGTKVSGGRVLSSKTKPTATRAAAILRNAAASLHHSQSALGAYYRRMAARIGKMQAVTATAHKLARIVYSLLRYGTEYSDAGQDYYERQYQERVMRNLRQRAKALGFELVPAPAEPIVT

SEQ ID NO: 222238 - protein, 351 aa, unidentified
MPLMKYYIGLDTHSTTSTFAVVDENGQCVLRETVKTSEQSLVHVINKVVGERHMTFEESSISQWLYLQLKDKVEKLIICNPTYVAKKQGAKTDFRDALHLANELRTNHLQPVFHDTSHWMEIRTTVSGYLDIVEEIVRFKNRLKAVFRAEAIQTDENSFYKNKTRVKELKNPAAKFVAEKLFDQIEFLENEKDKYKDVFERNRKKYRPIRNLMTIPGISIIRANTIAAIVCQPNRFENKHKFWGYCMLVRHIQISGGKIYGNKRFYGRRELRNVFLGAAENVMRLDGELRDRYDALRAKGADHQDAKVNLARQIASIALCLLKNNDKYNENYGDYIKERKKLRKDFFEQSL

SEQ ID NO: 222239 - protein, 361 aa, unidentified
MTQTMTWAGLDVHARSTQAVAVDARSGELARARFGGGIESVVEWLASLTGPVHAVYEAGPTGYGLARAGGELGLRIDVIAPGKTPRAAADRIKTDRRDAELLVRQLMAGTLHPIHVPSPALEAARDLVRAREDVRCDLSRARHRVSKLLLRHGEVYPKDRSTWTREHRRWLSSRRFDEPNTQLAYIDALAAVDGLTHRRDALAERLSHVAADAELWPVVSRLRAFRGIDTLTALALVCEVGDWHRFQRPDQLAAWIGLVPSLSQSGESRTSGGITKTGSRHARRLLVEAAWHYQRPPRIGATLRNRQHGQPDHILQIAWRAQHRLYRVHQRLRQRGKHPNLATAAAARELACFCWAAVTAP

SEQ ID NO: 222240 - protein, 368 aa, unidentified
MRRNIWAGLDVGVETTSVCVIDDAGEILQQDSCGSDVSSVHQQLRWLRRRRMATVGVEAGALTLARGLRSRGYCVEMYETRQLSKFLRVRRNKTDAGDALGIAEAGRIGASLVSKVHLKSLECQSLQSRLTMRRHLIRQRVAAVNLLCRQIELYGGRIRRSNRQKPLRDQVEVQLKRLFGKHPNGLTLELRHLLAYCEQLFGYQKAIDGEFKRLASDNEVCRRLMTIPGVGPICALTFYAIVSDPHRFRRSQSIGSYLGLTPRVHQSGLSNRAGRISRMGNAAMRTLLVQAALAFMRSKHADPALRSWALSIEQRRGRGQSRIALARKLAVIMVAMWKRGEAYRPSSQLPARLPAGTEPSPEAASAHL

SEQ ID NO: 222241 - protein, 340 aa, unidentified
MDATTYGLDVAKSVFQMYWVEVETGEILNRRFGRDELIRFLAQRPAGRVALEACGSAHWWARKIKALGHEAVLLHARFIRPFVQTNKTDAADARAIWTAVQQPGMRTVAAKTEDQQAMLSLHRMRALLVKFRTMQVNQLRGLLYEFGATFRTGRAAGLAEIRARTAELEDVLPGTMMCCLQDQLRRIDELQRDIDLLEKRIGVWQKQDAACHAITAIPGIGRLTATALVATMGDAKAFRSGREFAAFLGLVPRQSGTGGKVRLGPMSKRGDPYVRTLLIHGARSVMYNAKVPTPWQTDIQARRPSNVAAVALASKIARTAWAILARGQEYQRNYVSVRPA

SEQ ID NO: 222242 - protein, 387 aa, unidentified
MPQLNDQSRSHTALKQDCTLIAVLEMSQSAWLVAGLVPGIERHPLKKIEPDEAALLRLLRRWQEEATKAGHPIARITLAFEAGRDGFWLARWLRAHGIEAHVIHPTSVAVSREHRRAKTDRLDTALLKRAFLGWLRGERGHCSMAEIPTLEEEDAKRPTREREGLVRERTRLVNRIKGALARLGIRGFKPTLRQAPERLSTLRLPEGAPLPPNTLAELRRDMARLRFVLDQIREIEAARLDQLEQHPETGTHTMVRVLARILGVGIETADMLVHEVLSRTLRDRRAVARYAGLTGAPDESGGRRREKGLAKAGNARVRRGMIPLAWRFLRFQPERALTRWYRARTADARGATRKTMIVALARKLLIALWRLVRSGEPLEGVVLRPAA

SEQ ID NO: 222243 - protein, 422 aa, unidentified
MRVLYERCAAVDVGKDVIAVAVRLPGDGPDGRVMHKRMFKTFYGVLREAARWLTSLGVTHVAMEATGIYSMPVYHALVEHGDFAQVLVCNAGQVKNVPGRKTDLADAEWLVHLLECGLLRGSFIPPADIKAARDVIRYRTKVVQSRTSEIQRLGNVLQDAGIKLDSVASSITTKSGRAMIEALCDGERRPGVLAELARGRMRPKIPDLAQALEGRFGEHHALMCRLHLDHIDHLETSIATLDAQIEAMMAPFRPERELLTSIPGVGPLVAAAVLSEIGTAVTEYFPTAAHLASWAGMCPGNHESAGKRHSGKRRKGNQHLQPVLVEAAWSAVRTEGYLKALFHRHVMRSGGYRSPAAKKKAIIVVAHAMLIIIWHVLATTTPYHDLGANYFTTRADPAAETRRLIAKLEALGHTVNLEPAAA

SEQ ID NO: 222244 - protein, 330 aa, unidentified
MGTAATAFVGIDVSKATLDACLLGPDGRVKEAAFANDAGGHAALIAWADRHAGGAALHFCLEATGPYSDPPATALAEAGRLVSVANPARVKAYAVAAGQANKTDPADARAVAQFARARRPPAWRRPSAEVRQLQGLVRRRDDLRERAAREKGRLDSPALTRAARQSIARAIQFLAREADRVQAEADALIAAAPARRADRDLLASIPGVGAQTAATVLAELPAVDRLPSAQSAAAAAGLAPREFRSGVSVRKRTRLSKAGNARLRQALYLPTLTAIRFNPLLKGFFERLVAARKPRMQAVGACLRKLVMLCYGVLKNRAPFDPDWASTKAA

SEQ ID NO: 222245 - protein, 322 aa, unidentified
MNSENPIVGIDVSHRFFDAQWLGNHARYENGDAGFRKLLSEVPANAEFVFEATGNYHYRLAYFLDSKGKSVKVLNPLSFKLWGRSLGGKAKTDKIDSKNLAKYAKTEKIRAQKEWKKLPPKLAKAKVILSQLYRLAKMERQAGNSKHAAALVLDKGDELLDVMGGIRKHCLEQKKCLEKQLYEIVGELYPDAFRLLKSIPSIGAKTAAALLVVCRGIEGYESHRKLSSFVGFAIRVHESGDSVKGKGRIIKVGNPYLRGLLYMCAMGAARSRKNRQCREFYEKLLAKGKPKKVAQAAVMHKLVKIAFAIVKNGTPFKEKEAA

SEQ ID NO: 222246 - protein, 416 aa, unidentified
MRVHRNCCGLDVHKETIAACLISESEDGTSSRQKRIFGTMTQQLRELAQWLAEAKVTAVAMEATGIYWVPVWNVLEPHGFELLLINPEHYKAVRGKKTDLKDGERIAELLQDGRLAGSYVPPVAIRVLRDLTRYRTKLVQYQSSIANRIQRLLEQCNVKLASVASDVLGVSGQAMLRALAAGETNPQRMADLAKKQLRKKIPALQLALEGCLLPHHRFLLADMLEELDHIGSKITRLEQAIEEQMRPYQKAVDAWMTVPGVKQRLAWNLVAEVGPTVDAFPSAADLVSWAGICPGNNETAGKRKSGTTRNGNRWARKALCEAAWAASKTKATYLQAQFRRLAAIRGSKRAIIAVASTILTIGYHMLKEGTSYRELGGNYFDKRNLLRTTRRLVKRLEALGHRVILEPTQSPFQSSD

SEQ ID NO: 222247 - protein, 330 aa, unidentified
MSDYVGIDIGAKSVVVSVRRAGRTLVSQEFRQTPEGHQALIDKLGSQVACVVLEATGVYYLDLAMALHRAGLPVAVINPRSFHHFANLKLNSSKTDAVDAALLAEYGECMKPALWQAPDEALMGLRDIGRQINRLTAARTQAKNRLHALRSKSNTLALLIEDEADGIERLDLRIERLSKAALDLINQQPHIKQQLANITCAKGIGQTSAIAMLAELCVLPRELKSPQVSRYAGLDVRLCQSGSSVSKPGRLSKAGNAYLRSAFFMPALSAVRHDPNAKAFYEALQQRGKKKIQALCAVMRKYLTGVWACLKLDVPFDSSKLFSTEHLENA

SEQ ID NO: 222248 - protein, 322 aa, unidentified
MNPQFDPEMYVGIDVSKAQLDVAIGQEGETWQAANTAAGIQTTIQRLEAYPPRLVVVESTGGLEKPLVKALQAAGLPVALVHPGRVRKFAAGIGYFAKTDRLDARLLAWFGFAAHPHPKPQPLPACEALSELVRRRNQLIEMLIAERNRRSTCPASMLEALEEHITWLSAERDRLTTQIETMLATQPEFHDKDTILQSTKGVGPILSATLQAELPELGRYSHKQIASLVGVAPFSHESGQHQGKRQIKGGRSGIRCTLYLATLSAIRYNSVIRAHYQQLIDRGKLRMVAIVACMRKLLVILNAMIRDMRPWLPKVIPVTLDS

SEQ ID NO: 222249 - protein, 407 aa, unidentified
MEVFLGVDWAEDHHDLCLQDPSGAVVASRRIPDGLEGVQTLHALLAEHVEAPAEVIVGIETDHGLLVAALVAGGYQVYAVNPMSVSRYRDRHHASRAKSDKSDAKLLADLVRTDRHNHRRAIPDSELLEAIKVLARSHQNLIWTRQRLTNQLRSALREYFPGALVAFEDLRHHDTLAVLGKAPTPTQARRLTTAQIRAALKRGGRERNLDRRAAELHAVFAQPQLRASELVEDAFGVTTAAQTRIIGDLNEQIALLEAKLHERFDQHPDAELLLRLPGLGVILAARVLAEFGDAPNRYLDAKARRNYAGTAPITRASGTSEVVIARLVRNKRLFDACYQWAFCALSASPGARAYYDAHDPGPKTGKTARRKLANKLVGILHGNLTHHSAYDEAIAWQHWQVSQPGAA

SEQ ID NO: 222250 - protein, 335 aa, unidentified
MVQIYGIDLGMSSFDVSFLSESGSVRHLSGVKNTVHGISKFLLSLPSSAVLCAEHTGVYGDLLLRLCTLNRICLCFVPGYQIKHSLGLQRGKSDPLDACRIREYAERFYDLLRPCFYPGEEMSELQELYRTRSLLESRKRLDTLNIGDNCKSSVSLAADHARRAVLAELNTQISGLDHEIEALIQNSSEFSRNYQILTSIVGVGPVTSCELIIKTENFRKLDTAKKCAAYAGIAPYPKESGKMKCGHKISPMGDKQLKTLLFLCARSAKEHNKEIRLYFLKKHKVEKKHFFVAMNNIANKLLRLIYSLIQKQQTYDRDYIQRDPRCVVISDTNKC

SEQ ID NO: 222251 - protein, 366 aa, unidentified
MEIERTFVGLDVHSRSVVACALDDRTGELSKARLVPDHETVLAWLRQLAGPVAVVYEAGPTGYGLARFLTGRGVRCVISAPSKMHRPSGDRVKTDARDALLLARLLRLGEITAVTVPSLAQEAARDLVRVREDVRADLMRARHRTSKLLLRQGILWSGGTAWTGPHEQWLGQQRFELAGLQTAYDTTLETVLLATSRRARLDKAIGQMAHEPQWWPTVSRLQCLRGVSTLTAFGLTVEVGEWTRFSGSTIGAYLGLVPTENSSGEGRRQGSITKTGNTHARRLLVEAAWHHRRPYRPTKTMRDRWDPAPAAARARGHAGNLRLHQRWLAFDQRKKRPVIANVAVARELAGWCWSLATLDDNAGAAR

SEQ ID NO: 222252 - protein, 429 aa, unidentified
MHYTQNQKLEQVTEKTLVIGVDIGSENHHARAFNFRGIEYSPKDLKFGNNAKGFEAFQGWMQSYVQMFGAKKVIVGFEPTGHYWYNFADFLKTLGIMFVMVAPQHVKHSKEMDDNTQRKDDHKDPRVIAKLVTEGRYIIPYVPEGIYAELRTAYGRYCELTETKVRLENRITRWFDIYFPEYRKVYKNPGAKTGMMVLRIAPLPADVLKLGADGINQLWRSVKARGAGIKRAETLVAAATRSTGRAGGDAERLDLWQMLEEYGLVMRHLAEMQVMLEELVARIDGAERLLRIKGVGFITVAGFFAEVGDLSRFTDPKQIQKLAGLSVVTPDSSGKHNGQSEISRRGRKRLRMIMFRAAMSMVKSNREMKTLHEYYTTREQNPLKKMQSLMAIAGKIIRVFYGIMKNGTEYDPVRLLADIRRPGTDKDVA

SEQ ID NO: 222253 - protein, 391 aa, unidentified
MSMYFIGIDISKYKHDCCIISAANQKVVSKVIIKNNKAGFNELLTIIHSLANPADIRIGFESTAHYALNLELFLENSLLTFMEVNPVLISEYKKSKTLRRTKTDSVDCESIARWLMTVEYKPHSKGFYHAYSLKSLTRLRDKLIRQRSFYLVKITNVLDHTFPEFKPFFNERLSKTALYLLENYGSAEKMARMNSASYEKLRSVSRGKFSPQQFLLLKELAVNTVGVNNSIFDVELNSLLSLYKSLVKEIDTIKKEINQLIEEVHPHYMSVPGIGPLSAAVIYSEYGDISNFTNPGQMLAFAGIEPGINESGTESHGGKMVKRGSSQLRYTLINCCLPLIRFDMTFATYYAKKRGEGKPHRVAITHVAKKLIRVIYALESQDIDFNSQELR

SEQ ID NO: 222254 - protein, 347 aa, unidentified
MLTYYIGADVHSKFTEIAIECNGKIIRRETVRTAVSNILEVLSPLNGNKFIAIEEGTMADWLYRNIMPHVDDFIVSDPRRNRLIAVDGDKDDKIDAAKLAALLRGGFLKPIYHTDDSHRAEFKQWMRIYHDRVRDSVRMINKIRALCRLHGVSIPRQVIHNSEVRALWQAELKNDVLLGQLNILWIGLDAAVTQVNHVRRIISKYSKKYPIIAAWSQVPGIGIIRSATLFAYLDTPWRFPHKNNLWKYCGVGLQRTTSGTDRWGNPNPAQLRLSSMVNRPLKSAIFGAAVSVIHDRNNVFKSYYERIRYDGINPSNARHAVARKLLTVMWGMWKSNSQFDQTLVAKV

SEQ ID NO: 222255 - protein, 344 aa, unidentified
MVVLGTDAHKRSHTVVAVDEAGAEIASVTVAATPEGHLRLVKWAARWEQRRWAIEDCRALSRRLEADLLTVGELVVRVPPKLMAGVRRSARTRGKSDPIDALAVARAAIREPDLPVAQLDGPSRDLRLLVDYRESLVKDRTAAQNRLRWRLHELEPGYDPPSGSLNRYKTLDHIDQLLGAHTSMVATLGRREVTRIRELTREANQLERDISVRVVEIAPSLLALPGCGGLTAAKLVGEAADISRFKSRDAYAMWAGVAPIPVWSANQERFRLNRGGNRQTNAALHRIAITQLRIHPDAQAFIKRRLETGSTKREAIRLLKRKLANVVYRTLLTDTQQPTLAAAA

SEQ ID NO: 222256 - protein, 312 aa, unidentified
MKNDTIGVDISKDHLDAYRLADGAARRFANDKRGHKALIAWLAETPANRVVFEPTGPYHRAVERALGASGVPFAKVNPRQARRFAEATGKLAKTDRLDAAMLARMGAVLELEARPGRSEALLELRELYVAREALVKDRTAARNRGKNLTLSLLKRQNAQRLEQIDRQIVTVEAAILGIIEADASLSDRFAILTSIPGVSNITAFALLIAMPELGALEAGQAASLAGLAPIARQSGRWTGRSFIRGGRADVRQALYMPALVAARFNPDMKAKYTQLIQTGKPAKLALTAIMRKLVVLANALLKANRPWQPKAA

SEQ ID NO: 222257 - protein, 353 aa, unidentified
MMVFVAVDVGKRRCVTCVMGQDGSILDTGSYPNTAFDASHYARLMVERYGECKAVVESTGNMCMKTYEAFESNGVEVKLANPVKTRAIAEARVKTDKLDARILAHLLRADLIAECYVPSRDVRLSRALLTHRVNITREQTRIKNRIHSLLDKYDLECEYDDIFGAHGMRWLHTLQLNGHDHEILQSLLRELEFLQDEEEKADSTIAKDALHSQYVPTIMSMTGFDYYSASVLAAYIADVSRFPSPSHLVSWVGLCPSVYQTGESLYMGRMKGGSRKVKWIMIQAANTAIRSDHRMKAYYERKLRRHHHNVAVTHVANKMLRIIWHMLRENRLYNERKERLYESKLKRMTHTAQ

SEQ ID NO: 222258 - protein, 343 aa, unidentified
MNEVTTIGLDLAKNVFQVHGIDALGQVVVRRQLRRSQLLPFFEKQAACVVGIEACATSHHWAREVAKLGHDVRLMPARYVKPYVKRNKNDAADAEAICEAVTRPTMRFVAVKTEEQQSVLMLHRTRQLFVRQRTTLINAIRAHMAEFGIVAGVGRNGVERLLRLIDEGSDERVPPVARECLQALRAQLVLVKRQILEADRRILAWHRSNELSRRLETIPGVGPLIATALVASISDPHAFGSARDVPAWIGLVPKQNSTGGKERLGSISKAGNRYLRSLLVVGALSVIRRAKQVGYTRRAWLAELMARRPVKVAAIALANKIARVAWALMVSGTRYREPVPQAV

SEQ ID NO: 222259 - protein, 490 aa, unidentified
MTDRTTQSDFRRKPRSGNDRLVGEPSPAAAVIQPVASTDPSTRYVGLDVHKQQITYCILDSGGAVVQEGEIVLTRQRLSQFAATRLRPTDRVALETTTNCWAVVEVLQQYVPHVVVSNPMATKAIAASKIKTDKVDARVLAQLLRCDFLPTVWQPDAETRLRRQVSGRRASLVGQRTQLQNRIHSVLAMRLIIPPAETSLFGTQGQTWLLGLTEKVLDADGAMMIASDLRLLKHVQSEIDRFDDRLAALAWEDDRVKLLMTIPGVSVVVAQSLVAAFGDIRRFRTADAAASYLGLVPSTRQSGNSVHHGPITKRGNSTARCMLVQAAQQYARQAGPLGHFFGRLKRRKNHNVAVVATARKLAMIAWRMLTTGEPYRYAPPQSTADKLAKLRITATGEKRRGGNPKGVRCEAKLAGGSRTIRSLDDVYRNEGLPPRLPLAPGERRVLKDTGTQPFAEQITSEQVIPRNTAKTAAHNAKNTGRQPRKSSIPE

SEQ ID NO: 222260 - protein, 479 aa, unidentified
MRPTLFSKGDALNNKGKKITKKILPVSGLPSEFEQINLNAAGIDIGAQKHYVAVAKGRDPEGRDIRYFDTFTIDLHALADWLKQCGIDTVAMESTGIYWIPLFEILEQNGFDVRLVNPRSIKHAPGRKSDVVDCQWIQQLHAYGLLTSAFHPDDQISVLRAYHRQRTMLVNHAGTHIQHMQKALEQMNLKLTNVISDITGTTGMKIIRSLLAGERDPKKLSKHRDPHCKKSEKEIAKSLHGNWRDEHLFALQQAVALYDFYQTQIVDCDKQIQAQLCRFEDRSDTGELPPAASKSSGSGKKLTFDAREHLYRMAGVDLTQIVGLNTPTVLTVLSEVGLDMSRWPTAKHFASWLGLCPGSKISGGKNFSSKSKPSANRAAHAFRMAAYSLHRSQSAIGAFLRRKKAQLGAPKAITATAHKIARIFYEMLKTRTEYKDLGVDYHQNRYKERMLRNLKHKAKEFGLELVNPNQDQLVMANSE

SEQ ID NO: 222261 - protein, 359 aa, unidentified
MRIIGCDLHARQQTLAMLDTTTGEVVNATLKHEGSIVREFYANLPRPARVGIEATGSMQWFVNLMEELGIECLVGHPAEIRAAEPRKQKHDRRDADLLLSLLIEERFPAIWLPTKELLDLRALLRHRHQWVGLRVKIQNALQAMALAHGLRRGSSLWTQAGQHAIASLPLSPHAAYRRNELLAMYEKFEAEIEKLNQRVEQQAQERSGTRLLMTHPGVGPITALATEVYLGDPARFASSKALASYVGMIPGEYSSGKRQRLGGLTKQGNPLLRFLWSEAAIHAVRRDPELKHFYRRKLIQKGLGKARAAVARKLGIRLWIMLRDGIEYNEFCRRGQMQQKSGDACAGMPEPRYGAKVTG

SEQ ID NO: 222262 - protein, 345 aa, unidentified
MSEFYEGRQFVGMDLHRRRSVLVRMTESGQHLETVRILNDRDSLAEVMSRAGECPEVVLEATYGWYWAADALAELGATVHLAHPLGVKAFSYRRVKNDQRDAADLADLLRMGRLPHAWISPPETRELRELVRHRAKLVAMRSQCKAHVHAVLAKGGIWVPMRDLFGVEGNLLLDKVTMPAPYTARIASLRRFIEAFDAEIDLFTGLVQRRLTHDAGYTAIQQIPGIGPVLAAVLVAEIGDVHRFAGPAQLTCWAGLTPSHHESDTTVRRGAITKQGSRLVRWAAIESVKILPDTSRIGAIREQVAHRRGNRNIGAVAAARRQLELVYYGLRDHHVRALHRSPRAA

SEQ ID NO: 222263 - protein, 372 aa, unidentified
MTASVIYVGMDVHKDSIVIAIAREGREPAQTWKTLPNDGVKLRKALNSLLKNGEALNVCYEAGPTGFGLCRSLRQAGISCIVVAPSLVPGKAGDRVKTDRRDACKLAHFLRSGDLTEVHVPEEAVEAIRDLERARDDAKCAERVARHQLSKFLLRHDRRFDEGTAWTKKHMDWVRKQKFSHVAQQHVLNDYVKTVEDLGERVERLTKSMEELVKDTVLAPLVKALQAFRGISLVSAVTIAAEAGELKRFQTPQQFMSYVGLVPSEDSTGQRRRQGAITRCGNGHLRRILVEAAWHYRYLPAMSKELRRRNQGVAEGVQRIAWKAQKRLNERMYHLIKAGKSTQKTVIAMARELAGFIWAVGQENTLLQEKSP

SEQ ID NO: 222264 - protein, 347 aa, unidentified
MALASISVLGVDLGKNVCSVVGLDASGKVAMRRKVRRETLIRLAEKLPPCVVGMEACCGAHHLARIFAAHGHEVRLMSPEYVRPYVKAQKNDDRDAEGIAEAATRPTMRFVDRKSQDQLDMQTLHRSRDRLVGERTALINQLRAILLERGIVAPKGRRKLGEFLADLMDERGGAELSPRMILLVADVRKQWAELDRRIAAFDAEFIQWAKENEEVRRLTTIPGFGAIVASALVAAVGHAESFDRGRDMAAWLGLVPRQFTTGGKPKLLGISKRGNRYLRKQLIHGARAALPYVAERDTPLGRWAKALMMRAHHNVAVVAFANKLARIAWAVLRRGERFAAKGVPSAA

SEQ ID NO: 222265 - protein, 397 aa, unidentified
MYIVGIDIAKRKHEAAVIDSEGAVIIKPFSFTNNCSGYNRLLAMLAKAKLPLDEVSFAMEATGHYWLALFTRLQKEGFRVQVINPVQTNSIRSFYIRQAKTDPRDALLIAEVIRFGHFSESTLHPENIYELRELCRGRHAIVSMQADVKRKVVALLDQVFPEYETAFTNLFGDTSMAILQTCPTPKELSEMPLEELCHLIEVSSHKRFRMAKAQELQALARNSFGFAMAGDVFSTMIRLYAKHLDFLKQQVREMDRKIAEIMETLDTPITTITGIGLTLGAYILSEIGDISRFSSAAKLAAYAGIDPTMRQSGEYNGVRNRMSKRGSPYLRHAIWLAASSAVLHDPALKLYFQKKRDEGKPYMASVGHACRKMVSIIYAVMRDNKEYVPCIPNEISA

SEQ ID NO: 222266 - protein, 406 aa, unidentified
MDVIYPRCAGLDVHKQTVVACARLSGDGAPKQEVRTFPTTTSGLLALADWLESLGVHHVAMQATGVYWKPVWHVLEGHFTLVLANAAHVKNVPGRKTDVNDATWLADLLAHGLIRASFVPPTAVQELRTLTRTRKQFVRERGSHAQRIEKILEDANLKLSSVISDVLGKSGRAVLQALIDGQDDPERLASCVGRVKATRSELVEALRGRITAHHRFMLKLHLDHIDTLDKAIAQIETEVGLGLEPFRQAAKLLSTMPGISSVSAHVVVAEIGIDMSRFATPAHLLSWACLCPRNDESAGKRRSTRLRRGGKWLKTTLVQAAWAAIKVKGSYLQAQFHRLRARRGANKAIIGVAASMLTAAWHMLRNGTEWHDLGAAHFDRADATKTANRLIRRLQQIGYTVEATPA

SEQ ID NO: 222267 - protein, 364 aa, unidentified
MIVIAADTHKSTHSFSAVDGQTGRVAEERTFKADAAGMLKTLRWGKGLGAERVWALEDCRHVSGRLERFLVASGERVIRVAPKLMGRSRAASRQAGKSDVIDARAVARAVLEHGVESFAAAFLDEAAMEIRLLNDHRADLVAERTRMQSRLRWHLVELDDALEARLPAGGLDRAVWLDRVDRRLRRLPQTARCRVARDELRRIRELTRSIQALEGELKTLIATQRPELLAWQGCGVISAATLIGRTAGAERFATDGHFARQAGVAPIPASSGRRDRQRLNRGGDRQLNAALHRIAVAQGRCHPDAKAYLARKQAEGKSRMEALRCLKRHLARHAWQLLRTPTDKAQTMTPNTIPNRPAAALALT

SEQ ID NO: 222268 - protein, 344 aa, unidentified
MKHYAGIDVSLEDSSVCVMDAEGLIIRETKVPSEAEALIAWFEALGIAMERIGLEAGPLSQWLYAAMAKAGLAVELLETRHVRTAFKTMPVKTDKKDARGIAQLMRLGWFRPVHCKSLPAQEVRAVLTARKLLQGKLHDVEMCIRGILRGFGLKVGPTTPRTYEARVRSLTEGHPTLEAITAALLNARGVFAQELRGFERRVRDLARQDERARRLMTVPGVGVLVSLTFVSAVDEPERFRSSRMVGAHFGLTPSRYQSGETDYSGRISKVGDTRVRAALYEAANVILTHRVRSSDLKTWALAVARRAGMRKAKVALARKLAVVLHRMLRDRTDFVPYFGAPMAA

SEQ ID NO: 222269 - protein, 349 aa, unidentified
MRFYTNQHRYYCGIDLHARMMYVCILEQSGAVVVHRNLPTTREAFEGVIGPFRGEVVVCVECIFSWYWIADLCSELGIAFVLGHALYMKAIHGGKTKNDKIDSQKIAALLRGGMLPMAHAYPQEHRSTRDLLRRRMYLMHQQSELLAHIQNTNTQYNLPGLEKRIGSPSNRTTLAEHFEQPMVRMSIEADIELLDRLHEVLLKIERTVLAEARESDPVALQLLRSIPGVGKILSLVILYEMEDVNRFAKVGNFISYARLVKCSRESAGKKSGARNSKIGNAHLKWAFSEAAVLFLKDHQAAKDWHDKLVGRYGKAKALSIIAQKLGRTVYFMLKRKEPFDSKRFFAQEV

SEQ ID NO: 222270 - protein, 413 aa, unidentified
MKAFCGIDWASDHHDVALVDGDGKLLGRARIGDDAAGLQQLLDLLAEHGDNPGDQIPVAIETSRGLLVACLRSTGRPVYAVNPMAAARYRERHTVSRKKSDHLDAMVLANILRTDADAHRQLPADSELAQAVAVLARAQQDAVWDRTRAGNKLRSHLREYFPGYLAAVQPITGGLNAPLARTLLAAAPTPRQAARLSRIQLKAVLKRAGRQRGIEAEVERLHAMLRVPQMRQLPLVETAMGRQALALLGKFEAACAAADSLAEASVELFEQHPDAAVITSFPGLGALSGARVLAEIGDERSRFADAKALKAYAGSAPVTRASGKSHTVMVRRVKNQRLAAVGYVWAFASLTASPGARAHYDRRRKTGDRHTSAQRNLYNRLLGCLHHCLANGTPYSETTAFPTAPKLELSRCF

SEQ ID NO: 222271 - protein, 383 aa, unidentified
MRIVCGLDVHKDSVFVCILNEKGEKFEAKYGVLTPELEELHQLLLTHEVKEVTMESTSIYWYPIWRILSDIECLKLVNPYFIKQLPGRKSDVRDAAWIAECTMKDLIRGSFVPDEIGQRMRQYNRRIFDLNKEKVYKLTKLDALLQRCNIRISNYVSSTDSKSYKDVVKLLSEGIVNAEKLTEAIHGRTVNRVGKEVITAALTGVVNEVDIDLIRQYREEILMDDKHLKECQEKLTEICRKEFPREFDNLQTIPGVKERSATSILSELGADMKMFITAAALVSWCGLKPRNEESAGKIKSRRITHGNKYIRKTMIECAWGASRTQNCFYSNFSYTQTVVRRKNAMKVKVAIARKMLVVIWHVLSDGVPYNDYKKPEAIAEGNS

SEQ ID NO: 222272 - protein, 386 aa, unidentified
MKNTANKEIKRINRTDNHIKGTSQAYQEQMILDMLGERNPIQPQEAPMKLYAATDLHSSNNYLAIIDENGERRFKQKLPNNPALILEALMPYKKEIAGIVVESTYNWYWLVDMLMAEGYKVHLANPVAVQKYSGLKHADDKHDAFWLAEMLRLGILPEGYIYPKEERPIRDLLRKRGHLVRLRTSLIISLQNIISRNCGKELDCNSMKRLKTNHVAPLLKDNEDLALAGSVSKESIDFLTRRIKEIESAVENKVKLQEPYSNLQTIPGIGKIIALTIMLETGHVERFADTGNYVSYCRKVHTKWMSNGKQKGKGNRKNGNKYLAWAFSEAAELARRFDSKAKAYYQRKKQQTNFMVAHNALAHKLARAAYHIMKDNVSFMPEKLFA

SEQ ID NO: 222273 - protein, 371 aa, unidentified
MDVVHARCCGLDVHQRTVVACLLTSASSGELSKEVRTFGAMTDDLLRLADWLTSAECTHVAMESTGVYWKPVYHLLEGVLQVLVVNARHIKAVPGRKTDVKDCEWIAELLRHGLLHPSFIPDRPQRELRELTRYRTSLIQERAAEVNRLQKVLEGGNIKLAAVATAIMGTSGREILAALVGGTREPTTLAQLARGRLREQIPQLEQALAGQFGLHQRFMVAQQLAPIDFLDELIERVSAEIAERMRPFAEAVTLLDPIPGVGRRTAEVLVAEIGANMSRFPTAAHLAAWAGRAPGNNESAGKRRHAPMRKGSPRIQPPRLGIFTSASSRFLTKARMLRVASDGRRKALQYAVTESGQTAPAFKRGMNGSCG

SEQ ID NO: 222274 - protein, 343 aa, unidentified
MKFKKVSTWDEFAQCSAIGVDVCKKHLDIAGLCGSVSVHRRISNTAQAIGELTEALVQQSFTGTMLCEATSHYHLVLAVMFCEAGLDIRVINPLLSSKHAKSAIRKTKTDRVDAQILATMVSNEPNLPPQLQLTRNHCLVRHTLGLILSQEQHLQGLNRSLESYQERLGQLNLETGNAYQEAVEATKQLQRSHDHMLSELESYLLETQLERQEAINRVSGIPGITRRNAALFLFMLNPTVSSAKSWIAYAGLDVAIKESGTWRGHGKITKRGPAWLRKRLYQAAWGAAMTNHQGKLYYDALKAKGRKHKEALVIMAKKLVSIMYALIVQQKTFDSSKAFQVTC

SEQ ID NO: 222275 - protein, 334 aa, unidentified
MLYAAIDIHKSVLQVALLEPATGEVSDARMPATREALRGWALPLRESVVAVALEATSGWRWVWRELSVLGFEVQLAEPAQARALRGRKRKAKNDRLDARWLALLLAKQMLPQSWIPPEEIQRLRDLTRLRQALRHDRTRWLQRLHAVLAHEGWPCGRGELASASGQRWLAGLKLDPHVRALVDAQLAMVRASAEQINAIDVELRRLARSDRRLLALQTLPGVGPVLACHLLAELGEARRFRRARQLVRAAGLDPVVHDSAETKRRGKLSKQGSPQLRWALVQAAHGAARRAGSDEQRRQRALTPRVGSQRAALTNARAIARHAYHVLAAAETAA

SEQ ID NO: 222276 - protein, 333 aa, unidentified
MDTHADTHVAAALDPVGGLLGVREFPATAAGYADLLSWLSGFGDLALVGVEGTGSYGAGLARYLAAARVRVVEVDRADRQDRHRQGKSDPLDAVSAARAAQSGRAAGEPKGRDGAVEAIRALMVAKRSARAERTQAINQARALLVTGPDDLRARFAGLTAAALADAIAALRPRPGDAAQYAVRIALRELGRRVEFLDGQLERLDDLIIPLVTARAPGLLSLYGVGPDTAALLLVAAGDHPERLRSEAAWAHLCGVAPIPASSGKVRRHRLNRGGNREANHALWRIVITRMSAHAATRAYIERRTKEGLSKKEIIRCLKRYVAREVYHHLRAGG

SEQ ID NO: 222277 - protein, 412 aa, unidentified
MKGCVVMNQNTCITIDVSQNKSHIQGFIGSNKPLSKARTMRHTKQGYQFILTLKDLIESKTNETPLIIFEFTGIYHKSLEKFLISQNLKYHIVAPLRASKARNSEIREQKTDARDCLSLSKLFYTNNLGIFYSEDETYSNLRKLNRYYDTCMKHLVKIKVNFRETLAVIYPNYKKLFTSIYSDDSLTFLKEFPHPFLYTSKSEDKIIETLKEKWNHLESWTSSKVKKLTPLVNEIVSGCNVTDPDIIMLLSYITQIEYYLNQIKVTVIKMNELAKKVPLYNLVHSLPGIQDILTCKFIAELGDISRFTNYKQIIAYAGIDPMIRQSGDKDGLHLKMSKKGNKRLRTILHLMVSSLIKANREPNAIKTKYQKKTHQLNPLKPKVASMACANQLVRIIFYMHKTSSTYKYDACK

SEQ ID NO: 222278 - protein, 348 aa, unidentified
MALTIVETHAITGGVDTHADVHVAAALDPIGGLLGVKEFPATAAGYGRLLGWLGGFGTVALVGIEGTGSYGAGLARHITTAGVRVVEVDRSDRQDRRRQGKSDPLDAVSAARAAQSGRARGASKGRDGAVEAIRALMVAKRSAAGERTQTINQARALVLTGPDDLRARFTGHTAAALVAELAALRPRPGSTVGYATRIALRELGRRAEFLDGQLERLDDLIGPLIAARAPGLLALYGIGPHTAALLLIAAGDHPERLRSEAAWAHLCGAAPIPASSGKTIRRRLNPGGDRQANHALWRIVFTRLGSDPATRAYAERRTAEGKSKKEIIRCLKRYVAREVYPHLRATAG

SEQ ID NO: 222279 - protein, 283 aa, unidentified
MSLSTTQTAGIDIGKAYLDIALYPSGAALRLANDSEGHGRLLHWLIEHDIARVGLEASGGYERGVAEVLRDAGLEVALLQPRQVRAFAVFRLRRAKNDRLDAQLIAHCTAELDSVRSAPDPRLAPFAEHLRLIKQIEADLARSKTRNEAYRCPRLKRWLAQETTRLERRLKAELLLLTKTLSAAPDLLHRLTLIESVEGVGRRTALSLLILMPELGHLTRAEIASLAGLAPFDHESGKHCGQRRIAGGRHRVRRSLYAASLAASFRWNASLKALYQRLRVVAP

SEQ ID NO: 222280 - protein, 391 aa, unidentified
MIYVGIDVAKDKHDCFITNSDGEVLFKPFTISNNREGFENLFQRIESVSDDFTKVKVGLEATGHYSYNLLGFLLDKGLTTYVINPLHTNLYRKSLSLRKTKTDKVDSRTIATMMMSDMNLKSYSDASYHNEELKSLTRYRFDKVKERAKLKSSVSRLVCILFPELEKLVPTLHMASVYALLFEFPSADAVANSHLTRLSNLLAESSKGRYGKDTAVMFREAARSSIGSHMPAKSLELKHTIKLIHELDAEIEEIENEIKSIMDEIHSPILTIPGISYRMGAMIIAEIGDFSRFDSPDKILAYAGMSPSTYQSGQLDNCYSHMEKRGSRYLRYALYNATKYVCHWDESFAVYLAKKRAEGKHYNVALSHATKKLVRTIYAMEKSGQPYQSAS

SEQ ID NO: 222281 - protein, 374 aa, unidentified
MGHDSEAFIGIDTAKLRNAIAVAEAGRNGEVRYLGEVDTSEAATRKLVAGLSARYRRLTFCYEAGPTGYGLQRLIESLGHTCIVVAPSLIPKKAGERVKTNRRDAVGLARLLRAGELTAVWVPDGRHEAMRELTRARDAGRGDLTRKRQQISSMLLRLGRYYPGIKTWNARHRSWLANLRLDHPEQRFVLEEMLQAERQAVERIGRLEQAIREALGDWSLAPIVPALMAMRGIDLVAAVTVLAEIGDLSRFESPRQLMAYLGLVPSERSTGESVKRGSITKAGNGRARRVLVEAAWAYRHPPRVGYEKQALVSAAPRPAREIAWKAQVRLCKRFRALSRKGKTSTVVATAIARELAAFIWAIAREVGKTPARAA

SEQ ID NO: 222282 - protein, 408 aa, unidentified
MKKQKVKANTVQVDLRNIVGIDIGKRKHAATAVTPKGAVIASLKSFENNQAGVDLLERQVLEPATSKSKPRIAMEATGQYWNALHDELQRRGYPCVVLNPIQTGNKGNKRIRKTKTDPTDSEMIARTILAGDAQATLVPDESIYELRLLVRHRWRMIRVHGVVLRYAIGLLDRVFPEYDGLFCKPFITSIRTLIREIGLTPKTLVSKQADVKKILEKASRKRLDAETIDELLKRAKISIGTQQGESVVNGQFRMVVDYLDFVEGQIEAINKQLQERMVASNSPLMSLGIGAEVAATILAESGDIARFPGPGEYAAFCGLDPSVRDSGDSIRGVSHISKRGSPLLRWALYVSAPTMLAKHRDFAKIYERHVNRHKGHRFALIAVAHKLARVIWRLVKDGRKFTKRPPKR

SEQ ID NO: 222283 - protein, 477 aa, unidentified
MKKTRDSNLQGPDAKPKRRRRNKGMCLEDRPVLEPNAAGIDVGAREMFVAVPPGRDEKPVRVFATFTEDLERLTDWLEQCGVTTVALESTGVYWIPLFEILEQRGIRPCLVNARHMKNVPGRRTDWHECQWLQFLHSVGLLRAAFRPGQDVCAVRTILRHRNELVAAASQHVQHMHKALTQMNLQIHHVISDITGSTGRAIVDAILAGQRDGAELAKLRDPRIKADTETIRKSLEGNWRPEHLFTLGQSRDLYRIYQQQIVNCDLEIEKMLQEFTPRIDPGERPLPPDRKRNRAGSKRRRKNGHPHPEFDLRTEAYKLFGVDVSQIPGLEENALPLFSEVGRDMSRWPSAAHFVSWLALCPDNDISGGKLLWRGARRVKNRAGHLFRMAAYALHRSLTPLGNYLRRMKTKLGPQAATMATAHKIAVIFYTMIKNQVEYDETIWDTRDAQREKRLEAKLKRQAKQLGYELVPVELKAA

SEQ ID NO: 222284 - protein, 355 aa, unidentified
MQKHHDDSKACLTAFVQDNTVIAVIEMSLANWLVAGMIPGVKREPLKRITPDPEVLLRLLYRWRDEAIKAGREITRIAVAYETGRDGFWLARWLRDRGINAYVMHATSVAISREHRRAKTDRIDTAMLRRGFLGWLRGERGHCSMALIPTIAEEDAKRPHRERESLIKQRTRAINQMKAILTQFGVRNFKPVLRKAAEKIGDVRTPEGGPLPANAAAALRRHIEHFRLINEQIKAIEKTRLQRLRQHPTDKFNTMVFLLVRIIGLGVETAEQLVHEILFRKLRDRKAVARYSGLTGAPDESGARRREKGLSRSGNGRVRKILIQLFGGCCGFNPTAGWCVGLKTEPQTPEGHASP

SEQ ID NO: 222285 - protein, 350 aa, unidentified
MLIIGCDYHPAFQQIAFVDTDTGELQEGRLQHREEAEKFYRDLAAQGMKVRVGIEASGHARWFERLLAELNLELWIGDAAEIRAKRVRKQKTDRQDAQHILSLLLEDRFPQIWVPSWENRDLRQLLWHRHRMVQARTRIMNQLQGVALNEGLRCKKRLWRESGREQLEAFRLARWASRRRHDLLEMLDRLTPTIAELTQAIEQEVEKCPAAQRLRTHPGVGPLTALAFVLIIGRAERFQCGKQVASYLGLVPLEKSSGNQRRLGHITKQGSSLLRFLLVEAAQVTVRSLPEWRSKYYHLTMRRGRKIAKVAMARKLSVRLYWMMRKEWDYGQLTKFGSHAGKLGTGDGVK

SEQ ID NO: 222286 - protein, 344 aa, unidentified
MENYAGIDVSLELSSVCVVNAQGKVLKEAKVASEPDALVEFFERLGFAIKRIGLEAGPLSQWLHAGLKGAGFETVLLETRHVKAALSAMTVKTDRKDARGIAQLIRMGWFQPVRAKSVGAQETRALLIARKQLLGRLIDVELSIRGILRGFGLKVGPVTRRNFEARIRELVAGQATLERIAGAMLSARSALKAEYGRLHKAVLAIVRDDAVCRRLMTVPGVGPLVAVTYKSAIDDPHRIVKSKAAGALFGLTPKKYQSGEKDVTGGITLAGDETVRTVLYEAANVLLSRITRFSKLKRWGMDVAKRRGSKRAKVALARKLAVILHRIWVDGTTYRSAEAGPMTA

SEQ ID NO: 222287 - protein, 355 aa, unidentified
MSQEKYIGMDVHQATISVAVLDARGKLIMECLLETKAATIVEFIRGLHGTLSLTFEEGTSAAWLHDLLKPHVSRLVVCDPRKNALLKDGNKSDRIDARKLAELLRGDQLHPVYHGEHGVRTLKELGRSYLTITQDVTRVMNRIKALYRSWAIPCAGTTVYASRHRTEWLAKITEPGVRARAERLYQQLDLLQPVRLEARRELLAESHKHSAVKLLRQIPSIGPIRSALLVALLQTPHRFRTKRQLWAYSGFAVQTHDSGEYRSVRGKLQRNRERMTVRGLNDNHNRDLKNLLKSAAISASTRPGPLRDFYVARVEKGMRPTLARLTLARKMAAISLTIWKKGVEFDPQQLHRQAA

SEQ ID NO: 222288 - protein, 463 aa, unidentified
MQKNCDKNSKPDKEVGIEGLPVIRPNVAGIDLGSETHWVCAPNVERTGLEVETFGATTPELERMAEWLKARKIESVAMESTGVYWIAPHEVLERHGLEIVLVNTRELARVPGRKKTDRVDCRWTQRLHSCGLLTGSFRPSEQVCMLRTLVRDKGNLVAEAGDWLRRMQKSLDQMNVRVHRAVSDIDGVTGMRIVRAIVAGERDAHELAKLRDRRCGKSEEEIVEQLSGHWREDHLFSLRQALKMYDAIQERIADYEREILRKLAEMERAECHGQEPAKLKNPQKAKAIQKRGEEPLRQALYRLSGVDLTGIDAIGVETVQVVLSEYGPDLSRFPSEKQFVSHVTLAPRQAMSGGKPVKKKKRGSASTRVAAALRMAALSLRHSETALGAYYRRISRRIGGDVAVFATARKLATLIYRLLRWGQPYVDVGAAAYENRYRQARIQHLAAIVKDLGYQLTPTPTNA

SEQ ID NO: 222289 - protein, 370 aa, unidentified
MAKPSMAQLERTLVTVGVDTHRDVHVARAKDQLGRLLGENTIATTPAGYRDLLDWARTYGDVEAFGVEGTGSYGAGLSRFLLSEGQVVIEVNRPSRQARRRNGKSDPADADAAASAVLSGDANATPKAGDAHVEMVRALRIARQTAIKARTQAINAMKALVVTAPSELRESLRGKSTTMQVRACARFRPGDLEGPVVAVKVALRSLATRCETLEAEIACLERHLDGLLAQAAPDLLARFGVGADSAGVLLVAVGDNPDRLRSEAAFSMLCGSSPVEASSGQQTRHRLNRGGDRQANAALHRIVMARLRWDQRSKDYLERRIKEGMSKREIIRCLKRYVAREIYGVIKIMQANDTAIAVGAVDDMAQSPKR

SEQ ID NO: 222290 - protein, 400 aa, unidentified
MTENGITFVGMDAHKQAINVAMLLPGQSQAVEWLVANEPGAIRRLAKKLEREAPGEVRCCYEAGPCGYALQRELQHAGGIICEVVAPSLIPVKPGERIKTDRRDARKLAELLRADLLTEVHTPTVEQEAVRDLGRGREDAQEDLTRARQRMGKFLLRRALMFTASKRAWGQLHRQWLRGLRFEYAADQAVFDDYLLGIEQLEERVRTLETKLIAAAEQAPYREPVGWLRCFRGIDTVTAITLVAELHDFRRFATARARMAYLGLVPSEYSSGLSRHRGSITKTGNRHVRRVLVETAWHYRHRGKAGKILRARRQDQPGSVIALAERAQERLYRRFRHLEESGKPRPKVVVAIARELVGFLWAAMLPANRAAQAKQTMTQGSRRSTIAALRSKTEVVSLNR

SEQ ID NO: 222291 - protein, 350 aa, unidentified
MLIGVDYHPSFQQIAFLVEETGECSERRLNHSDGEADKFYRDLQLRGVHVRVGMEATGYSRWFERLLAELGFEVWIGDPAEIKTKRVKKQKTDRQDAQLLLKLMMEDRFPRIWVPSPENRDVRQLLWHRHRLVQMRTRIMNQLQALAMNEGRRWKSKLWSEQGRAELEKLALAPWASRRRHELLELLDRMNPTIVELTAAAEQEARKRPEALRLMTHPGVGPLTALAYVLIIGTPSRFHRGKQIGNYVGMIPSEDSSGGKQRLGHISKQGNSLLRFLLVEAAQAAVRNNPDWRRRYMHLAMRRHKSIAKVAMGRRLGVRSYWMWRNGCAYSPSMEFGSYAGQLGTGHGVK

SEQ ID NO: 222292 - protein, 418 aa, unidentified
MNHRRPGRPVLAHGRAVVGIDIGKRTHAATAISPQGEIIAQLASFPNTREGFDRLENEVLRRAGGPGKVLVAMEATGHYWMCPRAEIERRGYDTVVLNPIQTNARCNAQIRKTRNDRIDSASIARLVLSGEARASRVPNERTLELRLLTRHRRRLLRAIGDQERFAHTLVDRIFPEYADVFSEPFLPSGEQLIRQVGLAPDSLLQRKDQVRDVLRRTSRGRLGPDTIDQLLRAAQTSIGVQQAQGVVHQQLTSILDFRHTVREQIALIEGELERRVQQLKSPLLSLGISSILAATIHAESDPIADFACADQYVAYAGLDPSIHDSGDTLHRRGKISKRGSPVLRHSLYLAAFVVYRKHNCFQRIYSKHRGKGKGHRNALVIVARHVACVIWRLLTDDRPFTKRPPKTTVRSGKQHPNA

SEQ ID NO: 222293 - protein, 342 aa, unidentified
MEQVALIGIDLAKRVFQVHGATATGKVLFRKKLAREKLLPFIAEQSPCTVAVEACATAHHWGREIQKLGHKVRLVPPAYVKPFVKRQKNDAADAEAITEAASRPTMRYVEIKTEDQQARTMLFRTRDLLVRQRTQLINALRGHLAEHGVVAPRGAVHVKRLAEAIDEESNGLPAMVRDTGRLYLEQIGALTSQVAVLEKQLRAESYRSETTRRLQTMPGVGPITAVSIENFAPPMRSFRRGRDFAAWLGLVPRQNSTGGKQRLGRTSKMGQRDIRRLLIVGAMAVVGWAMRRKEPSGSWISRMLASKPKMLVAIALANKMARGIWAMMTKNESYRTPAANAA

SEQ ID NO: 222294 - protein, 427 aa, unidentified
MKTEDSRLEEFRQLRNEIRGSEKHLLVGIDIGKEKQNAFLGTATGKTLFKRLIFENNKEGFEKLLTHTEAAKVQNNLSQAVFGMEPTANYHKPLGEYLITRGHEVVLVSGNAVSNNRQLLDGRWDKHDGKDAANVADLISQGKCQYYEYPCREVRDLRGLLSLKRKFKKQAQGLWLRIRNNLVAQYFPEMDRYYGSYTQDNLAIVRNCLSPSVIAGMEYNEFFKTVVSRKKGLRQHKHLYKIWQLAGDSICCEAGNAAVCEAEVLVEQLKQTREAIEQVEKEIEKLCCLFSEYEFLMSIPGFGPDISAKVLAYIGDPYRFDRASQVIKMAGLDLSANRSGKTTDRVVPVISKKGKADLRYALYQAALIASTRNIHFIKYFTAKLRGREKERGIKTKMRVKLAAKMLVIAWTLMIKKESFNPDYLTGE

SEQ ID NO: 222295 - protein, 387 aa, unidentified
MAKFDDFSRSLVALEQDSTLIAAVELSRSSWLVGGLVPGLRREPCKKLVPDAEALLKLLHRWREEAIAAGRRIDRICVAYEAGRDGFWLARWLRARGIECQVIHPTSIPVSREHRRAKSDRLDLGLLLRAFLGWLRGEPKHCSMVAVPSVEAEDAKRPVRERDSLVVEATRLVNRMTSLLALHGIRGFNVKLKGAPAKLALLRTAEGEPLPPNTLAELRASMYRRQVIQARIAEIETARLERLKQAPQSGPPAMIALLARIVGVGIETAEMLTLEVLSRELRDRRAVARYAGLTGSPDESGSRRREQGLAKAGNGRVRRGLIQLAWRLLVHQPDCDLVKWYRERTVDGRGVTRKTMIVAMARKLLVALWEYVISGKVPAGMRLHAAA

SEQ ID NO: 222296 - protein, 351 aa, unidentified
MQRATSTATVSANTLNCALELSKKTWLLAIQFPAREQPSVYTIKGGDGAALVAQLIAARDRWAEVSGSPPSILICYEVGYDAFWLARFLMAHGIECLVIDPGSLEVKRRSRRVKTDRVDLKKLLRTLSAWCRGERHVWSVVRIPTVEEEDLRRSHRERSRLISERTAHSNRIKGLLFAQGIGVDNIKTLALEKLVTGDGRRLLPRLADEIARQMKRLAVVQEQIDEIERERDTAPTPCKETEKKRHLLLQLKSIGPTNAAVLSREVYYRHFDNQRQLGSFLGLTPSPFKSGEEERCQGISRAGSGRVRAAMIEAAWLWVQHQILAIALWRFVELGLVPDGAIFHPRVTAQA

SEQ ID NO: 222297 - protein, 339 aa, unidentified
MTILTVGIDLAKNVFAVEGRNEKGKVELLRPAVPRAKLLELIASLPPCLIGMEACSGAHYWAREFARFGHTVRLMAPKFVAPYRRTGRRGKNDAADAAAICEAVTRPDMLFVPIKTEEQQQQLMVHRARQGFIAARTATVNRIRGLLSEFGIVLPLKADTVRRQATLHLEELPGLANTVIGDLLSELTHLDERVAQYDGHIRRLARGKDNPAQRLMRLGGIGETTATAILAMIGMGHDFKCGRQFAAWLGLVPSQYSSGGKTRLGRITKAGDAYLRSLLVLGARAVLAAAKNKTDSISTWALELEKRRGYWKAVVAIAAKNARMAWAVLAKGEAFKLPA

SEQ ID NO: 222298 - protein, 386 aa, unidentified
MQKLNDLSRSLTPLKPDRTLIAVIEMSLSSWLVAGIVPGIERQPLKKLEVDESTLLKLLIRWQEEAKKSGHSIERIAVAFEAGRDGFWLARWLRARDIEAHIIHASSVAVSREHRRAKTDRLDTELLKRAFLGWLRGERDHCKMVAIPTIKDEDAKRPNRERESLVGEQSRIVNRMKAALVRLGIRGFNPKLKKAVERLDGLRTPEGEPIPPNTLAELRRDMARRRLVSDQIRQIEDARLERLEQAPSDGPHAMARLLARVIGVGIETADMLVQEVLSRNMRDRRAVARYAGLTGSPDESGRRRREKGLTRSGNARVRRGMIQLAWRFLMFQKDSTLAQWFRARTENARSTRKTMIVAVARKLLIGLWRLVREGVVPDGVVLRPVS

SEQ ID NO: 222299 - protein, 335 aa, unidentified
MDNQYYVGIDISKGTLDWAVFDGRSIVFCTSTDNSAPGIKSALNQIRGIPGLLPQQTVFCMEHTGIYNAHLLGFLHKADLPVWLENSTQIKQASGMQRGKSDSIDARRIAEYAFRFRDRTRLWEPPRQVVQQLAFLSAARQRLIQAHKLLAVPLAEQESFVGATLQKQIRSTSKKSLVAIKDEMKAIDAQIKALIQGDKRLKELFDLIVSVPGAGPATATEILVSTNEMKAITSAKKMACHAGVAPFEYSSGSSIRGRTRVSHQARKRLKSLFHLGAMSAIQRRGELQDYYQRKVAEGKNRMLVLNAVRNKIIHRIYAAVARGEKYDGNYIVNLA

SEQ ID NO: 222300 - protein, 365 aa, unidentified
MSKDIKKPAGETRRYVGIDLGDKKSRVCILDERGEIVLQEWVVTTPEAFLKRFHGEAKMDIAMEVGAHSRWASDLLGRCGHKVVVADPRQLGLITKNDAKSDKRDARTLAQLLRADPRLLSPIEHRAEKLQTDLTVIRMRDNLIETRTRLVTSVRGVVKATGGRLPSGETSSFPQQVSDLIPEPLRPALAPVLEVIDRLNEATYEYDCLLEHWARTRYQESSRLTQVKGVGTLTALTFMLTVGDKARFSRTRDSGPYLGLRPRLGQSGDNEPQLRITKAGDGLLRKTLVECAQYMVGPFGQDSDLRRWGLKMIEAGNGSKRARQRAVVGVARRLAVLLMSLWKSGQSYDPLRHSRAQESSAEVAA

SEQ ID NO: 222301 - protein, 388 aa, unidentified
MYLIGIDISKYKHDCFIATEAALPIKAFRFDNNRLGFDLFLETLKSLDQSQDIRIGLESTGHYGTNLKQFICASGYTYLEFNPYLTHMFSKALSLRKTKTDKVDAKTISSMLGSVDYKTLHTSFYHINELKKLVRSRHTKMTARSKTLIEITNILDSIFPEFKPFFKERLPGTALFILRKFKSGSRISKFQTKDYDPIRCYSMGKFSYVRFQKLKQLAKDSIGFETQSDLFLLKEAIKSYEYLSILIQSIEEKIEIYMKDIPQTITTIPGVTTISAAIIIAELGDFKNFTNPAQVISFAGLDTSVSQSGMMETRGHLVKRGSGLLRMTFWQITFSSLRLNPVLYDYYLKKRAEGKHHKVAMVHCTRKLIRTIYYLGVNQIQFDQSLFR

SEQ ID NO: 222302 - protein, 412 aa, unidentified
MDVYCGIDWAEDHHDIALVNRDGQLLARRRISDDAAGLAQLLDLLAEHGDTAEDLIPVAIETPRGLLVACLRATGRTVYPINPMAVARYRDRHTVSGGKSDHGDSVVLASILRTDIGFHRPLPADSELAQAIAVLARAQQDAVWDRTTAHNKLRSHLREYFPGFLAAFAEAKHGILRPEARTILAAAATPGDAAKLTAAQLRALLKKAGRSRGIDAEAARLRDAFRAPQMRQLPLVEQAMGRQTLALLGQLNAACAAADDLEHAATESFNQHPDAGIITSFPGLGALTGARVLAEIGDDRSRFQHAKGLKAYAGAAPITRASGKTKSVTHRKVKNNRLAAAGYNWAFSALTASPGARAHYDRRRDDGDRHAAAQRNLFGRLLGCLHRCLTTGQHYDENIAFPGTPEKLSQAA

SEQ ID NO: 222303 - protein, 356 aa, unidentified
MKRQCVGIDIANEDFKASLARTGSDGRLLCTPSKKFDNTRSGFNQLIRWVAGEMDKDIPVVFLMEATGVYYEELAHHLHSIGKQVRVVLPNKFKHFAASLNTKSKTDAIDAKLLARFGVEREHQPWNPADPIFRQMRHLSRYRIQLQEQKTAISNILHSKDHSHEVPTDVTRSSKKIIAVLEREIEKLEQQMEKLVKSDEELYAKIEDLCSIPGCKLITASAIVAETGGFKEFTSAKQLTSYAGYDIVQYGSGTSVSGKPCISKKGNRYIRHQLFMPAMCASQHVPEFTALRERIKDRTKIPMKAQVAIQRKLLILMYTLWKTGSAYEKDHYQQKIARDKARATQDSALEQLPLEV

SEQ ID NO: 222304 - protein, 421 aa, unidentified
MKGLRSKRVRTVREGTLVATVDIGATTNTGYCTTVDGRDIKVFKFGNTREGFEKFWHLVVAAQNRFRCDEIVMGYESTGPYAEPLVHYLLNKPVKIVQVNPLHTKRLKEVNDNSPGKTDDKDPRVIADIIKLGHALSVVVPEGDAAYLRRLNNARERHVGERTALLNQMQQLVFFTFPEFKTVLKNMKGKTVRFILNTYTTPERIGALDKNVLGEEMRKRSRGKLGMKDAELLISLAQSTVGIKEGVSGIVLDLQHILAQLETVERFTAEIEGDMAATLGRIPCSSRILSIKGLGVISVAGLVGEVGDFSKFDTQSEIMKLAGLDLYEISSGKRKGEKRISKRGRSLIRKILYYAAIQVIRKNGILCHYYERLIGRGMLRMKAVVAVMGKLLGIIHAIVRDNRDYVGEYAIPKRRVIKKAA

SEQ ID NO: 222305 - protein, 310 aa, unidentified
MESITVGIDVSKDRLDVAVRPSGEAFAVERNAAGLEQLTIRLRELAPQVIALEATGGFETIAAAALAAARLPVVVVNPAQIRAFAKAIGQRAKTDPIDAAAIAHFAEATKPVPRPLPDDATRLLGDLVARRRQIIEMIGAERQREQRVTVPHLRQSITRLLKALEKELASLNTDIGDAVRGSPAWREKENLLVSVPGVGRVISSILIAELPELGQLGRREIAALAGLAPFTRQSGKWRGKSFISGGRTAVRTALFMGAFVAKRHNPVLKAFFDRLVAAGKPKMVALIAVARKLLTILNAIIRDNRPWQTA

SEQ ID NO: 222306 - protein, 404 aa, unidentified
MSVHVAPVTSSTIVVAVDVGKTSAVFSVTDGARHLLIGPSEFAMTGSGLTAAVARATAVVPLAGRVKVGVEAAGHYHRPVLDHRWPDGWEVLELNPAQVAEQRRVQGRRRVKTDVIDLEAIAELVLAGYGRLVTGRDVVIGEVSAWAVHRSRRVATRTATKNQLLGQLDRAFPGLTLALPDVLATRIGRLVATEFADPARLARLGVNRLIRFAATRNLQLRRPVAERVVAAAHDALPTRDAVIARRILAADLVLLADLDDQIQAAETALETLLPRSPYATLTSVPGWGVVRVSNYAAALGDPQRWPGPRQIYRASGLSPMQYESAHKRRDGGISREGSVTLRRALIDLGIGLWLNEPAAKNYAQGLKDRGKHGGIVACALAHRANRIAHALVRDHATYESTRWA

SEQ ID NO: 222307 - protein, 337 aa, unidentified
MLDAETGEVEEHVLEHEGEEVREFYSGLPGPVRVGIEASCATQWFLQLMEELGVECWVGHPAKIRAYEPRKQKNDRRDARLLMHLLEQDIFPRIWVPSVEQRDVRALLMHRHQWVRIRVRIQNALQSIALGHGLRRGSGLWSKDGQLSLLALSLPEHTDARRNELMTLYSQLEADIEVLDRMVAETAEERPLSRLLMTHPGVGPNTALATEVYLGDPTRFADGKAVGSYVGMIPEEKSSGKKWRLGKLTKQGNTMLRFLWCEAARHAVRHDAELKRFYTRKLAQKGLGKATVAAGRKLGIRLWIMLRDEIEYDEFCRRGRQRGEAHAERPDRERGPA

SEQ ID NO: 222308 - protein, 334 aa, unidentified
MKKDHYIGVDISKKTFDVAIYVNSKVSKGSFPHESFNNSEEGFKEMRRWLRKQNVVLSKSLFCMEATGSYTYELCLFLEQQGVAYSIQSPLHLKRSFGLTHGKNDKVDASRIAYYAYLHREDIKLSKLASDSVRKLKALIAERKSLVVEIARCKTQLKEVGEHAPSAGTIERTEALQLFLEKQVESVEKEMSQTIEADEMMNTNYYLLLSVDGIGIVNAINTIIATHNFEMFDNARQYASYIGVAPFEHTSGTSVRGRTHVEPGAKMLKADLTGAVRSCINHDKEIKHYYERKMAEGKAYGVVANAIKFKLLLRMFAVIKRGTPFVRKPEFIFR

SEQ ID NO: 222309 - protein, 400 aa, unidentified
MNSVGIDISKGRSTIAVMRPFGEVVISPFEVRHTGSELSKLAKQLKSLDGETRVVMEATGNYHASVAKLLHNAGLYVSVINAKLVHGYGNNELRRVKTDRKDAVKLANYGLDRWLTLPRYIPEEDTRLLLKNCYRQYRQYSKVQTVLKNNLISLLDTVFPNANRLFSSPIRGDGSEKWVDFVAEFWHCRCVSEKSERAFTSKYLRWCRKHGYNFREAKAHTIYAEASGHIGVMPKSETTKLLVEQAVAQLRATSTALAALKHEMQSLASQLPEYPVVMDLFDVGPTLGPQLIAEIGDVRRFYSKKALVAYAGLDAPPNDSGDVTGRHKSMSKIGASSLRRTLFLVMSVYAPLDEPVYQFMDRKRAEGKPYRVYMMASANKFLRIYYATVKAYLESLEHTA

SEQ ID NO: 222310 - protein, 317 aa, unidentified
MAHNVVFVGIDVSKADFCVFHQRSGESFTLPNTPKGHRELIARLGCPQGLCIALEPTGGCEWALWEALESAGFDTRQVSAAHVRAFARSLGNLAKTDPLDARMIARFIAFRPETGRRLPVKVIRNLNVLTSRRRQLVAMRKRLSCQMKQRHSKMTQQMDNDLMALLQAQIVQLEAQIETVLQSDNDLCNRARILRSIPGIGPVVSAALIAQMPELGCLGEKQAAALVGLAPINRDSGKYGGHRSIKGGRTWLRELLYQAALVASNHNPPLRAFAKRLKGKGKPHKLVLIAVARKLIIIANAMLARNTPWRAQGRYSC

SEQ ID NO: 222311 - protein, 340 aa, unidentified
MVHVGVDLDKRSSQIAVLSEDGEIVQHRLANDVARLEKFFADLPPHTPIAIEASGTWWWLVDLLEELGHQPVLSNPKQTKAIAAARLKNDRVDAERLALLLRGDLLPRVWIPPTALREARELIRHRIQLVWLRGVLRNRLQAMLARRNLQPTSGQSWLTHRGQRELQRLPLGETPSRIREDYAALLPTLDAQIRRLDADLVTRWGADARVRRLTTIPGIGPFIAIVLVLELGDIARFASAKRVASYIGLTPRVRGSAGRVRAGHITKEGNRLLRWVLVLAATQAVRRPGPLRAWFHAVKKRRGKKVARVALARRLAEIVFHVWKQECDYFTVVRHGVVRG

SEQ ID NO: 222312 - protein, 346 aa, unidentified
MMIIGCDFHPSWQQIAWLDTATGETGEQKLVHALGEAKKFYGQWAAPVLIGMEATGNSQWFVELAEDLGHEIWIGDAAQIRASYVRKQKTDKRDAAHILKLVVEGRFPRLWTPGREQRDLRQLVVHRHKLVEIRSRVKNELQHLSLNKGMQKKRTLWSAAGQKLLRELVLKPWAACRREDLLGLLAMLNQQIGKLDAAVQDAADEHPQAQLLMTQPGVGPNTALAYVLTIGDVSRFPRGKQVASYLGLIPREHSSGGHQMLGSISKQGNRMLRGLLVEAAQIAVRFDPGMKKEYLHRCHQKPKGVAKVAAARKLAVRLYWMLRTQVAYPEIVRIESSPRVPLVGAS

SEQ ID NO: 222313 - protein, 387 aa, unidentified
MQAETPATVVATTTPSDVDTLFASLELSKSKWLLTVNSPGGEKFSKHQLGGGDSGSLLGLLARLRTKAEQRCGRPVRVMAIQEAGLDGFWLHRLLIDNGVESTVVDPASIAVDRRHRRVKTDSVDGETLLRTSMAFARGERRVCSMVRAPSPEEEDRRRLTRERGTLLKERIQHTNRIKGLLNGQGVRDYDPLARDRIARLEAVRTGDGRALPQMLKAEIRRELERIEMATAQLAIVERARDAQLRTQAEGGENPAAMLLEIKGIGAEFASLLWLEALFRNFANRRQVAAYAGLAPSPWQSGAIDRDQGISKAGDRRLRRTMIELAWFWLRHQPSSALSRWFQERVGAGRGRIRRIAIVALARKLLVALWRYVTQGIVPKGAVLKAA

SEQ ID NO: 222314 - protein, 358 aa, unidentified
MKYIGCDFHPSFQQIAMLDKETGELVERRLLHAEEARVFYEGLKGPVLVGIEASGNTHWFESLLTRCRHELWIGDAAEIARQYGRKQKHDRQAAALILKLLMENRFPRIWVPTVAERDLRQLLIHRQHLVRMRARVKNQLQHIALNQGWQKKHKLWSEAGLKLLRSLKLEPWTQQRRDTLLEMLQELEKKIWPLDQAVEKEAQARPAARRLMTHPGVGPVIALATVLTMGDVQRFPNSRSWVSYLGLNPSEESSGERRWLGAISKQGNPFLRYLLVEGAISAARGDQSLARMYARLKAKKHHGVAKVAVARKLAVRLYWMARTQKSYPEVVRTQGSQSHPVAEIMADALSRPPASHQK

SEQ ID NO: 222315 - protein, 344 aa, unidentified
MITIGIDPHKTSLTAVALDATGRQLTTRRVTVNAGTYKTLMSWAARWPKRRFAVEGAAGLGRGIAQLLATAGEDVVDVPATLAARARLLDTGGTRKTDQADAASVAHAAMRRTRLRPVVAEDHTTQLRLLAERRDDLATERVRVLNRLHVLFRDLIPGGAPTDLTAEKAATLMRGVRPLTTTDACRRDLARDLLADLRRLDRQLTANETSTRQALPAAHTTVTDIRGVGHILAGKILGHVGDITRFPTADHFASYTGTSPLEASSGERRRHRLNTTGNRQLNSALHTVAVCQARDPGPGRVYYLRKIAEGKTPAEARRALKRRLANVIYRRILHDQQRRLARTT

SEQ ID NO: 222316 - protein, 428 aa, unidentified
MPNSDYSKQLARRQRIKGTTLVVGMDIGCEFNAMGLMNKEGEVLGRYPKIYNSRKGFDYFVKAIEDTKRKKRLNDVVIGLEPTGHYWRKIAYFAKDKGYDVKFIRTTALKHQRELDESSPAKCDIKDALTITNITREGKYIDTVIEDGLLRQLRTLASVRERIQRYNTGSKHALSAVLDDYFPELKGIFWSMKAKGLWAVLDECPFPEDALRLGPVKIAETIAKSSRRKVEATQKAIRVYQAARESIGLKQIGIADRYRVKMYIEEVKRSEEQLKDIEAQMKTLLKQITYAKYILSVPGIGVLSTAILLGELGNPFYFKHPKQIIKYSGYDPVESDSGQWIGRKRISKKGRWLLRKYLYFMAMRVVHRSPYFKSYYNRKLETKTRFGQTLTKKEAFCAVIIKLIKVIFALLRDKRTFTANAPVLALVR

SEQ ID NO: 222317 - protein, 483 aa, unidentified
MKPKSRPAECQKASPLSGDLKLIESDAAAVDVGSRSHWVAVNPQRDPNCVREFGSFTADLIRLADWLAQCRVKSVVMEATGVYWVPLYEVLESRGFKVYVVDAHTVRHLPGRSKSDVKDCQWLRRLHSYGLLQSSFRPPAQIRQLRNYLRSRTKIVEGAAQQQLRMQKALTLMNIHLHHVISDLGGLTGLAIVRAIVAGERDPKRLARLRDPRIRASKETIQKSLEGNWREELLFDLKMALESYDHFQGQIAAYDERIRQELKEVPSKVDPQSQPLPAARAKSCRKRPGMSQQDQLDLREELYRISGVDLTRIDGISLQSAQKVFFEIGTNVEAWRDEKHFSSWLGLSPNHRISGGKVLKRSSRKVVNPLSVALRLAARTLRNSHSALGANFRRLIAKIGMPKAITAMARKLAVLIYRMLKYGTQYVDKGMQHYESKYQQTKLQYLRYQAAKLGMTLVPNQLAATVIHQAQESPSKAARFAAT

SEQ ID NO: 222318 - protein, 311 aa, unidentified
MVERFSGIDVSMDRLDVLVLPDREGFSVENNAAGWAELIGRLSGSRPAAIGIEPSGGYERGVIRALLASGLSVRRINPNKLRQFARARGVLAKNDRLDAWLIAEYVAIMPTRIVQSDAAAERLAEVVTMRRQLCDEHVTVENQAAHVVDAMLRRLNKRRLARLKADIHLLDKRMAEIVAADPALAQRYQLLISMPGVGPVLAFTLIALLPELGQMSRKQIAALVGLAPYDFDSGKLRGHRSIYGGRMPVRNVLYMAALSACRYNPALKTFHNRLAAANKKSKVIIVAVMRKMITTLNAILRDKTEWLTKAA

SEQ ID NO: 222319 - protein, 355 aa, unidentified
MNVNVNHYIGFDVHKKSISYCVKLADGRIVEEGKLAARRVTLCQWASKRAEPWHGAMEATLFSGWIYDTLKPFAAKLEMGHPGRMKAIGASKKKNDKLDARTICDLIRANLLPACWVAPSEMRELRRILRYRNLVLEQAVRMKNKISGLLMESGVEYNKKRLHGEKYFHELLENLAAEVPESVKDLLKLSRGWLESFQATQQQLLVKLQKHPILMERLKRLKSIRGVGEVTALTWALEIGDPHRFSSIGDAVSYCGLTSALVESADKQKRGPISKQRNAHLQTVLIEAAKVAPRWNPQLAELHQAEIDSGNHRNRATLEVARKLVAYLLAVDKSGKDFAVRTPSAKPEGEVKPAA

SEQ ID NO: 222320 - protein, 426 aa, unidentified
MNYTQNSKIAQVTEKTLVVGVDIGSETNFARAFNWRGQELSKKVFRFSNSLEGFQSFLAYLGRYKATASAEQIIVGCEPTGHYWFNLARYLKEQHINLALVNPYHVKQIKELDDNSPKKTDLKDPKTIAKLVVDGRYSYPYLPEGIYADLREAVSSRDRIVKELNAATNRIKRWLKIYFPEYLTVYKNFSAESGLTVLERAPLPKDVVKLGAEGINRLWRDKKLRAVGMKRAQTLVQAAHNSIGLDGGECARMEVQLLLEDYRTKEAQLEKVTAVLEAETLKVPYAEKLLAIKGVGLITVAGFLSEVGDIRRFDSPKQIQKLAGLELKENSSGKHRGRTSISKRGRKKLRKILFQVMLPMIRNNAEFREVYEYFTTRQKNPLTGKQAIIAAGCKLIRVFYAILKRGVDYDPQKLRMDIIRPELAAA

SEQ ID NO: 222321 - protein, 460 aa, unidentified
MNEYFIGIDASKGYSDFVMLNAKKQTVIDNFQLDDTFDGHAQLYELLHSFNKDNPEATIYAAVESTGGYENNWFQSLVTFQASLPVKTAHLNPLGVSHNSKADLKRNITDRISAKNVAEYMIAHSEKVSYQHQDSLASLRKQWGFITMLTKQSTQLLNQLESLVYNANPEILTYCKDGCPQWVLKLLSSYPTALRLSRAKVKVLARIPYISLDRAKQLIATAKKSVASASDKITEQLIVATVKQIVHLKKTIKVQSEVLANECQIPEVALLKTFTGIGDYSAIGLMLQIQSVNRFLTSKKLASFFGIHPEYKKSGDGTYKYRMSKKGRKEGRRVLFIVAMSAIQSNPLIRDVYQQAVERGMEKMSAMGLCMHKILRIVYGMLKHNKAFDPQVDLKNRQKKPSRQRKVGQDKDRRYQNFDSNAPISRRQKMKRKERKQSQNVINVEYGISEASVPSTQLAN

SEQ ID NO: 222322 - protein, 401 aa, unidentified
MTVPTHEQIEVFLGVDVGKGQHHAVAVSRTGTILFDRTLPNDETRVRELIDTLTQHGPTILVVDQPATIGALAVAVAQDMGIAVGYLPGLAMRRIADLYPGEAKTDKKDAAIIADAARTLPHAIRHLKATDTQVAELSILSGFDDDLAMQITATSNRLHGLLTQIHPALERAIGRHIAHPAILDLLEHYPTPAQIRRLGYARLATRLSKNAPRMGARLAGDITTALSEQNVVVIGTSAAETVIPKLAEQLSSLQRQRSDVAAKVEALVEAHPLYPVLTSMPGVGIRTTARIITETSGKHFATAGHLAAYAGLAPVTRRSGSSIRGEHRSRRGNKKLKRVLYLSAFAALQDPDSRDYYDRKRAQGKSYNQALVALARRRCDVLFAMLRDGTTYQAHPRPSAA

SEQ ID NO: 222323 - protein, 457 aa, unidentified
MRKKSKRTKGIEEAHPFSGMSRIHPHAAGVDIGAIEIVACVAGDENTQIVKAFGNYTVDLQALACWMKDHQVKTIAMESTGVYWIPLFEELERQGFECLLISSRFLRRVAGRKSDISDAQWIKTLHTYGLLEGSFRPQGDLVALRTLLRHRSQLVEHRSPHIQHMQKALLQMNVQLSQAVTDVTGMTGQKIIRAILTGERDPQTLAAMREPGCKKSAEEIGKALTGSWREEHLFVLNQSVMLYDFYTEQIQACDLEIERLYGLTRPDWDRGEVQPLIKRKKNSHSKNLPHNAEEVRKHLKRISGVDLSAVDGFGVSLAQTVIMEVGTDMSKFPDEKHFCSWLGLAPKHEISGGKVLKNNTLKTKNRAGQAFRMAAQSVKQAECVFGAFYRRLRARLGPSQATVATAHAIARVVYRMLKYKVEYEPLRVNEYQKHYEEQQIKYLKNRAAKFGFHLLPT

SEQ ID NO: 222324 - protein, 265 aa, unidentified
MKTNTNQNINVGVDTGKFQLDIYIRPLDIFFTVANDDKGIKEAVSRIQKHKPERIVIEATGRLEMPFIMACANANLPFVIANPVHIKRFAGAIGQRAKTDKLDAQLIAHYSEAIKPRLSTLKPDIMRTMSDLVARRNQLLVMQTMEKNRLQILPRELVMTIKPILTVFKNQIEKIETKIVKLIESCPDYQAKNVILQSMKGIGKIAAASIISNLPELGYINNKEASSLVGVAPMNKESGRFKGHRKIQGGRHQVRTVLYLSLIHI

SEQ ID NO: 222325 - protein, 324 aa, unidentified
MSNATSSQTVFAGVDVGKATLDLALSFHEDQFLQKQFPNTLEGRSELIALCAKHHVQLVVLEATGGLELDAAAELAQAQIPVSVITPAQSEAFRRALNLQAKTDRIDGRMLALFARKMTPPASEIPSETQRNLRELAARRRQLTQQLVQEKNRLQQARDRRVKASIQKVIAFLEEQLADIDGHLGQLIAADPQLQLTVERLDSVPGIGKETARQLVVCCPELGSLNRQQIASLAGLAPFNHDSGSSTGQRAIRGGRSSVRTSLYMATLTAIRSNPKIKDFYLRLVQAGKKKMVALVAAMRKLLIMLNSLIRQQKTWPQFVSQSA

SEQ ID NO: 222326 - protein, 428 aa, unidentified
MSPIHPSHEAQFAAVVGIDWGDKKHAWSLLPVGSDQRERGEIEHTPEAVESWVSMLSARFNGQPIAVALEQSRGALVFMLAKYAHLHLYPIHPRAAAQFRAALYPSGAKDDPVDGDILLELVLHHRAHLRPLQPDTEQTRLVQHLVEARRRLVNEKTRQVQRLTDKLKLYFPQMLSWFEKVDSPLVGALLLRWPTLEDLQKARPATLRSFLTQHNCRSQELIDERLKQIPHAIPAIRDVAVIQSAAGMTQILVELIATLRQGIDKLEKQIGQAARAHPDFPIFDSFPGAGPALAPRLLAAFGSLRDRYAAASDVQKFSGIAPVMERSGKTEWVHFRRACPKFLRQTFHEWAGHSIAFCEWARLYYEQKKRGGKDHNAAVRSLAFKWIRIAFRCWQDRVPYDDARYVASLHRHGSPLAAALAVKKSDLI

SEQ ID NO: 222327 - protein, 311 aa, unidentified
MTDHSIGVDISKSHLDVFRLEDGASRRFENSAAGFRALARWLGKAPVARIVFEPTGPYHKAFEAALGETFPLVKVNPLQARRFAEAHGTRAKTDVVDARMLARMGAAFDLEPQAPCSKETLVLKELHVARAGLIKDRTRLRNRAQTQDVAILKRQTKARLAQVERQIAELDAEIAALIEAHQTTARNRDILCSMPGIGTVTAAAVLTLMPEIGALDRKQVASLTGLAPSTRQSGQWQGKAFIGGGRKPLRDALYMPALVAMRFNPDLKARYEHLRAAGKPAKVAIVAVMRKLIEMANALVKADRKWTPKTA

SEQ ID NO: 222328 - protein, 326 aa, unidentified
MKAFIGVDVSKNTLDVAALAAKKIVFRGKFGNNKKGIADLIGKAAQKLKAYELVFGCEATGVYHELFAKTVYRAGYDVAVINPRLVHHEFESMGRKTSTDRIDAQVIAYRLSREQDRLWEPCDADQELLRDLIVRRDQILKTFQAEKSRLDRFPEGNRVRKSVKRIIKTLEKELAEIEKEIKGTVESSAVLKEKTELARSVPGVGKLVAASFVAVVGDVGKFDNAGQLTSFLGLCPRQKISGTSVNRSYLSRNGDGLLRRHLYMGAVSTIARNNVYHDYFDSLVGRGKCKKQALAAVMRKIARAVYAVLRDNEPFTIENYGINPII

SEQ ID NO: 222329 - protein, 402 aa, unidentified
MKLQAIKTIGVDVAKSVFQIHGTDARGTAVLRRQLRRAQMLPFFVQLPPCLIGMEACAGAHHWARELRKMGHTVRLMAPQFVKPYVKTNKSDRADAEAIAEAVTRPGMRFVGVKEVWQQDLLAEHRARDLQVKTRTALTNQIRGLLHEYGIVFARGSAKLHEGLLNLLASEDERLSAGMRQLLQRLLEQWLFLERALDTSETTLVRESRSREVCRNLEKLPGIGPITSTALVATVGDPSVFKNGRHLSAFLGLVPRHTGTGGKMRLGGISKRGDRYVRKMLVHGARSALKAAAAKNHEHPPWVVRLADRRGFNKACVALANQNARRCWAIMAGREVPAAATSLHAASATHAEGAFPTALPLGRLRSPRGSAVENACRHDIPRRQRKCRTGCPQTGLPPAGGR

SEQ ID NO: 222330 - protein, 343 aa, unidentified
MTNRSKQVVETFAGIDVSARENSVARIQGEENSTCTTFANNASGHKALLAFLLQGTERVRVCLESSGNYSLDLALALHAHPQVEVSVINPRRARRFAESLGERSKTDPVDPRVLCQYAARMPWVAWQPPTSVALRLRAITRAIESLGVMHTQESNRAHALSSSQALPALVLRETQRHQRYLEHRMKQLRREALRLIARDRELDRRYQLMLTVPGIGETSALHILGELVVLSDALDARQWVAFSGLDPSHFSSGTSVEKRPRISRGGSRHLRRALYMPALVALRREPHLRAFYQRLLSRGKARLQAVVAVMRKLLHALFAMFRSNQSYDGSKLCPIELTNKAAA

SEQ ID NO: 222331 - protein, 366 aa, unidentified
MLKINPLSTLYVGIDVSSKSNYVCALDFFKNKYINSSFANNQPGAEELALKILECLNQHPDLTMVVAALESTSVYSIHIANYLSSCEELMRFKPYVFVLNPKCTANYKKSYIGLGKSDPIDAFVIADYARAGNIESEPWLGSQFLALKRLTRHRLHLVECMTREKTYLISNLYLKFSELQMLEGDDQPFCDIYGATSSSVLMEYLSPEEILASSEENLIAFLAEKSRNRIKDISKTADLLKKAARDSYRLDKALYEPLNVSIASSFNCIETFKREIKVIDNAIEKEIKGLNPNAFIILQSIDGIGPVFAGGIIAEIGDITAFHSSDALAKYAGLTWKSNQSGDFYGEDTPMESIRNYTPSVYNSYP

SEQ ID NO: 222332 - protein, 342 aa, unidentified
MQISTIGLDIAKNVFQVHGIDAAEKVVVRKRLRRRQVLEVFKALPRCLIGMEACATAHYWARELTKLGHEVRLMPAKDVKAYVKRNKNDAADAEAICEAVRRPTMRFVRIKSAEQQGQLMQHRTRDVLIRQRTQIINALRAHLAELGLVAAQGNAGVNELRAIVTDEQDTRLPIDARASVIVLAAQLEALESVIGAIEKRIKMQHRSSEASQRVEAIPGIGVIGASAIVATVADPTIFRSGRDFAAWIGLVPRQDSTGGKQKLGPISKQGDRYLRRILVVGAIAVLRRAQENPGKYPWLTQLLARRPFKVVAVALANKMARMAWALLAHGGTYRAPELAETA

SEQ ID NO: 222333 - protein, 350 aa, unidentified
MTEHNAKPAIKIVAIDLAKNSFHVHCADDQGRKVMSKKMSRKKLSKFMVNLSPCLVAMEACGSAHSWGQKFQSYGHDVRLIAPQFVKPFVKSNKNDAVDAEAICEAVQRPDMRFVAIKSVEQQDIQSLHRMRGQSIKHRTALVNQIRGLLLERGIVIPCGRAKVLERLPEILEDAENGLSGRFRLLLNGLKDELRVIDERIAVYDQEINQIAHHSEAAKQLMSVPGIGALSATALLAHIGDVRLFKDGRELAAFLGLVPRQRSTGGRPTLLGISKRGDVYIRTLLIHGARAVLRFADKKQDRTSRWVCDLMNRRGKNVAAVALANKMARTVFALLSQGEKYAVAAVAEPM

SEQ ID NO: 222334 - protein, 406 aa, unidentified
MSQQVFVGLDWAEDHHDVYIEDEGGGHLGGGRLPEGVEGVARFHEWVARHVDDPGDAVIAVETDRGLFIGALVAGGYVVLAVNPMSTSRYRERHSTSGAKSDLGDAKVLADLARTDAHNHRRVAGDSELAEAVKVLARAHQSMIWTRQRQTNQLRSTLREFYPAALDAFDDLAGRDCLALLRIAPTPSAGRGLSRSKIAAALRRAGRQRRIDERAVEIQTALRAEQLAAPPVITDAMGATVIALVAVIAELQTQIARLETELADRFEQHPDAKIIRSLPGLGMTLGARVLGEFGDDPNRYATAKCRKNYSGMSPITRASGKSRVVLARYARNRRLADACYQWAFATLTASPGARAFYDTRRTAGDTHSRALRALGNRLVGLLHGCLRHGNLYDEHTAWGHRQQLAA

SEQ ID NO: 222335 - protein, 414 aa, unidentified
MAAVSCGIDWAQDHHDVAVVDEHGAVVCAERIGNDAAGLARLLEILVEHDPADRRLEVAIETSRGLLVAGLRAAGRTVFAINPLAVSRYRDRYRSSRGKSDTFGAMVLANILRTDRNAHRPLPDDSEQVRVLQVLCRAQQDAVWDKITITNRIRALLKAYFPGAVAAFERGGKHRLESASCRTILAAASTPGEAAALTERRLAVLLRKAGRKRGIDAEAARLHDYFHNEQMHQPEAVEQAMGVALRGLVRQLDAICDALAELETLIDAAFLAHPDGRIISSVPGLGVALGARLLTEIGDDHTRFAAGRALKAFAGAAPVTRASGRSTFVHARRAKNNRMAAVGYVWALAAVRHDPLWEARYRARRAAGDRHVTALRKMFNSMPGKLHHCLTTGELYQPDEAFRPHLPAAEAPAA

SEQ ID NO: 222336 - protein, 344 aa, unidentified
MDKSITVIGLDLAKSVFQVHGINAEGEVVIRRKLSRSRVLAYFNQLEPCLVGMEACATAHYWGRELRALGHDVKLMPPQFVKPYLKSQKNDMRDAEAICEAVTRPTMRFVPIKTPDQQALLALHGVRDHWVRLSTRLINTLRGYLAEFGIVAARGRMGVEAILDTLADDQDDRIPDLARECLRPLASELRHVKRQILEMDRKILKAHRANSICQRLETIPGVGPVIATRVVAEVPDPKIFKSGRAFSAWVGLVPKQNSSGGRERMGQITKKGNPELRRLLVAGAISMIIRAKRSDFTRHPWLSRLLERKPMMVVAIAMANKIGRMIWALMTKGEKFNPAKLMPA

SEQ ID NO: 222337 - protein, 343 aa, unidentified
MKISRVGVDLAKNVFQLHGVDRHGKTVLKRRLSRDKWISALIKSAEPSCEIGIEACGGAHHWARLLMAKGFTVKVIPPQFVTPYVKSNKNDANDAEAICEAMSRPNMRYVTAKTVEQQDIQATHRVRSELMCHRTAKANQIRGLATEYGLVAPLQIASLRAAIPRWLEDAENGLTSRFRALLHGLWDDLIRLDQRIETLNGEIGSIAKSDPLAQRLQQLRGVGPLVATALIATVGSGKQFDKGRQMAASLGLTPRQHSSGGKDRLLGISKRGDAYLRSILIHGARAVVAKAKHKEDRLSRWVTELAERSHPNVAAVALANKTVRMAWAMMNHDADYDPEFAVS

SEQ ID NO: 222338 - protein, 410 aa, unidentified
MLWGGGEEIASIVADVNRWSPPMQMQTPNDLRQSRIVLKQDSTLIAVIEMSLSSWLVAGIVPGVERQPLKKLAVDESALLKLLNRWREEAEKAGRKIERIAVAFEAGRDGFWLARWLRARGIEAHVIHASSVAVSREHRRAKTDRLDTELLKRAFLGWLRGERDHCKMVAIPTIEDEDAKRPNRERESLAAERTRIVNRMKAALSRLGIRGFNPKLKKAAERLKDLRTPEDQPIPPNTLAELRRDMERRRLVSDQIRQIEHARLERIEHAPSDGPHAMVRLLARVIGIGIETADMLVQEVLSRNMRDRRAVARYAGLTGSPDESGTKRREKGLARSGNARVRRGMIQLAWRFLMFQKGSALAQWFRARTENARGTRKTMIVALARKLLIALWRLVREGVVPDGIVLRPAQ

SEQ ID NO: 222339 - protein, 362 aa, unidentified
MTATHSTVSTLLVAIDISKHRHEVLIGIPGKKRRRRLTVMNTLEDFQRLSAALASYDLPVRIGFEATGNYHRTLAHHLGQAGFEQKLISSVGLVRTREALHNSWDKNDPKDAQVILHMLEIGAVQFFHDPLVTGTADIQELSKTHEIVSRSKTELWHRILTHYLPLYFPEAERFHRSSRTDWFLAFLEKYPTPHMISAMSRDAFIADAWQVVGCKVSKELMLSDIYATAVGSVGLPIPPESDAVRMFRLVLAEGRSLIRQRNEIEARAVELLSDLPDYQLLTTTPGIGPINAMTILAEAGDLRRFRHHRQFLKFCGMDLATVQSGMFRGQSKISKYGNARLRRMLWMAGQTAVLKRTNSFRE

SEQ ID NO: 222340 - protein, 308 aa, unidentified
MCCVLMVVIAPKKKFANTTKGHDELVSWLKGHKIDHAHICIEATGTYMEPVAECLYDAGYIVSVINPALGKAFAQSEGLRNKTDTVDARMLAEFCRQKRPAAWEAPHPLERALRALVVRHQALTDMHTQELNRTETAREVQRPSIDAHLLWLEAELKRLEKQIKDLTDDDPDMKHRRKLLESIPGIGEKTSAVLLAYIGLKDRFAHARQFAAFAGLTPRRYESGSSVRGASRMSKAGHVSLRRALYMPAMVATSKTEWGRAFRDRLAANGKKGKVILGAMMRKLAQVAYGVLKSGVPFDASRHNPVAA

SEQ ID NO: 222341 - protein, 482 aa, unidentified
MAKRKVSTFERLRSGKMNRKERKEWQQRLYAEDAGLEVIHPDAAGIDVGNASHFVAVPPDRDEQPVREFGSWTADLRRMAEWLKRCGIRTVAMQSTSVYWVAVQEILEREGFEVYLVNARGTKNLPGRKSDVQECQWLMKLHTYGLLRNSFHPPEEIRAVRTIWRQRDRLVKEAGREVQQMQKALTTMNVQLANAISDVSGVTGQAIIRAILQGERDPQQLAKLRDWRVAATEAEIAHSLEGNWREDVLFELQQVVDAYDFHQKQIAACDVQLQKYLSALPMRNGPGAGERSTANAPSERPKKQRKHKSQKNQPTFDLAAELQRTMGVDLTAIDGVDVMTTQVILSELGPDLSASFPSEGHFTSWLELAPRRDVSGGKIIRQKSRKSNNRVATALRMAAQSLWRSDSYLGARYRHLKARLGGQKAVKAMARYLACLIYRLLTKGQPYVDRGVAHFESKRTERELLALRRKAAELGMQLVAVS

SEQ ID NO: 222342 - protein, 353 aa, unidentified
MTYVGIDLHANNMVIVAINSNGEVIREAKLPTSTRALEDFFNTFDGPVRAVVECTSSWYWLSDWCRANGVELTLAHSKMVKAISYAKVKTDKVDAKTLAELLRADLIPEAYQIQHDRRELRELTRGRLRLIQWRGKLQSTLWNQAIKYNVQISGSQWRYLDKLQDWLVPQLPPAASLQAELMLHQISQLQQHIHRLEEEIEKQIPFEASAERLMAVPGMGKVGAWTILAEIGDINRFPSAKQFVSYCRLVPGAKDSGGSHRHKSGNKDGNKYLRAAFGQAAVSAYTHYKVVKKFYRKIKRRSGKPIARAVVAKELAKGVWHMLTKNQEYKGFKGQPVQAASQTCWPQPISPYA

SEQ ID NO: 222343 - protein, 335 aa, unidentified
MLYAAIDIHKRMFQAAVLDVETGETVERRFGATREELSDWAMPLQGKLAAVAIEATNGWRWVWRELSARGFDVRLVDPAQAKALRGRIKRAKTDRLDARWLCVLLAKEMLPESWLPPAEIQALRDQTRLRKALAEDRTRWAQRLHALLAHEGWPCQRARLLTVEGRRWVNALSLSPAARSQVERLLRLIEAVEDELRSLETELRRFARSDRRCIALQTIYGVGPILACHLLAELGEASRFRRARQAVRAAGLDPVVDESGETRRRGRLAKHGAPALRWALVEAAQHAQRANSPDRGLYTQAATRVGSKRAVLTVARKIGRRAYHVLHELETQAAA

SEQ ID NO: 222344 - protein, 307 aa, unidentified
MFVGIDVSKDRLDVHMRPGGESFTLARDGEGLAKLCKRLSRRRPNLVVLEATGGFETIVASALAAAQLQVAVVNPRQIRDFARAAGRLAKTDAIDAEVIAHFAKAMQPAARPLASDDALLLGELMARRRQLIEMITAEQNRRSRLASRSLLKAIDRHLALLKQYLAELDAEIDTTIRGTPIWRAKEDLLISAPSVGHKIARTLIAELPELGTLDRRKIASLVGVAPFNRDSGTFRGRRAIAGGRTPVRNALYMSILVAIRRNLPMAHLYHRMRQAGKPAKVAIVACMRKLLTILNAMLRDQKPWKAA

SEQ ID NO: 222345 - protein, 418 aa, unidentified
MSSTLTRKLTRVKPRTLYAGVDLALERNVVQVLSERAERLARFSFPNDRDGYDYFLHRLDKLKDHYQAPDVLVAMETTNYFWKLLATELEQRRVEYRLVNSYTVKKHREGNQLDRSKDDQRDAYTIADLLRTGKYTETQLLHGGYAELRQQVVLHDRLKGDVRRQKTLIDNIVGQLFPELCGAFKDLTMATPLAMLRRHGAATMIRHMSQGAFVASVRADFQGHRLMVSQLCRAHRLAAQSIGLQQGVQGLQLALRLHIETLETLQQQVLETEAALIDTFLALPEARYLLSVPSIGILTAATILAEIGDPSHYRNGRQLVKLAGIQPVPNKSGNKSHSRTPMSHKGRPRLRTAVFFAVMRLVHRDEAFAHVYYCLQHREEDPLTKMEALGALMNKLLRVLWSLMRYRRRYDPAVLLRT

SEQ ID NO: 222346 - protein, 388 aa, unidentified
MYYCGIDVAKRKHSAMVLNERAETVQQNFTFGNDREGFDKLLAALAPFSGELVVALEATGHYWLSLYECLAAANHPVVVLNPLQVHAYQRSGVRKRKNDRIDAFWIADYARISNSQATNQAAPELLQLRDLTRFRLRLRENIGDCKRKLLSILDRVFPEYETLFSDVFLTTSRQLLAQAITAQEFADFDLAELTELLASASRGRFGQDKAEAIIEHARRSVGVNLFANSARLQIHCLLEQLNLLEQQTQQIDQSIEALMNQLPQHITSIPGVGPVTGAAILAEIGDIHRFEAPEKLVAYAGIDATVYQSGDFEAAEAHISKRGSPFLRLAIWQAAGMAAIYDPQLNAYYQQKKAEGKHHGVAIGAVARKLLARIYIILKENRPYEIRY

SEQ ID NO: 222347 - protein, 392 aa, unidentified
MYIVGIDIGKNHHEASIVSPEGKQIGHSLRFATTHKGADSLMSFIFNNIGNSSCIFGMEATGHYWYPIYSFLKARGYTIYVINPIQSDSLRKMYIRQTKNDSIDSFLIAEVIRFGQFTTTSMADENILAMRQLCRYRDSVISSRTEIKLRIGTIMEQIFPEYEKQFSSLWVSTSMGILEKYLTPENIENAPIDELFEIIKDKSHNKLTMKKAISIREAAADTFGIKIAQDAFSFQLKQLIDRMNFLDKQIEALDCQILEYYEKFDCYLHTIPGIGMIAAATILAEIGDINRFKSSSALVAFAGIDPTVRQSGEFSSTHNHMSKRGSPYLRHAIFLAATTCSFHNSPLNAYYKKKSDQGKHHLTATGAVARKLTTVIYAVLRDSKPYEPKKFW

SEQ ID NO: 222348 - protein, 343 aa, unidentified
MQIVRIGLDLAKYVFEVHGVDAEDKVVLRKTLRRDSVPQFFASLSPCIVGIEACSGAHYWAKALSDLGHEVRLISPQFVTPYVKSNKSDRNDAEAICEAVGRPSMRFVPPKSSEQLEIQAVHRIRQRLVSDRTRMVNQIRGLLAEHGVVIGREISRLRRGLREIVDGADNSLGDIIRELVQEVHEELVELDQRIASYNRRIRDLFRTNEMCQRIGKIEGIGPITATALVAAVGDRTCFKNGRQFAAWLGLVPKQRSSGGKARLFGISKRGDRYLRTLMIHGARAVLGKAGGKQDPRSQWIGRMRERRHPNVVAVALANKNARIVWSILAGSETYRAAQTNVSA

SEQ ID NO: 222349 - protein, 343 aa, unidentified
MQVIIGVDPHKASHTAVAIDAKECQLSAKKVRATRAQVSQLLEWAEPFPTRTWAIEGADGMGYLLAQQLVATGEHVLNVPATLASRIRLLGTGHSSKNDPNDALSVAVAALRTSGLRQVRPVGHGEVLRLLAKRNSDIGRQRCRVVSRMHALLLELDAGGIAKEIKASDVDRFLAAVQPTTPAEQIRYDVALELLADIRRLDEQLKTSHKRIATAVAASGTTVTDIFGIGPVIAAMLIGYTGDITAFANRDRYAAYNGTAPVEFSSGGRTVHRLSTRGNRNLNHALHLAAICQIRHAHSDGRAYFDRRIAEGKTKKEAIRALKRQISNSVYRHLVADTASTRG

SEQ ID NO: 222350 - protein, 350 aa, unidentified
MRIIGCDYHPGFQQIAFVDIETGECGERRLQHREEAEKFYRDLAVQGMKVRVGMEASGHARWFERLLGELQFELWIGDAAEIRTKRVRKQKTDRQDAQLILRLMLKDDFPQIWVANWENRDLRQLLWHRHRMVQARTRIMNQLQVVALNEGLRCKKKLWREAGREQLESFPLAPWACRRRRDLLEVLDRLNPRVAELSQAIEQEAEKCPAAQRLRTHPGVGSLTALAFVLIIGSTERFQCGKQIASYLGLVPSEDSSGDRRRLGHISKQGNALLRFLLVEAAQVTVRSLPEWRSKYFHLAMRRGQKIAKVAMARKLAIQLFWMMRKQWDYEQVRRFGPHAGQPEHRRGVQ

SEQ ID NO: 222351 - protein, 367 aa, unidentified
MMGWMAPLRHRRAKLVFSRITRNREPSMSEITTIGLDLAKHVFQAHGIDAEGTTVLRKRLRRGQVLAFFSRIPRCVVGLEACATAHYWARELGALGHEVRLMPAQYVKAYIKRNKHDAADAEAICEAVQRPTMRFVPVKTTEQQATALLHRGREQLVRQRTMLVNALRAHLAEFGMVAAQGLRNVGELIAIVRDDGDTRLPDVARQVLQVLAAQLEQIEAAIAALEKQLMAWHKTNAVSQRLASIPGIGPIIATAIATTVADPGVFRSGREFAAWLGLVPRQNSTGGKTRLGGITKRGNRYLRRLLINGASANLLRSKATKADPWVIGIRRRRPPLVVAVALANKTARIAWAVMLRQKEYQPRAVAA

SEQ ID NO: 222352 - protein, 413 aa, unidentified
MDIMYSCCAGLDVHKETVVATVRRLNTKGKACQETRTFGTMTGELLELADWLAQEGVTHVAMESTGVYWKPVWNLLEDQFTVLLVNAQHIKQVPGRKTDVKDSEWIAQLLQHGLLRGSFVPSTPQRQLRELTRQRQQLIRTKASVANRIQKMLEDANIKLASVASDVLGVSGRDMLRALIAGEEDVEVLAGLARKTLRAKIPALRKALRGMVTEHHRFLLQLLLDEVTHLERLIARLSERIGKVMPEAYGKALQRVLTIPGVDERAGQCLVAEIGADMKPFATAGHLASWAGMCSGNRESAGKRKSGRTTKGNRWLRGTLVQVAWAASHTKDTYLSAYYRRLAGRRGRKRALVALGHTILVIVYHLVKLETTYRELGADYFDRLNSERLKRNLVRRLEGLGLDVTLKPKEPAA

SEQ ID NO: 222353 - protein, 368 aa, unidentified
MNTVKFIGMDVHKKTITIAIIDEGRKNQPRIYGAIANELQALDKFCRKMVSTSTRLHFVYEAGPCGYGIYRHLTQKGFDCMVAAPSMIPKKNGDRIKNDHRDAAMLARLHRAGELTAVYVPDARDEAMRDLTRAREDAVAAARKSKQRLNAFLLRNGLTFAGRTKWSKAYFRWLSDITMPYPAQQVALQEYIDTVHENLQRINRLTDQIRQLVPHWRFAPVVSALQAARGVSLIVAVTVLAELGDLSRFDNPSELMAYLGLVPSEHSSGESIKKGAITKTGNGHARKALIEAAWAYRMQARVSRALLKRQQGVPERVCQIAWKAQLRLCARFRRLTARGKTKQKVVTAIARELSAFLWAMAKQLQPVT

SEQ ID NO: 222354 - protein, 346 aa, unidentified
MMIIGCDFHPSWQQVSWLDTETGETGEQKLVQASGDAERFYRQVAAPALIGMEATGNCHWLVDLLAELGHELWVGDAAQIRASYVRQQKTDKRDAAHILKLLVEGRFPRIWMPSSEVRDLRQLLLHRYKLVIMRARVKNELQHLCLNKGVQRKHKLWSAAGQQILRELPLQPWAGRRRDDLLKLMAMLDQQIEPLDQAVKAEAQRDKMALLLQTQPGVGPITALAYVLTLGDVSRFPRGKQVASYLGLIPREHSSGGRQKLGAITKQGNRMLRMLLVEAAQAAVRYDPGFRREYLHRCHQKPKAVAKVAAARKLAVRLYWMLRTQQPYPAVVRIESSPRVPLVGAS

SEQ ID NO: 222355 - protein, 441 aa, unidentified
MFCNGYGDILRKPFSVKNSPDGVKYLVDQATRSCRRRGIKKDHVFFGGEDANSYAENFVSTLRSKGWIVAGVNAHDAKKQRANLQASTDRLDLMGIATMLLNCRANCCPAQSGIYRNLRTLVRHRRKLVVMSTEVKNRIHGIVDRLFPGFLNEGKTGIVPFTSSSLYLMEDRFSPKQIRRRKREKLIEILKRFGTSKAEETADRLQQYAAQVLHTPADYVDTLQLSLAQHVKHLRCLQESVNQLEKEIAVNLAQTQGAFLTSVRGIGIVLAAGVTAEIGDPNEQKPLNNLVSYSGIIPRVKQSGGPESKAYTVSVAKRCNRILKDCVVKSALHIGLHGPEDLMADYKRRDASGQHADFSMGRRYLRMAMSLMRTSQIYLPPRLRKADATLQERADYYLMTWPYLRGKWKKLGALEAAITKDRPLGLWRQIVQELYDIKLKL

SEQ ID NO: 222356 - protein, 388 aa, unidentified
MQTVADRPEAPTAIRTDLGAIFVSLELSRSTWLITSLSPGGGEKMSKQVVRGGNVAGLLECFARLREKARARTGKVFPFVVIQEAGLDGFWIDRALQNEGIESHVVDPASIATSRRRRRAKTDGIDGEVLVRALLAYKRGEPRVCAMIKAPTPEEEDRRRLCRERKVLIVERVRHVNRVKGLLFSQGISGYEPLRRDRRQRLDTLQTGDGRLLPHHLKAQVCRELDRLELLLEQIKAVEAERDALLAAQQVAAPAPAAMLLDIKGIGPEFAAILWSEGLFRHFDNRRQVASYAGLAPTPWQSGSVDREQGVSKTGNPRLRTTLIQLAWLWLRHQPQSALTLWFEERVRRNGGRLKKTTIVALARKLLVALWKYVTAGVVIEGAVMKRT

SEQ ID NO: 222357 - protein, 480 aa, unidentified
MIKSVGIDLAGAGEHKVRCLDERAQMCDGLTFQTTPEGLSKLEERIFRDGSNPVIVFEPTGLAWLIVAIYLKARHPDCHLVRVQARKVVALRKYLRRSSKSDKIDALTLAKMPFIDSEQLEEIYLPPAKIYAIQRLARQRKRLESEIGARKKRIGSIVDGYFPGIRQAFSNPWSAHARAFLGSCLNPLEVVHSGEKALHSFLTKARRHSKADAVESHLVYLACQDAATLYKLSSPVGTIDEDFFAALQDEISRELRLMEMAEAESEAIAKRLEQLYHELHPSDNLRTIPGVGEHTAPILLAVVGDPARFRSQSAFANYTGVVPAAKQSADAEAKGLRMTKAGPAVMKWSLYQSGQIGRRFDPQLAWVYYREMVHYGKNHRQAMGAVMSHIGARVLAVLREDKPYELRDIDGRPITGDEARRLILLNYQVPEEIKRERRRRKQTAGSATKSTRRNREMAAHRTNEAATAPQPVEIMATSRE

SEQ ID NO: 222358 - protein, 335 aa, unidentified
MHYLYYVGLDVSKETFDASLVAFEDANEMAHRKFANSRKGICSCLHWVEKRHGILLDDVIFCAEDVGSYISEMAVCASDRTLNFNFSLISPLVIKYSMGIARGKTDRVDARRIAEYAITHYRKIALYLPAEKELCQLRTWLILRAYLAKQRVAKLVLLEKLDYKEKFADVSIQRSMLQEEIAYAETHMKTIEREMKELIAADSNICRNYKLLTSIKGVGPITAIVMLCSTLNFTKITDHRKFACYCGLAPFEHSSGTSVRGGCHTSSMANRDIKVQLNRSALIAIRCDPQLKAYYERKVAEGKHKFSVLNAVRAKIAARCFAVVRRGTPYVALQI

SEQ ID NO: 222359 - protein, 393 aa, unidentified
MVYVGIDVAKDKHEYFIVNSDGEVLYDVFTIQNNMDGFEDLFFKIKTASRDLSKVKVGLEATGHYSCNILGFLHNKGLTTIVINPLYTSLSRKSVSLRKIKADKVDARTIASMIMSDVSLKPYSDTVYHNEDLKSLSRYRFDKVSDRSKLKQSVSRLVNILFPKIEKLVSTLHTKAVYELLSEFPGAHQVASANLKHLTALLFTASKGHFGREKANKIREAARRSISSYLPANSLELRHTIKPIREFNAEIAEIKTEIKKIMDSIASPTLSVPGISYALGAVIVSKVGDFSRFDNPDKLLAFAGCSPSTYQSGQIYFTHAKMEKRSSRYLRWVLLNAAKYVCKWEPTFAAYLRKKLAEGKHYNVAVSHAAKKLVCLLYHLETTGEKYIPQTLS

SEQ ID NO: 222360 - protein, 427 aa, unidentified
MSEERSVELRVSVDVGYRRHSVAMGLSSGEVLEEFEIDHRPEGFQEFFSRIEKHQKAKSYTVAVAMEGYNGHARPLDSLVRQRGYRLYNLNNLKFARFKEIFPGAAKSDRIDARRGLELFQLSDHLPLAKEVLQEVRGTPKENEVLKRLTRRRRRLVNERVRVVNNLQADLQAVCPGLLEITSEASNQWFLNFLVSADSLSQLARLRKSSLLKIPAVGRKYAGLIQDWQKRAHFSEEAGWVSEMIQEDAKRCLELEEKIKTLETKIEQVAKDSKIAKILLSIPGFGPVCTSELAGEIGTVERFNKEGSLALYLGMSTLDNSSGNYQGTKAPKHVNTRAKAAMMIALDRHRKYVPESQRYYEKKRTQGKGHNQAIRALGRHLCRIIYKMLKEQREYQLRSKEGDTQARVRSRSCVKTKIRRSKISRRG

SEQ ID NO: 222361 - protein, 311 aa, unidentified
MTCWVGIDVAKDSLAVWQRPQGKSFSVSNDEQGHQQLLALFAEEKPERIVLEATGGYECGVMFSLSRAGHRVSRLNPTRVRAFATAMGKLAKTDPIDAAVLAHLAQTLEEAPSTVPSPERERLRELVQRREQLVSQRDDERRRLHQARDSFVRQCLEGAIKALKETIRGYDKEIAKAMNVVDAEQAQQLCQVKGVGPVTAAGLLAYLPELGQLNRRQIAALVGLAPYNSDSGQKSGQRRIRGGRGMIRRILYMTTLSIIRYQEDFARRYQGLRENGRCAKVALVACMRVLIVRLNAMVRDGTCWRTGTVQQ

SEQ ID NO: 222362 - protein, 346 aa, unidentified
MNYIGMDCHISTLDFAVVNETGRLVKASSVATSVNNFMEFVKTVPPPRTIYMEEGTLAAWLLETCVRFKEKLVITDPKKNHWIGSSGQKDDPLDALKLAQLARGGYIKEIHHPVGQRRRFRELMIAYHDTVRSTTRIKNKIKAKFRQNGIQCTGVTVYAKNHRQEWKDKLPQEATLLLILEGLWRQLEQSEQTEKELLAAARAQAKHYPEIKHFEALPGIGFTSAATISAILETPHRFADKRKVWMYAGLGIMTRSSGSKTYSEKLSTDYNRLLKYTIKQAAEAAIQAEDNPFRRKYLDMTLLHGIAPNLAKLTIARDMLATMLAMWKKGEKYNPEIRERAAHKQG

SEQ ID NO: 222363 - protein, 348 aa, unidentified
MTVYIGVDFHARQQTISYLTTEDGEIQRLQLDHGKPDEVRRFYRQFAGQRVVVGFESSGRAAWFEELLEELGCEIWIGHATAIRLFARRRQKNDRRDADLILDLLVRGDFPRIHRYSAESRAVLQQLRYRQRLVKMRTMLLNSLVFMAASRGVVLRSQLKTKRGLERLQQISLPPALREQRDELSQLLLDLKPKIDKVERELAAKAESDIRVRRLRTQYGIGPLTGLCLAHTLECPERFANPRKVTAYVGFDPVEDSSGERRRIGSISKQGSRLLRFLLVEAGQIAVRRDQELARVYQRVLVRRGHAKAKVAIGRRLLVRAFIMLRDEIDYAEFQRRGVAARSSRGIA

SEQ ID NO: 222364 - protein, 317 aa, unidentified
MMQITTGVAGIDTAKDKLDIAVHQCDLRWQVANCPRGWKRLYAELTKAGIGRVGIEATGGYERGVVKHLRAAGLVVVVLQPTQVRAFAQFHLRRAKNDALDAALIAACTAAVGDRSIEPDARLTELADQLTFVEQIEEDIARFKTRLEHIDDCRLRRLVTNDITRLKARRSAELLLIRKKLRAHVDLARRLDLVLSVPGIGERTALALIIRMPELGRISREQAAALAGLAPFDDDSGKSRGQRHIAGGRGRLRRSLYAAALPAAFRWNQALIDLYARLIARGKAHNAALVACARKLLIYANTVVARGTPWTQKPGVI

SEQ ID NO: 222365 - protein, 358 aa, unidentified
MSEITRVGGDLAKNLIQVHAVDAAGKVVTNRQLQRNKFIEWCVQLPAGCLVAMEASAGSHQWARKLVGLGLDARIMSAHLVSPYRIQGKSGKNDANDAAAICEAASRPNMRFVTIKTASQQGILCVHRLREGLKEERTACINRIRGLLAEFGLVVAQSTRILEERLSELLEDASNDLPGLARLTLERAQMQWREIDQHLQWCDQRIAAHIKEDRQAQAAMQIMGIGPVTASAVVATVGDFKQFKSGAQFGAWLGLTPRQSSSGGKNKLGAITKKGDQYLRTLLVQGAKSVVFRGVANNPITRWAQELRDRSGWQKAAVALANKNARTLWALLTKGVEFNAHHISVKPTGLASSSVCVG

SEQ ID NO: 222366 - protein, 400 aa, unidentified
MLSIGIDVSKGKSTVCGMKPGGEIVYTPFEIQHTREGMSELVSLLRGSGEEVRAVLESTGSYHCPVVTALLENGIFVSVVNSLRMKRFCSQSIRKVKTDRIDAMQIALYGLAYWQELQPTKLPEDTYRELQLLARQYYQMTSMLIKAKVDFNAICDQVLPGMQELMNDHAGRHKLSDFVLRYRHTTHILEMGETRFRKDYCKWAEKKGYRNCERMAALIFATAQNGIPVLPNAPSTQIVITEAIRVLHTVEASRDAILTQMQALAKTLPEYSLVREMPCIGDTLAPRLIAEIGDVRRFHSKRALITYAGIDAPPYQSGKFCANNRHISKRGNRYLRKTGYEVMQSYVMHKPANDPIFTFIEKKRGEGKSGKLAMVAGLNKFLRVYYGKVTELYRSLPAIE

SEQ ID NO: 222367 - protein, 343 aa, unidentified
MEHTTIAVDLAKSVFQVAISRRVGHVDTERRLTRDRFLAFFAQHPPATVVFEACGSAHYWARQLQPFGHTVRRLPAHDVRRYVRRNKTDRTDTKGMLEANRNEEIHPVPVKTIEQQAIASLHRLRSTWLATRTARLNTLRGLLREFGVFIPVGAHHVVPRLRELLGEPTDTVPLAVRGTLAAACAELDGLETNMHDVERQLAALARQLPDVTLLQTIPGVGVLTATALVALVGDIRRFRSGRHFASFLGLTPKEDSSAGRRRLGAISQQGDVYVRMLLTHGARSVVWHAKAAAQATALQRWAVHTELRRGRNVAAVAVANKLARIVWAVWVQQRPFAAEHRPG

SEQ ID NO: 222368 - protein, 397 aa, unidentified
MIAVGIDISKAKSTVAVIDSDGTVLASPFTMAHTQPEMEAFVSYLKGLGEPTTILMEYTGHYHYPVLKKLQDEGFPVCIVNPYQMKKYGDVEIHKAKTDKKDALRIAAYALEKSYKLVPYSSMEQKYEDLKFLSRQYNQRISYVAKLKVQLIALLDQTMPGITRILPLNSRNPEKCALLLFIKRFKSFDEIQRIGKARFLASYDVLAKKASERNASSKGLSIYELAVDSITTRGEDPYIWLSQNQCVDLLSATQNAADEIISQMRNIAETIPEYKVLRAMHGVGDRLGPIILAEIGDVHRFHSGKALNSYAGNDAPPYQSGQFESRNRHISKRGSSALRKACYEVMQALKLTKPQDDPVYLSMLKKEQEGKPFNVAKMAGVNKFLRIYYARAMELYK

SEQ ID NO: 222369 - protein, 436 aa, unidentified
MDIVHPRVAGIDVHKKIIWVAVRLPGETPGERKLVVKSFRTFWRQLQKMAAWLAGLGVTDAAMESTGVFWWPVYHALVQARIGVCVCNAAHMRNVPGRKRDISDCQWIAELHEFGLLRASFIPVAEVAALRQRTRYRKKLIEQRTSELQRLSKVLEDGGLKIDSVASSLTTASARDMIEALIAGQRDPAALAQLARGVMRRKIPELEMACDGRFTAACAQMCRLHLDAFDHLGTRIAELDRLVTEAAAPFAALIARLVTIPGIGQRTAQVIVAETGGDMTRFATSARLAAWAGLAPGDNESAGKRKKAAARKGNQHLKTAMIESAWTTARSRTRPGARFRRLARRFGRGNEKKAALAVGHTLICIAWAVMTRDQDYADAGEDYYEQRDHRNRDHLIRHHQQALARLGYQITLIPPGDGAPPPGTDTPPTAASGQAA

SEQ ID NO: 222370 - protein, 323 aa, unidentified
MYVGLDVHKRVCHGTVMDEEGHVVKREHFSNDRGSLSSFMKDIGEAKVVMESGYRWQPIYDHLKEAGYDVRLAHPLKVKAIAEAKIKTDEIDSETLAHLLRANLLPESYVPPKEIRDLRELVKRRAFLVGMRTRLKNRIHADLAKRDIDPGSPLFTRRGRALLASLGVDAVSQLLPVMETLDRQIGEISAVLKRAAAEDGRARILTTIPGVGYYTALLLVAEIGDVNRFPDAERLCSYAGLVPSVRRSGGSTVYGHITKEGSRWMRWALTEAVHSHLRYDTELTRFYRRLALRRPGQVATTATARKMLKAVYCMLMAGEPFQP

SEQ ID NO: 222371 - protein, 352 aa, unidentified
MRRYRLAVEKCKRIYIGIDLHRIQWHVTIRTDDVELFNGSIPGQWESLKRILDRYQGYEKQAVYEAGYFGFWLHDHLVAYGVDCVVTPPSLVPQEYGNHVKTDRRDSRKLAHLLAKGLLKRVWVPSPEQRYERQVIRRRRQLVGDRVRTQNRIKAELRFYGIDLPAPTGQWSKAYFGNLQHLRFDNHWMQESFARLLEKYQFLTQQIERQTKLLRAMAETDQYQERVKILRSTPGIGLISSMEYLLELQNVERFQRGNRLAAYVGLTPSQYSSGEKLRMGRITAIGKNDLRGTLVEVAWRLIAKDPAMREKYERIKIRAGSKRAIIAIARTLLLRTRRMLLDRQPYVVGLAA

SEQ ID NO: 222372 - protein, 369 aa, unidentified
MQSDYAARLGIDWADQKHAWALQVAGESRTEQGELEHTPEAVDQFVAGLAARFPGRKVAVALEQSRGPLFYMLSKYGHVDLYPVHPATLDHYRHSFYPSGAKSDPQDAALILELLVKHPKRLRGVVADTPEARLLGMLVQDRREAVDEKTRAGNQLTAQLKLYFPQLLAWFDVDQVVLAEMLSKWPTLEQLQRVRATRLEEFLRQRSVPESKRRRVSQERAGAVSALTDRAVIESAEGKARHLIALLELQCYSGIAPVTESSGRTKIVKWRWGCPTFLRQTFHEWAWLSTRGSEWARAYYDRQRARHKSHHAAVRALAFKWLRILFRCWQQHQPYQESRYLAAMQKCANPVIIPLKKSSGLTSVGELLA

SEQ ID NO: 222373 - protein, 389 aa, unidentified
MKVAIVGLDIAKHVFQLHGTDRDGKVVLRRKMRRHEVVPFFANLASCVVGLEACGGAHYWARRLTAAGHAVRLIAPQFVKPFVKSNKNDTNDAEAICEAAGRPSMRFVSAKSVEQQDIQSLHRVRSRLVSCRTQLVNQLRGLLMEYGIVLPQHVGQVRRGVPEILEDESNELTLLGRRLLASLYNELVDLDSKVEQIEKELRAVYAASEPCQRIAAVEGIGLLTATAIVAAMSDGKVFQNGRQFAAWLGLVPKQHSSGGRPRLLGISKRGDPYLRTLLIHGARSVVYRACRKKDVRSVWIVDKQRRLGTTRACVAVANKNARIVWSLIARGGALPCAARVYTPRPGYAGKLNFRAVEKTLASQAWKTLCVFHFSTARDDGFSDRFHRDA

SEQ ID NO: 222374 - protein, 336 aa, unidentified
MSLYSAIDLHSDNNFIVIIDNNDSILFQRRLPNDLGTVLSVLEPYKGGLQGVAVESTFNWYWLVDGLIEAGYTTRLVNTAKVKQYSGLKHTEDRYDAYWLAHLMRLGILPTGYIYPREQRAVRDLLRKRRQLVNHRTIHVLSIQNQYWRNTGIKLKAGYIKRSNDYLGEFEDSNIHLALVSNYEIMQALDEQIGRIETSVKQQIKLRPEYELLLGVDGIGFILAVTIMLETGEISRFEEVGNYASYCRCVESKHTSNTKKKGEGNAKNGNRYLAWAYIEAANFAKRFSAKARRFHQRKKAKTSNVVATKALAHKLARACYYIIRDQVPFDENKTFG

SEQ ID NO: 222375 - protein, 469 aa, unidentified
MDLLKLPIYTFYCEFLDMEERFMKKVFIGIDVGKFKNSISIIDSEGNPIIKKGISIENDYYGFAKLEEKIDLIMNNYGFTYDDCIAGVESTGHYWFNLRDYLKDIGIETVMIKTDSVKHRRALEEGQKGKNDTLDARVIASCLRNGNYVYIRDNERELRALQKLTRMRNDISDEVVALKNKIHRCIDICNPVFFKIFENLNSKTGVALIKLYPSPQDIINVDLDNIKRELGEIVDKPNMRMVSLYKEECEIWSRLIKEPSHAEKVEMTAYIDKFLLQNKSKEHLDKQIKEIAKNIIPLYSEFEEIKGIPLIQLISVLSEIGDIRNFKNTRAILAFLGLSLKGNASGKYIGERKINKAGSRIVRKHLFNIMDTLIKHNEYFRIAYCYYKSYNHKNPTKKRSMQIAVMCKFVRVMYGMLKYNASFDYKEMMKGYYFGDCNMQVFKEEFEGEKRTKKIENYKLAYSIFVNYS

SEQ ID NO: 222376 - protein, 355 aa, unidentified
MISNIKYIGMDVHTESISIAVRNAAGKIVMECVIETKASTILQFFDGLRGDLQVTFEEGTWAAWLYDLLRPHVGSLVVCDPRRNALLKDDNRNDRIDARKLSDLLYMNKLNPVYHGEHGLRALKELVRSYLTITRDLARVMTRVKAIYRSWGIPCTGKQVYAPRHREEWLAKISELGVRRRAEFYYQQLDALRVLRQQVRQDVLAESKKHRAWKRLCQIPSIGPIRAAVLLGILQTPHRFRTKRPLWKYSGFAIETHSSADHRSVNGQLQRKQKTSVRGLNENCNHDLKNLFKSAAVVASSKPGPFQEFYAALVAKGMRPEMARLTLARKIATIVLIVWKKGVCFDAQHLKPQTA

SEQ ID NO: 222377 - protein, 402 aa, unidentified
MIFINCLGIDIGKSESVVAHYKDEVLVKEMVIQNNQNGYRYLKNYIKHLDSLFILFESTGIYSRGMKRFCEIHKIDYLEMNPLEAKFKTSSLRSWKTDKSDAHKLALLAFRMKDSKVQRQSEEIYFELRERARFHLEMEINQNCLKVELVETLHQTFPGLEKLFTNRYSKIALNIAKAFPHPDFVSTLTHDELMEKVLHSTDKGISVNKAHKYVQKLIEIQTNSFPNVDKSSFLLQKVQYLCDKLLIGIEEMKEFDQEMIDLAENTTEFENIISIPGIGELTAALLIGELGNIREFKTNKQLNAFVGIDIKRYQSGTSKSRDTINKRGNKKARRLLYLIIMNIIRGRNHYQSHIVDYYYKLREQPHGKTHKTAVIASINRLLKTIHYLIVNNKLYDYQKAPH

SEQ ID NO: 222378 - protein, 348 aa, unidentified
MVTIGVDPHKQTHTAAAVDPLGVELEHRTAPARPTGNGQLLEWARTLDGERVWAVEDVRNVSGSLERFLIDRGEVVVRLAPQLMAGARRGARTRGKSDPIDALAIARAALREGVENLPTARLAGPEREIRQLALYRERLVDMRTRLSNELRWQLHDLWSDWEIPTKAFAQPGWQTKIKTRLARTEQTIQVRVARDMIRRITELTQSAKDLYDQIAGLVRQVAPQLLAERGIGVLLAAKFIGEIAGIDRFTTDAQLARMAGCAPIPVSSGCSDRHRLDPGGNRRLNSAFYMLAVIRIAHDPRTAIYLARQRANGKTKREAIRCLKRHLVRRVYHLLHDPTSVPTTICLT

SEQ ID NO: 222379 - protein, 323 aa, unidentified
MEGSSQMTQTPTYAGIDVAKDRLDVVLRPSGEYVEATNDERGIRSVVRRLRKENLALAVLEATGGLEQPAAAALALFGVPVAIVNPRQVRDVRGLATGKLAKTDRIDATVLAHFAEAVRPDPRPLADKHARELSAVVLRRRQILAMTTAEANRARTAPKAVRKRIEAHLRWLRKELARVDGELEQVVKESLVWKERAALLMSVPGVGPTLSATLLAELPELEHLDRRRLAALVGVAPLNRDSGTLRGIRTVWGGRSGVRTTLYMATLCATRHNPAIREFYGRLVASGKPKKVALTACMRKLLSILAAILRNRTPWQPRSLPAS

SEQ ID NO: 222380 - protein, 341 aa, unidentified
MSIVGAFDVHRRQLTFEYLDTVTGELKRGRVMPADRPHLRAWLARFAGQQDVQFALEGCTGWRYVVEELHAAGITPHLAEPADTAALRGKKRHAKTDKTDTRHLRVHLMAGDLPECWIPPGHVLEARATARLYKDLLDERGGWHQRVAATLFHQGVPAAVSVAKPEGRAAAERAFLSPAGRQAVEAGLRQIDRLTAELEPLRRQLDMLSRRQPGCAALRAAHFGIGAVTSVAIWAELGDVRRFGNSDDVVRHTGLDITVYSSDGKRSAGHLSRQGPQLLRWALYESAKCAARPAAPDYGYYTAARDDRGGGRATLSVARKLARRCYHTLRELGEDALAPAA

SEQ ID NO: 222381 - protein, 318 aa, unidentified
MPESIVIGIDIAKQTFDAALGVSGRIKTFANDDAGFDTLLANLAGQAVDLIVMEATGGLESNLACALQAAGFAVAVINPRQARDFAKAMGYLAKTDRIDAKALAELAQVLARSPERDRFVTALPTPEQQALQALVARRRQLVAMQVAERQRLSVSHAAARKSIEALIMAIRTQLDQVETELAKHIETHHADLALRLSSVRGIGPTTVATLIAEVPELGQLSRREISALIGLAPFNRDSGQMRGKRAIFGGRGQVRRGLYMAALAAIRFNAVIKQFYDRLVAAGKPKKVAIVACMRKLLTILNAMVRTGKAWDDSLHTA

SEQ ID NO: 222382 - protein, 334 aa, unidentified
MEQIKRVGVDTSKHIFTVHGVDEKDRPVLRRNLRRSAFLEFFAKLAPTKIAMEACAASHHWGRELQALGHQVVLIPPQYVKPFVKRGKNDRNDAEAISEAAARPGMANVAVKSAEQQANAMLLSVRELLSRQRTQLVNALRGHAAEFGLVAAKGDKGVTELLAAAQASLPTPAVEALTLLGRQIEHVEAELAQADLKLQAQHRALPASRLLETIPGVGWMTALTLTLRIDASQFESGRHLAAWLGLVPKENSTGGKHRLGAISRAGDERLRSLLVLGATAVIRHAKPGKTSPWLLSLLARKPRKLAAVALANKLARVVWAVMTSGESYRPPQAA

SEQ ID NO: 222383 - protein, 349 aa, unidentified
MNATIVAVDLAKNIFELAAADAQWRIVQRQRLNRTKVLGFFAQLAPCQVVMEACGSAHYWARQIAGLGHTVRLLPAHYVKPYVRRSKTDQADAAALIEAARCAEIREVPVKTVDAQQIQSLHRLRSQWMSTRQRYVNTLRGILREFGFAIPLGVNVAKERIGAAIADPESAVPQALRGTLAGMLQEVRLLEEKILGIERELNVLTRTDIRVQQLRQIPGIGALTSTALCAVVGDIQRFPSGRHFASWLGLTPSERSSAERRRLGKISKQGDTYLRTLLVHGARSALLAAHRAERAGKSLDRLRRWALDCERQRGHNKATVALANRLARIVWATWKFERPFDGNWGAQVA

SEQ ID NO: 222384 - protein, 366 aa, unidentified
MNETSNRVVIGMDPHKRSVTIEVMTTDETVIGGDRFGTDEAGLADLRRYVSQLRPRVEDRVWAIEGCNGIGHHVAVRLLAAGEEVVDVPPKLSARMRVFATGQGRKTDATDAHSVALVDTRIAGLRPVVNDEQLAVLRVLVDRRRSLGEDHTRMTSQVHQLLLELIPGGAKRDLSAAQAKKLVAGVRPRDAAGKIRRRVAAELVGDLERVYARKKAADKELTELLTATDTSLMDLPGIGPTGAARLLVEVGDITRFPDRGHFASWNGTAPIDASSGDHVRHRLSRAGNRQINRILHTMAVVQLRNPGLGRDYYDRKQADGKSSMEAMRCLKRSPVRHRVPHHARRRPQPDHEREGDGPGRTTGKRL

SEQ ID NO: 222385 - protein, 339 aa, unidentified
MEILSRSQTTPLRFQGIDVSKATFDVAWWGDLPFQEMVNRSFPRSPEGVRVWLACFTPSERLGMAAVMESTAGYCKELAAWILQASPGFHVAIANPHRVKGYACSLGLRNKTDRVDARMLAKFGQERQPGAWAPLSPSQEELRALTRTRTKLKATRTAYRNRLKSKTGGFPVDRKCQEDLVRYLDRQIQVLEKGIRDLGRRDPALGRDLKLLVSIKGVGLITAASVLGAAGDLRRFTRRGELCAFLGVAPRQFQSGTSVHGKTHMCRTGGKHVRAVLYMAAVATCRTKGPLGDYYRRLVAAGKLPKSALGALMRKLLVVMRAVLIQGKPYQAIAPDIAA

SEQ ID NO: 222386 - protein, 358 aa, unidentified
MKIVGCDLHAKQQSIAMVDTDTGELIERTLSHDGNAVREFYAALEGPVVVGIEATGSMQWFLELLDELGIECQVGHPAKIRAAETRKQKHDRRDARLILDLLTMEGRFPAIWMPSTEQRDLRTLLRDRHQWVKIRSRLQHTLQAIALNHALRRGQGLWSQAGQSELRALPLPPYTRQRRDQLLSLYGQMQKRIEQLDRQVEEQAKQRSQASRLLTHPGVGPVTALATEAFLGDPSRFTRGKKVASYIGMIPCEHTSGKRQRLGKMSKEGNSLLRYLWTEAVMHAVQKDPELRRFYRRKLIQKGMGKARVAAARKLGIRLWIMMRDQIDYEEFCRRGKLRQKGEAHAGMLDFNSGPASQ

SEQ ID NO: 222387 - protein, 339 aa, unidentified
MLFSELIRTVAWDTKPAFTRLEGRDMNKKITSWIGIDVSGESLDVAERPTGEFWSWPNTELGVEKVVEKLKALSPELIVVEATGGLEALVVTALSSAKLPVVAVNPRQVRDFAKATGTLAKTDKIDAHVIAHFGEAVKPEIRPVKDEKLQELSEIITRRRQIVDMLKSEKNRLKRSSSKVAKDIKAHIVWLEKRLEKSDNELQKRIKESPLWREKDEKSRSVPGVGNVLSQSLLTFLPELGKVSPRQVSALVGVAPFNHDSGKYRGRRIIVGGRANVRSVLYMATLSAIRFNSRIRAFHDRLIKKGKKPKVAITACMHKLLIILNAIARDGTTWQENHK

SEQ ID NO: 222388 - protein, 312 aa, unidentified
MNIVASQAGIDVSKDELVTSIDQAKTFTVPNHEEGAKRIALALPEGCTVHLESSGGYERTAARVLRAAGFRVQVHNPLKARRLAQGTGRKAKTDPIDARMLSRSGHLLPASQPKSQERQGLCDLSRAIDALKGTAASYKKKMSAPELDEEAKKAYSALVKGLQGQLRKLEGQFVRRVKASSFKERYELALSVPCVGPVAARVCVCELPEDLYEQPASHMSSYAGLAPIDNSSGKHKGPSRIGRGNARLKKGFYMAGVCALRFQPWAKALYARLMARGKVHDQAMVAVMRRMLLRVVCVLQRGSSWQDEPPKA

SEQ ID NO: 222389 - protein, 319 aa, unidentified
MTVYIGVDFHPYEQSVAYCDNRDGEIGYRRFLHSDKQSLKAFYRKCGTEAVIGVEATGCLWWFEKLLFENGMELKIGDPRMIRRVALSRHKNDFRDAETILDLLMREQFPTIVPRSEKSREVLDLLNYRQSLVRKRTSVANQVHAFARGKGFAKFRLPGIKARKKLVDAPASETEQLLLSSRFLLYDELTRQIKAVEAKLEEEANKDERVQLLRTHPGVGPLTSLVLVHTLGDVRRFRRKEEVVAFVGLDPLEKSSGEKKRMGQISKHGSRLARHLLGQAAQTCRDKKIRQFYSQLAARRGRPKQKWVQPESSLSTVTS

SEQ ID NO: 222390 - protein, 329 aa, unidentified
MSQNPNAGIAIVGIDIGKNSFHIVGLDQRGAIVLRQKWSRGQVEARFANMPPCLIGMEACVGAHHLSRRLKALGHDARLMPAKYVRPYSKGQKNDFRDAEAIAEAVQRPTMKFVATKTADQLDLQALHRVRERLVSQRTGIINQIRAFLLERGVAVRQGLRFLRAELPRILATPPDVLSPRMVRVIEGLAGDWRRLDERIESLSGEIAAVARQDAGCERLMSVPGIGPIISSAMVAAIGTGDGFSKGRDFAAWLGLVPKQISTGDRTILGIIRSKSKICFLRLSSWLPSAARHARTTSGTRLSLGSAMTPRSSSMPLRPTGAITPNSAR

SEQ ID NO: 222391 - protein, 320 aa, unidentified
MAILTSPTVIGIDVAKAEIVVYREDLKTTQAIDNNRLAVGRWLKTLPAQSSIALEATSIYHLDTVELAHEMGHRVYVVDAYRVSHYRESVGQRAKTDPCDARLLARYLSSEQERLRIWSPPPQAYKVLKSLLQRRAELIKLRVSISLSWSGEPLLQESLALLLKSYEQAEQALQQLLRKVSREAGITENIKRCKAIEGIGELTATGLATAFMRGQFASSDAFIAFLGMDLRAKDSGKKNGPRHLSKKGDAELRRLAHNAAMAACRSPAWRPYYESYLARGLAKTQALVILARKLCRVAFALMKNQSEYQPNLRLQGFPAT

SEQ ID NO: 222392 - protein, 343 aa, unidentified
MQLVTTIGLDIAKSVFQVHGVDAAGQVVIRRQLKRRYVLMFFQKLPPSLVGIEACASAHHWSRELKALGHRTRLIPPAYVKPYVKRHKNDAADAEAICEAVSRPNMRFVATKTPEQQGCLTLHRTRHLFVRQLTSVINAIRAHLAEFGIVAPVGRNGIEELLYVVSDASDRRLPEVARACVAALGTQLRMLKAQILQFDRMIMAWHKSNEASRRLDDIPGIGPVLATALVASVADPKMFRSGRDFSAWIGLVPTQNSSGGKDRLGSISKRGDRYLRNLFTTGALAVIRYAKIHGTRRRPWLTALLARRPTKVAAIALANKIARMAWAIMAKDERYKEPAALAA

SEQ ID NO: 222393 - protein, 401 aa, unidentified
MECIFGIDISKHTANVAVLIDRQVIKEFKLSSNREGFERLEDELNSFREPKIIFESTGIYSRPWRAFFHRNGWLYTEINPLKAKKVMDSFRIVKTDSVDAVGLAEAMSRNNFAPSFQEKPEYTELRDLHRIYQEHNDDVVRNKNRLHHELQLTFPEIEHFLSRTEGALYWHIVQIFPHPYLVLQHSSTELTSIILKATSKNMGPKRAQHLAEHLLELAKSSGPAVDIDSYALKRVTELAYEVERLDRSKKSLIEEMAKIGTNLPEVAILTTIPGIALKSALCIIAELGDIRRFHSANAINAYIGIDLTTYQSGDYTAEQRIRKRGNPLARKVLYRTVINIISASSYRPTRFNDFYQMKKQSSQSKGTKKIAVAVMSRLNRTIFHLVLHNEVYEPTVSQPRQ

SEQ ID NO: 222394 - protein, 342 aa, unidentified
MEAKRYIGIDLHRDCFTACLRLENGREYLKEWKLEDLAKFTAKLRPTDEVAVEVTGNTRLFHDAVAPHVGRVVAVNPSQFKVITHSVKKTDPNDARNLALYLAKDLLPEVRMKDKTQAQIASLTQTRDTMVKLRTALKNKVNNLCSAHGVNLNKESLGSEKGLRTVLEMRFDPLVNLELKIIIEQIRSLNQSIAELEQTIGKEGQKLEGHKNLTSIKGIGGLSAGILLSIIGDIGDFSDEGKLAAYFGIVPRISNSNETEHSGRITKRGTKLGRTTLVQCALIAQRYSPYLKAYYEKKKSRGTGKAIIALARKFLGIIYRTLKNKWLFEDFPNFVLAEATTA

SEQ ID NO: 222395 - protein, 372 aa, unidentified
MITNSTGLEKNVYMAMEISNKKWKLAFTDMKKRREVNIDARNTGGLKRAIEMAKEKFGIKGACKVKSCYEAGRDGFWIHRMLASIGVENIVVDPASIEVPRRGRRAKTDRLDAEKLLDLLVRHSAHGEKRTWKVARVPDESVEDERRGMRERERLKKETTMHSARIRSLLALHGITTKNLLGVEQIKRLRDWQGRALPAGIYAELEREIMRLKIVREQMEALEGEQEKLLRKPQTRIGMVAAKMAKIKGVGMVRAGVLSEEMLGWRKFKNRRQVGAMAGLSGTPYSSGESHREQGISKAGNRRVRHQMVELAWQWIILQPQSVLSRWYGERFEHGSGRMRKVGIVALARKLLIALWKYVEFDEIPAGAIVKA

SEQ ID NO: 222396 - protein, 409 aa, unidentified
MELLVARCAGLDVHQATVVATVRVPDDQGGRRSVTETFGTMTPDLLALREWLQAYGVTHVALESTGVYWKPVYYVLEGGFTLLLINMQELKHVPGRKTDVRDSEWLAQLLECGLLKPSFVPPPAIRELRDLTRYRVQQVRDRAQEVNRLCKVLEDAGLKLTSVITDVMGVSGRAMLRALVEGTTDPAVLADLARGALRKKLPALRRALQGRFRRHHAFLIEQIFAKIDFLDETLDRLTAEIDGRLGPFASMLANLDTIPGVDRIGAISIVAETGGDMSRFPSAGHLCSWGAMCPGQNESAGKRRSGKTRKGNRYLRRTLIQAGLGALHKNGSALQARYHRVKRHRGHKKAVVAVGHQILEIAYYIMRDGVTYDELGADYFNRRHAERAVRRHVRQLEALGFHVTIERAA

SEQ ID NO: 222397 - protein, 394 aa, unidentified
MKLIGIDIGKNKHFFCVMDQQTGEIISQPVSFSNDKEGFDFLVQKIKSYPKDSILIGMEDTGHYHFALLKYLLDLQYTVALINPKTTDFNRKMQGGITKNDKLDTINICDVLDTPERKKQYRITKVNSFDLYEQKQLTRHHHNLKEEENVYKNRLQKCIDIVFPEFNKLFNSKYGIVYMNILKMFGSAENIANTDIRTIRKCFEIEGRGNRISLTPERLKECAISSIGISSSAEVIQIKHLTAQIELIEEQLTEIDKKIEEFSIQNNSPILSIPGISHFSGTSILAELGDISNYSKTSQIIKFAGVAPLHYESSQFNAQHTAITKKGSKYLRKTLYQIMLPVIRHNPVFNKYYQLKISQGKGHRCAQGHCVRKLLRIIYHLLKTNQQFDPQLLR

SEQ ID NO: 222398 - protein, 411 aa, unidentified
MHNRQNYLYVGVDLHKEHHTAVIINCWQEKLGEIQFDNKPSAFSKFLLEVETYVSDGLSVVFGLEDVGGYGRALAKYLVDHEQVVKEVNPALSFLERKSQVMIQKNDSWDAECVARILINKLNQLPDAKPNDLFWSIQQLVSRRNALVKAQSALKNQLHIQLNHHYPSYKKFFSELDGKTALAFWEQYPSPSCLEGANIKQLTAFLLDVSNNTCSVKKASEILKLVKEDGHTMKEYQETRDFLVRSIVRDIEFKKTEMKYIERELKQLVKLLAYQLETMPGIELVTASALIAEIGDVRRFPNANKLARFAGIAPVYFGSGGKGKTHKSKQGNRALHALFYNLAVQQVQVAKGSKMPRNPVFHAYYQKKLKEGKTKGQALVCIMRRLVNIVYGMMKYKTAYELPIVEEKEVV

SEQ ID NO: 222399 - protein, 389 aa, unidentified
MKIYVGIDIAKLNHFAAAISSDGEIIIEPFKFTNDADGFQLLVSKLESFDKNSLIIGLESTAHYGDNLVRYLVTELYQVCVLNPIKTCQMRKNNVRKTKTDKVDTYVIAKTLMIQDNLRFVSFFDLDMMDLKALGRFRQKTIKQRTRLKIQLTTYVDQVFPEIQYFFKSGLHQHAVYALLKEAPSPKEIASMHMTHLANLLKVNSHGHFTKEQAKELRVLAQKSVGANDSAISIQITQTIQQIELLDSQLEKIEAEMTDIMKFNDSVIMTIPGIGYINGGMILGEIGDIHRFSNPSKLLAFAGLDPSVYQSGNFQAKTTRMSKRGSRVLRYALVNAAWNVVRNNATFKAYYDAKRAEGRSHYNALGHCAGKLVRVIWKMLTDEVEFNLE

SEQ ID NO: 222400 - protein, 313 aa, unidentified
MADKLIVGVDVSKGWLDVCPGAAGGGVERLANEREAIVAWLDRAQPTIVAFEPTGGYERTLRDCLRERGILFVRVHPNDVIAFRKSRGIKAKTDRIDARLIGAFAAEAALRRGLRLNTIGNELLQALAARRRQVADALQAERCRLALAAAEAVRKSLEIVIDALRRSLDTLDQEIANTIAADPEVAEMSKLLQTVHGIGPMVAALLIAHLPEIGRLSSKEIAALVGLAPQTRQSGKTKYREHTSHGRPDVRRALFNAARAAIRHPSPFKDFYDRLVAHNQRPGKVALTAVMRKILVTANAIARDKQPWRLHPA

SEQ ID NO: 222401 - protein, 378 aa, unidentified
MKCSVRNASSGVATPEEAPSVGSLAPEPLGLLLSKIAFGSSTDPDGCLNTLVRIHKEGSQKMAKHNIKAAGIDTGKFTLDVAVHGTPDKLEVANDAAGHESLIDWLRAREIERVGIEASGGYEKPVTAALRLAGFVVIVMQPMQVRCYAGFELQRAKNDRIDAALIAKCTALYEALREAPDPRLEPLAEALTLIDQLGEDIARWKTRRESFHQAEQRDWASAEIKRLTRIRDLERGRLIRAIRGHGDLTRRLDLMLSVPGIGEPTALTLLIRMPELGHLTREQVAALAGLAPYDHDSGRFKGRRHIAGGRARVRKALYAAAFPAAQRWNPQLVAFYKRLVQKGYKHKYALVACARKLLIMVNAVITRGTPWITHQTQT

SEQ ID NO: 222402 - protein, 443 aa, unidentified
MARKNQKRFEIIHHLCAGIDVGSREHWVAVNPEQYDPAVRQFSTFTDDLIALADWLQSLNISVVAMEATGVYWIPLFEVLDARGFEVYLVNSRATRQTSGRKSDVLDCQWIWQLMTHGLLSGAFRPSDEICSMRSLVRQRANKVCDQAKSINRMQKALSQMNIQLAQVISDITGVTGLKILRAIVQGERSPEKLSALRDGRIKADQETIARSLHGNWRAEHLHALGQELACHDFLEKQIAECDQAIAQALARLPVLQPETGLPCKPLRSAHRSADQQLALHQALIKVMGVDLTAIPTIGIDIALVLASELGPDLSRFPTSQHLSSWLGLAPPTRISGGKPLPGKAPKIINRAAQALKQAASNARQDKSFIGASHRARLTRMDTSCAIKATAHQLARLIYAMLTKGQPYVEKGIEEFEEKSRGRQLRALERKARKLGMQLVKAA

SEQ ID NO: 222403 - protein, 371 aa, unidentified
MNSIVYVGMDVHKESYTLCCYCYDTDKVEYKQTIPSDYKLILKYIESMRKVYGEDVTFICGYEAGCLGYSLYHQLTDHAVDCKILAPTTMAITNTNRVKTDKRDAANIARCLAFHTYSEVYVPDDEDNSVKEYIRMRDDQKLMLKKIKQQILAFVLRQGKKFEGGKTYWTIAHMKWLKNLDLTGLDKETLSEYLVTYEYLTEKIERLDNRIEELASGEKYKEKVRNMGCFLGIKTHTALSMVVEIGDFNRFEKAPKFAGFLGLVPSENSSGDDRNRYSITKAGNSHLRRLMVEAAQSYTRGNVGHKSIALKQRQQGCCAEVIAYADKANERLRRRFYKMTLNKGINRNIATTAIARELACFMWGMATGNMS

SEQ ID NO: 222404 - protein, 315 aa, unidentified
MTQTNITTAGIDTSKLKLDIAVHQRTERWQVTNTLPGWRTLTTNLAKAGITRVGIEATGGYERGVVEHLRAAGFTVLVLQPLQVKAFGRVHLRRAKNDALDAVLIAACAATLDQPRIAPDPRLAELAGYLTFLEQTEEDIARFKTRLEHIDEPRLRRIVTSDIKRLKARKAAQIRDIAKRLRAHNDLARRLDLVLSIPGIGERTALALIIRMPELGRISREEAAALAGLAPFDDDSGKYKGQRHIAGGRGRLRRSLFAAALPAACRWNEALIALYARLIAKGKAHNAALIACARKLLIYANTVVQRGTPWTEKAA

SEQ ID NO: 222405 - protein, 351 aa, unidentified
MLLIGVDYHPSFQAIAFFEEETGEYGERQLHHSGGEAEQFYRDLQRRGIRVRVGMEATGYSRWFERLLAELGFELWIGDPTEIKAKRVKKQKTDRKDAQLLLRLMREDNFPQIWVPSSENRDLRQLLWHRHRLVQMRTRIMNQLQALAMNEGRRWKTKLWSEQGRTELQKLPLAPWASRRRQELLELLDRLHPTIEELTAAAEQEARKRPEVVRLMTHPGVGPLTALAYVLIIGTPARFHRGKQVGTYVGMIPSEDSSAGKQRLGHISKQGNSLLRFLLVEAAQAAARSSPEWRRRYLHLAMRRHRSIAKVAMGRRLAVRLYWMWRNGCAYSPSLEFGSYVGQLGTGHGVK

SEQ ID NO: 222406 - protein, 373 aa, unidentified
MKYTTVYVGMDVHKESFTLACYTNEKEEAEYVQRTEAHYSKVISYLEAMRFHYGDDVTFICGYEAGCLGFTLYHQLTNHHVRCVILAPTSMPVQQGKKKVKTDKRDARKIAKCLAHHDYSAVHVPTAKDEETKEYIRMRDDHKLALKKIKQQILAFCLRHNYRYPGGTKYWTQAHLKWLRDLKPGGVYQEILEEYLLTYSNLVDKLERLDKRIEELAADKEYAESVHKLICFLGIKTQSALSVITETGDFKRFGNAQQYASYLGLVPGEDSSGEDQNRLKITKAGNRHLRMLLVEAAQSYGRGQIGHKSKELKKRQEGNLPEVIAYADKANERLRRRYYRMVLSQNKRSNVAKVAVARELACFIWGMMTGNVA

SEQ ID NO: 222407 - protein, 367 aa, unidentified
MADVFTIPNNIDGFHFLLQRIQDCTHAQDKIKVGLEATGHYSYNLLGFLLDNGLPTYVLNPLRTNLYRKSLSLRKTKTDRVDARTIATMLLSDVGLKPYTDTAYHNEELKSLTRYRFDKVNERAKLKSSIARLVCILFPELEKLVPSLHIASVYALLAEFPGAKQIAAAHLTRLKALLETASKGRYKRDMALEIRDASRNSIGSWMPAKSLELQHTIRLIRELDNEIAEIEEQIQAIMDELNSPITTIPGLGFRMAAMIFAEVGDFTRFDSPDKLLAYAGMSPSTYQSGQLRNCYPHMEKRGSRYLRYALYNATKYVCHWDPTFAAYLAKKRAEGKHYNVALSHAAKKLVRLIFAMEKSRQPYCLAA

SEQ ID NO: 222408 - protein, 339 aa, unidentified
MQIVTIGLDIAKNVFQLHGVDAAGDVVLRRKLRRSEVRIFFSRLTPCLIGIEACATSHYWARELVSLGHSVRLIPPSYVKPYVRRGKNDAADAAAICEAVARPTMRFVPVKSVDQQAVLVLHRSRDLLVKQRTMLINALRCHLAEFGIVAAQKRTGLAELVACVEEGVDDDFPELLRRGLNPLIHQLKQIQAQILQLEKEIETWHRYNSTSCRLATIPGVGPIIASAIAATMLDPAHFRSGREFAAWLGLVPRQNSSGGKERLGRISRQGNRYVRRLLVIGATAVLRHDRRRTSGIGWMRALLERKPARLVTVALANKMARTAWALLARNADYRVPTTE

SEQ ID NO: 222409 - protein, 402 aa, unidentified
MISVGIDVSKEKSTVCILKPYGEVVCKPFELQHSKKSLESLDELLRRLDGEVKIVMEATGIYNLPVLTFLDEKGYFVSVINPCVMKKYARNNNFRNVKTDKMDSITIANYGIEKWFKLKRYEASESTYTELKLLGRRYRHYMEMHIQALQELTHVLDYVMPGIKNLFNSWTESNNRDKLSDFVERFWHYDLITSMSCEEFVKAYNEWATEKKYHQSESKAIQVYELASNGIPTLSSNLPSTKMLVLEAIKTLRAVDDSLYIILSRMKELAKSLPEYSTVRAMGGVGDVLAPKLIAEIGDVRRLHSAKALIAWAGIDPPPYESGQFVGSNRKISKKGSATLRKTGYEVMRVLKSHRAPEDCTVYNYILKKEAEGKSKKQAKIAGLNKFLRIYYVRVMEVYQSV

SEQ ID NO: 222410 - protein, 327 aa, unidentified
MLIIGCDYHPSVQQIAMVDPETVEYVERRLTHRAEAEQFYRELKQRGVSVRVGIEATGQSRWFERLLGELNFELWIGDAARIRAMQVRKQKNDRKDAEHVLKLMMKDAFPRIWVPGPENRDTRQLVWHRHRMVQMRTRAMNQLQSIALSEGVRRKRGLWTEKGRASIDELTKAVEQEAERRPEVERLQTHPGVGPITALAYVLVLITPDRFQCGKQVGSYLGLIPCEDSSADQWRLGHISKQGNGLVRYLLGQSALAATRYDHDWHRQYARLANRKNHAVAKVAMARKLALRLFWMWKREWDYEEWKKFGSYAGQLGYQHGVQSITA

SEQ ID NO: 222411 - protein, 356 aa, unidentified
MSKYIGFDIDCKKVVACVVEKGKRDIYETMGPDVGSMRKFLLAQKQSGERVELAFEIGGQAGFIYDSLLDCVDEIKVVNPSKMTWIYRTAKKNDRIDARKMAVLMSIGELPCVYMPSKEVRQWRQAILHRRTIVGKVVQAKNRIRASLKSQGYNKSAHGGGWWKKANRFWMRSLCQGSLDVDGLWRLGLCNLLDELGLLEVQLKRVSYYLDGYLSGKPGGKLLMSIRGVGPRTAEAVLAYTDDVSRFGNYKQYCSYFGVTPKLDESGLTRRLGHISKQGPSVVRWLICEASWKAIRYSKGLRSFYERVMAGQKGRKKIAIVAVARKLLSIMRAMLLTGELFNEDMINRCDDLTDAA

SEQ ID NO: 222412 - protein, 350 aa, unidentified
MQVSKKTNNNQTVKMYDYYIAMDWSLEGVSMAYMRSNSIEPKVRDNIPAKIKIIKEYLNELKGRKILTIEETTGSQWLYVELKDSVDKIIICNPKRNRLLEEGSKTDRIDAKKLCYLLRAGLLKEVYHTDDEKYRIRKLVSAHEDLVKSEVRLKNQVSALYRAIGIRGKKERSEYKKDDDTLNFILESKTRELEILLEEKRKYEKSFKEISRKEEVINNIKRISGFGPILSVEGYGIVIDASRFKNKYKFWAYSGLVKEKRESGKTSYKRRNKLYNRKLKCIFKMATQAALIGRNDIREYYEYLLEKSYTPKDARNAVTRYLATSFYAVMKKGIKYEPYYWRKKLANKAA

SEQ ID NO: 222413 - protein, 348 aa, unidentified
MIIIGCDYHPGFQQIAYVDTETGELQERALQHREEAEKFYRELAAQGLQVRVGMEASGHARWFERLLAELNVELWIGDAAEIRTKRVRKQKTDRQDAQLILKLMLKDDFPQIWVPSWENRDLRQLLWHRHRMVQARTRLMNQLQAMALNEGLRCKKRLRREAGRQQLEAFRLAPWASRRRQDLLELLDRLNPTIAELTQAIEREVEKCPEARRLQTHPGVGPLTALAFVLIIGKADRFRCGKQIASYLGLVPLEDSSGSRRRLGHITKQGNSLLRFLLVEAAQVTVRSDPGWRSKYHHLMMRRGRKIAKVAMARRLAVRMYWMMRKGWNYEQLKSSVRTRDNSYQAMV

SEQ ID NO: 222414 - protein, 467 aa, unidentified
MTPHKDYCLDPCPPVLTPMLPPSPILSDALQVCHPHAAGIDIGEAEHWVAVPPGSDPQPVRRFGPFTADLDALADWLIDCGVTTVAMESTGVYWIPLFELLEARGVQVLLIDPRQAKRAPGRPKTDRLDCKWLQRLHAYGLLAGAFRPADQVCVLRGYLRHRQMLLTYAAHHIQHMHKALEQMNLKLTQVVSDITGVTGMAILKAIIAGERDPVTLAKLRNPHGQHSEDEIAKALQGTWRAEHLFALQQAVELYQFYHQQLTTCDQRITAHLETFADQSAGQPLPPKARRHKKTNEPRFDARTPLYRLAGVDLTTIEGIEENTALILLSEIGTDMHRWPSVKHFCRWLGLCPQHQSSGGKVLSRRVRPGAHRVTVALRLAARSLHHSQSALGAFFRRMKARLGTPKAITATAHKLARLVSHLLKHGSPYVQQGLENYEAQYHERKVTTMAKQAKALGYTLVPLAAQG

SEQ ID NO: 222415 - protein, 344 aa, unidentified
MTLVGCDLHTRSQHIAVLDTETGEILERQLAHDGTAVEAFYAALPGPVTVGIESTGYAVWFHALMQRLGHTVLVGDAAKIRAMVVRKTKTDRRDALHILDLLRHHRFPTIWIPDPATRDLRALLTHRLRLVRIQTMLKNGLHAIALNQRLARGSKLLSRAGVAALQNLALPPYTAQRRDQSLDLLATVHAQIVQLDAAIETAALAHPDAPRLLSHPGVGPLTALATIAVLGPATRFPDSKHVVSYVGLAPSLNASAEKYHLGRITKQGSTLLRWVLGQAGRHAARLDLDLKRTYFTVLHRRGRAKAKVAVARKLLVRLFIMLRDHIDYEEFRRRGHARTVAPAT

SEQ ID NO: 222416 - protein, 312 aa, unidentified
MGRFIGIDVAKRQLDVAERPSGARWTATNDVTGIAGVLERLAAAGPVALIVVEATGGYEIPLVAGLSAAGLPVVVVNPRQVRDFARALGKLAKTDTIDAAVLAHFGEAVRPEPRGLPDELTQELQGWLGRRRQLLEMVLAEEQRVAVAARVIRPQIQQHIEWLRSQLRDVDAQLQQAIRQSPVWRETENLLRTTPGVGPVLATTLLAELPELGQLNRRQIAALVGVAPLNWDSGQQRGTRHIWGGRAPVRTALYMATLAAVRCNPVIRAFFDRLSAAGKPRKVALVACMRKLLTILNAMMQRRVGWQPALTA

SEQ ID NO: 222417 - protein, 323 aa, unidentified
MQGKVSFQEDAMPVVYAGVDVSKEWLDVHLHPLGESRRFSNDKTGIRQLKRLLANHRPKSIVMEATGKFHRPAHRSLWLDGFAIAVIDPLRARMFARACGYLAKTDRLDARFLALLAESLRPPASAPPSPHIEALQELVNARSAAKCDITALQNRSKTATTALLRSELNRLVRRLEQHVERLDKEIERCVGEDPQLCRKAEILTSIPGIGRVTALALMAGMDELGTCSGKQAAMLAGLAPIANDSGARTGRRSIRAGRPAPRRALYMAALSACRYNPALARFADTLKAAGKPAKVILVAIMRKLLVLANCLLAHDPLWTPNPP

SEQ ID NO: 222418 - protein, 402 aa, unidentified
MFAESRDVWSIVPLEYDVFIGMDVDKKSIALTSFEHKQHIDSLKMANKADIVINYAKKKFPGKRIVFTYEAGPTGFGLYDKLTDAGYKCLVTNPASVPTASNSRVKTNKVDSIKLAKTLRGGELKSVRVPTGRYRELRHIVKLYNITVKHRTACKQRIKALLLLEGIAYPNMTRYDHWSNNTIKRLTALKCNESVRFKLDMLIEDLQFHRGQLLKINRKLRSFCKDDNEIADSVRYLTSIPGIGKTIAVHLIARIGDWRNLKNVRELGGFIGLTPCENSTGDKIDRGNITRLGDKRLRNMLIEGAWTAVFRDPEMGEFYQRICSRHPKDRASRKAVVAVARKMTTRIYRVLKDRREFVIRDVDYKSRNIEFNKKRRLNAPEDDSTLRRTIKDTGKSKKDAPV

SEQ ID NO: 222419 - protein, 356 aa, unidentified
MPKIKQLDFEGQTIFCGLDVHKKSWRVNVRSDEFELEDYSQDPSEELLLKHLHKRYPGASFQVAYEAGFCGFGIQRSLKSSGVGCMVVNPADVPLTDKDKKRKNDRIDARKISRHLSNNMLRSIYVPSIRMEHARTLVRQRIKLVQDQTRCKNRIWHMLMFSGLKMKMDKPNDYWSCRFVESLRKLPCQTPSLRQALDMALEEYLLIRKLVGNMTKQLRVLSAQKSFAPIQNLIQSIPGIGLLNSMVIITELQDMKRFKTLDKLCSYAGIVPDTASSADRTTVKGITHRSNNYLRPAIVESSWVIIRKDPAMLHLYKKYCRKMVPNKAIIKIARHLLSRIRYVWTNLVEYEVGLVG

SEQ ID NO: 222420 - protein, 369 aa, unidentified
MKDDIRVCREMTNPVPNEFALFPKSTLGIDLGDRFCHCCALDYRGEVVERFRFETTKAGLAKAFENRPPCRVVLEVGTHSPWVSRALGALGHEVIVANAREVQSITKSDRKNDANDAEQLARLGRADPKLLHPIAHRQEDTQRDRALLTVRDKLVQVRASLTVQARGIAKALGERLPKSTTPAMAKRVREEGFANLFPGMSSLLEVVELLSEQIRELDSEIEKVSKERYPETELVRQVKGVGPITSLAYVLTIEDPARFARSRSVGVYVGMRPRQRDSGDRNPHLSISKAGDPYLRNLLVECAHYILSRGPDSDLRRFGERIVERGGPGARQRAVVAIARKLAVLLHSLWRTAEVYDPLRQAQVTEATA

SEQ ID NO: 222421 - protein, 421 aa, unidentified
MTIDINNLTDVVLVAIDIAKARNDVLVQLPNGTKKKFKVANKMKDFKEFIDYLSSFNKECFIALEAIGNYHRPIAYHLQASGFKVYLVSSFSAAKTREALHNSWDKNDPKDAKVILHLLKTGVIQTYYDPLINQYNDIQEIAKTYHQISLRKVRVQHSIMNHYLPLYFPEAEIFFHSSRALWFSHFMQHYPTPSAILKYSQEEFIQNAWDVVGRKVDKENWLINFYQTAQESIGLPIPCDAQAIKMFKIILQEHHDLCQQLKCLEDTASTFLEGNNDYQKLLTIPGIGPIIALTILAEAGNLKRFKHYRQFLKYCGFDLSTKQSGFYRGQTKLSKFGNGRLRYVFWLAATVSIRMRENTFRKKYEDYIKQDPLNNDLKRKGYTAVAAKIARVAYGIVKNETNYRCYHESVIPSGGIPSVRP

SEQ ID NO: 222422 - protein, 365 aa, unidentified
MDTIYIGVDFHARQQTICYLKTETGELVTCELKHQDKQKVRAFYAQFRGQVVVGLEASGYSPWFERLLEELGCEVWLGHATEIRRRARWRQKNDRRDAELILDLMVHDEFPRLHRPAVQSREVLRMLRYRQKLIKIRTMSKNSLQALALQSGLAKGSRLFTKDGQQQLGTAEMSPVMHWQREHWLQLMEPLNQQLLETMAWFKTQSKDDVCITRLRTHPGIGLLTSLCLVHTLQPVSRFRNTRKVAAYAGFDPVERSSAERKCFLGISKAGSRLLRYLLVEAAQTAVRKDEDLKRFYKRLAERRGRPKAKVAAARKLLIRAYIMLRDEIDYAEFRHRAVAARLARRGQRPNVPEVLIGQPASPAQ

SEQ ID NO: 222423 - protein, 411 aa, unidentified
MEVVVVVGAGLDVHKKKIVACCLDGRSSPPKVVKCTFGTFRDELERLREWLLKRECTHVAMESTGVYWMPVHRVLEGSPLQIILGNARHMANVPGRKTDMSDAEWIAKLLRHGLIRPNFIPPRPIRDLRQITRYRRKLIDTRSASELRVEKLLQTANIKLSSVASEVFGVSGRLMLRSLAKGVTDPVKLAALAKGTLRNKRAELTRAFRGTFTADDARLLAVELNVIDDLEKRLTNLDQLIEKQVGPFAEEIARLDTIPGVDRALATDLIAEIGTDMTAWPSDRHFAAWTGTCPGNRESAGVRRRARTRDGNPYVKAILLRAAVCASRTVTSYLAARYRRLTARRGSRRAFVAVAHEIAIAIYHMLSKQQPYIAPKAADPAVARKHKSNQLIRELRKLGFEVTCTPTANLI

SEQ ID NO: 222424 - protein, 343 aa, unidentified
MDHFAGLDVSVKETSICIVDDAGKIVREVKVASEPEALLAVLKNLAYLKRIGLEAGPLSQWLFSALAEAGLPVICVETRHMQAVLKAQINKTDRNDARGIAQMMRAGLYRPVHVKTIRSQKLRMLLTHRKLLQSKAIAIENDLRGTLRNFGLKVGMVGKVKFEARIKELVENLPDLAVLVEPMLIVRRTLREQIVILHRRLLAIVRDDEVCRRLMTTPGVGPVVALTYRATVDVPARFRKSKAVGAVFGLTCAKYQSGEVDRNGRISRCGDEMMRVMLYEAAQSMLRSKKWSWLKAWAMQIARRRGMKKAIVALARRLAVIMHRIWVDGTEFRWTREQATAAA

SEQ ID NO: 222425 - protein, 352 aa, unidentified
MKKLKLSIGIDVAKDSIVCCVGSLDTEGKMFFSKPRTFLNSIEGFEELMDWVKIENGTETLFIMEATGVYYEGLAYWLDGKGKKISVLLPGKVKHYGRSLNIKTKTDSIDAQLLSRIGLERQLTCWHMPSKAMRTIKFLSREYKEIKAKLVVSKNQLHAKTHSYDCPLSVTKRIKQEIGLLENQLLEIEAELRMSAMADTALYDRINKVVTLPGVGFMTVIGIIAETNAFALVSNAKQLVSYAGLDIKLNQSGMKEGKTKISKQGNSFIRSTLYMPALSASKHNSELNRFYKRLVEKKPAKKIGITAVARKLLILIYILWKNNEEFNPNIATKNMQTGLRLPAQDEQTVLLK

SEQ ID NO: 222426 - protein, 316 aa, unidentified
MSEPVYVGIDVAKASFEVAASGEMQTLSLGNDEAGHGELCQVLIPLAPRLILLEATGGHEQHLALALAAAGLRVSVINPRQARDFARCMGKLAKTDRIDAQALRGFAALLDVQGHEPRALADDQQRELTALVTRRRKLVAMLVAERQRLALAHPKARASILAIMDAIAAQLHDVDAQLREHVQLHHADLARLLTSVKGAGPTTASTLLAQLPELGKLNRKQITSLGGLAPVNRDSGTLRGQRHIFGGRADVRRVLYVAALVGTRFNPVLKAFHAKLLAAGKPKKVALVACMHKLLVILNAIARTKSPWSNEIAGIA

SEQ ID NO: 222427 - protein, 352 aa, unidentified
MNPKNYGGIDVAKKNFVIGIYGQDKTKTEANTPKGHAKAVEYLQKHNVDLVVLESTGGLEVPLANALHAADIRVVIANPQRTHQYAASFSLGKTDHLDAKMLADYAQALDSRKMADDMCYAPPSEEALALEALVKRRSQLVEMRKMEKNRLEQTHASQKASVVAMIKHLGELIAALDKEIDQSNRGGFNGKGEILSEMKGVGRITCATLLSMLPELGKVPHKRAALLVGVVPPPRQSGEKEKKSGCVGGRMVVRNALYMAALTATRSEPKIKAFYEKLMSRGKAFKVALNACMHKLLRILNARMRDYLASLKGRIYNSSATATKKTSISDTAKNIKTLQETENGCLPSYYAH

SEQ ID NO: 222428 - protein, 308 aa, unidentified
MPTVIGIDPHPQHHTAAALTAQGSVQDIQTFPNSAAGRDAFLAWLARFGSVRLAVEGPTQTFFTEWLTHLWAAGMPVVGIPAQHVRQRRGRRKTDPEDAVLVARILVAEPERPAMRPPEWLRPLQEMTRTRTNLAHQLQATRMRHRATHLPAVQAALGQVSAALAAAVAALDQEIAEQVRILAPRLLKVPGVGPVLAGVLLAESGDIRRFATPHQYATYCGAAPVPWESGGSKRVRVNRGGNRRLNWAVHMIARTRLRIDPATRALVARKKGEGKTHREALRVLKTYLARQLYTVLSEVQPLPLPSPS

SEQ ID NO: 222429 - protein, 422 aa, unidentified
MLEETQDSDQIIQRVAALDVGKAELTCCVRVPGQGGSGRRLQEVRTYPTMTRSLLVMADRLGELGVTRVVMEATSDYWRSPFYLLEAHGFEVWLVNARDVKHLPGRPKTDTLDAVWLCKLAERQMLRPSFVPPRPIRQLRDVTRYRADLVAARTAEKQRVEKLLEDAQIKLSVVASDIFGVSGRAMLAALIAGERDPKVLAQLARARMRAKLSLLEEAFTGHFSDQHAFLLAKMLGRVDALDADLAELDAKLAELITPFAHAVDRLDEIPGVGQLAAHLLVAELGADMTRFPTAGHLVSWAKFAPGVSESAGNPKGSGSTGHGNPYLARVLGEVAVAAGKTDTFLGERYRRIARRRGKRRAIVAVGRSILVIVWHLLSDPEAHFHDLGAGFYDTRIGPERAKRNHIRQLEALGYKVTLDPAA

SEQ ID NO: 222430 - protein, 320 aa, unidentified
MTNLNVFSGFDVSKDYFDFFTIDDQGKSTGQRVVYTREGLKSLARLIPAQSHCVMEATGPYYLKLATWLYQNGYAVSVVNPLVIRRFCQMKLVRAKTDKADARMIALYAKSEKPALWQPPAPYIVKLQQLDALVELFTKNRTALINQLHAFEVTGIADPFTCSLLKKTIADVTKKMEKIEVEITAVIGAHYKEMLENLKSIPGIGKRSAVALIVASDGFKRFDNYKKFSSYLGICPRIYESGSSVRGRSRICKLGMSRIRAILYVCAWSAKKGNLACKQLYDRLVEKGKSKRLALIAVANKLVKQAFAIAKSGIKYQPVG

SEQ ID NO: 222431 - protein, 373 aa, unidentified
MSKVSRFVGLDVHKETIAVAVARGDSAAESLGSIPNDADAVVKLVHRLGADDGLWCYEAGPCGYELQRLLSELGVNCIVVAPSLIPTKPGDRVKTDRRDALKLARLLRSGDLTAVWVPDAAHEAFRDLTRARQAAQEDLTRVRHRLTKLLLRLGVRAPATAWSKAYRQWLDALTLPQSLQQLVLDETRLAVAQGEQRVERLTAAITEAALQVSQAAPIAAWQSLRGIRLTTAAMLGAEIGDVTRFRSPRELMAYAGVVPSEYSSGGSTRRGRITKTGNAHLRFALVEAAWHYRHGPRLSKALKARQQGQPAEVLAIAERAQRRLNSRYRHLVARKTKQQAVVAVARELLGFIWAIAWAVHPDQRLRPAQRQAA

SEQ ID NO: 222432 - protein, 370 aa, unidentified
MGNRNMFVGLDVHKETIDVSIAEGDRLGEVRHYGVIKSDLEPLDKVVRALRAPDRRLHFVYEAGPCGFGIHRHLTHRGEDCVVVSPSMIPKRSGDRVKTDRRDSQMLARLHRAGELRAIYIPDATDEAMRDLVRARADAVGVGTQAKYRLKAFLLRQGRRYPGREGWTLPYRRWLTDLSFPSAAQHIALQEYRDAIGETEQRIERLTEQLRQLAPTWRWAPVVDAFQALRGVSFITAVGLVAELGDLTRFRQPRELMAYLGLVPSEHTTGPRVRRGAITKAGNPHARHLLAEAAWAYQGIPRIGRQHAYRQEALPKVVCDIAWKAQLRLTTRFRRLVAKGKAKPKVATAIARELTGFIWAIAQEVSPAPQ

SEQ ID NO: 222433 - protein, 388 aa, unidentified
MIYVGIDIAKLNHFAAAISSEGGILIEPFKFSNDYDGFYLLLSKLAPLDQDSIIIGLESTAHYGDNLVRFLISKDFKVCVLNPLSTSAMRKNNVRKTKTDKVDTFVIAKTLMLQDPLRFISLKDLDYIELKELGRFRQKTVKQRTRLKIQLTSYMDQVFPELQHFFKSGVHQNSVYTLLKEAPTPNDIASMHMTHLTHLLQTASHGHFGKDTARGLRILAQKSVGIHDSSLSIQITQTIEQIELLDSQLFHTELEMANLVTCLHSVIMTIPGIGTTNGGMILGEIGDIHRFPTPGKLLAFAGLDPSVYQSGNFQAKKTRMSKRGSRVLRYALVNAAHNVVKNNATFKAYYDAKRAEGRTHYNALGHCAGKLVRVIWKMLTDEVEFNLE

SEQ ID NO: 222434 - protein, 388 aa, unidentified
MTVVGIDAHKNWHTLVAVDDVGKRIAVLTVEARAEGHRKIVSWLEQFDDVQVAVEDCRHLTRRLEADLLDAGHKVVRVHTRLMAGMRRSGREPGKSDPIDAEAVARVALREDDLPTAELPGPAREIKLLSDHRRSLVARRTAMQSKVRWFLHEIDPDLHVPSRGLRRYQLLDDLIGVLENHAGAVAEIARDLLEDIRSLTRRINEIESRLTRLVRARHPRLLEVPGLGVLGAAMIVGETAGARRFKSKDAFARFNGTAPIPVWSGNNVRVRLSRGGNRRINTALHMAAVTQLRLGAEGAAYYDKLIAAGKTRTEALRLLRRRISDRVFAAMRSDEPQASLAPEATSSTSSNEITGLNRHGFRAVFMLAAAPGGGQWLQRSGLLRPRPG

SEQ ID NO: 222435 - protein, 330 aa, unidentified
MKNYDEAVGIDVSKNTLDVRCYLAMKHKVFSNDIRGCKSMLKWVSQQTGKGSVFYCFENTGNCSLKLSTYLTSQHIVYVEESPIKIKRSCGLVREKSDKVDSEIIARYAWLHREELEPSELKGLFYQELGRLIGLRDQLVRNRAGLIGTLKESRQLLGSPSTDTVCLVLTRSIDYLSKQVKNIECRMVALVKEYREVHKSYELLRTMHGIGFVVALQLIYHTHNFRRFSTWRQFSSYCGLAPFEYSSGTSIHRRKKCHYLGDRKMKSLLSMASISAIQHDPELRKYYQKKVAQGKPKMIALNNVRNKLLSRAFAVIRRGTPYVALNQFAA

SEQ ID NO: 222436 - protein, 343 aa, unidentified
MLHAGLDLSRKKIDVCLLSGGGEIVDEWASPPDADGLRGLAARAAMWAPAVRGVIESMNGARFVHDRLEEHGWEVLIADATKVKGLAPLACKTDKIDARVLATLSARDLVPEIWLPDPSIRRERELARFRLHLVRHRTTLKNRIHAALIAFGHPCPVSDLFGHAGRELLDRMQIPDPWRANIDVSLQLIDDLDLQIAALTVQLKRQGVDHRYIPLLVTAPGIGWINAYTIASEIGDIHRFASPAKLCGYTGLCPRVKQSGATDARGPLSKHGPKYLRWALFEAALNACKHPYYAERYQHTKRRVGRQRGPKVAQIDLSRRLTEAIWHMLTRNQPFAPAGATVV

SEQ ID NO: 222437 - protein, 392 aa, unidentified
MTVCIGIDAAKAVHWAVGIDERGRVVLDRAVENNPDAIDTLIADLRGLEGEVVIGIDVVGSFARFMEASLLAEGFALVHTPGIAVNRAGQGFSGGERKSDPRDARTIAELVRTRDLRPVLADDDTRVALRLKVGRRRDLMQDQVRRIARIRGLLCGIHPGLEQAFDLCCKGPLALLTRYVTPSDIRRAGKARIIAHLKKTPHLHGCEALAIRALEIAKAQHIIVPGEVATAELIRELASEALEARQKIVGIERDLEHILSDHPDYALIRSLPGMGVILTAEFLAAIGNIKRFTSADALAAAAGLAPVQRQSGKKMGWRRAYGGDKALKRVFYQSAFCAVTKKDPISKAFYDRKRKEGKHHTQALIALARRRVNVLWTMLQRRETFDPKRKAA

SEQ ID NO: 222438 - protein, 377 aa, unidentified
MGEFFRQCVGIDISKEKFTACLYMYDRASDVGCCTKSINFANTKSGFNQMVKWSRKESVKGYPLTYLMEPTGVYYEHLAYHLHKIGQTVYVVLPNKARQFCESEGIKTKTDAMDARCLALMGCVSRKLKTWSPPAAIYRELRQMTRFHADLCEVRTSVTNRLEALGHTEGLSKTVRRNCEKLIEEIDTLIEKNDKAIMQKVAEDKELEARVKRIATAKGLGEATIVCIIAETEGFHLIENRKQLASYAGLDVEARQSGNDDPRHRISKKGNAHIRAALYMPALVAIRYNRQIRAAYGRVCQKHPKEKMIGVAAAMRRLLLLIYSLWKSGEVYDDTRDTTRTSRKKNPELEYGPEDSITTTEEHAGWNAVDENRQTPF

SEQ ID NO: 222439 - protein, 339 aa, unidentified
MNLTPVGIDIAKSVFQLHYVDAETGEIVNRPIKRSRFLEYFANRAPCLIGMEACGGAQHWARELIKMGHQIKLMPAEFAKAFNIRNKNDAADARAVWLAVQQPSKAVAIKTEAQQAVLALHRMRQQLVKFRTMQVNSLRGLLTEYGEVMGRGRAALDKAIPAVLASISDRLPMVLIDTLREQWDGLTKLDEHISVIERRLRQWMLEDKAVKAITAIPGVGVLTATAAVATMGDAKSFRSGREFAAWIGLVPKQTGSGGKVTLLGISKRGDTYLRTLLIHGARSVLHHVKEPGPWVEQIRKRRPPNVVIVALANKMARTIWAILAHDRPYQKGYVSAKPA

SEQ ID NO: 222440 - protein, 410 aa, unidentified
MPEPTSALYVGVDWGNQTHQVAVLDTARGLRGERGGAHDGPGLHAVASGLAELAAPGTVAVAIEVPHGAGVDTLLERGFAGYALNPRPMDRFRDRDTVAGAKDDRRDAQVLAAALLTDRPAFRRLHVDDPQVVQLRELTRIEAELSEALRRLANRRREQLLRFYPQALELCPAADEPWFWALLTQLPTPPAAARRRRGPVAALLREYRLRRRTADEVLTVLRRTPLTVAPGTLEAATEHIALGLPRLELIATPRRACAPRVETMLAVLAAAGQQQGHRDVTIRRSFPGVGRVVAATMLAEASQLLAARAYHRLRASGGAAPVTRQSGKQRGVPMRYAWNPRLRNALYYWAFIAARHDPATRQHDEGLRARGHSQGRALRGVADRLLAVLIVMLKTQTLDDPSRREAKFAT

SEQ ID NO: 222441 - protein, 327 aa, unidentified
MAYYGASKEVFHGNMLSDYQCLRKFLERFKDCKVKVGYEAGPCGFGLYDKLTNDGIETIVVPPSLIPVESGNKVKTDKRDSRKLAKLLESNMLKKVYVLSEEDRANRELVRTRRQLIEHRSDVMRQIKSKLLFHGIKSPFPSKQRWTKQYVKWLRELHFEHEVVKVSFDTLIDLYEYLGSQLTRISKEIIVLSQSDKYSHKVKLLRSVPGIGILIAMELLVELPDIERFKTADEIASYMGLTPSEYSTGQYVRQGRITRCGNTRARVCLVESSWHLIVKDLFWRGKYMKLKYRRGAKRAIIAIARNLIIRIRRILLNNEPYVITVAA

SEQ ID NO: 222442 - protein, 633 aa, unidentified
MLATVRPRDIAGKTGRRIAADELADLVAVEAKVKKATAELKAIVTARGSKLMDIHGVGPVVAPRILADVGDVARFADRNRFASWTGTAPLDASSGEQNRHRLSRAGNRRMNHMIHIAAVTQIRLNTKGRAYYRRKLAAGKKPMEAMRCLIGGVSDARPGRMPGRGSRSCRRMASLPRPSRASFSAATSDAPRPLTGVRNMPDRGPNNEEPAKGLDTDESIIDSIGRPEMTVVGWDWASRTHDVTVLDDDGGVRERWAFQHSEAGWANTLQRLRGHGDPQALPVIIEKTSGLVVDRLLAAGHPVVPVHPTSFYAARPRWGASGAKSDPGDSYKLADYLRTDGHRLRRLEPVDPGLRELQALVRLRDDQVRARTAATNQLTATLDAHWPGPRNLFQSLASPIALAFLTDYPTPHSAAHLGEARMAGFCRRHSYRGGKSAAELLARLRTAPVAPVGLPADTLSTMITAQVALLRALQAVITDVEHAIGQRVASHPRARLLERLPGVGVINLAQLLAEVGPILDRVDNAEQAATECGAAPVTKASGKTTGVYFRWAANTRARKAITSFAHNARLQSPWASALYADARARGKRNPHATRIVARAWIRVIWACWHTGTPYDPVLHQARLHTRRRPTELT

SEQ ID NO: 222443 - protein, 355 aa, unidentified
MDSKKYIGMDVHKESISIAVINSAGKLVIECVIETKASTILQFIQGLSGSLHVTFEEGTWAAWLYDLLKPHVTRLVVCDPRKNASMKQGNKSDKIDARRLAELLRLNHLNPVYHGEHGLRTLKELVRSYLTITKDLGRVMTRVKALYRSWAIPCTGKQVYAPQHRAEWLAKITEPGVRRRAEFYYQQLDALRSLRREVRRELLEESKKHQAWKRLCQIPSIGPIRAAVLLGILQTPHRFRTKRQLWTFGGLGIETYSSADHRYIEGQLQRSKKPALIRGLNENCNHDLKNLFKGAAIIASTKPGPFQEFYAALLDKGMRAEMARLTLARKIATIVLVVWKRGVCFDAQSLKPQTA

SEQ ID NO: 222444 - protein, 418 aa, unidentified
MTATHSIAPTLLVAIDISKHRHEVLIGIPGKARRRRLTVMNTLEDFQRLSVALASYELPVRIGFEATGNYHRPLAHHLGQAGFDLKLVSSVGLARTREALHNSWDKNDPKDAQVILHMLEIGAVQFFHDPLVVGTADIQELSKTHEIVSRSKTELWHRILTHYLPLYFPEAERFHRSSRTDWFVAFLEKYPSPHMISAMGRDVFIADAWDVVGRKVSKERLLSDIYATAVDSVGLPVHPDSDAVRMFRLVLKEGRSLVRQRDEIEARAVELLLDLPDYQLLTTIPGIGPINAMTILAEAGDLRRFRHHRQFLKFCGMDLATVQSGMFRGQSRVSKYGNARLRRTLWMAGQTAVLKRTNSFRDKFERYISKDRHNAHLRRKAYTAIAAKMARTVHAVVNHGEPYRPFFEGVSPGGRTSL

SEQ ID NO: 222445 - protein, 340 aa, unidentified
MDITTLGIDIAKSVFQLHGIDADGAVVVQKKLRRGAVLNFLGNVGPCLIGMEACATSHYWAREIAALGHEVRLIPPAYVKPYVKRQKNDAADAEAICEAVTRPNMRFVPIKTEEQQSFLVLHRARDLLMRQRTMILNAIRGHLAEFGIIAAQGPRQVMGMIARLRDDGDASLPEIARSALLALGAHLEALAGEIRALERQLMVWHRADPTSQRLETIPGVGLITATALAASVSDPSVFKSGREFAAFLRLVPRQNSSGGKDRLGRISKMGDRYLRKLLVVGATSVIRRAGSNSTKTGAWVRSLMERKPTRVVTVAMANKTARIAWAVMTRGEAYRASPIA

SEQ ID NO: 222446 - protein, 430 aa, unidentified
MKSNTQNAKIEAITEKTLVLGIDVGSETHYARAFDYRGIEYSKKPFKFSNTEAGFVTFKEWILDIKERHEKDKVVLGMEPTGHYWFNLGKFLQDNEMKPVLVNPHHVKKSKELDDNNPTKNDRKDPKVIAGLVREGRYMIPYLPDGVYADLRTASNIRFQLQAELTRIQNRISRWFNIYFPEYKTVYGKPDAKSGMLILKAAPLPEDILTLGIDGVNQIWRDAKLRAVGKARAKTLIEAAEHSVGSKEGAVSARMEIRMLLEDYESRSIRLQEVMTLIEGLVKQIPMAEKLLEIKGVGIRTVSGFLAEVGDISRFNNPKELQKLAGLALVENSSGKHKGETTISRRGRKRLRYLLFEVAMSLVSKNQEFRELHNYYTTRRLNPLKKMQSLMAIAAKLIRVFYAMLTKGVDYDPKKMVSDIKRPAVYLQAA

SEQ ID NO: 222447 - protein, 401 aa, unidentified
MTNSEPQERIDVFVGVDVGKGTHHAVALDLAGKRLLDSALPNDEAKLRGLITKLKEHGRVLLVVDQPATVGALPVAVARAEGVAVAYLPGLAMRRIADLHAGEAKTDARDAYIIAEAARSMPHTLRSLKLADNELAELTMLCGFDDDLAGQITQTSNRIRGLLTQIHPALERVLGAHLDHPAMLDLIERYPSPAQLASVTEKQLANRLVKLAPRMGKRWAAEIVQALSEQTVVVLGTQAAAVVLPRLAQQLAALRRQRDEVAKEVERLVLAHPLHPVLTSMPGVGVRTAARLLIDVASRAFASAAHLAAYAGLAPVTRRSGSSIRGEHPSRRGNKQLKRALFLSAFAALRDPISRAYYARKISQGKRHNQALIALARRRCDVLFAMLRDGTLYSPPAGESH

SEQ ID NO: 222448 - protein, 330 aa, unidentified
MKSWNVILGVDVSKLTLDICCAERNLHVKIDNCSKGFTVLKKWCKTNAIDLKETLIVMEFTGGYEYRFIQFCEALSISYCRIPGLEIKQSMGMTRGKSDQADAFRIGQYGEEKIKRMTPSKPLDKNILTLKQLLSFRKRLVREKAGLESTVKERKHMYGAKKNDLVTHIAQAKIKANEKYILQVEQEIMEVIKNNEAMWLNYRIITSIKGIGPVNGWMTIAYTENFTSFTDARKYAVYVGVIPFEHTSGTSTKGRRRVSHLAHKELKQELNQAAKTAIMHDPELRTYAERKLKNKEYPLVLNNVKFKLILRMFSLVKRGEKYVENYKRAA

SEQ ID NO: 222449 - protein, 401 aa, unidentified
MIGVDPHKGSHTAVAIGAAEEPLGDVRVRACPAQAERLVTWAAAWPERTWAVEGAAGLGHLLAQQLVAAGERVLDVPPKLAARVRLLEAGDTNKNDPNDALSVAVAALRSRARREVTAEGHAAVLKVWAKRHRDLARARNQVTCRLHAVLCELVPGGVSKEITAGQAARILDQVTPSSAVAQARCELAAAFLEDLRRLDAQLRDTKTKLAAAVRASGTTVTEVFGVGPVVTGTVIGDVRSISRFASRDRFAAYNGTAPVEVSSGDRKVHRLSLRGNRRVNHAIHMAALTQIRHRHSAGRAYYDRKVAEGKTHKEALRCLKRRISDAIYARLQADARQAAAASTRDPGGQPGNDTDASAAGSHPEHRLFGQATPGPGTILRPVTQSDPTVAKRNPKKARKTP

SEQ ID NO: 222450 - protein, 359 aa, unidentified
MPILADTVDGVIGVDTHRDTLAAAALSPVGGILAQTATRADATGYQQLLEFADTQTPSGPARRCWAVEGTGSYGAGLTAFLHTHGERVVEVARPKRPARRTGAKTDAIDAVRAARETLGHQHQTLPRRRGDREALRVLLTTRRHATSSRVAAINQLKALIVGAPEELRAELRGVATKGQIDRCVGLRDRPARPLEHRMTVCALRTTAGRIRALQAEIDQLTAALDPLVASIAPWLVELPGVGPITAAQILVSWSYAGRLRSEAAFAALAGTNPIPASSGQVTRHRLNRSGDRQLNAALHTIALTRLRYDPETRAYAARRTTQGKTRRDVKRCLKRSIARQLFKLLERYDQPGVEIIRAA

SEQ ID NO: 222451 - protein, 369 aa, unidentified
MKHSIIFCGLDVHKDSITIALADGGRNGEIRSQGTISGDMASLDKAIRKFRRSGVELRFVYEAGPCGYEIYRHLTAQGFPCEVIAPSMTPKRSGDRIKTDRRDAITLARLYRAGELTPVYVPREDDEAMRDLVRGRDDAIKATRHARQRLSAFVLRHGFRYSGGSPWRVAHLRWLADIKMPHPAQQITLQEYIHSVEECTERIDRLTEQILKLLPTWRMAPVVTAFQSLRGVAPIVATVMVVEIGDLRRFENPRQLMAYLGLVPSENSSGQTTKRGGITKTGNGHARRALIEAAQAYSFPARVSRALRKRQEGLSREVKEISWKAQVRLCGRYRKLIARGKNRNRTVAAIARELAGFMWAIAKVVPMSA

SEQ ID NO: 222452 - protein, 449 aa, unidentified
MSRPQVIDDEEHERIHDKVAAIDVAKDAGVVCTRTPHPSRPGARRSRIWTVKARMNTIRALGRQLHKDGIEIVTLESTSDYWRIWFFVLEAAGLAVQLDGAAQAKNLPGRPKTDKLDAQWLARLTEMGLLRASFVPPKAIRDLRDYTRARTRLVQERTRCWQRLEKLLEGAQVKLSSVASKLTTVSAQDMIRAMIAGQRDPRVLAALARTGMKAKHDELVQALDGMFDDHHGELSQLQLDQIAGLDGKITQLGTRIEQAVTALPDAWGINAGGTTGPQAGTGPDAAVIPAVTRLAEIPGISENLARAVIAETGLDMRRFPTAGHLVSWAGLCPTARQSGPRTRAGKKGQGNTWLRGHLGQAAAGAARTATFLGERYHRIARRRGKAKAQVAVARSILVIIWHLLSNPEARYTDLGPGYYQARLDIGRKLRNHIRQIQALGFDATIAKTD

SEQ ID NO: 222453 - protein, 329 aa, unidentified
MTITTVGIDLAKNVFAVHCIDQNGKAVLVKPKVSRAALSELIAGLPPCVIGMEACSGAHYWARLFRQYGHDVRLMAPKFVSPYRMAGKTGKNDAADAIAICEAVQRPHMRFVPVKDESQQAMQCLHRTRQGFIQERTETYNRLRGLISEFGVIAPQSTDALRHVVSDQKETLPVQVRLCIDDLLTHVTNIEEKIAEYDRVLSRVAKTDHRSQQLMELKGVGPTTASALVASIGNAHDFKNGRQLAAWLGLTPSQYSSGGKSKLGRITKAGDAYLRTLLVQGARSVMVGAENRTDPFSRWVCSLIGRRGYWRAVVASLHYGDDFRLYSTT

SEQ ID NO: 222454 - protein, 402 aa, unidentified
MNAVGIDVSKSKSMVAIMRPFGEIVSTPFEIKHTASDIRSLVELINSVEGESRIVMEHTGRYYEVLAHQLSEANLFVSAINPKLIKDFDNDSLRKVKSDKADSVKIARYALDKWHNLKQYNVMDELRNQLKTMNRQFGFYMKHKTAMKNNLIGILDQTYPGVNTYFDSPARSDGSQKWVDFASTYWHVDCVRKMSLNAFIDHYQNWCKRKKYNFSQSKAEEIYGKAKELVPVLPKDAITKLIIKQAVDQLNSASTTVESLRTLMNETASKLPEYPVVMAMKGVGTSLGPQLMAEIGDVSRFTHKSAITAFAGVDPGVNESGSYEQKSVPTSKRGSSDLRKTLFQVMDVLIKTHPQDDPVYQFLDKKRAQGKPYYVYMTAGANKFLRIYYGRVKEYLSSLPES

SEQ ID NO: 222455 - protein, 345 aa, unidentified
MTQYKRIAIDTSKAVFTLHGIDQQDRPVLRINLRRAQMLPFFRKLPSTEIAMEACGGAHYWARQLITLGHEVRLIPPQYVKPYVKRSKNDRNDAEAICEAAGRPGMHFVPVKSVTQQAQGMVLKVRETLVGQRTLMVNTLRGHAAEFGVIAAKGLHQVGPLLAAIEQETAIPPEAKDMAVLLGQQIAELDTRIKEIDVKLNAAHKANEVSQRLATIPGVGPVTALTLAIEIDPAAFESGRHLAAWAGLTPKEHSTGGKQRMGGISRAGNERLRVLLVAGATSVINAAMRPGSQLMTDWLRDLLARRPRKVVAVALANKMARVAWALMTRGEVYRRPVAAAVAAAA

SEQ ID NO: 222456 - protein, 333 aa, unidentified
MVEGTLGSHHKEGSTKMSQSTTICAGIYTGKRKLDVALTDTPERLQVDNTPDGHRDLSVWLRRRRVKRIGIEASGGYEQTVVAELRRDGFLVIVFQPAQVRAYAKFHLQRAKNDKIDAALIAACTAATQKIHAAPDPRLAPFAEHLTLVEQITEDIAHLKTRRESCREPRIRRFWNSEITRLKELLRIELKALIAAIRQHRDLAARLDLIASVGGIGLKTAVAILVRMPEIGRVTREQAAALAGLAPYDDDSGDHIGARHIDGGRERLRKSLYTAALAAAFHWNPQLQTIYRRLIKAGKPHKVALVACARKLLIYANAVVERGTPWTNQPAAI

SEQ ID NO: 222457 - protein, 412 aa, unidentified
MQVIIERCAGFDVHQETVVACVLIGAPGAWPRKQVRTFRTMTRDLEALRNWLQELRVTQVGMESTGVYWRPVYAVLEGHFDLIVGNARHIRNVPGRKTDVKDAEWIADLVRHGLIAKSFVPPAPQRELRELLRYRRKLVESQAAERNRLLKLLETANIKLASVASDVFGVSGRAMLKALIEGSASAEAMADLARGQLRRKRDDLVLALEGRMEEHHRFLLATQLRRLEAAEQDIAALDDRIEAKLESYRVQHGLLMQIPGVDWVVAAVLIAEIGVDMSVFLSVHHLAAWAGVCPGNHESAGKQKSGRARKGNVHLRTMLVGAATSAARTKGAYLKDKFHRLKARRGAMRAALAIAHKILVAAYHMLAKGLPYRELGEAYLDQIAQIRTVANLKRRIERLGYNVTLEPKAEPA

SEQ ID NO: 222458 - protein, 403 aa, unidentified
MRSVLSIDVANGKSEVLLITEYGEVLIEPYEVKHCLSEFNLLKEKIDNFNLNDLTIFMESTSTYHLPIQRFFTKNNYNVQVINPILGKNNTRNLRKTKTDIEDCYNLADLFFKNTVKIHTKTMNDIYSSMIELSRQEKHLTESLVRSKNRFKQIIANAFPEYLKCFTASDIYGETSLNFIKEFPHADIIKSKRIDALANNIHKSTKRYLPYSKCLNKAKKIKELANNSYPGIDVNSCEVKNLINIIEIISYSDAKLSEVKQDIIKLAKQTPYFNIINSIYGVGETSTAQIIAELGDINRFENIKQLNAFCGLDPTIIQSGKSINYNGPISKRGNRNARKILFITCCSIIRSSVLHNVDNDLLLYYRKKQAENKHFKECIIACSTKLLRTIFAMCKNNSLYVQK

SEQ ID NO: 222459 - protein, 353 aa, unidentified
MQCIAFDSHKHYTWALVQDEAGEILREQRINHTRGALQEFLDEFEPGSPVAVETIGNWYWIADEIEAAGMVPQLVNARRAKLMSGSINKTDKLDARGINRLQRSGTLPTVWIPPRELRDIRELPRTRMVLVRQRTKLKNRIHANLAKYGLKTDGASDLFGVRGRSILKENLDELPLETRYATRCLLNQLDSLQHDVQEIEKRMRALFGDTQDLMLIQTLPGVAFILGVVIVTEIGDVGRFPSSSHLASYAGMTPRVHSSGGHTRHGRTRPDVNHYLKWAYAEAANAGMIHRRRHPQRHVSRLYERVKRRRGHPKAIGAVGRHLAEATYWMLTKQEPYRDPATDHVQAESTREA

SEQ ID NO: 222460 - protein, 412 aa, unidentified
MVKKECFIYVGIDLHKETHTAVILNCWNEKLGEITFDNKPSEFSKLTRKVNKYCNDGMEVVYGLENAYGYGRALAVWLIEKGYQVKDVNPALSYAQRKSVAMYQKSDSYAAGAVALALIVHLNKLPDAVLDDAYWTLKQLVNRRDNIKTHQTRLKNQLHEQLCVSYPSYKKFFSDISRQTALHFWETYPSADYLKGKTPEDLAKELRVVSHNNCSINKAKIILDSVRADGSIKRDYQEARDALTRSIVGDLKHYNKQLEDVEKAIENLYPVFGCTLMTMPGINITTATNILAEIGDINRFSNADKLAKFAGVAPVKFSSAGKGEDRASKQGNRRLQSIFYFLAIQMIQVTKNGTPRNAVFREYFIRRTQNGKNKQQVLICIARRLVNIIYGMLKNKTEYREPVFNESFLKNQ

SEQ ID NO: 222461 - protein, 413 aa, unidentified
MKEVYRRCCGMDVHKDTVVVCMLPPVGGEGKAIRKTYGTFRNDLIRMRVWLKQLKVSEIAMESTGVYWRPLWNVLEDEGFRLLLVNPAQVKALAGRKSDGRDAQRIAEFLQDRRLDASFVPPAEIRQLRMMLRHRIALLEQRNEVHNQIRDLFETAGLKLSSVVSDLLGVSGRRILEALIAGEQSPEILCWKLRGRLRAKEKLVKESLKGYFTEFHRSMLESHYKHYRFLTSEIGIFEERIARAMKPYDSQIDLLVSIPGVDRIVAWHLIAELGMDHTTFPDADHCASWAGLVPGQNESAGKQKSTRCRKGNRTLRRVLTQAAWAASHCKAGYMPAFFRRVKSRRGWAKAIVATAHKILTIAFNVLRTGTPYHDLGHDYFDRLNPARATKKLVARLEALGHHVQLSPLARSNA

SEQ ID NO: 222462 - protein, 433 aa, unidentified
MQDVQDEPLFAERVAGLDIAKAGVEVTIRVPSDTAAGRRQQETRAFATTRRELESLADWMHCWGVTRAGMEATGDYWKPVFFLLEARGFDCQLYNAAQVKALPGRPKTDRADSVWLARITERGAVASSFVPPGPIRRLRTHTRYRRHLTQARTAEKQRVEKLLEDGHLKLSSVISDIHGVSGRAMLEAIAAGQRDPKALAQLARGSMRGKIRRLEEALDCSFFTSEHAAVLAMMLAVIDHYTAQIEALNARIEALIAPYLHQVAQLDAVHGIGIICAQDIIAETGTDMTAFPTAAHLVSWAKWSPQVSQSAGKRKGSNATGRGNPYLSAALGEAAIGASRTQSFLGARYRRMVRRMPKKKALVATGNSMLTIVHALLSDHQASYQDLGPDYYEQRMHARRQARNHVKSLERLGYKVTIQALNPDTGELLAPAG

SEQ ID NO: 222463 - protein, 401 aa, unidentified
MNAVGIDVSKGKSMVCVMRPFGEVVLEPFEVLHTAQSLNDLAGKLKALDGETRVVMEATGNYHKPVAFVLHDAGLFVSVVNPVLIHDYDNNSLRRVKTDRKDAVKIANYTLDKWTRLRQYLPEDDTRLALKNCYRQYQQAVAVRTMLKNNLISSLDLTFPDANKLFSSPAKSNGCEKWVDFIGDFWHSECVSSLSSDAFAKKYLKWCQKHGYNFTRSKSDTIYACAVNAASLPKSPTSKLLIQQQVAQLKAVSQSVAAFQQEMLRLSQQLPEFDTVMEMYGVGPSLGPQLMAEIGDVRRFSSKKSLIAFAGIEPQPNDSGKIVGNDSGISKVGSAVLRRTLFLIMTVILKTQPQDEPVFQFMNKKRSEGKPYKVYLMASANKFLRIYYARVKAVMDSKHSK

SEQ ID NO: 222464 - protein, 422 aa, unidentified
MPLDRDPQPIRRFGTFTADLHALAAWLTQCGVTAVAMESTGVYWIPLYQILETRGFAVALVNARHVKNVPGRKTDVQDCQWLQYLHSVGLLRASFRPAEAVCAVRTLLRHRETLVQLAATHTQHMQKALNQMNLQVHHVLSDLTGVTGLAILDAILAGERDPEVLAQHRDGRVKASRETLAKALVGDYRPEHLFTLRQALASYRHYQRLITDCDREIQALLATVESQGDPGRLPLPPVPAARRKPHRKAPAFDFRAELYRVLGTDLTQVPGLQTPTVHTLFAELGADLSAFLSAHHFASWLGLCPDNRVSGGKVLSAKTRPVKHRVATALRLAAQGLARTPTVLGAYFRRMRAKLGAPAAITATAHKLARIVYHLITTRQPYQESRLAAADVAHRRRTESRLRAQARALGFQLVPAPAQAVS

SEQ ID NO: 222465 - protein, 345 aa, unidentified
MNKISVIGLDLAKNVFQLHGIDIDGEIVVRKQLKRSQLRQFFAKLEPCLIGMEACAGAHYWSRELIQLGHTVRMMAPVFVKPYLKSNKNDRNDAEAICEAVQRPSMRFVQPKIPEQQAILHLHHGRRLLVRQRVALSNHMRGVLSEYGIVLPQGVKVIPRRLPEILEDADNELPMLARHLLAELKAEYDQLIERIDRFEQQLKVWHANNAVSQRLASIPGIGLLTATALAATVGEGHDFKNGRQLAAYLGLVPRQASSGGKERLLGISKRGDSYLRSLLIHGARAVIHHIRRRLKANQPGGNPWVEQLLQRCHINETAVALANKMARTAWVLVARNETYCPARPV

SEQ ID NO: 222466 - protein, 415 aa, unidentified
MALKIVYKICCGIDVHKTFVVACIASTDKHGVTSYERHRFSTYTKGLKNLLQWLLEHNCKDVCMESTGKYWIPVYNILEKDCSIVLAHPKYVKAIRGKKTDKKDAKWIADLFKHDLVSGSFMPPADIRQLRDLMRYRFKLTCFKSSEKNRLQNCLTVSNIQLGNVVSDTFGKSAQAILDKLLENPADTSFDLEPLVYKSLKKKLPELRDAIDGYITPEQAGKLKIIKAHYESLESRKAELEELILALAAPYQQEFAILQTAPGISSDFTAIGIISEIGTNMEAFPSAKHLCSWAGLTPTNNESAGKKKSVRVSKAGCYIKPLLVQCANAVVKSSKHPEMRNRYLRLKKRRGHKKAIIAIARMLLTALYHMLKNGENYNAELYQKSDLLPVDREITVEQALMIARNQGYKIKSATA

SEQ ID NO: 222467 - protein, 408 aa, unidentified
MKRYYIGVDWGDRLHQVYVGDDQGQKVREIKVPETVEGLAEIGRWLDEKKAEGFELWAAIEKPAGRIVDFLLDHGVEVYPVNPKAMDRVRDRYRMSGSKSDTFDAYVLAEFLRTDQAHLKALRPSSENAQELKLLCRDQHRVVRHKTRLLNQLTTTLKEYYARPLEVFEDIETEVALDFLTRYPTPAHLGALKRKDFNRFATQQHHLSKQRCEQLWEKLQKPQLGVPEHVVRAKAQLVEVLIDQLRASIKAVKTYKHKVESFFASSPAAELAKTLPGGKSGTMVAAIWAELGDAQGRWQSSGHLQAEAGAVPVTKASGKSHVVHFRFACNKHLRYSMYWFSFVSLNNSEWAKLYYRGQRDKGHNHPQALRALGAKWLKIIFVMWRDHKPYDEKFHLANIALQKMRQAA

SEQ ID NO: 222468 - protein, 440 aa, unidentified
MNEEDRSRLEEFRQFRKEIRGSAEYLVVGIDVAKEKHHAFFGTATGKTLFRRLVFENNLEGFRKLLVQAEAMKVQAGLTKVVFGMEPTGNYHKPLGEHLIRCGHGVVLISGVAAHENRKTLDGRWDTNDTRDAANVGDLMSQGKCLFYEFPVGALQDLRNLLSLKRRLKRMEHGHRVRIRNHLVAKYFPELDRYYEQSESTALAIVRWCLDPSVIAGLEDKEFVRMVGSVRGRSSQERRLQAIWKMAVDSVGCEAGPVVEFEAQVMVEGLKQIRGNIREIEEKIQEICSPFPEYEFLLSIPGFGPDVSSKVLGAIGDPFRFQNGRQVLKMAGLDLNAERSGKNSESAVPVISKKGKADLRYALYQAAFIASIRNQDFIVYYTNQLRGREREPGIKTKMRVKLAAKLLIIAWTLMKKKEPFHPSYLRAAGPSVSTGDGRER

SEQ ID NO: 222469 - protein, 413 aa, unidentified
MQVLFARCAGLDVHKKTVVACVMLTLLTGEVRKQVRTFATTTQGLLALADWLTNQQITHVAMESTGIYWRPVFNILEGAFTVILVNAQHMKAVPGRKTDVKDSEWLAELLRHGLLKASFIPPQPIRDLRDLVRYRQSLVQERTREINRLQKVLETANIKLTSVVSDVMGASGRSMIGALIAGEHSPEVLAELAQGSLHKKIPQLREALVGRVDAHHQILLSHLLAHISFLDQAIFHLFFQIHSYLKPYDEAVELLVSIPGIAQETAACILAEIGVDMSCFPTAAHLASWAGVCPGNRESGGKRLSGKINKGNARLKAALAEVVWVLSHMKDNYLSAQYHRLARRLGKQKAVMAVAHSLLVIIYHMLRDKQPYRDLGATFFETRDKERAVKGARRRLESLGYTVTLQPQEEVSA

SEQ ID NO: 222470 - protein, 312 aa, unidentified
MPAKLPPTYVGLDISSDQLDYSRSENDEGRCAYTAEGIAELIKKLQVLLHARVICEASGGYEKRIVAELLQAGIEVCVVQPGRVRAFAYAEGLMAKTDRLDARLLRRFGEKIEVRLAVPTDPALTTLRELLEHRRQLTRQLIEVIGRLSLAGATLRKLLEKQRLFLEKQIAAVEGMIKDHIDQNPDLKQKSARLQEINGVGPVLSATILAYVPELGKIESNQLSALIGVAPHPDDSGLRNGPRHVRGDRAQVRRVLYMAAVCAARTNPILRAFYERLRANGKPAKVCLVAVMRKLVHLMNKLILNPDFSLVR

SEQ ID NO: 222471 - protein, 342 aa, unidentified
MQITTIGLDIAKNVFQVHGVDANEKVVVRKQLRRGKLMAFFEALPPCLIGIEACATAHHWARELTKLGHEVRLMPAKDVKAYVKRNKNDAADAAAICEAVRRPTMRFVRIKSPEQQGQLMQHRTRDLLMRQRTQLINALRAHLAELGIVAAKGDAGVKELLAIVADEQDTRLPIDARASVIVLAAQLGAVQTLIGSIEKRIKTQHRANEASRRVETIPGIGVIGATAIVATVADPTVFRSGRDFAAWLGLVPRQDSTGGKQKLGPISKQGDRYVRRILIVGAHSVLRRAQENPGKYPWLTQLLARRPFKVVAVALANKMARMAWALLAHGGTYRAPELAQAA

SEQ ID NO: 222472 - protein, 341 aa, unidentified
MQITTIGLDIAKNVFQIHGIDAAEKVIVRKQLRRGQVTAFFEALAPCLVGMEACATSHHWARELTKLGHEVRLMPAKDVKAYVKRNKNDAADAEAICEAVRRPTMRFVRIKSAEQQGQLMLHRARDLLMRQRTQVINALRAHLAEFGITAAQGREGIKELLAIVAQEEGSRLPSDAHASLTVLATQLQAVQTMIGSIEKRIVAQHRSNEASKRLETIPGIGVVGATTITAVVTDPKAFRSGRDFAAWIGIVPRQDSTGGKQKLGPISKQGDQYLRRILIVGAHAVLRRARQQPETYPWLTQLLARRPFKVVAVALANKMARIAWALLAKGGTYRAPQLVAA

SEQ ID NO: 222473 - protein, 318 aa, unidentified
MNSHCKTEPTEPVQYVPLDVSKRRLDYGLEPGRLAAVANTGAGIATLVKRLEGYPQAQVVCEATGGYERALLAALGAAKIAVSRVHPGRVRAFARAEGLRAKTDRIDVELLRRYAVAMQPRVEILPSPEVEALRDLLEHRRQLDEQRVLFSNRRETAGPTLLGLIEPQLAHLEQSLQEVETRIRDHIRSHEALRTKSERLQQLQGCGPVLAATLLAYLPELGVLEDRQVSGLVGVAPHAHESGESAHPRHAHGGRIAVRNVLYMAAVAASQHNPVLAPFYQRLLAEGKPAKVAIVAVMRKMIVTLNRLLRDPNFTLAN

SEQ ID NO: 222474 - protein, 323 aa, unidentified
MTDVLGIDVSKNTFDTNLGVGTKARSKSFANSLDGGHQLIAWLGEHKIGQVHACLEATGRHGLGIALALHEAGHVVSIVNPAQIRDFARTKLGRNKTDQVDAEHIREYAELFKPRPWTPPSSAMRRLCELQTIRAGTVADLTEWKNRRGSGIMDDLALSLAETTIQHFTTQLEAVDQAIAETIDNDVELSAKRDLLVSINGVGEALAGIVLAELPGPDILGSSAAVAAYAGLNPQQRQSGISVNRPVRISKIGNAVLRTALYMPALSAMRYNPAVVALVDRLKAQGRLKGKQIVIAAMRKLLVLCFGVLKTGKEFDPAMVMGK

SEQ ID NO: 222475 - protein, 523 aa, unidentified
MPTTRSRKRARARFPTVIQKPRGVIHPRVQQVGPEHFGIVSVDCAKARFKWMFCDFYGNVFVPPTEVAHNRVELAAAIEQLRRAQAEHAVRDLLVAVERTGRYHHVPRNAFAQACADVRTVHPFTTKQFRQPSDPDIKTDDTDLAAIHRAAVNGFALAEAAALPQYRELQLAIRHRRDLVYKISALCCQIREHLDAAFPGYAACFANFWDSEVALLLVRHFASAEAMLQTGPAGLANWLRQQHVRFQERTLHTVLAWAQRAAPGDIAAQRHHRIALALDDDRVHKTQEIQALERDIAAQLVRTPYVLLLSFPGINVVSASDFAGEMGPIEDYATGKAITGRAGLFPCRYQSDQLDRADGPLVRRANRALRAAILGIADNLIVCNRYFGQLTAGWRAQGKDPRVSHVRVACRFCRIAFQIVAGRQVFRHPAIQQRHYILDKLNVFHREHHTPLDQTMPDLLAAIEQLPRSVHAQEARPLQEELDKIKAGRRRGPQLLGDILPIVLARLGFVGVQSTESGEQHPR

SEQ ID NO: 222476 - protein, 324 aa, unidentified
MTDAVLGIDVSKNTFDTNLGAGIKARSQSFANSPDGWHHLIAWLGEHKIGQVHACLEATGRHGLGIALALHEAGHVVSIVNPAQIRDFARTKLGRNKTDQVDAVHIREYAELFKPRPWTPPSPAMRRLCELQTIRAGTVAGLTEWKNRRGSGMADDLALSLAETTIQHFTSQLKAVDQAIAETIDNDLELSAKRDLLVSINGVGEALAGIVLAELPGSDILGCSAAVAAYAGLNPQQHQSGISVNRPVRISKIGNAVLRAALYMPALSAMRYNPAVVALVDRLKAQGRLKGKQIVIAAMRKLLVLCFGVLKTGKEFDPAMAMGK

SEQ ID NO: 222477 - protein, 412 aa, unidentified
MKRIYQRCCGIDVHKATLTACVRVHGAGRKLSQEIRSFGTTGDELLSLHDWLMTHRVSHVAMEATGVYWKPVFYVLEQGFTLLLVNPADVQRMPGRKTDVSDAAWLAQLLENGLLRPSFIPPRAIRELRDLVRYRSELKHDHTRVANRLHKVLQDADLKLSSVMSDILGVSGRQILRQLAAGHSEPAALAELARGSLRAKRPALRQALTGRFSEHHAFLIGQALTELDNLEESMRALAARVEQHLVPFAQQIEQLTTIPGIKRVAAAVILSEIGTDMSCFPDTAHLASWAGMAPGNHESAGKRRRAKARHGNRWLRTILVECGHAAGRTRDTALAAIYRRMIIRAGRKHAAFVTGRHILNIAYHLLTKHDTYRELGPSYFEQRRAEQLKRRCLDQLRNLGFQATLAPLPTAA

SEQ ID NO: 222478 - protein, 387 aa, unidentified
MEKTIEETSIKLEFLEQKKLNNLLYVGVDVHKDQHTALAVNCFSQILWEKEINNSKEEFCQLVKQIKKLAEGQGLEPVFGLEDTSGYGLRLACYLYQQNLPVKTISPVLVDRGRKYETHPEKSDSLDALGVAKALIQRIGTLPDYTISKTEEISKEIKELAMDREFLVKEQTRIKNQLHRFLHKAYNSGYREKFKNPFSVKALNYWSKYPVPKKSDGLISCFPILKNQIKRKLKRLRDIKKEIIEIEKELRILMDQTEQKIETLNGCGLVLASSLLAEIKNIDKFKSPDALAKYGGLCPREKSSGKKLRHIKTKSGNRKLNKAIHRIAFSQIGRNGNQYAKEYFLRKVSEGKSKSQALCCLKRRLVNIIFMMLKHKQEYRYSVKNLT

SEQ ID NO: 222479 - protein, 331 aa, unidentified
MDIHKKFTYAVVKDEQGKQFTEDKLSNTLEEFAEFLSQFKPEETSIVIESSSVWEHIYTLLESLEYKKIKLANPLKVKAIAHAKIKNDKVDANMLADLLRANLIPESYVPPAETRRLREFTRSRKMIVKQATQVMNRIHAHFTRRGITMPRRTFCKEVVAFVKEHAENDAVLGYYVAVLESLRAQLGAIDTKMRAMAQENENAKLLMTIPGIGAIRAMSIIAEIDTIRRFPSEKHFSSYAGLVPTIRQSGSTLHVGRISLQASMQLKHALVQAALTAAHMKRANVLQDCYRKLAVIKGKQKALVAAARKLSSIAYAMLWNKREFSYSYSSR

SEQ ID NO: 222480 - protein, 418 aa, unidentified
MGRFIGLDIHRDFAQVAVVEDGFVTDWGRVGCRPEALREFAAGLRPDDQVALEATGNACAVAVLIEPHVARVVISNPVKTRAIAEAKVKTDKVDARILAQLLAADFLPGTWLADERTRMLRRLSTHRAQLVRGRIQVKNQVQAVLHRNMLPHPPVTDLFGTRGRAWLQFQPLPVDERETVTALLRQLDFYGAELAAVERRMATEALDDPIVRRLMTIPGVDAMTAVTVLAAVGDFHRFPSADKLVSYLGLNPRVRQSGGQPAHHGRITKAGCGKARGMLVQAAFAALRSPGPLRALHQRIMARRGMQIAIVAVARKIAVIAWHLVTKEEDHAFARPSLVAFKRRKLELTAGAERRIARRGPGYDYNNKQLRRQEREIAEQAERAYAVLAAHWQTQRPAGKPRLPAIPGTESDPVTCAA

SEQ ID NO: 222481 - protein, 337 aa, unidentified
MNYCGIDLHSNNSVVVVIDDEDRVVAQKRLPNELARIVAFLAQWRDELAGVVIESTYNWYWLVDGLQAAGFEVHLANTAAIKQYEGLKHSGDEADARHLAHLLRLGILPTGTILPKEQRAVRDLARKRVQLVRGRTTHILSIENIMARQLGGRMTSNQIKRLSADDIDEMPLSGDVGLAMKANLAIIGALDAQIAVLEQRLRERVKPRPEYALLTSVPGIGPALSTTILLETGPIDRFASVGNYASYARCVDSVHTTNRKKKGEGNVKNGNKYLAWAFVEAANFARRFCPEAKRFFERKRAKTNNIVATKALAHKLARACYHILKEGRPFDVTRCFA

SEQ ID NO: 222482 - protein, 350 aa, unidentified
MQGNGRWIGLDLSKETYEMCYFDQKGKVGRSGGETTKAGRAKLYAKVKPEDIVAMEANSLAFVMEKEMRAIGCTVVILNASQLSVIYASTKKTDKEDALKLARLVKIYEKEDLPTVDVPTDKEYYRRKLIKEYKTLKGDRTQELNRLHALFVQCGITTIKRSNLQTDVNRQKVLAQLFDYEAGQAQRLCQRLTMLEVQIEELEQLIKKECKEDKDIQRLQTIPGVGDKTALAFAAYVGDGKRFNNGNEVANYVGLVPRVDCSGTINKYGHITKKGNKIVRALLYQAAWAIVRSSHGGALKAKYFYLTEHGKGKKISITAIARKMAKLMYLIMKNKEEEYQEVPVSALKAG

SEQ ID NO: 222483 - protein, 381 aa, unidentified
MDRFCGLDVHKDSVFACILDAQGKKILEKRYGTLTSDLTQLRDTLVEHGCGMAAMESTSIYWMPLWRVLQSDFSLKLANPYFIKQLPGRKSDVKDAQWIAQCLQKELIKGSFVPDEVLQQMRQYSRQCRRLTKSRVRLEQQMDNQLQRCNIRFSNYVSNQGNNVSLRKIINAIIGGERDPAKLSRLVHGRTKNRHGEQKITDSLNGVINDTDSEMLIQCMEQIDLLEKQQARCLTHLEELADKYYAREISLLTTIPGIQKFSAMCILSEIGNDMEAFGKANNLVGWAGLRPRNDESAGKIQSRKTLHGNKYLRQILVEISWSAARSNKSFLGKKFNTLSERMKSQKALLAITRKILVIIFNVLKTRLPFDPNKNLQAAMPV

SEQ ID NO: 222484 - protein, 381 aa, unidentified
MGDHIAAFVGFDTSKLRNAVAIAEEGRTGEVRFFGEIDNTAEATSKLVRKLAAKYGRIAFCYEAGPTGYGLYRQITGLGHECMVAAPSLIPQKPGNRVKTNRRDAIGLARQLRAGELTAVWVPDSRHEAMRELTRARGAAVQDARQKGQQVSAFLLRLGRHYDAGKKTWTKAHLGWLASQKFEHPEQRIAFEELLLAVHQARERVGRLEEAIRTAVPDWSLAELVPALMAMRGIDMVTATAFLAEIGDLTRFRTPRQLMAYLGLVPSERSTGDTVVRGPITKAGNRRARRLLIESAWAYRHPPRVSKDKQAKVAAAPRAVAEIAWKAQHRLYRRYLTLVRNGKLKTVAITALARELAAFIWAVGREIANTARVETQQGIRG

SEQ ID NO: 222485 - protein, 338 aa, unidentified
MSIVRIGIDLSKSTFHVHGVDNEERVVVQRMMSRAQLRHFLAMTPPCEVATESCGSAFHWARYAKQCGHLTKIIASQFVKPYVKSNKNDFNDAAAICEAASRPSMRFVPTKSIEQQDIQALHRVRTRRVAERTALGNQIRGLLLEYGVPIGLSLVTLRQRLPVVLEDEQNELTPRSRALFRELYAELLDLEGKIAYVERKINQIFKASEQCQRLAQIQGVGPLTSTALVAAVGDARVFKNGRHMAAWLGLVPRQQSTGGKARLLGISKRGDRYLRTLLIHGARSALRVMGRKSDRRSLWAIDVERRRGANIATVALANKTARIAWAMLAHDEDYRAAV

SEQ ID NO: 222486 - protein, 366 aa, unidentified
MSMKLRYIGLDVHKETIVIAVAEDGRGPAEAWKTIPYDVARLIKAMELLSEGAAVSICYEAGPTGYGLQRALEKAGYACQVVAPSLIPVQSGNRVKTDRRDAVKLAHFLRSGDLTPITIPDTAREALRDLERSRDDAKRAQQVARHQLSKFLLRRELRFHEGRNWSRKYMRWVHQLQLEDAVLQAVLDDYLKTVDDTTERVEQLTRCLEEKMLASSLAPLMNGLMVLRGVAVVTAATIAAEIGDFRRFATPQKFMAYVGLTPTEDSSGERVRRGSITKCGNRHVRRLLVESAQHYRRRPAMTQTLRQPSASQPEPLQKIGWEAQKRVHKRLMALIARGKPGNKAITTVARELAGFVWAIGQEVASE

SEQ ID NO: 222487 - protein, 411 aa, unidentified
MDVFCGIDWAEGHHDVAVVDRDGNLLAHQRISDDAAGLAALLELLAGHGDTPDDPVPVAIETPRGLLVACLRATGRKVYPVNPMAVARYRDRHSVTGRKSDKGDAAVLAGVLRTDMNMHRPLPADSELAQAIAVLARAQQDAVWDRTTAHNKLRSHLREYFPGFLHAFAQVRSGIMRPEARAILAAAPGPAAAATLTPAQLRALLKKAGRVRGIDAEARRLRDAFRQEQMRQLPLVEQAMGRQTLALLRQLDAACASADDLEQAATESFNQHPDAGIITSFPGIGTLTGARVLAEIGDDRSRFQDARGLKAYAGSAPITRASGKTRSVTHRKVKNNRLASAGYAWAFAALTASPGARAHYDRRRDAGDRHTAAQRNLFNRLLGCLHHCLATGQHYDETTAFPNQAATSAAA

SEQ ID NO: 222488 - protein, 414 aa, unidentified
MTYPLFVGIDVSSSDNVVCCLTKDEEKKPLCRFTVSNNRPGIMEFRERIVSLVHKHGFDQILFGLEHTGCYSTHAAMYLERHLDFECGDVNVYVFNPSLIKEFKKSNYLDAPKNDRIDAWFIASKLRSGHLPHPFTWSEPLLSLQYLTRARFHLMQDLTRESNFLMTYLYLKFSDYTVGPFSKTKLSTTSLSVMEEFESVEELAEMSIDQLVNFLVDKGKNRFDDPQAVALSLQKAARSSYRLPKSMADSVNLAMASSIRVIRAIQDELKSLKKAIEDHLKTIPQTLDSVPGIGPIFAAGILAEIGDIRQFSSHKQLAKFAGLAWSENQSGNFTASQTRLIHSGNRYLKYYFIEAANSVRVHDPVYAEYYARKIAEPKVYAEKRALALTARKLVRLVDYLLRTNRLYEPRGGIS

SEQ ID NO: 222489 - protein, 408 aa, unidentified
MATVEFPQIIERGAGLDVHKDTVVATIRGTGIIEETKTFGTFTCELEKLILWLKEAGVTHVAMESTGVYWKPVYYILEGHFDVILVNARHIKNVPGHKTDKKDSEWIAQLLLSGLLKRSFVPDSQTRELRALYRHRKKLINQRSREKNRLQNVLEDANIKLGSVVSDVFSKTGQAIIEHLIKGITDPVALSNLAKGSLVRKKTELQKALQGRFTEHHRFMAQLILDTINSINEFISRIETQMAKCSASIQHHINLLQTIPGVSYQSAIGIISEIGTNMAVFPSSKHLASWAGICPGNYESAGKKKSSRVTDGNNYLKTTLIEASWAGTHTLNTHFAFKYNQLSLRRGRKKAAMAIGHEILVASYHILRDKVPYREPKLKPEILQQRRKVEMERLQNRLEKLKRLASNN

SEQ ID NO: 222490 - protein, 442 aa, unidentified
MARKPSKQRFTVVHPDCAAVDVGGREHFVAVDPRHENPVQSFTSFTDDLLKMADWLESLGIKVVAMESTGVYWIPIYEILSERGFEVYLVNARATRQITGRKSDVLDCQWIWQLMTHGLLRGAFRPDDLTCCVRSLVRQRASKVKDQAQTLNRMQKAMSQMNIQLANVISDISGVTGMKILRAICAGQRDPLQLAELTDRRIKAGKEAVARSLHGNWRREHLHALTQELAAYDFLEQQIADCDDAIKTALEQLPVLQNKPEPSNKPLRSPHRSGAQQTELHQTLWKVLGVDLTAIPTIGVDTALVLAGEIGTDLSRFPSSQHFCSWLGLAPPTRISGGHRLAGGGPKIVNRAAQALKQAASNARNDKGFIGASHRARLTRMDTSCAIKATAHQLARLVYNLLTKKQAYVEKGLEEFEARSQDRQVRALLRKARKLGYQLVAA

SEQ ID NO: 222491 - protein, 355 aa, unidentified
MDSRKYIGMDVHQASISIAVRDAAGKLVIESLIETKAATILEFLQGLKGTLCVTFEEGTSAAWLYDLLKPHVANVVVCDPRKNALLKAGNKNDRVDARKLSDLLRAGLLTPVYHGESGVRTLRELARSYLTLTKDLTRVMNRLKALYRSWAIPCAGEKVYSPRHRSAWLEQLSEAGVRRRAEQLYQQLDILLQIRREARRELLRESRKHPAHELLRQIPRLGPIRVALLIALVQTPHRFRTKRQLWAYCGLALQTRSSGEYRFTAGQLQHSKKLPALRGLNINHNHDLKNLFKSAATHVSTSPDALGDFYRSLLAKGMKPAMARLTLARKMAAIVLTIWKKGARFDPGELKQTAA

SEQ ID NO: 222492 - protein, 361 aa, unidentified
MRVIGCDLHARQQTLAMLDTVTGEIVSRTLMHEGNEVREFYSELPCPVLVGIEAIGPMQWFLDLLEELGIECQVGDATKIRAAEPRKQKHDRRDAELILKLLVEKRFPAIWMPSKELLDLRALLLHRHQWVRLRTQVQNALQAIALANGLRRGPSLWSYGGQAKIAFLPLPPHASLRRSALQAMYRHTEEEIEKLTVQVAEQAEHRSGAQLLMTHPGVGPVTALATDVFLGDPQRFVDGKSLASYVGLIPGERSSGKRRRLGKITKQGNPLLRFLWNEAGAHAARRDPQLKRFYRRKLVHKGMGKARVAVARKLGIRLWIMLRDQIDYEEFCRRGQKQQSGAVCAGMPEVGYGANRHRPVD

SEQ ID NO: 222493 - protein, 300 aa, unidentified
MKNNTAKGPITVLGIDLAKQSFQLHGVNAEGEVVLKKKLNRKQLSAFMANLPVCLIGLEACGGSHHWVRIFTEMGHAVRMMAPQFVKPYVKSNKNDAVDAEAICEAVQRPNMRFVPAKSIEQQDIQSIHRIRSQLVARRTAQANQIRGLLMEYGIIIPQGIKCIRKNLPDILEDGENLLTAIFREQLSALYDEMVHLDERVDSLELSLKRVCNQNEDCKRLLTIPGIGLMTATALIAAIGDIGAFKSARELAAWLGLVPRQHSTGGKPTLLGISKRGDSYLRTKVSEFISSSKKLGNIDL

SEQ ID NO: 222494 - protein, 321 aa, unidentified
MAISAQPLLIGVDVSKATLAICLGPDQPAQTLDNDRKSIARWLASLPAGPVCIAAEATNTFHLDLVDLAHQAGHAVYLVDGYRLSRYRDSIGTRAKTDASDAQLLQRYLAHERDSLRPWSPPPQGYRTLQQLLQRRATLVLARVALQQSLADLPGLKQAAATLFRQLERIDLLIQKGLADTLAKLDWDADSRRCQGIEGIGPLTGAALTMSFHRGAFRSSDAFVAFLGLDVRVRDSGQLRGKRRLTKKGNPELRRLLFLAAMQAARSRSWKDFYQKQLDRGFARVQALVILARKLARVAFALLKNQTDYRPRYLKEGCMET

SEQ ID NO: 222495 - protein, 383 aa, unidentified
MKSVCGLDVHKDSVYLCILSEFGELIEKVFGVLTYQLEEMRDLMLHHHVVEVSMESTSVYWIPIWRVLSPHFKLNLANPYFIKQLPGRKSDVKDAQWIAECTMKELIRGSFVPPEIIQQLRQYDRRIFDLNEEIVRKLSKLDAVLQRCNIRLSNYVSNVDSKSYKAVVRAISQGITDPEELVKLIHGRIINHHGIDVITASLKGVVSLAEIDMISQLRDELDMAEAHKEKCQARMLEICEREFPEELKRLQTIPGIKERAATSLIAEIGTDMNKFETANHLASWSGLKPRNDESNKKIKSRSITHGNVYLRKTIIECAWAASRTKDCFFSRFSYHQTQVRKKNKMKVLVAVARKMLIAVWHVLHDNTIYIDFTTDRKTSRTKG

SEQ ID NO: 222496 - protein, 436 aa, unidentified
MEQPTRFIGMDVHKETIAVAVTAAGDSGRATGYGIIANTPEALEKLVKRLRQAGGGPLMFCYEAGPCGYGVHRRLTGMGEDCMVVAPSMIPRKPGQRQKTDTRDAASLAELLRGGLLTAVWVPDAAHEAMRDLVRARQAAVRAVRAARQQLSAFLLRHERVYAGKRTTWTKAHRGWLADQRFSEPAQQIVLQESIEAVRACEQRRDRVEAHLRAQIPSWRLFPLVRNLSALRGIDIIGGAGLAAAIGDPARFATAPHFMGYLGSVPSEQSSGPKRRIGGITKAGDVHARTLLIEAAHSYRFPARVARAKSGVLDEVPEAVRQIAWKAQLRLCRRYREMIAAGKPKQVVVTAIARELAGFVWAIACITSDPPGTAVAEPAVAETGEMAEQVAAAAKGGGSIGGSRAPCRQPLKGAARRAGPPDGASRGAARERRAAP

SEQ ID NO: 222497 - protein, 475 aa, unidentified
MNIKGTKKKNQVVTANIFEQQELLKKAEVIKENLTASTWRELETNGKFDKNKKLSFISDDMLILGCDVGSETHYVRAIDTRGRELSKSAYSFNNDYEGFQSAKEWAVKIAAEHDKSQIVLGLEPTGHYWFCLATWMIANGISVVQVNPYAVKQTKEVEDNSQLKDDRKDPKLIANLVKDGNFGMPYLPEKIYAELRRLSMFRDQLNEDRIRTINRMHREMKIYFPEYKEALGKVDGAFSLELLKEAPFPDELTALGEEGIRQIWHAAKLRGRGYSRAREILQYAKASVGIKDGSIASKAAVKWFVQKIMELDVELAVIENQINQKCQEIPHTGNVLEISGIGENTLSGILAEMGDISRFDDVKEIQKLSGLGLVACSSGKHKGETKISHRGRKRLRYWLFQAAKSAVAHAEEFKELHMYYTTRADNPLKKMQSLIVIACKLLRIIYTILNTGTFYDPKKMLMDIRRPENKEAIVA

SEQ ID NO: 222498 - protein, 346 aa, unidentified
MNSVGIDLHRKRSHIAALDETGAQLLSRRIVNDPQTFLALLEDLGECRIALEATYGWEWLADVLRDAGYELHLAHPMRTKAIASARVKTDAVDARTLAHLLRADLLPEAYIAPRELRDLRDLLRHRVALTRMRTALKNRVSAILAKHGIAAPYSDMFGVGGTQFLAELELHESPRRRLDSHLALIADFTREIDATSGEIDARAKADPYVAVLCQIRGVGRYIAMLIIAEVGDIDRFQTARRLCSWAGLTPTVRSSDGRARLGHISRQGSPPLRWALVEAAQHAARGGGPLRADYERIAKRRGKAVAKVAVARKILTLCFYGLRDGEIRCLAPRAKARTVRPVAVSP

SEQ ID NO: 222499 - protein, 344 aa, unidentified
MEQIIRIGMDTSKNVFQLQGVNAVEQPILRKTFSRKEMVNFFEKTARTTIALEACGGSHHWARLLSCLGHEVKLIAPQLTKPYVKRGKNDAAHAEALCEAMSRPTMWFVPVKTADQQAALMLAGMRERLIRNRTQLANAIRGFGMEFGIVAASGMCRIEPLLERIAGDQSLPDLARELFAVHGDEYRGLLSEIKRIEEKLMDLHRADECSRRLAEIPGVGPVGASLLMMKTPDPRMFKCGRDWIGLTPRDHSTAGKVRLGGITCVGDEMLRSVLVVGATAVLQHVGAGRSRHASRWLTELLQRKKPKLVAVALANKIARIAWKTYGERRNVSANGRTAEGSIGD

SEQ ID NO: 222500 - protein, 448 aa, unidentified
MRQVRVIHKQVAGLDVHKKTVVATRMQVTDEGRLEWQTETFGTTTPDLLKLHDWLLEWSLSHVAMESTGDFWKPVFNVLEGSFEVVLTNAQHVHNLPGRKTDAKDSEWLAELMLYGLLKASFIPPKPQRALRDLTRYRTTLVQEHTRLVNRVQKLLEGANIKLASVATDLMGVSARAMLAEIAAGQTDVTRMANLARARLRNKIPELEKALTGLVEPHHRFLLAQQLEHIDYLDEKIEELNGEIEGQLAAMSNSSAGPQAPSDEARKPEDSSPGGEQKAPLTWDKAVTLLDTIPGINQRAAEDILAEIGIDMSRFPTDKHLASWTGRAPGNNQSGGKRFSGRRPRGNKPAGSILTEVSHAASRTKNTFLNARYHRLAARRGKKRALGAISHSIIVAIWHILTYQEPYHELGGDYYDQRQKDTKVDYLIRRLERLTGGAVSIELQPIAA

SEQ ID NO: 222501 - protein, 356 aa, unidentified
MKTDYQKGKILAKGKNVYIGIDVHKDKWHVTAQVAGEEVFNGSMPSNYHSLRKLLDRFENCRIKVAYEAGPCGFWLYDKLIVDGIETIVVPPSLIPIESGNKVKTDKRDSRKLAKLLESNMLKRVYVLSEADRADRELVRTRRQILEHRSDVMRQIKSKLLFHGIKSPFPNKDRWSQRYVKWLKALSFEHQVLKISFDSLIELFEYLSIQLVKISKQIIALSQSEKYSHKVKLLKSVPGIGILIAMELLVELPDIERFKSAEEIASYMGLTPSEYSTGQHVRQGRITRCGNSRARTCLVEGSWHLIVKDPFMRVKYMTLKNRKGAKRAIIAIARNLIVRIRRILLNNEPYKIGLAA

SEQ ID NO: 222502 - protein, 232 aa, unidentified
MVYRGIDISKSSFVAAYPSTNGNPTKTFPNTTAGMRELIGTLAVAEHHCVMEATSNYGCCCTCYIRTVLPSVLPPPQKKKQIKHFSRMMMPVTKTDEKDAYMIAMYGEKMNPPIYKMPSQATIRILTTEGFTYFDNAKQLSRFIGICPTYQQSRTSVNIREHINRNDDERLRSLLYIAFWTALRYNSRECYIRLKANEKPFKVALIAVTNKLVRPVLTITTINSIYRWICPG

SEQ ID NO: 222503 - protein, 337 aa, unidentified
MYYTGIDLHKHTSYLTTVDFSGKIIKQANIKNFACNFVQYFSDLGNENIATVESTMTWYWLNDLLTTLQIPLVLAHAKFIKAIAYSKVKTDKVDSHTLAQLLRMDFIPAAHKISNEKRLLRDALRARLKMVERHTSVTNSIHLLLDKHNIDSPDQLEGISRYQYEQLSELETLLSKQILSLEKQLHPILIPDADIQRLLWIPGIGKLNAFTILLEVDDIKRFEDIKHFFSYCRLSPAARNSGGKSRQRCSKDGNRYLKLTFSNAAIHAIMYYPVIRNYYHSLLRRKNKPVARTIIAKEIAEITFNVLKLKNDFNDKFKGHFIPRKSLQWPRVVSPSY

SEQ ID NO: 222504 - protein, 338 aa, unidentified
MAIVMGLDQHRAQITADWLDTKTGEIKRGRVRPADRAGVRRFLDRFHGQQLEVALEATTGWRFVAHELAEVGAQVHLAEPAETAARRGKKKHAKNDRADARHLRELLMFGRLPESWVAPEHILDLRARVRLRHTLGEQRSEWQQRIQATLYHHGCPQRRNLLRGDGRAWLASQPLPQSAREQVTVALQMIDVLQAQIAPLESRLRAYARRQPGCQALMTHYGIGELTAVTILAELGDCRRFTSSRNAVRYAGLDITVHESDQRRAPGHLSRQGPPALRWALFEAAQGARRSTSPDRDYYEQSAERLGGNRACLAIARKLLKRSYHTLRELGEEALQPA

SEQ ID NO: 222505 - protein, 340 aa, unidentified
MNLTVFGVDVAKRVFQVHSVDHETGEVISKQLKRAVFLEHFANRVPCLIGMEACGGAQHWARRLKEMGHQVKLMPGKAVKAFVCGNKNDVADARAIWIATQQEGVKSVAVKSEAQQAVLALHRMRQQLVKFRTMQSNGLRGLLTEYGEVMAVGRAALDRAMSDLLARLNERLPSVLIDTLREQWEMLGKLDEQIAEIERRLSAWMKQDKACKTIAEIPGVGLLTATAAVATMGDAKAFKSGREFAAWLGLVPGQVGTGGKVRLLSISKRGDTYLRTLLIHGARAVLTHAKEPSAWVQEISKRRPPNVVTVALANKMARTIWALLAHDRQYQRSYVSVKPA

SEQ ID NO: 222506 - protein, 359 aa, unidentified
MNVTTVAVDLAKNVFELALADAHWKVIGRARLTRSQLQRWFANQGVGLVVMEACGSAHHWARYLQGLDIPVRLLPPKYVRAYVKRNKTDAADAAALLEAARCADIQSVRVKSLEQQALQSLHRIRSQWMATRTSRINALRGFCREFGMAISLGSRLGVEQISRLLADPDSAIPGLLRPSMTLLVEEIRLLEVRIAQLERQLGAAAQQSPACQTLLSVPGVGLLTATAMIAATGGSISHFKNARHFASWFGLTPKEYSSGSTRHLGRISKRGDRYLRMLLTHGARSVLRAATLAERAQRPLDPLRQWALAVQNRSNHNKATCALANKLARICFATLRDHEPYEKMRLRHKIERTAYAIVH

SEQ ID NO: 222507 - protein, 345 aa, unidentified
MTQYKRIAIDTSKAVFTLHGIDQQERPVLRTNLRRAQMIPFFKKLPLTVIALEACGASHYWAHELTALGHTVHLIPPQYVKPYVKRGKNDRNDAEAICEAAGRPGMHFVPVKSVTQQAQGMVLKVRESLIGQRTALINTLRGHAAEFGIIAGKGAGKIAPLLSAIGQEATIPTEAKEMFTLLGQQIHEIDIRIKDIDAKLTAAHKASEISQRLVTIPGVGPVTALTLAVEIDPAMFESGRHLAAWAGLTPKERSTGGKQRMGGISRAGNERLRVLLVSGATAVINAAMKPGSQQMTDWLRALLLRKPRKLVAVALANKMARTAWAMMKSGETYRRPITAAGTVAA

SEQ ID NO: 222508 - protein, 330 aa, unidentified
MKNYEEVVGIDVSKKTIDAYCYQAQVHKEFVNDLIGYKRLLKWVLKETKTSKVFYCFENTGYYSLKLALYLHSQDIVYVEESPLKIKRSSGVVKEKTDKLDAKLIARYAWLYREELQPSTVKSMSHLELGRLLALRDQLVRNNAGLKGTLKEMKVLLSSPTTDFGCISLKRSIDYLSKQVKGIEDRIKEIITADDSMNKNYELLSSLKGVGLVVACQLIYHTGNFTRFASWRAFSSYCGTAPFEHRSGTSIHRRKQCHYLGDRKMKSLLSMASVSAIQHDSELRLYYKRKLAEGKDKMLAINNVRNKLIARAFAVVKRGTPYVVLQQHAA

SEQ ID NO: 222509 - protein, 311 aa, unidentified
MEHSLFVGIDVAKEHLDVHLRPTGEAFRVGHDDTGLATLTARLARLGPALVALEATGGYEVTVAAALASARLPVAVVNPRQIRDFARATGQLAKTDALDARVIALFAEAVRPPARPLPDAQAQALGELVARRRQLVDMLGAEANRRRLVRDPQLQRRIAAHIRWLERALEDLETDLHDTIRASPVWRETEDLLRSVPGIGPITAFTLIADLPELGRLTRRKIAALVGVAPFNRDSGTLRGRRMVTGGRAPVRRVLYMATVTATRRNPAIAAFYQRLRAAGRPAKVALTAAMRKLLTILNAILRDHRSWQSA

SEQ ID NO: 222510 - protein, 354 aa, unidentified
MPKIASIEIAVIGIDIGKNSFHVAGHDKRGSIVLRQKWSRGQIEARLANLPPCLVGMEACVGAHHLARKLTALGHDARLMPAKYVRPYAKGQKNDFNDAEAIAEAVQRPTMKFVATKTADQLDLQALHRVRERLVSQRTGITNQIRAFMLERGIAVRQGIRFLRTELPIILASRTDVLSPRMLRTIEDLAGDWRRLDERIENLSREIETIARQDAGCDRLMSVPGIGPIISSAVVAAIGSGDVFSKGRDFAAWLGLVPKQISTGDRTILGKISKRGNRYLRVLFVQAAWVVLVKPQSWERHGLKSWIEAAKKRLHHNVLAIALANKLARIAWAVLAKGCGFEATRRVDGSLQPA

SEQ ID NO: 222511 - protein, 399 aa, unidentified
MLDDGSQPTRLFNVDNNLLGAEVLVERIYTIAKEHCVSDILIGTEATSMYDWHLLEYLAESKLALEFNLKLYRFNAKWIKNFKKSLAPRGKTDPIDSFALAERLRIGRLPKEYIPDTKYQPLRKLTRFRFHLMQQITREKDFFLANLFLKASAYSRVSPFASTFSATSLAVINDFFSVDELAAMPIEELTEFILEKGKAHFSKPGEIVDNLKRVARESYRLKPELAPTVNLILASTFNNIRCYKEQVKLVDEAIAENLKAFKHTIESTPGIGPVYAAGIIAEIGDVHRFPNDSALAQFTGLTWPKYQSGKFQAEETRMSHAGNQYLRYYFVEAANSVRRYDATYKTFYEKKYAEATKHHHKRALVLTARKLVRLIWTLLTRQVLYQPGYCSFETLSKIG

SEQ ID NO: 222512 - protein, 369 aa, unidentified
MIGACSLQANLNPKEVNETRYIGIDVGKRRCQVCVMDERGSIVDEFKFENSFEGISYLVGKVKPIPAKAVVESTGNLWLRIYEALEDIGVEMKLANPFNTKAIASARIKTDKLSARILAHLLRADLIAECYVSSKEIRKVNALLRQRASLTRIQTMVKNQVHSLLDKYGLKSDWRDIFGLHGMEWLRSLQLDPVDRCILDTHLRHLECLRRETKLLDSEIAAKASESQDAKLLMSFTGIDYHSAMLTASEIGDITRFPSPKHLVSWMRLCPSLHQSGNSTYMGKMKKDSNRRVGSIMIQAAKTAAIHDQRMKTLYDRVSARSGDNKATVRVANKMATITWHILTKKEPYHQAKDRLYASKLKNRARVAA

SEQ ID NO: 222513 - protein, 375 aa, unidentified
MSDHSEAFVAFDTSKLRNAVAIAEAGRSGEVRFLGEIDNTPAATVKLVRKLAAEYGRLAFCYEAGPTGYGLYRQITDLGHECIVVAPSLIPKKAGDRVKTNRRDALGMVTQFRAGELTAVWVPDPRHEAMRDLVRTRGAAVEDLRRKRQHISAFLLRLGLHYAGKKTWTKTHMRWLASQKLAHAEQRIAFEEMLLAVRQAEERIARLEEAIRVAVPDWSLAEVVDALMAMRGIDMISATAFLAEIGDLSRFRTPRELMAYLGLVPSEHSTGDTIKRGPITKAGNRRARRILVECAWAYRHPPRVGRKKEDKVAAAPRAAREIAWKAQHRLYARYRALTRRGKLKTVVVTAIARELSGFIWAINREITTAGAVASQ

SEQ ID NO: 222514 - protein, 386 aa, unidentified
MAHPQPPRVTIGVDTHKDLHVAAARDQLGRRLGTTMAPASRAGYAELLAWAHSLGEVAAWGVEGTGSYGAGLARFLATNGQRVLEVNRPDRATRRRRGKSDPVDADAAARAVQAGEATGTPKAQDGVVEMLRALRVARQTAVKARTQAINAIKALLVTAPTELREQLAGLPTTKLIRQAATLDPGTLATPMAAATLALRGLARRYQHLDAEISLLTGTLDQLTATTAPKLRDLLGVGPDCAAALLITAGDNPSRLHSEAAFAALCGSSPVEASSGKTRRHRLNQGGDRQANAALHRVVIARLRWHQPTRDYVARRTAEGKTRKEIIRCLIGGVSSLRPAEESGRARGACQGTASLSRHAMASLSAAAPDRAEPKTGFRKLPREGRQ

SEQ ID NO: 222515 - protein, 377 aa, unidentified
MFKRVIALDVHQAKITACAIVEHEDGRQEMFGAFKRDRRALAQWALQIRPEVVVMESTGVYWKSPFAALEAVGIIAWVVNARHVKAIPGRKTDMADAPWLATLARAGLLRGSFIPPVEFRQLRLVARQRQKLVGMLSAEKNRLHKVLVDAGIRINVLVSDVHGQSARAMVKALIKGQPVHEILDLKGRLGASREELFEALSTEQFSATHAFVADQIMQHIEYIEQRIALMDRHLLAGLQAWQPQLNLLQTIPGVDLSGAATLLVEIGADMSAFGSAERLASWVGICPGNNESAGKRKTRRIRKGNAWVRRLLCKFAQAAAQTQCALKAKFDALAIRKGRKKSVIALAHKMLRTIYAMLSNGTHYEGKTVDYEAMSVA

SEQ ID NO: 222516 - protein, 377 aa, unidentified
MNHVPTEVCPLAGPSIRPLPRPKEGPVPIVVGVDAHKNTHTAVAVDAATGVEVDQIVVAARTKGHQRLVRWARRLDADRTFAVEDCRHVSGRLERDLIKLGERTRRVPPKLMAGARKAARTRGKSDPIDALAVARAALREPGLPEARLEGPERDLQMLVDYREKLVWRRTEDQSLLRWRVHDLDPDIEIPKGALDRKVQLDHLRERLLSMPPSVSIEICLDTLERIVTATAKVNELQRRIEALVRQLAPSMLALPGCGALTAAKIVGETAGVDRFSSEAKFAMHAGIAPLPVWSGDRTRFRLNRSGNRQLNTAIHRIAVTQIRMHQPAQQFMKRKLSEGKTKTEALRSLKRHIARKVFDTMTKDTIKTPTGLQPAAA

SEQ ID NO: 222517 - protein, 344 aa, unidentified
MNITRVGLDIAKQVFQVHGVDEHGKTRVRKQLARAKVLEFFAQLPVCLIGIEACGSAHYWGRELTKLGHTVKLMAAQFVVPYRKRGKNDANDAEAICEAVGRPTMRFVAIKSEEQQSVLMVHRARTLVVANRTAQVNQIRGLLGEFGLVVTKGVARLRRELPGILEDAENGLPALAREVLCRLLEQFHELDARVSAYDRQIRVLAEASEPARRLMKVEAIGPQTATALVASMGDPHVFKNGRSYAASLGMTPRQHSSGGKDRLGQITRRGDRYLRTLLVHGARAYLRVVDKKTDAKSAWARRLKERRHVNVAAVALAAKHARIAWAILAHGTEYRPPGPELAAA

SEQ ID NO: 222518 - protein, 346 aa, unidentified
MIVIGCDFHPSWQQICWVDTVTGETEEKKLDHASGEAERFYRQLQGPVLVGMESTGNCQWFVELLTSLGHEVWTGDASKIRACDPRSQKHDRRDAALILKLLLEGRFPRIWTPSGAEKDLRQLLIHRYKLVRIRAQVKNELQHLAMNQGVTKKRKLWSQAGEKVLRELPLKPWASRRREDLFRVREMLNGQIAQLDQAVVEAAEKNEKARLLMTQPGVGPITSIAFVLTMGDIFRFQRGKQVASYLGLIPREYSSGGHQRLGSISKQGNRFMRMLLVEAGQCAVRYDPQFRNEYLHRCHSKAKGVAKVAAARKLAIRLYWMLRTNTGYPEVVRVESSSRVPLVGAS

SEQ ID NO: 222519 - protein, 372 aa, unidentified
MASIIYVGMDVHTTNFTFCCYTADSDRGFAVAQTEPDYRQVIKYMERVQKQRGEECKFVCGYEAGCLGYSLYHQLTRCGVDCVILAPSTMHQEKGKRIKTDRRDAENIARCLAFSLYSPVYVPTTEDDAVKEYIHMRDDIKADLKRVKQQIIAFTTRHGFAFDGKSYWTQKHLKWLETLVFEHPLYKETLQEYLILYYMLDEKVAVYDTRIEEMSHLEHYEENVQKLCCFRGVAAHTALSLLVEVGDFQRFRSAKHFAAYLGLVPGEHSCSDKQIRTSITKAGNTHLRRLLVEAAQSYNRGAIGKKSAALKARQGGNPAEVIAYADKANERMQRKYYRIAFKSRHNIAKTAIARELACFVWGMMTGNISNAA

SEQ ID NO: 222520 - protein, 383 aa, unidentified
MAKARKSTFERLQKGQLNRQQRKELQRKFDADSPELDVKHPHAAGIDVGGASHFVSVPPNRDEMPVREFGSWTEDLRCMARWLKACGMETVALQSTGVYWIPVYDVLEGEGLEVYLVNARGTKNLPGRKSDVQECQWLRKLHTYGLLQPDLLFELQQVMDAYDFYRRQLGIIDKQLEEYLATLPAREPVGKVEPAQLTAKQRKKLKASRKSKDNRPAFDLGAELTRLMGVDLRIIDGIDLMTAQTIYSEVGADLSAWPTEAAWASWLELVPRNDITGGKVIKQKKRPSNNRVATALRNAAESLYRSDSYLGARYRHFTGRLEGLKGVKAMAHYLACLVYRLLTKGQAWVDRGAAYYENKRQQREMVHLQKRAAAAGMKLVPIT

SEQ ID NO: 222521 - protein, 347 aa, unidentified
MNSRKVAPVAIKGKSAVDEEYDQYIALDWSEQIMAVARTTDPRRQPQAFERPSDIEELRQHLLSLKGRKILTFEETTSAQWLYLELCDLVDRIIICDTFHNRLLVHGPKTDKIDAVKLCTLLCAGLLKEVFHSADTLYELRRLVSGYDDVVQAGVRLLNQHHALERAGGPTHRAGQFAPFVTDYLQQSIALYQKVKPEYEKKFAQLCRRHRLLRNLMELDGIWTIGAVKILAVVVDARRFPTAGHYLSYCGLVKHHKLSGGRYYGQRQGRYNRLLKSVYKTAVAAALNGHNPLRAYYDYLLSKSVAEHNARNAVARYLAKVSYGMLKSGEPYQPNRWRDEAHRAANT

SEQ ID NO: 222522 - protein, 325 aa, unidentified
METKKLCCGIDVSHTKLDVCYENNQGELFHLQVGNNNQGFAKILEHTGAGYHFVMEATGVYYIRLAFYLHSRGCNLSVVNAIAIKRYIQMHLERNKTDKKDAAWICRYAIEQQPPYWQMPDSAYFECKQLYNTIREYTEQIKRFHNQLHSLGLLPVPSKDTIKSVEKVIVCMKKEIKMLEQKLQLLLEQWQPEQLKNVSSIKGIGKRAAAMLIVFTQGFKHTQNHRQLISFAGLAPTQYSSGSSIQGKPRIYKRGGKNLRDVLYMCSMNAMKTNVACKAIYERLRAKGKTGKQALIAVCNKLLKQVFAVVKNNSLYQPNYCSAKP

SEQ ID NO: 222523 - protein, 437 aa, unidentified
MLGRPLVGGTRVLARTFESVTQNEPAGAKMELKPMHRRVIALDVHQAKISACAIVEHDDGRVEMIQREFGAFKRDRRELAQWALQIAPEVLVMESTGVYWKSPFAALEAVGIVAWVVNARHVKAVPGRKTDLCDAQWLATLARAGLLRASFIPCAQFRQLRLVARQRHKLVGACSAEKNRLHKVLVDAGVRLNVLVDDIHGQSARAMVKALIEDRPIDQVLDRKGRLRASREELFEALCTEQLSPTHRFVADQIMQHIEQLEQRIARMDQYLLEGLQPWQAQLNLLQTIPGIDQIGAAMLLVEIGADMAAFGSAERLASWVGICPGNNESAGKRKSGRTRRGNAWVRRLLCEFAQAAARTRCAFKDKFQALAIRKGHKKSVVALAHKILRTIYAMLASGTYYQDRVVDYEALTVARNAPRWIKMLRKHGYIASPAAA

SEQ ID NO: 222524 - protein, 345 aa, unidentified
MNITQVGIDLAKLVFQVHGVDARGKVTLRKQLKRSQVVAFFAQLAPCLIGMESCGGAHFWARKLAEFGHTVKLIAPQFVKPYVKTNKNDAADAEAICEAVGRPNMRFVPIKNTEQQALLGLHRARQGFVAARTAQANQIRGLLAEFGLVIPAGIRCIERKLPEFLEDAQNGLSGASRLLFARLLEHFRALDRLVDELEREINAWHREDTASQRLQAIPGIGPITASALVASVGDAKVFHNGRQFAASLGLVPRQNSTGGKTSLLGISKRGDTYLRTLLIHGARSVLFSLKRNPARADGWLARVANRRNPNIAAVALANKNARIVWALLAHGRDYQAGYRSASMAV

SEQ ID NO: 222525 - protein, 353 aa, unidentified
MKTYYVGMDVHGASIVIVVLNGAGKIVMQSVVETGAERVRGFLKQLRGKVYVTFEEGTQANWLHDIVRPLVTEVVVCDPRHNKLLQSGNKSDRVDAYKLAELLRNGSLRAVYHGDNGVRTLKELVRNYDCLVSDTTRVMNRLKAIYRGRAIVCKGHDIYRQDRREQWLEKLSERGAKQRAGFLYKQLAALRPLRHEAKLVMVKEARRQAAYPWLLSVPLLGAVSVAQVIAVVGTPYRFRSKRQFWTYVGLAVVTRTTADHVVVAGVLRRSTRPIATRGLNRNHNHVLKRVFKSAASSACHSGPFKAAYDTRVARGMDPSLARLTIARQLAATTLAIWKRGEQFNPERMKQQAA

SEQ ID NO: 222526 - protein, 343 aa, unidentified
MEQYVGLDVSLRQTAVCVVDQSGKIIREAMIPSDPEAIATFIRANTSNVVRIGLESGPTSTWLWTELDGMDLPVICIDARHAKAALKIQINKSDRNDAAGIARIMQTGWYREVRVKDLDSHAIKALLVGRALLVKIKRDLENQIRGLLKNLGLVIGRAKMNTFASRAKELIEDKPALVAVVEPLLKAREVIAQQIADLDRKVMRLARSDDQVRRFMTTPGIGPITALCYLATIDDPTRFNKSRNVGAYIGLTTRRYASGEIDWTGRISKCGDKLLRSYLYEAASVLLTRVAKWSTLKAWGMRIAKRSGIRKAKVAVARKLAVILHRMWIDGTEFQWSAKEVAA

SEQ ID NO: 222527 - protein, 401 aa, unidentified
MAKTNRLFKIFLGIDISKEKFDVCCIDNTGGKLFRLSLLMEREGLDELNKKLSSLSVPKESILIGMESTACYHINLFSFLTSLGYTVVIINPLLISNFVKLQLRKTKTDKKDALVIAQFLLLNKDTLSERSLSSDISDMRDLSRQRESLIGQMTSIKNEMKRLLTITFPELEHITGLFSKSILRLLCQYPSANAIRKAKRTKIAKILIPGSYGKQTDESVERIRKAAETSIGTTSPMKELILKQKTSLLVQMEGHLQELTDILMQQCESTIQEDVDILTSIEGIGKKTATNFLIELGGDMNQFENHRKLIAMAGLDPAVYQSGTIDRKGKISKRGNRHLRRVIWLMTTKVIQFNESFKRYYLKRRKEGLVYKMAVLATAHKLIRVVFALLTNKTVFNARMN

SEQ ID NO: 222528 - protein, 426 aa, unidentified
MDVKYPICCGVDVHKSFLVAVIVKDSQPKPQYIKKRFSTFNNDLEEFKKWLIGNDCLFMCMESTGKYWVPVFNILEDKINITVANPKWVRAIKGEKDDNKDAKWIADLFRLGLVRGSYIPSKEIRVLREFTRYKYKLTGLRSGEMNRYHNCLTVGNLAVDHVFSDIFGKSSQAIIDYILNTDSANFNDDYCLSLLDKRGKRKSTNEEILNAVKNSSFTDAQKTRISIVKEHLDYITNSISRLESEIDSLVAPYEMYIDLLTTIPGMDRNSAIITLSEISCDMSHFDSSRRLCSWAGLVPSNNQSAGKKKSVKISRAGVYLKPCLVQVAHAAVKDTTNPYYANKFNRISKRRGKKRAIIAIARMILTAIHHMISTGEYWKPSDLESAEMPAEVKIKLAKSDLQRSLKTLLSNGYTIEDITNGFLSIT

SEQ ID NO: 222529 - protein, 413 aa, unidentified
MERLLERCAALDVHQASVSACVRVGDEEGERCERNERFGTTTPDLLALCDWLRGQGVTHVAMEGTGVYWKPVYYALEGEFELLLVNAAHVKQVPGRKTDTKDAAWLCQLLECGLLRASFVPPRPVRERRDLTRYRKTLIADRASEANRLHKVLEDAGVKLSSVASNVLGVSGRLMLEALCHGTDDPQVLAELARGRLRSKLPALRRALESRFRDHHAFLVSQILAHLDYLDGAIASCSKRIEEHIAPFAPALTLLESIPGVGRRNAEVIVAEIGVEMTVFPSSRHLASWAKLSPGNNESAGKRKSGSTGKGSPWLRSALVESALAATRTHGYLRAKYWRIRQRRGHQRAVIAVAHAILEIAYQMLTTGELYRELGDDFFERRDSERATQRHLRALERLGYRVTVDAVPTPGAA

SEQ ID NO: 222530 - protein, 420 aa, unidentified
MQSARTTLPEEPAGGVTAGIDWARDDHAVPVVDARGREISRCTIEHSAAGLRELAAVLARAGAGEAAIERPDGPVVDALPGAGITVVVISPNQVKNLRGRYGPAGNKDDRFDALVLAGTLRTDRARLRPLTPDSPATVALRRACRARKDLVSHRVAVANQLRAHLRNAFPGAVGLFADLDSPVSLAFLARFDTRDRADWLTPVRLGKWLASISYSGHTDPAVPHARLTAAPRGLTGPGAAAQAGITRALHAVLVTLTEQIKALSAQIGTQLAAHADSHVFTSLPRSGTVRAARLLAEIGDCRARFPTPEALACLAGTAPSTRQSGKIRAVTFRWSCDKQLRDAVTDFAGDSRRASPRAAGLCNRARARGHDHPHAVRILARAWLFVIWHCWQDHTAYDPARHHALQRLLAAQPSTAARAA

SEQ ID NO: 222531 - protein, 404 aa, unidentified
MSVHVAPVTSSTIVVAVDVGKTSAMLSVTDGARKRVLGPVEFSMTRSGLVATVHRVEAVVVASAQVKVGVEAAGHYHRPVLDYGWPTGWEVLELNPAHVAEQRRVVGRRRIKTDAIDLEAITDLLLAGRGQLITEREVLIGELSAWAGQRSRRVATRSATKNQLLAQLDRAFPGLTLALPDVLGTKIGRLITAEFADPARLCALGVSRLIRFAAARDIQLRRALAERLVTAAREALPTRDGVVARRVLAADLGLLADLDTQIETAERELAALLPASPYATLTSVPGWGVVRVSNYAAALGDPDRWPGPRQIYRASGLSPMQYESAGKRRDGTISREGSVALRRALIDLGLGLWLTEPAAKAYAAELRSRGKPGGIIGCALAHRATRIAFAMVRDHTSYDPSRWA

SEQ ID NO: 222532 - protein, 427 aa, unidentified
MRPEERIQEREAYARGFAVHVGVDAGKEFHKLVASGPDRVRTKAIKVEVHRAGFLAALEFLTATFPAVTPAETLVAIEFGGHYGYTFAEFLRARGFAVVTMPSVVTKRLKEIEDNSPRKDDAKDAAQVCKLVGAGLFVAYAELSSLVAEMRVLTTERHHLVKEETALRNRLRAILDLAWPEFQTHFPRIDTHTARALLRRWPVAGDVAAAHTRSIHALMKHVSRNHFTLDQARTLIAAAKDSIAITRGVDARRGEILRLLDRWELNIAQGAAIDARLTALVEQHPGAKALATVPQVGALCAASLVAEIGAPEHFESPRQVLKLAGMNLARRESGTSLRGRVHQTKRGRPQLRRQLYLLAGRWCQRSGPYRPAYEALKARNGGLNTSALCAIARRMVPMLLHIMQTGEPFDRARWQRDRTDPVLTPAA

SEQ ID NO: 222533 - protein, 398 aa, unidentified
MTTEYTVFCGLDVGKEAHHACALDPDGRRLFDAPLPQDEGRLRDLFDRLAQRGPVLVVVDQPNTIGALPIAVARAMGLDVAYLPGLAMRRIADLHPGTAKTDARDAYVIADAARVMPHTLRRVDVGEEALTELNVLVGFDDDLAAEATRLVNRLRGLLTQVHPALERVLGPRIHTKAVMALLSRYGGPTGLRKAGRGRLLATARKANPRGAADLVDHLLAALDEQTVVVPGTSAAETVVPRLAASLRDTLDQRAVIAAQVERVLDAHPLAAVLTSMPGVGVRTAARILLEVGDASSFPTAGHLAAYAGLAPVTRRSGISIRGEHPPRSGNKQLKRVLFLSAFAALRADPVSRAYYDRKRGEGKRHNAALICLARRRTDVLYAMIKTKTNYQTRLPQAA

SEQ ID NO: 222534 - protein, 383 aa, unidentified
MKAVCGLDVHKDSIYLCILHPDGELFEQVFGVLTFQLHEMCKLLKKHHVSEVSMESTSIYWIPIWRVLSPHFTLRLVNPYFIKQLPGHKSDVKDAQWIAECTMKELVNGSFVPPEIIQQLRQYDRRIFDLNEEIVRKESKVDAVLQRCNIRLSNYVSNIECKSYRTVVRRLSEGVTDPQELIKEIHGRIINKHGRETILAYMEGVVSQAEIDVLRQLREEIDIAESHKKECQDKMSEICQKYFPEELRRLQTIPGIKERAATSLIAEIGTDMSKFETANHLAAWSGLRPRNDESNKKVKSRKTTHGNSYLRRTIIQCAWAASRQKDCFFSWFSYHQTVVRRKNKMKVIVAVARKMLVAVWHVLHDNVEYFDFKHDCEESANNG

SEQ ID NO: 222535 - protein, 377 aa, unidentified
MSKLRFVGLDVHAETIVVAVAETAGEVRSLGVIPNRLESIRKLVHKLGPVQHLRACYEAGPTGYVLYWQLTQLGLECAVIAPSLVPTKASDRVKTDRRDAEKLARCHRAGELTAVWVPDAAHEALRDLVRAREAAKKDQLRARHRLGKFLLRHGQQRPEGVKVWTKKHREWIKSHVRFEQPALEATLADYLEEVDHVGKRITKLETAIDEAIQQAPPAIRAVVEALQALRGVAQTVAVSIVAEVGSLSRFPSPRALMGYSGLVPSEHSSGNRVQRGGITKTGNGHLRRVIGEAAWAYQHRPNVIGFLAQRQKRLAIGEESKKIAWKAQQRLHKRYKALSARGKNKNQIITAVGRELLGFIWAIGVSVEKQHQVTAAA

SEQ ID NO: 222536 - protein, 338 aa, unidentified
MKSHIGVDLHQRFCYLTAVDASGKRYGQARVANDAGALQAWLGQMPRPRQVVMEASEFWPAFERAVRPEAERVVMVHPQRVKAIASARLKNDRVDSEILARLSQADLLPEAWMADPQTQRLRKLARLRIALGQQRTTAKNQLQAVLHQEGFAKPVTDVFGKRGRAWLGKLELSAAGRMVVDTWLQMVDHLDGLIAQQKRELERMAGEDMRARWLQTVPGIGAYSAMVILAEIGDIARFHSKRALASYAGLTPSVRESAGKRKRGGIGHHGSGTLRWIMLQVAQVAARHSPAAKAWIARLRKKKPAQVAKIALARKLLTAVWALLRQGVCFEESVFGQP

SEQ ID NO: 222537 - protein, 432 aa, unidentified
MKYKIQQKQNQRIQQITDTTIIVGADIAKQTHVARAIDFRGIELGKECVFNNDDEGLTKLVTWMKELQRLHGKTDVVFGVEPTGHYWFPLGAFMQDLSVRFVLVNPHHVNKSKELEDNSPTKNDYKDAKVIANLVKDGKYTEPKLPTGIYADLRILMNLREKVVVNLGQVQMRIQNWLDRFFPEYTQVFKDWEGKTSLITLRKSPFPQDLVSLGASEIVGQWKRGGVKRAVGMKRATRLVSTAKKSIGLKEGLTAARLELMALLEQYEMFTRQRDEIMAQVEQLLNQIPGTEEMLSVPGMGFTTLAGFLAEVGDLRGYDHGQQIIRLAGLNLKENSSGKRKGKTGISKRGRSRLRALLFRAILPMVAKNAEFKALHDYYTTRTCNPLKKKQSLIALCGKLIRVLHTLGTKQVQYNAEDLLGPLRRSQLQVAA

SEQ ID NO: 222538 - protein, 349 aa, unidentified
MKTKTVAKLWIGIDFHKKTWRVHFRSDVFSENPFSMEPNPDVLHTKVKKEYKDYEVSTVYECGCFGYSAHRKFKSYGWNSFVVNPSDIPRMSKQKFTKTDSIDARKLSKFLKAGLLTSNTVPEEKREHLRSLFRRRVHLVKNTRSIKVILKSQLLYFGIKIPDDLDNAAWTIAFKQWVKDIKWEYETGKQMMLSNIKQVEYLHLETNEISNQLRKYCRNNYKKYYHLLLSVPGVGPLTAICFISEVGNIKRFRNFKQLSCLVGMMPTTYQSADTNRTQGLTPRALRIMRSYLVEAAWQAVRIDPVLREYYKKHESKKPNDIIVKVARKLLSRIYGVLRTETEYELGIVK

SEQ ID NO: 222539 - protein, 310 aa, unidentified
MDNRTTEAEVILGVDTHLDVHVGAVINEAGKWLGTLSVPADSAGYLKLLIWANSLGRVLRAGVEGTGTYGAGLARALRDHEIEVLEVNRPDRAARRLRGKSDPTDAESAARSVLSGSARAIPKTQSGAAEAMRAVSVARRSAVKAKTQAINQLRALLISAPQDIRERLWKSKPADCVAACARLRSLGNTPLLQTLTATLRLLAKRWLALADKLHSLDEMLESLTSQHAKRLRERFGVGPQTAAVLVAVAGDNPERLRSEAALAALCGVSPLQASSGKTVRHRLNRRGDRSANNPLRTIAMVRMRSDPRTR

SEQ ID NO: 222540 - protein, 327 aa, unidentified
MNNIGIDVDSVNLVCRIRRNGKDFPQMIFTNNAAGHQKLIRWATRRRKPARVCMEATGVYSLPLALALDNAPNIEVMVVNPKAIKNFATASMQRGKTDSMDAATILSFLERMPFQPWHAPATELLELQHICRRIVQLNAEVSRERNRHLAALRVGPHGRIVANDTSVNMKHLQRRIDLLEQAALDLINNAPVLADKLATITSATGIARKTGPRILAELLVLPHDMLAPQWVAHAGLDPKPHQSGTSTNRPGRISKAGNRYLRDALYFPALVASRRDPNVKAYYEKLIERGKKPKQALVAVMRKLLLAIWAMLSNDQAWDGNKFYKLA

SEQ ID NO: 222541 - protein, 367 aa, unidentified
MKKVSTVGTQQTRNVSQQKLTIGLDLGDRNSWYCVLDEAGQIQLEQRVRTTAKALGEVFGAMPRSRITLEIGTHSPWISRLLSELGHEVIVANARKVRLIGESRKKDDRLDARTLARLARIDPELLCPVKHRSAQAQADLTLIRARAGLVRARTALVNTARGLAKSYGERLRGCNVRNMNPEKAEGLSPELQAALQPLLAALESLSERIVEYNERIEKLAQQSYPQVALLKQIKGVGTLIALTFLLTLEDPHRFHKSRDVGCYLGLQPGRRNSGQSEPQMHISKEGDPYLRTLLVQGAQHILGPFGVDCDLRRWGLKLAERGGRNGKKRAIVATARKLAVLLHHLWVSGEVYEPLHNSSQTTVAAAA

SEQ ID NO: 222542 - protein, 366 aa, unidentified
MPTLFDASERDDTPSMATKKRPVTGGVDTHGNTHHAAAVDQTGRVLGDQQFPATAAGYRALLAWLRSQGRVVKVGVEGTGTYGAGLARYLAVEGVELVEVDRPDRKTRRAKGKSDPIDAIAAARAALSGQACGTPKTRTGPVEAIRALRVARRGAVKARTAALNQLHGLIAAAPEALRAELVALPTTARVATCAALSLDETRLTDPTQATRAALHAVARRIQALTAEITQADKRLRPAVAATAPRLCALPGVGPEVAGQLLTTAGDNPDRLRSEAALAHLCGAAPLPASSGRTDRHRLNRGGDRAANTALHTIALCRMRYDPRTKAYVERRTKQGLGKKEIMRCLKRYIVREVHTALLADFAALNP

SEQ ID NO: 222543 - protein, 380 aa, unidentified
MAKPLRSLVRSPGRVVLCQSRRIAVISTSHHKVSRIIIGVDTHKDEHVAVAVDGLGVRLGQRNLPTTTAGYVGLEHWASSLGEIGAFGVEGTGSYGAGLSRFLRGQGHMVIEVNRPDRSTRRRLGKNDPTDAEMAARAVLAGVACDQPKSGVDEAEMIRMLKGTKDSAMKARTQAVNQMKAVVVTAPVELRAELRHMNTSQLVARCARWNNGYPETAKSAARYALRSLARRHAQLSQEIEAIDAQLTRLTAKFAPELIESVGVGPDTAAALLVTAGSNPERLKSEAAFAALCGVSPIPASSGKTNRHRLNRGGDRQANAAIHRVVIVRLRYDGRTRAYLQRRMEEGKTKTEVIRCLKRYVAREVFGILIDMCKLRTVQNA

SEQ ID NO: 222544 - protein, 434 aa, unidentified
MIQVVYPKCAGLDVHKKFVTVCRLTVEEQGQTEKALCEYSTMTADLQAMADWLAEGGVTHVAMESTGVYWQPINNILEGRFEVFLVNAQAVKRMPGRKTDLKDAEWLANLMQHGLLQRSFIPERQQRELRELARYRLSLVQERSRYANRLQKVLEDTNIKLSAVATDMRGVSAQAMLRALIQGETDPSVLAGMAKGRMRRKQDELARALVGKLTEHHRFMLSQLLDQLDVLDQQIAKIEGRIEEQLAQMPPFQAAVTLLDTLPGVDHQLAIAIVAEIGIDMSRFPSDRHITAWAGVAPGNNETGGKQRSGKSRKGNKYLRRALVLAAWGAVRSRTNYLRSMYYRLASRRGKPRAAMAVGRTILQAAYHMLLRGEPYNELGADYLDQLDRERTAKRLLKRLDNLGYDISSVKDRSLLPPTTAEPALPRQPLPVPG

SEQ ID NO: 222545 - protein, 433 aa, unidentified
MTTHPYDLVIGLDRSDQKADLCLIDPHTDQRRTAVIDTAPEALWEWLRELRQQHPGARVGICLEQPAVHLIPFLEAYDWITLHPINPITLQKYREAFVTSRAKDDTKDAEYLADLLLSHHAKLPVWAPEDSATRAVQQLVVHRRAVVDERTGLSNRLIALLKQYYPQALLLCGEDLWRPLATAFLLKWPSLQTVQKAKPATLKTFYHLHGSRSARLQTERLALVAKAVAVTDETAVIGSFGLRVQLLCRQLQLVQRTVTAFDQQIAAAYAAHPDRSIFASLPGAGPVLGPRLLASLGANRERFAESAAQLQRYTGVAPVTKRSGGSCYIHRRYCCPKFHRQSFHEYAKESVLWCRWAGAYYLQQRSKGSHHHTAVRALAFKWQRIIWRCWQDRKPYEEAKYEAALRKAGSPLVALFDRVELGKSPWKNPAKKN

SEQ ID NO: 222546 - protein, 316 aa, unidentified
MNEMIVEKFVGIDVSKSTLDVCIEPAVQTLHVAYDEAGIKQIAVRLKEVNPTLIVMEATGGLEVRIATELAGQGLPVAVINPRQARDFAKATGQLAKTDKVDAAVLAAFAQAIRPQVRPLKDADTRALDDMVTRRRELIDMRVQETLRLGTAASKPLEKSLNKHIVWLDKRIAEIDTDLAQRLRKSDVWRTKDDLLRGIPGVGPVTTLTMLAKCPELGLLNRREIAALTGVAPLANDSGKHRGKRFIWGGRADVRAVLYMAAISAIQHNDAIKAFAERLKKAGKLPKVVIVACMRKLLTIMNSMLKNNTPWNPKNA

SEQ ID NO: 222547 - protein, 347 aa, unidentified
MDKIDFAGIEVSKGELVVALQREGQRKPLKTFVNLSPGHQALIRHVSQPGRKVRVCLESTGMYGLDVALALQRAGLEVMVANPRAVRNFAKALMERSKNDRIDAGVLLEFAARMPFQAWVAPRPAALQLHALARRLEAITDMQTAEKGRLEAVQATETTPAAVRRDLERSLRSQRRALARLSGEAVKIIEQDPGLKLRFELLISVHGSIAAASAIRILAELAVLSEDLDVRQYVAYAGLDPRECTSGTSVHKKVRISKAGNAHLRRALYMPALVAIRHQPHLRAFYLHLRALGKPKMVALVAVMRKLLHAIFGMFKHEKPFDGSKVYVLPAPEAAPVAEIPTKEVAA

SEQ ID NO: 222548 - protein, 350 aa, unidentified
MVIVGVDAHKRTHTLVGVDEAGRKLGEKTVSATPEGHLEAVEWAMRWPERQFALEDCRHVTRRLESDLLAAAEAVVRVPTRLMAGARRSVREQGKSDPIDALSVARAALREPDLPVARLDGEARQVRLLVDHRDDLVRERTRIQCRLRWHLHELFPGLVIPPKSLRRQNVLAELETRLADVDGTVAAIARELLGRCRELTLRANELEREISALVKRLGPALLELPGCGVLSAAKIIGESAGAGRFRSKAAFARWNGTAPVPVWSGSTRFRLNRSGNRQVNAALHRIAITQWRGVGDKGHAYVERRMAAGATKTEALRLLRRRLSDEIFRRLLLDERCAEVHVGDEFAAAA

SEQ ID NO: 222549 - protein, 420 aa, unidentified
MRVNEVNEKIGRITEDTLICGIDIGKTNCCARFCDYRGMEVYKKVWFDRTKNLDVIGCNITAAMYETGKNDVIISFEPTGHYWLNVNKYFNDCGLETVLMPTQTVKQEKGSYDQQPIKSDPVDALLIARLTSQGKYVKKIERDGLYQDIYSGYRLYEDLKKELNRIKNKIHVWNDKYFPEMEHVYKIDSVGIKPIYKNALLPSDIKEMSMDEFTELMTENNTYARKASIKKIKELSEKTSGINPDKYTKKEIKYLYDRYLELEKGIEEIKKELIELASQIDYVEKAVEITGVGYMSMVGIIAETGDLNNYDHAKQVLKMSGLSLKETSSGQKKGKKHISKRGRPILRRNLKQTGIALVGKNSFFMQLHNYYTTERERPLTKIISINAIIRKFVYILMALVKNKDSFDEEKAIRESCILSN

SEQ ID NO: 222550 - protein, 408 aa, unidentified
MNPLFVGIDVSSKNNVAYLMKPDGSKHSSFSVQNNLGGAKLLSERIVSALGSMQLSDVVIGLEATSIYGDSLVYALREDGSLERFQRKIHVLNPKQVRKFKEAYSDLPKNDWVDAFVIADHLRFGRINREVYMDDYRYKALQTLTRARFDVIQNLTREKQRFANYLFLKCSGVAQDKDIQNTSATTIALMERFETVDDLANANLDELTAFISETGRGRFADPDATAKAIQTAARASYRLPKTVNDTVNQAMAVSIASMRALEKQVKVLDKAIEQQFEIIPNTLTSIPGIGKVYSAGIIAEIGDIHRFESQASVAKYAGLVWNRNQSGDFEAEHSRMIKSGNRYLRYYLLEAANSVRRCDSEFRRYYDLKFKEVNKYQHKRALALTARKLVRLVFRLLKDNRLYIPPER

SEQ ID NO: 222551 - protein, 343 aa, unidentified
MPHYVGLDVSQKTTAICVVDAQGRRLWRGVCATDPGPISARISQHAGVDAKVGIETGSMTPWLVHGLRAAGLDVACLDARRVKAALQMQLNKTDENDAEGLAQIMRTGWYRAVHVKSLDAHRARALLGARAQLVGMTTRLSNMIRGVLKTFGLLPGAGRGLRFDRKVEALLEGAPEIALVVRPLLATWRQLREQIAVFDKAVLQQVRADPICRLLMTVPGIGALSSLMYVSTVENPSRFSRSRAVGAHLGLTPRRYQSGETDRSGHISRCGDGLARTLMYEAAVVILHRVKRSLHLKDWAEAIERRSGSGKARVALARKLSVILHSVWRSGEPFRWAAPAMAA

SEQ ID NO: 222552 - protein, 395 aa, unidentified
MFIVGIDIAKRSHEAIIIAEDGQVVRKAFSFRNNCTGYNLLLEQVRKLTLVKSQFVFAMESTAHYWLALYARLLKDGYTVIVLNPIQSHSLRELYIRKAKTDARDSLVIADLVRFGRCKASNVPQDKILALRELCRSRAYLVDMAADLKRKLIALLDRIFPEYESLFDSVFSKASIAVLSKYSTPQKVKNANLRKLTDLLMENSNGHFGEWKAHQLKEAACSSFGIDDSGGVYSTLLGMFLEQILSLTAQADSLEKQISVFFQEFNNPLTSIPGVGTVLAATILSEIGDITRFSSADKLLAYAGLDPSVKQSGEFKSNQNRMSKRGSPYLRRAIWLASTVAVHRDPMFQTYYEKKISEGLHYMNVIGHVSRKMTAVIFAVLRDGWPYQPILPTAG

SEQ ID NO: 222553 - protein, 367 aa, unidentified
MTYYCDIILSNKPKPYVEVKKTKKYSYFVGIDISKNKLDIAVCHERNFLFHTEIMNDDQAIRSFVSKLKEMPGFKLSKAVFAMENTGFYGNHLLSVLFKLKASIVQDHPLKIKRSMGVTRGKDDKNDAIRIAEYTWKNRDEIKLWMPKRKIMTELAGLMTLRNRLIGVAVILKTPQKEEKSFIPGKYHSGKVMACKASIAAITGDLEAIELEIRSLISADDHLARLLEIITSVPFIGFVTAVTMIICTNEFKDICDPKKFACYSGIAPFPRESGTITRRRRISPFANRKMKALLHVCAVGAATRNEELNNYYKRKLEEGKHKLSIFNAVRYKLVLRVFSCVKQDRLFIREIRCAKTLVIVPVENCVI

SEQ ID NO: 222554 - protein, 312 aa, unidentified
MEPLSLGIDISSKRLDCYWSHLNKHQSFENTLSGIAQLLLKIGQEKPVWIVFEPTGGYEIDLAFHLAEKGIAFSMVQPHRLRSFARSCGKLAKTDKLDAKLMATYGIKMTPKSTILGTKAQKELSSFVTRRRQLVDLLSIERQRIDQGRDPLIQEDVKDHCEYLKNRIINLEKQIQDCIHQDINLEEVSQTLQTFRGVGPTSAAVLLADLPELGHIGPKEISSLVGVAPFNSESGNTARKSKIRGGRLSVRCILYMVALVAIRHNTVIKEYYNRLRSQQKPPKLAIVACMHKTLIILNAMTRDHFKNKTVPS

SEQ ID NO: 222555 - protein, 331 aa, unidentified
MAQNNLVVVGIDVSKDKVDACIRSLSQRQTFPSTPEGRRMLIRWLRKHKVGKAAMEASGGYERDWAKALREADIEALIVDPKRVRNFARSAGRLAKNDPIDAEMIAWFAETFVEAKGQAYDEAREKLVKIVNARQALLDLQTSLRNRSEHSAPNVVQKMQGRLLKNIALEVAKLEAAITALIKATAHFAKLAEIIESVPGLGEITCAGLIAAMPELGQVNNKTAAALLGVAPYDQDSGKRRGDRHIQGGRRKVRNLFYMACMGAATRHNPVLKPFYDRLIAKGKEPKVALTACMRKLIVILNVMIARGEKWDATRYNVSDSARLPPSACTA

SEQ ID NO: 222556 - protein, 389 aa, unidentified
MMEWIGEMITVETRVHPLVASRPLNGLLIPIGNGDAPMSYEYHIGVDYHKAYTHLVVQDSGGKVLRSGKVKNDPQSLAGFLTPYLENSHAVMEASRNWTVMYDWLDELCDDVVLAHPLKVKAIADAKIKTDKIDATILAHLLRADLIPESYVPTEAARELRQALRERIFFVRLRTMVKNRVVTIFDRYPTQTRALREMTDLFGKEGRGQLELLCVSVIDREHIDRAIAFIDDIDQKIREAEKTIRRFSKDNADVKRLKTIPGIGEFFGRLIAAEIDDISRFRSAKKLAAYAGLVPSTYASGGKCWNGRIIKAGNKWLRWAFVEAAIPAIRAEPALKFDYERLKATKGANRAKVVIARKLLTIAFQMLRDKRDYERRDALEQLPTNSRLS

SEQ ID NO: 222557 - protein, 331 aa, unidentified
MFPVGIDVSKNTLDLCMLYDGIKGRIKTRNIQNNRHSVENILRWLRLQHCSPEDVHVVMEATGVYHERLATELHDAGFRVSLANPHRSREFARGMGIMTKTDKVDAYMLACYAFLKKPHRWEPPAPEIRYLGALLRRRDVLLGDALREENRLEKYLSTDTPADIISSCMHMAQLLREEVSNIERQIKAHIKVSPALRRDYTLLTSIKSVGPQLGMHMLVVLRSHDFSSAEQAAAFLGVVPIEKRSGTSVRSRPRMSKIGPPQLRAKLYMSALCGKIYNKRMRNIYDEMCLRGKPKMVAIGALMRKLVHWCYGVLKTGIVFNDGGLKQVLST

SEQ ID NO: 222558 - protein, 346 aa, unidentified
MSSDGLDLSRKRLDFHLLDGEGTTVDVGAAPPDADGLHGLSERLAGHGEPIRAAIESMNGARFVHDRLELHGWQVEIADAQKVKGLAPLACKTDRIDAWVLAELARRDLVPAIWLPDPMVRAERERARWRLHLVRHRSSLKQRVHAVLLTHGKPCPVSDLFGVRGRQLLAKLALPEPWQGTIEASLRLIDELEREITDCERELRRLGADHRYVPLLLTVPGISWVLAYTIAAEIGDIARFPTPRKLAGYSGLCPRVYQSGGRDLRGPLSKQGPRYLRWALVEAATHACTSAAYRDRYQQTKARLGKQRGAKVAQIDLARRLAEAIWHMLTRNEPFAPKGATDPLAA

SEQ ID NO: 222559 - protein, 351 aa, unidentified
MRRPKEKLIAGLDLHSNNVMIGIINEDGKRVAHRKLECDLKQVTEFLKPLKPQLQSMAVESTFNWYWLVDGLRGQGYGIDLANPAKIEQYNGIKHVDDKDDAFHLAELQRLNILPKAHVYDPQLRPVRDLLRRRTLLVHQRTSLLLSFKSLYARTTGQALPLNETKRMEPKEAVKLYEHPANQLIAQVQVEHIEALSASVSRIEKTVLASAREIPLYDKLLTIPGIGKILGMTITMEVGDIKRFPSNGDFASYCRMVDARRLSNGKCKADNNQKCGNKYLSWAFVEAANFARRYNEACRRWYDRKAAKTSSVIATKALACKLAKAAWYLISQNADYDPNRMFPAPSRKPTK

SEQ ID NO: 222560 - protein, 399 aa, unidentified
MVLDREPFREKFVRLDLPLFINVVIRTVGVDGPTASLCQNWGCKQPRPEPSMTQYKRIAIDTSKSVFTIHCIDAQDRPVLRTNLRRGQLLPFFRKLAATEIAIESCSGSHHWGRELTALGHTPRLVPPQYVKPYVKRGKNDRNDAEAICEAAGRPGMHFVPVKSRTQQAQGMVLKVRDTLISQRTVLGNTIRGHAAEFGIVAGKGISTIAPLLSAIEQEATVPPEAKEMFVLLGQQIAEIGARIKEIDAKLNAAHKASEVSTRLATIPGVGRVIALTLSTEIDPSAFESGRHLAAWVGLTPKEHSTGGKQRMGKISRAGNERLRALFVSGATSIINAAMKPSSRQMTEWLRALLLRKPRKLAAVALANKNARTAWAMMTSGETYRRPTPPPGATGALAA

SEQ ID NO: 222561 - protein, 312 aa, unidentified
MTSSVTPTRFIGCDVGKRSITVFDSQTQRSFVVANTASALRTFAKRLDACCLVICEATGGYEARLLASLVAAKVPAHRADARKVKAFIRSFGTLGKSDKIDAKGLSRYGAERQTRLVRWQARDESRISLQTLVLTRNDLVKSRTAFQNRLAAPQSQAARPHLKAVSAKLNAEIAKIEAKIGELERNSQPLRQALEILTGIVSIGATTASALLALMPELGTLNRRQVASLGGLAPHPNQSGEQERYRRTRGGRSAVKDALFMAALSASRYHPTLSLLYQRLIQRGKKQIVALAAVRRKLLVIANAKLRDAMAV

SEQ ID NO: 222562 - protein, 345 aa, unidentified
MPYYAGLDLHRSMSVIVLKDAQGQLICQGRVDNDPVALERFFAPHLEEPIVVALEATTNYAWMYDTLERLGCRVELAHPLKVRAIASARIKTDRIDANILCDLRRANLLPTSYVPPPPIRDLRELLRHRMRLVHDRTQVKNRLTTLLTKANLQAPGTDPFGVKGRRYLAEIPLSPMLDWQRKDGLAQLDFLNSQVHRIDRQIQVIAKKYAQVPCLTAIPGIGIFSALLILAEIGEIARFPSAKQLVSYAGLAPGVYQSAETRHGRGITRQGSRYLRWILGQNAQHAIRRPGPLRQTYLRLSKGKGHGKAVVAVARKLLVGIYAVLHDGKPFCPTDPGTLVQRSPR

SEQ ID NO: 222563 - protein, 353 aa, unidentified
MQYIALDAHKTYTLASVEPVEGGKPRETRIEHGPGILRGFLGRLDQGSPVAVETVGNWYWIVDEIEAAGMVPQLVHARKAKMMMGMVNKTDKLDAQGMNRLQRTGTLPTVWIPPAEVRDKRDLARTRMMLVAQRTSLKNRLHSTLDKYALSVLEEEVSDLFGKKGRELLKERTKQLPSETRFSAQQTIQALEEIEEHIKALEKRIAEVFEETEEIRLLKTLPGIGPILSTVIAGEVGDVGRFPEAQNLASYSGTTPKVSSSGGKTSYGRLRKDVNHYLKWAFVEAANCVCLNRKKFPKRHASLLYERVRSRKGHGKAIGAVARHLAEAAYWVLRKKVPYRDPAGSLAVLPTKG

SEQ ID NO: 222564 - protein, 349 aa, unidentified
MGQVSTIGVDIAKSVFQIHGVDADGTVVIRKRVGRARVLEFFADLPPCRVGVEACATAHQWAREIRMLGHDTRLMPPTYVKAYVKRGKNDAADAAAICEAVTRPSMRFVPIKSVEQQSVLMLHRTRDLLIRQRTQLINALRAHLAELGLVAAKGREGVHQLVTMVSECGTERLPSNARFACQAIVTQLHAVQIEISGLDKRLTQIHRVNADSKRLDTIPGFGVLLSTAVVATMTDPKAFKTGREFAAWIGLVPRQNSTGGKERLGSITKQGDRYLRRLLVVGATSVINSARARPYKYPWVIELLGRRPTKVVAVALANKMARIAWAVLAKGEPYRTPTRPWNAVVPAAA

SEQ ID NO: 222565 - protein, 406 aa, unidentified
MTVGIFVGIDWAEHHHDVAVVNAEGAVLAKFRIGDDVAGLSRLSRALAGLSSSPAGVQVALETDRGLLVAALVAAGYRVFSVNPKSVDRYRDRYSVSGAKSDPGDALVLAHLLRTDGVRHRSLAADSQAVAVIAVLSRAHQDAIHLRQREASRLRSLLREFFPAALTAFPAVATRSAMVVLGAAPTPQAAARLSCAELHKLLQSTGRRGVPVKAAERLRQIFTAEQLRHPAAVEDAMGCAVRTILTSLIAYDNAIKDLEAELTKHFEQHPHAEILHSLPGLGVVLGARMLSEFGDDPDRFTDPAARRCYAGTAPVTRASGKSRIVLMRRARNERLADACRWWAFNAIGKSEGADAYYRRRRAAGEPHEAALRRLANKLLGQLHHCLQHHQLYREDIAWPTQVDHAA

SEQ ID NO: 222566 - protein, 343 aa, unidentified
MNYVGIDLHKKTIVLCVMNQDLKVITRRTLACCQTEAIGEYFAGLGPFRAVVEATASYEWLVALIEPLADKVILANPKKLRVIAESVKKTDQLDAQVLAEFLTRGMIPEAHRPSPRQREHRTLVRHRQYLKQCGTALKNKMRRIAGDYNADRKDLFSAEGWKRLEQVKLSTGDRFVLDQLHAQWQFLEEQLWDLGKQLKAFAASAPAREAEARAKLGTIRGVGPVTIDVVVSELGDVSRFRSSKSVTAYSGLAPKVRQSAGKGKDLAITKEGSPLLRWALVEAAWRVVHQSAAWQRIYERVKKRAGGKKAIVAVARRLLCVMYAMLRDGTNYDLLKVGEPQAG

SEQ ID NO: 222567 - protein, 430 aa, unidentified
MSVDRSREPEPLFAAFVGIDWADQKHVWCLQTADSQKRESGELEHTPEAVEVWVAQLCQQFAQGPIAVALEQSRGALVFMLSKYERLHLFPVPSTMAGNMREALYPSGAKDDPRDADLLLDLLLKHRDKLRRLSPDTEATRRVQNLVEERRKLVDEKTEQINRLTSHVKIYFPQVLDWFDRLDREAACALLERWPTLEELQKVSSVKLRTFFCKHHCRDQEVIERRIVGIRQAVPAIRDRAVSEAKSAVVQVIAQLIRILVQGIAELDRKIEEQAAAHPDFFIFDSLPGAGPALAPRLLSAFGSQRVRYSSAQEMQAYSGIAPVIERSGKKKWVHFRWAAPKFLRQSFHEWAGRSIAQSQWARTYYEQQRQRGKGHHAAVRALAFKWIRVAFRCWKNGIAYDESMYVATLARRASLRSGSIVALSPAKSL

SEQ ID NO: 222568 - protein, 349 aa, unidentified
MQKKSQIRSIGIDLGKTTFHLVALGIRSQILVRKKFSRAQLLAYTANLPSTLMGMEAGVGSHFLGRALREQGHQVRLIPAQFVRPFVKSNKNDYRDAEAIAEAVERENMRFVPIKTEDQLDLQALHRVRDRLVARRTSVINQMRAFLLERGISFRKGPASLRRQMPEILENADEKVSARMRCLLDFLWQEWKGLQEQIESLNTDLEQIASSDASCVRLQQIPGVGPLVSTAVVSAIGNGAALKKGREFAAWLGLVPRQWSTGGKPKLLGISKRGNPYLRKMFIHGARAAVLRVKREGSSLGKWMSGLETRAARNVVIVATANKLARISWAVLASGNDYHPSYKAVVVSN

SEQ ID NO: 222569 - protein, 384 aa, unidentified
MNKHSILFIGLDTHKEFNEVAYIEDHRGAQPVHFGRAPSSKIAVKKLVRHFESKYPDATLHFVYEAGPCGYWIYRLITSLGHCCYVVAPSLIPKKPGERVKTDKRDAMKLAKLLKTEDLTPIYVPEPEDEAVRDLSRAREVAMKDLKDAKYQLKALLLRNNINYAGTANWSLKHLRWLTELVLSHPAQQLVLQEFIQTISERMARLERLDNELTHHVHQWRYYPVVKAIQAMRGVRLLVAAGVIAELGDLSRFDHPRKLMSYLGLVPSEHSSGGKRHIGAITKCGNGRARRLLIEGAHTYRYAANISTDMQKRQEGLPKQIIDIAWKAQLRLCKRYKKLISKGKHYNLVVTAIAREMIAYIWAIAKEVVLTPVDPKLRLARVPA

SEQ ID NO: 222570 - protein, 351 aa, unidentified
MMIIGVDYHPSFQTIAFLMEETGECGEQELKHSDGQAEKFYRDLKQRGISVRVGMEATGYSRWFERLLAELGFELWIGDPAEIKAKRVKKQKYDRNDARLLRRLMLENNFPQIWVPSPENRDLRQLLWHRHRLVQMRTRIMNQLQALAMNEGYRWKKKLFREEGRAQLEKLTLAPWASRRRRELLELLDRMNPTIEELTAAVEREARKRPEVLRLMTHPGVGPLTALAFVLIIGTWERFPRGKQIGTYVGMIPSEDSSAGKQRLGHISKQGNSLLRFLLVEAAQAAARIHPSWRRRYIHLAMRRHKSIAKVAMGRRLAIRLYWMWRNGCEYSPSLEFGSYAGQLGTGHGVR

SEQ ID NO: 222571 - protein, 333 aa, unidentified
MRFIIGCDFHPGYQCIAMLDTETGELVKKRLVHEGEEVRKFYAGLPAPALVGIETSGHSQWFEKQLGELGHEAWIGDAAKIRAAEVREQKTDWRDALLILGLLQQGRFPRIWVPTPEERDARQLLLHRHKLVRMRTQVKNQLQALALNQGVRRKSKLWSVLGRAQLESLALLPWAARRREDLLKLLDDLGPRILELDRAVAQQAWARPTARRLMTHPGVGPVTALAFVLTTGPVSRFRRGKQVASYFGLIPRERSSGGKQRLGHISKQGNAFLRGLLVEAAQSAVRHEPELRRDYQRLAQRKCRALAKVAIARKLAVRLYWMLRTDSDYAQLL

SEQ ID NO: 222572 - protein, 311 aa, unidentified
MSKRRVDLGLRSFDVAVRPDGLHWEVPHSPEGIAAFVRRASKLRPQLVVMEACGNLERSLARALEKKGIPVAVMNPRQVRHYAKSIGQLAKTDKLDAEVLARFAEFVQPVPRPLLDEDAERFRDTLARRHQLVTMITAEKTRLRQAAPAVRLGIEAHLQWLADALNQLDEEIRQQRRSDADWEERTRLLETVPGVGSIVSTTLIGFLPELGSLDRRKIASLAGVAPFNRYSGLRTGRRSVWGGRAQVRRAMYMSVITGIRCNGPIRSFYERLRGQGKPAKVALVACMRKLLTIPNAMIRDGTPWQPQTTGP

SEQ ID NO: 222573 - protein, 370 aa, unidentified
MTRKSSKKLYVGMDVHKESIDIALAEEGEQVRHYGRIGGDMNALTRTLRKLESLGRSLVFVYEAGPCGYGIYRMLKARAHACWVVAPSNTPRRVRDRIKTDRRDCLKLAGLARAGELEPIYVPDVRDEAMRDLVRAREDAVIMQRQVRHRLGALLLRNDIRYAGKTAWTDAHRRWISSVVLPGGAAQRIAFEEYVLAVQESTERVRRLTQCIEQQLVHWRWRPLVAALQACRGIQLIHAARIVAELGDLSRFSHPRQVMGYLGMIPSEDSSAERRHQGAITKAGNSSARRALVEAAHAYQYRAAVTPIIARRQTGLPKAVIDIAWKAQLRLCARFHRLAARGLNRNKTVVAVARELAGFVWAIAQQVKPL

SEQ ID NO: 222574 - protein, 401 aa, unidentified
MPEQPVIQRWIGLDIHKAYFVAVGVNAEKCTILGPHKISNEHLEDWIAKHLLPTDAVVMEMTTNTYQFYDTLVPHVGSVIAVHPPHVLLVTGVKVKTDKKAALTLAQLHAAGLLTGVWIPPVEVRELRAVIAQRSKMVRLRTQAKNRLTSLLHRTHRERPAQPFQPEQKAWWDSLPLTTIEKYIVASDLETLAFAGKQIDAIGEVLRQEAAKDERVPLLTQLPGIAMLTALTILAAIGPIERFEDAKHLVGYAGMGASVHDSGQMHATGHITKAGRRDLRGAMVDAANAAVRHHLYWKKVFERLEYRLGRSKAIVAIARRLLVAVWHILTNGVADRHADETSVAASMYKLAYEIKVNNLPKGTSARAFTRQQLDRLGIGQTMDVLPWGGKKVKLPPSQLNT

SEQ ID NO: 222575 - protein, 392 aa, unidentified
MYIVGIDIGKNHHEASIVSPEGKQIGHSLRFATTHKGADSLMSFIFNNIGNSSCIFGMEATGHYWYPIYSFLKARGYTIYVINPIQSDSLRKMYIRQTKNDSIDSFLIAEVIRFGQFTTTSMADENILAMRQLCRYRDSVISSRTEIKLRISTIMEQIFPEYEKQFSSLWLSTSMGILEKYLTPENIENAPIDELFEIIKDKSHNKLTMKKAISIREAAADTFGIKIAQDAFSFQLKQLIDRMNFLDKQIEALDCQILEYYEKFDCYLHTIPGIGMIGAATILAEIGDISRFKNSSSLIAFAGIDPTVRQSGEFNSTHNHMSKRGSPYLRHAIFLAATTCSFHNSPLNAYYKKKRDQGKHHLTATGAVARKLTTVIYAVLRDSKPYEPKKFC

SEQ ID NO: 222576 - protein, 373 aa, unidentified
METIYIGVDFHARQQTICYLTTNGGEILLHVLKHQDKEAVRSFYAQFRGRVIVGLEASGYSPWFERLLEELGCEVWLGNAMQIRRRARGRHKNDRRDAELILDLMIHDEFPRLYLPPMQSREVLRMLRYRQKLIKMRTMAKNSLQALALQAGLAKGSHLFTKAGIQELLTAPMSPAMQWQRSHWLQLLEPLNEQLLETMHWLKQQSLNDQRIGRLRTHPGIGLLTALCLVHSLEPVSRFRNTRKVTAYAGFDPLERSSAEKTRFLGISKAGSRVLRYLLVEAAHTAVKHDVDLKRFYQRLAERRGRPKAKAAVGRKLLIRAFIMLRDEIDYAEFQRRAVAARLARRSPGPTMPGTLIGQSASAEHRENSPTTS

SEQ ID NO: 222577 - protein, 446 aa, unidentified
MVIQRFYSGMPYIIQKKGSDTKCREVLPGIHAFIMKGGINQMDGPIITVDVSKGNCHYQPFLEKGKPLRKPKILYDTIEGFEELQKSIDLTRQKSEKEVSVVFEATGVYHRCLQKYLDDHDIPYFIISPLLSATYRKTDLHANKTDALDCGHIAKAYYGDEKLHVFEKQEDRFISLQRLNRMYEDELQHLRKRKVSFRSTLDIIYPRLDRCFNGKASLYDPVIMEILKKYPHPKLLLKHKEETIAKAIERRTDHGFLFISKIVHKVCECAMKCYSGCDINDIEVRKLPDMIEELQDQMERCESLLSELVKKASEIEYFNNVASIIGIGVNLASRIIAELGDISRFKNRKAISAYAGLNPKILQSGDKDGIHLKISKKGNRHLRCLLYLGATCNYRLKKGDPLYEFNQKKRQQAVSPLKPKAANIAAAHKLLVIIYALCKNGEQYRF

SEQ ID NO: 222578 - protein, 315 aa, unidentified
MGVDVSKTHLDVHCLQSGQTSQYTNDASGIQQLQAFIAEQGQPAVACEASGGYEREMVLTLSAAGVRVSVVNPLRVREFARAIGRHAKTDPLDAHCIAYYGQVVCPAPVVLATEVERDIKALVTRRAQLVEILSGEKNRRSQLNGPMADDVDAHLDWLKDRIEQLEKKIQSLAADHDEWSECQALLQSAKGIGPTISMGLLVYLPELGQLNRKQIAALVGVAPFNRDSGRYSGKRRIWGGRAEIRSLLYMATVVAIRHNPPLRAYYQHLREQGKLKKVAIVACMRKLLTCLNAMMRDRTPWQDERVSAFFQTADA

SEQ ID NO: 222579 - protein, 461 aa, unidentified
MRNNRKSGDSPGSTRPIAGLPIVRAQVAGIDIGSERHWVCAPGLEGSGREVADFGATTPELVQMAEWLKERKIESVAMESTGVYWIAPHEVLEKDCEVLLVDTRQLARVPGRNKKTDPSDCEWIQRLHSCGLLNGSFRPQEQVCMLRTLVRDKAILVAESADWVRRMQKSLDQMNVRVHRAVSELNGVTGMAIVRAIAAGERDAQKLAQLRDRRCRQSEQEIAEQLSGHWREDHLFSLRQSLQMYDAIAERITAYEQEILRKLADMEVEEHGGAPVPPVKNLQKAKAIKKRGQEPMRQALYRMSGVDVTQIDAIGVETVEVVLSEYGPDLSRFPTEKQFVSHATLAPRVRKSGGKPLKHKKRNSASTRVAAALRMAVLSLRHSETALGAYYRRLARRIGADVAVFATARKLATLIYRLLRWGQPYVDEGAEAFEKRYRQQHIKGLAARAKELGYQLMPTTT

SEQ ID NO: 222580 - protein, 392 aa, unidentified
MIYVGIDVAKDKHDCFLTNSDGEVLFKSFTIPNNRKGFETLFQRVESVSDDLTKVKVGLEATGHYSYNLLGFLLDKGLTTYVINPLHTNLYRKSLSLRKTKTDKVDSRTIATMMMSDMNLKSYSDTSYHNEELKSLTRYRFDKVKERAKLKSSVSRLICILFPELEKLVPTLHIASVYALLSEFPSADAVANAHLTRLSNLLSESSKGRYGKDTAVMFRDAARSSIGSHMPAKSLELKHTIKLIQELTAEIDEIEAAIKRIMDEEIQSPILTIPGISYRMGAMILAEIGDFSRFDSADKILAYAGMSPSTYQSGQLDNCYSHMEKRGSRYLRYALYNATKYVCHWDKSFGAYLEKKRSEGKHYNVAISHAAKKLVRLIFAMEKSGKAYLPTA

SEQ ID NO: 222581 - protein, 355 aa, unidentified
MESTKYIGMDVHKDAISIAVLNSSGKLVMESIIETKAITILEFVHGLRGGLHLTFEEGTWAAWLYDLLKPHVTKLVVCDPRRNGYLKQGSKSDRIDARKLAELLHSNMLRPVYHGEHGVRPLKELARSYLTITQDQTRVMTRLKAVYRSWAIACAGKQVYGQRHRLEWLGKIQEPGVRRRAEFYYLQLDALRSLRLEVRRELLLESRKHDASRLLCQIPSIGPIRAALLIALLQTPDRFRTKRQLWAYSGLAIETHDSAENQYVDGQLQRSRKQTSIRGLNQNHNHDLKNLFKSASAVAAVKAGPFQKFYDAQIGKGIKPEMARLTLARKIAAITLIVWKRGVSFDAKYLNPQTA

SEQ ID NO: 222582 - protein, 334 aa, unidentified
MENIALIGIDLGKNSFHIHCQDRRGKAVYRKKFTRPKLIEFLATCPATTIAMEACGGSHFMARKLEELGHFPKLISPQFVRPFVKSNKNDFVDAEAICEAASRPSMRFVQPRTESQQAMRALHRVRESLVQDKVKTTNQMHAFLLEFGISVPRGAAVISRLSTILEDNSLPLYLSQLLLKLQQHYHYLVEQIKDLESQLKRKLDEDEVGQRLLSIPCVGTLTASTISTEIGDGKQYASSRDFAAATGLVPRQYSTGGRTTLLGISKRGNKKIRTLLVQCARVFIQKLEHQSGKLADWVRELLCRKSNFVVTCALANKLARIAWALTARQQTYVA

SEQ ID NO: 222583 - protein, 359 aa, unidentified
MKEYISFDSHKHYTLAAHEDRRTGVVWQRRINHSPGAIREHLRGCEPETPVAVEATGNWYWIFEEIEQAGLKGVLVHPRKAKLMMGMINKTDKLDADGLNRLQRNGTLPTVWVPPGELRDLRELTRGRLVLTRERTRLKNRIHATLARYGLTITDTSDIFGVGIRPTLLDSIGRLPVETRYMTELLLGRLDHLAAQIAVVEKRIETLARKTPEMRRLMTAPGVAEILATTILLEIGDVGRFPSAEHLASYAGTTPRVKASGDKVRYGKLRPDVNHYLKWAYLEAANSVALNHAKKPGRFVSRQYQRLSVLRGPARAKGAVARHLAEATWHMLIRQEDYRDRGASATGKRLVARRKVSGT

SEQ ID NO: 222584 - protein, 410 aa, unidentified
MIAMGQGLSSSSCFCRLKSVSAVPPIPGMTAMDLSTYAYGMVRPRSPFPPAYAGGEEIRSKEYAMTRPSTAAVATLGIDIGKNVFHLIGLNKRGAITLRQRLSRRQLEARLTNMPPCLVGMEACVGAHHLGRQLRALGHDVRLMAAKYVRPYSKGQKNDYRDAEAIAEAVQRPTMKFVAIKTVEQLDLQALHRVRERLVSQRTGIINQIRAFLLERGIAVRQGPRPLRSELPLILTMDKLSSRMLHVIEALAADWRRLDERIEALSSEIAALAEDDASCQRLMTVPGIGPIISSATVAAIGMGDLFSKGRDFGAWLGLVPKQMSTGGRPLLGRISKRGNRYLRVLFVQAARVVLRLRPETWERHGLKRWIEAAATRMHHNKLAIALANKLARIAWSVLHHGRDFQMSKLR

SEQ ID NO: 222585 - protein, 380 aa, unidentified
MIESSDYESVQVFIGVDVGKDTHHAVAINRSGKRLFDKALPNDENKLRSLISDLKQHGQILLVVDQPATIGALPVAVASSESVLVGYLPELAMRRIADLHAGEAKTDARDAAIIAEAARTLPHALRNLKLADEQIAELSMLCGFDDDLAAQTTQASNRIRGLLTQIHPALERVIGPRLDYPAVLDLLQRYPSPEKLASLGEKKLATQLSKLAPRLGKRLAADITRALSEQTVVVPGTNAAVVVLPRLALQLITLRKQRDEVALEVEQQILAHPLYPVLTSMPGVDVSTAARLLTEVACRAFASATHLAAYAGLAPVTRRSGSSIRGEHPSRRGNKTLKRALFLSAFAALRDPDLQGLLHTQNEPGKTTQPGAYCPGKTAL

SEQ ID NO: 222586 - protein, 403 aa, unidentified
MNAVGIDVSKGKSMVAIMRPFGEIVSTPFEIKHTSSDINSLIELINSVEGESRIVMEHTGHYYEALAHELSAANLFVSAVNPKLIKDFDNDSLRKVKSDKADAVKIARYALDKWQNLKQYSVMDELRIQLKTMNRQFGFYMKHKTAMKNNLIGILDQTYPGVNSYFDSPARSDGSQKWVDFASTYWHVDCVRKMSLNAFIDHYQKWCKRKKYNFSQSKAEEIYGKAKELVPVLPKDEITKLIIKQAVDQLNSASTTVEELRTLMNETASKLPEYSIVMNMKGVGPSLGPQLMAEIGDVRRFTHKGAITAFAGVDPGVNESGTYEQRSVPTSKRGSADLRKTLFQVMDVLIKTMPQDDPVYQFLDKKRAQGKPYYVYMTAGANKFLRIYYGRVKEYLATLPESN

SEQ ID NO: 222587 - protein, 407 aa, unidentified
MTQKDAPPKRFIGLDVHKHYLIAIGVDEDLNQVLDPQRVKLSYLEKWMSKTLCKEDAVVLEMTTNTWQLYDDLLPHVGSVTVVHPPHVALITRAQVMTDKIAASILARLLAKGLLVGIWVPPKEVQELRALIAHRNKMTRLATQAKNRLHAILHRGHIQPPEGNLFHEDQRGWWLGLELSPARQTSLLCDLDALDFAQQQIKRIETTLKTLAAEDQRVPRLVQLPGISLINALTILGAIGDITRFPSPKKLVGYSGLGGRVHDSGQTSRRGGITKAGRRDLRTAMVQAAQTAANTHPHWKTELERLQPRLGRNKAIVAIARKLLVSVWYVLTNEVSDRFAEPELVARKLLQYAYALGKANRPASQSPGQYVRYHLDRLGLGADLTAIPWGTKKPRPLPPSSLLQNSK

SEQ ID NO: 222588 - protein, 342 aa, unidentified
MDQISIIGLDLAKGVFQVVGRNVAGEKVLCRQLRRAQVEPFFARQERCVVAMEACAGSHFWARRLRELGHDVRLIPPIYVKAYVVRNKNDARDADGLSLAVQRPDIPTVPIKSPDQQAQASLHRVRDLLVRQRTQCANQIRGLAAEYGLITRQGREGLKQLISQIGSDDLPEAAREALRLQVGHHRELGEKIDELTARICREARACEQARRLMTIPGIAEIGAHALIARLPDASTFRSGRDLAAWLGLTRLDRSTGGKPKTQGPISKRGDRALRRQLVLGATAVIAHQRRKGRLDPWIAGLLQRRPFKVVATALAAKMARIVWALLVRGETYQSGHQPKLAA

SEQ ID NO: 222589 - protein, 494 aa, unidentified
MLSARCLSVVKDNVSVIGEPVVGIPLERMSMMTYPRWRDIADSTKEDFMAPRKRKSQELTVKHANAAGIDIGSASHFVAVRPDRGGDTVREFGCFTEDLEAMARWLLESGVDVVAMESTGVYWIAPYEILESHGLKVYLVNARHVKNVSGRKSDVLDCQWLQQLMTFGLLTGAFRPEGDICALRAVSRQRDALLREQARQVQRMQKALTQMNVQLTNVITDIVGKTGQDIIRAIVGGERDPEKLAKLRNYRIHASEAEIAKSLKGNWREEHVFCLRQALALFDTYQKLIAETDAKLEELIKPMRHHQRTLPPNKKKGRGKNAPSFDALNMLYQWVGVDLTRIGGIDVTTALKIAVEIGTDLSKFKSSKHFASWLGLCPGTKITGGKKLSGASKRLPNRVAQALRLAAQGLHHSQCALGAYYRRMAARCGAGKAITATAHKLARLIYAMMTKGEEYVQRSQQHYEESMRKRTLTYLKRKAKALGYRIEAIDAEAV

SEQ ID NO: 222590 - protein, 414 aa, unidentified
MALMRWVGRAIGLDVHRDFCVVAICEGGEVGAAGRVPSTPEGLSMLADSLVRSDRVALEVTGSCWEVARILEPHVDRVVVVSPDDTGITRARAKTDRLDARTLARLLWSGELESVWMPDERCRVLRRRLARREQLVRSRSRAKNEIHAVLQRRLQGKPPCSDLFGVKGRRWLAGLELPVEERESVEAGIRHVEFLDAEIAAVKRLIAQQALAWPEIRRLMTVPGVNLICAATFIAAVGDPRRFLTSRKLVAYLGLDPRVRQSGEAPARSGRISKRGSASARWALVEAAWSVVLQPGPLHAFYDRTRARRGHGKAIVATARKLAILFWCMLTRGQDYAHQQPSLTAQKLRRLEIAAGAPPRKGKPSGVWVTHQKMRAAEKQLAAQAQASYKQTVRDWKAASPKKNVGASVTAERA

SEQ ID NO: 222591 - protein, 315 aa, unidentified
MYLGIDVSKATLDCCLISDGLFFERKFKNSKVGFQELKDWLKENGATERLHCCCEATGKYYEAAAEYLSRYYRMSVENPRKIKGFGTAVLQRSKTDRQDAKTIAQYCKALEPRPWQKPTEAQTKLQELTRYQHRLKRQKAAEQTKLQTAPTYLLPLIQSTIIHLQQQIKAVQNQLNQFHKDNPDYKTQKERLKTITGIGEAAANSLLSVLTQTDRFKTAAQFVAYLGLDPKENQSGTSLKGRPRISKLGNTHLRTTLFIPAMHAYRSSTFAKYVSRLQKNGKRPKVIIVALMRKLAVIAFTLLKNGQDFQVERYK

SEQ ID NO: 222592 - protein, 360 aa, unidentified
MDVHSTNYTLSSYVFEEDKHFATVKLSPETDSVLSYVKRIRREYGDDVDVITGYEAGCLGYTLYKDLKKNDVECIIVAPTSLPKQKAGEIKTDKRDARKIAQCLATGNYKTVYVPDNHDDEIRQYIRMRDDHKLALKKVKQQILSFCLRNGYKYTQGKNKFTKKHLKWLRDLQMPHLLKTILEEYLISYDYYSLRIEQMDSRIEEFAKEERYKQNCEKLCCLSGMSTHKALCHIVETSDFSRFRKADAYSAYIGTVPGEDSSSDKVKRLGLTKTGNAHLRTLDIEAAHAIGRTTKKKSKALIQRQSLCSPEVINYCDKANERMRKIYVDISLRKNKQVAACAVARELSCFIWGLMTDHIS

SEQ ID NO: 222593 - protein, 337 aa, unidentified
MNEAITIGVDLAKSVFQLHGVDHNGKSVLRRQLRRSQMLEFFQKQPGSLIGLEACASAHYWARELGKFGHDVRLMQPSYVKGYVKRGKTDAADAEAICEAVSRPSMRFVPVKSEETQGQLVTHKTREFLVRQQTQIVNAIRAHLGEFGIVIPKGIQNVGRVIEACDSAKLPTAARKALNLLADQLIDTQKKIAELTTDIRADVTSNEAAQRLQTIPGVGPITASAFVATLPDIADFKSARDLSAWLGLTPKPHSTGGKERLGRISKMGNKYLRRLLYLGAMAQVSARRRGEPGDDWLWKIIQRTKPKQAAIALANRMARRIYALLKHGTEYQANYAR

SEQ ID NO: 222594 - protein, 353 aa, unidentified
MKKVIKQVLGIDVAQKELVTCLGKLDEDLELNLYAHKTFANTVKGFELLLQWVKKQTEQSVVVRYVMEATGVYHESLAYFLNNKGMEVSIVLPNKISNYARSLTIKTVTDKTASEAIAQFGLERKLDNWEKPSPIFKKIKQLTREREQLIIERTMAKNQLHAEQAEAEPNKTSEGRIKKRIEFLSKQEKEILVEITSFVKSDDKTSSIVELLRSLPGVGSLTAAIIVAETNGFELIRNKRQLTSYAGLDVKEKQSGTSVKGKPKISKKGNRFLRKALHLPALCAIRHDERFKAIFVRLVSKHGIKMKAVVAVQRKLLEMMYTLFKTNKKYDKDYFKNQESEAKVESEVLEEVI

SEQ ID NO: 222595 - protein, 341 aa, unidentified
MKNLFIGIDFSKEKVDVAIISADGLVEKGQRVFNEFKTTVSGYKQLVKWVEKNSSNIDPSQWIFCGENTGDYSKGLCNFLYGKGYDMWLENAKSIKDASGLRRLKSDRADASMIAEYAMRNYDRAIMYEPLSESLAQLRELFLYRQMVIRHRCSFQVRRGEKRLTMEKSPIKTMISQSGRHIVSELNKVIEKINRKIEELIASDDELREIFSIVTSVPGIGPQNAVCLMVYTDNFRRFNYDSRKIACYYGIAPFGKDSGTSVHSDPRVHYMANRQIKAMLTQAALAAVNFNPVMARYYMRLVERGKKKQVALNNIKNKLVHLVTAMVRNRQKVNPDYKISA

SEQ ID NO: 222596 - protein, 341 aa, unidentified
MSKGSTVACQRLFCGIDVSAATLAVAVQQEGLERFEHHEFANTCAGHKKLTAWLLRHSRTVRVSLEATGIYSQDLALALDAAEGIEVAVLNPQQVHQFARSMQRSKTDKADAMALAEYSRRMPFVPWRRPSLAALRLRAISRLIASLREDHSRLRSRLHAARASAATPDCVVKLLKDAMAQLQKSRLKLVREAMAVIAQDTELQRKFELLKSVKGIAETSAVQLLGELAGMDPAMSVRQWVAHSGLDPQHRSSGTSVHPPSRISRRGNRHLRLALYMPALVASRFDPHMKVFYNQLKARHKASLQALVALQRKMLHAIYGCFKSNTPYNGATLFPKLIPTS

SEQ ID NO: 222597 - protein, 452 aa, unidentified
MGKSNKKAIKIGFHEGLPQIRANAGGMDIGASEVWVDVGGKDPEPVRRFETFTADLQEMGDWLKRCGIETVAMESTGVYWIPICQVLESKGIEVVLVNARYAKNVSGRKTDMLDCQWLRILHSYGLLEASFRPARDIGVLRAYMRHRQMLIEYAAAHVQHMQKAMTQMNLQLQHVLSDITGATGMRIIRAIVDGERDRNRLAAMRDVRTKANETTIAKALEGDYRAEHLFALKQSLELFDSYQKQIEACHQQIADHLRSLESKADPAAGLKPARTTKKKRRNQPDFNIREEAFRISGVDLTEIDSIHESAALGLLAEIGVDLSPWKTEKHFASWLTLCPNNKISGGKVLHRSTRKSASRARDILRLCAQSLLVSRSALGAYCRRMCARLGKPKGIIAAAHKLALLVYRMLKFGRRYVDGQEQYEEKYKERALKQLARKAQHFGFQLVPSCQQ

SEQ ID NO: 222598 - protein, 402 aa, unidentified
MGSLWAGVDVGKTHHHVCVVNDDGTVVLSEKIPNDQQAISGIAGRLGKRRKPIRWAVDLRGGPASLLLAVLLDRGADVRYVSGTVTSRMAEAFHGERKTDAHDAYVIAQTLRMRMRMRNDLPTLTLADEVQQRLQLLVSRRLDLVADRIRITARIQDLLTMISPALEKTLNLRSKGALRLLEQWQTPARLRRAGEARILAHLRQHGVRAAMALTVKVLTAAQTQTVTVAGETTAAGIVAQMAADLEAVNDRITALEETIAGIVAEHELGEIVTSLPGIGTTLAAEFLAHTGTLTTYPSAAALAAHAGLAPISRDSGRRQGHQVRPHRYHRGLRRVFSMSSFTALTHCPRSRAYYDKKRAEGKTHRQATAALSRQRLNVLWACIRDQTPYQPKQPRSAELALR

SEQ ID NO: 222599 - protein, 316 aa, unidentified
MAAESYVGIDVSKAELVVAVRPSGERLTLANDRAGIKRLVGRLGELKPTLVVVEATGGLQRQVVAGLWLAGIAVAAVNPSWVRNFAKGRGVMAKTDRKDAELLALFAQRERPEPRPPADAETQALQDLVMRREQLLEMLVAEKQRLHRASGPMRKELRHHIAYLEGRIKELEEDIDKTVRRSDAWRRKSEIVRSVPGFGPRFSAIALAKMPELGTLNRKQIGALVGVAPMPDDSGRRHGRRIIAGGRFEVRNKLYMCALVAARSNPVLKQFYERLVTRGKPKKLALAAVMRKLIVILNAMLKTNSLWRPPCPDPSV

SEQ ID NO: 222600 - protein, 345 aa, unidentified
MKITTVGIDLAKNLFQVHAVDERGRAVLRKQLRRDQMAGFFVNLPPCLIGMEACASAHHWARTLQKFGHSVRLMAPQFVKPYVKTNKNDVADAEAICEAVSRPNMRFVPIKSVEQQAVLSLHRVRQGFVRARTAQGNQIRGLLGEAGLIIPKGIVNVAKRVPALLEDAGDEVPASFRQLIQRLTEHLKELDRQVDELETQIKAWHRGSKLSCKLEKIPGIGPLGASALVASIADAKSFDNGRQLSAWLGLVPRQDSSGGKPKLLGISKRGDVYLRTLLIHGARSAILAAQRKAVNTNVWLAGLLNRRHPNIAAVALANKNARTVWALLAHGREFRADYAPEASAA

SEQ ID NO: 222601 - protein, 350 aa, unidentified
MNISHYIGFDVHKKSISYCVKTADGKIVEEDKVRATHQALREWAGKRSEAWHGAMEATLFSGWIYDTLKPFAAELQMGNPSMMKAIGAAKKKNDKLDARKIADLVRCNLLPACYVAPAEMRDLRRLLRYRNLVVGQAVQMKNRMSGMLMEVGAEYSKQRLHGKQYFSELLDRLEEVPESVKDLLRLSRGALETFAATQQQILNRLQREPLLAKRVKLLKSISGVGEVTALTWALEICDPRRFPSIGDAVSYCGLCSALVSSADKAKRGPISKQRNAHLQTVLIEASKLAPRWNKQLAEVYDRELKRGDCNQATLAVARKLVAYLLAVDKSGKRFEVRTPPVTPVEVAQVA

SEQ ID NO: 222602 - protein, 450 aa, unidentified
MSPLALDVVIKTGKTPVLGRMLSKYVGRKTSSIENGITKARNHSRQRGNIMRVVFGIDVSKASSEVAILVNGEKIHGYTIPNDAIGFNRLLGDLRTVYQPEIVFEATGVYSRRLQAFFEDNSYAYIRLNPLESKKQLDSLRVRKTDKIDAEKLATSQFILNRKPSYVQEALYQELRDLSRFYQNLTEDIVCSKNRLHKVLQVTFPELENILSSPTGKQYWNLVMAFPCNSFVLELDDAALRAIIRQSTSKRISEKRVTYLVDKLTKLANHSYCAVKKTSPMMEEVKYYAGELLRLSEYRQSVLEEMITLAQPLPEYEILLSIPGIAETTATSIIGELGDIRRFHSANQINAFIGIDLRHYESGNFLAKEHITKRGNPYARKILFKCIQNIASASHTNACHIADFYEKRKRQSQVTSTKPHTIASIHRLIRTMYYLITHNKLYDYTSTQNR

SEQ ID NO: 222603 - protein, 352 aa, unidentified
MPRTTRFHSVTTTIGIDMGKNTLHMIGLDSNGAIVLREKVWRGRIASRLANLPPCLIGIEAGMATHYVARELAALGHNVKQVPPTYAKPFRQGHKNDFRDAHAVAEAVQRPTTRFVPAKTAEQLDLQALHRVRSRLVSERTAVINEIRGFLLERGIIVRQGLRFLRQSLPDFLAKRTDVLSLRMVRIVADLADDWRRLDQRIETVTDEIETVVKSDDNCRRVMTVPGIGPIISSAMVAAIGNGVAFARGRDFSAWLGLVPKQMSTGDRTILGRISKRGNGYLRMLFVQAARVILRRPTNWSKHNFGGWLVCAAQRLHPNVLAAALANKLARIAWTVLAQQRCYEARVTKAAA

SEQ ID NO: 222604 - protein, 388 aa, unidentified
MQDVADQSAAPTTIGADLCAIFVSLELSRSTWLATSLSPGRGEKMSKHSVSAGDIAALLARFSELRRKACARTGKSFPIVVIQEAGLDGFWIHRVLLSEGIESHVVDAASIATSRRRRRAKTDRIDGETLLRALLAHKRGEPRVCSMVRAPTPEDEDRRRICRERKVLIMERVQHVNRIKGLLFSQGASGYEPLRRDRRARLEALQTGDGRRLPQHLKAQVCRELDRLELLLEQIKAVEAERDALLNAEQTKASAPPPMLLGVHGVGPEFASVLWSEGLSRHFDNRRQVAAYAGLAPTPWQSGSVNREQGISQSGNRRLRTTMIQLAWLWLRHQPRSALTLWFKDRMERNGGRRRKTTIVALARKLLVALWKYVSAGVVIEGAMIRPA

SEQ ID NO: 222605 - protein, 388 aa, unidentified
MPRQLNDLSRSLVALEQDATLIAVIEMGQSSWLVAGIVPGIERQPLKKLAPDQHALLQLLHRWQKEANEAGQVIKRITVAYEAGRDGFWLARWLRAREIEAYVIHPSSVPVSREHRRAKTDRLDTELLKRAFLGWLRGEPKHCSMAAIPTIADEDARRPSRERENLVKEATRLVNRMKANLARLGIRGFRPHLARAARQLQTLQTPEGAALPANTLAELRRDMDRLRFAKQQIKQIEAARIERLEREPAEQRHAMVRLLGRVVGVGVETADMLVHEVFARRLRDRRAVARYAGLTGAPDESGNKRRERGLAKAGNARVRRGMIQLAWRHLLHQRDSALAQWYRARTADARSRTRKIMIVALARKLLIALWRLLTTGEAPAGLLIRPAA

SEQ ID NO: 222606 - protein, 466 aa, unidentified
MARKQKSNKSKKHKRPIQSLETIQPNAAGIDLGSREHWVAGPPQEDKVPNVERFGTTTPELLRLADWLTQQGVKSVAMESTGVYWIPLFEILDSKGFEVLLANARQVTHVPGRKTDMLDCQWLQLLHACGLLRGSFRPSDDICRLRALFRERNTMVDQRSDWVRRMQKSLDQMNICVHHAVSDITGVTGMRIIRAIVDGERDPQALARMRDRRCRKSEEQIAAELTGNWRSEHLFNLHQALKMYDQLCTVVADYDSEILAYIQTLQPEDNNDTAVPPPSTKAKARGIAKRGQEPLRQALYRFSGFDMTTIDGIGVDTASVVISELGLDYTMFPEEGNFVSYLRLAPNLSISAGKKVPSKSKASTCTRVASALRMAALTLRNSKTALGASYRRVAWRKGASVAVFATARKLAQLIYRLVRYGQAYVDAGAKAYETRFNQRRLKFYTKALNDMGYNVEPLAAAEANSG

SEQ ID NO: 222607 - protein, 314 aa, unidentified
MSKSLYFIGIDVSKDHLDVATRPTNQQMQFGNNDDGIDKLIEALNPISPTLIVLEATGSYHRLVLSRLIAGGLPAIAINPRQARDFARAIGRMAKSDAIDADILAAFGEKIRPELRAVADEATQQLEAICTRRRQLVGMLTAEKNRFHSSPSSMRSLIKKHIQWLEKHIAELEEDLDDQIRSSPAWREKDDLLRSCKGIGPTTSHTMLACLPELGRLNRHQIAALVGVAPFNHDTGLYRGRRHIQAGRSDVRCVLYMATLAAIRSNTVIRRFHQRLIAAGKLKKVAITACMRKLLTILNAMVRNHKPWNLDFVC

SEQ ID NO: 222608 - protein, 577 aa, unidentified
MDFKNNPHNFFNTNLLFNPHGFYISSAGLLNFCWGYEKHHWSCCFNNIQEIALSIPNFRLLLLYIILIKCSVIARKMCILTLLFKQHRIIVYPVIPSLGKLHIRKLSYRHLPVMIHDKQGCITLFITPEKVYHPSVPPDIWTVVLATISMSEKEAITFVLVHFKEELKMNNYISNPPDQSSRAGSNPLVVGIDPHEDILGVVFLLNNTIIKGFSIPNCSKQHFDNLIADALSKSSNVAFVIESTNVFWRPLFSYLTNKGLPVFTVNSYQTNSSRKTKMIKTKTNLIDANNIAELYLQGKAHQTLFPEGQLFDLRELTRFYFWISDIKGRILNRIYTYMFQVFPEYSSVFPKRYFSKTLFYLLKHKLFHPQSLSKMDPEKLSEIIRKVSHDKYTNKVKQLVSLANNSTGISEGKKTFETTLKLLATFYQFLETMLDFMELKSISPILETVPNKFSTIKGFSKIAQASFISELGNPKKFDNADDVLAFFGLDPSLGQSGRRNGQGKHISKAGSKFARETMFLAATTVMLHNPVFKQRYQRLRKQGRHYIDAKTILAADLTKICFAMYRDNSEFDSNKVI

SEQ ID NO: 222609 - protein, 339 aa, unidentified
MTRYVGVDLHRNQFVVCILEENGRQSLSEYRLEQLPGFVGKLRPTDKVAVEVTGNTRLFYDAVAPHVAEVVVVNPTQFQVTRQSVKKTDPHDARTLAWYLSKGMLPEVRMKDKLHAQLASLTQTRDTLVKQRTALKNKVNNILSAHGINLRKEGLSSEAALEEILGMKFDAIVQTELRVIVGQIRALNQSIAELDQAIQAEGPKLPGYRNLRSIKGIGNLGATILLSVIGDIQDFADPGKLAAYFGIVPRVRNSNEVERSGRITKRGTKLGRTALVQCALIAMRYSPYLARFYHKIAARRGAGKAIIALARKFLGVIYHTLKNNWVFEDFPNFVLAEAS

SEQ ID NO: 222610 - protein, 373 aa, unidentified
MPKYSTAFGMDVHLRSTTVCALDADTGEAVTRRFPGNPWGEIAGWMDGFPGPSLAAYESGYLGFAPQRELAGLGVECVVAAVSKIPRSAADSASKNDRNDAARMAKAILAHDISPVWVPSPEVEGIRDLAGAYDGATARLAAAKQRLLAFLAKRGFVYGGTTPAGNPRKYWTYDFLRWLDKVRPEDDGGVRTLAALRNEVEAAAEARADLLSEYRAAVDASPIAAEAAALQSIKGCAFALAAAFASEVGDFTRFRSGRQVTAYFGLAPSQRSSGDSVRLGGISGAGNALVRKLAVEGSWCYAAARHQPKLMPRDTGVPLEIRMHGRKGSERLLRRREEMLARGMPAAKANAATAAELVRWLWALGMMCREGAE

SEQ ID NO: 222611 - protein, 431 aa, unidentified
MLKINPLSTLYVGIDVSSKSNYVCALDFYKNKYINSSFANNQPGAEELALKILECLKEHPDITTIVAALESTSVYSIHIANYLSSCEELMRFKPYVFVLNPKCTANYKKSYIGLGKSDPIDAFVIADYARAGNIESEPWRGSQFLALKRLTRHRLHLVECMTREKTYLVSNLYLKFSELQMLEGDDQPFCDIYGATSSSVLMEYFSPEEILDSSEEDLIAFLAKKSRNRIKDISKTADLLKKAARDSYRLDKALYGPLNVSIASSFNCIETFKREIKVIDNAIEKEIKGLNPNAFIILQSIDGIGPVFAGGIIAEIGDITAFHSSDALAKYAGLTWKSNQSGDFDGEDTPMIKAGNRYLRYYLGEAANSMRKHNVEYGTYYRKKYNEVPKHQHKKALALTSRKFVRLVYGLLARNQLYSGVSLDTSIKDSN

SEQ ID NO: 222612 - protein, 343 aa, unidentified
MRGPRARILRKAGHTKIRIPSRKEPVTPTADTFVGIDVSKATLDVHVLPAKRAWSTPNQDNAVHALCKELAALNATLIVLEATGGLERRLLAALLAAKLPAVVVNPRRVRDFAKANGCLAKTDALDAAIIALFAERIRPPVRPPVDAETQELAALLARRRQVVDMITAEKNRLSADPPSKRVQRAIRKTISYLEKQLDEVDNDIDTAITNSPVWKAKDDIIQSVPGAGPVLSRTILSHAPETGTLNRKQIAALIGVAPLNKDSGTLRGRRIIWGGRTEVRNVLYMATLAAIRFNPVIARFHARLIAAGKLKKVAIVACMRKLLTILNAMLRSNSQWQTTEVLP

SEQ ID NO: 222613 - protein, 336 aa, unidentified
MGNVTTIGIDLAKNSFSLHGVDAAGAVVLRKTVSRARLVGLIAEQPPCLIGLEACSGAHEWARRFQRFGHTVKLMAPRFVAPYRKNGKNDGNDAEAVCEAVSRPHMRFIPIKTPEQQAVLCLHRVRQGFIEERTATINRLRGLLAEFGFVLPQRTAEVRRGVAALLEQLPPHAARALGDLWEHLRLLDARVRQYEHCIAAHARENKAAQLAQQRQGVGPITASAIVASVGDLREFKNGRQFSAWLGLVPRQHSTGGKQRLGHITGRGDPYLRTLLVMGARSVLQRAAAQSDPLSRWALAVRARRGYHRACIAVAAKNARVVWAMLAQQPPTDAAAP

SEQ ID NO: 222614 - protein, 369 aa, unidentified
MGAALLADGEYEVRVYGLKHQKEKRSMDHFAGLDVSVKDTSVCIVDGTGKIVREVKVASEPDALLAVLRNPAYRFKRIGLEAGPLSQWLFSALAEVDLPAICVETRHMRAVLKAQINKTDRNDARGIAQMMRVGLYRPVHVKTLRSQKLRMLLTHRKLLQSKAIAIENDLRATLRNFGLKVGMVGTVKFEVRIKELVENLPDLILLVEPLLVVRRVLREQLDLLHRRLLAVVRDDAICRRLMTVPGVGPVVALTYRATVDVPARFRKSKSVGAVFGLTCSRDQSGERDRPGAISRCGDEMMRAMLYEAAQAMLLRSTRWSWLKAWAVQIARRRGMKRAIVALARRLAVILHRIWVDGSEFRWTREAAAA

SEQ ID NO: 222615 - protein, 318 aa, unidentified
MGSIATDRQHKVVIGVDPHPGSHTFSAVDSNGGVLDELRIENTVAGREALWAWADRFPDRRWAVEGPGNRYAKELVSELILAGEQLHAVAPAMTAEYRKRYRRGKDDEIDAGSAARSVLANDDVPVYLPTEYEAELKELTRTYQRLVVQCKSTKMALDQLESREVREALRGVIDVLSDAIEELKRKIHHMVKKTAPGLLRAMGVGPVVAGTLLAETGRVDRFSTPAQFAAYSGCAPISWDSGAHQAHRVNPGGNRRINWAMHIVVMSRLRIDQRTQAFRDRKLREGKTQREVLRILKTYVARELFRLLKSCNPDSATT

SEQ ID NO: 222616 - protein, 408 aa, unidentified
MWFVGDDWAEDHHDVEVQDASGRKRVRARLPEGVAGIARLHELIAGVLGADAEPDQVSLGSETDRGPWAAALVAAGYRVFAINPRQVARARERHGTSGAKSDAGDAHTLADLVRTDAHQLRPVAGDSPLVEGIKVIARAHQNLIWDRHRHVLRLRAALREFFPAALEAFADLTAPDALELLATAPDPDRAARLSRSKIAAALKRARRRDVEVKAEAIQAALRSAQLTQPAELTDAYAATVRSHVALIAALNAQITTLGEQVDAHFGRHPDAEIYRSQPGLGDLLGARVLGEFGDDPDRYGGARARKNYAGSAPITRASGKKTVVLARHVRNRRLADALHQQAFCALSASPGARAYYDSLRARGAGHHAALRQLSNRLVGVLHGCLKTRTRYNETTAWAHYNQDQDVAA

SEQ ID NO: 222617 - protein, 317 aa, unidentified
MEKTSMIVAGIDTAKDKLDVAICGQTQRLQVANSMRGWKQLRLELTKAGVERVGIEATGGYERGVVRHLQAAGFVVLVLQPIQVRAFARMHRQRAKNDALDAALIAACAIAIKPHEIGPDQRLTALADSLTFVEQIEEDIARFKTRLEHIAEPRLKRMVLADIARLKVRRLAQLRLIAKQLRAHHDLAVRLDLVMSVPGIGERTALALIIRMPELGRISREQASALAGLAPFDDDSGKYKGQRHIAGGRARLRRSLYAAALPAAFRWNKALINLYSRLTAAGKAHNVAMVACARKLLIYANTVVARGTPWRENAVPT

SEQ ID NO: 222618 - protein, 373 aa, unidentified
MNSDSVVLVGLDVHKDSIMVAYSVGFGDVENLGKISPRATDIDRLCKRMQSKASQVMFVYEAGPCGYGLHRQLTGKGHQCMVCAPSLIPRKPGERVKTDRRDAARLVRSLRAGDLSPVHVPTIEDEACRDLVRAWGAAKQDLKQARQRLKAFLLVHDVRYTGRADWGPAHRRWISGYSFDLPWQQIAFEEHRRTIEDRLTQCARLETTLREAAPQWRFYPVVEALQALRGVQFTTAIGLMAELGDLSRFDHPRQLMAWLGVTPSEHSSGQHRQLGSITKAGNSYARRLLIEAAWSYRHPAKVSPAIQKRHDRLPKAVIDRAWDAQLRLCKRYRKLTARGKHRNVAVVAIARELAGFIWDIARMTPITAAVQAA

SEQ ID NO: 222619 - protein, 389 aa, unidentified
MLLDHPSDGPTAIRTHIGAIFVSLELSRSNWLVTSLSPGKGEKMSKHSVAAGDMAELLALFAELRRKAEVRTGQSYPIITIQEAGLDGFWLHRVLQQNGIESHVVDPASIATPRRRRRAKTDRLDGEALLRALLAYKRGEPRVCAMVVAPSPEEEDRRRLCRERRTLIEERITHVNRIKGLLFAQGISDYAPLRRDRRARLEALRTGDGRELPSHLKAQLGRALDRIELLLDQIKSVEAAQDALLAAARKPASEEAAPDPVTMLLALKGMGANFAAVLWSEAFYRQFANRRQVAAYAGLAATPWQSGGIRHEQGVSKAGNSRLRTTMIQLAWLWIRHQPQSALTRWFKERSQQGRKRAIVALARKLLVALWKYVTQGVVIEGAVMKPAA

SEQ ID NO: 222620 - protein, 403 aa, unidentified
MRHVIAFDISMGKSYMVIYNAQKQCILETEIKHSKPAFKNLQNKINELTNEIGELPAIVFEATGVYSRQLERFMQNNQYIYCLLNPLEAKLQCDSLRIHKTDRSDAHQLALTHFTASRREKTVTDHLFCQLKSLSRFYNELDDELSIIRNRMHKVLQLTFPELERIFTTKSDLFLRFIQLFPHPDLVQNLSKTVIKNRIRASTQKNISVRIAEQKAVAILEAAKLSYPAVDSDDVLCEQLKIYARRYQELLHQKECCINKMVRLAENRIEYGVFLSIPGIGPNTAVRLMAEIGDITRFVNNKQLNAYAGIDIRRFQSGKTFFKDKINKRGNKHLRKLLFLIIQNMIKQRRYGRNHIVDYYDKLKTQPYNKCHKVASIACVNKLLKLLLHLITHNIHYDYRLTA

SEQ ID NO: 222621 - protein, 388 aa, unidentified
MQVVAAESEAPISIRTDLCAIFVSLELSRSTWLVTSLSPGAGEKMSKHSVSASDTAGLLKRFADLQQKARTRTGRTFSIITIQEAGLDGFWIHRLLQGEGIESWVVDPASVLTSRRRRRAKTDKIDGETLVRTLLAYKRGEPRVCAMVKAPTPEEEDRRRICRERKTLTAERVTHVNRIKGLLFAQGIGDYEPLRRNRRGRLEELGTGDGRSLPAHLKAQISRELDRLEIILAQLKAVGSERDAMLEPAKEGPPTPASLLAQLKGIGPEFAAVLWSEGLFRSFNNRRQVAAYAGLAPTPWQSGSVAHEQGVSKAGNPRLRTTMIQLAWLWLRHQPDSALSLWFRERVQRNGGRGKKIAIVAMARKLLVALWKYAVHGILIDGTKTKAA

SEQ ID NO: 222622 - protein, 276 aa, unidentified
MQQFIGCDAHKRFSVFVAVDERGNATRPVRIEHVRKDYAHFLSQLPKGSEIAVESTGHWYWLVDEMERSGHHVHLANPMEAKKRMGKTNKTDALDAKGLAILLRNGTLPESWIPPGSLRDQRELLRTRMALRDLRSGLKHRIHAAVDRYGLHTDALTDLFGEKGREYLAARLSEFPPETARMVQVQLRALDELAAHVELIEQRIRTEIAPTAEVRLLRSVPGVGEILGPVIGLEIGDVRRFPRAENLASYAGLVPRVFSSGGHTRLGGISRFVNRI

SEQ ID NO: 222623 - protein, 444 aa, unidentified
MISKAYRATRVNEVDWDRLARGKEGVDIALGVDVGKHTLWPVCRWADGRFERPWRVKNPEEIPALLALTQRMSAGRKLVVAMESSGTYGDALRQALADAQIDLVRVSHKASHDYAEVFDGVPSQHDGKDAAVIAELAALGKAQPWAYQPASPWEQELTYWVEWMVAHRQILTTWQGRLEGLLARHWPEATEVLKLSSGTLLRVLKYYGDPKALAADPEAAQRLARWGRAFLSPEKIEHLLAGARSSVGVRVGDWQRRQIQDYAEHALAARREAERAQRHLRGLAKGHAVLQAQGKVVGVPTACVLWASVGDPRKYHAAAADRKAMGLNLVERSSGQYQGRLRISKRGSARTRQWLYFAALRLVQHCGVRPWYEAKKARDEDDARRVIMAVMRELAMALYHVGVRNEAFQPRRLFGQVCRRGGHSAGPRSGARNQPEVEGVSARG

SEQ ID NO: 222624 - protein, 343 aa, unidentified
MKQKATVLGIDLAKRVFHLVGMNETGHVVLKKRLTREALLPFIAQLSPVIIGMEACGGAHYWARRFRGYGHTVKLIAPQFVKPYVKSNKNDPADAEAICEAVMRPTMRFVPMKEVEQQDLQSFHRARERVVKARTALVNEIRGLAMEDGLVFPQSITKLRHTFAATLEAEQDKLTPLSAELFRQLYDEFGTLEKRLAYYNEKIAAICAAHPVCQRLGTIPGIGPLTATALVAAVSDASHFKNGRQFAAWIGLVPRQHSTGGKARLLGLSKRGDVYLRTLLVHGARATLRWVGLKTDRRSQWVRSLRERRGKNKAAVAVANKNARIVWALLTTDEVYTAEHAVA

SEQ ID NO: 222625 - protein, 330 aa, unidentified
MTNAIREAAAARHVDYIGIDMAKARFEWAVHGERSSHSLRNDPADFEVLLGHLRERRVGLIVIEATGGLEHALASVLLQHGFAVAVVNPRAAREFARSMGHLAKTDAIDAQALAHYAHTLAHKADQAGVQMTPPPAHLEALQVMVLRRQQLVDMRTAELNRRGGPMRVLRRSIDAVVKTLEAQIRALDQDIGAHLDEHFQDLQQRFDRIAGVGPNTCATVIAFMPELGRISNARAAKLAGLAPLNQDSGSCHGKRRIWGGRKLVRRALYMATLSAVRFNPVIRAFYQRLLAAGKCKKSALTACAHKLLRILNAMARNGQPWNPQLHGVTA

SEQ ID NO: 222626 - protein, 449 aa, unidentified
MSRPQVIDDEQHERVRERVAAVDVAKDSGMVCTRTRHPSRPGARRSTVWTVKARMGAVRALGRQLHKDGIEIVTPESTSDYWRIWFFILEACGLAVQLVNAAQAKNLPGRPKTDKLDAQWLARLTEMGLLRASFVPPKAIRDLRDYTRARTRLIRERTRCWQRLEKLLEGALVKVSSVASKLTTVSAQDMIKAMIAGERDPEVLAGLARTRMRAKRDDLVQALDGMFDDHHGELAGMLLDQIAFLDGRIAQLSARAAELTAAMPEAWGINADGTTGPDAGAAPGAPVLPAVARLAEIPGISDDLARAIIAETGLDMSRVPTAAHLVSRAGLCPSARQSGPRIRAGKKGQGNGYLRGSLGQAATGAARTATFLGERYHRIARRRGKAKAQVAVARSILVIIWHLLAGPAARYTDLGASYYQTRTDTDRKLRNHIRQIQALGFEVTLTKTL

SEQ ID NO: 222627 - protein, 408 aa, unidentified
MESQIIFGIDVSSKSSTVCVVNDRIKQGESFRISNDSFGYQKLYEQLNQYLITPLVVFEATGVYSLSLQAFLEDYHIKYLKLNPLKAKKLMDNNLRHNKTDKVDAYRLALIQFNAPQKLRDPQPREYHELQNASRYYEELTRSIVTTKNQLHRNLQSTFPQIEEILSHPSGRIYWALASLFPHAGYVLEKNETQVTQMLNSISGIGQQRARYLTTRLYAFAREAYPYDSKDSIIVRAIQRNISNLFSLQQERDYVINYMEKLAKAVNARALSIYLSIPGVARITAVRLVAELGDLRRFSTSAQIDAFVGIDPGRYQSGEKDSSLGITKHGNHIARKILYRVITQMETVKATQPCHITDYYDKKKRSSNSQGYKKIAIASVHKLIRTMFALIKHDQLYDYNIATENKRL

SEQ ID NO: 222628 - protein, 402 aa, unidentified
MSNYFAGLDWASKTHALCVIDERGGVVERFDIDHDAGGLTELRRRLRRFGSPPVAIERPSGLLVDTLVDADFTVVPIHPNAVKASRPRYRSHGGKSDASDAYVRADLLRTDGHRFKALTPQSDEIRALRALVRGRDDLVATRVHLANQLRTLLESFWPGAAAVFADIDSPIALAFIERYPTPESASRLGPKRMAAFCAQHASCGRRSPDDLLARLQEAPSAVSAETEMEAKGELARCVARTLTRLVEQLRLLSSRIEHLVASLDDGRILMSFPRAGRICAAQILAELGSVRERFATDAQLAAEAGVAPVTYESGKSKAVTFRWACNHRLRAAITCLADNSRHVNAWAAHVYANARARGDHPHSIRILARAWLRVIWRAWTDRKTYDPMQHRAAQLLLKAAGG

SEQ ID NO: 222629 - protein, 320 aa, unidentified
MMTQNDLVVVGIDVAKAKVDGCIRSLSLRQTCPSTAQGQRKLVAWLREHQVNKAVMEASGGYERDWAKVLRNAGIEVRIVDPKRVRSFALSAGHLAKNDTIDAEMIAWFAETFREAPSQAHDAAHEELRALVKARKGLLDLKTRLQSQNQHAAPGAVQKAHARVLKSLDREMAKLEAAISAKIKATPDFAERAEIIESVPGLAETTSANLIAGMPELGQVSNEIAAALLGTAPYDDDSGQRRGERHIKGGRRWVRNATYMPCLGAATQNNPVLKAFYQRLIAKGKEPKVALVACMRKLIVILNTLIARRQKWDPSRYALS

SEQ ID NO: 222630 - protein, 340 aa, unidentified
MNSSASNYRLFVGVDIAAASFAATWTPAGPPPQRARTFPQTPEGFAAFQVALTSSAIPPAQTLIVLEATGSYWITLAVTLHQAGYAVSVVNPAHVHAFARSLPRRAKTDALDAQLLTLFALERQPSRWTPPEQVYHELRQRLLVRDGLLTMRGQARNQRHALEQWPVTISAALAALDKVVTECERQLETLEREIATVLQEGAWAESAALLASIKGIGLVTSAWLLVGTLNFTACVSAEAAAAYAGLVPLARESGTSVRGRRQIGHAGNARLRTALYMATLSAARYNPVIRGQYQRLRAAGKPTKVARCAAARKLMHLAYAVVTKGERFDPEYRTRGATAR

SEQ ID NO: 222631 - protein, 363 aa, unidentified
MIVIGTDTHKQTHTCGAVFAGTGQVAGELTAPARKAGFAELLDWGHRLEEERVWALEDCRHVSGSFERFLVASGERVVRVPPKLMGQSRRGERTAGKSDPIDALAVARAALREGPETLPAAHLDEAALELKLLLDHREDLVRARSEDQQRLRWHLHDLWPDFELPAGCLDRMVWLDRVTRKLSRAKQGARVRVSRELVRAIRDRTKRASELEREIAAMVRAQAPQLLEFPGCGTLTAAKLLAETAGVARFSSDAKLARLAGVAPIPASSGARTRLRLHRGGNRQLNCALHRIAVTQGRMHPPAREFLARKRAEGKSNREALRCLKRHLARRVWRLLNDSESDRSMTTIDSQRGSLAPQIAVAA

SEQ ID NO: 222632 - protein, 335 aa, unidentified
MSKTISPTTEVPAIFAGIDVGAEELVLVLRKNGVSMKAQTFANTPTGHQQLLKALKGARVCMEATGVYYVDLAVSLHDAGISLSVINPRAAHNFAKALMHNSKTDAVDADALAQFAERMDFVPWTRPSTEALALRAFARRIEALTGERAAAKNQQHALCAWRDTPKAVLRDVKLAIAQLQKRIERLSAEARALIKQHAQLETSFQLLLSIKGVAQTSAIALLGELGVLPQGLTHKQWVKYAGLDPRVFQSGTSVQKKPRLSKAGNRHVRQALYMPALSAKQHDPYVRAYFEHLLARGKKPLQALCAVMRKLLHAIHGMLKHQQPFDNSRFYAMQT

SEQ ID NO: 222633 - protein, 347 aa, unidentified
MRFYTKQHKFYCGIDLHAKKMYLCILDEAGEVRLHRNIKTDREVFLKVIEPFREDIVVAVECMFTWYWIADLCKEHSIPFVLGHALYMKAIHGGKAKNDKIDSHKIAVLLRGGMIPMAYTYPAEMRATRDLLRRRNHLMRKRAELYAHIQNTRSQYNLYDFLGRIAKAQNRAGVAERFEDPSVQKMIDADLAVIEAYDPIIAKMERDIISMANHHDPVAYALLKSIPGIGRILGLVILYEIETIKRFPSVQDFVSYCRLVKCRKESNGKTYGTSGKKIGNAHLKWAFSEAAVLFLKGNEPGKRYLDRLTTKHGKGKALSILAHKLGRAVYFMVKNKQAFDQNKFLGL

SEQ ID NO: 222634 - protein, 401 aa, unidentified
MESPIVSIDVSNGNSHYMCFIKNNKRFDKVKKIDHDIEGFKRLLEDIQKLEAETNEKVCAVFEATGVYTKPLERFLSKNSIKTYIINPLESARKRKEEIHNKKTDKLDPISISKVYYDKEEMMELKKKDETYNWLRKKNRLYEDQLNHLRKYKVTFQNQLSICFPGYLDLFKDGYSDIPMTILKKYPHPDLLKNKKAETVARYLEKNTCHTHKVSLEYALKIIEFAKKTYPGCEKDDVEVEIFKILLDKVIETQRECEKTLNEMITVASTLEEYRYISSIDGIGPNLAARIIAEIGDIEEFKSREALVAYAGLDPHIYQSGDQDGKHLKISKKGNKYLRCLLFLAVGCSIRGAKDNPVNRFYQKKKQQSNPLNSKAAKTACTAKLLKIIYGICKNKTTYER

SEQ ID NO: 222635 - protein, 361 aa, unidentified
MPGTMTYVGFDVHARSTHGAAIDVMTGELSRVRFGPGVQTPVDWLKTLPGPVRACYEAGPTGYGFYRAAVAAGVGMEVIAPGLTPRGRGDRVKTDRKDAELLARCLIAGSLTAVMVPSPQVEAAREVVRAHDACRRDLMNARHRVSKMLLRHGRVYPEPSAWTQKHRRWLAGQQFPESMSAFTYADLIATVDGLSARKKMLAERIGVLATDPAWWPTVARLRAFRGVDTLTALAIHLELGGDWQRFEKPTRVGSWLGLTPSRSQSGESDRHGAITKTGSMLARRLLVESAWQYIREPRIGVTLANRQDGQPDHILQISNRAQQRLHHLYTSMRARGKPHNVTVVAVARELSCFLWAAATAP

SEQ ID NO: 222636 - protein, 362 aa, unidentified
MNPFAFSNDLSGFQKLLDCLKDFSLDELLIGMESTAHYAENLTFFLFTRGFKLCIINPIQTASLRKSSIRKTKTDSIDTFLIIKALSLNHFRLFTQHDFDSMQLKSLCRFRQKLMKVRTKVKIQLVSYVDLLFPELQFFFKSGIHIKACYALLKEEPNPDKIASMHLTRLSNLLKKTSKGHFGKQHAIALKELAAQSVGIKNDTLSLQILQSINQIELFSSQLDEVEKLINQIMDNMDSVIKTIPGIGNLNGAMIIGEIGDITRFEKPCQLLAYAGLDPSVFQSGKFTASRTRMSKRGSKILRYALINAAWQTTLVNQTFRDYYNLKISQGRGHYSALGHVAHKLVRVIHKMMTDNVEFNLD

SEQ ID NO: 222637 - protein, 398 aa, unidentified
MVLCPKCPTTDYAYAESRRRSDSFISTHVKSSNLSRHLLIHQKILDMSKKVTTSTPKLFIGIDIHKKSWKVHFCTDISEGSTATFTPCANKLRKYVLKYFAKHEVSVAYEAGCCGFDHARQFIGFSWTTLVVNAADIPRPAKQSIVKTDKIDAKNIAKQLRAGLLRSITIPDVDRECLRSLTRQRTCLLKDLKRTKTRIKSLLLYYNVHVPEEYDNASWTHAFRQWLTDLKWNYENIDLTLKSLLKQYTFLDQMVRDVANQMRAHCKKYLKHDYNLLRSVPGIAGLTASYILAEIGDLRRFRSFKKFAGFVGLLPGIYSSGDNESVRGVTPRANYVVRSLIVEASWVAIRIDPVMQAYYRQHTGKNTKAAIFKVSRKLLSRIHAVIKTDTPYQIGLIN

SEQ ID NO: 222638 - protein, 363 aa, unidentified
MANPSTSTPTLTIGIDLGDRFSYYCVLDANGAIIEQSRLSTVPLAFVKRFGKTKAARIVIEAGTNSPWVADCLEEAGHEVLVANAGKLRFIFMNDNKSDREDAELLARVARVDPLLLAPIQHRTKKTRAHLSILRARKCLVTSRTQLINHVRGSMKSFGIRLLKCSTPSFAKRMLEEIPEELRPALVPLLTMIQTHSADIRDYERQLETLAKEQYPVTDLLRQVNGVGPLTSLAYILTLEDHRRFKDSRSVGAYLGLRPKRDQSGKHDPELRITKAGDGNLRSMLVQSAQYILGPFGKDSDLRTFGLAIAARGSKVAKRKAVIAVARKLSVLLHSLWRTGEVYEPLRNTSPESATPAIVAAAS

SEQ ID NO: 222639 - protein, 348 aa, unidentified
MSKLIAGMDLHSNNVVIGLMDMDGKRVAHQKVECQLSEVVKFLAPYRKRLEQVAVESTYNWYWLVDGLQALRYPVVLANPAGMEQYSGIKHADDTNDAFFLAELLRLKILPTGYIYDRHLRPVRDLLRRRLTLVHQRTALMLSFKSLYTRTTGQEMTLSRLKELEIKQAQDLYDHPANQLIAGMQIKHIEQLTESIEKVEKAVLDCARELPFYSKLTTLPGVGKILGMTITLEVGDIKRFAEAGHFASYCRTVEAKRTSNSKKKGENNSKCGNKYLAWAFVEGANFARRYDPQCRRWYDRKVAKTSNVIATKALACKLAKAAWHVMAEGTDYDSQRMFGQAAEHEMRT

SEQ ID NO: 222640 - protein, 344 aa, unidentified
MNKLSRVGIDLAKNVFQLHGVDRHGKAVWRRRLVRDQWLKVLLGKVEPSCEIGMEACAGAHHWARQLQANGFTVKLIAPQFVKPYVKSNKNDANDAEAICEAMSRPSMRFVAVKTAEQQDIQAAHRIRAELFGHRTAKANQIRGLVAEYGLVAPKQLACLRVAVPAWLEDAENGLTTRFRGLLSGLWNDLMTLDHRVAELDHEIDLIAKSDPVAMRLQQLRGVGPMIATALVATVGNAAQFTNGRQMAASLGLTPRQHSSGGKDRLLGISKRGDAYLRSMLIHGARSVIRTAKQKDDRLSQWVTNLATRRHPNVAAVALANKTARIAWAMLRNGTDYEPDYIVA

SEQ ID NO: 222641 - protein, 323 aa, unidentified
MKQIYVGIDVAKDSFVVAYKENETIFKKATFVNDKKGITQFMKSIDQSCWCILEATGSYSMQLSLTLHQHGRMVSVINPLQVKRFAQTKLKRTKTDSVDSELIAEYGQRMQPVLYEPPDEYIRNLQQLRASYKLLIKTKRAYTNQLHALRFVKDVSKASIKVCKSILKSLDKQIADIDAEMSECVKTHCNGLFRQLQTIPGISKKTAIELITVSNAFKNFYSAKQFSAFIGICPCINESGISIRGYKGISRVGDKQIRATLYMCAMMAKVCNHACRDLYDRLVAAGKPKKVALVAVINKLLKQVFGMLRSGQAYSSDFEKMAC

SEQ ID NO: 222642 - protein, 465 aa, unidentified
MVEQKDASKKTAKSATPTALPVIRPRVAGIDIGSSQHWVCGPARAEGEPNVRVFGTTTDQLNALADWLVDQHVESVAMESTSVYWIPVYELLESRGVEVVLLNARQLHNVPGRKTDFSDCQWVQLLHSCGLLRGSFRPAEAIVRIRALQRQMANLVAERTRCVQWMQKSLDQMNVQVHRAVTDITGTTGMAIVRAIVAGERDPAGLAVHRDPRCRKSVDEIARYLTGTWRAEHLFTLASALRLYDTFGHEIAAFETRLLEELEALQPPERRDEPVPSHPNAAKEKALRARGEQQVRTTLWRFAGVDLTRIDGVSAGVAKVVLTEVGPNLSAFPSEDHFVSWLRLCPRTPISGGKPLKKRRNGLGANRIAGALRMAATALQRSKTALGASFRRVARHKGGAVAVFATARHLAKLIYRMLRFGQDYVDVGEQAYERQFQLRRLAAITEAARSLGFTLVERTPGLASG

SEQ ID NO: 222643 - protein, 403 aa, unidentified
MNMNAVGIDVSKGKSMVAILRPYGEIVSSPFEIKHTSCNIRSLIEQIKSIEGESRIVMEHTGRYYEPLARELSLAGLFVSAVNPKLIKDFGDNSLRKVKSDKADAVKIARYTLDSWTELKQYSLMDEIRNQLKTMNRQFGFYMKHKTAMKNNLIGILDQTYPGVNTYFDSPAREDGSQKWVDFAATYWHVDCVRKLSLNAFVDHYQKWCKRRKYNFSKDKAEEIYGTAKEIVPVLPKDDLTKLIVKQAIEQLNTASKTVEELRALMNETAAKLPEYTVVMGMKGGGPSLGPQLMAEIGDVTRFTHKGAITAFAGVDPGINESGTYEQKSVPTSKRGSSSLRKTLFQVMDCLIKTKPQDDPVYAFIDKKRSQGKPYYVYMTAGANKFLRIYYGRVKEYLMSLPE

SEQ ID NO: 222644 - protein, 300 aa, unidentified
MRPHKHQKEKRSMDHFAGLDVSVKETSVCIVDETGKIVREVKVASEPEALLAVLKNPAYHFKRIGLEAGPLSQWLYSALAEAGLPVICVETRHMRAVLKAQINKTDRNDARGMAQMMRVGLYRPVHVKTLRSQKLRMLLTHRKLLQSKAIAIENDLRGTLRNFGLKVGIAGKVKFEARIRELVENLPDLTVLVEPMLIVRRVLREQIAILHRRLLAIVRDDEVCRRLMTTPGVGPVVSLTYRATVDVPARFRKSKSVGAVFGLTCAKYQSGEVDWSGRISRCGDEMMRVMLYEAAQSMLR

SEQ ID NO: 222645 - protein, 311 aa, unidentified
MTCKERGRVAKLTRAMQYVNNTELSSAEETRCQFNGSKADIKLGIDVHQHFYTVVMQVGGCNPKPAQRFAKEAFLHWAAKLKQSCGGQVHAVYEACGFGFGLQRELSALGIECEVVCPQKLDEQNRRVKTDGLDAKALCLKLDRFVQGNRSAVALVRVPSEEEEQLRAIHRQREQLVKTRKQLEAQGRSLMVNHGIEPVQQWWKRRAFAALNVPKWMKELLKNSQPILLALEEKIHALTVQLQAAAQDRQPRGFGALTSVVIDREIANWHRFGNRRQVGSYTGLCPGEYRSAGHRSSAQKSYRGRGPTAGG

SEQ ID NO: 222646 - protein, 350 aa, unidentified
MVVVGADVHKRTHTFVAVDEVGRKIGEKVVTATTAGHGEAVMWARERFGAEVVWAVEDCRHLSARLERDLMGFGQSVVRVPPKLMAQTRASARTRGKSDPIDALAVARGFLREPDLPVASHDEVSRELKLLVDRREVLVAQRTATINRLLWRVHELDPERAPKSRSLDLAKHRQILGDWLDSVPGLVAELARDELADITRLTEAINALAKRIGRRVREVAPVLLSLPGCGELTAAKLVGEAAGVTRFKSEAAFARHAGVAPVPVWSGNTAGRVRMTRSGNRQLNAALHRIAVTQIRLDGLGQAYYRHRIAAGDSTTEALRCLKRRLARVVFGHLHTDHNNRTQPCQQAAA

SEQ ID NO: 222647 - protein, 316 aa, unidentified
MRKRETFVGIDVAKKDLEVAVLPGTDTRTWPNTEEGLVLLVEWLKPLCPAIIVLEATGGLEMPCVGTLAAEGLPVVVMNPRQIRDFAKATGRLAKTDRIDARVIARFAEAVRPKTRELKTAEMQALTALGVRRRQIIQMITAERNRLTSASKWTREDIRDHISWLQQRLDDVTDELKKAIRNSPVWREKDDILRSVPGVGPIVSATLLSQLPELGSLNRRQIAALVGVAPLNRDSGLSRGKRSIWGGRATVRCALYMATFVATRFNPTIAAFYQRLRIAGKEPKLALTACMRKLLTILNAMARDRARWAPVCLRES

SEQ ID NO: 222648 - protein, 458 aa, unidentified
MNPKRRKKAVNEQQGWNLNLEPVHPNAAGIDIGNESHYVAVPPDRGHAPVRQFACFTEDLRRLADWLKSCGIDTVAMQSTRVYWLPVYEILTEEGLQVFLVNARHTKNLPGRKTDVQECQWLLQLHTFGLLNNSFRPPEEICVLRAYWRQRAEHVSSASACIQRMQKVLTEMNVQLANVISDISGLTGLAIIQAILDGERDRYKLADLAHARIHATREEIARSLEGNWRKELLFILQQERNLYLIYQQQIAECDTALAAHLQSLDDKSEPGSQPPPTKTNKRAGSNAPTSFDLRAELYRISGTDLTQIDGINIMNAQTIIAEVGIDMSRFPSEAHFASFLGLCPDNQITGGKVLRRGTRKVENRAATALRMAATSLSRSKTYLGAKFRRLRARLGAPKAITAMAHMLARLVYRLLRYGEQYVDKGMKYYEEKYRAHEIRSIQKKAKELGLNLTLSPAA

SEQ ID NO: 222649 - protein, 461 aa, unidentified
MTEDGTDEVVQGEELVARVAAIDVAKATGMVCVRLPHRSGSGRRTQRVHNVAATTNAILELGAELVRDGVERVVMEATGVYWKPWFFLLESQGLECWLVNARDVKNVPGRPKTDKLDAVWLAKLTERGMLRPSFVPPKPVRQLRDFTRTRTVLAQERTRTKQRVEKLLEDAHIKLSSVATDIFGVSGRAMMDALITGQRDPHALAELAQGRMKAKRDALVQALNGRFEDHHAELLTLMLETADHLTAQIDKLTARIEQLLADASGDGPHPGGGAPRAEGSPHARAAAAAARFPGGLPVLAERLDAIPGIGPTTAQVILAEIGWDMSAFPTAAHLVSWAKLCPRTLQSGGKNTSGSNKGGNPWLRGVLGEAAMAAAKTDTFLGVRYRRLVKRGGHNKALVAVARSILVIVWHLINDPDAIYQDLGPNWHQRLADPVRRTRDLVRELERLGHTVSLTTADTAA

SEQ ID NO: 222650 - protein, 308 aa, unidentified
MLIFIGIDVSKDRLDVHVRPLGDAFSVMHDAEGIAALLDRLKKVAPTLIVLEATGGLQTRVAAGIAAAGLPTAVVNPRQVRDFARATGRLAKTDALDAEIIARFAEAVRPEPRPLSDEAGQALQALVARRRQLVDMRVAEKNRRAQIRDAKIRTRLEDHLDWLAEAIAEVDREIEDHIQGSPIWQAKEDLLTSVPGIGDKTARLLIADLPELGSLSRRRIAALVGVAPINRDSGSMRGRRHIAGGRPHVRTALFMATMTAIRRNPPIKAAYQKLVASGKPRMTALVACMRKLLVILNAILRDNLAWTT

SEQ ID NO: 222651 - protein, 351 aa, unidentified
MNVTKYIGMDVHRAMTVSAVLSATGKVVAEAIIETKGSVILDFIQSQRGTLWVTFEEGTQAAWLYDLIQPHVAKVVVCDPRKISTQGNKADRPDAKRLAELLRTNALTAVYHGERSTRALKELARSYSAIVGDSTRIKNRLKAVFRARGIDNSGGGIYTTEERECWTSKLEAGAVRLRVQRLWRELDTLDVLRAEAEKDMVVEARKHPSTRILQTVPGIGPVRAALILAFALTPHRFRSKRQFWGYSGLAVVTRTTAEYELVKGRIRRTKKRPALRGLNPNCNRVLKDVFKGAAGTAANGPWRAYFESKVASGNKPELVLLTIARKIAAITLALWKKGERYDETKLTMHAV

SEQ ID NO: 222652 - protein, 511 aa, unidentified
MGCRDSDIGDRPAASWRIPFERLSVPFPPLSATPCANLTMEEAAMMHNSTRERKEKPARLSVSLLERIQPDAAGIDCGQNSHFVAVPPDRDPQPVREFRTFTADLHRLADWLVQCGVKTVAMESTGVYWIPLYEILEQRGFQVVLVNARDVHNVPGRKSDVKDCEWLRELHSVGLLRASFRPAAAIVPLRSFMRQRETLVEEAATRIQRMQKALTEMNLKLHTVLTDLTGQTGLRIVRSILEGDRDPEQLAAHRNYRCHASHAEIVAALTGNYRAEHLFALRQNFAAYEFLLKQIAECDTEIERLLTTLAAQQPPPSAPLPVARRKRASKHQPQFDIRGPLHRLTGGTDLSQIDSIGPQAALQLIGEIGTDMTRWPTEKHFTSWLALAPNNKISGGRLLSSRTPPSANRAAVILRRCAMSLTKTSTALGAFYRRLAMRVGKAKALTATARKLAVLVYRVLSSKLVYNDPGADAYHQLNRTRELKSLRKRAKLFGFDLLDRTTGEVLVNPVF

SEQ ID NO: 222653 - protein, 411 aa, unidentified
MDVLYPVCCGLDVHKKTITACLRFPSARARAEEVRTFGTTTRELLRLADWLTAAGCTHVAMESTGVYWRPVYHILEASFEVLLVNAQHVKAVPGRKTDVKDCQWLAQLLEHGLLRGSFVPPAPLRELRELTRYRRQLVQEHAREANRVQKVLETANIKLGDVATDVLGVSGRAMLHALIAGERDPERLADLARGALRQKAEALREALVGRFTLHHAFMLQGLLDHIEFLDQQIARFDERIEEQTRPFGPAIERLDTIPGVGRRSAEQILAELGDDMRRFPTAAQAASWSGICPGNHESAGKRRNGRTRKGNAWLRSTLVESARAAVRNRGCYLSAQYHALARRRGDKKAVVAVAHSILVAAWHILRDGVEYRDLGPDHFDRLNRERLVQYHTRRLAELGLTVQLPGAQATA

SEQ ID NO: 222654 - protein, 358 aa, unidentified
METVATRKITIGLDLGDRYSHLCTINEAGEVLEEGRIATAPVALRTRFGGTERARFVLEAGTHSAWVSRLLQDLGHEVIVANPRRLRLIYGTDRKNDRVDAQYLARLGRLDPELLAPIEHRSEDAQVDLAVIRSRGALVRTRAALVNHVRGVVKSSGGRLPACSTPSFARKARESIPEALRPALEPVLETLGELNQRIRAYDKKIEELAAESYPETGSLRQVSGVGALTALSFVLTLESPDRFKNGRAVGAYLGLCPRQNDSGDSEPELRITKSGSPMLRSLLVGSAHYILGPFGPDSDLRRWGLEIAARGGKNAKKRAVVAVARKLAALLYSLWRTGEVYEPLRNRSSREQPVSQIA

SEQ ID NO: 222655 - protein, 341 aa, unidentified
MERFIRTAIDLGKNYFQVHGLESEGGRSISRKVKRSKMHEVYSQIEPCRVGMEACGSAHYWARQLTAMGHEVVLIPPAYIKPYVKRGKNDVVDAAAICEAMSRPDMRFVPIKSADQQAVLMLHKTRELLVKQRTMAVNALRGHLAEFGIVAAKGIGRVDELLALAKADAALPHIAGAAVACMAGHLEGLDLSIETVDEEIAKAHRQNPISCLLDEIPGIGTLIASATAASVPDPGVFKSGRDFAAWLGLTPRQNSSGGKEKLGAITKQGNRYIRKMLVTGATSVLRVAGKRKGALADWINALRARKPERLVAVALANKLARICWAIMTTGEGFRTDMYVKS

SEQ ID NO: 222656 - protein, 315 aa, unidentified
MYYLGIDVSKKTIDCCLISDSIFYERRFDNTEDGFRRLDDWIQGYTAEVVHCCCEATGIYHEAIAAHLRQKHTVSIVNPSKIKGFREAEQKRTKTDRQDARLIAEYCRKMQPQAWQPPTEEQEYLQAITDYIARLKQQRAAEQTKHQTAPDTIRHHIQTTIDHLNRLIATVQNELKDFYRQNHAYNEKKNRLKTIDGIGESAASVLLTKLTRYDFANQNQFAAYLGLDPKIKDSGTSVKGKPRISKQGQKNARKALYMPALVAYRMNAFPAFTARLKARGKPPKLIIVAIMRKLAVIAYQLYKTGKDYDRSRYRN

SEQ ID NO: 222657 - protein, 370 aa, unidentified
MLDTTTFVGLDVHARSIKAVSLDVMTGEVRAATFGYDAGAVAEWVRSVDPGARCVYESGVTGFDLQKRLSGLGVDCVVGAVSKMIKPSADRRRKNDRNDAEFLARMLSVGNVVEVWVPDDECEAARDLTRALEDARDDLSRSKQRLSKFLLRHGLVFDERTPTGRRKGNWTRAHWSWIESIRFAEGADNDALAYYVDAVRRAAEEKARLEGLVEAEARKPRWRKRVDSLRCLKGVDTASAADLVFEAGEFSRFRNARSFAAWVGLTPSEHSSGESDRRGAITKAGNKHLRKTLVEAAWHYLTCSGRPKDLAKGQAPDRGARRHAAKGVRRLVERREALLARGVHGNKANVATARELACWVWAVGLVAEEA

SEQ ID NO: 222658 - protein, 429 aa, unidentified
MKKINTVQIFESEIFKEQRLTIGMDLGDRWSCYCILDETGRILLEQKVATTPEAMKQAFAKIPRSLIAMETGTHSPWVSRLLTELEYKVIVAHAQKVQLITKSNRKDDRHDARTLARLARIDPELLGPVRHRSAQAQIHLTVIRARAELVRVRTALVNAARGLAKSYGQRLPKCGTQQVSRQLGAGLPAELREVLEPLLKEIESLNERIQEYEVRMEKIAKESYPHVELLKQVKGVGTQIALTYVLTLEDPQRFPKSREVGCFLGLKPGRRDSGESQPQMRISKEGDRYLRTMLVQGAHYILGPFGADSDLRRWGLKLAARGGANAKKRAVVAVARKLAVLLHRLWVSGEVYEPLRNSQKAMRAVAYSEELPTKQGMLGLDGIGDRRREAILVRNLSAENWKIQEERKRSIPERREMVSEQPSSTAEIR

SEQ ID NO: 222659 - protein, 405 aa, unidentified
MWYAGIDWADEHHDVAVIDEQGKQLTKKRVPHTAEGLVDLIAVLKQVGDVAEHPEQIACIIETNKGLLITALLEAGLPVYPVNPKTLEKWRKPSGAKTDAIDAFLLARKGRSDLDQLRRLEPDSPVVQELKQLTRDQDGLIQMQTRLVNQLTACLKAYYPVALQVFTKVQQKATLAFLQAYPTLEEAQAAPPADIEAVLRKERHPTAAAKARSIVEQVQQPQLHADAITARTKSRLMLALVQQLVAVMDAIAAYDQEIARLFLTHPDAAFFEALPGAGKRLAPRLLAEWGDDRMRYQDASSLQALAGTSPVAFQSGKFAKAHRRYACNKSLRNTLHQFTWQSMRSEPWALAYYQRKRAEGKTHTVALRALANHWVRILYAAWNSRHAYDVAIFLAAQQAHAPRAA

SEQ ID NO: 222660 - protein, 406 aa, unidentified
MRVLYERCCGLDVHKQSITACALTPEGKEIRTFGTLTDDLEELVDWLKEKKVTHVAMESTGVYWKPVYNLLEAEPIEVLVVNAQHIKAVPGRKTDVKDAEWIADLLRHGLLKGSYIPHRAQRELRERVRYRRSLIEERARELNRIQKVLEGANIKLSSVVSDINGMSARLIIRALIEGKNDPAALAQLAKGRLKQKTEELRRALKGMIGPHQRMMLAEQWRHVEYLDEAIARLDREIEERTSPFHEALELIDTIPGVGRQSAEQIVAEIGTDMSRFPTAAHLASWAGMAPGNHESAGKRLSGRTRKGNKKLRSCLVECARAAARTKNTYLSAKYHRIAKRRGANRASVAVGRTILEMIYYILTRKEPYRELGTDYWDRQREASIVRQTVKRLEGLGYEVKLEKTSA

SEQ ID NO: 222661 - protein, 350 aa, unidentified
MKIVGCDLHSKWQQIAVFDGETGEISEHKLMNGDGEAARFYGGLAQPALVGVEACGNSQWFLDLLERLGHEVWVGDAAQIRASYVRKQKTDRRDAGHILRLLIEDRLPRLWVPTVEQRDLRQLLMHRHKLVEIRTRVKNGLQHLAMNRGVQKHSRLWSVRGRACLEELPLAGWSAQRREDLLKLLSQLDAQIGSLDAAVEQAARQQEQARLLMTQPGVGPITALAFVLTIGDVRRFQHSNQVASYLGLIPREHSSGGRQKLGAITKQGNRFMRQLLVEAVQNPCRLDEGFRRQYQARCHHKPKAVAKVAAARKLAVRLYWMLRQDVGYPEIARIESSPGVALTRCKRSRP

SEQ ID NO: 222662 - protein, 320 aa, unidentified
MTDIVTHTDRIATIGMDLGKRSFHLIGMDTRGKVIMRQQLSRGRLERHMANLQPCLVGIEACAGAHHIGRRLSTFGHNVRLIPGQYVKPFRKGQKNDYRDAEAIAEAVQRPTMRFVPIKSAEQLDLQALHRIRSRLVSHRTAVINQLSGFLLECGVTVPQGPARLREILPSVLAQRTDVLSPRMIRLIEELADDWRRLDDRVDAVTSEVQTLARQDECCRRLTSVPGIGALTASAVVATIGNGAAFSKGRDFGAWLGLVPKQLSQATERYSADSANAATSTCARYSSSGLAPCWQSPAAGRSLGSKNGWQLPPSASTITS

SEQ ID NO: 222663 - protein, 339 aa, unidentified
MKVSTLGIDLAKNVFQLHGVDHNGKTVLKKKLTRDKFVPFIMQLEPCLIGMEACASSHHFARVLTQFGHQVKLMPPQYVKPYVKTNKTDAADAEAICEAVTRPNMRFVQVKTAEQQAVLALHTERDILIRERIACVNSLRAILAEFGLIMAVGRKAFNQGIPDILENGDIELSPFIRRSVARQFEHIQSLEDQVTLIEQELSQWAQTQQACQRVMKVPGVGLLTSTYLVASVGNGQQFHCAKQFSAWLGLTPREHSSGGKQRLGSISKRGDGYFRYLLVHGARAVASVIERHKEDMPWLFALLQKKNYNVAVVAQASKTARILWSMLVKETEYRPVIAH

SEQ ID NO: 222664 - protein, 375 aa, unidentified
MDQHSRAFVGIDTSKLRNAVAVAEDGRGGDVRYLGEIDTTEAATRKLVTKLAAKYRQLTFCYEAGPTGYGLYRLIRKLGHDCIVAAPSLIPKKPGDRVKTNRRDAVGLAKLSRAGDLTAVWVPDERHEAMRDLSRAREAARKDLKGKRQQVSSFMLRLGRHYPGKKTWGPAHMNWLMLQKLEHREQRIALEELLGAVRQESERVERLEQAIRDAVPEWSLAELVTALQAMRGVDLVAAVTVLAEIGDLSRFQNPRELMGYLGLVPSESSTGDTVNRGGITKAGNGRARRILVEAAWSYRHPPRVSRDKQTKVAAAPRAVREIAWTAQMRLCGRFRSLTRKGKRPTVVATAIARELSAFIWAINRQVVGSHATANQ

SEQ ID NO: 222665 - protein, 417 aa, unidentified
MQSARNTLPEEPANDVTSGIDWARDDHAMSVVDARGREISRRTVKHSAAGLRELTDALTRAGAREAAIERPDGPVIDALLEAGIIVVVISPNQVKNLRGRYGSAGNKDDRFDAFVLADTLRTDRARLRPLTPDSPATTALRRACRARKDLVGHRVAVANQLRAHLHNVFPGAAGLFAQIDSPVSLAFLARFATQDRADWLTPARLGKWLASTGYSGRTEPAVLHARLTATPRGITGPDATAQAGITSALHAVLVTLTEQIKVLPAQIGSQLAAHTDSHIFTSLPRSGTVRAARLLAEIGDCRARFPTPEALACLAGAAPSTRQSGKIRAVTFRWACDKQLRDAVTDFAGDSRRASPWAADLYNKARARGHDHPHAVRILARAWLFVIWHCWQDHTAYNPARHNALQRILNQDQLIAA

SEQ ID NO: 222666 - protein, 409 aa, unidentified
MPGALHIGIDISGRENMACFLNENGDRLGPVFTFSNDQTGLNKFLEQLFQIAHNHCPEKINIGMEATNFYWWHLQEALSEVRLDGADIDLFTINPKLVKGFKKAYPNLPKTDAIDAFVIADRLRFGRLTPLHRGSLIYAPLARVTRLRYMMKKSIEREKNRAINLTFLKFSNFRQAAGRKAFNKSSCELLNGFTVDEVADKPLEELVDFVLTHGNNRIAGPEQFINEIQKAANNSYRLNPKMDDMVSVALTMTIENIRFLEGQCKKLDKVIEKEFKAMPQVLNTIPGIGSVLSAGITTEIGDISRFSGEKALAKFAGLTWHRTQSGPYVAEETSLTKAGNAYLRYYLVEAANSLRLHNDDYAAFYRRKYEEVTKHRHKRALVLTARKFVRLVFALLSKGQIYNERMVNG

SEQ ID NO: 222667 - protein, 398 aa, unidentified
MKTCGLDVHKDSIFCAIYNGEKYSDITEYETTTVRIRQMGEYLRSEGVAKVAMESTSTYWVPVWDILLEMGFELMLVNPFLIKQMPGRKSDVKDAQWIAFLLYKGMLRGSMIPSPEIQQLRTYSRKYTKLQQQKTRALQKMDRIMVMCGFRIGSCMSNLATKSVMNIVKSLIKGESKPEDLCKLVYGNTLNKKSGKLREALTGNLKEHYRQQLEWEKEEYDLFEKQAEKCLQQMQRICNEHYKKEIELIKSIPGVSDISAIIIIAETGGDMTVFENSGKITGWAGLRPRNDESAGKYKSTAITKGNKYLRSVLVQVSWAAVRIKNGWFKEKFNKLSMRKARKKALIAIARKLLTITWNVLYYKTDYNPLLVHVYDPVKVEAKMSYHKREMERMQKLLK

SEQ ID NO: 222668 - protein, 426 aa, unidentified
MNDLEDSRLVVFRQMKQEIRGSDRHLLIGIDVAKNKHNAFFGTATGKSLLRRLVFENDLEGFERLLLHEEAIRVENDLEKVVYGMEPTADYHKPLGEYLIKKGKEVVLVSGVAVNRNRELLDGRWDKHDTKDSANVADLMSQGKCLYYDFPSLKLRDLRSLLSLKRRLKRLEHGTRVRIRNHLVAQYFPELDKYYSIGSEGLSIVKWCLDPAVISSFSYEDFRKIVSPRNMNIIQERRLRAIWEAAGCSIGCQAGAVLDFEAKLMIEDLEHTQKSLKVVEEQVKEICLKFPEYRILQSIPGFGPDISSKVLAAIGNPFRFNAGKQVIKMAGLDLSASRSGLTSESAVPVISKKGKASLRYALYQAGVVATAKNKHFRIYFTNKLRGREKERGIKTKMRVKLATKMLIIAWTLMKKREPFDPSFLNA

SEQ ID NO: 222669 - protein, 369 aa, unidentified
MKNVTTYVGIDAHKKDLFIAMLVGQEKTPVTWTVPNEPSAIRRLVRKLERDAAGPVRACYEAGPCGYALQRRLTTPRVSCQVIAPALIPRKPGERIKTNPRDARNLVELLRADLLTEVHPPTPEDEAVRDLCRARDDAREDLQRCRHRLGKLLLRRGLHYTAGRHWTQGHRRWIGSLEWTHAAERSVVDDYLLAIDQVEARLKELDHRLTEVAETEPYKERVGWLRCFRGIETLTAMFILAELHDFRRFHSARALMAYLGLVPGEDSSGEKHRRGRITRTGNALVRRVLVEMAWHYQHRPGVGGALARRRRGQPSRIIAIADKAQQRLCRRFRLLALQHKPGPKIAVAVARELAGFLWAALQPAAPTQA

SEQ ID NO: 222670 - protein, 409 aa, unidentified
MLEMEGNEMKGPIVSVDVSKGESHYQGFKELNVKYSNVRKIKHDKQGLNDLLKLVKEMEQSLKCEVCVVYEATGVYHCVLKKFLDDHNIKQFIINPLLSAKTRKNDSLRSPKTDKLDPKSIAKTFYNQNLYQSFKNERIYHELRELSRYYEDVLVHIRKDKVAFRAQLDIVFPGYDTLFEDLYGSVSMAIIEKYPHPEMIENKSVNTVSKLIQKKTCHHEATSKVKAIKVIEFSKTVYSGCNKEDIEVIILKRLIDNLKAHLNEAEAIINEMINLAQDLPNFEIIRSIPGIGDNLAARILAELGDISRFKKFNQLVAYVGVDPRINESGQEDGQHLHITKKGNKRLRCLLYLAVTCSIRLKKDNNKIKEYYIKKMQQSNPMCSKAAKIACVNKLVRIIHNMCKNGTLYQ

SEQ ID NO: 222671 - protein, 361 aa, unidentified
MNHRTSVGLDVHARSIAAAALDHMTGEVAQRSFGYDPPAVAEWVRSLEGPARCVYESGPTGFDLQRSLEASGVECVVGAVSKMLRPSGDRVKTDKRDAVFLARMLAVGNVVEVAVPTTAMEAARDLARAREDCREDLMRARHLLSKLLLRKGIVYGGRTAWTKAHREWLSRVELADPCERLVLEEYLESVRSLELRRARLDAAIAERAKAPDLAPVVSALSCIRGISTVTAFSVAVEVGDFSRFPDARSFMAYVGVVPSESSSGETTARGKVTRTGNGHVRTLLVESAWHHARRYSPMSATSLADARGVPAAVAEAAERANRRLHERASRLRSRGKPANVANMAVARELAGFVWAVATAAS

SEQ ID NO: 222672 - protein, 363 aa, unidentified
MSRDIQYIGMDVHKEAIVIAVLNGSGKLVMETILETKASSILQFIHGLRGELHVTWEEGTWAAWLYDLLQPQVHEILVCNPRRNALLKEGSKSDKVDVRKLAELLRTGMLRPVYHGENGLRTLRELARSYQTISKDLTRVMNRLKALYRGWGIPCAGTQVYAPRYREEWLSKIPQTGVRRRAELLYQQLDGLQALRRNLRPEFLAESRKHKAAKLLRQIPCIGPIRAAHLIALMQTPHRFRSKRQLWTYSGLGIETHDSAQFRFVRGQLQRSKKPQQLRGLNQNHNHEMKEIFKSTATRASCGRGPFHNFYAALLAKGMKPEMARLTLARKIAAITLTLWKGGKRFDAEQLKTQALEHLTEPR

SEQ ID NO: 222673 - protein, 359 aa, unidentified
MNAITIGLDIAKSVFQVHVEDAAGKIVLQKCLRRSQVAAFFAKQPPALVGIEACGTAHYWGRTLRALGHDVRLIPAAYVKPFVKRNKTDARDAAAICAALGRPDMRFVPVKSEEQQASRGLERSRDLLVKQRTQLMNSVRSQVAEFGIIAAQGRCGFAELTALIAAEETPLPAVLVAALRRLVGQIDGLHAEIAALEEEIMTVARRHPVMRRLATIPGVGGLTAHAVVTAAGDGRQFATARDFAAWCGLTPREHSSAGKRRERGISRQGDMRLRKLFALGASTIMRNARSRADRATQWQRGILARRPVKVAVLAQAAKTARIAWAMLVSGEAYRKPAPAAAVDHSPATAGLVAVAASVD

SEQ ID NO: 222674 - protein, 453 aa, unidentified
MKKEIPKLGIFKMGSGLPVFNPYAAGIDIGDTLHCVAINDGNGGHEVKTTSAFTCDLHDIVDYCKSNGVTTVAMESTGVYWLALYLLLEEAGIEPYLVNAKHAKNVTGRKKDDTDAIWLQKLHTCGLLQKSFQPDNEIRLLRSYTRQRKSLILLGSDSIRRMQKALELMNIKIHTVISDILGKTGMGMVKAIIAGERNPEILYKLCDPRIKASREDIIKSLDGIWKDEYLFMLEQAVETYEFHKKQVKTCEEKIQQQLLKQVALIKDGDITGLEETQKKKSKANSKKNQFDFSLLPYLIALAGVDLCKIPGISQVTALEFTAEVGLDMSKWKSPKHFAAWLNLTPNTKISGGKILSSKMMKKNNKAGQLLRQAASCLVTNKTPIGDYYRSMRARMGGKGAALATAHKLARIIYTMLLKQTQYNPGMIIENHEKSKEEKIKKLEKQIARLKQVA

SEQ ID NO: 222675 - protein, 416 aa, unidentified
MKLFVGIDVSSEKLDVCFLTDDNQLSILSEISVANDIEGASFIRETILEFNNSYHFDQIVIGMESTSMYSFHPSMFFHEDEKLKKLNTLVTIENPFRVKQFSRMFDENKTDRNDALRIADFLRIQRFTTSPIKEEKYMALQRLTRTRYQLIKQLIRTKQHFLENLTYKCNTLAREMRDESTSLFSATLISLMTEDFTLDELAELPLEAFCDLLQEKGKGRFKQPEKIAKAIQRAITMSYRLGALAQESINVVLSVLVREIRALEKNIKELDKAIEQVIVVIPEYQCLTSIPGVGKVYAAGLIAEIGQIERFEDQTKLAKYAGLSWKVNQSGNYQSQNTPLTKQGNRYLRYYLVEAANSVKNYLPEYKAFYQSKYKEVPKHQHKRALVLTARKFTRLVDTLLRKHQLYTPPRSVIEK

SEQ ID NO: 222676 - protein, 339 aa, unidentified
MRFYTHQHQFYCGIDLHARSMYLCIMDQSGEVLLHKNYNANPDALLEAIAQYREDFVVAVECIFTWYWIADLCNREGIAFVLGHALYMKAIHGGKTKNDKIDSQKIAALLRSGMLPMAYVYPQKMRSARDLLRRRLYLARQHAELQTHIQNTNTQYNLPYFEKRIDRRSNRTGIGLRFKDPAVRTSVEVDVALMDAIHEQILAIERQINAQVPEHDPVAVHLLRSIPGVGKTLALVILYEIHRINRFPAVGNFISYARLVKCTHESGGKRKTGTNNKIGNVHLKWAFGEAACLFLRRNERGKLYHQRLVGRYGKAKALSILSSVTRPYRIHHSEKEDPF

SEQ ID NO: 222677 - protein, 400 aa, unidentified
MLSIGIDVSKGKSTVCGMKPGGEIVYTPFEVQHTREGMSELVSLLRSSGEEVRAVLESTGSYHCPVVAALLENGIFVSVVNSLRMKRFCSQSIRKVKTDRIDAMQIALYGLAYWQELQPTKLPEDTYRELQLLARQYYQMTSLLIKAKVDFNAICDQVLPGMQELMNDHAGRHKLSDFVLRYHHTTHILEMGETRFRKDYCKWAEKKGYRNCERMAALIFATAQNGIPVLPNAPSTQIVITEAIRVLHTVEASRDAILTQMQALAKTLPEYSLVREMPCIGDTLAPRLIAEIGDVRRFHSKRALIAYAGIDAPPYQSGKFCANNRHISKRGNRYLRKTGYEVMQSYVMHKPANDPIFTFIEKKRGEGKSGKLAMVAGLNKFFRVYYGKVTELYRSLPAIE

SEQ ID NO: 222678 - protein, 345 aa, unidentified
MFYAGLDVGLRTVAICIVDDTGKVRLERTCACEIDLIAAALREFSGPIERIGFEAGTMSQHLFFGLQACGFEVVCMEAHQVSAALSAIRNKTDKNDARGIAQLLRSGWYRPVHMKSRASHNVRALLTSRKTVLRKFIDLENEIRGLFKVFGIRLAPSITHARFDIAVRDLILADDDLAYALLPMLDARLVLYKTFRELDKRVKRTANDDPICRRLMTTPGVAQVVALTFKAAVDTPERFSSSRNVGAHFGLTPRRFQSGESDNPGRISHAGDPDVREALYSAAHSLMTRTLAWSALKSWGTKLMRTKGRRRAVVAVARKLAVILHRMWADGTDFRWTQAEAAPMS

SEQ ID NO: 222679 - protein, 355 aa, unidentified
MKFYTKQHKYYCGVDLHARNLYVCIIDQKGEIVKHKNIDATPEAFLNIIKGCRKDVVVAVECMFAWYWLSDLCRKEKIPFVLGHALYMKAIHGGKAKNDRIDAHKIAALLRGGMIPMAYVYPPDMRATRDLLRRRNHLMRKRADLLAHIQNTNHQYNLPRFKKNICYRGNREGIAEQFSDECVQKSIEINMALIDKYDYLLRKVEHYICKKARVQDMDSFVRLQSVPGIGQTLSMIILYEIHDIKRFPRVQDFVSYSRLVKPAKESAGKRYGHSGAKIGNAHLKWAFSETAVLMLRESADIKKYKAKLQRKHGKAKALTILAHKIGRAVYYMLKRKEVFDIDRFLNKQIIQTERA

SEQ ID NO: 222680 - protein, 319 aa, unidentified
MKQITTIGLDLAKQVFQVHAASADGSPIFNRKLRRAEVLRFFERTPACLVGMEACGSAHYWAREIRALGHDVRLIPPVYVKPFVKRGKTDAADAEAISEAVTRKTMRFVPVKSADQQAAAVVLKTRAFLVNQRTQAINALRGHLSEFGIIAAAGTTIASQIDALKVQIEKLEQAIVATVRRDDDARRLVTIPGVGAIIAASVRALVPDPGGFKSGRHFAAWLGLTPRPHSSGGKERLGRISKMGNPALRSLLVVGATAVLRHARGNPNASRWITALLARRPYKIVAVALANKMARIIWALLVKGGTYQDKGARNQIVAA

SEQ ID NO: 222681 - protein, 312 aa, unidentified
MAKLVSKITLGADVSKVKLDICNWETQELVSLSNESAEIRSWLKGLHGPVRIAIESTSDYHLALVDEAQALGCEVYLVNGYQLSHYRESLNVRNKTDPKDAWLLARYLAHEGSQLRLHPPRCRKAQELWNLVKRRAKVVEIRKEMQQSMANVSVSTKAFFTCLKQLLQYFDKRIKALIQELGWWDDYQRCQSIPGIGPLNAAALITAYHRGAFASSNAFVAFIGFDVRLRESGKYKGKRKLTKRGEAELRRLLYCATKPAQSYAPFDQYLKKQLDKGLSKIAAKVCLARKLARIAFSLIEKQQSFKKMEFAS

SEQ ID NO: 222682 - protein, 430 aa, unidentified
MSKRRGKAKREQKVAKQELQNLPVLNLDAAAIDIGSEQHLVAVPPGRDTESVRSFGAFTVDLHAMAHWLKQCGVKSVVMESTGVYWIAPFQILEQYGLEVLLIDARAAKNLPGRKSDVLDCQWHQQLHTFGLLSGCFVPAAEIAPLRSYLRLRDELVKASTQGIQHMQKALFEMNVQLANVISDITGETGLAIIGAILAGERDDKKLAELKHRRIVASKETIAKSLEGNWRPELLFALQTALDRYKFYQQQISQCDEQIAQALAKLPTRQLQAQTKPEINTLQSAKEQKLSPLATQLQRIAGVDLTSIDGIGEHIAQIILSELGPDLQRSFRSEKHFSSYLGLCPGTKISGGKVLKRKSRKVKHRVATALRLAARSLHSSDSALRGQFPPTQSATWCAQSHHCNGQQTRQAGLSLTGLRQRLLRSRRPNL

SEQ ID NO: 222683 - protein, 359 aa, unidentified
MKIVGCDFHPSWQQVAVFDPETGEIAELKLVNTDGGAERFYRALEAPALVGIEACGNSQWFIELLEQLGHAVWVGDAAQIRASYVRRQKTDRRDAGHILKLLMENRFPRLWTPTAAQRDLRQLLIHRHKLVEIRTRVKNGLQHLALNRGIQKHSRLWSVRGRAYIEKLPLEGWTARRREDLLKLLTELDKHLDELDAAVSQAAEEHPLARLLMTQPGVGPITSLAFVLTIGDVSRFKHSNQVASYLGLIPREHSSGGKQRLGAISKQGNRFMRQLLVESVQTVNRLDEGFRKEYAARCHHKPKGVAKVAAARKLAVRLYWMLRQNIGYPEIALIESSPRVALTGGSYVATLNERSRIQQ

SEQ ID NO: 222684 - protein, 365 aa, unidentified
MLNPNRAGIGCTENDNTGIEHNRIDYAGIEVSAEELIVALRREGKLKPLKSFPNTPGGHKAIVRYLARPGRQVRVCLESTGVYGLDLALALHAAAGIAVMVANPRAVRHFAQALLQRSKNDRLDALVILEFAARMPFQAWQPPSPAARHLCALARRLEALTELCAAEKNRLHAVGATQALPPIIRQDLEGSLRFHARAMQRLKQEALKVIAQEPELRRKFDLLLSLRGVKETSAVQILAAVAVLSSDLDVRQWVAYAGLDPREYSSGSSVHKKTRISKAGNRHLRRALYMPALVAVRREPHFRAYYEHLLARGKTKMQALVAVMRKLLHAVYGMFRHQLPFEGSKVYRLPQGTVANTVSCTKEVA

SEQ ID NO: 222685 - protein, 350 aa, unidentified
MMIIGCDLHTRYQQIAMLDTETGEEVERRLEHENGEARAFYSALQGPVRVGIEATGHTHWFEAMLAELGHELWMGDAAKIRASVIRKQKTDARDAEHLLNLLRQDRFPQIWRPSPAERDLRQLVWHRQKLVWMRGAVKNQLHALAMGEGVCRKKKLFTAKGRKELEGLALGPWASYRRQELLRMFDELAAATAQLDLAVEQAAKNQPLAVRLMTHPGVGPVTSLAFVLIIGPVERFERSKQVVSYLGLNPQEHSSGGKQRLGAISKQGNPMMRSLLVEAGHTAARFDPVLKRMYQRLKFRRGASVAKVAVARKLAVRMYWMLRSTADYAQLVRMQGSPWATLVENSSSLG

SEQ ID NO: 222686 - protein, 426 aa, unidentified
MLGARRRVLKMKSLKQGIIQDKEVTNMRAVFGIDVSKASSEVAVLVNQKKIHAYTIPNDGIGFSRLLDDLNSVQKPEIIFEATGVYSRRLQAFLEDHNFAYTRLNPLEAKKQLDGLRVRKTDKIDAEKLAQSQFLLNRKPTHVSEEVYQNLRDLSRFYQNLTDDIVRAKNRLHKVLQVTFPELEGILSSPKGDQYWELVTAFPSSYFVLDLTNEELEATIRRSTSKRISDQRVAELTEKLISLAKQSYCAVKKDSPMLEQARYYAQELQRLSDCRQAALDEMKSLAEFLPEYDILLSIPGIAETTATSIIGELGDIRRFKTANQLNAFIGIDLRHYESGDYLAKEHITKRGNPYARKILFRCIYNIISASRTNPCHIADFYEKRKKQSQATSTKPHVIASMHRLIRTIHYLITHNKLYDYSLSKSQ

SEQ ID NO: 222687 - protein, 430 aa, unidentified
MKITTRISPINPNLLKVTVDVGMESLYAYTELPPQTNAAHCLEETIPNRNQPIIRALEQFSQLARQHGFEGLCVLCEPTGGYERRLLRLARQAGHFTAYLNAESVRKLRVVQSNDSTKSDLKDPKTMFLLAKLGKTLTHRNLSGPWLVLRETHAYYEEHDRHNVVLRCQIHRVLTQLFCEFTFKKDFLFESPALPHLVREFGLNPYRIVATGQAAFYRRMKKHGVRLRTLERLWQDAQRSVLQHLEPGYSDLLETNLRELFEDFWRCQQRLEAARQQMIGLLHQLQAQGEVKLTARHGLINEFLLARILAETGPLEDFKSWPQLLRYAGMNLCERQSGTMIGRRRISKKGRTLLRKVMGQVVLPRVRKTDLYGPYYHGKKANGMVGQKAMMAVARKFLKLLWGLNRSAQDYAPARVFCSATQFQPLAQAA

SEQ ID NO: 222688 - protein, 347 aa, unidentified
MQATTIGIDLAKNIFQVHGVDARGKKLFNKALKREQMAAFFVNLPPALVGMEACGSSHHWARKLQSMGHTVRLMAPQFVKPYVKGNKHDAADAEAICEAVTRPTMRFVPIKNIEQQAVLSMHRVRQGFVRIRTAHANQIRGLLSEFGLIVPQGVAHIVERVPALIEDATNELPGGFRILMDRLLEHFKALQAQIQQLEAQILAWHRSNAASKRLEQIPGIGPITASALIASLGDARSFKDGRQVAAWLGLVPKQHSSGGKQNLLGISKRGDTYLRTLLIQGARSVVYHADQPNRQTASATCQWVCGVAQRRNKNIAAVALANKNARICWALLAGDKDYQERSTTISA

SEQ ID NO: 222689 - protein, 437 aa, unidentified
MAKKGKKNPSTPENLPILHPHAAGIDVGAEEHWVCVPADRDAQPVQKFSAFTCDLHRLADWFTACRVTTVAMESTGVYWIPLFQILEARGFAVALVNARHVKNVPGRPKTDRFDGRWLHKLHSYGLLAPSFRPPEDICQLRSLLRHRENLIQMTVKHIQHMHKSLDQMNLHLHHVISDVTGVTGMRIIRAIVAGERAPKALATYRDYRIKSAQDTMAKALEGDDRPEHVFTLTQFLALYDFTQQQIAACDQEIERVLDTFDSLVDPEDHPLPPPTTAHRRPQRNEPAFDLRTHLYRITGVDLTQVPGLQAPTIHIVLAEVGLNRHKWPTDKHFASWLGLCPDNQISGGKVLSTSSRRVQNRASRALRMAAQSLRTSPSYLGAFHRRMRSKLGPAQATTATAHKLAKIIYHMLQDKTPYQERGAEHYLHKDQERKIRQ

SEQ ID NO: 222690 - protein, 356 aa, unidentified
MGKDTTAVGGLTIGLDLGDKHTVGCVLTVSGEVEETFRVATTTSALGRTMAGFESGRVVLEVGTHSPWVSRLVEQAGHEVIIANPRRVRLIAENDSKTDEVDAELLARLGRVDPGLLKPIVHRGERAQHDRILLLARDGLVRSRTQLVNQVRGFAKSLGHRMPSSSTEAFPRRVREQFSKDLFPGQSVMLEMIDRLTQEILCMEREAEKLCKDRYPETGVLRQVKGVGALTALGFVLTLEDPSRFAKSRTVGAYLGLRPRSRHSGEQQPQLRITKAGDELLRRYLVGAAHYILGPFGPDTELRRFGLKLAERGGKAAKKRAAVAVARKLSVLLHRLWVTGEEYQAIGYGQPTQEAA

SEQ ID NO: 222691 - protein, 345 aa, unidentified
MRSMYYIGLDVHKKTISYCVKDGSGQIHSQGAIPATRLDLDRWMKTLPQPWTAAMEATIFTAWIYDHLLPHAAALKVAYPLMLRAIAAAKKKNDRIDAHKIADCLRCDFLPECYMASTEIRERRRTLRYRNLLVRQAVQMKNKIAVLLMEAGVSYNKQKLHKVGYFRELLATNKDIDDGLRPLLRLCRETLVRLGKTESALVRSLGRDPLLVERVERLMTIPAVGPITALTWVLEVGDVRRFSSIKKAISYCGLCGAEKSSAEAIKRTPLSKQRNKHLQSVLIEAAKLAPRRSPDLALVYDQEKQKGNANRATLAVARKLVAYLVAVDRRQKEFLPVQRENRTAA

SEQ ID NO: 222692 - protein, 407 aa, unidentified
MKVIIERACGMDVHKKSITACVITPEGKEVQTFSTETVFLLKLIDWIKEHACTHVAMESTGVFWKPIVNLLEAEAIEFFVVNAQHMKAVPGRKTDVKDAEWIAQLPRHGLLKGSYVPDRSQRELRELVRYRRSIIEERARQHNRIQKVLEGANIKLASVVSDVMGVSARDMLRAIADGEEDPEKLAGFARRTMKRKKNELELALHGYVQSHQRIMLKTILLHIDFLTEQIDKLDQEVANRVSDYQADIERLDSIPGIAVRTAEQILSEIGTNVAVQFPTAAHLCSWAGLVPGHNESAGKRKASKAKKGNKYLKSALTECAHSIRGSKNYLGALYRRTSARKGRKRAAIVVAHAMLRIAYYLLTRKEMYVDLGEDYFDKQKQVSIVRHSIRRLENLGYTVTVTAPEAS

SEQ ID NO: 222693 - protein, 391 aa, unidentified
MSMYFIGIDISKYKHDCCIISAADQKVVTKFTFKNNKSGFDELLTIINSLSNSEDVKIGFESTAHYALNLELFLEKSLLTFMEVNPVLISEYKKSKTLRRTKTDSVDCESIARWLMTVEYKPHSKGFYHAYSLKSLTRLRDRLIRQRSFYLVKITNVLDHTFPEFKPFFNERLSKTALYLLENYGSAEKIAHMNSVSYEKLRSLSRGKFSPQQFLQLKELATNTVGVNNSIFDVELNSLLSLYKSLVKEIDAIEKEINKLIEEVHPHYMSIPGIGPLSAAVIYSEYGDISNFSSPSQMLAFAGIEPGINESGTESHGGRMVKRGSSQLRYTLINCCLPLIRFDMTFATYYAKKRGEGKPHRVAITHVAKKLIRVIYALEKQDTDFSSQKLR

SEQ ID NO: 222694 - protein, 339 aa, unidentified
MWYSGIDQHKQFCVITTYGSDGPRVKQARVASTPLALQHYCAEFPGPHRAVVESTGGWYWLADTLAPRGVELVLAHATRVKAIAAAKVKTDQVDSDILALLLRADLIPVAHQIAPAQRGPRDLMRTRLRLVEKSVSAQNSIDRLLEKFNASAVGELDALYQLPAACHTAQIQLLEDQITTLERALYPHLIPNADVQRLLWIPGLGKVNAFTIYTEIDGIIRFPSARQFFSYCRLVPGADNSGGRTRHRSGSKAGNRYLKLAFSHAGIRAVQYYPEIRAFLKAKARRKPIRIARTLVALELARIVYHVLTTQEDFNGRFKNHPLSRRKQLQWPRRASPPA

SEQ ID NO: 222695 - protein, 417 aa, unidentified
MLVVGIDVGAEVHHVAVVDQSKAVVVKPTAFGEDANGYQELFALLGRAGARGGEDLPLATASALPPSALVVMEATGHYWQNLFAALVANGFAVALVNPLRTHRFAGEELARTKTDRIDCLQIARFGAQKRPAAAHLPDAAGEELRELVRLRERLMQEMVARLNQLHRLADLGFPEFTRYLKDLNTALATAILHQYPTAQAFRGLSRKRLAKLSYDGRHQVGAELAQQLIDAAAISVGSQHSPSHQLGVRYACEDLETLRKRLKRLDGDVAGMLQQHQVGQLLTTIGGIGANTAAMLIAELGDPARFASAAALTAYVGLCPGHKHSGKHQPKSSSLTPIGNRRLRRALWMPTLSAATQSNPWLMVFYRRLIQRGKPHKVALCAAMRKLLAAIYSVAKYRRPFVPFLNPSAVRLDYEKA

SEQ ID NO: 222696 - protein, 407 aa, unidentified
MDLLIGIDWADDHHDICLMDPEGKILKEFQILQGIDGFHQFGIELKKYEKDQVLICIETNHGLLFEHLACMPHKLFVVNPGALVDYRKRYHVSGAKDDKIDARLLANFLRTEKHRLRPYQMNGDLVETLKLLTEDRARLLKNKIRMQLQLIDTLKQYYPIALELFSDIATAIGLAFLEEYPTPEKAQKVSLNELKRFLKKQRYSWPKRLEEIFSLLQKEQPRARALFVEAKTQFVMVMIPQIRLITGQIAFYDKRISECFKQYPDHDMFSSLPGVAEGLGPRLLSSLGDFRDRFSGFNEIQCLAGTAPVTKRSGKQCFVHFRVACNKSFRNTMQQMAFSSLKESIWAKHYYQEQRQKGKTHNMAVRALANKWLRAIYALWIHGTSYDENVHLAHMKRISLIANIAAA

SEQ ID NO: 222697 - protein, 309 aa, unidentified
MISIGIDVSKLQLDWAAGPEASVERVANHRRGIRALVRRLSQLKPDRIVVESTGGYERPLLQALAEAGLGVVLVNPWRVRRFGEGLGKLAKTDAIDARLLAHFGAVADLKSTPVRLGRQRLLADLVARRRQLLAFIVAEKNRVALAPRLVRREIASLIQILERRVARLDRKVDALLGEDPERSQVGELLRSVPRVGPAVARTLLVDLPELGALGRREIASLVGVAPFARDSGLKRGLRYTRAGRASPRTALYMASVTGARCNPVLHALYQRLRAAGKPPKLALIALARKLLTILNAMIREQTPWRDAHA

SEQ ID NO: 222698 - protein, 349 aa, unidentified
MSQIIRIGMDTSKHIFQLHGVDASEQVVLRKRLSRKAMLAFFAKLPPTVVVIEACGAAHDLARALGKLGHTAKLIAPQLVKPYVPRNKNDGRDAEGLCEAASRPRMRYMPVKTAEQQAALMLLGVREQLVARRTQLSNTIRGHAAEFGLIETKGLDKLASFLTAIGRDESVPALARELFAMLARQYEQVQVELKAIEAKLMAWHRADAMSRRLAQIPGVGPVTAAALVMKAPDPHAFRSGRLFAAWLGLTPKDHSTAGKTRLGKITRAGDERLRQLLVVGATSVVKQAKARGRGPAWLLELLKRKTPKLAAVALANKMARIAWKLMTTGESYDSARLDGRIETQAVAVA

SEQ ID NO: 222699 - protein, 406 aa, unidentified
MLFVGDDWAEAHHDIEIQDDQGRVLVRRRLPEGLAGMASVHGLLAEHADLDRGPDQVIVGIETDRGPWVQALVTAGYQVFPINPIQASRYRERHTSSGAKSDPGDAHMLAEIVRVDRAAHRPMQGDTAVAEQVKITARAHQSMIWTRQRSVNTLRSLLRDYYPGFLASLDELASREALLVLQAAPTPDQGARLSVSRLTSLLRRAGRKRGLEGRAVQIQAGLRSPQLTARPAIVAASAAAATSLAAVILVMVEQIEVLAGQVEQDFGQHPDAEILLSQPGLGPILAARVLAEFGDDPTRYTDAKARKNYAGTSPITKASGTKRVVLARWARNRRLADAVHQQAFCALQNSPGARRYYDHLRDRKATHHQALRALSNRLVGILHGCLKTHTPYDENTAWQSQYVTSA

SEQ ID NO: 222700 - protein, 339 aa, unidentified
MDATTYGLDVAKRVFQMYWVEAETGEIVNRRFGRDELIRFLAQRPPGQVALEACGSAHWWARKIKALGHEVVLLHAKFIRPFVQTNKTDAADARAIWTAVQQPGMRTVATKTEDQQAMLSLHRIRALLVKFRTVQVNQLRGLYEFGATFRAGRAAGLAEIRARTAELEDALPGTMMCCLQDQLRRIEELQLDIDLLEKRIGVWQKQDAACHAITAIPGIGRLTATALVATMGDAKAFRSGREFAAFLGLVPRQSGTGGKVRLGPMSKRGDPYLRTLLIHGARSVMYHAKVPTPWQKDIQARRPANVAAVALASKIARTAWAILARGQGYQPNYVSMRPA

SEQ ID NO: 222701 - protein, 448 aa, unidentified
MIKEQVEESSVAEEIMARVAAIDVAKASGMVCLRVPAKAAGRRTQRVWNVQATGNEILGLAETLIEAGIQRVVMEATGVYWKPWFYLLESRGLGCRLVNARDVKNVPGRPKTDKLDAVWLAKLNERGMLRPSFVPPKPVRRLRDLTRARAVLTEDRTRVQQRVNALMEDAQIKLSSFISELFGVTGRRIMDALAAGQLDPHRLADLADYRIKAPRRDLIEALTGHFEEHHGFLLRVHLETEAHLTGEIDALTERITAVLAAAQDPRGPAEDGAGTPSHLNELVQRLDEVPGIGERTAQILLAEIGWDMSRFPTPDHLASWAKLTPRTIQSGGKRGAGPTGKGNPWLKGALGEAAMAAANTKNSFFAARYKRLVKRRGHNKALVAVARSLLIVIRHLINDPGARYTDLGGDWHQRHLDPERRMLRLVRELRALGHDVALTPLAPPLQAA

SEQ ID NO: 222702 - protein, 350 aa, unidentified
MIIIGADYHPAFQQIAWVDSESGELNELRLEHREGAEKFYRDLGAQGMKVRVGMEASGHARWFERLLAELHFELWIGDAAEIRTKRVRKQKTDRQDAHLLLRLLLEDRFPRIWVASGENRDLRQLLWHRHRMVQTRTRLMNQLQAVALNEGLRCRKRLWREAGREQLEGFRLAPWASRRRRDLLELLDRLNPTIAELTEAIEQEVEKCPEAQRLRTHPGVGSLTALAFVLIIGKAERFQCGKQIASYLGLVPSEESSGDRRRLGHITKQGNSLLRFLLVEAAQVTVRSDQEWRSKFFHLALRRGRKIAKVAMARRLAVRLYWMWRKGWDYEQLKKFGSHAGQPGHRHGVH

SEQ ID NO: 222703 - protein, 345 aa, unidentified
MKHFAGLDVSLEETAICVVDETGTMVREARVSSEPEALVAFFRGLGLVVERIGLEACSLSAWLHESLVAASLPAVCIETRRAKAAMGAMPNKTDRNDARGLAQIIRTGWYRAVHVKSPTCRSWRALLTARRLVLNKMRDLENGLRALLREAGLKLGTPARKEFAARVRELTAADPVLSVMTEPLLTIIAAMTRELAQLTKRVLDIVRDESVCRRLMGVPGVGPLTALTFRATIDRPERFRRSRDVGAHLGLTPKRYQSGETDVQGGISRCGDELARTALYEAAHSLLIRSRKWSTLRAWGMQVAKRRGMARARIAVARKLAAILHRMWADGTEFRWGEADAAVAT

SEQ ID NO: 222704 - protein, 340 aa, unidentified
MFKNFVGIDVSKSKFDLALIKDSDKQNIIQSVFDNNQKGIKSMSKFLEKENHILLSETVFCMEFTGVYCRPLTMFFVDQECSVWLEMPVNIIRSLGLQRGKNDRIDAHRIALYAYKNKDDIKLWKPQRDVILRLRDLLSLRERLLISQKSLTMPIEELTAMGDKSGAARVRKACQKTLSSIKKEIEQIDKDLDNIIKDDHQLNELYKLATSVPGIGKFTALFMICFTNEFSMYTNPKQLACYCGVAPFEHSSGSSIRGRTRVSHMANKVLKRMLHMGAMSVIGRDPELRNYYQRKVEQGKNRMLVINAVRNKIIHRLCAVIKRGYEYRSENIFKEQLILS

SEQ ID NO: 222705 - protein, 403 aa, unidentified
MNGVGIDVSKGKSTVAIYRPGEEMVLKPRDFHHTQTDINSLIGIIKGLDGETKVCMEHTGRYYEPIATWLSNAGIFVSAVNPILIKAFSDDSLRAPKTDRADAKKIARYTLDRWSKLRQYGHMDETRNQLKTMNRQFGFYMDQKTAMKNNLIALLDQTYPGANTFFDSPARSDGSQKWVDFVYTYWHVDCVRGKSLQAFTEHYKNWCKRKSYNFSAAKAKAVYDASTDLIAVFPKNANTKLLIHQAVEMLNSASGTVESLRTEMDRTAATLPEYPVVMAMNGVGSTLGPQLMAEIGDVTRFAKRGSLTAFAGVDPGKNESGQYAQKSVPTSKKGSPHLRKTLFQIMDSLIQRSPADDPVYSFMDKKRTQGKPYYVYMTAGANKFLRIYYGRVNEYLSSLSESE

SEQ ID NO: 222706 - protein, 425 aa, unidentified
MTRPQLTPPAGVLVAIDIAKARNEVLIEVPGSGRRRRLSVLNTRAEHDRLIALLSDLGQPVTCGFEATGNYHRPIAWRLLQAGFAVRLISSVGLARTREALHNGWDKNDPKDAQVMLHMIRIGASQVYHDPLAAGINDVQELSKTHDAVSRAKTEVLHRILTHYLPLYFPEVDRFRHNSRSDWFFAFLDRFPTPACITALSKEAFIAAAWDVVGRKVAKAQLLGDIYETARSSIGLPVPPDAPAVSMFRLVIGEARGLIQQRDAIEATADALLTDSSDYKLLRRIPGIGPINALTILAEAGDLRRFSHHRQFLKFCGLDLATQQSGTFRGQTKLSKYGNARLRRTLWLAGQVAIRQRENGFRDKFERYIARDRHDADLRRKALTAITAKMARVVHAVIKTGADYRPFVEGPVPGGRTPLSRAVRA

SEQ ID NO: 222707 - protein, 422 aa, unidentified
MLAEARDDEVIVERIAAVDVGKAELACCVRVPDERRPGRRLQEVEVYPTMTRSLLRLAERLAGLGVTRVVMEATSDYWKPVFYVMEAAGSGTWLVNAKDVKHLPGRPKPDRLDCIWLCKVAERQMIRPSFVPPPPIRRLRDVTRYRIDLVTTRTAEKQRAEKLLEDACIKLSVVASDIFGVSGRAMMDALIGGEGDPKALAQLARTAMRRKIGALEEAFTGHFTDHHAFLLAKMLARVDALDADIAELDAVIEQMIAPFASAAERLDEVTGIGAVAAAVIIAEIGTDMTRFPTSGHLVSWAKYAPGVKESAGKKKGAGTTGHGNPYLARVLGEAAIATSRTDTFLGERFRRIARRRGSKKAIVAVGRSILVIIWHLLSDPAARYADLGPGFYDARISHSRKTHNHVRQLEALGYKVTLEPAA

SEQ ID NO: 222708 - protein, 328 aa, unidentified
MNRAAVGIDVSKKTLDVAVTVDGEEVVSSGQFANDTKGHKALLKWVNKQTRKHQADEVHYTMEATGHYSEDLHEFLCDADELVSVENPMKVKSFSQVKMMRTKTDAVDAAVIARYVWIIKPALTPPMEPSIKRLRALVRHVEHLTGHRAQEANRLEGAKDKIVIKSIKAIVKRYDQEIEKTMEEINKHVDDNPELKKKRDLLTSIPGIGEKLSSQLLCEIKGDAVSVKAQVAHAGLAPRQRVSGSSVRGKTQICKMGNARLRRALYMPTMSAIQYNPHIRAFYQKMVSQGKHKMVALCACMRKLLVIALGVLRNGVPYKEDWVSKRPV

SEQ ID NO: 222709 - protein, 434 aa, unidentified
MSEFLNDFIVGIDVSSEFSVVAMLEPNGSLIRKPFRIDHNPAGFNKLLTILKKEEERLKQKPIYFVESTGIFHLPLFFFLKSNDLKGFVLNPLCVHSIKNFDLRKVKNDAKDAESIARLAKFQDVKYSLVPEPQILALRFLLREYYSISDMLTELKNRLCTDLYLLFPGYLDVFSNPFGKSSLKILRGYQTPQAILSENPDTLAQMIAKTSRKGLIWGQKKVAKLVAMAQLCLSMPMEFSILSRKIQYHLDGIETFQANLEGLKDELTGMIVNVDFPKNVRNSIILLEAMPGIGFLTAATILAEIGDFSRFHSPKALVAFFGIDPSVNQSGKFNGDRNKISKRGTRFGRRVLFTAALASIRTTCKGDPINPVLRAYYQNKCQNKKKKVALVAVMHKLLHYIFAVLRDQKPFEFRSPEDHQSWRNSNHSSLILVT

SEQ ID NO: 222710 - protein, 346 aa, unidentified
MNQIIRIGMDTSKHFFQLHGVDAAELPVLRRKLRRHEVLAFFAKQPPTVIGMEACGAGHYWGRELRKLGHEVKLIAPQHVKAYVKRNKNDGRDAEGLCEAMSRPTMQFVPVKTEEQQAALMLAGVRQQLMTRRTQLSNAIRGYAAEFGLITAKGLVKVEPLLADIAQDESLPALAREMFAVHGREYARLQVELKAVEARLMAWHRANADSRRLAKIPGIGPIGATTLVMKAPDPGLFPSGRHFAAWIGLTPKDHSTAGKTRIGKITRAGDEMLRSVLVAGATAVIQQAKKGRGRPSPWLVALLARKSPKLAAVALANKTARIAWKLLTTGESYDGARMPVASALAA

SEQ ID NO: 222711 - protein, 345 aa, unidentified
MIVIGTDPHKSKHVFVAVEARSGEYLTELEIEVSDTGFRRLEGWIEELKGKRVFAIEDCRQVSGSLERFLLKRSERIARVAPKHMANSRRTLSERGKSDPIDALAVARAALREGIENLPPARLDPQAEEIKLLVDHRDDLVQERTRIQNRLRWHIHDLWPGFEIPLGNLDRSKGLERLARKLNRAPKKARVRVCLQQVRRLRAISREESQLENEIRPLVQTRAPELLELPGCGVLTAAKLIGETSGAKFASEAKFARMAGLAPIPASSGKTERFRLDRGGNRQLNCAIHRIAVTQGRYFEPARIYLAKKQAEGKSRKEAIRCLKRQLVRPVLRCLNCYSEAMEAA

SEQ ID NO: 222712 - protein, 407 aa, unidentified
MIFAGVDWAEAHHDVCFQDEQGRRLAGGRLPEGVEGIARFHELAAAHAAEPGEVVIGIETDRGLFVSALVAAGYRVVAVNPMSASRYRDRHRSSGAKSDPGDAKVLADLVRTDRHNHRLVAGDSDLAQGIRALARAHQSMIWARRRQANQLRSALREFYPAALAAFDDLTGGDAVAVLKAAPQPSLGAALSRAQIAAALRRGGRTRRLAERTAAIQAALRSPQLQPAPALAAAMGAAVAATAAVIAEMNAQIAALEQQLAADFEQHPDAQVVRSLPGLGTILGARVLGEFGDAPGRYATAKSRKNYASTSPITRASGTRRAVLARYARNKRLADAIYLWAFAALTASPGARAFYDHRRAAGDTHHQALRTLGNRLVGILHRCLASHTPYSEHTAWAHRANQEIGHAA

SEQ ID NO: 222713 - protein, 375 aa, unidentified
METIYIGVDFHARQQTICYLTTETGEFVTHELKHQDKDEVRSFYSQFDGRVIVGLEASGYSPWFEQLLEDLGHEVWLGDATEIRRRARWRQKNDRRDAELILELLLHNEFPRLHRPSLESREILRMLRYRHKLVKMRTIIKNSLQALALQSGLSRRTKLFTKIGQQELRAAPMSPVMKQQQEQWLELLLVLNQRIVETTLWLKQQSLNDARIRLLRTHPGIGLLTSLGLVHTLDPISRFRNQRKVTAYAGLEPMERSSAERKRFLGISKAGSRLLRFLIIEAAHTAVKKDDDLKRFYRRLVERRGRPKAKVAVARKLLVRSFIMLRDEIDYAEFQRRAVAARLARQSSRPNVPDSLIGQPASSESQECVLNAAQK

SEQ ID NO: 222714 - protein, 379 aa, unidentified
MVVGSTTDVGMDTSKKSIQVAMLLPGRREPVEWELANEPAAVKRLAKRLSREAVGELRVCYEAGPCGYTLQRQLRAAGVDSIVVAPSLVPVKPGERIKTNRRDARRLAQALRADGLTEVHPPTPEEEAVRDLSRCREDAREDLLRARHRLGKMLLRRRLVHCGKAWTQVHRRWLRSLSFEHEADRAVFGDYLQAIEHLEERLRGLEAKLVTVSEKDPYREPVGWLRCFRGIDILTAMTLVAELHDFRRFQSPRGLMAFLGLVPSENSTGDKHRRGPITKAGNTHARHVLIEASWHYRHRPGVSKQLRKRREGQPGWVIGLADRAQLRLHKRFWKLALHGKSTNKAVTAVARELAGFIWAALSLKDAAATPKNAVVDSYA

SEQ ID NO: 222715 - protein, 363 aa, unidentified
MIVIGTDTHKRSHTCGAVDGATGRLAGELTAPARQPGFRELLAWGRGLDEERVWAIEDCRHVSGPLERFLVASGERVVRVPPRLTGESRRGERTPGKSDPIDALAVARAALREGPETLPAAHLDEEALELKLLLDHRDDLVRARSQDQCRLRWHLHDLWPDLELPAGCLDRTVWLDRLARRLSRADQGARATIARELVVEIRRRTRRVEGLGREIAALVGARTPGLLDLEGCGPLTAARLIAETAGAGRLASDAKFARLAGVAPIPASSGTRTRHRLDRGGNRRLNCALHRIAVTQGRCHTPAREFLARKQTEGKTRREALRCLKRHLARRVWRLMIESERGRSITPSTLREACPGPQFAATA

SEQ ID NO: 222716 - protein, 419 aa, unidentified
MKNSKTKKTKNINKKTLIVTMDIGKTVHFGYFRAPDGKDVKPFPIYNSRKSFNEFWDKVCQFKAEKNLEEIVVGFESTGPYAEPVCNFLRKKPVNLVQVNPVHTKRIKELQGNSPNKTDMKDPRVIADVISLGHALTLVVPEGAASQLRRLTNARERALKSRTAMINQVQDLIFIVFPEFLQVMKDTKTKSARHLIKNHSTSESIVAMGLNNLTMILRKISRGKLGQKRAEELFKGAQTSVGIQEGRESILLEIQHLVSNVENEDQFIEGLEKQMAHYLEQVPYSQSILSIKGIGKVTVAGLTGEVGDFRKFNTIAEIMKLAGLDLYEVSSGSHKGKRRISKRGRSLMRKLLFFAAINTVRCKGIMHGYYKQMLDRGMLKMKALIAVSRKLLAIIFALTRNNTHYVENYSRIHHSKLAA

SEQ ID NO: 222717 - protein, 338 aa, unidentified
MNKITTIGLDLAKNVFHAVGCDQHGKQVSKKMLRRNQVLAYFAQKEACLVGMESCASAHYWARELQKFGHQVKLIPPQYVKPFVRGNKNDYNDALAIAEAVTRPEMRFVAIKTQSQQDIQALHRLRERRVQERTALCNQVRGLLAEYGIIITMGVRSLQRKLPELLEDAENGLSDVFRQYLAKIQQQLQELDAHIGFYTDILQEQNRQNEVCQRLQTIPGFGPIVASVFYSLVGNGESYHRGRDVSAALGLVPKQHSSGGKDRLLGISKRGDRYLRSLLVHGARSVIIHAVNKDDKLSRWVNKIKAERGYNKAAVALANKMARIGWAVIAHKTIYQTA

SEQ ID NO: 222718 - protein, 422 aa, unidentified
MLEETQDREKIIERVAALDIAKAELVACVRVPSADRPGRRAQEIATYSTMTRSLLGLADRLRVLGVTRVVMEATSDYWKPVFYLLEAHELEPWLVNAKDVKHLPGRPKTDKLDAVWLCKVAERQMLRPSFVPPVPIRRLRDLTRYRLDLVNTRTAEKNRVEKLLEDAQIKLSAVVSDIFGVSGRQMLAALIAGERDPKMLAQLAQARMRAKIGVLEEAFVGHFTDHHAFLLHTMLARIDETSADIAAVEAKIAELIAPFVQAVERLDEIPGVGVTAAHVMIAEIGLDMSRFPTAAHLCSWARLAPGIKESAGKKKGRGSTGHGNPYLARVLGEAAIAAAKTDTFLGDRYRRIARRRGKKKAIVAVGRSILVTVWHLLSDPQARFHDLGPDFYDNRLGPDRKKRSHVRQLEALGYKVTLEPAA

SEQ ID NO: 222719 - protein, 313 aa, unidentified
MYYIGIDVSKKALSVFDGQNDLEFENQEGLKALKKYLKKRYQTFDNLGIIFEATGIYSDHLKAFCADHQIKAFILNPKQSHNFARSLGRRSKTDKIDARTIYAYCQLIAKEKMQVPVINQEAKMLSSYLTSYQFAQKQRVSLLNHLESVKDKNLLKLLTQELKRAQRLEDKLLSDMKTHIKDHPKLQKDFQRLLTISGIGEKLAFALLALFINYQGTNRAQMTALVGLDPIQRASGTSVKGKAKISKNGNRHIRKMLYMPTLCAIKNNQKIAIFYQRLIAHHKPKKVAVIAAMRKLLLVAHAIYRNKTEYVAI

SEQ ID NO: 222720 - protein, 321 aa, unidentified
MTYVGIDVSKVTFVVAYSSVKTNKTRTFKNTVNGVHEFVQTISASEHNCVLEATGNYSALLVYLLSEAGITISLENPLKIKNFARVMLTVTKTDEIDARLIALYGEKMQPAPYKLRSDAILVLKQKRTVLRQLKKQLVATRNLKGSMEVLPFFDPKCKKTIEKTIAFLEKQIKGMEEELASLAQGEYKKQMDLLTSIKGIGVTLAAALIVATGRFTYFDNAKQLTRYLGLSPTYQQSGTSVNVKGHINRNGDSSLRSQLYVAAFSSLRCNTECKACFDRLRSNGKPGKVVVIAVANKLVRQAFAVVTHGKPYVDGFKSEKP

SEQ ID NO: 222721 - protein, 442 aa, unidentified
MKRKNTGKMKVPKHLEHINRCAAGIDIGSRSHFVAVPEGTDENPVREFSTFTEDLEHLADWLIVCGVTTVAMESTGVYWIPVFEILESRGLEVRLVNARHVKNVPGRKSDVLDCQWLQQLHTYGLLQGAFRPADEVCTLRAYVRQRSTLVRSAASYIQRMQKALTQMNLQLHNVVTDITGATGMRIIKAILDGERNPDALASMRDPRCRNSRSAIARSLKGNYRPEHLFSLQQAVELYEFYQIKIADCDRQILEQLKSFDACDPPHDLPRSTVEDALLRMSGVDLTGIDGIDTATALKILAEIGTDMSRWKSSKHFASWLGLSPGTRISGGKVLSSATKPVANKAAAALRMAAFTLFNSKSALGAYLRRQRARLGAPKAITATAHKLARLVYAMLAQGTAYVDAGQEYYEQRYRLRVIQNLKRKAQELGFELVAMQGTTTAQ

SEQ ID NO: 222722 - protein, 370 aa, unidentified
MSQSSTLFIGMDVHKDTIAVAYVAQEHGAEVTYLGTIGTRQCDIDQLVRKMQSKAKHLIFVYEAGPCGYWLYRSLTKKGYDCWVVAPSLIPKKAGDRVKTDRRDAVQLARLARSGDLTVVYVPTVDDEAIRDLTRAREDALSDGKDAKFRLKAFLLRHDIRYTGRANWGPAHLRWLSEVVCPTPAQQIVFQEYVRAVTEHAERLQRLDQELQEHVRAWRLHAVVEALQALRGVQFTVAVTMVAEIGDLTRFDTPRELMKFLGLIPSEYSSGERRHQGAITKAGNTHARRALVEGAWAYRYPAKVSRHLQLRLEKQPKMIQDISWKAQVRLCKRYRHLVARGKHANIVTVAIARELAGFMWAIAKQLPVAA

SEQ ID NO: 222723 - protein, 339 aa, unidentified
MSVYVGIDVHRKRSQVAVINEGGEVLANRNVPNGTQPVLGVIGGLPPGTPVAFEAAFGWGWLVELLEDYGFAAHLVHPLQCKAIASARLKNDKVDAAILAQLLRADLLPEAWIAPPPVRRLRALLRHRAQLVRLRTLLRNRIHAVLADHGYDRPGGCWSGPGRAWLASLPLPAISREVIDDDLALIDALQVPIDRLDWEVHQQARRDPRVKVLTHLPGVGPYTALVLLAEIGDITRFGSARKLAAWAGLTPTVRGSDRTVRHGHISKQGSAWLRWILCEAAQTAKRHPSFAASYQATARRRGKKIATTAVARKLLTRAYHLLAAQAAGSPATTHASEAA

SEQ ID NO: 222724 - protein, 355 aa, unidentified
MPSKADTAVARTIGIDTGKNTLHMIGLDEKGAIVLREKVSRTRIAARFVNLPPCLVGIEAGMASHHVARELVALGHEVKQVPPAYSKPFRQGHKNDFRDAHAVAEAVERPSTRCVPIKTDGQLDLQALHRVRSRLIGNRTAVINQIRGFLLEHGIPVRQGYRFLRQQLPQILATRTDVLSPRMIRIVGDLMADWKYLDERIEGVTDEIEALAHADEGCQQLITVPGIGPIISSAMVAAIGNGAAFCKGRDFAAWLGLVPKQMSTGDRTILGRITKLGNRYLRMLFIQGARAVLLRPASWVKHSFGSWLTAATRRLHRNVLAVALANKLARIAWTVLAQGRRYEARVEPRVEPAAA

SEQ ID NO: 222725 - protein, 372 aa, unidentified
MNYNTVYVGMDVHKESFSLCAYTIETEKASHYQRTEADYKKVLNYLEFLRTIYGDDANFICGYEAGCFGYTLYHQLTANNVKCIILAPTTMLEQRSKKRIKTDRRDAEIIAKCLAQHNYSPVHIPTAKDEETKEFLRMRDDHKLALKKVKQQILAFCLRHNYRYDGKSHWTAAHLKWLKALTPEALYKEILDEYLLTYQTLSDKIERLDKRIEELATQDEYKEAVKKLCCFIGVKTHTALSVLVEVGDFKRFASAQHFASYLGLVPGEDSSGDDQNRLGITKAGNRHVRLLLTEASQCYARGQVGFKSKELKSRQSGNTPAVIAYADKANERLRRRYYKMVLNKYKKHNVAKTAIARELACFMWGMMTDNIV

SEQ ID NO: 222726 - protein, 379 aa, unidentified
MEVFIKNCAGLDVHSETIVACVLKGRHEYEVYQETETFPTLTKDLFRLLKGLESHEVTHIAMESTGVYWKPVFNILEDFFDITLANAQRIKNVPGRKTDVSDAEWIAKLLRHGLIEKSFVPPVEIRELRDLTRLRKKWIGHLTSEKNRIQKVLESSNVKLSTVISDVFGASGRKLLKRLIKQGYVDEADVEKNIHGRLAPKKQLITDSLFGTLNEHQIFLIRQSWRHIEYLESLVLEIEKRINQLLQNYHEELQLLITILGIKKDTAAVIIAEIGVNMNQFPTSQHLASWAGVSPGNHESAGKRKSTRSIKGNPCIKSAMCEAARAVSRSRNRWLANKYWSLAARRGKKKALVAISHRMLRIIYSMLLNKETYKEPQLV

SEQ ID NO: 222727 - protein, 365 aa, unidentified
MSIVSCYVGLDYHDETIRVCVLAEDGELMVNRNVGNDPAEVRRLVQLRGASVRGVAIEACCGSADFAAELIAQTGWSVKLAHPAAVQHLKKNRDKTDHGDAWLLADLLRVNYLPEVWLADSHTRQLRRLVRHRQGLVAERKNIKLRIRSLLREERMPRCSAANAWTKPWMAWIVTLPLGPESQWVLNQELQRLAQVEEAIRQVDQRFADATQGDPLVEKLLALPGVALVTAVILRALIGRFDRFRNGKQLSRFCGLTPCNASSGKRQADAGLVNEGNELLRAAMIQLAKRLPRHDARWKELHSRLRSTKPANVATAALANRWLRGVYYQIVPPQLGQPEQNSDLGSGSANGGEPVAPRPHVVLGL

SEQ ID NO: 222728 - protein, 422 aa, unidentified
MMDKERSWFVGIDWAAQEHVVSLYDGAGNKIGQRKFSHGGTGLTDMIAWLLKASGGEPGEIHVGIETPHGPIVEALLERRFNVYSINPKQLDRFRDRFTVAGAKDDSRDADVLSDSLRTDMRAFRKLSIADPLIVELRECSRIDEELKVEHGRLTNRLKHQLWRYYPQMLELADDVGAKWFLELFEAVPTPEKAANVREKTIARILKNHRIRRFDAAHVLAELRKPALAVAPGTIEAATAHIRSLIGRIRIINGQLADAGQQLDRLCKKLSEPVADEDGEAAPGQKPEQRDAAILDSLPGVARTVLATLLAEAPDTLQRRDYHALRALCGSAPVTRRSGKSRMVVRRYACNHRLRNATYHWAQNAIQHDHTSRAKYDALRARGHGHARALRSIIDRLLSVACAMLDSGTLFDPEFASKRATG

SEQ ID NO: 222729 - protein, 403 aa, unidentified
MNAVGIDVSKEKSTVAIYQPGDQVILNPHDFHHTQSDISSLIRIIKGLDGETKVCMEHTGRYYEPVATWLSDAGIFVSAVNPILIKNFGDDSLRAPKTDKADAKKIARYTLDRWTNLKQYSHMDETRNQLKTMNRQFGFYMDQKTAMKNNLIALLDQTYPGANTLFDSPARSDGSQKWVDFVYTYWHVDCVRGKSLAAFTEHYKNWCKRKGYNFSAAKAEKVYHKSTDLIAVFPKDANTRMLLHQAVDMLNLASKTVESLRTEMNQTAATLPEYPVVIAMNGVGPTLGPQLIAEIGDVTRFVKRGSLTAFAGVDPGKNDSGKHSQKSVPISKKGSPHLRKTLFQIMNGLIKRSPVDDPVYAFMDKKRSQGKPYYVYMTAGANKFLRIYYGRVNEYLSTLSEGE

SEQ ID NO: 222730 - protein, 349 aa, unidentified
MSIVAETYQYLVGVDTHAATHTLAVINAGSGALIATDTFPTSPAGLNRAVTWIKKRTNGSTLLVVEGVGAYGALFTRVAVTAGYQVVEPFPTPAQIRRGRGKTDRLDAAWIAESVRAADTTELRQPRCDEPIRKALQVLVNARDMINLERTRAINQLTALIRTTGLGVDARQHLTEKQITQIAAWHISANADAASYARREATRLARRVLACNKDLAVNEKDLLQQVAAHPGGCLLDMFGVGPISAATIIVAWSHPGRIRSKAAFSALAGVSPIPASSGNTDRHRLNRGGDRRLNRALAAIVRTRLAKDPATQAYQAKRTAEGHTSPEIRRILKNYVARQVFKKLASITI

SEQ ID NO: 222731 - protein, 414 aa, unidentified
MDQLYDRVAGLDVHRDNVVGCFRRRGPRGGVVREKERFTTTTAGLRVLEAWLAEWQVELVAMEATGVYWKPVYYALESRFTVWLCNARAVKKVPGRKTDMSDSEWLADVAAHGMIRPSFVPPPPIRELRELTRYRKTQIDARAAEVQRLEKVLQDAGIKLTSVASKVLTQSGRAMVEALIAGERDGARLAELAKGKMRPKMLALAEALSGHFGSHHAVACERILGHLDFLDASIAALTAQIDQRTAAFAQVYASLLAVPGVDRLTIDVIIAETGADMTRFPTPRDLASWVGVCPGSHESAGKRRRVGTTGGNQWLRRALIESARAAARTKRSYFGAQYRQIARRRGPNKAAIAVAHSLIELVWHLLSTGEVYNDLGEDYFTNRQDPERRARRLVAQLEELGFTVTLQAAPATAA

SEQ ID NO: 222732 - protein, 405 aa, unidentified
MVEFPQLIARGCGLDVHKDTVVATIKGTGLQEQTRTFCTFTQDLEEFSTWLKTHQVTHIAMESTGIYWRPVYYVLESSFQIMLVNARHIKNVPGHKTDKKDSEWIAKLLLSGLLKHSFVPDSSVRELRSLLRHRRKLVNERSKEKNRLQNILEDANIKLGSVVSDVFSKTGQGIIDLLLEGVTDPVLLSNQAKGSLIGKKQTLVKALYGRFADRHRFMLKLIIDTMADLDKLIGRLDQQIESCLTDKQAQLALLQTIPGVSRQSAIGIISEIGIQMSQFISEKHLASWAGVCPGNNQSAGKVRSTRVTHGNANLKTTLIEASWAASHTMNTYLSFKYHKLVQRRGKKKAAMAIAHQILAASYYILRDQTPYKEPELRQEILIERRKAEMLRLENRLRKLKTLASK

SEQ ID NO: 222733 - protein, 381 aa, unidentified
MTTPATCNVPESTTAGTLFVAFELSEKTWKLGFTTGHGQKPRERTVTARHQERVLEEIAHAKRRLGLPDTAPVVSCYEAGREGFWLHRFLQGHGITNHVVDSSSIEVNRRRRRAKSDGLDVRKLLSMLMRYAQGERQVWQVVKVPSVEAEDQRHLHRDLETLKQERASTTTRIQGLLSSQGIRVTSLSNLPEQLEALRLWDGSPIPPGLRRRVLRVYAHHTFLSEQIAAVEAERRAQLQASTDANIEKVRQLMQLKGIGINGAWLLVMEFFGWRAFKNRREVGGLAGFTPTPYQSGESAREQGITKSGNRHVRWMTTELAWSWLRFQPDSALSVWFRERFGGGGKRLRRIGIVAVARKLLIALWRFLETGVLPEGAVLKEG

SEQ ID NO: 222734 - protein, 343 aa, unidentified
MDHFAGLDVSVKETSICIVDDTGRIVREVKVASEPEALLQVLGNPIYRFKRIGLEAGPLSQWLFSALAEAGLPVICVETRHMRAVLQAQINKTDRNDARGMAQMMRAGLYRPVHVKTLRSQKLRMLLTHRKLLQSKAIAIDNDLRGTLRNFGLKVGVVGTVKFEARIKALVEDLPDLAELVEPLLIVRRALREQIDILHRRLLAIVRDDEVCRRLMTVPGVGPVVALTYRATVDVPARFRNSKAVGAVFGLTPSKYQSGEINRTGAISKCGDEMIRVMLYEAAQIMLARTAKWSWLKAWAMKIARHRGMKKAIVALARRLAVIMHRIWVDGTEFRWTREVTAA

SEQ ID NO: 222735 - protein, 345 aa, unidentified
MMVIGIDAHKRSHTAVSVDEMGRQGFVKTVGTTTQDHPRLLKWAVGLAEERLWVIEDCRHLTRRLERDLVAAGESVVRVSPKLMAHVRDSARSYGKSDPIDALAVARAALREPDLPIARLDGIEREIRLLVDHREDLVAERTRIIARLRWHLHELDPGWTAPTKLERHSAFDKVKAHLSDHNDGAMVRRLALRLVEHLRLLTDEIDELTAEITVRVTRIAPSLLAIVGCGALSAAKIVGETAHAGRFRSKDAYARHNGTAPLPVWSSNKQRHRLSRTGNRQLNAALHRIALTQARCYQPARELLERRKNGGDGGMEGLRVLKRRLSDVVYRAMLTDETVPLRRTA

SEQ ID NO: 222736 - protein, 412 aa, unidentified
MEVLHACCCGLDVHKKGVTACVLWAEGKGKKRKEKRQFGTMTRDLLALADWLRACGVTHVAMESTGVYWKPVWNVLEGQFEILLVNAQHIKAVPGRKTDQNDAEWIADLLQHGLLRRSFVPPTAIRELRDLTRYRVSLVQECNRLANRIQKVLEDANIKLASVATDALGASGRAMLKAMIEGEGDAKKLAEMSRGLLRNKIPELQGALEGRMKSHHRFLLKELMEHLEFVESKIARLEQEIGEHLRPFEEEMEQLGTIPGVDWVTASGLIAEIGVNMNRFGDPEHLGSWAGVCPGSYESAGKRKSGKTRKGNAWLRRCLCQAAWAVSTKRNNYLSALYRRLAARRGTKRAILAVAHKLLQIAFYILRDGKCYRELGADYFDRLHPYRVKRHLVRRLESLGFQVNLVPASQAL

SEQ ID NO: 222737 - protein, 370 aa, unidentified
MAEPTTLFVGLDVHKETIAVAHASPDRSSDVIYVGEIGTRESDLDKLLRRLHSHASRLVVAYEAGPCGYGLYRQLTEKGVCCLVVAPSLIPKKPGERVKTDRRNAAQLARLLRSGDLTSVYVPTVEDEAVRDLSRAREASIGVLKDAKLRLKAFLLRHGLNYSGRATWNEAHLRYLAKVVCPTPAQQIVFQESLRAVTEQTDRVRRLEDELVEIAATWRLRPIVDAFQSMRGVQSHTAVTIAAELGDLTRFDNPRQLAAFVGLIPSEYSSGESRRLGPITKAGNGHARRALVEAAWAYRYPAKVSAHLQQRIERCPKPIQEISWKAQVRLCKRYRRMVARGKNPNVVVTAIARELLAFLWAIAQEVPIGT

SEQ ID NO: 222738 - protein, 447 aa, unidentified
MNDRSGLSRGDRNRNSRLARLRRLLPPQNAVVGIDLADSKQAVVVTDHDSRVLARRRLTARAWELGELLDWALARANAAGFESVTVACEPTGHRWRVLDQLAAQRGLALVCVQPLLVYRARESEDLTRDKSDPKDAVIIARLAAGLRCYEPERADAVWARLRHLGARRLQLTTEATGQVNQVRDLLECAWPAVLTTSGKPFRSSTWCAALAVALERGAGDLARVRRLGSARFEAAVRRELPRWGATRPCLRIVRAVFAALADGTGVAAHRPGALERAGLAMADWHDTTERLACTETRMVTILDDLGLTGLVTTIAGPTPVGAAAILAETGDPARFATPRSLVKHAGLCPRDNASGEFQGKTSISGRGRPGLRVAAWRAVWAALPNNPVMAAKFTHLTTRENNRLARQQARTACAAALLRWLHVVITRQVSWDPVIAAGGRSSLRPAA

SEQ ID NO: 222739 - protein, 357 aa, unidentified
MQRNKISFKGQNIYVGIDVHLKTWHVTTVTESGYKYSFAQHSDAKELFDRLNRKFPDAHFLSAYEAGFCGFSAHYALTELGFENIVVHAADIPTTGKEKAMKTDAVDSEKIAWALKRGELTGIYVKDKRYMDDTNLMRLRQRFVTDLSRQKNRTKHLLYTQGVTYPERFRKNRTHWSRNFMSWLRNEVSLLSEEKRSLVLLCDQVENTRRSILAVTREIRRLSTTDKYKENYDLLASVPGFGLIMSMSMLTELDNNVARFPNERTFVSMLGLIPTCHDSGEKKVSGEKTNRGSKHLGPLIIETSWVAIYRDMELGAYYSNCCQSMKPHKAIIKVARKLACRAYAVLKTKAKYKYEQS

SEQ ID NO: 222740 - protein, 403 aa, unidentified
MTMRRRAWVGIDVGKTSHHACAIDETGKVVWNQKVSNEQRTIEQLVTRACKGAQQVRWAIDLTSPMALMLITVLLCAEQSVVYVPGRTVNTMTHAFRGEGKTDAKDARVIAETARLRNDLSNVVLPDELVVELTQLTGYRADLMADWVRGINRLRALLGSIFPGLEAAFDYSTHTPLILVSGLCTPAEIRAAGIDGMTAFLVDNHAWPTRIVKSAATAAALANEQPLALPGEAGTAALIKRLARRLLELDREIKDIDKTITERFREHPYARIIESLPGFGPGLGAEFLVVTRGDLASFATAGRLASYAGLVPVPKDSGRITGNLRRPKRYNRRLRRVFYLAALSSLRADGPSRRFYDRKRAERLIHTQALLALARRLIDVLWALLRDGREFTPEKPTAATAAA

SEQ ID NO: 222741 - protein, 393 aa, unidentified
MICVGIDVAKDKHDCFILSSEGEVLADVFTIPNNAEGFDTLLQTIRRCARPEDKIKVGLEATGHYSYNILGFLLNEGLDTYVINPLHTNLYRKSLSLRKTKTDRVDARTIAAMLMSDVDLKSYTDTAYHNEELKSLTRYRFDKVRERAKLKQSVSRLVTILFPELEKLVSTLHMASVYALLSEFPGAKQVSEAHLTHLKAVLYDASKGRYGSDMATTLRDAARCSVGSVMSAKSLELRHTIRLIHELDAEIEDIEAAIQSMMGEIQSPITTIPGMGVRMGAMILAEIGDFSRFDSPDKILAYAGMSPSTYQSGQLSLSGAYSHMEKRGSRYLRYALYNATKYVCLWNPTFAAYLAKKRAEGKHYNVALSHATKKLVRLIYALEKSKWPYSTAA

SEQ ID NO: 222742 - protein, 459 aa, unidentified
MRTIGIDLAIQGSHKAIVADEGGRYITPVIKLHTRASEIDKLLARAREGAEGCPLQVVMEPTGMAWFPLAAYLARQEGVTVYLVNSQQVADLRRFYKRHAKSDRIDARVLARVPLVNPEKMHPLVLPPAGAFGCQRGCNQLDRMQTQITAIKNRLRAVDRFAWPGLEELIFADPFSPTARWFRQHWYDPRQVIQAGAQTIRHQWQNSSLAGGDKGEWAEQLVELAEQVLALYGHDTGYLDFALLQAEVGREQEQLAFLEEMHHNLRLQTVRPLYRQIHPSRNLETLKGVGQDGAAVYASFIGDPDRFGSNRRFRGWHGLVPGSKQSADSETKGLHVTKAGPNLLKRYAYLNAEVARQWDPQIAAIYYDQMVNKGKHHNQAVCTCATHLLDRILVVLREDRSYQLRDVDGTPITVEQARAIIAEHYTVPEEIRRRNNKRHRRERAERRSERKQKRESRPR

SEQ ID NO: 222743 - protein, 350 aa, unidentified
MVIIGVDAHKRTHTLVAIDGAGKKLTDKTVAVTAEGHLDALSWASQWPDRSFALEDCRHLTRRLESDLLRAGEAVVRVPTRLMAGQRRSSRQPGKSDPIDALSVARAALREPNLPVAKLDGESRRLRLLVDHRDDLVGERTRIQCRLRWHLHELALEAELPPSSLRRFKVLDHLDKQLSSVEGTVAELARELVGRTRELTVRINELEHEISAIVKLLAPSLLALPGCGVLSAAKIVAETAGARRFRSKAAFARWNGTAPIPVWSSNTERFRLNRGGNRQVNAALHRIGVTQWRGVGPGRGYVQARMTAGDTKTEALRALRRRLSDVVFRLLVADEITREGVLEATVPVAA

SEQ ID NO: 222744 - protein, 410 aa, unidentified
MRRCIGLDVHREFAEVAIWEDGIVRLAGQIATTPEALRLFAESLCELDEVAIEATCNTHAIARLLERHVGRVVVSNPMKTRAIAEAKVKTDKVDAQVLAELLAADYLPSVWIADDETHALRRQVARRAHIVRQRTRFKNRVQSILHRNLIPRCPAADLFGHKGRSWLAGQELPLDERQAAEALLRQLDFHGEELKLIDAELARVALRREEVKRLMTIPGVDATVALSIVAAVGDFGRFRSPEKLVSYLGLNPRVRQSGGQPASHGRITKQGRAHARGMLVEAAWAAAKTPGPLCAFYERVRARRGMQIAVVATARKLAVLCWHLIAKGEDYAYGRPSLLAQKLRRLELRAGMPSRRGQRGSTHAYNLKEVRARERALSEQGEIAYKQLVADWQAKRPVRAGAGAATGVRL

SEQ ID NO: 222745 - protein, 367 aa, unidentified
MWMEAPVKVQRTSIGLDVHARSVVACGLDGDTGEVFRRRLCPDHREILDWVQGLPAPVAVTYEAGPTGFGLARALIAAGIDCRVAAPSKLQRPPGDRVKTDARDAAHLARLLHLGQVVEVTVPSPGQEAARDLVRAREDCRGDLMTVRHRISKLLLRQGIVYYGGQAWTGKHELWLRGQRFDALGLQLAYDTAMDAVIAGVHRRDRLDKAIVATAADSEFTPVVQRLGCLRGVSTLTAFGLAVEIGDWHRLTGRSIGAYLGLVPCEYSTGDTRVQGGVTKTGNGHARRLLVEAAWHHRGPYRPSRDLRARWTAAPAAAQARGHAANHRLHDRWTGFDARKKRSVVANAAIARELAGWCWSLAVLDDD

SEQ ID NO: 222746 - protein, 412 aa, unidentified
MQTLVERGCGLDVHQATVVACLLMVRREGKVQKQMRTFGTTTRELVSLREWLLSEGCTHVALESTGVYWKPIYAILEGTLEIVVANAQHIKKVPGRKTDVKDAEWIADLLCHGLLRSSFVPPKPIRELRDLMRYRRKLTESQAAERNRLLKVLETANIKLANVATDVFGMSGRLMLRALIAAKATPQEMAELAKGLLRKKIPELQLALEGKLEEHHRFLLELQLQRLEAAEKDLATLEQRIRQKLEPYAAQLALLDEIPGVDWTLAAVIIAELGVDMSVFGSVSQLASWAGVCPGNNESAGKRKSSRIPSGNVYLKSGLVEAANAAARAKGTYLRDKFFRLKARRGYKRAVVAIAHKILVAIYYMLSQQVSYNDLGDLYLDKLNKNHLTRNLVHRLERLGYNLTLTLQQKAA

SEQ ID NO: 222747 - protein, 317 aa, unidentified
MTNVTFPQLILRGCGIDVHLKVVVATIDGVGIHKETRSFNTFTSCLTEMKEWLLANGITHVAMESTGVYWKPVMRVLEEDIPNVWIVNARHIKNVPGHKTDKMDSEWICKLLLAGLLKPSYIPPKEQRQLRDLTRYRNKLIQTIAAEKNRMMRVLEDCNIKLSSVVANTSGVTATALIDMLCEGRKLTMADIESVYHKKMSASPQELLEACTGFVEEHHVYMLQMIRKSIAQTQGLVDELSKRIKEILIKYDNVLELLKEIPGFNTKVVEDLASEIGLDMSAFPSEKHLASWAGICPGNNESAGKKKAEESLTVTNK

SEQ ID NO: 222748 - protein, 415 aa, unidentified
MQIMDERCCGLDVHKNHVNACLITPGSRRTRQKEHRKFGTTTGDLRRLLDWLRAAGCTHVVMESTGSYWKPVYNILEESLELVLANPQHVKGLPGRKTDVADAEWLADLLQHGLIRPSFIPPKAHRELRELTRYRKSLIQQRSSEINRIQKVLEGANSKLASVATDITGMSARGMLEALIAGSQDVTAMADLAQGRMRRKREALQQALDGAIGDHQRFLLQRQLAALDSLDAAILACSTEIETRMRDWADPIERLCTIPGIGQRLAEVILAEIGIDMGQFPSQQHLASWAGVCPGNHESAGKRKSGKTRKGSKWLREALIEAAHAAARARNTYLGSQYRRLAVRRGAARAALAVAHTILVIIYHLLRDGGTYTDLGPSYFDQLDRDRIRRRLVTRLEALGYEVSVTAPSSAAMAR

SEQ ID NO: 222749 - protein, 424 aa, unidentified
MENTAARKRRQVPEGYLVIGVDPHKKRHAAVAITQDFATQVKFKFDNTREGLEMMLDRARVEMVKSGCRGVIFAIETGGHYWRNIAYYLDERGFPFRFINQYTLKRRREGKDLNRRKNDYRDSEVAAQLLCTGEFVESVIPQGVYAELRTSHNAYQRLVKERTRITNLVKGLLDALFPEFTQVFKDPGGLTALSVLSICPIPKVIAGMTEDEFVATIEARHKGRRLMRKKLKALYYSARTSIGIAAGARSLSSEMAFLVDKFELIRRQICIMEGTLVKLVDETKEGKYLLSIRGLNYIAVAGLLAELGCFKLYRSAKQMIKMAGSNPTESESAGKKRAKTPMSKQGRPLLRYCAWTAVIPMLRFNPDFRDWAKQRRERPAHANPLSGREIVGAALNRLLRLAFALVKNQTYYQDVKPALIPVAV

SEQ ID NO: 222750 - protein, 379 aa, unidentified
MPTAADLAEAPTAIQTNLAALFVSLELSRSVWLITSLSPGSGGKMSKHSVPAGDVAALLARFAELKQKTLARTGQSFPIVSIQEAGLDGFWLHRVLESEGIESHVVDPASIATSRRRRRAKTDRIDGEALLRALLAYKRGEPRVCVMVKAPTPEEEDRRRLRRERKVLVAERVEHVNRIKGLLFSQGVSGYELMTGDGRALPAHLKTQISRELDRLELLLDHIKAVEGERNALLGEQQAEASPTIAAGKMPLDFRGIGPEFAAILWLEAFYRHFDNRRQLAAYAGLAPTPWQSGSVDREQGVSKAGNPRLRETLIQLAWLWLRHQPKSALALWFKERVSRNAGRMKKVIIVALARKLLVALWKYVTAGVVIEGAVFNAA

SEQ ID NO: 222751 - protein, 394 aa, unidentified
MKLVGIDVGKNSHHFCVMDKETGEFNVTPTSFSNNKEGFDFLINSLKPYSKKSILIGMEDTGHYHVALLKFLLSNGYTVALINPKTTDLTRKMEGGITKNDKLDTITICDVLDTPERKKQYRITKVDRFDLYEQRQLTRHHHNLKEELNVYCNRLQKSIDLVFPEFNTLFSSKYSIVYMNLLKTFGSAEAIASTDIRTIRKFFEIKGKGNRISLTPEKLKECAKNSIGISSEVETIQIKHLVSQITLIKEQIAEIDKKIEEFSITNNSPILSIPGISHFSGTSILAELGDIGNYSKPSQIIKFAGVAPYHYESSQYNAQHTGITKKGSKYLRKTLYQIILTVINNNPVFKKYYRLKISQGKGHRCAQGHCIRKLLRIIYHLLETGQSFDPASLR

SEQ ID NO: 222752 - protein, 456 aa, unidentified
MSNSNGTPRKPRSKLTVINPRAAGIDIGSRFHVVSIPSELDDQPTRQFGTFTGDLLELASWLKVHGITTVAMESTGVYWIPAFEILVKTGIAVALVNARHVKSVPGRKTDINDAQWLQQLHSYGLLRGSILPEGSLAHLRSYMRTRENLTRGRARYLQLIQKALMQMNLQLHHVVTDVLGETGRRIITSILAGERDPLVLAEHRDARCKQTQQTIAKALEGNYEDDHLFELENAFSLHEYYSERISRCEDRINELLQTLVESTSEENRHFINDKKLSSAKLDSRNRIRSLNFNPRPLCAALCGRDMMELPGMGHGTLLTVISECGTDMKRWPTAKHFTSWLGLAPRNKVSGGRLLSSDTALGANPARTAFWMAAQVLARTQTSLGGFQRRLASRIGRPKAIIATARKLAELYYRALRDGISLADPGLSRYEAEQRQIQINAIKKRAQRLGLTLTEA

SEQ ID NO: 222753 - protein, 344 aa, unidentified
MKNITHPTREFFIGVDISKDTFDAALMISDHRRQGDILKAQFKNNKTGLKEFDKWLKANRVARNEQAMLVIENTGLYHCLLWDYCSKHEIRIHIGNGAHLKWSFGIARGKNDQIDSVRLCNYCFKNVDELKLAPEPDPNILKLKVLIATRSRLVKNRGGHQAHLGEINSSLESAIYKMVKKELQLVIDCIEKAIKNIERKIQDLMKASHELSTHYKLLLSVPGIGPVTAAYLISCTNNFDTHPTGKQLACYAGIAPFSKESGTSIKGKARVHKMGNKELKRLLYMAVRSALQHNAEYKAYYDRKIAEGKPELFVVNALKNKIISRAAAVIRDSKAYVENYRPAA

SEQ ID NO: 222754 - protein, 343 aa, unidentified
MNHYAGIDVSLECSSVCVVNASGKVVREGKVDSEPKALIAWFRSLGVALERIGLEAGPLSQWLYADMKAAGLAVELLETRHVRNAFKTMPVKTDRKDARGIAQLVRVGWFRPVHCKSMEAQETRAMLTARKLLQTKLHDVEMSLRGILRGFGLKVGRVTPRRFEARIKELVSGHPSLERVAEALLAARAVLLCEFNKLEKQVLSMARADADARLLMSAPGVGPMVSLTYISGIDDPTRFKSSKSVGPHFGITPKKYQSGETDITGRISKIGDASVRTALYQAAHIILTKPVKGGALKSWAARIAKRAGMQKAKVALARKLAVILHRMLVDGKPFDFAAAAARQ

SEQ ID NO: 222755 - protein, 387 aa, unidentified
MSQTVAARIPAAVDYERTLVLAIEVSNKSWVLAAQVPGLPRTKAKRTIDPEAEALLAAIAAYRARAAATGRSIERVIAVYEAGWSGFWLARWLMRHGVEVYVVQPSSVPADRRIRRAKSDGIDSELLLRTLLAWLRGEPRVCSMVPVPDEADEDARRCVRERSELISERIGLTNRIGAILATLGVSDYNPLLRNRGRRLAELRTALGEPLPANAHAKLKRLLARLELVLTQIAELERERDAVVETEASDGASKMIQQLTALRGIGVQSATVLVREAFVRRFANGKALGSYAGLASSPYSSGGIDREQGIGKAGNRRVRTVMVELAWLWTRYQPGAAQVCWFRERVGSTGRRVRKIMVVALARKLLIALWRFVIDGVLPEGAVLKPAA

SEQ ID NO: 222756 - protein, 347 aa, unidentified
MKVTTSGIDVAKSVLQVHGVDERGKVVLRRQIRRSQLLLFFSKLEPCVIGMEACASSHHWARKLMALGHTVRLMAPQFVKPYRKNDKNDGNDAEAICEAVQRPSMRFVPVKSPEQQAELAVHRIRRRLMGQRTALINQLRGLLAEYGVVFAQGANHVRSKLPALLEDGSESLPALAVELFRDLYEQLVQLEQRIDVYERRVERLYRGNPVCQRLGQLDGIGALTATAFVATVAHAAQFKNGRQCAAWLGLVPKQDSTGGKPRLLGISKRGDVYLRTLLVHGARSAMRHTPKQNDPKSRWVEQLRKRRGENIAAVALAAKHARILWALMVRGESSAPPATHSIEQQTI

SEQ ID NO: 222757 - protein, 341 aa, unidentified
MKNLFIGVDFSKEKVDVTIIFADGLTETAARVFNEFKTTVSGYKQLVKWVEQNSYGIDSSLWLFCGENTGDYSKGLCNFLYGKGYDMWLENAKSIKDASGLRRLKSDRADASMIAEYAMRNYDKAVMYEPLSESLAQLRELFLYRQMVVRYRCSFQVRRGEKRLTMEKSPIKTMISQSGRHIVSELNKEVEKIDKRIAELIKSDEELTEVFTIVTSVPGIGTQNAVCLMVYTDNFRRFNYDSRKIACYYGIAPFGKDSGTSVHSDPHVHYMANRQIKAMLTQAALAAVKFNPVMARYYMRLVERGKKKPVALNNVKNKLVHLVTAMVRNRQTFTPEYKISA

SEQ ID NO: 222758 - protein, 372 aa, unidentified
MKEIIKIVIGLDVHKKTIVAAVLHPGLSQVSERFTIENTTEAIEKMVKRLSERGALSFCYEAGPCGYEVYRQLRRLGQACVVIAPSLTPQKPGDRVKTDRRDAEKLARYFRSGELTEVRVPSVEEEAARDLVRAREDALEDQSRARHRLTKFMLRQGRVYRNGKAWTQKHRRWIQQQRFEVTMYTQTYHAYVRALEECEARLKSIETDVLALGRQPAYAGIVNALGCFKGIAPLTALTLAVETQDFKRFGRAASYMGYTGLVSSESSSGEKIRRGAITRSGNGRLRRVLVEAAWHARHKVTAVGEGLRKRREGCQTRVVNLARRAEERLHRRYWHLVNRGKSPQVAVVACARELAGFVWAMANQANLEIIAA

SEQ ID NO: 222759 - protein, 346 aa, unidentified
MTLFAGLDVSVRETAVCVVDDTGKVVAERKVATEPDVLIELLLSVSSEYGRIGLEAGPLSQWLVNGLAEAGLPVVCVETRHMNALLKAQQINKSDRNDARGIAQMMRVGLFKPVHVKTLASQERRMLLTSRKLLQRKLLDVESDLRGTLRNFGLKVGMVSTGGFEARIRELVEGFHSLAAIVGPMLIVREVLREQFAVLHRLLLGLVRRDPVCRRFMTAPGVGPVVALTYRATVDQPRRFLHSKAVGAHVGLTPKRQQSGETDYDVGISKTGDVMLRTMLYEAAQSLLTHSARWSWLKAWGLRVAQRRGMRRAVVAVARRLAVVLHRMWVDETDFRWSNKPAAMAA

SEQ ID NO: 222760 - protein, 331 aa, unidentified
MKKVTETIGIDVSKLTLDVFVRITNVHKQFSNDTKGFKQIISWLNKQKINLDQTLFCFEHTGWYCLQLSYFLYENDYRYCCINAIEIKRSMGLKRGKSDKADAWEIANYAWLRREELVPSTPPAKKLIELQRMMSLREQLVKQQTASKNLLKGMASIVEDDKSDVSMTILKENIGQLENQILTTEKAMNELIKQDEAMITNYKLSKTVKGVGMVLAVQMLLHTHNYTRFESSRQFSAYCGLVPYPYQSGTSINGRNKIHPISDRKMKSLLSMSAISAIQHDNELKIYYKKRLEEGKPKMVVLNIIRNKIVSRVFATINRGTPYVEMNKFLA

SEQ ID NO: 222761 - protein, 349 aa, unidentified
MGKQIDTLQATVFCGIDVSAATLAVAVIARDQPLQQRAFANRPSGHKALIAWLGKRKAMVRVSLEATGIYSLDLALALDRAPHIEVAVLNPKMVNRFAQTLRRSKTDAADAMVLAEYSRRMPFTRWQPPSLNGLRLRAVGRHIAALVVAHTREQNRLHAAQGSQATPRCVVEDLKRSLCLLERRMVKMRREAMALLGSDAELERRFKLLTGIPGIAATSAVGILGELALLAPEMKVRQWVAHSGLDPVHQDSGTSLHKPTRISRAGSRHLRRALYMPALAAVRWDPHLKAFYELLQARHKTKLQALIAVARKLLHAIYGIFRTGKPYDGQKLFPALLPSENRNPLPVLI

SEQ ID NO: 222762 - protein, 351 aa, unidentified
MMIIGVDYHPSDQYIAFADAETGEIGERRLNHRDGEAEKFYRELKQRGVSVRVGMEATGYSRWFERLLAELGIEVWIGDAAKIKTKRVRKQKTDRNDAQLLLKLLLENNFPRVWVPSPENRDLRQLLWHRHRLVQMRTRIMNQLQALAMNEGQRRKKKLWSDQGRAQLEKLPLATWASRRRQDLLELLDRMNPPIEELTRAAEQEAKKWPEALRLMTHPGVGPLTALAFVLIIGTPERFHCGKQIGSYVGLIPSEDSSAGHQRLGHISKQGNSLLRFLLGEAAQAAARCDSDWRRRYVHLAMRRQRNIAKVAMARRLAVRLYWMWRNGWEYAQWLKFGSNAGQLATGHGVN

SEQ ID NO: 222763 - protein, 358 aa, unidentified
MQSNKINFKGQNIFIGIDVHLNSWSVTTITPSGYKRQTSHRADAVELYAYLTKNFPGGIYHAVYESGFCGYSCCYELRELGIDCVIVHAADVPSTQKSRLSKTDSNDSMRLAMSLSNGELNTIYIPPKEVLGDRDILRYRSIVQKGMSRTRSRIKHLLHTNGVSYPREFREPYKHWTRRFIKWLREDVKLLSGKRLELDFLLEDLEHQRSQLLKATGKVRELSRTSRYAEDYGNLISIPGIGLITAMTMLTEVTDIHRFSSQKKFMSYVGLIPVMKDSGETIRQNEITPRGNQRIRRMLIESAWSAVRYDAQMAAAFGTFCRRMKKNRAIVRIARILASRTYHILKTRTKYDTALCTA

SEQ ID NO: 222764 - protein, 338 aa, unidentified
MTCYSGIDLHSTNSVVVVSDEADRVLYERRLPNDLLKIRAALEPYRGELAGVVVESTYNWYWLIDGLQAAGYAVHLANPAAMKRYEGIKHSGDETDAAYLAHLLRLGILPTGYICPPVERAVRDLARKRSQLVRTRTAQVLAVENGFARETGGRMSANVIKRLEVAGLGEYGLGEDVTCSLAANVAVIQALTAEIEKLEARLRQRVRPRPQYRLLKTAPGIGEVLTTTIMLETGPIERFAAVGNFASYARCVDSKHLSNGKKKGEGNVRNGNKYLAWAFIEAANFARRYCPEAKRFHDRKRAQTNTIVATKALAHKLARACYHMLKEGQPFDVKRCFA

SEQ ID NO: 222765 - protein, 341 aa, unidentified
MKHEMHVLGIDIAKRVFHAVGMDDRGNIVYRKRLSRHDLLPCIAKLPPVLIGIEACGGAHYWARRFREHGHEVKLMAPQFVKPYVKSNKNDSRDAEAIAEAVTRPTMRFVPIKDVDQQDIQALHRVRERLIGERTALVNEVHGLMHEYGIVLPKGVAKFRQAVVGKLEAEKDKLTPLSQELFWKLVEEFAALEAQLAYYQEKLDTLAQTHPECQRLMTIPGIGPFTATALGAAVSDATAFKNGRQFAAWLGLVPRQHTTGGKERLLGISKRGDTYLRKLLVHGARATIRWVGRKTDRRSQWIRHLLERRGKNRTAVAVANKNARIVWALLTSHEDYQPAKG

SEQ ID NO: 222766 - protein, 491 aa, unidentified
MSKRKTYAPPPHEGLPVDTLDFADGDIIQPLYPYGVGVDCHSQFIEVCVFVRTGEAIRKFEGTYPTSWGTLHTAHDWTRQIICAKSCPTINPDRLRYTIESTSTYHMPIIKAWGGNPCVINPLLASSTRRKTDKLDARLMAYHSMTGLWPASFIADPQVQAFRLLMKQRQDAQRLAVTITNRINNYLLRFGHTIGATGSVRGTTARGIIEDMCRDDYVYHEGMYDGLLEGQYICPAGLPDDVKIVIKGMWEELDKQKAREAEFHKKALNKAKSMMWETEDGAIMGDELIKNLMTVPSVGEITALVWLAEVVTPRRFDVKEKLVAFCGCDPSLKISAGKVTSQTRRGGNSRLHCQLIKVAGSCINRHKEPFGQWGYALSQRHAKGGYKKACGAVARRIATAMYFIHARGETFSYDKYNFHKIEVPDVPLDEMLFSTRTRNILAANNLSSSHMITSLFITGEFHRLRGVGKKSVAEVDGWIQANKFKQRSKPL

SEQ ID NO: 222767 - protein, 366 aa, unidentified
MKAKTETTTASLAVVGVDIGKEVFHLVGLNTDGTIAFRRKIRRSSLKDVFEQLPPCVVGMEACLSAHFVSRTLRTLGHAPRIIPAIYTKPFVKGQKNDYNDAEAVAEAALRPNLRVVQEKSQNQLDLQACHRVRSRLVSRRTATINQIRAFLIEQGIAVRAGARALRNSLFAILENRKDEISPRMVKLIHGLYEDWCCLDQRIETVTGEIEELSRIEPKCQRLMSVPGIGPLISTALVAAIGTGEAFDRGRDFAAWLGLVPRQYSTGGRSILGRISKRGSRYLRTLLIQAARVLLMRPHNWNRFSFGPWLRAASERLHRHKLAVALANKLARIAWSVLRHDKVFDTHLEIAAISTEFAIEKLHGTD

SEQ ID NO: 222768 - protein, 421 aa, unidentified
MKSTVARKLRQVPQGYLVIGVDPHKKKHAAVTITQDFTTWAKFKFDNSREGFEMMLQRFRVEIAKTGCRGVIFAIETGGHYWRNLAYFLDERGIPFRFINQFTLKRRREGKDLNRRKNDYRDSEVAAQLLCTGEFTESKLPQGVYAELRAAHNAYRRLVKERTRITNLIKGLLDSLFPEFTKVFKDPCALTAISVLSTCVTPRVVSSMTEGEFVATIRAGHQGRLMRRKLRALHHIARTSIGIEASAWSVSMEISFLVEKLNLIKRHIRIIDGTLVKLVDETEEGKYLLSIRGLNYIAVAGLLAELGSFKQYRSAKQLIKMAGSNPIESESAGKRGAHTPMSKQGRPVLRYCAWTSVIPMLRLNSDFRAWAKKMRERPVHANPLNGREVVGAGLNRLLRLSFALVKKQTFYRVPEPARTTW

SEQ ID NO: 222769 - protein, 379 aa, unidentified
MEGFNSFYNTIVELMQKRELEEALVGIEPTGHYWFDLGQFMGEKNIKFVMVNPHHVHKTKELDDNSPSKNDRKDPRVIAGLVRDGRYFYSYMPTGVYAELRNASNRRFVLVEEQTRAKNRLQKWIAVYFPEYKGIYTHIDAKGGLLVLKQAPTPEEIVRLGVEGIIKIWKDAKLRGNGHKKAMLILNAAMKSIGLKSGLTEARMEIQDLIEDYELQTKRLERVNDLIKELCQQVRYADKLLEIKGIGITTVAGFIAEVGDITRFDSTKELQKLAGLELVSDSSGKHNGKTKISKRGRKRLRYLLFEAAISVVGKNEEFKEIHSYYTTREKNPLKKMQSLIAVACKLIRVFHVILTKGISYDASKMLKDIRHQGEQLKAA

SEQ ID NO: 222770 - protein, 547 aa, unidentified
MATARVGGHRLISLVESFSIANAYCFRRTVAPDISVAVIHDRAKRSYTARRSEVVNNCAAGENFAGGRPAPARSQSQSPHPKRVIGRLLAEPEALAPTSNRKAPQEGHDISTVDGRAKRRKSQQQQQKIMNDSKQWQQQRAFGALDWASKKHSVIVVDQTGKVIEDFEIEHSALGWKKFREKLQPYGSIPFAIETSQGVAVEQLLEAGMIVYPLNPKSAQAYRERKAPSGVKDDRLDGWSFADALRVDGQDWKALRPEEPLIKELRLLCRDEVSLIEQRTAFINQLRHALAEYYPAALEAFEDWTSVSAWMFLQRFATPELLAQAGKRQWQKFLHSRRLWGSDQGAQRMEIFAHASEFAGTPPTIQAKSLLALSLVQMLFTIEKQLTVYRQRIEELFARHPDHDLFGSLPGAGPKLAPRLLSEIGDDRERFGADPQALQCFAGSAPVTKRSGTKRKYWRVHQRWACDKHLRHAMHLFSELSLSRCVWAEIYYQHHRQKNQSHANALRRLAHRWLKIIYKMWIDRTPYNAELHHRNQLKHGSWIFQLQ

SEQ ID NO: 222771 - protein, 402 aa, unidentified
MNCVGIDVSKGKSMIAVMRPFGEVVVSPFEVRHTASELSELARLLKNLDGETRVVMESTGNYHAPVAWLLHGTGFYVSVVNAMLVHDYGNNSLRRGKTDKKDAVKLANYGLDHWLTLPRYVPEEDTRLMLKTCYRQYQQYSKVQTMLKNNLISLLDTAFPDANRLFTSPPRADGSEKWVDFVATFWHCECVCGLSKKAFTAKYQKWCRKHGYNFSQDKALDIYASACGRFGVMPKTNTAKLLVEQAISQLQTTSAALAALKQEMQSLAASLPEYPVVMEMFGVGPTLGPQLIAEIGDVRRFHSKKALVAFAGIDAPPYQSGQIDVRSRSISKRGSASLRRTLFLVMGVLLQCAPMDEPVYQFMTKKRSEGKPYRVYMMASANKFLRIYYASVKAYLDSLEHD

SEQ ID NO: 222772 - protein, 466 aa, unidentified
MKSKYRRCCGIDVHKKSVSVCVLPPEGEQGAVKRETFGTFLRDLKRLRAWLKSCKVTEVAMESTGQYWRPLWNVLEGHVNHLVLLNPAHVKGLAGRKTDRRDAEWLARMHEREHLRGSFVAPAELREMRELTRTRVHLLEDCNRMKNRIAQILESGNIKISSVASDLFGLSGRRMLDALIEGKHKPAWMADYACTSLRKKRDQLEMALEGTLTDHQRRLLRRLVRQLQSLETEIADLTAEIELRAAPWEEKIGRLIEIPGIERVSAWTILAEIGTDMSVFPDSKHLASWAAVCPGNRESGGKRMSGKTRKGNCYLRRSLCQAAWAATRKKGSYLGTVYRRVRGRRGHQKAIMALGHRMLTIIFHMLRDDQPYRELGTAYNDEKRKAKNTARMVRGLEQMGFRVTLEVLPTPEEIQEFGSRTASPETEPSVPRRGRPCKCAERGLVCKHQILLPPPSLPETTEIYSQ

SEQ ID NO: 222773 - protein, 364 aa, unidentified
MLIIGCDYHPSFQQIACVDTDTGELSERRLAHREEAEQFYRELKQQNLSVRVGIESSGHSRWFERLLHELGFELWIGDPAEIRTKRVRKQKTDRQDAQLILQLILENRFPRIWVPDAENRDLRQLLWHRYRLVQMRTRVMNQLHVVSLNEGLRRKKALWRPAGRKELESIALAPWASRRRQDLLDLLDQLTPKIQELTRAVEEEVEKRPVTRRLMTYPGVGPLTALAYELVIGTPERFHCGKQLASYVGLVPEEKSSGDRRRLGHISKQGNVLLRFLLVEAAQVTVRSQPEWRSKFFHLAMRRGRKIAKVAMARKLAVHLYWMWRQGCDYGQWRKLGSHAGKPGNPDGVQSSTDVMIGHPAPRK

SEQ ID NO: 222774 - protein, 360 aa, unidentified
MAKARTLVGLDVHATKIVAAVLDAETGELQCFTLSGDVSEAAGLCAGLPRPVRATYEAGPTGYGLARELARRGVECVVAAPSKIPRAAGDRVKTDRRDAEHLVRLLLAGKLHPVRVPGPEEEALRDLVRAREAVRADLMRCRHRLSKLLLRHGMRFDDGQAWTQRHRDWLAEVALAWPAAQATMLDAQGAIDALAHRRGALDREIVALLPTSPWAGHVARLRCLRGIDTLTAVGLCSEIADFERFAKAEQLMSYVGLVPSEATTGQKRRLGAITKTGSGHARRLLVEAAWHYRPRPRIGTALAERHDGQPAEAIAVAWSAQLRLHRTWTRLEQRAKRRTIIAVAVARELTGFCWAVTRIE

SEQ ID NO: 222775 - protein, 327 aa, unidentified
MYSIGLDISKSTINVYVPYNDLDLVIENNIKSLKSLYSKLKKQYKKDIDKLVFVYEPTGNYSSVIKKFAANKNIKCFIVNPKQSSNFSKAIGQRNKNDVNDARMLSQMIVTASKEQIKVPVIKQEIEEIKELITYYQFLIKQKSQNKNHLESLIAKDGISKLIQRIKKEIKLLEQKEKEILLEIKKVIAKDEKLQEAFINIQSIKSVGEVSAIVLLHHFIQYSNANQKEIISLAGLDPIEKTSGTSIKSKTRISKAGSKLCRSVLFMASLNATQYNEELKRFYNRLKENGKHTTVAQIAVMRKIVVIAHSIYKNNEKYDEERYKRYL

SEQ ID NO: 222776 - protein, 342 aa, unidentified
MGRKIGVDLHKNSFRVCYYQNDKKYDFETYQVSVKGLDHFKNGLKKTDELAVESTGNTGHFYRAVEGKVKRIRVVNPMQFKVISESVKKTDDEDALKIAKFLSRDMIPEVRMKSKAESQLGSLIGTRDKFVKLRTALKNKVHNILNANGIVTRTELLTSNKSLDKVLGHKLDETCLFELEIMVGEIRNLNEAIVKIDEQIKDKGSKLDGHKNITSITGIGDISAAIFLNTIGDVKYFKDDKALASYFGIVPRMRISNETAHMGRITKMGNKIARTALVQCTFVAIRYSPYLRAFYDRLKAKKGSVKAIIATARKLLGIIYNTLKNKWIFEDFANYKLAPQCA

SEQ ID NO: 222777 - protein, 410 aa, unidentified
MRRCIGLDVHREFAEVAIWEDGVVRSAGQIETTPEALQLFADSLCDRDEVAIEATCNTHAIARLLERQVGRVVVSNPAKTRAIAEAKVKTDKVDARVLAELLAADYLPAVWLADDETQALRRQVARRAHIVRQRTRLKNRVQSILHRNLVPRCPAADLFGHKGRAWLAEQELPADERQAAEALLRQLDFHGEELRRIDAELARVALRRDEVKRLMTIPGVDATVALSIVAAVGDFGRFSSPDKLVSYLGLNPRVRQSGGQPASHGRITKHGRAHARGMLVEAAWAAAKTPGPLHAFYERVRARRGMQIAVVATARKLAVLCWHLISKDEDYAYGRPSLLAQKLRRLELRAGMPSRRGQRGSTHAYDLNEVRARERALSAQGEIAYRKLVADWQAKPPAKAGAGAATGERL

SEQ ID NO: 222778 - protein, 336 aa, unidentified
MKEQQIKHNEVQIKKFIKKLKLEWNEIHCCYEAGVTGYPLYRYLKSLGVNCILVAPGKIPRQSSDKIKTDKRDAIKLARLMRSGELESIHVPSEEDEAVRDYLRSRDSLRLDLGRNRQRLMKFLLRKDIKYSTTKYWTVSHYKWLNNLHFNNEILQETFNDYYSRVRVQEENLKSMDKKIQEIAESEPYREKVGILRCFRGVDYLTAMFLLCEVNDFKRFKTAGSFMSFLGLVPGEYSSGSKRKQTGITKTGSPRLRRILTEAAWQHRFPGTGSKIITARRSGQPALVVALAEKASLRLHKKFRNLQLRGKTPQVMITAVSRELSGFLWAAMNLVA

SEQ ID NO: 222779 - protein, 388 aa, unidentified
MLRKNIVQTLDAATSWKVFGLDLAKHDLAVVAIPADGSEVQYVKRYADFLEFTAQIPSATMVFEPGNGANHFALRLQAQGHTPKMVSGASVKSWITLHMSGQKTDLNDAYALARLSEDPDLKTVRIKSVDQNRLQSLQAMRKQLVEQRTKTIVSIKGIFQCWGILFKKDSRSLKKFKEAANNNKELLGEEVVEAMILQIDRIADLDKDIKHVEELLKKVTMQDPRAQPMLDIPCVGLQTVSRLCAIMGDIKDFETPRSFVAFIGLVPKNMISGNKTTTPSGYEQVGQGKVNRRGDKMARSLIIQCASSMYMNFHKDNFPECALKDWIQKQKDAHKPYGKIMVSLAAKLLRIIYAVLKHGEAFSYEKAGISRSALAALKAAQPAEVGNA

SEQ ID NO: 222780 - protein, 331 aa, unidentified
MKQIYGIDLSKEKFDVNYFNKQGEMNHKIYDNTFKGICKFLEKLPKEAVLVAEHTGVYGDLLVFLASRTNINICLESGYKIRHSLGLLKGKTDKLDAARIREYGERFSDKLKSTEADLEEIKELEELYSLRKQLVKERKMLLCHIEKKKQSPANSLVVHAVSEQMLYHFNEAINKLEGQIIELIHSHKDLHRNFDLMVSIKGIGAVTASSLIIKTKNFSKISTARKAASYAGVCPFPNASGKMVKKSRVSAMSDKELKTLLYMCAKSAVKYNQEYRLYYKQKALEGKHHFLIMNNISNKLLRTIFRIIETGEKWNPNYICLDPRENVKIVA

SEQ ID NO: 222781 - protein, 362 aa, unidentified
MNASTTVAVDLAKSVFQLAVADASWKVIESHRLTRAQFERWFDNRKVDTVIMEACGSAHYWGRRLAGLGIRVHLLPAAYVRAYVKRNKTDAADARALLEAARASDIVPVRLKSEEQQALQGLHRIRSLWMATRTARINALRGFCREFGLSMPQGARTGIEAIARALADPQVAIPGLIRGSMTLLIEEIRLLEQRIAQLERELTEVARHSPACANLLSVPGIGLLTATAMVAATGGSVSHFKDARHFASWFGLTPREFSSGSSRTLGRISKKGDRYLRMLLTHGARAVLRAAYVAKQANRSLDGLRSWALAVQGRANHNKAACALANKLARICFAVLRDATPYGQPVSRPNKKLERTAFAIAH

SEQ ID NO: 222782 - protein, 421 aa, unidentified
MRGLRVKRVRTVKEGTLIATVDIGLANNTGYCTTLDGRSTKSLRFDNTKEGFEKFWYMIIASKNRFGCDEVLVGYESTGPYAEPLVHYLANKQVKIVQVNPMHTKKMKEVNDNSPLKTDDKDPRVIADIIRLGRALSIVVPEGDAASLRRLNNARERHVGEQTALLNQLQQLVFLIFPEFKTVLKNMKGKTAHYILKRYTLPERIGTLSKEALGEEMRKRSMGKFGIKDAESLIGLARETVGIKEGIAGIFMDLRHILMQLEAEGRFISEIEAEMGTTLERIPCSVRLLSIKGLGTVSVAGLIGEVGDFSKFSTQSEIMKLAGLDLYEISSGKRKGQRRISKRGRSLLRKILFYAAIQMIRKNGIMSEYYARLIGRGMERMRALIAVSRKLLRIIHAIVRDNRDYVGQYQAPERRVIKMAA

SEQ ID NO: 222783 - protein, 394 aa, unidentified
MNRIVYIGMDVHTSNYTLCSLDPGYGVEKDNYFAEVQFTNNFVTNVVNYVSNLKKKLKDCEFVCGYEAGCLGYSTYKDLTKVGIKCVLMAPSTMAVQKGGKKVKNDRRDARVIAQCLAYQTYKEVYVLSEHDEAVRGYLRMRDSHNKALKRIKQQIIAFCTGHGLFSPTKSNWTVAHLKWLKDLKFNDPVEQEILNEYLSSLTFLNDKIKDMDVRIEELASEKQYCENVKKLRCIKGIETNVALTLLAEIGDFNRFSKPTDFAAYLGLIPGEQSSGDKVRGTGITKAGNSTLRRKLTESAKGYWRGRIGIKSATFKKLEKELPKEVTEYALKANTRLQRKFFNMTHVKGKNMNVAASACAREMACFVWGLITNHYDKAPAVPKTDEELLDLNLG

SEQ ID NO: 222784 - protein, 341 aa, unidentified
MSIVGAFDVHRRQLTFEYLDTGTGELKRGRVVPADREHLRQWLARFDGHDDVHFALEGCTGWRYVAEELAAAQVTAHLAEPADTAALRGRKRHAKTDKADARHLRVHLLAGDLPECWIPPEHVLEARATVRLYKDLVDERGAWHQRIAATFFHQGVPAGVSAAKPAGRAAAAEADLSPAGRQAVEAALRQVDRLTAELDPLRRQLDMYSRRQPGCAALRRAHFGIGAVTSVAIWAELGDVRRFTSSDHVVRHTGLDITVHSSNIKRPPGKLFRQGPPLLRWALYEAAKSASRPAAPDYGYYTATRERRDGGLATLSVARKLARRCYHTLRELEEEALAPAA

SEQ ID NO: 222785 - protein, 427 aa, unidentified
MILNIVYPICCGVDVHKTFFVATIITTAPDGITAYYKKRRFSTFNNQILAFKQWLLENDCREVCMESTGKYWVPVYNLLEDSIHVTVANPKWVRAVKGCKDDDKDSKWIGELFRLGLVPGSFIPSKDIRILREFTRYRFKLVSCKTSEKNRYQNVFTVCNVALDAVVSDMFGVSASAITDYIVNSDTFDSEYCASLLQRSLKKKADEVIASIEGFQMTSEQKMRARMVKEHYDFLLQHIQRLDEMIDLLAQPFESVTTLLNFIPGASRLSIISVLSEIGTDMTQFGSSKRLCSWAGLTPSNNQSAGKKKSVKISRAGVYLKPMLVQMAHAAVKDKQSPYYAIKYSQISKRRGKKRAIIAIARMILTAMYHMLSTGEVWNPCDLSKVDLPPDLREKKLQKSLRKATKLLVAHGLISPDAVKIPESVPA

SEQ ID NO: 222786 - protein, 369 aa, unidentified
MKYVGIDYHKRYSVCSATDERGQSVRERRINGNSAAGFAQFFSELDEPAKVVMEACWNWGYLYDLLGETPGVAEVVLAHPYKTRLIAEAQIKTDKIDARVLAKLLRGDLVAQSHAPGPATRARKHLLRQRLFWVRLRTMLRNRTHAILDRQRGLERPQLKDLFGRRGQTWLHAVHLPTESDQPLLVQDLEVMQMLELKIKELDRLIGATQGEEEKLLESLPGIGPVFSSVIASEIDGVTRFAAPAKLCAYAGVVPTTHASGGRVFHGRLLWQCNKWLRWALVEASWSSIQFSGYFGSIYRAARERGKNKNVAITMVAHRLCQIIWPLLTEKRPYTETTPLKRPKTFPDRSEPQMTVATRQPRTPHAPRR

SEQ ID NO: 222787 - protein, 364 aa, unidentified
MAKARTLVGLDVHATKIVAAVLDAESGELETFRMDGDAGEAAAFCAGLPRLVRVAYEAGPTGYGLARELAKRRVECVVAAPSKIPRAPGDRVKTDRRDAELLVRLLLAGKLHPVRVPGGEEEALRDLVRAREAVRVDLMRCRHRLSKLLLRHGIRFEDGAAWTERHRRWLGAVTLEWPAAQTTLLDARGAIDALCHRREQLEREIVALLPSSPWQTQLGRLRCLRGIDTLTAVGLCAEIGDFERFATAGQLSSYVGLVPSENTTGQQRRLGSITKTGSGHARRLLVEAAWHYRKQPAIGAKLSDRQDGQPTEAIAVAWSAQRRLHRTWTRLEQRAKRRTIIAVAVAVACARELAGFAWAICQIE

SEQ ID NO: 222788 - protein, 336 aa, unidentified
MFQLGIDVSKKTLDLCLLREGVKGSVKTRKLQNDINAVNAVIAWLSKQHCKPEDVHIIMEATGVYHESLAYGLHKAGGRISLANPHRAREFARGMGMLTKNDRVDAYMLACYGALKAPEPWLPPPEEVRHLSALLRRRDALVADSTREKNRLEKYLATDTPSVIAESVEAMIGQLNAEIKRLDRLIRSHLNQHPELKKDFDLLTSIKSVGYQLGLNMLVILRSHDFATAEQAAAFLGVVPVEKYSGTSVRGCPKLSKIGPPEIRAKLYLASLCGLRFNPLMKAMYERLCLRGKGKMCAIGALMRKLVHWCYGVLKTQKPFDVGYLSSYAHSACKAA

SEQ ID NO: 222789 - protein, 368 aa, unidentified
MKKRITFVGLDTHKNSIEVALADDGRNTEVRLYGSIGGDLASLDKMIRKLQATGTELRFVYEAGPCGYQIYRHLRAQGLQCDVVAPSMVPKRSGDRIKTDRRDACNLARLYRAGELTAIYVPQEDDEAMRDLVRGRQDAINAQRKVRQQLGGFLLRHGFRYPGKCAWTLAHRRWLAGVRMPHPAQQIMLQEYIHSVEECTQRVHRLTEQILQLMPDWRMRPLVGALQALRGVAPVVAATAVAEIGPMGRFERPRQLMAYLGRVPSESSSGGSVRRGAITKTGNGHARRALIEAAQAYSHPARISRVMRKRQEAVPEPIRQIAWKAQLRLCARFRKLTARGKSRNRVVTAIARELSGFMWAIAKQVPVP

SEQ ID NO: 222790 - protein, 335 aa, unidentified
MIQVGVDISKTKFDACLLIDSKTTLKTFGNSYDGFNAFVEWLSEHELQLMHVCMEGTGKLWEPLAEFLHSSGCIVSVVNPFQVKGFAQSELRRSKTDKIDAKIIARFCRSHSPVAWIPPSPETRAVRDLQRYIDALKAQRTQENNRLQSGVMHSSVQFAIEQHLEYLHTLIDELENQVLSQINASQKLRRNFLLLTSINGVGQTTAATFLGELSGAENFSQSRQLEVFCGIAPRLYESGSSVRARSKISKIGNSRMRNALYMPAMAAMRTNPALQEFASRLKAAGKPGRVVICAVMRKLLRIMFAVVKSGIPYDSKFRSVRKVSNHVLERQLCFE

SEQ ID NO: 222791 - protein, 425 aa, unidentified
MNYKQNEKINQVKESTLVVGIDIGSTTQYARAFDWRGIELGKVFPFSNSREGFESFKAWMQHLQDKYKKLDAIVGIEPTGHYWFDLGAYLEDEGILLVMVNPYAVKQTKEPDDNSQSKNDRKDPKVIAKLVTEGRYSAPYTPDGVYADLRIMVANRKRLIREMTQIKNRFARWFAIYFPEYTDVFGDYEAQSSMLLLKKVCTPEAIVELGAEKINQIWRDAKLRAVGMKRATTLCETAKRSIGLKKGSSAARYEMKLLLEDYEYKKAQLDAVMEEIEKLCRKIPESRQMLAIKGIGVITVAGFLAEVGDVRRFESPRQIQKLAGLSLRENSSGKHKGQTSISKRGRSKLRAVLFNAAIPLIAKNPEFKSLHEYYTTRANNPLKKKQSMIAISCKLIRVFYAILANGVTYDAQKMLSDIHRQPQAA

SEQ ID NO: 222792 - protein, 412 aa, unidentified
MTQLQSEYLYRVGVDWASQHHQVCIVDREGHRTEDTVPHTSAGLAALAEKLAALSPEAPERVAVAIEVPRGPVVETLLERGFHVFALNPKQLDRFRDRHTVAGAKDDRRDAWVLADSLRTDQPSFRRVHLDDPLIIELRELSRLDDDLREELSRLSNRLREQLQRFCPERLALCPAADEPWFWALLDLTLARRPKSLAINAVRAVLTAHRIRRLSAETVHAALQVPPLRVAPGTIEAAGAHIAVLLPRLRLVHDQRHRTVGTRIDRVLAALAQEDVAGEHRDVTILRSLPGVGRLVAATVLAEATRPLAERDYHTLRAQAGAAPVTRQSGKKVAVMMRWACNGRLRNALYHWARVSVQVDARCRAHYDRLRQRGHEHARALRGVVDRSLAVLMAMLISRTLYDPERRCAKPA

SEQ ID NO: 222793 - protein, 344 aa, unidentified
MEYFTGIDVSLEQSSVCVVDGTGKIVREVKVASEPDALVRFFLGLATGVARIGLEAGPLSQWLYAGLVAAGFEVVLLETRHVKAALSAMVVKTDRKDARGIAQLLRMGWFRPVHAKSPVAQEVRALLVARKLLQTKLLDVEFSIRGILRGFGLKMGEVSKGRFATRVRELAAGHLMLERITEPMLRARAALRTEYAKLHGEMLAIVKPDPVCRRLMTVPGVGALVAITFKSAVDNPGRFARSRVLGAYFGLTPRKYQSGETDVTGAISRVGDAMVRMTLYEAANVILSRVTRFSSLKRWALDVAKRRGLKRAKVALARKLATVLHRMWVDGTSFRWGKQGAAAG

SEQ ID NO: 222794 - protein, 308 aa, unidentified
MTLPQCYIGVDVSKNWIDVFVASTQKLTRIANRQSSLSEWVAGLGEVTVIFEATGRYDHELRTQLDELGIPYVRMNPLRARQFARAAGFLAKTDRLDARILCMMGEALRPEPTMPIQPVRQRLYDLQARREDIVVMIIAEQGRLSIVKDPFICSDLKASIRALTRRRDALQKQIDAHIEANRQLAEQYRQLQSAPGVGPQVACRLMASMPELGRVNRRQIASLAGLAPHARESGLYKGKRTIHGGRSHVRRAMYMAALVAIRWDQHWKMAYQTMREAGKAAKTAIIAVARRLLVRINAMVKTGLSYQV

SEQ ID NO: 222795 - protein, 352 aa, unidentified
MKHYIGCDGHKHYSIFVSMDESGHASAPQRVQHERTEFQDFLRCLPPGSPIALETSGHWYWMVDAMEQAGHQPILVHARKAKLLMGMVNKTDKLDAKGLATLLRNGTVPAVWIPPATLRDQRELPRLRMTFVRIRTALKNRIHAAFAKYGMALTDISDVFGAKGRQVLEQRLPELPPETRRAVREELALLEALQDQIDDLEGRIREVVRQTPEMVLLQTLPGVGPILAIVIALELGSIERFPNAEHFASYSGTVPRVQESGGHRRYSGAVRNDVNHYLKWAFIEAANCVVLNQAHWEGRQVVQLYQRLRRHKGHAKAIVAVARHLAEATYWMLKKQEPYREPTWTRRTGVQG

SEQ ID NO: 222796 - protein, 413 aa, unidentified
MGYKIAGIDVHKKVLMVVLIDATSPVEKPERRRFTTLPSDLRRLSSWLREQGVQEAVMESTAQYWRTVWLELEPHMLLHLAHAFSNRAPRGRKHDFKDAERLGRRLIADELILSFVPNGEQRIWRSMTRMKVQLTRDRVRLQSQIESLLEEMRIKLSSVVSDLLGVSGLRILRALAAGETEATRLAALGDNRLRCTEEQLLDALTGSSQPMHRAMLALQLERLHLIDTQIAELSNLIAQAMKPHQEAVIRLAEVPGLGVGSAQQIIAEVGAQAGTFSSAAELTSWVGTCPGKNESAEQNHTSRSAKGNKYLRRVLNQAAHAAVKKKGSHFQTVFRRLLPRLGYQSAIWAIAHRLCRVVWKILHEGARFIEQGSEPDAHTKKKRARLLVQALRRLGYDVAITAKHLANQNALQV

SEQ ID NO: 222797 - protein, 341 aa, unidentified
MEQATTIGLDIAKHVFQLHGADAAGHVLFRKRITRAKLLSFLAAQTRCVVAMEACAGAHYWAREIAKLGHHVRLIAPAYVKPFIKRQKNDAADAEAICEAAQRPSMRFVPVKTEEQQANGIVFRARDLLVRQRTQCVNALRGHLMEYGYVFPKGITHVETLVALVEDLQSSLPDSVRVILKLLVDTFTALEAQIAALDAEINQRSKSDPTARRLMTIPGVGPIASTAITALVPAAEGFPAGRDFAAWLGLTPLQKSTGGKQKLGAVSKRGERTIRRLLIIGASAVVQQASRRGAPKGSWLAQMLARKPKMLVTVALANKMARIIWALLVKGGTYRTPAAAA

SEQ ID NO: 222798 - protein, 350 aa, unidentified
MKKHSYIQMGLGMDIAKSDFSACIMGFEGKKKYKVLASSKFSNTPSGFEKYWSWSQKHLGKHDCEDIEYLMEATGVYHENLAWFLYDKSVKVVVALPSQAKDFMKGEGIRSKTDKIDAQGLAKMVLVKDLRAWQPISSSMQALRSLTRHHETIQKDLTQSRNRLHALDYSHNPDKFVAKQLKAQIKFLEKQRDQTHDQIEATVKEDEKLHEKIKHLTSIHGVGLLTAAVVVAETNGFELFTSEKQLTSYAGYDIVENESGTRKGKTKISKQGNAHIRRILCMPAFNAINVEGVFLNLYNRVFERTKEKMKGYTAVQRKLLCMMYTLWKKDEDFDYSINNKTVEEQNALLH

SEQ ID NO: 222799 - protein, 337 aa, unidentified
MKYSGIDLHSNNAVVAVIDNADHVLYRKRLPNDLQLIVAALAPHRAELEGVVVESTFNWYWLVDGLVDAGFTVHLANTAAIKQYEGLKYAGDDQDAVFLAHVFRLGLLPEGYIYPPEERPLRDLARKRMQLVQQSTLNILSIQSLLSRQVNMRMTGEQVQRLDNATVSALRLPPYVERSLVASLVVLRTLRAEVHSIEAVLRREAKLRPEFEILKTAPGIGEILAVIIMFETGTVTRFASVGHFSSYCRCVESKRISNGKKKGEGNAKNGNRYLAWAFIEAASAAMRYCPQARRFYERKKAKRLAVVAMKALAHKLARAAYYMMRDGKPFEVGRCFT

SEQ ID NO: 222800 - protein, 350 aa, unidentified
MHTTTIGVDLAKRVFQVAVADAQYRITQRLRLTRARFERFIASHSASLFVMEACGSAQHWARRLTALGHEVKLLPAQYVRAYVRRNKTDAADAAALIEASRCQEIKPVAVKTLEQQQLIQLHRLRESHKRTRIAQINLLRGCLREFGFAVPVGAVRGCAAMSEVLESADNGLPDALRPWVAAGLEQIRTCKGQERELERQIKALVEPDELVQRWLAAPGIGLLGASAVRALAGDLHRFPSGRHFASWLGVTAREYSSGEQRRLGRISKRGDSYLRMLLIHGARSALNAAARAEKAGRRLDPLQRWALQTEQRIGRNKATVALANKIARVLWAMARYQRAYDPNYSAPHEH

SEQ ID NO: 222801 - protein, 375 aa, unidentified
MQEKLRFLGLDVHAETIAVAVAEPDGEVRSLGTIPNRTESIRKMIRKLGPAEKLRACYEAGPTGYVVYWQLAELGVQCEVVAPTLVPVKAGDRVKTDRRDAEKLARCYRSGDLTAVWVPDEGSEALRDLVRAREAAKQDQMRARHRLSKFLLRSGQRPPTGVRPWTRPYLIWVAQLRFTQIAQESTRQDYLHEVEHMRERVARLEQAITEAVKLASPALQQVINDLQALRGIADISAVTIAAELGQVSRFGSARQLMGYCGAVPSEDSSGKRTRRGGITKTGNAHLRRVVVEAAWSYRRPPCIWYGLRRRQESISEEVKEIAWKAQHRLHKRYMKLGAAGKDQRKVVTAVARELLGFIWAIGTRAETVASRRLAA

SEQ ID NO: 222802 - protein, 389 aa, unidentified
MTKVFCGIDVAKYEHVASIYNPVTGEIILDSLHFDNNDKGFKSLLSNLSKLKKEYEVLVGFESTGHYHQTLFNCLTSNKYKCYLINPYMTSKFRSISLRDAKNDNIDSRAIARFLSLEYINLKDAEFLSNELKELSIQRDFLMTDSSKMKIKLKSYLDRTFPELENIVDINRAAIRAILKEYPSAEAISSVRIDKLKNIAKEASGNKYSLSKIETVKEKAKESIGIRSTGIELNIIQCIETLELKEKQIDKIEKEIKKHPLVFNSPLHQLTGINDVEIAYIMSAIISIARFDSPKKLVAFAGLDPKVKQSGTWQASTTRMSKRGNKLLRYALIWTAFNMSKKDGPIKDYYDLKKSQGKSHYNALGHCAAKLCRYIFWILNNPTKEFKYQ

SEQ ID NO: 222803 - protein, 386 aa, unidentified
MQKLNDLSRSLTALEPHGTLIAVIEMSLSSWLVASIVPGVERQPLKKLAVDESALLKLLHRWREEAEKAGRRIERIAVAFEAGRDGFWLARWLKARGIEAYVIHASSVAVSREHRRAKTDRLDTELLKRSFLGWLRGERDHCKMVEIPTMKDEDAKRPNREHDSLVGERSRIVNRMKAALVRLGIRGFNPKLKRATTRLGGLRTPEGEPIPPNALAELRRDMERRRLVNNQIRQIEQERLERIEQAPCDGPHVMVRLLARVMGVGIETADMLVHEVLSRNMRDRRAIARYAGLTGSPDESGRKRREKGLARSGNARVRRGMIQLAWRFLLHQKNSALTKWFRSRTENARGTRKAMIVALARKLLIALWRLVREGIVPDGVILRPAE

SEQ ID NO: 222804 - protein, 355 aa, unidentified
MSQEKYIGMDVHQATISVAVLDSRGKLIMESILETKAATILEFLQGLHGSLSVTFEEGTSAAWLHDLLKPHVTRLVVCDPRKNALLKDGSKSDRIDARKLAELLRGNQLTSVYHGEHGMRTLKELGRSYVTITQDLARVMSRIKALYRSWAIACSGTSVYAPRHRAEWLGKIPEPGVRLRAERLYQQLDLLQPVRQQARRDLLTESRKHHAVKLLRQIPSIGPIRAALLVAQLQTPHRFRTKRQLWAYSGFALKTHDSGEYRYVRGKLQRNQERMTVRGLNNNHNPDVKNLFKGAAISASTHPGPLYDFYIALLEKGMRPTMARLTLARKIASITLTIWKKGADFDATQLHRQEA

SEQ ID NO: 222805 - protein, 402 aa, unidentified
MNAVGIDVSKGKSMVAIMRPFGEIVSTPFEIKHTASDIHSLVELINSVEGESRIVMEHTGRYYEVLAHQLSEANLFVSAINPKLIKDFDNDSLRKVKSDKADAVKIARYALDKWQNLKQYNVMDELRNQLKTMNRQFGFYMKHKTAMKNNLIGILDQTYPGVNTYFDSPARSDGSQKWVDFASTYWHVDCVRKVSLNAFIDHYQNWCKRKKYNFSQSKAEEIYGKAKELVPVLPKDAITKLIIKQAVDQLNSASTTVESLRTLMNETASKLPEYPVVMAMKGVGTSLGSQLMAEIGDVSRFTHKSAITAFAGVDPGVNESGSYEQKSVPTSKRGSSDLRKTLFQVMDVLIKTHPQDDPVYQFLDKKRAQGKPYYVYMTAGANKFLRIYYGRVKEYRSSLPES

SEQ ID NO: 222806 - protein, 359 aa, unidentified
MEYVALDVHKNYTWARVENSQGARLYESRLAHAHGTIKNFVNRWSGRSPVAVETVGNWYWVVDEIEAGGGTPQLVNARLAKLMMGNVNKSDKLDCQGMNRLQRTGTLPTVWIASSSVRDGRERARTRMVLSRLRTQLKNRIHATLGKYGYTVKGASDAFGKKGREIIEELLLKLPPHTQQALRLILDELDHVTDNLKAIEGHMIEIFSPCPQTQWLKSLPGVADILAVVIWTEIGTIERFNRAEQLASYCGLVSRENSSGGKIRLGPVRRDVNVYLKWAFVEAANSACSMRGAVGMVISAGFMSGLNPAGAMAKPKSPSHATSLRPASGCLRKESPIGNRCRPRNAKRVRLMSPTRLAF

SEQ ID NO: 222807 - protein, 410 aa, unidentified
MDVLYANCAGLDIHKDSVVACSRRMSAGKVLREVRTFKTTTGELLALSEWLGSLGTTHIVMEATGVYWKPVWNILSDGDFELILANAAHVKNVPGRKTDVNDATWLADLIAHGLIRASFVPDPQTQEQRGLLRTRKQLTRERTSHVQRLQKTLEEANIKLDSVISDVIGASGRAMIEALIAGETDPLRLASLASSRIKASPTSLGEALRGRVTRHHRFLLRLHLQQIDALDRAIAEIDKEVEANLAPFRELIPVLTSIPGIGDLAARVLLAEIGTDMSRFPTAGHLISWAGLCPQNDESAGKRRSTRMRKGAPWLKTTLIQCAWAAARKKASYLAAQFYRLRARRGPKKAVGAVAASILTAAYHMIANGAFYQDLGADHFERRAKPNQIKRLVARIQNLGYDVEIKPMAA

SEQ ID NO: 222808 - protein, 347 aa, unidentified
MKHYAGIDVSLNSSSVCVVDEIGKIVREVKVASEPVALIHCIKSLGVRVERIGLEAGPLSQWLYGALRESGLPVELLETRHVKAALSAMPVKTDRNDARGLAQLMRLGWFRPVHCKSMAAQEVRALLTARKLVQSKLYDIEMSLRGILRGFGLKVGPTTSRSFAARINHLAAGHPSLEMVAEALLSTHAAALCAFKNLEKNVRQISRADARVRLLMSTPGVGPVVALTYVSAIDDPKRFTSSKPVGAHFGLTPKKYQSGETDISGRISKIGDSSVRAVLYEAAHIILTRPIHGGALKSWAMRLAKRAGMKKAKVALARKLAVVLHRMWVSASTFDFEKANGCTRAAA

SEQ ID NO: 222809 - protein, 365 aa, unidentified
MAEVTRGAAARVGVDLSKRVFQVHAVDRWGHKVVGKAMSPERFFAWCAELPAGCLVAMEACGGAHHVARRLRLMGLDARLIAGHFVTPYRMAGKSGKNDANDAAAICEAAGRPHMRFVPVKTAEQQGQLSVHRLREGYKAERTALINRIRGVLVEFGMSFPQSPEALRRVLAEVIEDGSNELTGIARLVLQRAHLHWIELELQMKWCEERIGTHVRSDERASKAAALQGIGPIGASALVASVGDFKQFASAKQFGAWLGLVPSQNSTGGKASLGRITKRGDDYLRTLLIQGAKSAVMTAHKRSDRISQWLVQLKERAGWQKAVVALANKNARILWAVLTRDGEFDANHLPERPAPHCALSQRPAT

SEQ ID NO: 222810 - protein, 375 aa, unidentified
MKVTTIGIDLAKQVFQIHGVDEHGKMTIKKQLRRAQMAEFFVNLPPCLVGMEACGSSHHWARKLQGMGHTVRLMAPQYVKPYVKTNKNDAADAEAICEAVGRPNMRFVPVKNIEQQRILAVHRVRQSFVQARTAQANQIWGLLGEFGLVLPQGIHHIAQKVPELLEDASNELPGSFRLLILRLLDHLKELGKQVQELECQIVQWHREHEESKRLEQVPGIGPITASALVASLGDVKSFHNGRQLAAWLGLVPRQHSSGGKQNLLGISKRGDTYLRTLLIHGARAVVQVADRKPEHSPTCRWATLLRRHLQRQMPVGRAACAHLRCQVHGQRANDGVAALHLAGSRCGTWQSNAGPLCCIHCRAPGWRLTNQVVIC

SEQ ID NO: 222811 - protein, 357 aa, unidentified
MNTVRRSLDFHGQDIFVAMDTHKKNWKTCILTKQMEHKIFTQPPQPDKLVHYLKNNFPGARYHCVYEAGFAGFWIQQALTQQGVDCIVVNPADVPHTNKERVHKNDRIDARKLANALRSGVIKGIYVPQAQELEDRTLVRMRQLFVKKQTRSKNQIKALLYFHGIDQPEDICERYWSKRYLEFLHSVTFSHHTAKLALEALLNELEHHRQSIAQLTQQIRTLASQEPYQQRVGYLITIPGISTLSAMIFLTELVDIHRFRHLDHLASYVGLVPSEHSSGAHEHVGPITRRRNPELRALLVQCTWSAVRRDPALMLAFQELSKRMSKNKAIIRIARKLLARIRYVLRNEKPYVTGVVE

SEQ ID NO: 222812 - protein, 394 aa, unidentified
MSFVTYIVGIDIAKFSHECLILNHHGEVVVQSFSFDNNYLGFKMLGTILSRTAHSTQIKIGFEATGHYGNNLKNFLINSGYDFMEIHPVLINRFSKAISLRKTKTDKVDASLICSYLTSVEFKPYSLKSYHNTSLKSLIRTRDSLVKERSLQLQRMTNILDIIFPEFKPFFKHSLKSSTALYILKHYTLPSKIKRMTQSSYAKMASKLRRTISYARFIKLKELANNTVGTEDELLAFQLHSFLNLYNHFDNLIKEIDVLILNEYKKANSYIHTIPGIGEISAATIATEIGDIRKFSNPDKLVAFFGLDPALYQSGETEFTGRMVKRGSSLLRQTIMNCATYCLLHNPPLYDFYRKKRDEGKHHRVALSHVAKKLIRIIFALETKEIEFDFNQMK

SEQ ID NO: 222813 - protein, 460 aa, unidentified
MAQKRKNAPGKGRKGQPYSLNPIQPNAAGIDLGSREHCVAGPPLPDGSPNVKHFGTTTPELLCLAGWLDQQKIATVAMESTGVYWIPLFEILDSRGFDVQLINARQISHVPGRKTDMIDCQWIQLLHACGLLRGSFRPGDDICRLRALIRERNSIVDQRSDWVRRMQKSLDQMNICVHHAVSDITGLTGMAIIRAIVSGERDPRALASLRDCRCRKSEDRIAEELTGNWRPEHLFNLGQALKVYDQLCGVIADYDAEILKYVNSLQPPDSKEPSAPPPASRAKATKFSKLGQEPMRQALYRMSGSDLTTIDGVGVDTAAVIMSELGPDLSVFPDEGHFVSYLRLAPNISISAGKKVPGKFRAVTSTRVCNALRMAATSLRNSKTALGAYYRRISRRKGKSVAVFATARKLAQLVYRLIRYGQAYVDTGSEVYEARFNRRRLASYAKALKEMGYKIEPLAA

SEQ ID NO: 222814 - protein, 382 aa, unidentified
MARYRPASKCSFRAGAADDVVYWKEINVAMPIVAEHYSFVIGVDTHAATHSFALINATNGGIIDQAVFPNSPAGFDRAYTWITHRINEKPTLVVIEGAGSFGAGLTGRVTNSGLPVAEPAAMPAAQRRGVGKTDALDSVRIARSVLAVDINRLRTPRADGQRVALRVLTVAREEMVAERTRAINALTALLRTVDLGLDVRKTLPHSQFKAIAAWRDRKEDPVIATCRQEAIRLAKRIVALDGELVDNRKSLDSLVEDVAPELCELPGVGSVVAACVLTAWSHPGRVRSEAAFAALAGTCPIPASSGNTLRHRLNRGGDRRLNRALTTVVIVRMRTHAPTRAYVARRRAEGRTTKEIMRSLKRYITRQLYRTLTVAHPVRATP

SEQ ID NO: 222815 - protein, 363 aa, unidentified
MSEVTKFVGLDVHKETIVVAVAERIGGEARTVGTFKNEPRVVAKLVKQLGRAEELHCCYEAGPTGYGLHRQLSRLGATCWVIVPTLIPTRPGDKVKTDRRDALKLARLLRSGELTACWVPTEAYEAFRNLTRERSAASQDQRRARQRLGQLLLRLGVAPAARMTRWGPRHRAWLQGLRLEQPMNQDVLGSQLRALDQATERLAGLTEAVAAAAAASEFAEVAEIGDFRRFARPRSLFNYLGMTPREDSSGPRVRRGSITKAGNRHARWVLIEAAWHFTHPPKVSAELAKRRAGQDPAIIAIADRAHARLYRRYWRLIKRGKLSQQAVVAVARELAGFMWAIARELARLEAERTMAAAAEVAVA

SEQ ID NO: 222816 - protein, 346 aa, unidentified
MQIVGCDFHPGQQQIAVLDTETGEFRELKLMHADGQAERFYRELAAPARIGMESVGNALWFERLMERLGHELWIGDAAQIRRSYVRRQKTDRRDAGHLLKLLLEERFPRIWVPSQEQRDQRQLLLHRHKLVEMRSRIKNELQHLALNQGVQKKRQLWSVRGRAELEKLPLAGWTARRRADLLALLATLEAQVEELDQAVAVAAEGNAQARLLMTQPGVGPITALAFVLTLGEVSRFPGSKHVASYLGLIPSEHSSGSKRRLGSISKQGNVFLRTMLVEAAQSAVRHDEQFRKAYRQRCHGKPKGVAKVAAARKLAVRLYWMWKTNTPYPQVVHTEGSPSHPVLGTS

SEQ ID NO: 222817 - protein, 382 aa, unidentified
MRVVGMDVHVRNSFLYVTEADGQLLRRGRVGNTLGEISKFLGELPDGDQPMRVVLESTTNSRAIQRMMLEYGKQAGVEVQAQVLDARKLRVIAESVSKCDKQDAAVLNELARSNLKLPACYIPDDEMFALREHLRARSDLVRMRTMLKNRIHSILHRRGILNPLKDLFTKDGRNWLAEIKLDEAGRLILDGYLGTLDQLSATIDESTSALTRLSKSQRWFKQTALLKTMPGIGPITSLTILAELGDIHRFKSRAAVSNYSGIVPVVRDSNEKKFSGHITHRGPAHLRSVLVEAAWTSVGRVPQYSAIYHRIAAKKAKQIAIVAVARRMLEDAWTMLIRDEVFRLMTVTTDVATATTDVTDARSVSTAADEKSAAAVTRPVAG

SEQ ID NO: 222818 - protein, 337 aa, unidentified
MTIVGGLDLHRRQITFDYLDTATGELHRGRIAPADREHLRVWLARVAGESGDLAVEGCTGWRFVVEELAAAGLRPHLAEPAETATARGRKRRAKTDKGDASWQRELLMAGTLPESWIPPTHVLEVRALVRLYVDLLGEYIGWRQRLHATLFHHGAPAAAQLTAELLDRVELSPAGRDAAATALRQLQRLTAELDSLRRRLHRIAGRQPGCLALQSHYGIGPLTAIAIWEELGDTRRFSSSRAAVRHAGLDVTVYSSDTTRAPGYLSRQGPAVLRWALFEAALRAGNDKSPDHAYYLQVKQRLGTQRATLSVARKLARRCHHTLRALGDKAWAPAPLD

SEQ ID NO: 222819 - protein, 429 aa, unidentified
MNNFINNFVVGVDISSKSSVITILMPGGESYGKKLNITNDLKGFTELLITLKKVEKQFSKRPEIFMESTGLYHIPLYNYFSKNSYKCYIINPIHTKNFAKQSIRKVKNDKVDSLRIAQLAQSSMFSTESVFDENTFLLKKLCREYDSLVSNAAQYKKKVNSLLNLVFPKFNEIFSDAFSPVPLALLSKYPTYVDFLSATKSDVITLITSTVNHSTEWADKRYNLLFKFAKEAELLKLPVDCLGIEIVCFINLIYSFKTAINKLKEEILKFSVIIPGFKENVELLCSHPEVGQISATILLAEIGNIKNFSNAKKLVAFLGVDTSVSQSGAFTSTHNKLTKRGSNLARKVLYNLSLASIKSFRNGVPANPVLLAYYKKLTTSKAKKIAICAIMHKLINHFFAILRDKKTFELRLPETHKKLYLERHLEIVI

SEQ ID NO: 222820 - protein, 449 aa, unidentified
MDVSKGYADFLLLDSAGYVMEEGFQLTDNKQGRQALKQLISGWQKQGLEELFCGVESTGGYENNWYTYLKTGFKGSKVHVCRINPKGVKAVGDAALKRTITDAVSAENIATYMISFSKKLDYGQDAFPVKQAFKEGRQHMTYIRMLQKQKTQLSNQLEKLLYQYFGEILVYCRHGAPVWLLTMLIKYPTPAMVIKAGINQVSAIRSISQEKAKSILVKAKNNIHNLSLQIARVISATAREILHKDALIKEEKAYLTDMYKTSGEVILLSSIPGIGIDSAVAIMLEIEDVKRFETVKKMASFFGVHPTFKQSGDGLWGNHMSKKGRGEIRAILYMSTLSAVRYNPVLKQVYARFRAKGIKHNQAAGIVMHKLLRIIYGVLKNQTAFNAETDELNQQKAKEKQLSQEQKDKATEKVKKQKKHRYQEASTDAPISRRAEQKIKKQIASQASD

SEQ ID NO: 222821 - protein, 422 aa, unidentified
MSYCPVAGIDVSKRFSDMCILSPDNKIFAQEKIYHDETSINRANALLQKAERLFFSKPVIVMESTSHYHLILFQFFSEHGYDVIVVNPLQSNSMKDFSIRKRKTDRVDAFKLAMMYRTKTLRPSQIPQTATRALRQLCRHRAELLNDVSSYKNRLTALLDQTFPGYDKVFSDVGGVTSCAVLVRFPTPTILLVEEESELVEVIAAASKSGYGFAKKKAGLLISAAQKAQTLGIHSCADETLIACTIQMLRTLSESVLQIETAIDNLLAQIKEMRNNVSLLQSIPGIGSHSAALLLGEIGDISLFKKPKQLAAYFGLDPTERQSGSFRGTKNKLSKRGSSYARAALHMGVVNSICKRGKDSAANPVLLSYYEKKCKNKPAKVAQAASMHKLVFIIFAVLRDQKPFELKTPEQHAVEQGFVKAA

SEQ ID NO: 222822 - protein, 338 aa, unidentified
MSILYVGIDLAKNVFAVHGVNAAGAAELRQPKVARARLHALVASLAPCVIGMEACSGAHHWARLFQAHGHTVRLMAPKFVAPYRMSGKQGKNDAADAAAICEAVQRPNMRFVPIKTEEQQSRLMVHRARQGFVEARTATINRIRGLLSEFGVVLPLKAEVVRVEARNHLEDLPGYANTVIGDLLSEVSHLDERIKQYDTHVRTMARDCALAQRLMQLKGVGETTSTALVAMVGNASEFDNGRQLAAWLGLVPGQYSSGGKTRLGRITKAGDAYIRSLLVLGARAVLNAATNKTDSLSRWAVRLRERRGYWKAVIAIAAKNARMAWAVLTKGESFMLPT

SEQ ID NO: 222823 - protein, 428 aa, unidentified
MSGKTKQPQLEFVAFVGIDWADQKHEWCLQAAGSMQRECGELEHKPETVEAWVGELCRRFGQGPIAVAVEQVKGALVCMLRKYECLHLFPVPSTMSAGMRKALYPSGAKSDPRDADLLLDLLVQHRDQLRHLRPDNEETRRVQNLVEERRKLVDEKTAQINRLIGYLKIYFPQMLEWFERLDRKLVCDFLERWPSLEELKKVPPAELRKFFGQRHGRHHELTEERIQGVVQAMPAIQDRAVIEAKGAAVQVIAQLLRSLLEGIANLDRKIEEATGAHPDFFIFQSLPGAGVALAPRLLAAFGSQRDRYDSADEVQKHSGIAPVTESSGKKKWVHFRWACAKFLRQSFHEWAGHTIGYSVWARAYYQQQRQRGNDHHAAVRALAFKWIRIVFRCWKDRVAYDENKYLAALAKRGSPLNSALLAATATTV

SEQ ID NO: 222824 - protein, 373 aa, unidentified
MPRYSTAFGMDVHLRSTTVCALDAETGEAVTRRFRGNPWGEVAEWMSGFPGPSLAAYESGYLGFAPQRELSGLGVDCVVAAVSKVPRSAADFSSKNDRNDAARMAKAILSHDISPVWVPSPEIEGLRDLAAAHDAATARLAAAKQRLLAFLARRGYAYGGTTPAGNPRRYWTYDFLRWLDKVRPADDGGIRALAALRNEVEAAAETRDDLLAEYRAAVAAGPLSAEVEALQSIKGCGFALAAAFASEVGDFSRFRSGRQVTSYFGLAPKQRSSADSVRLGGISGAGNALVRRLAVEGSWSYVQASHQPKLMPKGSGVPLEVRMHGRKGSERLLRRRGEMLARGMPQAKANAATAAELVRWLWALGAMCREATE

SEQ ID NO: 222825 - protein, 510 aa, unidentified
MDPADATPQPTLPVNGLASPGITPIGVGIDTSRYGHYATFLRPDLQPAAADLAFVESAQGYAQLRQRLGGIAAKYGQVHFHFRVDVAGRYADNLLAFLWALPEPKTVSCGDPQRNKNYRAALFGHKKSDPVESAAAARYALTEKPQPMPVVSPQIRLLGHLASRLEAQARQVTRLVNQLHNLLARAFPELALVVADISAGWVLELLDRYPTAAKLARARRSALERIPYLPDQHIPHLLDSARISVASLSGPVAEELVRAQVRQVREAHVRQKSLEKMLAKAYRQLPEPNQLDTIIGFGEVTAAILTAKIVDPQRFVEPGKLVSYVGIFPVEAASGIDREGKPRAPKRMVMCPRGNDLVRRYLYMAALSAAQHNPAVRPLYQRARAKHPNHPGIAVGHAMRKLLHLALAVWKTGKAFNPEHYPWDQAAHLEGSAQPEPATAAATSTQAAGHNPETVPESSVVTAACATANVAAQPVVGNFTSAEADSASAPADGPALPPADAASPWIDFDH

SEQ ID NO: 222826 - protein, 416 aa, unidentified
MKGTSKKEKRRCCGMDVHKETVVVCVLPPDGEEGKPLKKVYVTFRNDLGRMRGWLKQLKVTEIAMESTGVYWRPIWNVLDGHGFHLVLANPQQVKALHGRKSDKRDSQRIAEFLQDRRIDPSFVPPPEIRRLRDLLRYRVSLLEQRNETHNKIRDLFETANIKLSSVASDLLGVTGQRIIAGLIAGETSPDKLSWKVKGRLRAKEKEVRQSMVGCFDEFHRQMLELLWNQYRFLSGQIEQVEGKTRREMEPHREWIELLDGVPGFDEMIAWTLIAEMGTDMGVFPTAGHVASWAGMCPGTNESAGKQMSTKTRKGNRYLRRALLQAAWAATRKKDSYLRAFFNRLMDRKGWGKAIVALGHKLLVIAYEILKTRTPYYELGSNYYDQLNPERTIHRLVQRLEKLGVEVTLTPQEANA

SEQ ID NO: 222827 - protein, 458 aa, unidentified
MKSTLVLGVDVSKGYGDFVLLDAHKRVVEPPFRLDDNKQGHDILKKQLLEWKKNYRVSRLLLVTESTGGYEDNWLRIGKDKALSFVESYRINAKIIFHEYQAQRRNSIDDGVSAITIAEHVVKNLENFTVTSSFEETPYTSSRSLIRHYVSLQEESSSHKNALVKLLYQYLPSLEALKPREWPIYWIEIFVRYGSRKSIQIAASKGFKQLKRVPPGKAKEIAEALANGIDMRETPAMVVYAIRSKARQIKRLMEEIKEVKKMIIEVAPVDAQQVSLLKSIKGMGDITPVILLSFIEEVGRFGDAKQMACFFGVQPRVKKSGDGAYRAKMSKQGAGLVRRELYLLAFRTLNKEPYLRAIYAKSRAKGMVHNAAIGVLMHKILRMIYGMLISNTPFNVGIDQLNQHQVADKPKEKRQKKDTSRRFQPPSMAAPISGRQRRKRKKDYELQADGISESTESS

SEQ ID NO: 222828 - protein, 447 aa, unidentified
MGNGSGLSRGDRNRNARLARLRELVPVSHAIVGIDLADETQAAVVTDHDSRVIARRRVSVRAWELGELLDWAVAKAAGAGFASVTVACEPTGHRWRVLDQLAAGRGLALVCVQPLLVYRAREGEDLTRDKSDPKDAVLIARLAGELRCYEPERADAVWARLRHLGARRSQLTTGATAAVNQIRDLLECAWPAVLAASGSPFRSVSWCASLAVVLDRCAGDLSRVRRLGLARFTAAVRRELPRWGGIRPCLRIIRAVFAALADPAGVTAHRPGALERAHLALGDWRDIRARLADAETRMCAVLEELGLAGLVTTIAGLTVTGAAAILAETGDPARFATPRALVKHAGLCPRDNASGAAQGKTSISGRGRPGLRLAAWRAVWAAMPNNPVMAARFTHLTTRQDNRLARQQARTACAAALLRWIHVVVTRHVPWDPAIAAGTRPAQSTAS

SEQ ID NO: 222829 - protein, 344 aa, unidentified
MPHSIKDPHRVPPPEAPCCPNGSVVGIDISKDYFDACFEGQHRRYAYSLEGIEAFMSETACLGEARFVMEATGNYFYKLALALVEAGRKSDVVNAYRVRAFGKSRLQRHKNDKADARLIDDFAVANREAMMLWQPESQTIAALRQLRTVRTQLQKTATVYENQLHALLQLPESQQSQDALQICKQMIAHCQKQLNLIGKQMQALSDDELKKNDELLDTIAGIGRESALMLLILTGNFTKFRSAKAFADYIGIAPTHYESGTSVKGRGSISKMGDARARQVLYLAAMSAVRHNVACRVFYVRLRQTGRAHKHAVVAVVNKLIRQAFAVIRQQAPFETRGAWSVST

SEQ ID NO: 222830 - protein, 346 aa, unidentified
MNITRIGVDLAKLVFQVHGVDEKGNAKLRKQLKRSKVAEFFAQLPPCLIGMEACGGAHYWARKLTDFGHTVKLIAPQFVKPYVKTNKNDAADAEAICEAVGRPSMRFVPIKSTEQQSVLGLHRARQGFVAARTAQANQIRGLLAEFGLVIPVGIGAIAHKLPELLEDAENGLSGVSRTLFARLLDHFRLLDRQVEELEQEINTWHREDAASKRLQAIPGIGPLTASALVATVGDAKAFHNGRQLAAWLGLVPGQCSTGGKTKLLGISKRGDKYLRTMLIHGARSVLFSLKRNPAQADGWLARVANRRNPNIAAVALANKNARIVWALLAHGRDYTRDYRSVKPMTA

SEQ ID NO: 222831 - protein, 417 aa, unidentified
MKTEADSRTDTRYLGVDLHKHYLVIGGVNARQEVVLTPRRIELDDWLAWAKAHLRKTDVLVVEATGNTWTFYDEVVALVARVEVANAGKIALIANTRVKTDKHDVMKLAKLSAAGLIPEVWVPPVHVRELRMLMSHRRRLVKVSTLVKNRMQSLLQRHHLAPPDGETFSQANRAWWANLDVSVTERLHLKHDLATLQQVEMQLAEVDAELNRLSTTEPWASQMPYLMQLPGLGLITALTVLAAIGDVTRFETAKQLVGYAGLGASVHDSGQTHRTGRITKTGRRDLRYVLVEAAWAAVEHHPYWKAEFARLTHRMDENKAVVAIARRLLVAIWHVLTEQVADRHADEKMVATKLMRWSWELTDEQRGGLTTRQFIRYHLMRLQLGKDLTHFRYGNMPRRIASVDEVLALQPDVRSAA

SEQ ID NO: 222832 - protein, 320 aa, unidentified
MMAQNDQIVVGIDVAKDKVDACIRSLSQRHTFPNTAQGHRKMIAWLHKHKVNKAVMEASGGYERDWARLLRLAGIEVRIVDPKRVRSFALSAGRLAKNDTIDAEMIAWFAETFDEAPGQTQDAAHEELVALVKARKGLIDLKTRLQSQDEHAPPGVVQKAHARVLKSLAAEIARLEAAISAKVKATPEFADRAEIIESVPGFAETTSATLIAGMPELGTVSKEIAAALLGAAPYDDDSGKRRGERHIKGGRRWVRNAIYMPCLGAATQNNPVLKAFYQRLIANGKEPKVALVACMRKLIIILNTMIARRQKWDPSRYALN

SEQ ID NO: 222833 - protein, 431 aa, unidentified
MRNRINQRLEEITDTTLIVGVDISKAVHWARFVDYRGREEGKALAFKSDRKGFESIVARIEEICGTKALLHTYDEVIIGMEPTGHYWKTFANYLIKAGYRVVCVNPAHTKKAKELDDNSQTASDKKDAITIARLMKDGRYFEPYLPQDIYAELRMLSSTRFGAIKRIISIKNTITALLDEYFPEIFTVWGKVLEAKSSRQILKSCPFPAFILATGEAGVLAEIKKVALKTVGVKKVRKLMEAAKNSVGAEYGLDSARLRLRLLLEELEMYEKHISEIELAMEQTLSGTGYSKQLLSIKGIGVVTAAGFLGEVGDPLRFQNARQIANYAGYNLVEDSSGKNKSGTRISKRGRGQLRALLHQMSFSMAGNNAEMNALYKYLTSRPENPLKKKQALVVVSKKIITIIHTLLKKQEVYSSELVFGPVRREIMKAA

SEQ ID NO: 222834 - protein, 356 aa, unidentified
MNTLRIQDFVVEGKEVFVGLEDSKTTWKIAVRSEKMLIHQVAMEAKYPVLKKYLGNKFPACTIHLIYEAGFKGFNLYDQLTEDHIDCVVIPPHLVTEPKVNKVKTDKRDAKRLALILENHDFKDACHVPDKERREDRQVSRTLIAIQKDIVRTRNRIRKLLHFHGIEVSFPDRWGRKEFYALRELPLSEPLKISLNVLLTVLEQLWTHQQHLRASLRQFCRRERYRKAFEIARSVPGIGWFTAIRLVLEIGEDLTRFTSGKKIAGFVGLTPGEYSTGETTWKGRITGMGSGFIRAALVENSWVAIRKDPVLLGKFKRIWKGTGSKKKALVAVARMLIVRLRACIISGMPYVIGVAR

SEQ ID NO: 222835 - protein, 362 aa, unidentified
MKQTLATAPVCPPSTHPREVIGIDLGDRWSRYCVVEQAGTVVEEDRVRTTPEALTAKFGELPATRIVIEVGAHSPWVSRLLQAQGHDVIVANPRKVRLIYESDRKNDRLDARMLARLGRVDVSLLSPVQHRSREVQADLALVRSRDALVAARTQLINSVRGMVKSMGGRLPRSTTAAFAGKVNLLIPAELKTALAPLVRCIQTLTEQIRGYDERVEQLADKKYPETRLLRQVKGVGPLIALTYVLTVEDPNRFQRSRQMGSFLGLRPRQCESGNNAPQLGISKCGNNHLRWLLVQAAHYILSRLAPDSRLRRWGLQLASRGGKNGKRRAVVAVARKLAVLLHRLWVTGEVYEPLYGLAAEAV

SEQ ID NO: 222836 - protein, 340 aa, unidentified
MKEFIRIGVDIGKSVFHVHALESEDGRAATRKLNRTGMRKFFASIAPSVVGMEACGSAHYWGRELKGMGHDVRLMPPAYVKPYVQRGKNDAIDAAAACEAMARPKMRFVAIKSEAQQATLMAHKTRDLLVKQRTMLVNSLRGSLAEFGIVAAKGIERVEELIAKAAAADLPEMARMAAQALIEQLERLDAAIADLAKRIVKAHGRDEQVGLLKDVPGIRDMFATQVVASVSDPHAFKSGRDFSAWLGLTPRQDTTGGKTKLGPITKKGNRALRKLLFLGATSLLKVAHLHKGAVGDWLKAIKARKPYKVAAVALANKLARIVWAIMTRGEAFRAEAFARA

SEQ ID NO: 222837 - protein, 355 aa, unidentified
MIVIGIDPHKQTHTAVGVDGATGVLEGERTVSARLAGHEQLLGWARGLGSERLWALEDCRHVSGSLERVLLGRGERVVRVPPRLMGQARRADRERGKSDSVDALAVARAALRDPDLPAAQLAGPEREVRLLHDHRADLVAERTRIQNRLRWHLHELDPEFAIPAGALDRAVWLDRVARRLARLEQTVQARIARELVLRCRELSRRVRQLDRELEQLLRTQAAELLDLVGCGPLTAAQLLGEIAGVERFATEAKLAKHSGSAPLPVSSGQRQRHRLNRTGNRQLNLALHRIAITQARIHPPARDYLARKQAEGKSRREALRCLKRHLTRVVYRILKTIAARRQADAATPTTAMGLT

SEQ ID NO: 222838 - protein, 287 aa, unidentified
MKLTTVGADIAKNVIQLHFSDAETGEIVNKPVKRAGFLEHFSNRSPSLIGMEACGGSQHWARKLIAMGHQVKSMPGKFVKAFVMGNKNDAADARAIWMAAQQPGRSVAVRTEIQQAVLGLHRMREQLVKFRTMQTSSLRGLLTEYGEVMGKGRAALDKAVPSVLARLVDRLPKILIDTLRDQWNGLTDLDKPIAEIKRRLRAWLREDKSCRAIAAVPGVGPLTATAAVATMSDVKTFRSGREFAAWIGLVPRQTGTGGKVQLLGIKLRPILSQSEHTKNRRKREAFI

SEQ ID NO: 222839 - protein, 356 aa, unidentified
MHSMKQQVRRVVGGVDSHADTHQAAALDERGRLLGSKSFAVSATGYRELLAWLASFGLIERVGVESTGSYAAGLTRHLLAEGVRVFEVNQPHAHTRRRRGKTDAIDAELAARHALSRASAVTPKQTSGIVESIRQLRVARNSAVKSRSAAIVQLGELVRTAPSELREQLAIRSTVKGKAALCRRLRPDTDRLGEPANGAKLALRSLAGRIARLDDEIAQLDGQLAPLVATAAPRTTALLGISTGHAGQLLITAGQNIDRLHSEAAFAALCGASPIPIASGKRGRYRLNPGGDRQANRALHMIAVCRLRHCPKTRAYAHRRSSEGKTKKEIIRCLKRYIARQTYATLRDDLRSLTIG

SEQ ID NO: 222840 - protein, 355 aa, unidentified
MRFYAEHHQFYCGIDLHARQMYVCIVDDAGEVLVHRNMSAKPAELLHVLSPYAGKDVVIAVECVFTWYWIADFCAERKIPFVLGHALYMKAIHGAKTKNDKIDSRKIALLLRAGMLPQAYVYPRSMRSTRDLLRRREYFMHQQSELLGHIENTNSQYNLEPFAKRIRDRSNRSGIAERFSDPQVASSIEADALLLDVYHQILLDLEAQVLKAARVHDPVGLQLLRTIPGVGKVLALVLLYEIHDVGRFPSVGQFLSYARLVKCPHESGGKRTGGGGNKIGNVHLKWAFGEAAVLFLRGNEAAQRYHEKLVSRYGKGKAMSLIAKKLGRVVYTILKKRQPFDPKKFFSDAAHESAA

SEQ ID NO: 222841 - protein, 410 aa, unidentified
MEVIIGMDPHKRSATIEVLDKRERVLEQGRFLTDSAGYKSMLAAGRRWAQRRWAVEGANGIGKHLAQRLIADGEEVLDVPAKLSARARVFSTGQGRKTDATDAHSIAVVALRTPGLHVVQVDGAHVALRLLADRRDELGVRRTETVNRIHRLLLELLPGGAKTFLTSAQAKALLATVRPRDVAGRTRRALAAEMIADLARLDKKIKVANKELTALVTATGSGLMDLTGIGPSTAARLIGDVGDVARFPTKGHFASWNGTAPIDASSGENNRHRLSRSGNRRLNRVLHIMAIVQLRNDTEGRRYYDRKKAAGKSSMEALRCLKRRLSDVVYRQMVADATSKTAPPTPLDEASANGPGRALWTGPGGHVGAATGSSAAGSYPDAGPSDQSLPGPATTIVPTDPKSRKTPSLT

SEQ ID NO: 222842 - protein, 482 aa, unidentified
MKKKNIFQNRSQQLLRLFEKAGNRLKMMCIPIDYAKNDHMVMFCNGYGDILRKPFSVKNTIDGVKYLIDRVMRSCRQRHIKKEHVFFGGEDANSYAENFANALRAKGWLVANVNAHDAKKQRETLQASTDRIDLMGIATMLLNLRAKCSPAQNGIYRNLRTLVRHRKKLVVMKTEVKNRVHTLVDRLFPGFLNEKNTGINPFSKSSLYLMEDRFSAQQIRRRQKSTLIKILKRCATPDSESVAAKLHSYAAQVITTPDEYAATLQLSLEHHIKHYRCLQENIDQLLSEIGLLLAQTQAAFLTSIKGVGIVLAAGVSSEIGNPFEQKPLNNLTSYCGIIPRVKQSGGIEGHTHTGRVSKRSNHILKDYVVQSALQIGLRGPEPLLQDYKRREAAGQHADFGIGRRFLRMAMCLMRSSQVYLPPTLRSPKTQMPERAGYYLTAWPLLRDKWKKAHAHQAAFAKDQPLGQWRQVVQELYDIKLKL

SEQ ID NO: 222843 - protein, 371 aa, unidentified
MEHTRFIGLDIHKERISIGVAESGRAGAVEYHGEIANDPGAIGKLCDRLRRPGKPLAFCYEAGPCGYGVHRQLTSLGHRCDVVAPSLIPTKSGDRVKTDRRDATMLARLHRAGELTPVWVPDADHEAMRDLIRLRSVVRQIVTRARQHLQGFLLRHGRKHGGGTAWRMAYRRWLSTLAFEHPAQQIAFQDYVDAVMDAERRLKRVEEQIVGLLPEWNLRPVVDALQAMRGIALINAVVLVTEVGDFTRFSNPRQLMAYFGLVPGERSSGQTVRRGGITKTGNAHARRALIEGAWAYRMKPRIGRHKVDRIEALPKVIRDIGWKAQIRLCARYRRLSARGKTANVVNVAIAREMVGFIWSIACVIQSTPTAA

SEQ ID NO: 222844 - protein, 322 aa, unidentified
MNKYNETFGVDISKDVFDVHGSKSGHVQFKNDEKGFKAFLKSLPCQALVVMEATGYYHYRLAQFLYKNDVLVSVVNPLSVKRFIQMGLAKVKTDKSDAKAICNYALINDVPLYTALTDVQSECLQLFRLLDSFIKHRTATKNKLHGEEILGVPSKAVYRSLKRNKKHLDKELAAIEERILSLVKKDQQHQLTLLTSIPGIGIKTALFLIVVTDGFSKFENASQLCSYVGITPVVKESGSSVRGRSKISKVGNKKLRNLLFLCSFNACKHNKACNGLYERLVNKGKSKKLALIAVSNKLLRQAFAIAKSGRPYDDAFVSVLKK

SEQ ID NO: 222845 - protein, 463 aa, unidentified
MGKAQQRLKQPEVQTSLAPIHPNAAAVDIHDGSHFVAVPPGRDSEGLDVREFPAFTADLRRIVNWLRECKVEQVAMESTGVYWIPLFELLDAEGFEVCLVDPRQAKNLPGRKTDVADARWYQQLHTYGLLRAAFRPGNEVCVLRSYMRQRAMLISSAAEHAQHMQKALTQMNVKLTRVISDILGVTGLRIIRAILNGERNPRKLAKLRDEHCHHSTREIALALEGNYRAEHLFALRQAVDLYDFYQLKLQECDQQIEAQLKKFEDQSAGQTLPPRPGNKKPGGNSPEFDLRGRLYSMAGVDLTSIDGVDALTAAKVLAETGIDMSRFASEKDFCAWLGLCPGSHISGGKRFSGRIRPCKNKAATALRMAAQSLYQSKTALGAFLRRMKQRLGPKGGITATAHKLARIIYSMLKHKLPSYKDLGADYYENKYKIRVLNNLKRRVKELGFALVPVGALVSATGGI

SEQ ID NO: 222846 - protein, 386 aa, unidentified
MHQATTLPAPQRTCSRGDCATLFVSLELSRSTWVATALAPGSSKMSKHTLVGGDGRKLLDLLARLKTRAEQRIAAPVKVVTIHEVGLDGFWIHRLLEANGVESHVVDPASIAVPRRHRRAKTDTIDGETLLRTLMAWQRGEPRVCAMTVPPSPSEEDRRRISRERAKLLQERVRHTNRIRGLLFGQGITNYNPLHKNRRKNLEQLRTGDGRSVPAHLKSAILREIDRLELVLRQISEVETERDEMLQLAQPSSPAALLIRLKGIGAEFATVLYLEGLFRRFDNRRQLAAYAGLTPSPWKSGSIDQEQGISKAGNPRLRTTMVELAWMWVRYQPASALSCWFRQRVGSKRGRIRRISIVALARKLLIALARYLSHGEIPAGAVMTAG

SEQ ID NO: 222847 - protein, 337 aa, unidentified
MKVAVLGIDLGKNSCSVVGLDDTGKVIMRRRMHRDSVIKIASGLAPCVVAMEACCGAHHLGRILRERGHQVRLMSPEYVRPYVKAQKNDDRDAEAIAEAATRPTMRFIELKSAEQLDMQSLHRVRDRLVSERTALLNQLRAILLERGIVIPQGRRKLEDHLRTLLEGQEAILSPRVWSLLNDMQAEWRALDSRIEALTDEFAAQAKTDEAARRLATIPGIGVLNATALVAAVGNAATFARGRDLAAWLGLVPRQMTTGGKPRLMGITKRGNKYLRKLLVHGARAALPSLSASATPLGKWLTSLLERAHKNTVVVALANKLARIVWAVLPDPQEPRRA

SEQ ID NO: 222848 - protein, 371 aa, unidentified
MNSVVYVGMDVHKESYTMCCYTFEADKVQFQQKIKSDYRMVLKYLEQVRKRFDSDIEYVCGYEAGCLGYTLYHRLTEHGVKCIILAPTTMAITNNNRVKTDRKDAGIIARCLAFRTYSEVYVPTDEDNSIKEYIRMRDDQKKMYKSTKQQILAFVLRLGHRFEGGKTYWTIAHVRWLKSLELEGVFQETLDEYLITYEYLKDKIERLDNRIEELATEEKYEKKVNKLICFLGVRKHTALSMIVEIGDFERFAKAEKFASFLGLVPSEESSGGSQNKYSITKAGNSHLRRLIVEAAQGFTRGAIGHKSVALKRRQEGNTSQVIAYADKANERLRRKFYRMTLKKGINRNIAATAIARELACFMWGMMTDKIA

SEQ ID NO: 222849 - protein, 360 aa, unidentified
MAPATLPRNGQSIPFDHVVGIDTHRDFHVAVVLAPNGGKVGELKFPASSEGYEQLVIWSEQFGVRPVFAMEGTGSYGAGLCRVLLDAAYDVIEVNRPDRAARRRHGKDDPVDAEAAARAFLAGTATIIPKRGGDQVEMIRLLKVAKDSAIDGRTRALNQMRSLLITAPVALRERLKELSRSELIATCASFRHGVLDGPMAAAKRALRSLARRIQALDTELEALMSDLDALTQAACPGLRQSYGIGVDGAAVLLTAVGDNPERIRSEAAFAAICGASPLEASSGNRRHHRLNRGGNRQANATLHRIAVVRLRWHEQTKAYAERRKAEGLSNKDILRCLKRFIAREVFHLLMGKPPRRTAAS

SEQ ID NO: 222850 - protein, 354 aa, unidentified
MNTIIGCDAHRRYSLFAVFDTTTLSVEQTRVNHQPGAIREFLSDYPEGTLVALETVGNYYWIVDEIEEAGCIPLLAHAAKAKVIMGNINKTDKLDAKGLATLVHLGSLPTVWLPPGEIRDERELHRTRMAFCKPRTALKNRIHSTLAKYALNTAEHSDIFVGKGRAWLNRTIKKLPLETGRCLEQELDLLEATMEQITALEERIRERIQLTSNMQLLKTIPGVGDILAIVIEREIGTIDRFPSAGHLAAYSGVVPKVHSSGGKTRYGRMRKQANNYLKWAFIEAANVVVAHRHHPAWRQKKVSLVYERICRRKGHAIAVGAVARHLAEAVFWMLTKGETYQDPALRRQGSPKLA

SEQ ID NO: 222851 - protein, 386 aa, unidentified
MMWMKVSKFGSSLVNQTVQDAKPTFIKNLNSTLGNKTCIIAMIDFPHQIRIKDLKMKLVIGIDVSKKKLDLSTYDGKQYKSFCIENSKKGIISFLKNYDTVKNECLFLMEATGVYHLNLVTIIYDKGFKVGVVNPLRIKRYAQMKMIRVKTDAVDAKIIAEYGFEQPVSLYNPKSKDRQKIISFLKAIEAHSKTKEIYYNRLEALTQYPAQKKIVINSFKKIIKLLEKEIKMFEQELRKLVSLHYPKEYRLLTGIDGVGFKTAVVIIGYFGKFENFENSKQVASFIGINPSPKESGSSVKGRGNISKQGNSYLRKQLFMTSLSAMQHNKTCKELYDRLKNKGKEHKVCRVAVMNKLVKQIFAIVKYDRVYDSNYCRNFLPIQHSTS

SEQ ID NO: 222852 - protein, 420 aa, unidentified
MKVVYQTCCGVDVHKSFLVATIIKTTSGVHPSYQKKRFSTFNNSILEFKKWLLDNSCRDICMESTGKYWIPVFNLLEDEINVTIANPKWVKAVKGNKDDTKDSKWIGDLFRLGLVPGSYIPCKEIRILREFTRYRYKLTSCRSSEKNRFQNALTVCNVALDSVVSDIFGKSATSVIDYLLEQSDNSINHEEISSRLLRSLKKKSESVIESIEGYQMTDSQKYRMRLVHAHMDYITSTISDIDSMIDSLVDLYDNTVKLLCTIPGIDRNSAITIISEIGTNMTQFSNSKRLCCWAGLTPGNNESAGKKKSVRITRAGVYLKPALVQVAHAAVKSDKSPYYKAKYERIMKRRGKKRAIIAIARMILTAAYQMLSTGEVWNPTDLYKIDMPEPLKEKQKEKAIKQAKKLLIAEGIIDESLLAS

SEQ ID NO: 222853 - protein, 376 aa, unidentified
MKKNTKTTRPRKNAAQKTATTMSPRRIVGIDLGDQTSHYCILNDQGDVVSEGTVRTTESGLEEQFRRMARARIVLETGTHSPWVSRYLERLGHEVLVANARQVRIIYDNDRKTDKVDARTLARLARVDKSLLNPIRHRSAEAQADLAVLRARDMLVAVRSTLINCVRGMVKSVGGRLPSASGAYFSTKVRDQLPGCISGALLPLLEEIENLTIRIRVYDKQIEELAKTKYPKTELMRQIPGVGVVTSLAFALTIDDPNRFHKSRDVGSYFGLRPKQSDSGSSKPQLSISKAGDHLVRRLLVNCAQYVLGHWGPDCDLRRWGLSLTAHGGKNAKKRAVVAVARKLAVLMHKLWVRGEVYEPMRQASKATQTQAAPAA

SEQ ID NO: 222854 - protein, 412 aa, unidentified
MRKMVNRAAGLDVHKDQVTACVRIAGKGEEGREQIHEFGTTTRELLALRDWLAAHRVELVAMEATGVYWKPVYYVLEDEFETWVVNARHFRNVPGRKTDVLDAAWLAELAQHGLLRPSFVPPKEIRELRDLTRYRKTQIQERTRETQRLDKILQDAGIKLSSVASRVLGASGRAMLDALVKGTTDPEVLAELAKGHLRKKIPRLKEALEGRFSRRHAVVVGQILAHIDYLDEAISNLSTEIEEVVAPFAEKVELLRTIPGIDDRTAVSLLAEIGTDMSRFPTHRHLASWAGMCPGNDESAGKRRSARTRKGSKWLRDALVQAAHAADRTKGTYLGSQYARLRGRRGAKRAAVAVGHSILVSSYHVLSRGVPYQELGDDWLLTRDRNAQTVRLIKELTRLGHIVTLQPAEVPA

SEQ ID NO: 222855 - protein, 410 aa, unidentified
MISKNPEEGVDKQGLRYLARDILPDGAILLSPSALPEYRPSAVVSTDNHIEDTSTGVPFCGMLEVRESILSLRRCLMRLYSAFDLHSSNSYLGIMDENGKRVFRRKLQNDVGLMVKVLNPFKGDIEGIVVESTFNWYWAVDLLMEEGYKVHLANPSKIQKYSGMKYADDEDDAFWLAEMLRLGILPEGYIYPKEDRPTRDLLRKRSHLVKLRTSLIVSLQNIMSRSLGGKMKASDIKVLAEDRVTPLLAENDDLALAGKVSKDVIDSLTRQIKAIEGAVEKKMDLRKPYDYLLSMPGVGKVLGLTIMLETGPIGRFEKVGNYASYCRKVPTLWKSNEKKKGTGNKYLAWAYSEAAQFARRFDDNARTYFDRKRRRTNAPIAHSALAHKLSRAAYYIMRDGVPFMAEKTFG

SEQ ID NO: 222856 - protein, 424 aa, unidentified
MKEPTIDDFAALIGIDWADDKHDICEMPVGTNDYQLSVISSKPQALHDWALSLKNRYPDKPVAVACELKKGPLIYALSRYEHITIFPINPSTVAKYRKAFTQSGAKNDPSDAFIQTEILMLHMDKLTHIQPESADVRALAQLVEYRRKVVQDRVDLTNRITATLKNYYPQVLDWFKEKDTIIFCDFIARWPSLPDSQKVRKQTLMNFFNQHNSRYPEINEKRFTDIKAACALTNDPGVIEPNKVLIEVLIPQLKLLIEAIDRFDLEIKKYYSCQDDRVIFDSLPGAGVQLAPRIFVAFGSNRERYSTAADLQKYAGVAPVIEQSGKKKWVHWRYSCPTFLRQTFVEWAGLSIRYSFWAKAYYEQQISKGKPHNTVIRALAFKWIRIVFRCWKTNTPYDESTYLKALKKRGSPLLKFAAENFMVV

SEQ ID NO: 222857 - protein, 449 aa, unidentified
MAVVMIGIDPHKASHTAVAISAAEEPLGELRVRACAAQAERLLAWAAAWPQRTWAVEGAGGLGHLLAQQLLAAGERVLDVPPKLGARVRLLTAGDSNKNDPNDARSVAVAALRSPGVREVRPDDHAAVLKIWSKRHRDLGRTRTQVVCRLHAVLCELVPGGVPKAITAPGAARLLESITPAGAVEAARAELAAAYVEDLRGIDARIRETRKKLAVAVQATGTSLTGLYGVGPVIAAAVIGDVRDVSRFPGRDHFAACNGTAPIEVSSGPRKIYRLSRRGNRRLNHAIHMAAVTQVGHRHSQGRAYYEKKLAEGKTSKEALRSLKRQVSNAIFACLQADARRAAARAEDPGGQQGNDSVASAAGSHPRHRLFGQATPGPGHHPTIVTGGPPPGPARSRDRAGHSSIAAIPPSATPQVQVERPQRSEDERPGGAARRRPHSAARKAKAKNR

SEQ ID NO: 222858 - protein, 360 aa, unidentified
MRYIGLDVHKDNITACVLSDTGKVVFEKDFKKTDGTCDCLAELFDHVGKSGFCILMETGTYAYPPYRFFRDRGCDVDCVHAQCLRMITQTDKKTDKKDAMTIARMLRLWKRHDIDLQIAYMPTREQCELKDLCRYREEISKKIGDETRRIKSQMSRNCQVLSDGMDNFQVKRNRRYVLEKFGTDLTLSRRMEALEQLFEERDIVQKQVESCLPDDPNVKLLENIPGVGRQTAVQLMSMIVDISRFEDSEKFCAYFGLVPRVRDSGGKEHHGRMTKNGDRMMRMLMERVTEAHVRNCDSFITDYYKRLCPQMGTKKALITTSRKMLMTVFAVLKKQQEFRTRPRAGSAAGSGDANSHGKDL

SEQ ID NO: 222859 - protein, 352 aa, unidentified
MSDFKNLVFVGIDPHKEEHVAVMIDHWGKVFFELTFPNQVSGFETLLEHVDTHTPDGKTTVFGIEDTGGLGRSCAQWLTLRGQLVKGVNPIMSSNKRKRYPHRTKTDKIDAVAVAKVLITDFTQLPEVLVDDYYHGLRQLANRRDQLTRTSTRCKNQLHKLIHDHYPNYKEFFSNPFGVTALGFWNKYPHPSMSKGAGTKRLASSLNKFSRNMGSTKAENILALVDKEQALTIDAKMTMIVIRQIIEQLQQITNHLAELDELIKEALGQSDTQLETMPGVGPVTALNVLSRVGPIEKFSSADKLARHAGIAPVDDSSGPKTRQKRRLCDIIYAMLRDKTPYIEPASRPSSAA

SEQ ID NO: 222860 - protein, 368 aa, unidentified
MKEVTTRYLGLDVHKATISVAVADPGAPPVAFGTIANDPGAVRRLVSQLKRGGKLLAAYEAGPTGYGLHRQLVELGVECVVVAPALIPRRAGDRVKTDTRDAISLARLLRSGDLPPIWVPGPKEEALRDLVRSRFDAKDDLRRAQHRLSKFLLRQSIPAPAGVRPWSARYHSWLNALRLEHAASQLVVEDYRVTERAARDRVRRLEVDLKRCAETDPRLEVIVALQVLRGIAFLSAVTIVAEVGYFRRFPDAPRFMSFTGLTASEHSSGQSRCQGGITHAGNPRLRHILVQAAHNARYAPALDGAVKRRLREAPPDLIEIALKAQTRLHRRYRHLDRRIGRAKSVTAVARELAGFVWAIGQRMEASAA

SEQ ID NO: 222861 - protein, 400 aa, unidentified
MYVGWDWAGKTHDVSVLDEQGCLVEHFAVGHDEAGFKHALKRLGRHGQPEALPVAIERPSGLVVERLVEAGHPVIPIHPNAFNAARSRWGASRAKSDPGDSYRLADYLRTDGRRLRRLRPMDEATRKLQALVRMRDDHVEARVAASNQLEALLNEHWPGAIDIFKTVASDIALHFLDRYPTPASAARLGETWLAAFLTRHSYSGRRSPAQLLERLRRAPTAPGGLDPEVLTELVRHQVDVVRTLLHTCKELEHAMAAVLPDHAKARILAGLPRIGDGVNLAQVLGEVGPILDASLDVDHAAAQCGACPVTKASGQSRGVHFRWAANNHARQALQMFADNSRHASPWAARLYAKHIAAGKRHPHAIRILMRAWLRVIWSCWHSHTPYDPARHRSELRLKGA

SEQ ID NO: 222862 - protein, 420 aa, unidentified
MPNIEIGVDSMVKENFIYVGIDLHKETHTAVMIDCYNQKLGEITFPNRPAAFPKLVTKVKKCNTDGKEVVYGLENAYGYGRALAVWLIDKGYLVKDVNTAISHRQAKHRGAMYRKSDSDDAEAIALATLNMLDKLPDACPNDAYWSLGQLVHRRDNIMKQRTRLVNQLHEQLCIAYPSYKSFFNDISRPTALYFWEHYPSRKYLRGKFVEDLRKELVPVSHNKCSTKTCQAILDAVAGDKVKNIDYQDARDMVTLSIVSDLQHYDSQLAEVDKMLEQMYKMLGCTLTTIPGVNVITAVKILAEIGDIKRFSNANKLAQFAGIAPLHLSSSGKGKDVATKQGNRRLQATIYFLAIQMVQISSKGTPRNPVVRAYYEKRKAEGKTSQQALICISRRLISVIYGMLKNGTEYRMPVVENAGEK

SEQ ID NO: 222863 - protein, 355 aa, unidentified
MYGLYLKLFVNLFAETINKVVKQAATQRIINVAHASAIGIDVHLDLLVCAFQSSTDGEIITEVREFGASFSQLEAFASGCADKQPEIVLMESTGVLWQSPYCALEAHGFTSERLALVNARDVKAAMGRKTDREDAIRLAEFARMGRVRKSFVPKPDFREMRVLARLFQKSKADLARKSNRYPKLLNSAGCRASTVFSDVVHGRASSRILDAFLHNSPDFPDVVAREAKRLRKATPESIMDALNAKVPPLLIEQLRDERRVIDQEKEYCDATMDRLKVLQKPYEAHIKLLCTIPGIKETSARLIFAELSDDLDQHFPDSEHFASWMGLCPGNHLSAGKSYSSKTPQGEQVAQARND

SEQ ID NO: 222864 - protein, 416 aa, unidentified
MRVHRNYCGLDVHKETIAACLISESEDGTSSRQKRIFGTMTQHLRELAQWLAEAKVTAVAMEATGIYWVPVWNVLEPYGFELLLINPEHYKAVRGKKTDLKDGERIAELLQDGRLAGSYVPPVAIRVLRDLTRYRTKLVQYQSSIANRIQRLLEQCNVKLASVASDVLGVSGQAMLRALAAGETNPQRLADLAKKQLRKKIPALQLALEGCLLPHHRFLLADMLEELDHIGSKIARLEQAIEEQMRPYQKAVDAWMTVPGVKQRLAWNLVAEVGPTVDAFPSAADLVSWAGICPGNNETAGKRKSGTTRNGNRWARKALCEAAWAASKTKATYLQAQFRRLAAIRGSKRAIIAVASTILTIGYHMLKEGTTYRELGGDYFDKRNLLRTTRRLVKRLEALGHRVILDPTQSPFQPSD

SEQ ID NO: 222865 - protein, 352 aa, unidentified
MSEQYAGKQIVGMDLHRRRSVLVRMTETGERLETVRISNDPEYLRAVMTRAGEAPDVVLEACYGWYWAADTLAELGATVHLAHPLGVKMFSLRRVKNDELDAGDLADLWRMGRLPEAWIAPPATRELRGWVRHRAKLVGLRSNLKCQIHAVLANAGVQVAMSDLFSAGGQDLLARVALTPESRARVDSVLRLIAGLDFEIELFGKLVAGRLRRDRGYLAIQAIPGVGPVLAAVFVAEIGDIGRFARPEQLASWVGLTPRHHESDTTVHRGPITKQGSRLVRWAAVEAVQRVPAHTRLGQVRDRVGQRRGRNIGVVAAARELTELVFYGLRDGRVRCLTPPAATRLDTANPAA

SEQ ID NO: 222866 - protein, 425 aa, unidentified
MRITQNLREIKMNQVLDVSVDVHKEILNFFFSIEGKEYPDECRNRTGSIEKRLSKYRGIAQEQGITRLRLICEPTAEYQNKLLRTARRHGHLTCLVNTESVSKFRVVESNDANKTDTKDPKVIATLGRLNKVVHHRMLSEDYLVLRKLGRIYHELDSDITALRCKIDRLLIELFCDFSFTKDFLYGNSGAVLIDRFGCNPYRIIETGFETFAATMKRAISRIRKDTLTRLWQDSESSILNELPPGYRDVLEEQFRDLIARFRDRELRKDRIVEQMKIVLQRIRDDDPRIPPPTAGVISEKYLALLIAETGPMADFRNWRQLMRYAGLNIRMRQSGKYMGKNKISKKGSPLLRKVLNHIVLPLVRSGWLYGDYYHKKRETEKMAGTKAMTIVSRHFLRKFHGWYKSGAAFDEKRFFVCEAEYLKAA

SEQ ID NO: 222867 - protein, 355 aa, unidentified
MTSSKYIGMDVHKESISIAVRNAVGKIVMECVIETKASTILQFFDGLRGELHVTFEEGTWAAWLFDLLKPHVTKLIVCDPRRNALLQDGNQNDRVDARKLSDLLYLNKLNAVYHGDHGLRTLKELGRSYLTITRDQSRVMSRIKAIYRSWAIPCSGKQVYGLRHRVEWLAKIPEPGVHRRAELYYQQLDALRTLRQQVRKDLLTESKKHKVWKRLCAIPSMGPIRAAELLGILQTPHRFRTKRQLWTYCGLGVVTSSSADHEVANGQLRRKKKHVQIRGLNENCNHDLKNLFKGAAVVASIKPGPLAEFYAALVAKGMRPEMARLTLARKIATIVLIVWKRGVCFDANHLKLQTA

SEQ ID NO: 222868 - protein, 392 aa, unidentified
MYIVGIDIGKNHHEASIVSPEGKQIGHSLRFATTHKGADSLMSFIFNNIGNSSCIFGMEATGHYWYPIYSFLKARGYTIYVINPIQSDSLRKMYIRQTKNDSIDSFLIAEVIRFGQFTTTSMADENILAMRQLCRYRDSVISSRTEIKLRISTIMEQIFPEYEKQFSSLWVSTSMGILEKYLTPENIENAPIDELFEIIKDKSHNKLTMKKAISIREAAADTFGIKIAQDSFSFQLKQLIDRMNFLDKQIEALDCQILEYYEKFDCYLHTIPGIGMIAAATILAEIGDINRFKSSSALVAFAGIDPTVRQSGEFSSTHNHMSKRGSPYLRHAIFLAATTCSFHNSPLNAYYKKKREQGKHHLTATGAVARKLTTVIYAVLRDGKPYEPKSFC

SEQ ID NO: 222869 - protein, 468 aa, unidentified
MGQSRLRSRGTTSRTPKPPSLLKRINRHAAGIDCGSETHFVAVPAERDHEPVRSFKTFTADLQRLADWLKVCKIKTVAMESTGVYWIPIFEILETRGFEVVLVNSRHIKNVPGRKTDVLDCQWIQELHSVGLLRGSFRPAAEIATLRAYLRHRDKLVQAAATHIHRMQKALAEMNLQLHNVISDITGLTGMRILRDIVAGIHDPAALAAHRDYRCRASEEKIAASLTGNYRAEHLFALRQNLEMFDAFQRQIQDCDGAIESLLHSLARKQGNAARALPPPRCTFRCCDNEPRFDVRDPLFRLSGVDLTQIDGIGPYTALQLIAEIGTDMHRWPTEKHFTSWLTLAPKNKISGARLISSRTQPSANKAAALLRMSAMVLGRTSTALGAYYRRIAYRIGKPKAITATARKLAILVYHTLKGELDYADPGASAYEELHRERTLRNVRNRAKSLGFGLVNLETGEALQGAVS

SEQ ID NO: 222870 - protein, 428 aa, unidentified
MKANSNLIEENSYAALIGLDWGDSQHALAILDCSSGKTESSALEHSAENVHAWLKTLETRFGSKPVAIALETSKGPLIHMFLDVPWLTVFPIHPATSARLRRAFSPSGAKDDLPDAHVLLDLLRHHRAKLRPLFIDDAQTRCLGGLCELRRKSVDQRTDFTNQLSSTLKDYFPQALLLVGEILYSPMALDFLKRWPDLISLKSCRESTLKTFYYKHNVRSPEAVKKRLEIIRQAKALTTDQAIILAATRQVARLLKLLAEIQRHIAEDEKLIREVFKQHPDAELFRDLPGAGKVLAPRLLVAFGTDRTRYASADQLQRYSGVAPVKEKSGGRVWIHWRWNAARFLRQTFVEWACQVARFCPWSKAYYEQQKKKGKNHWAIMRSLAFIWIRILWKCWQTRTPYNESLYLESLRKRQSALLPTLKIVKTC

SEQ ID NO: 222871 - protein, 342 aa, unidentified
MFYAALDVSLRSVAVCIIDDDGKVRFERVVPSDVPDLVRCLNAFGEPIHQVGLEAGTLTQHLTYGLREAGFHVVCMEARQVAAALSAMRNKTDKHDARGIAQILRSGWYSRVHVKSVESHHLRALLTSRRVMQRKCIDLENEIRGLLKVFGVKLPMRLSRGAFDVAVRDTIESDPGLSRALLPMLHARQMLFATFMELDRRVRKAAQEDEVCTRFMGIPGVGEITALSFKAAVDDPARFKSSRTVGAHFGLTPRRFQSGEKDNPGRISHAGDSDVRAALYAAANAMLMRSIKWSSLKAWGMRLMKTKGRRRAIVAVARKLAVVLHRMWADGTEFRLGSEAAA

SEQ ID NO: 222872 - protein, 345 aa, unidentified
MTIVETRAITGGVDTHADVHVAAALDPVGGLLGVKEFPATPAGYARLLAWLAGFGTVTLVGVEGTGSYGAGLARHLTRAGVRVVEVDRAGRQDRRRKGKSDPLDAVSAARAAQSGRANGAPKGRDGAVEAIRALMVARRTARAGRTQTINPARSLIVTGPDDLRARFTRHTTGRLVADLAALRPRPGEVVGYATRVALRELGRRAEFLDAQLERLDELIVPLVAARAPGLLRLYGIGSDTAAPLLIAAGDHPDRLNSEAAWAHLCAVAPIPASSGRITRHRLNPGGDRQANHALWRIVITRMSSHPATRAHVERRSKEGRSKTEIIRCLKRYVAREVYPHLRSPY

SEQ ID NO: 222873 - protein, 438 aa, unidentified
MDIIHERAAGIDVGSEQLHVAVVDGAVHVFETFTAALHQLREYLMSAGVTTVAMEATGVYWLPLYEVLEEAGIQVCVVNGAHVKSLPGRKSDMADCQWLAKLHSHGLLKSGFVPDEWIRRLRDYQRLRQDHVQMASAHIQHMQKALDRMNLKIHEVLSDLMGASGMRLVRAILDGERDSERLLALCDGQVLRKKKERMRQALQGHWKPEQLFALRQALQAWEFYQEQIAACDRESAATLQEIAALSPPSDPPTVASVVSKRMQHNAPHIADLKQLLVRITNGHDLAVLPAFTDYSILQLLAETGPNMRAWPTVKHFTAWLGLAPSSRQSGKRRRRERRFRNRAGRLFAVMARSLARSNKIALGGFYRRLRATRNPAVANMATARKLAVLYYNTLKHGLAFVEQGLDAYEQHYQARSLRRLQAAARRFGLALVPQANVA

SEQ ID NO: 222874 - protein, 338 aa, unidentified
MTGTKYFDGVDIASSTVMMSVGTEPWKLVLKPQEFDNTEDGYQSLMDYLVAHQLSPKQTVVCMEATGVYGEGLAYFLYAKGYPVAVQPPLEVKRAFKPNGPKTDAVDSIQIAEYACRFADKLAFWKPRSEILEQVKVLLATREQFVVQNTAHKNALQTIQRKSVKTPFAEQAHQQMIEQFKNQIRAIDHEIRRLIDDDPTFKQTLLLLLSIPGVGLTLAAHMLLLTSVSLDHKELASFLGISPNQHFSGSSVYKTPTSRHFGPPAARKLLYLAACSLRTHQQQFRTYFLRKTAQGKSSRLVLNNIANKLIKIICAVLRSQKPYIPNYRSVQPLLLKNT

SEQ ID NO: 222875 - protein, 325 aa, unidentified
MNAILGIDVAKANLDVALLVEAKPAEPAPFSNDEKGFKQLKRWLVKRGVQSLQVCMEATGNFSEASATFLYAQGYTVSVVNPARISGYAKSQLRRNKTDKLDAALIADFCRTQHPPAWSPPDPAWKELQALVRHLQDLVNTRQQARNRLSAGPGAAAVIAQLNEQLAFLDKQIAHLKKLIQNHIDQHPDLKRQRDLLASIPGIGDLTASKLLAEFRNIAAFDSPAQIVAFAGLNPKHHTSGSSIRGKTVISKQGRASIRAALYMPAVVAKRHNPLLAVFAQRLKQRGLSGTQIIVAIMRKLLHLAFGILKSGQPFDPNFSLKSAP

SEQ ID NO: 222876 - protein, 343 aa, unidentified
MKITTIGMDLAKNVIQVHGIDEQGKVVLKKQLRRHRVASFFANLPVCLVGMEACGGAHHWARQLEKSGHRVKLMAPQFVKPYVKTNKNDAADAEAICEAVSRPNMRFVPVKNGEQQAVLSLHRARQGFVKARTAQANQIRGLLAEYRIVVPQGIIHIAKRLPAILEDGENELPGTFRQLLARLGDHLKELDRQVVELEKQIQRWHRESEASRKLEQIPGIGPLSASALVATIGDAKQFENARQLAAWLGLVPRQHSSGGKPMLLGISKRGDAYLRTLLIHGARSVVRVAECKDDGGQSWLVQLIGRRHKNVAAVALANKNARIVWALLAHDRDYQADYVPLAA

SEQ ID NO: 222877 - protein, 411 aa, unidentified
MQVIYARCAGLDVHKKTVSACVSVCEANRSKRQQTRTFGTFTGALLELADWLKEHGVTQVAMEATGVYWRPVWAVLEGQFEQMLVNPQHIKAVPGRKTDTKDCEWIADLLQHGLLKGSFVPPTPIQDLRDLTRYRAELRQSQTRVANRIQKLLEQANLKLASVASNALGVSGLRILEAIISGQADAAQLAQMARGKLKSKIPELEQALQGRVRDHHRFLLVEHLDEWKSFGERIRRIEAAIDQHIRPFESAVTLWQTIPGVDRVTACNLVAEVGVDMNQFPSAQHLASWAALCPGNHESAGKRMSGHTRDGNKWLRRSLCQAAWAVTRQKNCYLSAQFHRIAARRGVKRAVMAVAHTMLIIGYHMLKTGETYHELGAAYLEQINKDQLQRYFVKRLQRLGLNVTVYPAIAA

SEQ ID NO: 222878 - protein, 422 aa, unidentified
MPYHIAGIDVHKKMLAVVVADVAVDADYQFEQLKIGTGPAQLRVLAEWLVAHDVAEVVMESTAQYWRPVWEALERYWQPRRTHDGAPAHLYLAQAQSNRGVGGRKKDFPDAERLVKRLVAQELTLRFVPDAEQRLWRTVMRRRYPLARNRVQLHNRLEALLEEAHLKLSSLVSDLLGTSARRMLQAVADGATAPADVAALADQRLRATPEQLADALDACTTLHPVYRRLLALTLEELRLLETHLGHLDQQMADLLAPHHEAVQRLAEVPGLGVESAQQIIAEVGVTAATFPSARQLASWAGVCPGHEESAGINYNPRCPKGNRQMRRVLNQAANAAARAKGTIFAVVYRRLVARRGHAQAIGAIAHRLCRLVWKILHERVRYEERGPAVDAQAARIRTRKMVRALRGLGYRVELPSPRPITE

SEQ ID NO: 222879 - protein, 449 aa, unidentified
MREPREIEDEEHEQLVERVAAVEVAKASGMVCTRVPDPSRPGRRRTRVQEVDATTNAVIELGGQLAAEGIEKVTIESTSDYWRPFFYLLEAAGLAVQLVNAHDVKNAPGRPKTDKLDAVWLAKLTERGMLRPSFVPPAEIRQLRDYTRLRTDLTRDRTRHWQRLEKLLEDALIKVSAVASTLETLSVRDMLEALIAGERDPKVLAGLARGKMKAKRAALIEALTGKFDDHHAELARMLLDQIDALTAQVGTLTTRIEELIAAIPAAQGVDADGTTGPGAGTGPDAARPDALTRLDEVPGISAHGAQIILAEIGLDMTRFPTAGHLVSWAKLCPRTIQSGAKNRSGKAGKGNPYLKGILGEIATAAAKTDTFLSERYRRIVKRRGKLKALVAVARTILVIIWHLLADPAARYHDLGAGYYASRIGTERKTRNHIRQLEALGYTVTLTQAA

SEQ ID NO: 222880 - protein, 358 aa, unidentified
MVQSKELNFEGQNIYIGIDVHLKTWHVTIITESGYKQNYSQPSSAQSLFEHLQKYYPKGCYQAVYESGFSGFSTYYALVDLGIQCMVIHAADVPTTQYENVMKSDPIDSQKLARALRSGVLKGIYVPGKESLDDRNVVRFRKILQKQLGGYKSRVKHLLYNNGVSIPDSFIQPGSHWSKRFMRWLREDVVLLSPTRHSLDLLLSQVELYRQSLLETTRQVRALSQSDRYAKVFQNLTSIPGIGMIVGMSLLTEIENVHRFKNTRQFASYLGLIPVSHSSGEKQSFGEKTFRGNKQLGPMLVECAWVTIHYDRVMAAAFGEYCKRMKSQEAIIRIARKMANRILTVLKNGKIYEYDRYR

SEQ ID NO: 222881 - protein, 322 aa, unidentified
MQHDSSSRPVVGIDVAKHKLDGFADLPGGRSFSFANDDAGRAALVAELRRLDAALVCVEATGRYHRRLAADLLDAGIPVAVVNPQRVREFARATGRLEKTDPIDARVLAEFARAIGPRVEEKARENQAELRDLVSRRRALVQMRVAEKNRLADDAPKLARAQAAKLLRFVEQQIEDLDHAIAKLVERDDHWTNRAALIASVKGVGQSTANQLVADLPELGKLDRGQIAKLVGVAPLNCDSGNRRGQRHIRGGRHDVRLTLYMGAFNACLHNPRFKAFAARLKAAGKPFKVIVTAAMRKLLVILNQMVKTNTPWNQELAFKFN

SEQ ID NO: 222882 - protein, 317 aa, unidentified
MNTKNNQNEINVGVDTGKTQLDIYIRPLDIYFTVENNQSGIKHAIQILKKHPVTRVTIEATGRLELPFIIACAEANIPFVVANPVNIKRFAGAIGQKAKTDKLDAQLIAHFGEAIKPPLSSLKPEQMRLMSDLLSRRRQLMDMQTMEKNRSQIMPKTLSSLIKPILTALKNQIDKVDLKLQKLIEECDEYKAKNAIIQSVPGVGNVVAFNLLSDMPELGYVNNKEAASLVGVAPFNRESGVYQGKRMIRGGRPKIRTAMYMAMMSAIQCNSKFKDLYQRMVKAGKPKKVAIIACIRKLVVIINSMVRDGVMWDPKMV

SEQ ID NO: 222883 - protein, 375 aa, unidentified
MKSILSVGMDVHKNSFSLCAYDGYTGEIVSESTFASDVKLVIKFIETLKSRYENDVEIKCGYEAGCLGYSLYKSLTARGVDCVILAPTTMQVSAKNKMVKNDRMDALNIAKNLASGSYKSVYVPDEEDVEIKEYIRMIHDFKKESKRVKQEICAFVLRHGYQYDGKSKWTIRYMNWIRELEMSEIQRETLNEYIAEMENLNDKINRFMNRIDEMYQSERYHEKVSKLRCFKGIETFAAMTIQVETADFERFPSAKAYASYTGLTTGEHSSGDKNNRIGITKQGNTVIRKTLVECAQSLVKGNVYAKKSQGLKSRQKGMDVNIIAYADKATERLKKKYQKLIERNVPRNKAIVAVARELACFIWGMETGNIHLNKK

SEQ ID NO: 222884 - protein, 349 aa, unidentified
MTIVAETVEHVVGIDTHARTHTYCLLHARTGAVVDTATFPTSKAGNARAVDWIGRRSRGSVLAAIEGTSSYGAGISAALLEHGFDVAEVRPAARSTHSHAGKSDALDAEAAARSVIGRDYDTLARPRQTGPRAALRILLASRSIIDQQRTANRNALTALLRSFDLGVDARKPLTDAQIRTIAAWRNSRAASSDASGIARREGRRLAVAVLEQTESLKANHRELRELTEQLAPGLQDVPGLGPVTAAIIVCAYSHRGRIRSEAAFAALGGIAPLPASSGNTTRHRLSRSGDRQLNRAFDIAVRTRMSYDSDTRDYVARRRAEGRSNREIRRCLKRYVCRSVFRQLQACMA

SEQ ID NO: 222885 - protein, 367 aa, unidentified
MKKVSTASAKATKNFSQQKLTIGLDLGDRTSWYCLLDEVGDVVLEQKVGTTPKAMREVFAAMPRSRIALETGMHSPWVSRLLSELGHETIVAHARNVRLIGESRKKDDRLDARMLARLARIDPQLLSPVKHRSAKAQADLTVIRARAGLVRARTALINTARGVTKSYGERLRGCNPRNVNPEKAEGLSPELQAALQPLLSAVESLSEQIREYNERIEQLAKQSYPQVALLKQVKGVGTLIAITYLLTLEDAHRFNKSRDVGCYLGLQPGRRNSGQSEPQLHISKEGDPYLRTLLVQGAHHILGPFGADSDLRRWGLKLAERGGKNGKKRAVIATARKLAVLLHRLWVSGEAYEPLRNSQPVTMPAAA

SEQ ID NO: 222886 - protein, 376 aa, unidentified
MERGSLMLNTTTFVGLDVHARSIKAVALDAMTGEVRSATFGYDAAEVAGWVSSVDPSAKCVYESGVTGFDLQKRLSSMGIDCVVGAVSKMIKPSADRRRKNDRNDAEFLARMLSVGNVVEVWVPDDECEAARDLVRALDDARDDLKRCKQRLSKFLLRHGHAFSETTPSGRRKGNWTAAHWAWIKSISFAEKADDDVLAYYIDATRQAMEDKARLERLVEAEASKPRWKRRVDSVRCLKGIDVMSAADLVFEAGEFSRFKNARSFAAWIGLTPSEHSSGESVRQGGITKAGNKHLRRVLVESAWHYPGCSPHSKDLAKGQAPDPGARRHAAKGVRRLVGRRAAMLERGVHKNKANVATARELACWCWAIGCMVENG

SEQ ID NO: 222887 - protein, 411 aa, unidentified
MQVIHNRCAALDVHKKTAVTTIMITQADGSVQEYTRTFLTMTADLLALDDWLRSHDIKVIAMESTGVFWRPVFNLLEEGRQVILVNAQHMKAVPGRKTDVKDSQWLADLLRHGLLKASFIPPKPVRELRDLMRYRKTIVQERADEVNRLQKVLETANVKLASVATDVLGKSGRSMLDAILGGQDDPETLAELARGRLRAKLPDLRLALDGRVQPHHRVLLTRILAHIDFLEESLAQLQAEMEQYLHPFEEAMELVQSVVGIDETAAASILAEIGTDMTRFASEKHLASWAGVCPGNKQSGGRRLSGKTTKGNPYLRAILCEVAWAIAHTKDNYLSAFYHRIARRHGKPKAIMALSHKVLVIIYHILRTKKPYADLGAEYFDQRDRERIERHHIHRLEQLGYTVTLLPKEAA

SEQ ID NO: 222888 - protein, 402 aa, unidentified
MNCVGIDVSKGKSMIAVMRPFGEVVVSPFEVLHTDSELSKLAGLLKSLDGETRVVIESTGNYHAPVAWLLHDAGLYVSVVNAMLVHDYGNNSLRRAKTDKKDAVKLANYGLDHWLILPRYVPEEDTRLMLKTCYRQYQQYSKVQTMLKNNLISLLDTAFPDANRLFTSPPRADGSEKWVDFVAAFWHCECVCGLSEKAFTAKYQKWCKKHGYNFSKDKALDIYASSCGHFGVMPKTDTAKLLVEQAVSQLRATSAALAALKQEMQSLAASLPEYPVVMEMFGVGPTLGPQLMAEIGDVRRFHSKKALVAFAGIDAPPYQSGQIDVRSRSISKRGSASLRRTLFLVMGVLLQCAPMDEPVYQFMDKKRSEGKPYRVYMMASANKFLRIYYASVKAYLDSLEHD

SEQ ID NO: 222889 - protein, 371 aa, unidentified
MFGDEATFHQKGGTPMNYVGIDYHKRYSHVTAIDEEGRVIRSKRLENRPESFQEFFGRLQGQSETVLEASRTWGVMYDLLEEIEGIESVELAHPQKVRAIAEAKIKTDKIDSHILAQLLRADLIPAAYIPGKQTRSYKEMIRQRVFLVRMRTRLKNRIHVLLDRLHVPLPSVTDIFGKRGTDYLRKLNLPGVDGEILRENLQLLEVFNTLIKEAEREIASILGDNPLVKLLRTVPGLGLILAAVVALEIDRIERFASPSKLASYAGLVPSTYASGGKLFHGRLLPMSNKWLKWALVEAAWISIRTSPYCRAYFEHHKRHKGPHTAAIALARRLSEIVWHVLKENRVYEERPFQRQRRVSIMATSPAALTAN

SEQ ID NO: 222890 - protein, 411 aa, unidentified
MQVIYQRCCGLDVHKRIIIACVLEWVGSGWEKEIRQFGTMTSDLLALSDWLVHEGCTHVAMESTGVYWKPVYNILEGQFELLVVNAQHLKAVPGRKTDVRDAEWIAELLAHGLLRGSFVPPASVRELRELTRYRTSLVRDRARTINRLQKVLEAGNIKLANVVSDIDGVSARLMLEALVAGERDAQQLAGLAKGRLKDKRAQLVEALSGRLQPHQSFLIAEELAQIDYLDGAIERLNHQVEERLRPFEQEIGWLDTIPGVNRRTAEVLWAETGGDMSRFPSARHLASWAGMCPGNNESAGKRRSGRTRKGSPWLRHCLVEAAHGAAHTKNKYLSSQYHRIGARRGKKKAQVAVGHSILVIAYHLLTRKQPYSDLGANYFDERDRQAVTKRCVNRLQKLGFKVNLEKLPAAA

SEQ ID NO: 222891 - protein, 387 aa, unidentified
MQKPHDNSKASPAAFMQDNTLIAVIELSLSNWLVAGLIPGVSREPLKKLEPNPEDLLKLLHGWRDEAIKAGRPITRIAVAYETGRDSFWLARWLRERGVDAHVIHATSVAVSREHRRAKTDRLDTAMLKRGFLGWLRGERGHCTVAIVPTMEEEDAKRPHREREGLVHEQTRVVNRMKSALIQFGVRNFNPKLRKARVKLETVRTPEGKSLPPNTIAALRRDMERLKIIKEQIKAIEQARLQQFEQKPEALANRMVYLLVRIYGLGWETADLLVHELLSRTLRDRKAVARYAGLTGSPDESGSKRREKGLSRSGNARVRKIMIQLAWRMVKFQPDSALVQWFKQRTENAKGSRKPMVVALARKLIIALWRYANDGVIPEGFRLHSAA

SEQ ID NO: 222892 - protein, 332 aa, unidentified
MYLGIDGHKRYAQVAVMDEAGEIVDEVRVENANLDDLAQRYAGAQAALEATSNYYHIHDTLSEHLDVTVAHPKELNQIANSDKKTDRVDAKELARMVRLNSVPESYVPTDEIREARALVRGRQTLVEDRTKYANKVHGLLSDHGITEDVRPLSVEGREFLRKLLLPTPWNSLLESYIEVIETLTEEIHNLDETIEERAGSLKETQLLMIIPGVSYYTALTIYAELGELSRFESDKEVVSYVGLNPAIRESGDLRIKGSISKRGSGRLRWLLVQAAHTAVHTCNDEYLSRFYKRLASRKNSQKAILATARKMLVSIYHMLNRSEVYDPPGVSA

SEQ ID NO: 222893 - protein, 400 aa, unidentified
MMTPDDIDVWVGLDVGKSAHHAHALDHDGNTLYDKPLKQDEKAIRTMLGKLSKHGRVLLVVDQPNTIGSLPLTVARNMGIAVAYLPGTAMRRTAQLLPGDAKTDRRDAHVIAWAALKLPETLRDAGPDDETLAALKLLAGHDEDLAHESTRHVNRLRSLLLQTHPAFERALKGERITRDATLALLERYGGPMGVKRAGIEDVKDWAKSNGLRAGRIIDDMFKAIGEQTVTMPGTLMAETIIPSIAHDIKTIRDRRREVDRQVEKLLEDHPLLTVLTSMPGIGVRTASNILLGIGGDIANFKSSAHLAAYAGISPVTGQSGTSIKGERPSRRGNKRLKNALWQTAFVASTKHPPSVAYYKRKREQGKHHNAAIICLARRRCDVIYSMLKNGTLYQEPALVA

SEQ ID NO: 222894 - protein, 318 aa, unidentified
MTNYIGIDISKRDFHACFSEESEIQIFNNDTVGIRKFIKYLKSVKCAARNTIIGLESTGSYHLPVAYLCTKAGYTVNVINPLITKRQNQTSLRRVKTDKQDARLIRYCLVNGAGYPFCETAQTLALKTLVRQRAGYSMLRHRTRLKHEEVLKREDYLGISISTLNQELYDFLNQKIKGLDVILRQYESKTQKLLQTIPGVGPQTAVTFLSEVGDINRFPDAQKLTAWVGLDPRVHQSGTSINGKGYITKRGNKLLRTRLFNASSVAVIHPPNIFYDFFQKKLSEGKPYRVALCAVMRKMVHVIHAVWSRKTPFIKEKR

SEQ ID NO: 222895 - protein, 410 aa, unidentified
MRYYLGVDWADQTHAVWVVDESGTKITERAVPHTAEGLGEWGRELDEWRAQGIDLWAAIERPDGRVVDVLLDHGVVVYPVNPKALDRARDRFRQSGAKSDPFDARVLADFLRTDHVHLRALQPSSEAAQELKLLTEDCQRHIRQQTRLVNQLTATLKAYYPRALEVAELTSALAREFLPAYPTPAALTALTERQWQRWARAHRLPEARTADLWAVLQQPQLPVPAHVVRAKARLMRTLVEQLMPVVAAVAQYRKAIDDFFASLPAAQWARTLPIGKHGITAPTLWARLGDAPERWESFRHLQAHAGTVPVTKRSGKQQRVVHFRFACDKALRHVVDQVAFLSLLSSTWARAYYDQQRARGHAHRQALRALGAKWLKIIFVMWERHVPYDEQYHLATMTRQQLRQRQEQIA

SEQ ID NO: 222896 - protein, 349 aa, unidentified
MNHYVGLDVSLEETAICVVDGTGRIVEEARAASEPEALIAALREIDLPLERVGLEACSLTAWLHDELHSAGLPAVCIETRQANAAMKTMPNKTDRNDARALAQIMRTGWYRQVHVKSRQCRLWRSLLVARRTVLNEMRSMENVVRAVLREAGLKLGVPGRAAFAGRVRELTEGDARVTTLVEPLLAILATMLDQLAHLTKQVQDIVRQEAVCRRLMSVPGVGPITALAFRATIDRPDRFRRSRDVGAHLGLTPARYQSGETDIQGKISRCGDELARTALYEAAHTLLVRSRKWSALRAWGMKVAKARGMARARVAVARKLAVILHRMWSDGAEFRFGKEPSAGVARVSA

SEQ ID NO: 222897 - protein, 321 aa, unidentified
MKNRKNDVLYVGVDVSKDTLDVYRPDTSESIRVENSEASINDLCKKLKSKKLLFAMEATGGYELLLRTCLAKHGIDSTVLNPRQVRDFAKGIGLDAKTDAIDAHVISKFASVVEAKAMPMASDHEQKHSALVTRRCQLLELINQENNRLKQAWDDDVKKSIQEVLESLKKQMKTVDSQLAKMLEKDTANERTIEILQSVKGIGPVTISTFIADLPELGKLNRGEVAKLVGVAPINRDSGKKSGKRFIGGGRGHVRRVLYMATIVAIRHNETIKSFYQRLKAKGKESKVAIVACMRKLLTIVNLLIKNNEVWKNAESVSAKN

SEQ ID NO: 222898 - protein, 404 aa, unidentified
MSETRDKGSFSGFLGIDISKGTFDGCCIDREGKVLFHVSLPMNRAGFEKLITQVCAISLPQGSILIGMESTACYHVSLFSFLMALGYSVSVINPLLISNFVKLQLRKTKTDKKDAAVIARFLLAHGASLPQTMADSHVADLRELSRQRESLLHQMTALKCDIKRVLSITFPELERTMGIFTRTTLRLLGRFPSARALAQANREELAPLLHHASRGRSTPVSVDTLLKLARSSVGTANPSREMILRQKASILVHLEEHLREMTNTLIELCQCALEQDVEILTSIRGIGDKTAATFLIEMGGEIQKFDTHNKLIAMAGLDPSVYQSGQYDGHSRITKRGNRHLRRVIWLMTIRVIQFNDLFKSYYRKRIEDGLPFKKAVLATAHKLIRIIFVLLTRRTMFCHQVTS

SEQ ID NO: 222899 - protein, 444 aa, unidentified
MACSGMILIREVADAPVIMGISKPAGLKSPCGEVKIVNPLFVGIDVSSKNNVAYLMKPDGSKHSSFSVQNNLGGAKLLSERIVSALGSMQLERVVIGLEATSIYGDSLVYALREDGSLGRFQRKIHVLNPKQVRKFKEAYSDLPKNDWVDAFVIADHLRFGRINREVYMDDYRYKALQTLTRARFDVIQNLTREKQRFANYLFLKCSGMAQDKDIQNTSATTIALMEHFETVDDLANADLEELTAFITETGRGKFADPDATAKAVRAAAKGSYRLPKTVNDTVNQAMAVSIASMRALKGQVKVLDKAIEQQFEIIPNTLTSIPGIGKVYSAGIIAEIGDIHRFDSQASVAKYAGLVWNRSQSGDFEAEHSRMIKSGNRYLRYYLLEAANSVRRCDSEFRRYYDLKFKEVNKYQHKRALALTARKLVRLVFRLLKDNRLYIPPEG

SEQ ID NO: 222900 - protein, 369 aa, unidentified
MNDTTIFVGLDVHKKTIAVATVEGRASADVRFYGTIANTPVAIRSLLRKLGKGGQRLHLAYEAGPMGYNLYRLSTGLGHRCDVVAPSLIPRKAGDKVKTDRRDAMTLAQTLRAGQLTEVWVPDEANEAMRDLVRMRALAMKDQRKARQQLHSFLLRHGRSYPGKHWTKAHRRWLGELTFAQPAQHLVLEELLARIERAEELCERLKKAIVDLMPQWTLAPVVAAVQALRGVSILVAATVVAEVGNFSRFDNPRQLTAYLGLNPSEHSSGATIKRGPITKTGNSLARTCLVEAAWTYRHPARVTQIIRERLKGLPEPIRAIAWKAQVRLSGRYRKLTATGKSAPKAIVAVARELVGFIWAIARLVEPKVA

SEQ ID NO: 222901 - protein, 524 aa, unidentified
MVPESGDCHIGEDRQESIPFKRVPSNRLRVQAHQLQTGRDAMRKGKNRQDKKSGKTNLSKAMPVICPNAAGIDIGANEHYVAVPSDRTEEPVRRFGTFTSDLKAIGEWLLKCGVETVAMESTGVYWIPIYQMLEEYGFEVKLVNARHVKNVPGRKTDVQDCQWLQQLHSYGLLTGSFRPEGEICVLRSYLRQRQMLVSYGSRHIQHMQKALNEMNLHLHHVISDITGVTGMTIIRAIVSGERDCLKLAAMRNRRIKSDLETIAKALEGDYREELLFNLRQSLELYDYYRLKIVECDQKILAHMQMLPDSEMLKKERANSSSQDTALIARSNEKLRKKRSNKRKVNGNRPTFDCASELHRIMGVDLTRIDGIDESTAQLILAETGLNIKEKWSTEGHFASWLGLCPDNEITGGKVRRRSTRKVISRVSNALRMCAQSLFVSDSALGAFARRIRARRGAQIAITAAAHKLARLVYRMLTLGQEYVDAGQAQYEERYKMNLLNNLARKAKQFGYELTRKEEPATVVP

SEQ ID NO: 222902 - protein, 356 aa, unidentified
MRKATTIRRRVTIGLDVSDRYSRVCVLDARGRIECEDRIRTTSDAVGTWFERYARARVVLEVGPHSPWLSRLLAAQRHEVVVANPRRVRLIAEAERKSDRIDAEMLARLGRADPKLLRPIEHRGEAAQQHLALLRVREGLVRSRTRLIQCARGLAKSFGVRLAASSAPSFAKRVREGGHEALFPGLAALLEQCEALTASIRQLDREVEQLGRERYPETRLLRQVPSIGPITSLAYVLTVEDPSRFAKSRSAGAYFGLTPRQRDSGEARPELAITKRGDEFVRRLLIEAAHYTLGPFGPDSELRRFGLRLLAQGGKRAKKRAVVAVARKLAVLLHQLWVTGEVYHPLGAPSEEAQAA

SEQ ID NO: 222903 - protein, 343 aa, unidentified
MEQITTVGIDLAKNIFQVHAIDAAGRVVLQKAFRRPRLAAFFQKLPACLIGLEACSSAHHWGRLLTQFGHQVRLIPPAYVKPYVRRQKNDAADAAAICEAVTRPSMRFVPIKTEEQQAALMLHRARSLLMSQRTALICALRGHMAELGLTAPREVRNLRPLLEVLIDETDDSLPALARAALRPLADQLATIGMRIAELDHQLLAWHRANPVSQRLATIPGVGPVTASALAATVADPAMFASGREFSAFLGLVPRQSSSGGKVKLGGISKMGDRYLRHLLVSGAAALLSHAKTRRGPLDVWAKALVEKNKPIKLVAVALANKMARIAWALMIRGETFRLTAHAA

SEQ ID NO: 222904 - protein, 331 aa, unidentified
MKKPGHHLIAEVPRRQPRVEMTIGIDLGDVWSHYCTLNEEGEAVDRGRFRTTPKGLEKWFTDVPPARVAMEAGTHSIWISEQLHELGHQVIVANVRELRSISHSDRKSDNADAEKLARFARLDPKILRPIAHRTVEQQEALTLIRARDLLVRLRTAAVNAVRGLAKPCGYRLPASSTRCFAKRSLAVMPPTLAQALGPVIEQIAEMTVQIKQYELQIKKVTETDYPEAQALLKVYGVGQITALTYVLTLGSKQRFQRNRDVGCYLGLRPRRSQSGNRDPQLGITKAGNVYLRSLLIECANHILRPQEKTPPSDGGAFIWLLEAASRPRTEL

SEQ ID NO: 222905 - protein, 407 aa, unidentified
MQLFVGDDWSEEHHDVELMDAAGRRLSKARLPEGVAGIARLHAMIGDQLSDDVDQSEVAIGIETDRGPWVAALVAAGYTVFAVNPLQAARFRERSGVSGAKSDAADAHVLADMVRTDSHQLRPVAGDSPEAEAIKVVARAHKTLIWERTRDTQRLRHALREYFPAALQAFDDLDAADALELLGKAPDPASAARLTRGQITAALRKARRRDIETKTDRIQAALRGEQLGRAAVITTAYAATVRSTVAILTTLNAEIKALQGQVDAHFGRHPDAEIIMSQPGMGPSLGPRVLGEFGDDPERYATAKARKNYAATSPITRASGKKKVVAARFVHNDRLVDALNSQAFSALQASPGARAYYDKQRDRGLDHGSALRQLANRLVGILHGCLKTRTRYDETTAWSHHVEKAAA

SEQ ID NO: 222906 - protein, 341 aa, unidentified
MEEVTIIGLDIAKQVFQAHGADGSGAMVFSRRITRQKLVAFFASQPRCVVALEACAGAHHWGRELQRMGHAVRLIPPAYVKPFVKRQKNDAADAEAICEAAQRPTMRFVPVKSEAQQASAAVFRARDLLVRQRTQLLNALRGLLAEHGWVAPKGLFHASAMMAKIEDPSCELPASARDVFLVMIASARALDERIHLLDREITKRAREDETARRLMTIPGIGPITATALLALAPPPESFRKGRDFAAWVGLTPLQRSTGGKTKLGAISRMGDRTLRRLLIIGASAVVLHVARRGAPQGSWLAQMMARKPRMLVTVALANKTARIVWAVLAKGEDYKAPVAAA

SEQ ID NO: 222907 - protein, 325 aa, unidentified
MQNQTIVGIDVSNATLDICVSSDQGNRSFVITNDVKSICKFFNSYKESLIIGMENTGRYNWALYEAFKESIHRVFVISPLHLKKSMGLVRGKNDKIDAIRIAVFIQKNHTELLQWKPSSPAIQKLKILLTERNSRVKSRRQLLKQQYDYAKMKHLGIDKYLLSLNKQQLFLLDKQLALIEKEMEAVIKSDEQMQHQANLVRSVPGAGKVLCWMMLAKTEGFTTITQPRRMACYSGVVPFSHQSGTSIRGREKVSAYADKALKTILHLAAMSAIRLENDLRAYYRRKVEEGKNKMSALNAVRNKIVHRIFAVIKKQRPYQQHLLLS

SEQ ID NO: 222908 - protein, 428 aa, unidentified
MTKPMNTTTPVFLVAIDIAKRQNDVLVQHPDRRREAFKVANTRTDFCKFSAYLKSLSARCRVAFEPTADYHRAIAWHLIESGFDVHLVSSVACARTREAIFNSRDKNDPKDAQVILHLLEAGITQRYYDPLANGHHDLQELANTYSVIVYRRSQTLHSLKNHYLTLYFPEIERYLNSTRSAWFMRTFHRFPTPASILALSESKFIKEAWTLIGKKHGKEQWLKELYATASSSVGLPVALDSIAVQMYRLVIAEYAHLTELRDSIEQEANAQLQDNADYICLRSIPGVGPIVALIVLAEGGDLRRFRHHRQFLKFCGLDLATHQSGQSCGHTRLSKRGNNRLRYAFWMAASRAIMMNENTFRAKYERYIKDDPFNADQKRKARTAVAAKMARVAYAVVKHGRTYRPYHESGIPDGKIPLARAVEATSTS

SEQ ID NO: 222909 - protein, 368 aa, unidentified
MGQKSSKLYIGLDVHKESIDIAVAEEGGEVRHYGQIAGDTNALARTVRKLESSGRRLVFIYEAGPCGFGIYRGLIMRGHVCWVVAPSNTPRRVRDRIKTDRRDSVKLAGLARAGELTPIYVPDVCDEAMRDLVRAREDAVVMQRQARQRLAALLLRNDVRYPGKTAWTAAHRRWIADVRLPQPAQRLAFEEYVQAVEEATVRVERLSGYIAQEVAQWRWQPVVHALQACRGIQLIHAVRIVAELGDLSRFNHPRQLMSYLGLIPSEDSSGERRRQGSITKAGNGSARRALVEAAWAYQYMAKVSGLIARRQVKVPKAALDIAWKAQVRLCARFRRLAARGVSRNKIVVAIARELAGFVWAIGQQVKPV

SEQ ID NO: 222910 - protein, 368 aa, unidentified
MSASTFPTKGTPSMNSEKYIGLDVHQATISVAVLDSTGKLVMESILETKAATILDFFAGLRGTLSVTFEEGTWAAWLYDLLKQHVAKLVVCNPRKNALLKDGNKSDRIDAHKLAELLYLNKLSSVYHGETGVRMLRELARSYLTIVKDLTRVMCRLKAVYRSWAIPCAGRDVYYTRHRAEWLDKIKEAGVRRRAERLYQQLDMLQYLRQQARRELLAESRKHAITVKLRQIPSLGPIRSALAVALIQTPHRFRTKRQLWAYSGLALETRTSGEYCYVKGGLRRSKKQISIRGLNKDHNHHLKGLFKGAATRASVLPGPFQDFYQRSLAKGIKPTMARLTLARKIAAITLTLWKKGENFDADKLKSQAA

SEQ ID NO: 222911 - protein, 352 aa, unidentified
MKTYYVGMDVHQASIVIVVLNGAGKVVESSTLKTGATAVRSYLQRLKGKIYVTFEEGTQAQWLYDLVRPLVTEVVVCDPRQNRLLAVGNKSDRIDAQKLAELLRHGALKAVDHADHGVRVLKELVRNYDNLVQDTTRVMLRLKAIYRRQAINCKGHEIYRQDRRQQWLRKLKEPGAKERATFLYEQLAVLRPLRQKAKLRMRQEARKQAAYPWLMSVPQLGPVSVAQLLAIVGTPHRFRNKRQFWSYVGLAVVTRTSAEMELVNGVLQRSRRPIGTRGLNRNHNHVLKRVFKTAATGACHRGPFQAGYEARVKQGMDPALARLTIARQLVAITLRIWKREELFKAEKMKPAT

SEQ ID NO: 222912 - protein, 387 aa, unidentified
MIYFIGIDISKYKHDFCIISNTGEIIVENSSFENNQKGFQSFINLLEPYDKQCVRIAFEATGHYSLNLELFLTNQGYSFMKMNPLVVHQFLKARSLRRTKTDKADSKTIANYLMSVPYNPNSTLLYHTFTLKSLCRSRELLIKERSKIAVLITNQLDLTFPELKAFFNNTFSATLLYILGKYTNASHIALMKNYESLRKVSHGKFSYAKFAKLKELAKNTIGYHDENTDLLISTYVSLYNELSNKIDPIDKQISTIIKELNPRILSIPGIGEISAATILAEYGDISNFSSANKMLAFAGLEPSINESGTLQNNGKMVKHGSGHLRYAIMNIAMSILRYSPKFYDFYLKKRSEGKCHRVALSHVCKKLIRVIYSLEKYNNDFNPSLLK

SEQ ID NO: 222913 - protein, 363 aa, unidentified
MVTLLTATPMLYIGMDIHKKSWSIHMRTDIGDHKSFTMPPDCEALYNYVESNFPGYQVAITYEAGCCGFSAARYFLNLGWEVLVVNPSDIPRMDKQQYQKTDTIDCRNLSKQLKADQLKGIYVPGEDQDQLKSLLRQRAEITKQLRSVKAQIKSLLLYHGHQIPDQFDNPNWSKDFIHWLSSIRWTYEPGKICMESKLRIYAMIHKEHLQLANLLRSYCRTHYKKDYYLLKSIPGIGGYLASAILAEIGDLRRFGSETELASYIGVIPVMRNSGGTESMQRVTPRCRALLRSYIIESAWVALRLDPVMQNYYRKHAGKNPKSIIIKIARKLINRMLSVIKNETPYQINTTKEQIKKQPIKQNN

SEQ ID NO: 222914 - protein, 338 aa, unidentified
MYYTGIDLHKKTSFITTIDQNGKVIFRRNFPNEEELILDYFRNLDGPTKIVIESMCSWYWLYDLLSANNFTTVISNPLKTKAIASAKIKNDKVDSHMLAQLLRADMIATVHVCNIKTRKLKELIRHRRRLVQDSARMKNRIHMLLMKNNINIPVSDLFGKRGMKLLKEVSLPAYHQQQFNSYLALLRYLTEQIEPLTEQIRDLAKKDPMARLLMSIPGIGFLTAMTIIAEIEDIGRFPSYRNLASYAGLVPSLDASADKCRTGRITKQGSPYLRAALVEAAQAIPRTKQSRLNIFFRKRIVRAGYRKAIVATAHKILQYVYYVLKNQVFYSEEYLARA

SEQ ID NO: 222915 - protein, 324 aa, unidentified
MLAALTIPNSVAGVERLLGWLTEHDARDAVIGIENAAGYGRLLCAALAAAGCEILNVPAWRTHRDRHEQGRGKSDPGDAVAIAHVVLRKREQLGPALEPELIRALALLEGLRRQSVYNRTQAIQRLRAIWTQVDPEGEARVIHCQRQRELRKLTRIAFGAGIAEQAAARCIRELAREIERLNARIATLEHELEQLLRECGNPFADLAGAGATVAVALIAHSGDVRRFKDKGAYARFCGVAPIRCGSGQTAGHHRFDRGGNRQLNAALHRIAVVQARVDPRAQAFLTRKRAEGKTTREARRALKRHLANVVYRRLHAWAENALPT

SEQ ID NO: 222916 - protein, 363 aa, unidentified
MASIALDRGDVIVGVDTHKDQHVAVAIDGVGGLIDEPKFLDANNDGYAELLAWARSLGKVHVFAVEGCGSYGIGLARFLRRHGHLPVEVSRPPRAGARRMSGKSDAIDAEHAARTALAGVGVVTPKLADGQVEAIRLVKIARDTAVKAHTTAMITLKAVLVTADQDLRDQLEALSDFKLVAACSELDASADLADPAVAMRHTLASLARRWFDLHAEIKTHSKHLKALTRAAAPELLDAFGVGVDIAAQMLITAGDNADRIRSEAAFAKMCGVAPIPTGSGKTSGRHRLNRGGNRQANAALYRAVIVRLRWHAPTIAYLERRTTDGLSKKEIIRCLKRYLARELFQLLPDVSAELAPAPTARAA

SEQ ID NO: 222917 - protein, 338 aa, unidentified
MFIIGIDPHKGSHTAIAIDGDEQLVGELVVRADRRQRERLLCWAAEFEPRLWAVEGAAGTGALLAQQLVGAGETVLDVPAALSARARLLDSGHKDKTDPFDARSAAIVALRNRKLRSVALEDHRQILRLLARRHHQLTAARTRAICRLHAVLCEMTEGGLSKNLSANRAAAELRKLRPSDAIGIERKRIAVEFLDEVRRHDRALTELRRRIADAVSAANTTVTDVHGVGPIVAAYLIGYTGDIRRFASAGHYARYNATAPIEASSGPRVRHRLNPNGNRQLNHALHIAALGQISHDTPGRAYYLQKQTEGKSRKEAMRCLKRRISDAVYQRLRADSDR

SEQ ID NO: 222918 - protein, 326 aa, unidentified
MSRIQEKKTITTATPPFIVIGIDVSKEQLDVFVSPAGNHHSFKNDAEGVAELVNVCRDHDADLVVLEATGRYHRMAHETLHEAGVKTAIANPARSRNFARSVGRLAKTDRIDAQILAEYGERVRPPASSPPSKLQAKIAEITVARRQIVDEMKILKQQQSQALDSIVATQIEARISLCQRHCKDLEQLLAELIKEDDALRRRHEILTSIPGIGLTTSATLISELNELGGANAKQIASLCGVAPMNRDSGSFRGKRKIGGGRKPVRDVMYMAAVVAIRWNKDMAAFYQRLKKAGKPFKIAITAVMRKLLILANTLLSENRLWSETQP

SEQ ID NO: 222919 - protein, 335 aa, unidentified
MKNIKETLGIDVSKCTLDTQLHVTAVQTKVTNDLAGFKKLLSWALKSSGVEKCELLVCFEHTGMYSIQLATFLEEKGITYCMMPAIEIKRSLGMVRGKDDQVDAKRIAHYAHIRRDTLKETKLPTKLLKELKALLSLRGKIVAQKAGYKAHLKELKRVFKRAENKDVFEVEEKLLKSLTQAQLKLEKQINKLINSDPEVKRLFNLITSIKGVGPIVGANLIVVTQCFKSFEKSRQLACYCGVAPFKKQSGTSIKARSRVSHYANKKMKALLNLAASSAVGSDKELKAYYQRRIEKGKSKMSTLNIVRNKLLHRVFAVVKRGTPYVETYQHKVNFC

SEQ ID NO: 222920 - protein, 455 aa, unidentified
MSNRTLRPGAAAREELPHLNPDAAGLDIGAEEIWASVPAGRDPQPVRAFGTFTPDLHALAEWLTQCGVKTVAMESTGVYWIPVYEVLEARGVEVYLVNARHLKNVPGRKSDIKDCQWIQRLHSYGLLTASFRPAEDMRGLRAYLRQRALVLEHRAAHIQHMQKALQQMNVQLTQVVSDITGQTGLQIIRAIVAGERDPQALAQLRHGRCHASEAEIATALSGHYRPEHVFALKQALALYDCYTQQVQECDATIAQHYAAIKPVYDDTTPPPPLGPDPKPNSHAKNAPAFDVRACLYRILGIDLTAVNGLEASTAQTLLSEIGTDMSKWPTEKHFASWLGLAPHNDISGGKVLRSKPLKVRSRAAQALRLAAQALGRTQTALGAYYRRRRARQGPKAAITATAHKLARIVYHLLKHREPYQALNPEVYEQHLRHRELARLKRQAARLGFTLQPTAA

SEQ ID NO: 222921 - protein, 351 aa, unidentified
MLIIGCDYHPSVQQIAFVDLETGETDERRLLHKDGEAERFYRELKLRGVSVRVGIEATGHARWFERLLAELGFELWIGDPAQIKAARVRKQKTDRQDAQLLLKLLVEERFPRIWVPSPENRDVRQLLWHRHRLVQMRTRVMNQLQAVAMNEGVRRKQALWSKSGRAQLESLVLSPWASRRRQDLLDVLDRLNPAIDELSTAVEEEAKKRPEVLRLKTHPGVGSLTALAFVLIIGSAERFACGKQIGSYLGLIPCEDSSANHQRLGHISKQGNTLLRFLLVEAAQAAVRGDAEWRRKYLHLAMRRDPRVAKVAMARKLAVSLFWMWRKEWNYEQVRKFGSHAGQLVTGHGVK

SEQ ID NO: 222922 - protein, 400 aa, unidentified
MISVGIDVSKGKSTVCILKPYGEIVSKPFNITHTHKDLSELSSMLFRLNDEVKIVMEATGIYHLPILTYLQEKGFFVSVINPYLMKSYRNESLRKAKTDKIDSRIIANYGIDHWFKMKEFQISGVIYEELKLLGQQYRHYMKLHLLSLAELTHLLDLTMPGIKNLLASWNETNRKDKRSDFVERFWHYDVITSMSEQEFTEEYILWAKEKKYVPSQEKAKVIYTLAQESIPTLPSETSSVKMLVTEAVRVLKEVDATLGLILSRMQEIAKTLPEYSVVREMGGVGNTLAPKLIAEIGDVRRFRNGKALVAFAGIDPPPYESGQFVGCNRKISKRGSASLRKVGYETMRSLKMRSRPEDPVYRYVVKKESEGKSKKSAKIAGLNKFLRIYYARVTELYKNI

SEQ ID NO: 222923 - protein, 396 aa, unidentified
MTTIGIDIGGRTHVVARCRDGTSRADREILRVNQSRAGFAALDAWLGRQTEPVTLVTMESSGHYWMPLASHLCRRDIPVAVVNPLAAKYFAKSRLARTKSDPADARSLAEMAMRDTPPARDPLTGVELRQAARFAMTLVAEQAKVCQRLIRLVELGFPELGELFDDPTCRTAREVLRIAPTARAAARRRPTTLANANAGPGRRRLGTAKAERLQAAAADSIAVPELDAEVAFEVGLLLDQYDLLERQIEEADRRVAGLLDGETARRLQTIPGVGPSIAAALLAEIGDIDRFTDFDQLLAYAGVHPAERSSGRKGANPETAWRMSKAGNSHLRAAAYRMALVGIQHNPVIAAHYARKRAAGKSKMNALGHCMRKALSIVWGVWRNGRDFDPNWGVEA

SEQ ID NO: 222924 - protein, 426 aa, unidentified
MFSESYDDEQIIERVAALDIGKAEVVCCVRLPAAAGTKRRVQEVSTHTTMVGSLSELANRLVDLGVERVVMEATSDYWRPPFYLFEAHGLRPWLVNAKDVKHLPGRPKSDVLDAVWLCKVAERQMLRPSFVPPADIRRLRDLTRYRVDLVGVRNAEKSRVEKLLEDACVKLSVVASDIFGVSGRAMMTALIAGERDPKKLAEMARSRMRPKIGLLEEAFAGLPMGTFDDHHRFLLNRMLERIDRADGDIAALDVEIEAHLVPFGDAVARLDEIPGIGPVAAAMIIAEIGTDMTRFPTPGHLASWAKFAPGIKSSAGKNKGNGSTGHGNRYLARVLGEAAVATSRTDTFLGARYRRIARRRGKKKAIVAVGRSLLVVIWHVLSDPETRFVDLGADHFDRHVDTTTKKRNHVRGLEALGYRVTIEPAA

SEQ ID NO: 222925 - protein, 354 aa, unidentified
MTETAVDMQVVVLGVDTHQQTHHAAIIDTLGQPLADQEFSATAAGYRQLLEWARTHGRLEQAGVESSASYGAGLARELTANGVEVIEINAPDVRARRAHGKSDQLDAYAAAMAVLTGRASGHAKDTSGVTESIRMLYVARRMAVDHRTQLGDQLRDLCTTAPDEFADQLKTRTTTPQRLALVESWTAPASLTDPRAAFVFAAKSIAGRYRQTHREVTTLTRELKTLLKALVPTVLALPQVGPITAARLLITIGQNAQRMRTEATFAKLVGVAPLPASSGKTVRHRLNRGGDRGANSALHMIVVGRIKSHAPTRAYLTRRENEKTKKEIIRCLKRYVARELYKAFTTDLGALDNL

SEQ ID NO: 222926 - protein, 351 aa, unidentified
MIIIGVDYHPSDQYIALVDTETGEYEERQLNHSDGEAEKFYRELARRGASVRVGMEATGYSRWFERLLAELGMELWIGNAAEIKTKRVRKQKTDWEDARLLLRLLQEKNFPRIWVPCPENRDLRQLLWHRHRMVQMRTRIMNQLQALAMNEGQRRKKKLWNEAGRAQLEKLPLAFWASRRRQDLLGLLDRMNPTIEELTRAVEQEVKKWPEALRLMTHPGVGPLTALAFVLIIGTPKRFRRGKQIGSYVGLIPSENSSAGHQRLGHITKQGSSLLRFLLVEAAQAAARCDADWRRRYVRLAVRRQRNIAKVGMARRLAVRLYWMWRNGWEYAQWVKFSSHAGQLGTGQGVK

SEQ ID NO: 222927 - protein, 412 aa, unidentified
MAMEALVERCAGLDVHQASVVCRVLLGPPGCRPRKLLRTFGTTTHELGKLRAWLAEHGVTHVGMESTGIYWKPVYAALEGHFDLTVGNAHHIKNVPGRKTDVKDAEWIARLLRHGLIGKSFVPPPPIRDLRELVRFRRALVEARTAERNRLLKLLEGAGVKLAGVASDVFGVSGTAMLEALAEGAAGPAAVADLARGRLRRKLEALAAALDGRVREHHRFLIAVRLRRLEAIARDLGELDARIEAQLEPFRAQHRLLMRIPGVDRVVAAGIIAEVGVDMDVFATAQRLAAWAGLAPGNHESAGRRKGAATRKGNVFLKATLFAAASAAVKTKGSYYRDKYHRLRARRGPVRALVAVAHKLLTAAFHTLRTGGPFRELGEDFLDRVSRKRSTTKLVRRLAALGYDVLLVPKAA

SEQ ID NO: 222928 - protein, 386 aa, unidentified
MRKGTKRGPGPSHLLITPDHAGNVVGIDPHKRTLTATVVDARAGSLGSEHFRVSGDGHRALEAWARQYGQIARWGVENAAGWGRHTAVFLIGRGYDVRDVCANRTPRQDRARQRGKSDTLDSERIAREVLAHPLLPKAFKRAGQDQGPDELHQLLALWHNRRRSILTSRQHLVNEAEQLLCELPLTVRDRLPGSRAVRPRLAALARRNRRRRYDPPTRLRLQMLDGYRAQIQGLDREEKQVVAQLAALVRQSGSTLGELCGLNTRSVAELLVETGDVRRFTEGGFGRFNGTAPLPASTGEGPGEPIRHRYNPGGNRRINAVLHRMAITQLRCEPRAQAIYANARANGHTKKEARRILKRHLSNVVYRRMIRDLAAASHPSQALLAA

SEQ ID NO: 222929 - protein, 347 aa, unidentified
MRFYTRQHLHYCGIDLHARSLYLCILDQKGQTLVHRKLPCERELLLKALSPYRKDLVVAVECLFCWYWVADLCNEQGFEFVLGHALYMKAIHGGKTKNDRLDSYKIAALLRGGNLPYAYVYPRQMRATRDLLRRRLFFARKRGELLAHIQNTNTQYNLPPLDERAGKTKDRGAIIEHFDDDTVQMSIASDVALLDSYDEVIRDMELYLIHEVRKDHNREFYLLRSIPGIGEILSLTLLYEIHDLSRFPRVQDFLSYARLVKGAHESDGKKKKRTGGKMGNVHLKWAFSEAAALFLRGNSVGQKYFTRLEKKHGKGKALSILAAKLGRAVYYMLLRNKPFELQRFVAA

SEQ ID NO: 222930 - protein, 452 aa, unidentified
MARTSKRTRNIEEAHPFTGMSQVNPNAAGVDIGAVEIVACVSSNATRQMVKAFGNYTIDLQSIGKWLTEYGIKTVAMESTGVYWIPLFEELERQGFKCLLISSRSLRRVPGRKSDIVDAQWIQTLHSYGLLESSFRPEADLASLRAVLRHRAQLIEHRSPHILHMQKALLQMNVQLSQALSDITGDTGLAILRAIIDGERDPQKLASKRDRHCKKSAEEIAKALTGTWREEHLFVLKQSLALYDFYTEQIAECDQQIERMYGTIRPDWKSGALQPLPAKKRNSHSKNGPEHQIESREHLKRIGVVDGFGISLAQMVISEVGTDMSKFPDEKHFCSWLGLAPKHEISGGKILNNKTLKTKNRAGQAFRMAAQSVKKADCVFGSFYRRLRARLDNAQATVATAHAIARTVYRMLKYKVEYETINVEEYEKKYKEQQIKYMKKKAAKFGFQLIPV

SEQ ID NO: 222931 - protein, 410 aa, unidentified
METIVKRAAALDVHKARLTGCVRLPGRGRERRQEVAEFETTVRGLLLLRDWLQAHAVTQVAMEATGVYWKPVWAVLEDEFDCLLVNARHVKQVPGRKTDVSDAAWLCQLLEAGLLRRSFVPPKPIRALRNLTRYRKAQIGERQREANRLHKILEDSGIKLGCVATDILGVSGRLMLDALVAGTTDPELLAELAKGKLRAKIPALREALVGRFDRQHALIVSAILAHLDFLDEQIELLSAEIEAQLAPFQAAVELLCTIPGVQQRTAEVIVAEIGTDMSRFPSERHLASWAGQCPGNDQSAGKRRSGTTRHGSKWLDTALTEAALAATRSNDVYLAAQYQRLRPRRGHGRAIGAVKHSILTSCWHMLQTGELYHDPGGDYFSRQNPERATRRLIAQLERLGHHVTIQEAAA

SEQ ID NO: 222932 - protein, 363 aa, unidentified
MIVIGADIHKSTHALAAVSGDGGTVAGELEIRADESGHRAALRWARELDEERVWAIEDCRHLSRRLEQALIAAGERVIRVPPKMMGQSRRGEREPGKSDQIDARAVARAVVREGVERFPAAFLDERALEIRLLGDHRSDLVAERTRQINRLRWHLVDLCPELEATIAARQLDSTVALDRIARRLRREERSARTRVALELVGGIRAISRQASGIERELRTLILAYRPVLLGERGLGVLTAATLIGRTAGAERFPTDAHFARHAGVAPIPVSSGRKDRHRLHRGGDRQLNRALHVIAITRARIDPQTREYLERKRAEGKSNREALRCLKRHLARHIHRLLSMPPTNPDRRTRIQLNTAISVPCLT

SEQ ID NO: 222933 - protein, 419 aa, unidentified
MKNWNQIAHYAGFDWAKDHHDVIILDASGKIVADFRFEHTASGWEQFREKIAGFPDLAIAIETKHGTAIERMLEMECCIFPVHPQSAKAYRQRKVPSGNKTDRVDAWSLADALRLDGINWKRLAPQEPLIKELRLICRDEVALIRDRTALITQLRQALYDYYPAALEAFDDWTMPAAWAFVIAFPTPQLLAKAGKRKWEKFLHVHKLGRPETYQRRLEIFARAAQFAGSLPVINAKSRLAVARARQLQLLETQIGEYRREIRRLFAQHPDATLFNSLPGAGDKIAPRLLSEIGDDRTLFPDAQGLQCLAGTAPVSFQSGQIHRVHLRRQCNKSLRNAVHLWANLSREFCPWAATYYTALRAKGKSHACALRALGQRWLKIVWKMWQTRTPYDADLHARNQLKHGSWVLQLVNQPAAGKA

SEQ ID NO: 222934 - protein, 338 aa, unidentified
MTSIAHTRQVTVTRIICGVDVSSDSLEARIGREGAAASFPNRAEGMAELAAFCHAQEVELVAMEATGGYEQQAFAQLSEAGLPVAILNPRSVRKFAEGMGRLEKTDRIDAGMIAWYAEVRQSSPACLAPQNQQQLRALVTRLRQLTDMRTAQMNQQRLVTDRSVQASFAKLLAFVAGQIRDLEQRIRKLIGQDPLWRELDQAFRTIKGVADRTVCRLMAEMPEIGTLSNKTISKLAGVAPLARDSGKYQGKRAVRGGRASVRDILFIVAGVVGRYEPDFMAFQQRLRGAGKPPKVVRIALAHKLLVRLNAKARQVREHMAATKACTPGPVLLRKCISL

SEQ ID NO: 222935 - protein, 313 aa, unidentified
MNENQCFVGIDVSKASLEVALRPSGRQQSFSNDDEGVARLVQWLRGEASSLIVLEATGKFELPLARALAMEGLLFNIINPRQARAFAKAIGILAKTDRIDALVLARFAEVLQPEARTLKTEETEALSDLVTRRRQVVEMITAEKNRQGTASKRIHRDIQTHIRWLEKRLEDLNDDIDELIRKSPLWREKEKLLQSVSGVGPVLVSTLLGALPELGTLNRKQIAALVGVAPFNRESGRYRGKQTILGGRGPVRSVLYMGTLAAIRYNPVIRVFYQRLFEAGKPRKVAITACMRKLLVILNTMIKNGTSWKHQPA

SEQ ID NO: 222936 - protein, 412 aa, unidentified
MKDLLEISCGLDVHKEKIVACILTGPLGKPTHSEIREFSTLIPDMIALRDWIVSRNCHHVAMESTGIYWMPIYEILEDAFSGDITLLVVNARHMKNVPGKKTDMRDSEWISTLLRAGLLNGSFIPEKRIREFRDLNRYRKSIIRDITSQKNRIEKFLQSSGFRLSSFISDIFGASGKNIILHLIEHGQIDRTALDSCLKTKTRNHIDEILMSVNGTLSEHQKKFLKILMNHYDSLKEHLNEIEKDLEQDIEPFILQVQQLNSIYGISTTASCAIIAEIGVDMKPFKTAEHICSWAGLCPGNNESAGKRKSTSVTKGNPYIKSMLCEIAWVIAGKRNTYLSAWYWRIKQKKGAKKAIVALARKLLVIIYTMLKQGTLFDESCFEARRKNCEQKQLSRYIRELEKHGYHVEAQG

SEQ ID NO: 222937 - protein, 389 aa, unidentified
MMTQTLTAASKPVALDYDNTLVVAIEVSNVRWVLAAQVPGLPRLKAKRSVEPTAEALMAAINGYRNRAREAGRMVERVIAVYEASWSGFWLARWLERGGIEIHTIQPSSVPVDRRARRAKSDGIDAELLLRTLLAWLRGEPRVCSMVPIPDEADEDARRFIRERAELVAERVSLVNRIAAVLATLGVRDYNPLLRNRRGRLDELRTALGTALPPQARAKIVRMIDRLELVQAQVAELDQERDAVLEDRAPDKAAKMIQQLATLRGVGVQSATVLVREAFVREFPNGKALGSYAGLTATPYSSGGAEREQGISKAGNRRLRTVMVELAWLWHRYQPGSVQVSWFRERANAAGRRARKVMIVAMARKLLIALWRFATQGVIPEGAVLKPAA

SEQ ID NO: 222938 - protein, 427 aa, unidentified
MPYRIAGIDVHKKMLAVVVSDVEVYGEYQFERRMFGSYPEALHSLATWLVEQEVEEVVMESTAQYWKPVWGALERYWKPIGQKREGAHPKSGTLHLAQAQSNRGRRGRKKDFPDAERLVKRLVANELVLNFVPDTEQRLWRTVTRRRYQLTRNRVRLQNRLEALLEEAHIKLSSFVTDLLGVSARRMLKALAEGETNPATLATFADRRLRATPEQLRDALGASTELDPVYRRLLKMMLDELQLIEDQISQLDQEMAGLLRLHQDAVQRLAEVPGLGVDSAQQIIAEVGPAAANFPSGKGLSSWVGACPGDQESAGVNYSHRSPKGNRHMRRLLNQCANAAVKMKGSVFEIAYHRLVPRLGHNQAIGAIAHRLCRLIWLILHQEVRYEERGPAVSKRSKQKRTARMIRELRALGYRIEALNVQTVASM

SEQ ID NO: 222939 - protein, 417 aa, unidentified
MNLTPETIPIDRYIGIDIHKYYVMVGGQNRRQEWTLRPRRIQMNRFRDWAEKNFRLSDAVVIETTGSVWDIHDIVSPLAGMTLVANARSIRQIAEAKVKTDKKDIERMLTQLISGTVPEVWVPPVHVRELRSLISFRWRLNKQITMSKNRLQSVAQRFNLDLPEGGLLTEKNRGWWEEQEFTDLTGFEVKQDLEIVKLLEDQKEALDQKLAELSNTEPWASDMVFLMQIPGMGLILSMAVLSAIGDITRFSHAKKLVSYAGLSPEVHASGETNRSKPITKEGRKELRWAMVEAAWVAVRFNPYWKAQFKQLEKRMHRNQAIVAVARRMLVSIWHILSKREPYRHFDEEDLAYKMLIWAWAMDESSRKGMTPQQFAKYGLLRLGVGQDLERIVRGGAPRRIAPTEEILALKPELAPPR

SEQ ID NO: 222940 - protein, 322 aa, unidentified
MDAIVVGIDVSKDKLDIAVLPQGQTFAISRDAKGLDGLIARLKPLAIEAVAVEATGGFEAVVAASLAAEGLPVIVVNPAQVRAFAKALGQRAKTDPIDAMVIARFAMATKPEIRPLPDEATRFLNDLVCRRRQIIEMIVAEKQRAMRLSNKRLQQSIARLIKALEKELAGLDTDIDVAVRGSPAWREKEVLLISVPGVGKSTARTLLAVVPELGALRAREAGSIVGCAPFTRQSGLWTGKSFISGGRPAARSALFLSALVAMRHNAQMKGFYERLVGAGKAKKVALIAVARKLAVLLNAILRDKRPWRFSSNQGLAHAEASI

SEQ ID NO: 222941 - protein, 338 aa, unidentified
MPLYGGIDLHANNSVVVLLNEQDQVIYQRRLANHLPTILEPLALYQADITGVVVESTYNWYWLVDGLMDAGYRVHLANPAAMQQYSGLKYTDDYSDARWLAHVLRLGVLPEGYIYPKAERAVRDVLRKRSHLVRQQTANVLSLQNIIVRNTGVRLSAKRMHELTLEECERLLPEPDQVLAVTSSLAVLHCLRQQIKALEKLVHKRLQHTPAYEQLQTVEGIGTILAQTIVLETGDIRRFPTVGNYASYCRCVQSTKISNGKRKGQGNVKNGNPYLEWAYMEAAQFAVRFSPTVQRFYQRKQAKSHLMVARKAVAHKLSRACYYLMRDLVPFHVHKAFG

SEQ ID NO: 222942 - protein, 290 aa, unidentified
MTTYFGVDFHARQQTICYCDTADGVIHCRELRHDKDDVRGFYSQFTGEVIIGLEASGYSTWFVELLESIGHQVWLGDATEIRRRARRRQKNDRRDAELLLDLLLREEFPQVHRPPFASREILRLLRYRHRLVQMRTKIKNSLQALAFSAGSAKRATLLSQKGRARFLQLPMSGAMDRQRREWLCFVAEFDERIKELDGWLTEQAEQDERVLRLQTHPGVGLLTSLALVHSLEPVSRFAGGRKIAADVGLEPMEYSSGDKQRFGSISKGGSRLLRYLLVEAAQTASVEMKS

SEQ ID NO: 222943 - protein, 316 aa, unidentified
MSASPLFVGIDVAKDELVIALGPSRDLVAVPNDESGIRHVLEHLQAASPALIVLEATGGYETAAVAALAAAGLPVVVANPRQVRAFAKAMGILAKTDNIDAHVLALFAERVRPPIRPLPDEALRMLDALLTRRRQLIEMLVAERNRLAHALPPVGKSLKQHIRWLERRLADVDSDMDQAIQQSPVWRAKEDLLRSVPGVGPVVSRTLLADLPELGALNRKQIAALVGVAPLAKDSGTLRGKRMVWGGRAPVRAVLYMGALIASRHNPVIRDFYQRLVAAGKPKKVALTACMRKLLVILNTMVRNNTRWGERYALSA

SEQ ID NO: 222944 - protein, 339 aa, unidentified
MNRTAVGVDIAKNVFQLDYIDQDTGEIVNKPIKRAKFLEHFANRAPCLIGMEACGGAHHWARQLTKMGHEVKLMPGEFVKAFNIRNKNDAADARAIWLAVQQPGKPVAVKTEMQQAMLGLHRMRQQLLKFRTMQINSLRGLLTEYGEVMSKGRSKLDKKIPVVLERLAERLPAVIIDTFREQWSGLAKLDEQVAQIERRMREWKKEDKSVKAIGEIPGVGLLTATAAVAMMGDPKAFSSGREFAAWVGIVPRQTGSGGKVNLHAISKKGDTYLRTLLIHGARSVLEHTKEPGEWIGQMKKRRPKNVVVVALANKMARTIWAVLAHDQPYRKDYISVKPA

SEQ ID NO: 222945 - protein, 320 aa, unidentified
MMAQNDLVVVGIDVAKDKVDACIRSLSLRQSCPSTAQGYRKLVGWLRKHQVNKAVMEASGGYERDWAKVLRQAGIEVRVVDPKRVRSFALSAGRLAKNDAIDAEMIAWFAETFSEAPGQVHDAAHEELQILVKARLSLIDFRMRLESQSEHATPGLVQKAQAHVLKSLASEIAKLEAAISAKIKSTPDFAERAEIIESVPGFAKTSSANLVAGMPELGRVSDKIAAALIGVAPYDDDSGKRRGERRIKGGRRWVRNAIYMPCVGAATLNNPVLKTYYQRLIAKGKEPKVALIACMRKLIIILNTMIARRQKWDPSRYVLS

SEQ ID NO: 222946 - protein, 343 aa, unidentified
MELYAGLDVSLKETSICVVDGKGEIVSEGTVISEPAAIAEFIKAKADGAKRIGLETGPTTTWLWHELRAFGLPVICIDARHAKAALSMQINKSDRNDAVGLARIMQCGWYKEVQVKSVSCHEIRAVLNSRAQLVKIKRDLENQIRGLLKNLGLVIGKAGGTVFRRRVEELLGRQGLLWEAVRPLLAVREIVRREIAALHRKLLGLARNDVVSRRLMTVPGIGPINALAFCAAIDDPARFRRSRSVGAYLGLTPRRHASGEIDWTGRISKCGDAMVRSYLFEAAGVLLTRVPHWCALKAWGLRLAKRSGFKKAKVAVARKLAVILHRMWRDGTDFIWSTKEAAA

SEQ ID NO: 222947 - protein, 362 aa, unidentified
MPGTMTFVGMDVHARSMHAAAIDVMSGELTRWRFRGDLETPVAWLRSLPGPVWACYEAGPTGFGLYRAARAAGIRIDVIAPGKTPRGRSDRVKTDRKDAELLARNLMAGSLTAIPVPSVQVEAARELTRAHDTCRRDLMNARHRVSKMLLRHGRVYPKPSSTWSQAHRQWLAGQRFADPISELAYVDLLAAVDGLTARKQALAERISRLAIEGEWWPTVARLRCFRGIDTLTALSVHLELSADWARFEKAHRVGSWLGLTPSREQSGESDRQGSITKTGSTLARRLLVEAAWQYAREPRIGVTLAARQAGQPDHILQIANRAQHRIHRVYTRMRSRGKPHNVTVVACARELACFLWAAATAP

SEQ ID NO: 222948 - protein, 418 aa, unidentified
MLKLGLTKNIIMSTTKKICCGLDVHKETIFAAINANGKAGEVKEYSTLTCQIRAMSEWLKANGVTDIAMESTGIYWIPVWNILEAAGFRLTLVNPYFIKQMPGRKSDIKDSQWIAQLLAKDMLKSSLIPCHQIRTLRAYSREYVKRQQSITRIVVGMERTLETANIRITSMVSKIESKTVLNIIELIIKGETDIGKLLEKVHGRTKNRKGALVGQSLEGFVLAEHRFLLEQQLEEYRLYHKQAGELQKQMLAICKEHYAKEMELLKTMPGTDDQSVMQLIAETGADMGAFETSNRLSNWAGLCPRNDESAGKIKSKATTKGNKYLRRIIVQVAWAASRTKNSSYYNKYNQLAIRKGRKKALVAVARKQLTVVWNILKYDQPYDINKQPVITAEQIQAKKKYYQKELDKLSLITITTAQ

SEQ ID NO: 222949 - protein, 315 aa, unidentified
MASGVCIGIDVSKASLDVAFGSQGEVRSVANESGAIEQLAAQLKQLQPERVVMEASGGYERLLAGLLWDAGLKVVIANPRQLRQFREGMGQHAKSDRLDARMIALWAEHKRPEVRPLPDAEARELSELLARRRQLIEMLVAERQRLARALSRPLRKELKASVGSLERRLRQLESEIETRIGKSDLWRRTRELLESVPGVSKATSFMLIAELPELGTIDRRRLASLIGLAPFVRQSGQWRGRQMIGGGRAKVRSVLYMAALSAAHWNPILRVFYQRLLQRGAAKKKALIAVARKLLVILNAIVRDRTPWREPCPAA

SEQ ID NO: 222950 - protein, 347 aa, unidentified
MKQVSTIGLDLAKHIFQVHGAGADGSPVFNRRLRRSEVLHFFSKQPACLVGIEACGSAHYWAREIATLGHEVRLIPPAYVKPFVKRGKTDAADAEAISEAVTRKTMRFVPIKTAEQQAGTMVLKSRALLVKQQTQTINALRSHLAELGIIAAAGRTKVEALVAIVRDVADIRLPAAARFALTAVADQIEAQADQIDKLERAIVAAARTDKDMRRLTTIPGIGAITAATIKALVPDPGGFKSARHFAAWLGLTPRQHSSGGKERMGRISKMGNPELRSLLVLGATSVLRIARKADRAPPWLKSLLARRPYKVAAVALANKTARIAWALLNRGGIYRHPETLATTTPAA

SEQ ID NO: 222951 - protein, 418 aa, unidentified
MKGLSKSVVPAGRPLTPKARASAREPVLQIGPPPSSPRLRRIRGFVSLRYQGQSETIQGRGAGTTAYCREAVMDKFDPCGIEVSAQELVVALSRDERAERLRSFPNTAEGHVAVCRFLASGSQRVRVALESTGLYGLDLAYALHREAHIEVMVANPRAVRHFASALMQRSKNDRLDAVVLREFAARMPFQAWVAPSPHCLALCAVTRRLETLTEQSTAEKNRLHAASLSVAIPSVVRRDLQRSVRSIQRAIVRLTKEARRILEGDPLLASSYHLLLTAKGIGPTSALRLLAETALLSEDLDVRQWVAYAGLDPREYQSGSLVHKKVRISKTGNRHLRRALYMPALVAVRHEPHLRAFYQHLLAQGKCKMQALVAAMRKLLHAVYGMLKRRQPHDGAKLYRLVVDSHAPSSEHCSAEAA

SEQ ID NO: 222952 - protein, 369 aa, unidentified
MQEGTTYVGLDAHQESTNGAILLASGEVLEDRFATTSEGIRRWMRKLKRRCKGRIVCGYEAGPLGYALQRTLVSLGVKCIVIAPSLIPFKPGDRIKTDRRDALKLAELLAAGLLTEVHVPTPEQEAIRDLCRARGSVKGDQKRIQHRLSKFLLRRAIRWTSGRKMWTRAHREWLRGRRLGHAADQAVLDDHLLALEQNEGRLAALDEKLENWSTQEPYAQAVGWLRCFRGIDTLTALSVVAEIHDWRRFPSPRALMAYLGMVPSESSSGGQFQRGGLTKAGNHRVRRLLIESAWHYRHRPSVGRPLAKRRAGQPAAIIAIADRCQQRLHSRYLRLSARGKNHNRVISAVGRELVGFLWAAMQRTDIQSA

SEQ ID NO: 222953 - protein, 476 aa, unidentified
MARDPVREIIDITVWPDLQPTGEGMDNQLGNSNGLSLERIELSAAGIDVGATEIFVAVPPDRDQQPVRSFKTFTDDLRQMAAWLVQCGITTVAMESTGVYWIPPHEVLEEAGIRVCLVNSKHVKHVPGRKSDVSDCQWLQYLHSVGLLRASFRPESEIRAIRALSRHRSSLIEIASVHVQHMHKALTQMNLQIHHVLSDITGLSGMAIIEAIVAGERSPVRLAALCNQRVRSDQETVIKSLVGNYRSEHLFTLKQSLTAYKHYQELIADCDREIERLMRLLNGKIDPPPSSPATPTDPRFQKRSKNQFRFDMASELTRVFGVDLTTIPGISGLTAHTLLAEIGPDLSRFANVAAFASWLALCPANNKSGGKVLSSKTRQTNSRASHALRIAAQTLARSKSHLGNFYRRMRARLGGPQAITATAHKLARIVYHLLTTGQAYDETVFVREDQKQAQRHEKRLRKQAKILGFQLVPIAP

SEQ ID NO: 222954 - protein, 416 aa, unidentified
MTFKIVRFICGGMDVHKNLIVATIGTTDKQTLTTEYIQQSFSTFYSDLIRLKEWFISHDCYDVCMESTGKYWIPIYNVLETELNICLTHPKYVKAIKGKKTDKRDSKWICDLYKCDLVKHSFIPEKEIREMREIARYRCKLVYMRSSERNRYQNCLTVSNISLASAVSDPFGKTATNIMKELMQSEVIEDDKILKLIHKNCKDKDKILDSLQGYRIESDQRFKMDTVMNHIEYLDKQIQACEAELIKRAYPLRDYFQHITHIKGISALSAILIVSEIGTDMNQFESDKQLVNWAGLSPANNESANKKKSVRISKAGQYLKPLLVQCALSSIKDKNSYFGIKYCRIKKRRGHKKAIIAIARMMLVCIYHMILTGEEFNPCDYESLTNPKPKKEPTMTVESALQFLKDSNFDFSSIQL

SEQ ID NO: 222955 - protein, 402 aa, unidentified
MLPDHLNNPTAIRMQFGAIFVSLELSRKTWLITSLSPGKGEKMSKHSVTAGDIAGLLARFSELQRKAAVRTGKSFPLIVIQEAGLDGFWVHRVLQQEGIESHVVDPASIAIPRRRRRAKTDKIDGEALLRALLAYKRGEPRVCSMVVAPSPEEEDQRRLCRERDTLTAERVRHVNRIKGLLFAQGIADYMPLSRNRRKRLDELCTGDGRPLPQYVKAQISRELDRLELVLEQIKVVEKERDRVLLSLAPVVVSMGPEAVCDQPRRASGVRMLTALRGFAANGATKLWSEGLSRHFSNRRQVAAYAGLAPTPWQSGGISHEQGVSKAGNPRLRTTMVQIAWLWLRHQPQSALARWYFARVGVGATKARKKVAITALARKLLVALWKYVSAGELIEGAIMKPVA

SEQ ID NO: 222956 - protein, 459 aa, unidentified
MKKPGVSGNKIRKKITVMTHVVEPNAAGIDVGTTEMYVAVPADRDAQAVRRFSTFTNDLILIADWLKSCGVTSVAMESTGVFWIPLFQILEDRGFRVCLVNARHVKNVPGRKTDVADCQWLQYLHSVGLLRASHRPKQAICAIRSVWRHREGLIQIAAVHTQHMQKALDQMNIQLHHVISDITGVTGLAIIDAILDGERDPHKLARLRDPRIKASEQTVADSLVGDYRTEHLFVLRQSLKAYRQYQQWIIDCDKEIERQLKHIESKIDPVQQSLVSTKEDRRKPRGNEAHFDLRNNLYRVFGVDLTDVPGVSSLTAHVLLTEVGPDLSRFPSAAAFASWLGLCPDNRISGGKILSVRTRHVVSRLAIALRLAAQSLYSSRSYLGDYFRRIRTRLGAPAAITAAAHKLARILYHLISSRQPYDESVFSLLEERAKQRQISVLKKRASAFGFELKPVEMVP

SEQ ID NO: 222957 - protein, 348 aa, unidentified
MEITKMSYGIDVSSESFTVSQGVLFANTKNEISHTCSFTIDVKGFKSFLKYVNSLNKKYQSNAGIQPWFVMETTGVYYEKLAHFLNDKGFNVSVVLANKMKAFSRVVSPKSRTDEIDSRTIALYGLERQLQKWDPPSEFISCLKELSREANDLNEQVAMIKNRLHAKKHSHKPDQLVIKRLKDQITFLKKQNAQVKKQINDVVKTNNAFSEKVKKITLVKGLREYTVVSVVAEMNEFKHADNKRQVVSYAGLDLKIDQSGKKDSKRRISKQGNSNIRRALYMPALSSKKHEKKLKLLYDRLCQRYNFKDKKRAIVAVMRKLLILIYTLWKNDTAYDPDYYLFNKSIAI

SEQ ID NO: 222958 - protein, 354 aa, unidentified
MSKDIILTVDYHDRACVIRRLDRGADREQVFTEIPTTAASLGQVVDQARRDLGRRGRVVWIQESTTGWARVRELLADRVEFNLANVLQMPLPPKARRRKTDKVDTARMQREYLAGTLPLAYQPPAAWRQLRRLVAYREGLVSRRTAVRNWIDRYLAHETWFDRTGLWSPRGQRRLRALLEGWPRTDRVILAEKLDELARLEGQLGVALKELVAAYRDCAEARRLDAILGIDVVSAVSIVARIGPVERFGNAEALIAFAGLAPGIQESDRTRRDGRIGGGGTDRHLRHYLIEATVWARKLPRYQTTYERMKKRRGSKVGRLVVARMLVRSISKVLKDEVAFDPGVPPRTTPAAAR

SEQ ID NO: 222959 - protein, 303 aa, unidentified
MSKEWLDVHLHPLGESRRFSNDKTGIRQLKRLLARHQPKSIVMEATGKFHRPAHRSLWLDGFAVAVVDPLRARMFARACGYLAKTDRLDARFLALLAESLRPPADTPPSPHIEALQELVNARSAAKCDITALQNRSKTATTALLRGELNRLLRRLEQHVERLDKEIERCVGEDPQLCRKAEILTSIPGIGRVTALALMAGMDELGSCSGKQAAMLAGLAPIANDSGARTGRRSIRAGRPAPRRALYMAALSARRYNPALARFADTLKAAGKPAKVILVAIMRKLLVLANCLLAHDRIWTPNPP

SEQ ID NO: 222960 - protein, 352 aa, unidentified
MTNYKYVGMDTHPASITTEVLNANGRVVSKSIMETHPEQIRDYFRGMSGTVHVAFEEGTQAAWLYEIIKPLVAEVIVCNPRDSKLSRSGNKSDKIDAHKLATLLRMGELKPVYQGEARTRELKETVRSYSGLSKDTRRVMNRIKAIYRGRGIVCKGTHVYEPGMREQWAMRLADNTRNRLELLYRELDCLSCLRKTARAELAKQVRRQPAWKILKQVPGLGPIRIAYIIGIVSTPFRFRTKRQFWPYCGLAVVTCSSSDYEVVGGKFRRSKKPIGTRGLNRNYNRDLKYVFKSAALHASTREPFKPYYDRLIANKMKPELARVTLARKMAAITLAIWKKGEGFDADRLIQEA

SEQ ID NO: 222961 - protein, 433 aa, unidentified
MARYVGLDVHKRTIAACMLDCEGRPVRRATFDCTRTAIAQFAKEQLEHSDVVALEATTNSWAVAEILEPYVARVVVSNPLKTKAIAESTVKTDKVDSQTLAQLLRVGFLPEVWHPSGPFQLLRQLTVFYASLINDRTRVKNRLQSLFHRRLIHCPVSTLFSQAGLRWMDSLEVSEHDRLILELAKQQVFDLDAKSREVEQRIARLAQNDHSIKLLMTLPGVSLMTAACLVGAIGEVARFRDGDHLAGYFGLVPRVKQSADHCYYGSITKVGNNQVRKMLVLAARNLRTHPGPLGAYFRRMAKHKHINVAATATARKLVTVAYLILKNGEPYRYAQPATTSQKFGQLHALATQSKRAPVRVEAQPDEPVPPAGYRLQRRPALDQVLVRDGLEPIHWQAVPKGEKLVMQNFPIISRESANRQPRFAKARKPLHRY

SEQ ID NO: 222962 - protein, 354 aa, unidentified
MIWLGADLHKRSHTLAAVASATGELLGDRTIRVGEPGFAAALAWARGLGSERVWALEDCRHVSGSFERFLIAHGERVVRVSTRLMAGERRGSRDRGKSDRIDAIAVARAAIREGVEQLPQARLAGVELDLRLLVDHRDRVIRMRTALQNDVLWHLHDLWPEQSFPRNALVSRKWGQPIARRLARAEQTARVRIAREELRQIRDLTRSADALEAEIAELVGQVAPHLLDEPGFGPLTAAKLIGEIAGADRFSSDAKLARASGIAPIPASSGKTQRHRLDRGGNRQINAAIHRVAVTRARCHPESRAYIERKRAEGKSSKEAIRCLKRHLVRRIWHLLQTPAPDPTPTAITTTSLT

SEQ ID NO: 222963 - protein, 369 aa, unidentified
MNTTTFVGLDVHARSIKAVALDAMTGEIKSATFGYDAEAVASWVSAADPSAKCVYESGVTGFDLQKKLTALGVDCVVGAVSKMIKPSADRRKKNDRNDAEFLARMLSVGNIVEVWAPDDGCEAARDLSRALDDARDDLKRCKQRLSKFLLRHGYAFSETTPSGRRRGNWTAAHWAWIKSIEFAEKADNDVLAYYIDATRQAMEDKARLERLVAAEASKPRWKRRVDSVRCLKGIDVASAADVVFEAGEFSRFKNARSFAAWLGLTPSEHSSGESVRQGGITKAGNKHLRRVLVESAWHYLGCSPHSKDLAKGKTPDPAARRHAAKGVRRLVDRRAAMLDRGVQKNKANVATARELACWCWAVGIMAEGA

SEQ ID NO: 222964 - protein, 392 aa, unidentified
MIYVGIDIAKDKHDCFITNSDGEVLFKSFTISNNPDGFETSFQKIQSVSDDLTKVKVGLEATGHYSYNLLGYLLDKGLPTYVINPLHTNLYRKSLSLRKTKTDKVDARTIASMIMSDVNLKSYSDTSYHNEELKSLTRYRFDKVKERAKLKTSVSRLICILFPELEKLVPTLHMASVYALLSEFPSAHAVASAHLTRLINLLSQSSKNRYGNDTAVMFREAARNSIGSNMPTKSLELKHTIKLIQELTSEIDEIEAAIKQIMDEEIQSPILTIPGISYRMGAMIIAEIGDFCRFDSADKILAYAGMSPSTYQSGQLDNCYSHMEKRGSRYLRYALYNATKYVCHWDKSFGEYLAKKRSEGKHYNVAISHAAKKLVRLIFAMEKSGKAYLPTV

SEQ ID NO: 222965 - protein, 362 aa, unidentified
MTKVRTWVGLDVHAAKVVACVVDAESGEMTVCRLPGGTSEVVALCAGLPGPTRVGYEAGPTGFGLARALQAAGVVCVIAAPGKIERPAQDRVKTDRRDAERLVRLLMINGLHPVRVPSGEEEALRDLVRAREDLRGDLMRARHRMGKLLLRHDVRYDGVGDNWAHRHRQWLSMVRLPERGAQATLLDYLGAIDALVIRRDQVEATISELVPGSPWAQDIARLRCMRGIDTLTAVGLCAEVGEFERFGKARQLMSYLGLTPSEDTSGEKRRQGAITTTGSRHARRLLVEAAWHYRRPPAKGQALRRRQVGQPAHIVEISWQAQRRLHRVWQRLDTQRGKRRTIVAVAVARELTGFCWALANAD

SEQ ID NO: 222966 - protein, 287 aa, unidentified
MTEITTIGVDLAKSVFQVHGIDAEGAVVLRRQLRRSQMLSFFQSIPACLIGMEASAGAHHWARELGRLGHDVRLMPPSYVKPYVGRGKTDQADAEAICEAVTRPSMRFAPVKDEATQALLMAHKTREFLVCQLTQVTNAIRAHLGEFGIAAPKGMHNVGRLLEAGERADLPAAARGPVRLLAEQFFETRDWETRDWIDALTKDIRREAETSKAAKRLQTIPGIGPITATALAATLPDVRVFRTSRDLSVWLGLTPEPHSSGGKEKLGRISKMGNRSLRRLLYLGASC

SEQ ID NO: 222967 - protein, 320 aa, unidentified
MSAFSVVVGIDVAKAHVDVCVLGAKLDAQRFDNLSEGHSALTAALKPLDIALVVMEATGGFETELACALQAAGLPVAVVNPRQARDFAKSMGRLAKTDAVDARMLAEFASVLLRREDLGRFLRPLADPQQQWLAALVTRRRQLLAMMLSERQRLQITPKGLHPSIEAIVAAIKAQLDDIEAQMVGHVREHFSELDRLLQSASGIGPIASATLIAQLPELGRLNRREIAALVGIAPMANDSGSSKGRRRIQGGRFDIRRVLYMAALTACRHNPAIRAFYERLIAAGKLPKVALVACMRKLLTTLNAMVRTNQPWKNSLHRG

SEQ ID NO: 222968 - protein, 434 aa, unidentified
MNENAGGVDGGAEYHYAAVPEDSTEGPCTRKFLTNTRGLYELADWFVECGVKSVAVEATGVYCIPLLEVLEARGIEVLLAKPSSLKWVNDHQKTDMLDCQWIQLLHTFGLLRGSHRPTVAVAAYRTYNRHRQGLIAKAATEIEHMKKALTEMNVRIDQAVTDVTGKTGMRIIRAILAGERDPEELARMREDGCAKSEAAIAEDLRGKYADQHLFTLEHAVRTWDYLQKLIGECNQHLEKHAQAFEKQASREMIPKARRVEKVRKQSLTFEARELFYEVFGQDLTQIDGIGTSTLSVLLAEVGTNVDAFKTEKNFCSWLRACPGLNKSGGKNRSGKNRATTNRLWTALRIAAQTLSSSKSALGAFYRRKRAHLGPQKAINAAAHKLARMIYFTIKYQRPYVDPGPDHYVKTHHDRIIRTMEKRARQLGYTLIKAA

SEQ ID NO: 222969 - protein, 346 aa, unidentified
MEHYAGIDVSLELSSVCIVDTQGKIVKEAKVASEPEALVDFFGSLHFAVKRIGLEAGPLSQWLHAGLRRAGFETVLLETRHVKAALSAMTVKTDRKDARGLAQLIRMGWFRPVHAKSMGSQEVRALLVARKQLLGRLIDVELSIRGILRGFGLKVGAVTRKGFEARIRELATGQATLERIAGAMLSARATLRAEYEKLHKAVLAIVREDAVCRRLMTVPGVGPLVAVTYKSAMDDPSRITKSKAAGALFGLTPKKYQSGEKDVTGGITRTGDEMVRTALYEAANVLLSRITRFSKLKRWGMDVAKRRGSKRAKVALARKIAVILHRMWVDGATYRWTAAEQIAGQA

SEQ ID NO: 222970 - protein, 349 aa, unidentified
MNILAIDLGKYKSVFCMYQTTTNKHSFGTVKTVPQDMHDLFCEKDPDRVVFEIGTAAGWITDIAKTLGKDVEVANTTHDAWRWKNIKRKTDRDDALKLAQLSAMSQLPKVHIPKKDVREKRSFIQYRQKLVRRRTQIKNTIRAILQREGIHMPIGKDAWNKENAKWLRSMARPLGKFSNADDLWKGQLHTELKQLRDIGEAIERVETKLNKIGKTDLQVQRLQTVAGVGPRAAEAIVAFIDDPHRFENGKQVGSYVGFTPRRYQSSDVDIYGKISKQGNKLLRTLLIEISWTAIRYNPWARETYNRLLRGDKKRKKAAIVAMARKILVRCWAMMRDQTEWNQNISKAAA

SEQ ID NO: 222971 - protein, 355 aa, unidentified
MSQEKYIGMDVHQATISVAVMDAQGKLIMECLLETKAATIVEFIQGRQGTLSLTFEEGTSAAWLHDLLKPHVSRLVVCDPRKAALLKDGNKSDRIDARKLAELLRTNQLKPVYHGEHGVRTLKELGRSYLTLTQDVTRVMNRIKALYRSWAIPCSGTTVYAPRHRAEWLAKIGEPGVRVRAERLYQQLDGLQSVRQAARYDLLSESRKHAAVKLLREIPSIGPIRAALLVALLQTPHRFRTKRQLWAYSGFAVETHDSGEYRYVRGKLQRNRERITVRGLSDNYNKDLKNLFKGAAISARTRPGPLHDFYVALVAQGMRPTMARLTLARKIVTITLTLWKKGVSFDPQQLHRQAA

SEQ ID NO: 222972 - protein, 350 aa, unidentified
MNYAQINQRYLCGIDLHANSMYLKILDREGQVHYKRNMPNNFALFKKILNPYLPDIAVGVESTFNYYWLYDGCLEAGIPFYLGHAAYMKAIAGNKQKNDPLDAETIAHLMRSNLFPQAYPYPGEMRAVRDLLRRRHRLVRHRSEAYTHVQLLMRQQGICDFRGRDVKSVSGKEQILKSLTDPDVYYLVNSDILLIDQLDNLLSNIEKQIKTRACQHNGTDYSLLKTVTGVGDMLALSILYETHDINRFSHVQNYASYCRVIRVQRSSAGKNQYGRNQKMGNPYLKWTYGQILIHARQSSERINAYYQKLEARRCAKLARGIISHKFAVAVYHMLKKKEAFNEDRFLKVAS

SEQ ID NO: 222973 - protein, 380 aa, unidentified
MKKELYLGLDVHKDCIITAVAEEGRKGEVRESGAISNDLHAVEKWIGRLRQAHGKETLLRACYEAGPCGFGLARRLRQLGVECQVVAPSLTPTRSGERVKTDKRDARKLARLLRAGELTPVYIPDPTDEAIRDLCRARSDAVDDRRRSRHRLKGFLLRHGYRYQGKSSWSAAHERYLRELVLPHPAMKVILEEYLQAIAATGERIERSEEAMRVLLEQWRLVPAVRALMAMKGFQTVAAMILVSELGEVHRFAHPRQVMAYLGLVPTENSSSDRRRQGHITKCGNAHARWLLVECAQHYAAPPKVSKELSRRQEDQSHEVRAISWRAQNRLHSRYTRLMARRLQRNKAIVAIARELCGFIWELLRTQPCYQAQTTSPLQG

SEQ ID NO: 222974 - protein, 410 aa, unidentified
MEVVHAHCAGLDVHKDTVVACVRHMTDGKVTTTIKTFNTATQELLALSDWLSAENATHIAMEATGVYWKPVWNILSDGEFELVLCNAAHIKNVPGRKTDVKDAAWLADLMAHGLVSGSFVPDQTTQEMRDLLRTRKQLVRERTSHTQRIQKTLECANIKLDSVVSNVVGVSGRRMLEALIAGQTDPKELAAMAHGRLQATPAELEAALRGRVTAHHRFMLRLHLDQIDSFDEAIARIDKEVKDNDKNFRAAVELLKSVPGVGSLAAEVIVSEIGIEMTRFATASNLVSWAGLCPKNDESAGKRRSNRLKAGAPWLKTTLVQCAWAAARSKGTYLHAQYVRIRARRGNQKAICAVAASILTTVYHMLKDGTFYEDPGPDYFDKRNKDQQANKLVNRLQNLGFNVTIQPAVA

SEQ ID NO: 222975 - protein, 356 aa, unidentified
MAVYVGIDVHKKYCQAALMNDNGCVLQELRFDNTSEGATNLITLAKSVDPHVKAVVEPSANFWIRIYDQLEDEGVEVKLSNPLRTKAIAEARIKTDRIDAKTLAYLLRGDLVAESYVPTRKNRERRTLLRHRASLIQMRVDIKNRIHALLDKHELSHTYTDLFGKQGLEWLRNLQLPTPDQEILQSSLQVVETLNQQIRGMDIQIAKDATTETQAKLLMTMPGVDYYAAMVLLSEIGDVHRFSSDEKLVSWVGLAPQVHQSGETNWTGHISRKGSKRARWILGQCAQSARQHDPRMREFYERIERKHGSQKAIVAVARKMLTIMYVMLIRNEPYHGEKPLLTEQKHKRLDTLANSA

SEQ ID NO: 222976 - protein, 445 aa, unidentified
MSARLSGAPWLLIEICARSLVTDASAGCSTGCDHYFRPTNGEARVGAVRDNAWVGIDVGKTHHWVCAVDADGKTLLSVKVANDEAGILNFIAAASALAQRLTWAVDIIGAPSALLLALLAHACQPVHYASGRVVAAMSAAYVGEGKTDAKDARVIAETARLRRDLAIIDTDTDLVRNLAVLTGHRADLIADRVRMINRLRDLMTSVFPSLERAFDYSSHKGALVLLTGYASPDRIRRIGQTRLAAWLRTRHVRGFADVAARAIAAAKAQSVVLPGQDLTGSIIAELAGNVLRLDERLKSLDDQIEELFQQHPQAAIIQSMPGFGPFLGASLLVGAGDLRAFPGAGHLAAAAGLVPVPNDSGRRTGNLHRPLRYSRPLRHVFYLSAQTSMMRAGPNRDYYLKKRAHGRTHSQAVIALARRRIDVLWALLRENRTWTATPPQLAQAA

SEQ ID NO: 222977 - protein, 408 aa, unidentified
MNAQPLHLPVRAGGRAVVGIDVGKQHHAAVAVSPCGDKIASVASFQNTREGVDLLQVRVLEPAGTPPQVLFAMEATGHYWMPLYHELVRRGYQGAVLNPIQTNGEARTRIRKTKTDKRDAEGIARFILTGKAKAARIPDEATLELRVLTRRLLQLLQMKGDAERAAQSLSDRIFPEYAECMSKPFLHSGRVLIKEIGLIPARIAEQPDAVRDTLRRASRGRLSAAAINGLLEKAAESIGIGYAETVINEELHSSLELIEDIEKQICSLDTLIADLMENRNSPLPSLGIGPSLAAAIHAESDPASDFPNARQYAAYAGLEPSTFQSGQMEGTRAHISKRGSPHLRRALYLSAFVCYRRHEYFARIYNRFRKKGHSHNSALVVVARHLALVIWRLLVENRPFTKRPPKRK

SEQ ID NO: 222978 - protein, 363 aa, unidentified
MKEVYYVGLDVHKDTIQMAVLGSKGKEPVITKGLPNNAMKIVKELGKYNEKGKVLVAYEAGCMGYTLHRTLTEFGYDSRVIPPNKVFHHGEDKVKTDKRDALDIAWMLRRDEGESIAIPTKEDEAVRDLIRCRGDLQENLKSMKQRLLKFHLRKGLNYESDRYWTGKYYKWLSGLKLEQKMEQQAHEEYLDEILRLEDKLGRIDKVIEETAGWPEYAEKVRKLRAFRGIDYLTALSLVVEIGDFKRFPSAEAFMSYLGLVPTEISSGKKRKQGGITKTGNGHLRRLLTESSWHYARPNQVGKRLSKRREGTDEGTIRYADKAMKRLHEKYTRMVFKGKTKQTAVTALARELAGFIWGVMNNAA

SEQ ID NO: 222979 - protein, 350 aa, unidentified
MMIIGVDFHPEFQEIASVDTDTGEYQEKRLTHPGEAEQFYRSLACLGQPVRVGMEASGHGRWFEGLLEGLRIELWRGDATVIRAKRGRKQKTDREDARHILKLLTKDDFPRIWVPSWENRDLRQLLWHRHRMVQARTRVMNQLQAVAINEGLRCKKRLWREGGRQKLESFQLGPWASRRRRELLELLDRLTPTIEELSQAVEQEAEKCPEAKRLMTHPGVGALTALAFVLIIGNTERFRCGKQVASYLGLVPLEESSGNRRRLGHITKQGSSSVRFLLVEASQVTVRKLPEWRSKYVHLMMRRGRKTAKVAMARKLAVHLYWMWRKGWDYEPWKKFGSHVGQPGHRDGVR

SEQ ID NO: 222980 - protein, 363 aa, unidentified
MEVAGRFVGIDLGKRTYEMCIVDRKGKISRTGGKTDFAGIDRLCEKLNGDDAVAIEACNLAFRIERAIRKSVGCKVCIMNAGKLAVIYMSTRKTDKEDSLKLAKLLKTHDEDELPIVAPPSDEEWERRKLLSEYRSLKCQRTKEINRLHAIFEHNGYTQFVRKDMCSEKNRANILPLLKGYEKEEAERLVERLNLLEKQIERLLQKINAEVENDGKIQKVMTVPGIGPITALAYVAYVGDVNRFDNAHQVSNFIGFVPKVDNSCTICRSGHTTKKGNPLLRSLLVQAAWSTVKSKNGGALRDKYKYMAESRCIGKGKSIVTIARKLGELLYLILKTDQEYKPQKFITPELKISKLAEDALECS

SEQ ID NO: 222981 - protein, 342 aa, unidentified
MKPTTIAVDLAKSVFEIAVSDRPGRIRERHRLSRARFVRFFAQRPPALVLLEACGSAHHWARELTALGHRVVLLPPHLTVPYVARDKTDRSDAKALLEAFRNEDIHPVPIKTVGQQALASLHRLRSTWLTTRTARLNTLRGLLREFGLFIPVGAHHVLPQLASLLEDPDSPLPHGLRPALAEAAREIRELELRMRSLERDLHRLAADDPTVMHLYSIPGIGWLSATALVAFVGDMHRFPSGRHFASYLGLTARVHASGSRRSLGAISKRGDVYLRMLLIHGARALLNSPPKSGAPDALRAWALRIQQRRGHNRATVALANKLARIVWAVWTHNTDFHQPHAA

SEQ ID NO: 222982 - protein, 343 aa, unidentified
MQIRSVGIDLGKTTFHLVALGDNGKVLLKKKFTQKQLIIFTANLETSLIGLEACSGAHFLGRALRAQGHDVKLIPAQFVKPFVKSNKNDFIDAEAIAEAVDRHNMRFVPIKTDDQLDLQALHRVRDRLMIRRTSVINQIRAFLLERGMVFAKSPIRLKEAIPGVLENANENLTPRMRNLVAMLWSEWKDLELQIVEMNDEVERIASSDDACIRLRRIPGIGPLVATAIVASIGNGAAFHKGREFAAWMGLVPKQHSTGGKAKLYGISKRGNCYLRKILVHGARAVVLRSKRDRIAMGAWLTALEMRAPRNVLIIAMANKLARIAWAVLATGQDYRSVPNTLAA

SEQ ID NO: 222983 - protein, 402 aa, unidentified
MAGPLVACLDGMRVRVGASLTCNRGLSTGWPWPTPQMWEAPMNRNCTSVGLDVHARSVVGCAIDGETGEVLRRTMTPDHGDILTWIRSLPGLVKVTYEAGPTGFGLARFLLAAGIVCLVAAPSKLQRPSGDRVKTDKNDALHLARLLHLGEIVSVTIPDVATEAARDLVRAREDVRGELMSSRHRVSKLLLRQGIVYSGGNAWTPKHETWLRSHRFDQPALQFAYDSAFEGMLMTLQRRSKLDEAIAQMAADSEFTPVVNRLGCMRGISTLTGFGLAVEIGDWHRLDGRRIGAYLGLVPTESSSGQSRSQGGVTKTGNTHARRLLVEAAWHHRQPYRTPGATMRRRWELAAPAAVARGHAGNRRLHERWVGFNARKKRSVVANAAIARELAGWCWSLAVMDD

SEQ ID NO: 222984 - protein, 355 aa, unidentified
MNQQNNTTISFKGQHFFIGLDVHKKNWKVTIRINKTTIKRYTMDPSPEQLAKFLKAHYPDGIYHSVYEAGFCGYWIHRRLLELGIDNIVVNAADIPTSHKEKDRRDDKIDSAKLARELENGSLKGIYIPTPRQQSIRSISRLRYQHRNHATRIKNRIKMYLHFHGIKIPEDFNNSYWSSVFIKWLKSLEFEYPFDSQYLSQYIRALEYQRGMMKDVLLQMRDYCRQNNILKCIRSVTGLGVISAFTIYAELIDMKRFKDLDHLASYVGLVPSKDGSGDREGVKGLTPRYSRYVRYLLIECAWRAVGADPALTQAYATLTTKMSKQKAIIKIAKKMLNRIRYVWLNERKYITAIVK

SEQ ID NO: 222985 - protein, 343 aa, unidentified
MKITITWRFIVGIDISKNQLDCFLLDRQTDLGYTDQVPNTDKGFEQLASWLADHGADRSQTKLISEHTGRYGEHLLRWSTSNQWPHAVVKTTALKKVGNEHHRKTDAFDAEDLADYGVRFSDKLSLTKAPKPAIGQIKRLQAERRAMVDRRAALRSKLTEADIHDADMERLMDMWTQQIALLTEHITEIEARTKELINQDTAIKNRYRIMRTAPGIGKVLGPLWLSLFAGRQTLDARKISSRFGFAPHPHQSGSSVKRAEQSSGFGNSEVRRVMHQAALSAKTHYPHYRKYYQEKRAEGKEHLLVINNIINKLIRLYCAMWNNRTVYDPGYIQKNEHKWKKSA

SEQ ID NO: 222986 - protein, 352 aa, unidentified
MQCIAFDSHKHYTWALVQDEAGKVLREQRINHTRGALQTFLEAFEPGTPVAVETIGNWYWITDEIEAAGMVPRLVNARRAKVMSGSINKTDKLDARGLNRLQRSGTLPTVWIPPRDLRDARELPRTRMVLVRQRTKLKNRIHANLAKYGLKSDGATDLFGVRGRQILDQCLEELPAQTRFATESLLDELDHLNAKIGELEERMRELFGEIEALEHIKTLPGVGFILGVVILTEVGDVARFPSASHLASYAGMTPRVHASGGRVRYGRTRPDVNHYLKWVFAEAANVSMMHRRRHPQRHVSRLYTRVKSRRGHPKAIGAVGRHLAEATYWMLTKDEPYRDPAVEQTEESKREA

SEQ ID NO: 222987 - protein, 354 aa, unidentified
MKNQAIQYLAMDVHQATVVASVRDESGKVVMRATVETEAKAILRLVQSAGPRVHVAFEEGTQAQWLHDLLIDHAERVIVCNVRGRSETTNKSDRMDADGLSELLRLGGLKPVFHGAPEILTLKELVRCYTGLVNDSTRVMLRIKAIFRARAIPTPGVSVYRTSQRKQWLAKLEGGARIRAASLLTQLDMLLELRPQAKAAMIGAARRQPGWKILKSIPFLGPVRVALILAIMRTPFRFRTKRNIWPYAGLAVVKRSSADHQFKDGRLQRSKKAPMTRGLNRNHNPLLKSVFKGAATAAVSKPGPLRDYYEASLGRGVKDDLAKVTLARKIAAVTLRLWKKGELWDPKKLTMQAT

SEQ ID NO: 222988 - protein, 373 aa, unidentified
MYYTTLFVGMDVHKENFTVCCYDMIQDKIFYTQKLEPDYNQILKYLTFVRKAFRKDVDFVCGYEAGCLGFTLYHQLTQHGVSCVILAPTTMMKPAGKKKIKTDKRDAALIARCLVSNNFSPVHVPTTQDEEVKEFLRMRDDHRLALKKVKQQILAFCLRHGYSYTATKNHWTGAHIAWLRSLKPEGLYSEILSEYLLTFQALSDKLERLDQRIEELAAMKAYSEGVKKLSCFLGIKTHTALATMVEVGDFHRFASANQFASYIGLVPGEDSSSESVNRLGITKAGNAHVRTLLVEAAQSYTKGQVGYKSAALKKRQAGNTSEVIAYADRANERLRRKYYKMILSKSKRTNVAKTAVARELACFIWGMMTDRIA

SEQ ID NO: 222989 - protein, 365 aa, unidentified
MKRKVYVGMDVHKETIQIAYLTSNSKEILKEQQIKHNEVQIKKFIKKLKTEWNEIHCCYEAGVTGYPLYRYLKSLGVNCILVAPGKIPRQSSTDKIKTDKRDAIKLARLMRSGELESIHVPSEEDEAVRDYLRSRDSLRLDLGRNRQRLMKFLLRKDIKYSTTKYWTVSHYKWLNNLHFNNEILQETFNDYYSRVRVQEENLKSMDKKIQEIAESEPYREKVGILRCFRGVDYLTAMFLLCEVNDFKRFKTAGSFMSFLGLVPGEYSSGSKRKQTGITKTGSPRLRRILTEAAWQHRFPGTGSKIITARRSGQPALVVALAEKASLRLHKKFRNLQLRGKTPQVMITAVSRELSGFLWAAMNLVA

SEQ ID NO: 222990 - protein, 417 aa, unidentified
MDKSITLHVGLDVHKDSIDIATAELGRDGEVRHVGSIGGDLVALDKALRKLISKGHRLHVVYEAGPCGFVIWRHLNTLGTACDVVAPSSIPKRSGERVKTDRRDAMNLARLDRSGDLTVVRVPGAADEAVRDLVRAREDSVRECRSARHRLKALLLRSGIAYAGKSSWTQAHLRWLATLKLEHAAQQIAFQEYLHSITEATTRVQRLEQSMRDTLPEWTLKPLVQALQALRGVQLIAAMTLVAELQDFLRFESPRKLMAYVGLVPGEHSSGPKRRQGSITKAGNSAARRMLVEVAWHYQHSPRVSPIIATRQDQLPKAVTDIAWATQLRLHGKFKRLVARRVMRTKAVVAVARELAGFVWAIGREVQTSGWQGVSDDAQPPAKAVESVRGTTHPPALPASGKGAPTTSRKAAQRACA

SEQ ID NO: 222991 - protein, 320 aa, unidentified
MLFFCGIDVSKDRLDVMMLPQQQFWSVHNDPRGWTELVERLRSFSISAIGLEASGGYERGVMRALLAADMSVRQINPFKLRQFAKASGVLAKNDRLDARMIASFVAIMPTRPAQRRAPAIERLSEMEAIRRQLSNQKVAAENAARLLEDAMLQRLCHRRIARLAADIDLLDKHLLEVVAADPALADRYRLLTSMPGVGPTLACTLLALLPELGRLSRKQVAALVGVAPYDFDSGKLKGMRCIWGSRAPVRQVLYMAAMSASNWNPVLKAFHNRLKAAGKLPKVVIVAVMRKMITMLNAMVRDDVVWADLLRGRHTVPTAR

SEQ ID NO: 222992 - protein, 335 aa, unidentified
MNIKIKQVVGIDVASKKFDVCFMEEIPNGKSTIKGTKSFSNDFKGFKEYLEWFKKRKKENDLKHIMEATGVYHEDLCYFLYEHKELVCVELAQKIKYFSKTINQKSKTDKKDAKMIAMYGLSFRLEYWKPISKYFKDIRDLCRLVNHLKKSNSAMKSRLSALESQHNTLKSTVNILKSNIKDSNKSIDKCEKKIIKLLDKDVEFKEQINRICKIKGVNTMTVVKLLAETDGFRKCSSIRKLVSYAGLDVAQNESGTKSGISKISKKGNSYIRETLYMPALCSCRFEENMRVFYERLNTRQKVKKQGVIAVMRKLLVLIYTLWKSGQEYDPNYKWG

SEQ ID NO: 222993 - protein, 405 aa, unidentified
MVNVGIDLHKTQFTICVRERKGNGFMKYPTTNEGYQAFLSQAALWQGQGEEVRVGVESTGNTRYFKNRMEEAGIGVTVINTLKMKVVNESVKKTDKHDAATIAEFLEKDMLPEARLCSRESEQLRRLLKARETLVKSEVVMKNQIHGLLTSEGMEDVKGSLQSKRGRQRVLDALKADENGLVAQPLFETIERLEEEIKRIEKQLRSLAAGDRMVELLMTIPGCGEICSWTIRAYTDDIKRFSSPKKYASFAGLAPWVQNSNESIHHGSITKRGPKELRTALVQVVMGLRRMKEKTRAWRFMQRYEGMKKSKGSGRAIVATARKMATVIWHMLTEDVEFVLQRMVDPKLAKKSASMSGSTWLVEKALVEQKKKQAVTVDEKKGEGVNKDAKKTGVARKRKEKSDKG

SEQ ID NO: 222994 - protein, 311 aa, unidentified
MEHSTVVGIDVAKDHLDVHVRPTDEAFRVSYDDAGLATLLTRLRALPPTVIVFEATGGYEVPLAATLASAGLPVAIVNPRQIRHYGRAIGQLAKTDRLDARLIAHFAEAVRPAARPVPDEQARALGELIARRRQLTEMLVAEQNRRRLLRDRRVQRQLDAHIAWLEEALRRLDHDLTTLVRATPAWREADDLLRSVPGIGPVTACTLIADLPELGRLDRRRIAALVGLAPFARDSGAFQGLRMITGGRPHIRRVLYMATLSAIKCNPAIREFHHRLVAAGRPGKVAVTAAMRKLLTILNAMLRDRRPWQPA

SEQ ID NO: 222995 - protein, 315 aa, unidentified
MIQTNTTTAGIDTSKAKLDIAVHGRTERWQVANALPGWRALAANLAEAGVTRVGIEATGGYERGVVEHLRAAGFTVLMLQPLQVKAFGRVHLRRAKNDALDAVLIAACAAALDPPKIAPDPRLSELADYLTFLEQIEEDIRRFKTRLEHIDEPALRRLVNSDIARLKVRKAAQIRDIAKRLRSHDDLAKRLKLVLSIPGIGERTALAIVIRMPELGRVSREEAAALAGLAPFDADSGKYRGQRKIAGGRSRLRRSLFAAALPAAFRWNKALVALYARLIAKGKVHNAALIACARKLLIYANTVVQRGTPWTEKAA

SEQ ID NO: 222996 - protein, 333 aa, unidentified
MTTEYIGIDLHKAFFQACAIGSTGDRRWEGRFPRSAAGIAQLVGRGIGAEVAIAVEASGPTWAFVDALQPTGARVCVVDPRKTRLKAGFAAKTDRLDARRLADALRRESVVSIYVPPPAMRELREVCRGRHQVVRLRTRLAQMIRALLLRCDAGEPPGTRLYAPVALTWLAQVQLPPAADQTLRRLERLYRPVHADAQAADREVRERAKADPIAARLDDLVGIGPIMALTLRAEIGDIARFRSGPALASYAGLVPRVDSSAGRVYHGRITREGSPWLRWALVQAARHAIRRDDTRARWARRLAVRKGINKARVALARVLCDQVIRTWRAHNYA

SEQ ID NO: 222997 - protein, 452 aa, unidentified
MTKKKIALDVVNPFAAGIDVGSRSHYVAIGQTDEDVREFGVYNEDLIALAQWLLDNEIKTVAMESTGTYWQSLFATLQSMGLEVLLCNGKFTKNIKGKKTDVQDCQWIQKLHTLGLLSGSFLPDEATEQLRTYCRHRANLLGQAADTSRKMQKYLRLMNLRLDVVVKDITGLTGLAIIDSICKGESNPENLASLRHGNCKKSEKEIAKALQSNGRKDLLFALTHEYQLYLLFQKKITECDNEINKLLSEQISNDDNKKEHHIDKKIYKRINKNTPDININLLSYQYFEGVDLLAIEGISHSTVLTLMSEVGPGIHKFETAKQFASWLRLAPNNKISGGRILSNRIPKGSNRLKIALRQAANAVGNLKDTALSNFFKRIAFRKGRTSAISATARKLAVIIWNMITKKLPYKTDTQYEFLDQKRKRKVMEMKKLIHKFDITPEDLGLQLNINNL

SEQ ID NO: 222998 - protein, 426 aa, unidentified
MWDAQRRVLKIKSLKHGIIQDKRGNVMRAVFGIDVSKTSSEVAILVNGEKVHGYTILNDAFGFNRLLGDLKTVHNPEIIFEATGVYSRRLQAFLEEYGYAYTRLNPLEAKKQLDSLRVRKTDKIDAEKLAKSQLVHNRKPTYVQEEVYQHLRDLSRFYQNLTEDLVRAKNRLHKVLQITFPELENLLSTPTGEQYWNLVMAFPCKEFVLRLSQSDLCEIIRQSTSKRISEKRIAYLTDKLIKLAKQSFCAVKKNSPMLEEVRYYAQELLRLSERRQVVLNDMVTLAQPLPEYDILRSIPGIAETTATSIIGELGDIRRFQSTNQINAFIGIDLRHYESGNFLAKEHITKRGNPYARKILFKCIHNIASASHTNPCHIADFYEKRKRQSTIASTKPHTIASIHRLIRTMYYLITHNKLYDYSLTQNR

SEQ ID NO: 222999 - protein, 381 aa, unidentified
MDHDAIAGTPSTKAVLYGALELSKNTWLLALQLPDRAQPSLYPIRGGDTEELMAKLMAARDRWAKMSGKAPSIMLCYEAGYDAFWLARFLKARGIECLVVDAASMQVNRRARRAKTDRIDVGMLLRALIKWGQGDHHVWSVVRVPGVDEEDLRRSHRERDRLVCERTAHINRIKGLLFGQGIRDIKVKSKYKTLQIDKLVTGDGRPLPPRLASEITREIARLALIQEQLAVLERERDQAPTPCKATEKKRVQLMSLTGIGPAIAAVMTREVYYRQFDNRRQVAGFLGLATSPHDSGDVERSQGISRAGRGQVRGTIIQAAWLWLKHQPKSAITRWFVQRTAGQSGRIRRIMIVAVARKLAIALWRFLEQGLVPQGAMLANR

SEQ ID NO: 223000 - protein, 354 aa, unidentified
MLIIGCDFHTRYQQIAMAREETSESLVERRLDHQSGEAHAFYRSLQDLHEPVRVGIEATGPIHWFERLLTELGHELWIGDSAKIRASEVRKQKTDERDARLILDLMLAKRFPKIWVPTPAERDLRQLLWHRHKLVCLRTMLTNQLHFLAMSQGLCRKQKLFTKKGRAELGSLALGPWASRRREELLKLLGQLDPPIAELDRAVLEEAKRRDDTVLLMTHPGIGPVTSLAFVLAIGPVTRFHRSKKIASYLGLNPSEASSGGKRRLGAISKQGNTMVRWLLIETVHHAVLQDPELRQDYQRLKFRRGHAVAKVAIARKLAVRMYWMLRSGAAYAQLVRRQGSPGATLMNTSSSLA

SEQ ID NO: 223001 - protein, 336 aa, unidentified
MSHYCGIDLHSNNHVVVVIDEQDKRVFERRISNDLSLTLKALSPYREGLQGIAVESTFNWYWLVDGLQEQGYDVSLVNTAAVKQYDGLKYSGDHHDAFHLAHLLRLGILPTGYIYPKEQRAIRDLLRRRLLLVRAASTQLVCVQSQIWRSTGLRIKSDELRKADFVSPDIDDYTRQAVTAGLAVYQCIQQQINGLENTAHQAVKLTDAFKILQTVTGIGKILGLTIMLETGPIERFAGPGNFASYCRCVDSTRMSNGKKKGVGNAKAGNKYLSWAYSEAAHFAVRFEPLAQRFYERKKARTNGIIAIRAVARKLARATWMMLKHQVPYDAKLMFPG

SEQ ID NO: 223002 - protein, 367 aa, unidentified
MMGWMAPSRHRRAKLVFSRITRNREPSMSEITTIGLDLAKHVFQAHGIDAEGTTVLRKRLRRGQVLAFFSRIPRCVVGLEACATAHYWARELGALGHEVRLMPAQYVKAYIKRNKHDAADAEAICEAVQRPTMRFVPVKTTEQQATQLLHRGREQLVRQRTMLVNALRAHLAEFGMVAAQGLRNVGELIAIVRDDGDTRLPDAARQVLQVLANQIEQIETAVAGLERQLLAWHKTNPVSQRLASIPGIGPIIATAIATTVADPKVFRSGREFAAWLGLVPRQNSTGGKTRLGGITKRGNRYLRRLLINGASANLLRSKATKADPWVIGLRRRRPPLVVAVALANKTARIAWAVMLREKEYQPRAMAA

SEQ ID NO: 223003 - protein, 420 aa, unidentified
MEVVHARCAGLDVHKKTVVACVLRSGPDGLAEPETRTFSTMLGALEVLAAWLTEAGVTHIVLEATGVYWKPVYNVLEGEARWRVLVVNPEHVKAISGRKTDRADAQRLAFLLRHDLVQGSFIPERAQRELRELTRARTALIRERARAVQRLEKVLEGANIKLAVVVSDLLGVSGQKMLDAALQGVSDPDELAGLAHPRLLPKRDLLVEALRGRLSRPLRFLVQQHLDHWRELDLRIGAFDTEIAEQLRPFEELLTRLDAIPGVGQRTAEVILTEVGTDVATFPSARHLAAWAGLSPGNRQSGGRRQAARTRHGNPWSKGALTEAAWAASRCHDGYLPAQYRRLAGRRGRKRALVAVAHSLVTIIYHLLADGSEYRDLGTHYFVERDRARAEQRALITLRTLGYQVTLTPNPAKDPAPEVA

SEQ ID NO: 223004 - protein, 423 aa, unidentified
MNPQSNLSFTAFVGIDWADRHHDFCLQAAGSDQREFGTLDHSPEAIAKWAYSLRDRFGGHIAICLELAKGPIVYALQRYDFIVLYPVHPSTLAKYRQAFVPSHAKDDPTDAEMALDIMLRHPDKLKPIKLQSVAMRTLATLVEERRCLVDDVTGVTNRMTSTLKQYYPQVLDWFEKRDTVIFCDFVSRWPTLLQAKRARRSTLESFFHQHNGRRAHLIEERIQSIRDATALTEDESVIRPNKMVVLALVEQLRVLLQAIDRFDAEIDSVTKNLPDYNLFAALPGAGHIQAPRLLVAFGEDRDRYANAAEIQRYSGIAPVVERSGNKCWVHWRLACPTFLRQTFVEWAGSTIPRSYWAGAYYQQQRQKGCSHRVAVRALAFKWIRIVYSCWKNRTPYDESVYLKSLKRRGSPLLNGVMESAKMT

SEQ ID NO: 223005 - protein, 429 aa, unidentified
MSYRIAGIDVHKKMLAVVVSNVEVESEFQFERRMFGGNPEQLRLLAAWLLEQEAEEVVMESTAQYWKPVWGALERYWKPIREKREGAKRRSGTLHLAQAQSNRGRRGRKKDFVDAERLVKRLVARELTLSFVPDAEQRLWRAVTRKKYQLRRDLVRLNNQLESLLEETHIKLSSLVSDLLGVSARRMLKALADGETDPAALAALAHQRLRATPEQLCDALGACTDLKPVYRRLLKMTLEQLQLIEQQIGQLDQELATLLHPHQDAVHRLAEVPGFGVDSAQQIIAEVGPTAATFPSEKCLSSWVGACPGDEESAGVNYSHQSPKGNRHMRRLLNQAANAAVKVKGSIFEVIYRRCVPRLGHNQAIGVIAHRQCRLIWLILHNGALYEERGPAVTMQSKYKRTWRMIRQLRQLGYRIDPPNLQPSQAQAQ

SEQ ID NO: 223006 - protein, 440 aa, unidentified
MNSTAISMSKSILLDQQNQNTSDAVRIVNVAFDVGSDSLFWAMEFSGKSISGECENNSSEIRTTLEGIRNEVQQHGDCQLRVLCESTGIYHRRLLQLADELGMRTALVHGEAVAKYRTIQFADHGKTDQRDPKAALTVAKFGKLIKDRKLGKHYAQLRELHRLVLRCEARIKVAKCELHADLRTLFADLRLDKSVLYGPTGRALIEQFAGNPHAIVAVGEEVFYARMKSCSKNTKTATLKKLWQAANDTASNQKDHLSATLAEIRATAVRQLYAEITAFSQRQRKIEGQMQELYLTLQTSDPRLPGPRKGVVTLRMLSRLVAETGPPDDFRRLSQLMRYAGLNLCERQSGKWRGRTTISRRGRSELRYVLNLMAIPLVGRQKLFGDYYWKKKDADKMPGQKANVCVMRKILKMFYGWYKSGEPFDPERVFVMASEHAKAA

SEQ ID NO: 223007 - protein, 391 aa, unidentified
MIYVGIDVAKNKHDCCILDNSGKVLREAFTLSNDRKGFQELFSAIREALHQENTDQIKAGLEATGHYSENLVAFLRNSGIQPVVFNPLQVNLFRKSQSLRRTKTDKVDAKCIAQLLMSAESTPVPASYQIQELKTLTRHRSRLVSQRTKLKQCISRLVDILFPELPSVCCSATQASMRTLLLELPSARQIASCRIDRLTNLLYAASKGRYSREKALEIKQLAQQSIGANSPASEMELRLTLQQLDFLLAQLKQLEKAIQTIVAAIHSPILSIPGIGPTLAAIILAEIGDIHRFSSPDKLLAFAGMDPSTYQSGKFKADHTPMVKHGSTYLRWALMQAARLASVHCDTFRHYMNTKLAQGKHYFVALGHVSKKLVRVIFRILTTNEAFVPQA

SEQ ID NO: 223008 - protein, 224 aa, unidentified
MSYRIAGVDVHKKMLAVVVSDVEVNGQYQFERRKFGSNPEQLRSLAAWLVEQEVEEVVMESTAQYWRPVWEALEQYWKPIREKREGAGRRLGTLHLAQAQSNRGRRGRKRDFPDAERLVKRLVARELTHSSADKQRLGHISKQGSSLLRHLLVKAAQAATRFNPHWRRRYIHLAMRRHRSIAKVAMGRRMGIRLYWMWRNGCEYSPSFEFGSHAGQLVVRHGVQ

SEQ ID NO: 223009 - protein, 344 aa, unidentified
METITTVGIDLAKSVFQIHAIGAKGEVVIAKAFRRRDFLTAMGKMSPCLVGMEACASSHHWARQLKAMGHEVRLIPPAYVKAYVRRQKNDAADAAAICEAVGRPSMRFVPVKTEAQQAALMTHRVRALLVNQRTALICALRGHMAEFGLVTPTGPRHLAPLLEVLADKGDESLLSEARQALSLLVEQLHSLEAQIERLDRQVLEQHRANEVSLRLASIPGIGPLTASALAASVTDPTMFASGREFAAFLGLAPKQASSGGKERLGRISKMGDRYLRTLLVVGAASVLRHPGTSPSNMKTWAVGLLEKKPFKLAAVALANKMARIAWAIMTRGETFRGGVPAMAA

SEQ ID NO: 223010 - protein, 371 aa, unidentified
MFQPIRYVGLDVSKETIAVAVAEPDGTVVEYGDIPNDSSSVRRLVEKLSRDAQLKTAYEAGPTGYPLHRQLTSLGIENKVVAPSLIPRRSGDRVKTDQRDAVQLARLLRSGDLTPVWVPDEAHEALRDLVRARDDARTEGLRTKHHLSKFLLRQGVIAPARVGRAWSAQHQAWLSTLTFRDRAGQVTFDDYLACVRAAIERVRRLDAALLECGASSPHVELLRALQAVRGIGFLTAVTIVAEAGDLHRFRSAPAFMAYVGLVPSEHSSGGSKRRGHITKTGNRLLRHVLGEAAHHARLQPRVSEALRQRQQGVPKVVVEISWRCQQRLHHKYRHLGGRIGRQRTISPVARELAGFVWAVGQAVQPIAAVAA

SEQ ID NO: 223011 - protein, 478 aa, unidentified
MEAVRRRCCGIDVHKKSLSVHVRPPAGQTEMAPKDRVFRTFSRDLRALRGWLRNCGVTEVVMESTGQYWRPVWNVLEGEIPRVILVNPVHVKALAGRKTDRIDSRRLAGYLERQELDASFVPMREIRELRDLMRSRVHLLEEVNRVKNRIGQMCEAGNIKITSVASDLFGVSGRRMLKAIVEGRRDPGWMADYAKGTLRRRRGELEQALDGTFTDHQRWMLDEELKHLEGLESQIGRVEAELGQRMQPYAEAIRRLKTIPGVDGYGAWTIVAELGTDMTVFPDARHAASWAGMCPGNRESGGKRMSGRTRKGNLYLRRVLAECAWAASHTKNTYLSALYRRLRARIGHHKAVFAVAHQILVAAYTMLKRGEDYRDMGADYFDQREKPRVVNKLIERLSRLGYYVTLQPVEPEPAILPQPRISPPQAGGEFTATIQPPETSPRRKPGRPCKCAERGLLCHHQHRKQEPGIAYPSENTSG

SEQ ID NO: 223012 - protein, 412 aa, unidentified
MTITCGIDWAENHHDVALVDEAGKLVAKRRIGDDVQGYRQLLELLADAGDSASEPVPVAVETARGLLVSCLRTTSRKVYSINPMAAARYRERHTVARAKSDHADAMVLANILRTDAAAHRPLPADSELARVIAVLARAQQDAAWNRGQLSNQLRSHLKQYFPAALAAFQVRGVGLDSREARAVLAVAPDPAAAARLSAARLVSVLRKAGRQRGIEAWVSRLRTVFAGDYLHQLPAVEQAMGRQALALVRQLDAACRAADDLADAAATAFAEHPDAAILSSFPGIGPVTGARVLAEIGDDRTRFRDARGLKSYAGSAPVTIASGKSCVVRNRKVKNQRLAAAGYVWVFGALPSPQVKDLYDRRRAAGDRHTAAMRNVFNRLLGCLHHCLQTGQAFDPAKAFPLPESQPEPAAA

SEQ ID NO: 223013 - protein, 341 aa, unidentified
MTIVVLGVDLGKNVCSLVGLDGSGRVVVRRRVRREALERFVGGLPRCIVAMEACCGAHHLGRMLGAQGHEVRLMSPEYVRPYVKAQKNDDRDAEAIAEAATRPTMRFVPVKSVAQSDVQALHRARERLVAERTALINHLRALLLERGITAPQGRGKLAAELCTFADEDDSRLSPRIRLLVEDLRREWRALDERIAAFDAEFVALVREDAAARRLMTIPGIGTINATALAAAVGDARTFGRGRDLAAWLGLTPRQRTTGGKPRLLGISKRGNRYLRKNLIHGARAVLPRLVDQDTPLGRWTRVLSARAPKNVVIVALANKLARIVWAVLAHGRSYEVEYATA

SEQ ID NO: 223014 - protein, 342 aa, unidentified
MYYMGIDLHKKYFVSTIMDKEGKVLKRSRVSTDRESIKHYFSLLKDKGPIKAVMEATFNWVYFYDEISPFVDEAILAHPLKTRAIAEARIKTDSIDSNTLAHLLRSGLIPKAYTPGFETRDLRNLLRFRIALVKVRTSLKNRVHAVLDRNYVEDPIFKELSDKFGKTGMKIMRTLKLKGNDTSILNGYLDLIEEITKKINDLEKRIKSFVKEDKITLLLKTIPGIGDIVAFLMRYEIDDIERFSSAKKLYSYAGIVPSTYSSGGKTYHGRITKQGNKWLRWALAEASHKAIVKSPSLRRYYNKIKYKKGSNTATIALSRKLLEIVYKVWKEQRPYYEKEICF

SEQ ID NO: 223015 - protein, 309 aa, unidentified
MNTKNKTIIAIDIGKQSLQIQSKYQSFAVNNDSKGYAQLLKTITKADQAHIVCEASGGYERPLVRMLHKQQIDVSVVNPAKVRAFAKSEGVQAKTDPIDAKLLLKFAEGKSLRLSSCPGPVREEISELMDRRSQLSEALTKEKNRLEKQPVYLTKWIQKSISFLKKQIDLMDNRIEELIESNAELTKRVKAMTSIKGVGTTTAYTILAYLPELETLSRGQLISLAGLAPFDRESGKTKKKAFIHGGRAKVRKCLYMAAQSAATHNPVIKAYVSNLMNRGKPYKSALVAAMRKLLICMQSLSKNPNFVLE

SEQ ID NO: 223016 - protein, 320 aa, unidentified
MDQDYKRLFGLRQPNDLNHVLKVLEPFKADLKGVVVESTYNWYWLVDGLQEQGYTVHLANPSAIKQYEGIKHTDDKWDSFWLAHMKHLDILPEGYIYPKEQRAVRDLLRRRLFFVRQRTANILSLQSTITRNLGIKMPVNGIKKLNMDDACKLFDSSNLVFMAQNSISAIRHLGEIIKGIEKEVKSHVQLRKEFVMLLTIPGIGAILGLTIMLEVGDINRFSKVGNYASYCRCVSSKRLSNGKKKGENNKKNGNKYLAWAYVEAAHFATRYMPAAQKFYQQKMAKANGAVATKALANKLARASYFIMRDRVPFDEDMLFK

SEQ ID NO: 223017 - protein, 433 aa, unidentified
MSNFFYSPVIGIDVSADFSYTAILAPNGDIYKKSFKIQHDLNGFNHLVNEIKKVEEEFNMKTAIFMESTGVYHLSLFHYLNKYFDNTFVINPLVTKSNKNGDIRKVKNDKKDALSIATIGKFQNIKLSQQLSLDIFLLKNLVREYYKLTDTSSTFKKKLSADLRVIFPGYNTIFSDSTSKSSIELLSQYPTPQSILEAPKENIIKIFLNSSKKGIIWSENTYSKLFKIANEAKIIGLPLDGLAVKIASSITLIKTIQSEIDTLLQKINNFIQSETFPESIRANIELIDSIPGIGQLTAITIIAEIGDIDGFLKPKHLVAFFGIDSSVNQSGNFKGDDNKISKRGTRIGRRALYSVALASIRNNRNGVPINKVLLDYYQINLKGKKPKIALVAIMHKIINYIFAVLRNQTPFEQRDPKIHKQMFLENNSLNKVA

SEQ ID NO: 223018 - protein, 339 aa, unidentified
MDITTIGFDLAKTVFQVHGADAKGRPVLRRKLRRGKVLAFFAGLPPCLVGMEACASAHYWARELQALGHKVRLIPPQYVRPFVKTNKNDAADAEAICEAVTRPTMRFAPAKSAEQQSVLMLHRARELLVRQRTMVINALRGHCAELGLVVAQGASKVEELVAIIEDPGDVRLPPLAREALGSLVEQLRSAQARIKQLEATLLAWHRSNEASRRLATIPGVGVITATALVATIGDGAQFRSGRQLSAWLGLVPRQHSSGGKARLGRISKRGDGYIRRLLVHGARTVLRWRRAKPGTRPGWTDQLLARRPTNVVLVAMANKTARVAWALLRYERIYQPTPA

SEQ ID NO: 223019 - protein, 424 aa, unidentified
MFRYLIESGEYMEAMVEKCAGLDVHQETIVACVLKGDLNSKPQSKIRTYGTYTKDLEELHDWLVEEDVEQVAMESTGVFWKCVWNIIEDERYEIKLANAREIKNMPGRKTDVKDAQWIAELLRSGLIKGSFVPNVEIRELRDLTRYRRKIIQQASTEKNRIHKILQDANIKITTDISDIFGDTGRKILEKIIEGKEITNEDLIEITSGRGKASLREKIPQIKEAIKGTTREHHKKILKLIYDHLKYLEREQKEIEKLIDEACEEYKKEIELLDSIPGIDQDSAKAIIAEIGVDMNQFPTVKNLTSWAGMSPGNNESAGVKKKGKSTKGNRNLRATLNECAWSCIRSKKNRISSTYWRFVKRMGPQKAIHAVGNLILRLCYHILVSGIKYEEREKDDYEKILQKKKEERMIKELKERGYKIEIAS

SEQ ID NO: 223020 - protein, 390 aa, unidentified
MDVLYQSCAGIDVHQATVVVCILHGPLTSTRPKREMAQFDTTTKGLKACHDFLSQFHVEAVGMESTGVYWRPVWHELCDDFELILAQPAHMKAIPGQKTDKKDAHWIAQLTRIGLLPRSFVPDETIQELRELTRQRKHYVESRNRETNRIHKILQSGGIKLTTYIEDIMGASGRNLLQLLIDETPVTPRMIHQSVYTSLKRKVPQLLEALDGYFSAHHRFMLGQSLEIYDFYQKQIDCLEERMNGYLNLYERPVEILDSIPGMDLITASVIIAEIGVDMSQFPTAGHLASWAGLCPGNNESAGKKRSTKIRHGNSYLKRCLCQAVFAAKRQKGSPLAERYYQIQSRRGPQKATIALAHQLLKIAYILLKENLTYQEFVLQKKATRDEPVA

SEQ ID NO: 223021 - protein, 366 aa, unidentified
MCVCGSRWDVHKFSIVAATLPPDGGRPEVSRIETTERAIRRLIDRLGGPQGLAVCYEAGPGGFALWRLLSSMKVACDVVAPSLVPVRAGDRVKTDRRDAKKLVGLQRAGLLRFVSPPTAETEGLRDLLRCRDDLRCARTAARHRVAKQLLRHARIYRDGKSHWTQRHRAWVRVQRLDDPLAHEALAQMLIHLDGLERQLAALDARLEQIAAGERWAEQVKILVRFRGISTLTALGLISEIGDFARFSHPRELASWLGITPSEYSSGDQQHRGHITRAGNRHARRLLVEAAWHYRHPPRRPAAGALPDARAWNAQIRLHHRYRHLTEHGKRATVANVAIARELAAFLWAALTDQPLPTHDPLTEAAA

SEQ ID NO: 223022 - protein, 314 aa, unidentified
MHRSESFIGIDVSKGSLDVAARPAGTQWRTPNTTIGVAALVKKLRRLHPTLVVLEASGGYERLASDALHEAGLPVVVVNPRQVRDFARGTGQLAKTDAIDAEILAWYADAIRPAPRTPLDDETRALRALVQRREQLVEMLTTERNRLEGAAPANRDRIQAHIAWLQDEIGDLNGQIKRKIRNNPRWHDRDLLLKSVPGIGDVCTSSLLAHLPELGALGRKQIAALVGVAPFNRDSGTWRGQRRIAGGRSAVRRVLYMAALVASRHHPDLQAVYRRMCAAGKPKKVALTALMRRLLVLLNALVRTNARWSLTHAA

SEQ ID NO: 223023 - protein, 354 aa, unidentified
MAKILAIDLGKFKSVTCLLETGTNETEFWTMSTDRQYLETMLNAYHPDLVVIEACAIAGWVHDVCTAKGYKVLVCNPAQEAWKWKHLKRKTDRDDALKLARLAALEQLVPVHIPGREQREYRSLVNYRKFVLGRKNRVQNHIRAIFDRRGMAMTRGQKAWALSRRHELYRHRKPLADCSVDELWRGELDLELAELERLDEQLAQIEKKLTALGAEDKRVRLLKTIPGVGRKTAEVVVAYLDAPHRFKNARQVSSYAGLVPRRYQSGQMDRQGRIHKRGPRLLRAALVEAAWIMVRLNPWARELYKRLCAGQKTRRKKAIVAVARKLLVRCWVMLLRGEPWKQDMTRAEPVVAVA

SEQ ID NO: 223024 - protein, 388 aa, unidentified
MIQVDDLSRSLIAFEQISTLVIVVELSQSSWLAAGVVPGIERRPLKKLDPDPTALLHLVEGWRDRATKAGRAITRTVLAFESGRDGFWLARWLRVRGVETFVMHSTSVAVSREPRRAKTDRLDTEMLIRVFLGWLRGEPRHCKMVAIPTLEEEDARRPSREREILVGERTRIINRMKAALVRLGIRGFKPGLLTAPQKLDALRTPEETPIPPNTLDEMRRDMARLAWVREQINAIEQARLERLERAPATGRHAMVRMLARVIGVGVETADMLVQEVLSRNLRDRRAVARYAGLTGSPDESGSKRREQGLSKAGNARVRRGLIQLAWRFLRFQKDSALAQWYRGRTEDGAGKRKRTMIVALARKLLIALWRLVTIGEIPVGVALRTAVA

SEQ ID NO: 223025 - protein, 357 aa, unidentified
MKVTTIGIDLAKDVFGLHGVDGQGRVAFKKRLVRSRLLEFMSQLPRCLVGLEACSSAHYWARKIERLGHRVRLMSPRFVKPYRKSDKNDANDAEAICEAVTRASMRFVPIKSEAQHEVQALHRVREQLLKSRTALVNQVRGLLAEHGIVAPQGIARARRLRLEILAAPERHGLSGLFRETLQEIAERLRFFDERVGAYDDRIERVFKEDERCRRLAKIEGVGPLVATAVVAAVGNASEFKSGRELSAWVGLVPRQHSSGNRSQLLGISKRGDRYLRTILIHGARAALRRADHKRDQRSRWAMRIKLARGYNKAAVALANKNARIIWALLSRGENYRPPAISVASPTADRISLTQVQA

SEQ ID NO: 223026 - protein, 352 aa, unidentified
MKEYIGCDAHARYSVFVSVDERGQAAPPIRVGHAGRDLRDYLGRLEPGTPVAVEASGGWYWFMDELEAAGLDARLVNPLEAKRRMGGRNKTDPIDARGLAILLRNGTLPEVWVPPAQLRDLRGLMRTRLALRSHTTGLKNRIHAAIRRYGTLDGEPVSDLFAKKCRVRLSVAIGRMPEETRRAATHEWELLDEMERHIGELEVRIRERIGCIGWVRLLKTLPGVGEILGATIHLEIGDVKRFASARHLASYAGLVPTVHASGGRCHYGPTSKQANHYLRWAFVEAANCVVMHGQRYRQQHVMQLYQRLKPKCHSKAAVAVARHLAEASWWILTKGEKYRQPHAAAMSSSKNG

SEQ ID NO: 223027 - protein, 389 aa, unidentified
MYLIGIDISKYKHDCFIATEVGEIIKDSFSFDNDAKGFDQLLNVLQALDQSQLKKIGLEATGHYGYNLKVFLDQHGFDYMEFNPILVKKLSTGLSLRKTKTDKADARLLSMILLSVDYKTYPVKSYHIQELKSLTRYYKSLVKKRSRELVELTNTLDLIFPEFKPFFQNKFSQTAYFILEHYQTPRRIARMSYQNYEKLHSISKGHFSYAKFLRLKDLAKNTVGSSSDLLIFELESCIRLLRGINQEIKKLDSLLNNWTLKIDSPIFSIKGIGNVSALSLIAEYGNFTSFDSPAQMLSFAGMEPSIIQSGTSNKQGHMVKRGSGYLRDTLMNVAIPFMMHNPVIYDYYLKKKNEGKPHRVALSHVAKKLIRIIFYLVKSNQQFNQSKLV

SEQ ID NO: 223028 - protein, 346 aa, unidentified
MGVYLGVDFHTGAQNVCWCDTADGEIHERRLDHQRDDVRGFYAQFAVPAVIGVEASGYARWFHQWIEELGHRLLVGDARRIRQFAQRRQKNNRRDAALLLDLLLHDDFPAVHLPPPASQEVLRLLRYRDRLVRVRTRLWNGLHAVALGHRLQLGFRLRSAPGRAQLQALPLSAADALQREHSLALLAELQTRIAAIESALAARAQQDGRVARLRTHPGVGLLTALAVVHTLEPVTRFDRARRVAAYCGLDPVEHSSGDRLHFGHISKQGNRFLRFLLGEAAHGAVRPGGDDQLRRFYFHLLVKKNAPIATVAVARKLLLRLYRMLREQIDYDEFRRRGRDARRARQ

SEQ ID NO: 223029 - protein, 346 aa, unidentified
MTIVEVDRAIVGGVDTHLDNHVAAALDPLGALLGTESFATTPAGYKLLLSWLGQFGTVTKVGVEGTGAYGAGLARFLRKEGIDVVEVGRPNRMARRLHGKSDPLDAVEAARAALSGRAGGQAKTRDGAVEAIRVLHVAKRSATRARAKALTQMRHLTYTAPDQLRCSMKGLPGNKLVTEARRLRPRSSSDPVTSATKASLSSLAHRIDSLDREIVELEALLAPLVEATAPELLALLGVGIDTAAVLLVAAGDNAQRLHSESAWAHLCGVAPIQASSGKVTRHRLDRGGDRQANNALWRIVIVRLAHDPDTRAYMERRLKEGRSKREVIRILKRYVAREVYHYLPRG

SEQ ID NO: 223030 - protein, 385 aa, unidentified
MQASTVDTRTAGHCGTIFVAIELSQKSWLVTLHSPDKDKISHHKLESGDHADLLALIDRVRERAARALGAVPAVVSCYEAGYDGFWLHRLLLAAGITNYVFDPASIAVDQRARRVKTDRIDGERMLRTLMAYLRGEPRVVRIVRVPSAEQEDARRASRERDRLVKEQTAHTTRIKALLRLLGMAVGNPRRRNWLSWLAAQRDWQGQAVPPRTMTELSHEHARLLLVREQLKALTQAAAVDPTPAEAEMTRRSELLRQLKCLGPAFATTLTSEVFYKDFRNRREVGSYFGLTPSPWQSGGIDRDQGISKAGSPRARCAAIELSWLWLRHQPDSKLTLEYRKRTLDAGKRIKRIAIVALARKLVVALWRYLTTGLVPEGAVLKTIKV

SEQ ID NO: 223031 - protein, 431 aa, unidentified
MKRRINAKIEEITVSTLIVGIDIAKETHYARFVDYRGAEVGKTVSFKSDREGFEYIISQIEKIIKSAIYKQAYEKVVIGMEPTGHYWKPLANYLKKSEYKVVCVNPYHTKKAKELDDNSPTASDKKDAITIARLVKDGRYFEPYMPEEVYAELRILTNIRHSILKRNGSAKNNITAVLDEYFPEYTGTFKCVFTGKASRQVLKSCPFPKHIMELGEEGVLKEIKKAVKKTVGVKKVRELMAAAQSSVGVEYGLESAKMKLRMQVDELELVEKQLEEVEAAMEKMLEATGYAEQILSIKGIGVISGASFLGEVGDPMRFGNARQISNYAGYNLTEDSSGKNKSGTCISKRGRSQLRSVLYKMALTTVATNAEMKELYKYLKTRKENPLKKKQALVVISKKIITIIYSLIKKQEIYKPELVLGAVRREMLAAA

SEQ ID NO: 223032 - protein, 293 aa, unidentified
MVEYFIALDVHCAFSEMAVVTSSGKLVRRDRFDTSILAIREALAAVRSPRRLTFEEGPLADWLSRELRDHVRELLVCEPRRNHLIARDGDKDDPIDARKLADLYRGGYLKAVHQPNSLKRSLLKQQVGLYHDRVRERVRQGNQLVGLCRRHGVFVKAADLIDEDAWRQQLRRMPNERTLHHDLERVREVYLLMLRQEEALRKMLIGLARNEDAVRRFQELPGIAWIRGVTFYAYIDTPWRFKGKAALWKYCGIGLERRHSGNGPVRMRLSRRGNRRLKDVLLGAAKSAIAQAD

SEQ ID NO: 223033 - protein, 305 aa, unidentified
MKALRTHVAGVDVHKEMLAITVMIGKGDEDPTVEHFECSTMTDDLRAMGIILLGKGVNSVAMESTGVYWKPVYNVWQPLGLNPIIGNATHMKNVPGRKTDQKDAEWIAQLHRFGLIRASFVPDGIYQRLRLLSRQRTNLTGDLGRIKNRVHKVLEDGNIKWSSIVSDTFGVSGIKVLDLIAEGVTNAQTLAGSVTTKIKRRDEAKKALTNCLTTEHCFVIRLLMRQFRDIQSLILEIDNELVEKTAPYAHLIEELRKVPGIDKVLAIGLIAEATADMSSFADERRFAAWAGVAPGNNESAGKKKI

SEQ ID NO: 223034 - protein, 342 aa, unidentified
MDHFAGLDVSVKETCICIVDDTGRIVWEGKVRSEPEALLKVLGNSAYHFKRIGLEAGPLSQWLFSSLAEAELPVVCVETRHMQAVLKAQINKTDRNDARGIAQMIRAGLYRPVHVKTLRSQKLRMLLTHRKLLQSKAIAIENDLRGTLRNFGLKVGMVGKVRFEARIQELVENFSDLAALVEPLLIVRRALREQIVILHRRLLAIVRDDEVCRRLMTTPGVGPVVALTYRATVDVPARFRKSKAVGAVFGLTCSKYQSGEIDWSGRISRCGDEMMRVMLYEAAQSMLRSKKWSWLKAWAIQIARRRGMKKAIVALARRLAVIMHRIWVDGTEFRWTRETAAA

SEQ ID NO: 223035 - protein, 433 aa, unidentified
MTTAPYDLIIGLDRSDQTADLCLLDTRTGERRRVSIATAPEALWEWLAELRQQYPNARVGLCLEQPAGHLIPFLEAYAWLTLHPINPLTLQKYREAFVTSRAKDDTKDAEYLADLLLNHHAQLPVWAPEDSATRAVQQLVFHRRAVVDERTALTNRLQALLKQYYPQALTLCGEDLWRPLATAFLLKWPHLGAVQKARPATVTQFYYVHGSRSQKLLAQRLALLEKAVPVTDETAVLQSFELRVQLVCRQLQALQRTLGEFDQQLAAAYAAHPDRAIFASFPGAGPVLGPRLLASLGANRERFADAATQLQRYTGVAPVTKRSGGSCRIHRRYLCPKFHRQSFHEYASQSVLWSRWAAAYYLQQRQKGSTHHTAVRALAFKWQRVIWRCWQNHQPYDERIYEASLRKHGSPVVALFERVQLGKSPWKNPAPKN

SEQ ID NO: 223036 - protein, 337 aa, unidentified
MDRRYVGIDLHRRRSVIYAMDAEGEKLFCERIDNDSLRLLEVVSAAGGGAEVVIEATYGWYWAVDLLREAGFSVRLAHPSGNDWGKRRVKNDERDARDLADLLRLGRLAEAWIAPPAVREARELVRYRARLVQLRSGLKAQVHAVMAKEGVLPGVTDMFGPKGQTLLDVMELADAYGVRVKSLRDLIDVYDREVGMLERRIHELLRDDRGYQAIQALDGVGRTLSAIFVTEIGDIGRFRSPEALCSWAGLTPRHRESDTKVVRGKITKQGSKLVRWAALEAIVRYHGGPPLRDGFHRIAERRGTNKARIATARRLMTLVFYGLRDGEIRCLQQRAVA

SEQ ID NO: 223037 - protein, 363 aa, unidentified
MEELTHIGLDVHKDTIAVAVLRPGTVECDERVIPNTPEAVRRLLTRYPAASLSTCYEAGPTGYDTHRLVTSLGIACDVIAPSLIPKRSGVRVKTDRIDARNLARLHRAGELTSVRVPTPGEEALRDLVRAREEVKADKRIARQRIRSFLLRYGKRYPKPTDRWGARFEVWMRALRFEEPAAQAAFEHLLGAYFVRDSQLSAIDAQIEELAALPPLAEPVARLGALRGIATLSAVTITTETCDFRRFPTAGSYMAFVGLVPSEHSSGASRHQGSITKTGNQHIRRVLVEAAWSYRYAPAVRDKLKKRQEGQPPEVVAYSWAAQCRLHTTFRKLAARKNANKAAVAVARELSGFVWGVMTGNMGA

SEQ ID NO: 223038 - protein, 342 aa, unidentified
MAQQMSVLGIDIAKQGFHVVGMDDSGHVVLRKRLARSTLLTFMANVPPLRIGMEACGSAHDWARRFREHGHDVWLIAPPFVKAYVKSPKHDARDAEAICEAVTRPTMRLVPIKRVEQQDLQALHRIRERLIKARTALVNEICGLLNEYGIVLPQRIAKFRALIVDKLEAEQAKLTMLSTEVFWHLYDEFLAVEKRLAYYDEKLAAIGQAHPECQRLQTIPGIGPLSATALIAAIGDVTQFKNGRQLAAWPGLVPREHSTGGTPRLLGISKRGDRYLRKLLVHGARATLRWVDTKCDDRRQWLRALIARRGKNRAAVALANKNARIVWALLAHNQEYRVRTVV

SEQ ID NO: 223039 - protein, 299 aa, unidentified
MTGTLLTCQSFDVSTAGLAELIATLVDTGAVIDRIGVEGSSALGRPVVLALSAAGYDVREVQASRTNDRRRRRHRAKTDITDAQAIAAETLADPELPPAGKHTTDPPAAWEALHTVRTWRESLVLQRVRHLTEAEPVLTSLPIAIRDQLPATSRVMAALRALTTLQINHSILTAADRLKLSRLTATHEAVRAINVQLKDIDQQIPALLDTLGCTLTELVGIGVVTAMTLLTEIGDPTRFRTEAQFARWCGAAPVATSSGEGHGSPKRHRLDLAGNRQVNSVLHIVHVTQARMHEPAKAT

SEQ ID NO: 223040 - protein, 389 aa, unidentified
MFYVGLDVASEKHDCCILNEKKKIFRSFSISNSADGFDSLLAALAELSSDEIKIGLEATGIYSENLSVFLRRKGFDVSTINPLLIKKHQCATTLRKTKTDKADAKGIAQFIAEEGFQPDLPVSYHIQELKSLSRARFSVVQDRSALKNKVKRLLVLLFPELLGEFSDIFGNSAAALLKQYPSAAKLAACHCDTLAALLRKTSRGRFGRAKAEHLRQLAQNSVGNHSSAKAMELRMLLKRIGLLSEQIAEYDREIKIIMDKIDSPILSIPGISYTLGATIAAEIGDIRRFSSPAKLLAFAGLEPSIYQSGKFVPTSGKMVKRGSPFLRWALLQAAGYAPNYSSTFALYRSKKAAEGKPAAVVRSHVAKKLVRIIHSLLTHSTAFSDQLPA

SEQ ID NO: 223041 - protein, 343 aa, unidentified
MEQYAGIDVSLESASICVVDANGRIVREVKVASEPEALIAWFRMLQVTPTRIGLEAGPLSQWLYAGMREAGLPVELLETRHVRDAFKAMPVKTDRTDARGIAQLMRLGWFRSVHCKSLPAQELRAILTARKLMQSKRHDLEMSLRGILRGFGLKVGQTTPRSFEARVRELTDGHVTLLAVADALLSARAVLAEQLGRLQKRLVSLARQDTRARLLMSTPGVGVLVALTYVAAIDDPARFKSSKAAGAHFGLTPRKYQSGETDVTGRISKIGDASVRTVLYEAANVILTRPVKGSSLKSWAMRVAKRAGMRKAKVALARKLAVVLHRMLVDGTEFVAARAAARA

SEQ ID NO: 223042 - protein, 357 aa, unidentified
MNKMISFSEPTLYIGIDMHKKSWSIHIRTDISDHKGFSMPPDHEQLFNYVEANFSGMNIKLTYEAGCCGFSAARAFMNLGWEVKVVNPADIPRGDKQNYQKTDYLDSRNLCKLLSKDQLQGIYIPSQEQEMLCGLLRQRNNITKMLRKAKNYISSSLLFHGILLQEEFDKPTWSIAFKKWLEELKFEQESGRQDLNSKLRILNCLNQEYLQVGNELRLYCRKHHKKDYYLLMSIPGIGGYLASAILAELGDIRRFKNEREFSSYIGMVPGIHQSGGKESFMGITPRCRAIIRTYLVEAAWVALRKDPELQLNYRKHVGKNPKSVIIKIAHKLVRRILSVIKNEKKYQNNYNQNTMPK

SEQ ID NO: 223043 - protein, 312 aa, unidentified
MIEQCFVGIDVSQDRLDVLLLPQATGFSVANNEAGWNALIARLRDVPVAAIGLEPSGGYERGVIRALLTASLSVRRINPNRLRQFARARGALAKNDRLDARLIAEYVATMPTHVVRHDPAAARIAEIVTVRRQLCDEHVAIENQAAQLEDAMLRRLAKRRLARIETDIRLLEKRLTETIAAEADLARRYARLTSMPGVGPVLAFTLIALLPELGCMSRKQIAALVGLAPYDFDSGKLRGHRSIYGGRMPVRNVLYMAALSACRYNPALKAFHNRLAAAGKKPKVILVAVMRKMITMLNAMLRDGASWQPQAA

SEQ ID NO: 223044 - protein, 418 aa, unidentified
MNNNMYPVHPRMTRTYAGVDSHRDTHTVIFLNCFHEVLGEVTVGSAPSEFPKFIKRAKKYLQPNTTFAFGFEDVSAYGRSFVKYLVEKGYLVKHVDASKVATERGQVLHKTDSFDAECCGRVLINQFDKLPNANPQDKYWMLTNLVTRRNFIVKINVMAKNSLHGAIAESYPHYKKFFSRLTTDSALAFYEEFPAPHHLENVSVEGLATFLHSASKGRLSASKAELILNHVQRDKVGLVEYQDTKDFTVRSLVRQVKNNLAELAAIDEEIEKILAHFNYPLTSIKGIDSLTAAKLISEIGDINRFKNAKALAKYSGVAPVTFASGMSKLEMANARGNRKLNEIFYRIALTSVMPIGINKTLINPIFYDYYKKKISEGKLKNQALKCVMRRLVNIIYSVMKHKRPYENPPKGNVPVVTA

SEQ ID NO: 223045 - protein, 417 aa, unidentified
MDTLFARVAGLDVHLKSISCAVRCRQDSGKLLTEVRSFGTMTRDLRALADYLQGLGVTHVALEATGVLWKPVWNILDGRFTLLLVNPRHLKKVPGRKTDVKDAEWIAQLLQCGLLRGSFVPPRPVRQLRDLTRHRAQLMGEHTRVANRVHKLLEDANIKLGAVASDVLGKSGRAMLAALLQGEQDAEKLAELALGRLRGKIPELQRALEGHCTEHHRFVLGRLLSHLGYLERQSEQFSDHIAGRLDELLPAEIFVRLDAIPGVNRKTIENVIAEIGTDMTVFPDEHHLSSWCGMCPGNEESAGKRLRSRTRKGNRWLRRALTEAAWAASHVKNSYLAAQYRRLVGRRGKNRALVAVAHSLLVIIYHVLKNNVEYKDLGPDYFERLEPDRLRRHLVRRLQRLGYDVTVTPRVAEDSVR

SEQ ID NO: 223046 - protein, 402 aa, unidentified
MNAVGIDVSKGKSMVAIMRPFGEIVSAPFEIKHTASGINSLVELINSVEGESRIVMEHTGRYYEVLAHQLSEANLFVSAINPKLIKDFDNDSLRKVKSDKADAVKIARYALDKWQNLKQYNVMDELRNQLKTMNRQFGFYMKHKTAMKNNLIGILDQTYPGVNTYFDSPARSDGSQKWVDFASTYWHVDCVRKMSLNSFIDHYQNWCKRKKYNFSQSKAEEIYGKAKELVPVLPKDAITKLIIKQAVDQLNSASTTVESLRTLMNETASKLPEYPVVMAMKGVGTSLGPQLMAEIGDVSRFTHKSAITAFAGVDPGVNESGTYEQKSVPTSKRGSADLRKTLFQVMDVLIKTHPQDDPVYQFLDKKRAQGKPYYVYMTAGANKFLRIYYGRVKEYLSSLPES

SEQ ID NO: 223047 - protein, 430 aa, unidentified
MSYRIAGVDVHKKMLAVVVSDVEVDGQYQFERRIFGSNPEQLRSLAVWLVEQEVEEVVMESTAQYWKPVWEALERYWKPIRQKREGAGRMSGSLHLAQAQSNRARRGRKKDFPDAERLVKRLVARELTLSFVPDAEQRLLRTVTRRKYQLTRDHVRLQNQLESLLEEAHIKLSSLVSNLLGASARRMLKALADGETNPTALAALADENLRATPAQLCDALSACTDLKPVYRRLLKMALEQLQFLEQQIGQLDQEMANLLSQHQDAVMRLAEVPGLGVDSAQQIIAEVGPTAVTFPSEKQLSSWVGVSPGDDESAGVNYSHRSPNGNRHMRRVLNQAANAAARTKGSIFEIVYRRSVPRMGHNQTIGAIAHRQCRLIWLILHQGVRYEERGPAVTKRSKQKRTARMIRQLRNLGYRIELPNSQQPSPTQAP

SEQ ID NO: 223048 - protein, 341 aa, unidentified
MKNLFIGVDFSKEKVDVAIIFADGLTETAARVFNEFKTTVSGYKQLVKWVEQNSYGIDSSLWLFCGENTGDYSKGLCNFLYGKGYDMWLENAKSIKDASGLRRLKSDRADASMIAEYAMRNYDRAIMYEPLSESLAQLRELFLYRQMVIRHRCSFQVRRGEKKLTMEKSPVKTMISQSGRHIVSELNKEVEKIDKRIAELIKSDEELTEVFTIVTSVPGIGTQNAVCLMVYTDNFRRFNYDSRKIACYYGIAPFGKDSGTSVHSDPHVHYMANRQIKSMLTQAALAAVNFNPVIARYYMRLMERGKKKQVALNNVKNKLVHLVTAMVRNRQLYTPEYKISA

SEQ ID NO: 223049 - protein, 344 aa, unidentified
MPILCGLDIHRKQITFDLLDTETGEVRCGQVRPADREHLAAWLARFAGQDAHFAMEGCTGWRYVAEEVTAAGLTAHLADPAQLAGLRGPKRKAKTDRADARHERVMLAAGQLPECWIPPSRVLDLRALLETYLDLRKERTGWIQRVHAVLYHHGTPSLSGQRLGTPAGQAALAAAAARCSPAAGQVQVQIAVEIAEALDQRLLQVRRQLVTAARHTAGARELQARLYGAGPVTALALTCWLGGAGRFSSSRQAVRFAGLDITVHSSDAKRSPGHLSRQGPAVLRWAVFESGKAHARRGAPHYAYYTQVKDRVDGKRAALSVARKILREAHHILAALGDDALAPC

SEQ ID NO: 223050 - protein, 356 aa, unidentified
MSREIKYIGMDVHKEGVVIAVLNDTGKLVMESIVETEASSLLQFIHGMRGELHLTWEEGTWAAWLYDLLKPHVQQVLVCDPRRNALLKEGNKSDKIDARKLADLLRTGMLRPVYHGEHGLRTLRELGRSYETISKDLNRVMNRIKALYRGWSISCGGTQVYAPRYREEWLRKIEHVGVRRRAELLYQQLDGLQTLRRTLRPELLAESRKHKAAKLLRQIPCIGPIRAARLLALMQTPHRFRSKRQLWTYSGLGIETRDSAQYRFVHGQLQRAKKPQQIRGLNRNHNHEMKEIFKGAATRASCGVGPLRDFYVALLDKGMKPEMARLTLARKIAAIALTLWKKEETFDAEQLKTQAA

SEQ ID NO: 223051 - protein, 411 aa, unidentified
MRVHHNVCCGIDVHKKSVTVCLMWGPADKEPQFEIRRFGTMTQDLQKLAEWLKQAGCEAATMESTGSYWKPVWNVLEGRIPKLILANAQHVRALPGEKTDRKDGKRLAELTRHGQIRPSYVPPRAILELRDLTRYRNKLLSAGSSERNRVQKVLEDANIKLGSVLSDMFGASGQKMLQALVKEDTVDTAKVAQLAHWSLKPKIEAIQQALEGKLTDHHRFLIGASLQHMRFIEEQLVRLDKEIQRRLQPYQEEYALLQTIPGIKETGAARILSEIGADMSPFPDGDHLSSWGGACPGNNESAGKKFQSKIRKGNPHLLAALTECAWAATKKKDCHFRNKYYRLKSRRGSQRAIVAIDHAMLKCIYVVLSQRKPYEEPKPTSLTQAQKERKASSLCRQLRALGYDVKIQKAA

SEQ ID NO: 223052 - protein, 388 aa, unidentified
MLLDHPSDGLAAIRTQFGAIFVSLELSRSTWLVTSLSPCKGEKMSKRSMKAGELSELLKLFAELKRKAQARTGESYPLIAIQEAGLDGFWLHRALQQEGIESHVVDPASIATPRRRRRAKTDRLDGETLLRTLLAYKRGEVRVCAMVVAPSPAEEDRRRLCRERETLIAERIEHVNRIKGLLFAQGIFDYAPLRRDRRKRLEALRTGDGRALLAHLKAQISRELDRLELLLDQITAVEREQDALLAASKAAGEKTVSNPVAMLLELKSLGPNFTAVLWSEAFYRQFANRRQIASYAGLAATPWRSGGIEREQGVSKAGNPRLRTTMIQLAWLWVRHQPQSALTQWFKVHSQRGRKRAIVALARKLLVALWKYVTAGVVIEGAEIKAAA

SEQ ID NO: 223053 - protein, 332 aa, unidentified
MYLGIDVHKRYAQVAVMDEAGEIVEEVRVENANLDDLAQRYAGAQAVLEATSNYYHIHDTLSEHLDVTVAHPKKINQIADTDKKTDRVDAKELARMLRLNSVPESYVPSEEVREARALVRGRQTLVENRTKYANKVHGLLSDHGITEDVKPLNVEGREFLRELSIPTPWDELLDSYLDLIESLTEEIQKLEETIEERAGSLKETQLLMSIPGVSYFTALTIYAEVGDIRRFDRDKEVVSYVGLNPVIRESGDSRIEGSISKRGSGRVRWLLVQAANTAVHTCNDEYLSRFYDRLASRKNSQKAIVATARKMLVSIYHMLDRGEAYDPPGVSA

SEQ ID NO: 223054 - protein, 391 aa, unidentified
MIYIGIDVAKDKHDCFITNSDSEVLFKAFTIFNNLDGFNDLYQKIEAVMDDVTKLKIGLEATGHYSYNLLGYLIDKGLPTYVINPLHTNLYRKSLSLRQTKTDKVDARTIASMLMSDVNLKSYSDTSYHNKELKSLTRYRFDKVKERAKLKTSVSRLVCILFPELEKLVPTLHMASVYALLSEFPSAKHVATAHLTRLTNLLSESSKGRYGKDTAITFRDSARASIGSNMPAKSLELKHTIKLIQELDSEIDEIENEIKIIMDEINSPILSIPGINYRMGAMIIAEIGDFNRFDSPDKILAYAGFSPSTYQSGQLDGAYAHMEKRGSRYLRYALYNATKYVCHWDPTFAAYLAKKRAEGKHYNVAISHAVKKLVRVIYHLEKTKQQYIKAA

SEQ ID NO: 223055 - protein, 374 aa, unidentified
MQKKVRFLGLDVHAETIAVAVAEQDGEVRSLGVIANRGESVRKLIRQLGAGGHLRACYEAGPTGYVLYWQLTELGVECAVVAPTLVPSKAGDRVKTDRRDAVKLARCHRAGDLTAVWVPDAGVEGLRDLVRAREAAKQDQLRARHRLSKFLLRTGQRPPFAGKAWTLPYMAWVRQLRYQQAAQEWTRLDLLHEVEHMAERVKRLEATIREAVKLAPAAMQEVIRGLQALRGIAEISAVTVVAELGRISRFENARQLMGYSGAVPSEESTGQRLRRGAITKTGNAHLRRIAIEAAWSYRLKPAIGPVLRKRQEGVPEEIKEMAWKAQLRLHKRYARLAAAGKDPRKIVTAVGRELLGFLWAIGVRTETVHPAMAA

SEQ ID NO: 223056 - protein, 398 aa, unidentified
MTESSDYESVQVFIGVDVGKDTHHAVAINRSGKHLFDKALPNDENKLRSLISDLKQHGQILLVVDQPTTIGALPVAVARSEGVLVGYLPGLAMRRIADLHAGEAKTDARDAAIIAEAARTLPHALRTLKLADEQIAELSMLCGFDDDLAAQTTQASNRIRGLLTQIHPALERVLGPRLEHPAVLDLLQRYPSPEKLASLGEKKLAAQLCKLAPRLGKRLAADIAQALAEQTVVVPGTNAAAVVLPRLTLQLITLRKQRDEVALEVEQRVLAHPLYPVLTSMPGVGVRTAARLLTEVACRAFASAAHLAAYAGLAPVTRRSGSSIRGEHPSRRGNKALKRALFLSAFAALRDPLSRAYYTRKMSQGKRHNQALIALARRRCDVLFAMMRDGTFYTPQGS

SEQ ID NO: 223057 - protein, 402 aa, unidentified
MNAVGIDVSKGKSMVAIMRPFGEIVSAPFEIKHTAGDIHSLVELINSVEGESRIVMEHTGRYYEVLAHQLSKANLFVSAINPKLIKDFDNDSLRKVKSDKADAVKIARYALDKWQNLKQYNVMDELRNQLKTMNRQFGFYMKHKTAMKNNLIGILDQTYPGVNTYFDSPARSDGSQKWVDFASTYWHVDCVRKMSLNAFIDHYQNWCKRKKYNFSQSKAEEIYGKAKELVPVLPKDAITKLIIKQAVYQLNSASTTVESLRTLMNETASKLPEYPVVMAMKGVGTSLGPQLMAEIGDVSRFTHKSAITAFAGVDPGVNESGSYEQKSVPTSKRGSSDLRKTLFQVMDVLIKTHPQDDPVYQFIDKKRAQGKPYYVYMTAGANKFLRIYYGRVKEYLSSLPES

SEQ ID NO: 223058 - protein, 446 aa, unidentified
MNSIFQRSNPAIKKLFQEAGSPKKVMCVPIDYAKRQHTALVCNGEGMQLRGTFNIHNTAEGVAFLEDIIKGLCKKHSIRKAHVFFGGEDCTAFCYNFIHALLEKKYLGIGINAYEGAEARQNQLASTDKLDLLGIASVLINKKHGRTLSTAYGQARIMRELTHHRDSLVKAHTASAYRIYHWVDQLMPGFLDAKQSGLEPFSEASLWLMSQNFSPRQLLARKNDILAEKLGLLMLRNTDAKVAQLKQLARTTLPPPTGLCETLQDNLAREVALYRHLRDTLRQLDQQIARRLAVTPGAMLTTASGIGIILASGLYAEIGDPARQRNMASLAAYAGIVSRLKQTGGPDNPARSLGRSRRACIPLKRRILDIALSISQYGAEELKADYRRRVEANQDARFTMGRRMLRICAHLIQRQDFFLPPALLANTDPDARKAYFAKAWDPILIK

SEQ ID NO: 223059 - protein, 398 aa, unidentified
MYLNIGIDVSKNKHDVCILNENGEQIGKFMKLTNTKTSLNKFLEQIKIISEKHDAKIRIGLEATGIYWYSLFSKISEDHKISIYNPAQIHAFAKVNVRGSKTDKIDAKTIANMLRFGNAPQTDYSDKQRLELREYVRFYLKLTSKKTNLKKRFRRNLHLVFPGYDQVFKNVFTRTSKEILSQSPTPDDILEMGEAKLFELMKKASKNQIDKEKARELIAKAEDTIPSGILKESSLFELQIMLDLIENIEKHTDSLEKRIFAIWENVKDKHYIQTIPGISEFRAAMIWAEIGDIENFKHPDQIVAFAGLDPKVRKSANKEVIGGPNKRGSSTLRWALGWAVQESKNINPVIAPYFKKKIDEGKHYNTARCAASKKLIRIIWSVEKNKKPFQIPSNLQSS

SEQ ID NO: 223060 - protein, 329 aa, unidentified
MTSRTHQEEIHVGIDVSKRTLDVCILPGQDKEGSHGESFVVPNDQAGIDEILSRIEKPAMGPKLVVMEATGRHERLAASSIATKGIPVAVVNPRQARDFAKAIGRLAKTDKIDAFVLARFAKAVEPQASTIPDEEAMALQAILARRRQLIEMLVAENNRLGMAPKALQKRIKAHLEWLKKEIGRTDRDLDEAIENNAAFEANEALLRSVPGVGRILSRTLLAELPELGTIPHKRLCALVGVAPFNRDSGQRSGRREAWGGRAPVRATLYMGAIVATRFNPTIKGFYERLLAAGKPKKVALVACMRKLLSILNALMRDQAIWRCPHALTP

SEQ ID NO: 223061 - protein, 400 aa, unidentified
MTTRTTAWAGIDIGKTHHWICAVDAGGAAVVSVKVANVEADLMAALATVTDLADQVVWAVDIVGAPSALILALLARAGSPVFYASGRVVNTMSAAYTGEGKTDAKDAYVIAETVRLRRDLPMVDAVTDLIRELALLTAHRSDLIADRVRMINRLRDVMTSVFPTLEQQFDYSSHKGALILLTEYASPKRLRRLGETRLTQWLRRRQVRDAARVAARALAAARGQDIELPGQQVAEMIIAELAGSLLHLDQRIQGLDQQIAATFRRHHQAITIESMPGFGPILGAQLLVAAGDVRAYPSAGHLAAAAGLVPVPNDSGRRSGNLHKPRRYSRPLRHVFYLSAQTSMMRAGPNRAYYLKKRAGGHTHAQAVITLARRRIDVLWALLRDDRTFSIDPPTLAAAA

SEQ ID NO: 223062 - protein, 343 aa, unidentified
MQVSTIGLDLAKNVFQAHGVSAEGKVVLKKQLRRGQVLSTFAKLPPCLVGMEACAGAHYWARELRKLGHDVRLMPARDVKAYVKRDKTDAADAAAICEAVSRPSMRFVALKTPEQQGRLMQHRVRDLLLRQRTQTINALRAHMAELGLVAATGRQGLGLLLAILADAKDERLPQDARASLKLLASQITALQAQIDTLDKRLHAQHRQCPASRRLETIPGIGVIGATALAATITDPKAFKSGRDLAAFIGLVPRNNSSGGKQRLGPISKQGDRYLRRILVVGAHSILKQARTRPDKHPWLARLMARKPGKLAAVALANKTARIAWAVLARGETYRAPTAPAAAG

SEQ ID NO: 223063 - protein, 409 aa, unidentified
MDPVIDCVAGLDVHKATVVVTVRAAGANGRRTSRTETFGTMTADLIALRDWLQASGVTHVALESTGVYWKPIYYVLEDTFQLLLINMLELKHVPGRKTDVKDSEWLAQLLECGLLKASFVPPPAIRELRDITRYQVQQVRDRAREVNRLCKVLEDAGIKLTSVATDVLGVSGRAMVDALVAGTTDPTVLAELARGRLRAKLPALRRALQGRFRRHHAFLVEQILAKIDFLDETLARITAELDERLAPFAPMLANLDTIPGVNRTTAVSIIAESGGDMTRFPTAGHLCSWAGMCPGHDESAGKRRSGKTRKANRYLRAALIQSALGASHTKGTALQARYHRVKRHRGHKKAIVAVGHQILEIAFYVMCDGRTYDELGADYYDRRHTDRAARRHVRQLEALGFQVTIEKAA

SEQ ID NO: 223064 - protein, 318 aa, unidentified
MSEAFVSVGIDVASSHVDVCVEGAELAASMRRTSNDAAGHDALVQALAPLQPALVLMEATGGYEAELACALQAAGLPVAVINPVMARNFAKAMQRLAKTDRIDAQTLAQLAAVLVQRGDAQRFIRPVSAPEQQDLAALVNRRRQLVAMQLAERQRLRLARTVARSSIEAMLQAIAKQLDDVEAQMVGHVRQHHAQAAKLLHSVAGIGRVATATLIGELPELGRLNRRQISALVGVAPYANDSGSHTGRRRIAGGRFQVRRALYMATLSATRHNPPIKAFYERLLAAGKLPKVALIACMRKLLTHLNALMRQAIANAQA

SEQ ID NO: 223065 - protein, 461 aa, unidentified
MARPRAPKRPPQPPRPGALPQLNANAAGIDVGATSHFVAVPADRDAESVREFGPFTGDLYRLAEWLTACGIETVALESTGVYWIPLFQVLEARGCEVKLVDARQLKRVPGRKSDVLDCQWLQQLHTFGLQAGAFRPDDQICVLRSYLRQRAMLVTYAGQHVQHLQKALVQMNLQLPVVLDDVTGATGMKIIRAVRAGERDPQRLAALRHGKCKHDEATIAAALQGDWREEHLFALEQAVELVDAYQAKIAACDARIQAHLARCADRGTGAPPPPGTPPRADRHDLSFDATAELYRVTGVDLTAIPGLGAHTALKVLSEIGLAMTRWPSAKHFGAWLGLAPNNRVSGGKILSRRTTPTANRAATALRVAAQSLHRSQSALGAFLRRKAAHLGMPKAITATAYKLARLLYAMLSTGTEYVELGQDHYERAYTERVVRSLSRRANDLGYHLVKHEPSHSLATSG

SEQ ID NO: 223066 - protein, 316 aa, unidentified
MSPAKVYVGIDVAKDWLDVAQRPGGEAWRVSSDETGIAALVDRLKGVRPTLVVLEATGGLQIPAVAALAAAGLRTVVVNPRQVRQFAGATGRLAKTDAIDAQVLAQFGEAVRPEVRPLPDVATQELSALVARRRQLIEMLTAEKNRLRLATKKVRPNIEAHIRWLEGELLDLEGGLGEVIRSSPVWREQDNLLRSVPGVGPVLSSVLLADLPELGKLSRKEVAALVGVAPLNRDSGLFRGRRQVWGGRSHVRTALYMATLVASRHNPAIKSFYQRLLSAGKAKKVALTACMRKLLTILNAMMRHQVLWQHALPLDR

SEQ ID NO: 223067 - protein, 484 aa, unidentified
MVKSKHQAYKKRQHIQKVKGRRFTDEIRNLDLEKVLVVPIDGGKNSHKTLVANYFGDIVKSPFEFTNSANGVKIFDSILKQISSSIAAQKVIIGLESTGHYHENLYRKLIDLGYDVAIVNPTSVYAQRQGQLNWCKTDEIDLCAIGQVLIDNQATETRLAEGLYYNLKHLSRLHRDEVRKRAQLKIKIRVLCDHIFPGLQGAGIFSDFWSKSLILLLENYPTPCSVIRLGTKRLARFFKKHNTKLGIHTAERLVIVAKNALSVRDVNLEAHLLNLKFKLSDLKRANEKIQKLHVELARYLVQTPGILLLSIKQVNVPSAAEYLAEVGPLEQAGSAKKIIARAGLNPSRFQTSQYEREETPITKHGSNFLRNICLIISQNLIGVNPHSLQPHNPYFREFFDRLVQKGKNKQVAKVACANKFVKVSWAMMREKTLFTPPTWRKNNVSDDPLSKLQRFLSLNQAEELFEELAQIAKEQLPPLYHALL

SEQ ID NO: 223068 - protein, 353 aa, unidentified
MRILALDLGSASTQTHAHLLDTESGEKPIRRAFPTMASAFLDVVKELLPDRVVVEATPISGHFVDLCEVLGLPIQVANVRDPAWQNRTSKTDRNDAELLARLSASGQLRTVEVPPRDIRQWRLAIHHRHELVRCRTRIKNRIRALLRNELQPPVKNLWSVKGLRFAASQAKDPGACTPDERWRGVLSMELARYKEIQAHITTASKQLDALVDARPAAALLTTIPGVGYRLAEAVVACLVTAKRFKNRKQVVGYVGLCPRVQQSGQHTMYGRITKTGNSQLRSLLVEVAQLGSRRDPWMKAIFAQIQGKSPKNKRTNRAVTAVARRLLVRCWAVLRDHENGLPPRPTAASPVAA

SEQ ID NO: 223069 - protein, 376 aa, unidentified
MKEKLRFLGLDVHAETIAVAVAEPNGEVRSLGMIANREDSIRKFIRKLGSPEHLRACYEAGPTGFVLYWQLTQLGVKCDVVAPSLVPKKPGDRVKTDRRDALKLARSHRSDDLTAVWVPDEGSEALRDLVRAREAAKQDQLRAKHRLTKFLLRTGQRPPLGVKAWTEKYVEWVQQVRYTHPAQEATLLDCLNEVQHMEERVKRLEQSIVEVIQLAPAPMQQVVRGLQALRGIAHISAVTIVVELGNITSRFESARDLMGYSGAFPSEDSTGNRIRRGGITKSGNAHLRRIVVESAWSYRHRPAIGARLRRRQEGLPAEITEIAWKAQNRLHKRYMTLMARGKEQRKTMTAIARELLGFIWAIGIKAEAACKQQMAA

SEQ ID NO: 223070 - protein, 366 aa, unidentified
MRKISTVAMGRIENFKGHQLTIGLDLGDRFSHYCILNESGEVIGEHNLPTTPKGIEEVFHSIPRSRIALETGTHSPWISRQLARLGHEVIVAHARNVRLIGDSSRKDDQFDARTLARLARIDPGLLGPVRHRSAEAQIHLTVIRARAGLVRARTALVNTARGLTKSYGERLRKCGTQKMHREMAQGLSQELRDALDPLFGEIESLNQRIAEYDRRIKQIAKEIYPQIALLKQVKGVGTLIALAYVLTLDDPHRFRRSRDAGCFVGLRPGRRNSGMSQPQLHISKEGDVYLRTMLVQGAHYILGPFGEDSDLRRWGLRLAERGGKNAKKRAVLAVARKLAVLLHKLWVSGEVYEPLRNNYKVVAAVA

SEQ ID NO: 223071 - protein, 482 aa, unidentified
MNCSNTVQQLDKQFGGKVVKAPKDQIVRTRCAGIDVHKKILVVAVCITDPATLISEYHVYRFKTTNSDLNRLASLFISFGVKDACMESTGKYWIPVYAVLEAHELNPYIVHPKYVKQLPGKKTDFTDAIHIASEFRLGKIKFSIILPEDFRNLRELTRMRRKYVNDRTAYKNRFHNELIEGMFRIGNTLSDIYGKTGTALSELAINVSADKITDEMIAKCIDPKCKRSKEEIIDSFRGFMFSDTNKFMINELLTTIHELDKHIADFDAALKPYYDKYSKQIHLLMTMVGIKKLTAITILAEIGIDMSLWDDVASFVRWAGGAPGTHNSASTKHSTKCQGDKYLIAVLVEAARGAVRSTNQPYFMLKYKKLVKRRPSGIAVIAIVRKMLICIYYMLKTGNPFNPRDYQQVVENRASEKVAPTISNAVSILRKQGLSAEMIEKIKVELAQDVQDAGNKKGQSPKNSSSTSCETPGTVSNAIATA

SEQ ID NO: 223072 - protein, 368 aa, unidentified
MIVIGADTHKSSHTLAAIDAATGRVLSTRTVRADRDGMLAAWRWAHALDAQRVWALEDCRHVSGRLERALIAQGERVVRVAPKLMGQARRGERAPGKSDPIDATAVARGALREGVETLPTAFLDERGLEIRLLADHREDLVAERTRYQNRLRWHLVELDSEFEASLPARGLDRGCWQDRIARRLAQLPQHARVRVARDELRRVRELTRAERALERELGVLIARLRPELLAEQGIAALTAATLIGHTAGAERFPTDGHFAMHAGAAPIPCSSGRRDRVRFNRGGDRQLNCALHRIAVTRLRVDPATRAYLQRKLAEGHSRREALRCLKRHLARRIWHLLYRPLSSMPETTTTRRPRVSVNAPIHAPCLT

SEQ ID NO: 223073 - protein, 358 aa, unidentified
MESQDIKYVGIDCGKKSLEVVRIHSENSLKERRQFSTTETGINNLLKWLTQNDIVGLEAGTQSFRIAKSILNKGIQVIVLNPGDLATIYQSLKKTDKEDSLKIARLIQRYPMEELPVVPVPTDEEEDNRRLCTEQENWTRQLTQGKNRLHSLFTQAGLTEITKKHLRTKSSRETSVTLLPSRYQKEAERILQVLDLVEQNLKLIEEETKDALKKNPAYVQTIMSMPGIGMVTSLAILSYMGDCKRFSSAKQAAYYAGLVPRVDISGDTVRYGKIVSRGCHSIRRVIVQAAWSLVRCQHGGKLKEFYERLYSKKGAKKSIIAVSRKMIEVLYSMIRTGALFDSMPEEVLHRKLAQHGLM

SEQ ID NO: 223074 - protein, 352 aa, unidentified
MLILAIDLAKARSLFCWHDVVKGSHRMKTIASTPQAFHDALTSEKVERVIIEVCDMAGWIKDLCDTLQIPLQIANGNTEGWRWRNVKKKTDKDDVLKLVSLSLTDQLPTVDLPDRPVRQWKSLILYRQKLIERRTRIKNRIHALLVSEGRAMSGGRNAWSEQSLAELCRLARPISECPIEELWQGQLHMELEGLDDLNHAVETLDRKLNALGEKDARVIRLRTIPGVGPRLSELVVAVIDDPKRFKNVRQVGAYAGLVPRRYQSGSMDRSGRISKAGCGKLRKLLLEIAWGMLRYNAHGQSVFARISKGQKTRRKQAAVALARRILGWCWAMLRDGTDWRDPGTDHPTPAMT

SEQ ID NO: 223075 - protein, 460 aa, unidentified
MSQRKRRIRKRKKLAAAQTPLNPTHHPDAAGIDVGAEELVAAVPPGRGEGPPVRTFSAFTEGLHALRAWLLACHIKTVAMESTGNYWLCACAILEDAGIEVCLVNARHVKGVPGKKTDVCDAAWLQQLHAAGLLRGSFRPQKEILPLRYLLRHRGDLVAQSGQQVQLMQKVLTEMNLHIHHVFSDVDGVSAQAIITAILGGERDAAKLAALRDRRCRAPLDKIKAALAGDYRDEYLFVLKQCQTRWQQIHESVVECDAEIARRTAAISGVTDAPLPAAPAAPRRVQKNMITAMPVYEEAHRLLGVDLSAVPGISGGVLCVLLSELGTATHIRQKFRSAEAFASWLGLCPDNRISGGRILKAGTRKVSNRIANILRMAANALSREQGRMGEFVRRFKGRLGKAEGIVVGAHKLARILWALIVSGQPYDEAKAFAITPASTARRLRNLQNQAKALNLTLVPA

SEQ ID NO: 223076 - protein, 342 aa, unidentified
METTHIAVDTSKSVFTLHASDSTGRCTCRRDVSRGKFLAWFAKRAPLTITLEACGGSHHWGRELAKLGHVVRLIAPQHAKPFVKRGKNDRADAEAISEAASRPSMRFVPVKSCQAQAQAMVLKQRALLVGQRTQLVNALRGHATEFGLVVPRGTENVGPLLAKIAAEEAMPALARELCGELGGNIARLDERIATIDRRIAAMHKGNPLSQLLTTIPGIGSIAASTFATTIDPGQFQSGRAFAAYLGLTPKDHSSGGKQRLGGISRAGDERLRELLVLGAMSVLSHAVRGKPARGASAWLMKLLERKPRKVVAVALANKTARIIWAMMSSGEVYRGAARPAAA

SEQ ID NO: 223077 - protein, 394 aa, unidentified
MPSCLAIDVAKGKSMVTLVSSCGEVLIDPYEVDHSINGFSNLLNRINNLKLDNISVIMESTNIYHRPIERFFLENGFKVFVINPIYGRMHKRNLRKTKTDKEDCINLVNLFMSNTFKEYIKPDKLYLDLNALSRQYFALDDICVNIKNRYRNLIYLCFPEYENIFKNNLIYSNIALEFIKSFPHADIISNTRIDRIQNFFKKHEFRYWKTKAILIKDTASNSYPSVNMNDEIVSNLSQMANLVNEYQKTINIIKYKMTFLAKKSKYFKSINSIYGIGEFTTSIIIAELGDINRFNNIKELTAYCGLDPSIKQSGKSINVHGPISKSGNKYMRKILYVACSNIIRLATISKNENDIEIYYRKKRNEGKHHYAAIVACTTKLLRKILALCKQLDNQ

SEQ ID NO: 223078 - protein, 424 aa, unidentified
MCCLPAPPGLTHPASEHHREGTPTIVTASRRVVIGADTHLDTNHLAVITDTGKPLADAEFPTSPTGYAAAVRWAQSFGIIAIAGVEGTSSYGAGLTRMLQAAGIEVAEVSRPDRAARRRRGKSDPLDAYAAARAALAGDRLAVPKDEHTTALRALLSARRSAVKAHTAATNQIHALLVTGPVELRERYRRHHTPALVTALARCRPAAHRDPTTVAVLTAAKALAQRAEFLEHQKQDLTAQLDALVSQINPALRAAYGVGPETAAQLLVTAGANPHRLRSEASLAALCGAAPVPASSGQITRHRLSRGGDRAANNALYRIALVRMSNHPPTRDYVERQTAKGRTKKEILRLLKRAIAREVFRLLTRPGPVDDYRDLRPARLAKNLTLAAVAQHFGVPIITVSRLERGHQRNDTLANNYRQWLTAA

SEQ ID NO: 223079 - protein, 378 aa, unidentified
MNRIIKIGMDVHTTNYTLCIFEPSFEHDGTVHCITQVKPEVKNIIHVIETFKKKHENEELNIVCGYEAGCLGYSLYHELKEKGIECVILAPTTMKTEKGGRKLKNDYRDAKMIAECLAYGGYSAVHVPTELDNSVKEFIRMRDDIKENLKSIKQQIIAFLTRNGKQFEGKSFWTRKHIDWINTVSFSEPLLQDTLKEYMIEYNHLCNRIETLDRQIEEISLKEEYVEKVQQLQCLIGIKTHTALSLIVETSDFNRFKKGNMYSAYLGLIPGDDSSGGHENKVGITKAGNSHLRRLLVEAAQGYTRGRVGFKSKDLKSRQEKCSSEVVAYADRANERLRRKYYRMTLRGKRFNVAKTAIARELACFVWGIMTDHIDLCN

SEQ ID NO: 223080 - protein, 395 aa, unidentified
MFIVGIDIAKRSHEAVIIAEDGQVVRKAFSFRNNCTGYNLLLEQVRRLTLVKSQIVFAMESTAHYWLALYARLLKDGYAVMVLNPIQSHSLRELYIRKAKTDARDSLIIADLVRFGRCKASNVPQDKILALRELCRSRAYLVDMAADLKRKLIALLDRIFPEYESLFDSVFSKASIAVLSKYSTPQKVKNANLRKLTDILMESSNGHFGEWKAHQLKEAACSSFGIDDSGGVYSTLLGMFLEQILSLTAQADSLEKQISVFFQEFNNPLTSIPGVGTVLAATILSEIGDITRFSSADKLLAYAGLDPSVKQSGEFKSNQNRMSKRGSPYLRRAIWLASTVAVHRDPMFQTYYEKKISEGLHYMNAIGHVSRKMTAVIFAVLRDGQPYQPILQSAG

SEQ ID NO: 223081 - protein, 358 aa, unidentified
MVQSKGINFNGQNIYIGIDVHLKSWSVTIITESNYKKTHSQKSSAKELFEHLKKHYPGGKYKAVYESGFSGYSTYYSLKEYGIDCIIIHAADAPTTQYENVMKTDAIDSEKLAKSLKSGILKGIYIREKESLDDRNLIRLRKTLQRQLAGYKSRVKHLLYNNGVEYPACFDKPSLHWSKRFTLWLRNDVTLLSSTRYSLDLLLDQVTLFRKNLLKANRMVRELASRPKYAERYENLISIPGVGTVTAMSLLTEVDDINRFQNQREFASFLGLIPSCHSSGETICNMEKTFRGNKQLGPLIIESAWVAIRYDKALAIAYSEYCRQMKGQEAIIRIARKLSNRILSVLKSGKKYQYDRCR

SEQ ID NO: 223082 - protein, 381 aa, unidentified
MLDQTAHYPVPTVYAAIELSKKSWIVAIVQPAKGQPSIYRIKGGAFSELVMRLRTATPSGERLLVCYEAGYDGFWLARSLQTEKIDCRVLDPASLQVNRRARRVKTDRIDVLMLLRALIAVDRGDRHVCSIVRVPTIEEEDARRSHRERQRLIRERTAHINRIKGLLFGQGIRGVEPRLRRSRIDFSDLRTGEGLPLPARLRAELEREYARLDLVETQLRVTEAERETADAQDPSIEHKRNMLIQLRGVGPASAAILTREIFARRFANRRQLGSYLGLTPSAYDSGSTTRCQGISKAGNSFARRVMIEVAWLWRKYQPNSALAKWYEERAAGQSPRIRRIMLVALARKLIVALWRYVEIGLVPAGAVSCAKNDAALEAAAV

SEQ ID NO: 223083 - protein, 412 aa, unidentified
MKRIRDRVAGLDVHRDMVVACCRVVDPDGEVEVTKQSFATTRKGLGELAVFLSDAAVTTVAMEATGVYWRSPYYALEGMFDELWLCNAQHVKNVPGRKSDLSDAEWLADVAAHGMVRPSFVPPPEIRELRELTRYRKTQVDARAREIQRLEKVLQDAGIKLTSVASAVWSVSSREIIEALISGTRDPIVLAQMAKGRMRGKIDRLEEALSGHFGAHHAVVCRQIIDHIDFLDHSIAALTEEVTTRLVPFEAAVTIVTSVPGISRRTAEVIVAETGADMSRFPTPSQLCAWAGVAPASYESAGKRRPAGTRHGSQWLRRALIESARAAARTKNSYYSAQYARIARRRGANKAAVAVANSMLFTIWHLLTTGALYDDPGADYFERRHDPAVEAKRLARRIEALGFDVSLIERAA

SEQ ID NO: 223084 - protein, 343 aa, unidentified
MGEVSTIGLDIAKSVFQVHGVDADGTVIIRKRITRAKLLEFFATLPACLVGIEACPSAHYWSRRLQALGHTVRLMPPSYVKAYVKRSKNDANDAAAIYEAVTRPSMRFVATKSEQQQSGLMLHRSRQLLVCQRTMLSNAIRGHMAELGIISAKGRNGTAELLKMIANEQDDRIPAVARFSLDVLARQYAAVRAEIVAIEKRIHAWHRSSEESRRLEEIPGVGPIVATALVAEVGDWKVFSSGRSLAAWIGLVPRQHSTGGKERLGRISKQGNRHLRWLLVAGAMAVIRYARQHGTKRPWLAHLMDRRPIKVAAVALANKIARMAWAMMVRGERFKEPRLLPAA

SEQ ID NO: 223085 - protein, 344 aa, unidentified
MRITTIGLDLAKSVFQVHGVDATGQVVIRKSLRRLQMLPFFAKLPSCLVGIEACGTSHHWARELLKLGHEVRLMPPAYVKPYVKRGKTDAADAEAVCEAVTRPTMRFVPVKSPEQQAALSMHRTRDLLVKQRTQLINMIRGLLAEFGIDIPKGLERALLMARQIVDGKPPEVPFEAAKIVSTLSQQVLDTHVRLREIDRDLAIWLRSNDVARRLMTIPGIGPIGASALAASVTDPHQFRSGRQFAAWLGLTPLQKSSGGKERLGRISKMGDKYLRKLLIVGMTSLVRRAKYNPGKIDPRLADLLARKPTRVATVAMANKTARVIWAIMARGETYRTGHQPALAA

SEQ ID NO: 223086 - protein, 343 aa, unidentified
MSKPNPSMQSTVFCGIDVSAATLAAAVHQEDQRFEQRVFNNNASGHKALIAWLHKRKARVRVSLEATGIYSLDLAMALDRADGIEVAVLNPKLVHRFAQTLRRSKTDSADAQALAEYSRRMPFTPWRAPSLNSLQLRTISRHLLGLTAEYTRQNNRLHAAEKSAATPRCVVNDLKRSMASLERRILRFRREARELVRSDETIRKRFELLIGIPGIAEISAVQLLGELSSLSPEMSVRQWVAHSGLDPVHQVSGTSVHKPSRMSRAGNRYLRRALYMPALVAVRLDPHLKAFYETLLSRHKAKLQAIIAVARKLLHAIYGMLRSETPYDGSKLFPALLPAIIPG

SEQ ID NO: 223087 - protein, 405 aa, unidentified
MYVGIDWASQRHAVCVVDDAGRKATAFAITHTADGFDQLVARLRRYGDPAGLPVAIERPDGRLVDRLLEAGHPVVPVQPNAIKAWRDAEVLSGAKHDPSDAALIAEYLRLRSHRLRVLTPFSAETRALRAVVRTREDLVDQRVAATNQLDACLEAFWPGAKHVFADLASPIALDFLTRYPAPESAASLGEQRMAAFLTKHGYCGRRRPEELLARLRAAPAGLTGTVEVEARRDAVLAMVKVLRALLAAIKDLDRSVLAHLGEHPDAEIFTSLPRSGRINAAQVLAEWGDCRPAYADAEAVACLAGATPVTKQSGKHTSVQFRWACNKRLRRAICTLADNYRHGSPWAAKVYADALARGHDHPHAVRILARAWIRVLWRCWIDQVPYDPGKHGAARKLTEMATSAA

SEQ ID NO: 223088 - protein, 338 aa, unidentified
MKLYGGIDLHSNNSVFAISNEEGVIVSRKKLPNDLDKILSFLAPFKDQLIGLVVESTFNWYWLVDALIENKYCVYLANTAAIQQYSGLKHADDNSDAAWLGEMLRLNILPTGYIYPKEERTVRDLMRKRMQLVQQSTKNLLSIQGAYMRHLSHKLSNNKTKKLTSLRIEQDFKSENTVMAVQTNLAVMNCLAEQVKLIERAIIQQVKLRQEFQKLTCIDGIGTVLALTIMLETGSIKRFEKVGNYASYCRCVNGARYSNGKKKGSTNSKNGNKYLAWAFVEAANFAIRYNTTVRNYYQRKLAKTNKTVAIKTVAHKLSRACFYVLRDQVPFEAEKAFT

SEQ ID NO: 223089 - protein, 351 aa, unidentified
MSAKANSAIAVIGIDIGKNSFHVVGQDKRGAIMLRQKWSRGQAEARLANLPPCLIGMEACVGAHHLSRKLRMLGHDARLMPAKYVRPYSKGQKNDFRDAEAIAEAVQRPTMKFVATKSTEQLDLQALHRVRERLVSQRTGIINQIRAFLLERGVAVRQGLRFLRTELPRILATPCDVLSPRMLRVIEDLAGDWRRLDERIEGLSSEIEALARQDKGCERLMSVPGIGPIISSAMVAAIGTGDAFSKGRDFGAWLGLVPKQISTGDRTILGSISKRGNRYLRALFVQAAWVVLVKVGPKHWERYGLKSWIEAAKKRLHHNVLAIALANKLARIAWSVLAHGRTFEASKIQAA

SEQ ID NO: 223090 - protein, 345 aa, unidentified
MLYVGVDFHKRYSFITEMGEDGTINSQLRLSNDRESLTQYVNKLPSESKLAIEATCNWYYFYDLVEGHDIDVSLAHPLKTKAIASARIMNDKISSTTLADLLRTNYLPTAYIPDRGVRDTREILRSRAFLVAMRTRLKNRVHAILSKNGLESPYTDIFGKKSLGWLRELQLRPCYRQPLDSYIRLAEFFGNEIKLVTQTIESLAMESPEARLLDTHPGISYYSALLIATEIGTIDRFPTHGQLCSYAGLVPSVHSSGGKTRLGSITKQGSKWLRWILIECSSHAVGGSARYKSLYTRVAYKHGKAAARVAVARSMLRAMYYMLKYNKPFQERPILERPPVSAMGS

SEQ ID NO: 223091 - protein, 369 aa, unidentified
MGGRGTSDDVHRATIAVAIAEDDGCPPTSYGSIANEPSAIRKLMARLGGPNVRVRVAYEAGPTGYALHRQLTSMRLECMVVAPSLIPVRRGDKVKTDRRDALKLARLLRSGDLTAVWVPDEAHEALRNLVRARADAKSDELRAKHRLSKFLLRQGSHPPVGIRNWSVRFFQWLRQVKFEHVADEIVFTDYLAAVTAAGDRIKRLEAALRQCAETSSQVALIGALQAFRGIGFLSAVTIVAEAGDLRRFRTAPQFMAYAGVVPSESSSGRTHHRGSITKTGNSLLRHVLGEAAHHARHVPRVAGTLKQRQTNVPQPIVDLAWRAQQRLHSRYRHLGARIGVPKALTAVARELAGFIWAVSHVLEEVPTAA

SEQ ID NO: 223092 - protein, 354 aa, unidentified
MSHSSTLFIGMDVHKETIAVAYVAQDHGAELTYLGTIGTRQCDIDQLVRKMQSKAKHLVFVYEAGPCGYWLYRYLSKKGYDCWVVAPSLIPKKAGERVKTDRRDAVPLARLARLGDLTAVYVPTVEDEAIRDLSRAREDTLSDLKAAKFRLKAFLLRHDIRYTGRATWSPAHLRGLSEVICPTPAQQIVFQEYVRAVNEHTERLQRLEQALHEQVTSWRLYPVVEALQALRGVPFTVAVTTVAERGDLTRFATPRALMKCLGLIPSESSSGERRRQGSMTNAGNTHARRALVEGAGAYRSPAKVSRHLQRRLEKPPKVIQDLSWKAQGRLCKRSRNLLTRGKPANQVVVAIARE

SEQ ID NO: 223093 - protein, 331 aa, unidentified
MKINQTIGIDISKLTFDVRIHSNQMYAVFNNDMDGFKRMIKWVIKNNSFSKDETLYIFEHTGLYSHQLAVFLTEQHTPFVLVPGLEVKRSLGISRGKNDKIDAKKIAKYAFEKRDEIQTYEMPSEQISLLKRLLSLRVRLVKQRAGYKASLKEQKRILIKKENKVLFESQEKIIKYLTKQIDAIEKEMDDIINKNDSLKTIYKLIISIKSVGPQTALFLIVYTSAFTKFANWRKFASYVGTAPFPNSSGTSIRGKTKVSNLAYKKIKSLLDQCAKSAIQHNPEMKIFYKKRVEEGKNEMSTINIVRNKILARIFAVVKRGTPYVDTMRYAA

SEQ ID NO: 223094 - protein, 343 aa, unidentified
MQAVKIIGLDIAKSIFQVHGVDANGQVAIRRRLKRRYVLAFFQKLPSCLVGIEACATSHHWSRELQALGHTVRLMPPAYVKPYVKRQKNDATDAEAICEAVSRANLRFVATKTPEQQSGLVLHRTRHLFIRQQTSVINAIRAHLAEFGVVAPVGRTGIEHLLSVIADVSDKRLPEVARACLLALGAQLRALKAQLLELDRMITAWHRSNETSKRLDAIPGVGHVLATALVASIADPKVFRSGRDFSAWIGLVPKQHSSGGRERLGRISKQGDRYLRSLFTAGALAVIRYAKIYGTKHRPWLTALLARRPTKVAAIALANKIARMAWAMMTKGERYKEPIALAA

SEQ ID NO: 223095 - protein, 342 aa, unidentified
MTIATVGIDLGKNSCSLAARDATGAVVVRRRLSRERLVEFVGRLPACVLGLEACCGAHHLGRQFAAQGHEVRLMAPEYVQPYVKAQKNDDRDAEAIAEAATRPTMRFVALKSEAQLDQQTLHRVRSRLVNGRTRLINQLRAILLERGITAAKGRRALGLALGVLLDEDVSGLSPRVRELVDEMRREWAELDARIAALDREFVETARSSAPARRLATIPGIGALNATALTAAIGEAEDFASARDLAAWLGLVPRQTTTGGKARLGGITKRGNVYLRTLLIHGARAALPGLSRGETQLGAWLRGLLERAHPNVVVVALAAKLARIAWAVLRSGTDYDRRVGAGA

SEQ ID NO: 223096 - protein, 391 aa, unidentified
MIYVGIDVAKDKHDCFITNSYGEVLFKSFTIPNNRDGFETLFQKVQSVSDDLTKVKVGLEATGHYSYNLLGFLLNKGLTTFVINPLHTNLYRKSLSLRQTKTDKVDARTIASMLMSDMNLKSYSDTSYHNEELKSLTRYRFDKVQERAKLKTSISRLVCILFPELEKLVPTLHMASVYALLSEFPSAHAIASVHLTRLTNLLSESSHGRYGKDTAVIFREAARNSIGSDMPAKSLELKHTIKLIQELTSEIDEIEAEIKSIMDEINSPILTIPGISYNMGAMIIAEIGDFSRFDSADKILAYAGMSPSTYQSGQLDNCYSHMEKRGSRYLRYALYNATKYVCHWDESFGTYLAKKRAEGKHYNVAISHAAKKLVRTIYAMEKSKQSYNLVA

SEQ ID NO: 223097 - protein, 343 aa, unidentified
MTHYVGLDVSQKLTAICVVDDTGRRLWRGQCTSDPEQIERAVRRHGGGEARIGIETGPMTPWLVHELRGRGLDVTCLDARHARAALKMQVNKTDQNDAEGLAQIMRTGWYRSVHVKSFDAHRTRALLGARTQLVGMTTRLSNHIRGVLKTFGMLPGAMRGLPFDRRVEALLADRADVAPIVRPMLTAWRQLREQIAFFDKAVRVLVRSSPTCRHLMSVPGIGVLSVLAYVSMVEDPARFGRSRSVGAHLGLTPKQYQSGEIDRSGRISKCGDTLARTLMYEAAVVLMTRVKRASGLKDWAQAIARRSGAGKARVALARKLAVILHSIWRSAEPFRWSEQPAAV

SEQ ID NO: 223098 - protein, 310 aa, unidentified
MTRPYVGIDVAKATLDVAIGSDGEMVQVENSEAGIAQLVKRLGEAAPALVVLEATGGYESLVAAAVAGREIAVAIVNPRQVRDFAKATGVLAKTDRIDARVLARFAEAVRPEPRPLPTAEAKELEEFLGRRRQIVDMLTMEKNRLSIASTERMKKSLKKHIAWLEETLRRANDDIDTAVRNSPAWREQEDLLRSFPGIGPVSARTVLGELPELGALNRKKIAALVGVAPLNRDSGTLQGTRTCWGGRANVRQVLYMATIAAVRCNPVIRRVYLALRARGKKHKVALVACMRKVLTILTAMVRDQRRWSPS

SEQ ID NO: 223099 - protein, 371 aa, unidentified
MTTIACKDTGTKTDRSQTDQVEVAAGVDTHQDTHTAAVVDTTGRLLGHRQFPASRHGYLELLDWLRSFGLLLVVGIEGTGAYGAGLARHLHDQHVAMLEIDRPDRKTRRSAGKSDPIDAEAAARAALARVRTGVPKVRTGRVEALRNLRVARRSAVDQRADCVRRIKTLIVTAPDGLRARLRGLPKQELLDTCAGLRPDTARADEPEQATKVALRSLARRHAALTEEITELDALIEPLVAAINPDLLALNGVGADVAGQLLVTAGENADRIHSEAAFAMLCGVAPIPASSGKTHRHRLNRGGNRQANAALYRIVLCRLRWDPRTQTYMRRRTAEGLSKKDIIRCLKRLIAREIYYVLTRQRIEPGDLAIAA

SEQ ID NO: 223100 - protein, 386 aa, unidentified
MHHATTLPVSEQTGICGDCATLFVSLELSRSTWVATALAPGSRKMSKHTLVGGDGSKLLDLLARLKTRAEQRIAAPVKLVAIQEVGLDGFWIHRLLEANGVESHVVDPASIAVPRRHRRAKTDAIDGETLLRTLMAWQRGEPRVCAMTVPPSPSEEDRRRISRERATLLRERIQHTNRIRGLLFGQGITNYNPLHKNRREDLEELRTGDGRPVPAHLKAEILREIDRLELVLRQIGEVEAERDEMLRPAQASSPAALLMRLKGIGAEFAGVLYLEGLFRHFENRRQLAAYAGLAPSPWKSGSVDHEQGISKAGNPRLRTTMIELAWMWVRYQPASALSCWFRQRVGSERGRIRRISIVALARKLLIALSRYINHGEIPAGAVVKPV

SEQ ID NO: 223101 - protein, 443 aa, unidentified
MTVRKRELTVMFPNAAGIDVGSASHYVAVPSDRCEEPVREFASFTEELIALADWLASCGIDTVVLESTGVYWIALYELLESRGFVVYLVHAKHVKNVPGKKSDVLDCQWLQQLMSFGLLTRAFRPDDKVCALRAVVRQRDTLIDAQASETQRMQKALTQMNVQLANVITDIMGTSGQAIIRAIVAGERDAQKLARLRNYRVHASEEQIAKSLHGNWREEHLFCLAQSLKLFDTYQELIAETDAKIETMLARMQKHTTHLAPNNNKGRNKNAPNFDARTALYAWAGVDLTRIGGIDVSTALKILAELGTDFSKFKSAKHFASWLGLCPGTRITGGKRISGVTKRIANRVTQALKLAAQGLQRSRCALGAYYRTKAARLGAGKAITATAHKLARLVYAIITKGEEFVQRSQDHYEEQVRARTVRYLQKKAASLGFTLQPNAAVCA

SEQ ID NO: 223102 - protein, 428 aa, unidentified
MNNTLSATLFVGIDVSSKTNYVYGMDFFGNKLLSFQTSNNAPGAQVILEKIIHTLRDNNLAYLTVAMESTSFYSWHIANFLSTNEALVWFKPKVYCLNPRTINAYKKSFTDIDKTDPLDALAIADYARVGKINTSPWKGSQYIALQRLTRCRLHLIENISREKSYILSNIFLKFSELAVLDKKEHPFSNTFGASSIATLTEFLSVEDIANTSIDELVAFLVDKGKNRFSNPQATAKLLQKAARDSYRLDKALADPLNATIAASLNCIKALEREVKSLDKAIEKAVKALETHEFQCALSIKGIGPVFAAGIVAEIGDITKFNNQAALAKYAGLTWRKNQSGNFTACETFMTKTGNKYLRYYLLEATNSILKHNAEYYAFYRKKYDEALLHKHKRALALTSRKLVRLIFALLRNNQLYTSNTEADIEKTS

SEQ ID NO: 223103 - protein, 402 aa, unidentified
MNAVGIDVSKGKSMVAIMRPFGDIVSAPFEIKHTAGDIHSLVELINSVEGESRIVMEHTGRYYEVLAHQLSKANLFVSAINPKLIKDFDNDSLRKVKSDKADAVKIARYALDKWQNLKQYNVMDELRNQLKTMNRQFGFYMKHKTAMKNNLIGILDQTYPGVNTYFDSPARSDGSQKWVDFASTYWHVDCVRKMSLNAFIDHYQNWCKRKKYNFSQSKAEEIYGKAKELVPVLPKDAITKLIIKQAVYQLNSASTTVESLRTLMNETASKLPEYPVVMAMKGVGTSLGSQLMAEIGDVSRFTHKSAITAFAGVDPGVNESGSYEQKSVPTSKRGSSDLRKTLFQVMDVLIKTHPQDDPVYQFLDKKRAQGKPYYVYMTAGANKFLRIYYGRVKEYLSSLPES

SEQ ID NO: 223104 - protein, 416 aa, unidentified
MKLFVGIDVSSEKLDVCFLTDDDQLSTLSEISVSNDIEGASLTREMILEFNENYLFDQIIIGMESTSMYSFHPSMFFHEDEELKKLNTLVTIENPFRIKQFRRMFDEDKTDRNDALRIADFLRIQRFTTSPIKEEKYMALQRLTRTRYQLIKQLTRTKQHFLENLTYKCNTLVREMKDESTSLFSATVISLMTEDFTLDELAELPLEAFSDLIQEKGRGRFKHPEKIAKAIQRAIRSSYRLGTVAQESIDIVLGVLVCEMRALEKNIKELDKAIEQLVIVIPEYQCLTSIPGIGKVYAAGLIAEIGQIERFEDQTKLAKYAGLSWKVKQSGNYQSQNTPLTKQGNRYFRYYLVEAANSVKNYLPEYKAFYQSKYKEVPKHQHKRALVLTARKFTRLVDTLLRNHQLYTPPRSVIDK

SEQ ID NO: 223105 - protein, 330 aa, unidentified
MVIIGCDYHPGFQQIAFVDTETGECGERRLTHREEAEQFYGALKERSVRVGMEASGHARWFERLLGEMQFELWIGDAAEIRTKRVRKQKTDRQDAQLLLRLMVEDRFPRIWVADAENRDLRQLLWHRHRLVQMRTRIMNQLHVVALNEGVRRKKALWRPAGRSELESLVLAPWARRRRQDLLDLLDQLTPKIHELTRALEEEVEKRPVTRRLMTHPGVGVLTALAFELVIGTPERFHCGKQIASYVGLVPAEDSSGDRRRLGHISKQGNALLRFLLVEAAQVTVRSHPQWRSKFFHLAMRRGGKIAKVAMARKLAVHLYWMWRKGWDYEQ

SEQ ID NO: 223106 - protein, 420 aa, unidentified
MVQDDGSRIKEFRQLKHEIRGSAQHLVVGIDIAKDRHHAFFGTPAGKVLLHRLVFENTKEGFEKLCFQTDILKTQHGLRHVVFGMEPTSDYHKPLGEYLIHKGHLVVLVGGSAVKKNRELLDGRWDKNDTKDAANVADLITQGKCLFYDLPSLGLRELRNLLSLKRRLRKSEQGYKVRIRNHLIAQYFPEMDGSFTYAEGPALVRCLDPKKLAGLPFRELVRMVSSGNGHQKSRLEEIHTKAASSIGCAAHPSVAFEASTLLDGVASFHLMIRETDKKIAEVCTRFSEYSFLLSIPGFGPDVSARVLGALGDPHRFENHRQVLKMAGLDLSADRSGKKQDAAPVISKKGKADLRYGLYHAAVVASSKNPTFIKYFTDKLKGREREKGITTKMRVKLAAKMLVIAWTLMKKKEVFDPDCIT

SEQ ID NO: 223107 - protein, 351 aa, unidentified
MIAINTDIIIANIGVDIGKNAFHICAMNAKGTIVLRERLTRAALPKRLANIPPCLIGMEACAGAHHIGRKLASLGHDVRLMPAKYVKPFLKGHKNDYRDAEAIAEAVQRPTMRFVPFKSDEQLDLQALHRVRSRLVGQRTAVINQIRAFLLEHGVPVRQGPGALRQALPSILAQQTDTLSSRIIRLIEGLIDDWRRFDQRIADVTSEIEQLAKQSENCKGLMSVPGIGPMTASAMVAAIGDGSAFSRGRDFAAWLGLVPKQISTGDRTILGGISRRGNSYLRTLFIQGARSVLQRFEGWEKKSFGRWLIAASKRLHKNVLAVALANKLARIAWSVLYHARGYDAAPTPKAA

SEQ ID NO: 223108 - protein, 385 aa, unidentified
MYQLSGSTQAALDYNSTIIGALELSEKKWVLAVQLPGVRRHSRHVLEACGDGLASFVERLKARCAAAGRKIARVILTHEAGRDGFWLARFLARRGIEIHVIQPSSLPVDRRARRAKTDIIDVEMLLRTLMAWLRGEPRVCSMVPIPSEADEEARRAYREREDLTGERRSIVNKIDGILATLGVKGYKALRRDRREQLTAVRQPDGDPIPQKARARIERLLDRLDLVLKLIEQVESARDAVLKKDAPADEAERMIRSLTDLRSIGPDFATLLVREAFVRQFRNRRALGGYVGLGGTPFSSGGSEREQGIGKDGNRRVRAAMVELAWTWLRWQSDSALSVWFRARVGAMGGRIKKIMIVALARKLLVALWRYVMDGVIPDGAKMKAA

SEQ ID NO: 223109 - protein, 420 aa, unidentified
MDIMYSRCAGLDVHKQSVVACRILPTSSASSGVSTHTHGETRSFGTTVADLLRLSDWLSEGGVTHVALEITVVYWKPIFNLLEGNFTVWVLNAQHVKNLPGRKTDVKDAEWLADLLRHGLVQPSFIPPQSQRDLRDLTRERTNFVRQRATLVNRVQKVLEGANLKLGDVATNVLGVSGRAILTAIIAGESDAKVLAGLAVGKLRSKRTELEGALQGRVRPHHRFLLTELLCQIDSLDETITHFDEEIRAACETAGNEEVISLLDTIPGVGRELAEVLVAEIGTDMSRFPTAGHLAAWAGVAPGNNESAGKRRSGKTRKGDMWLRTGLVQAARAAIRTKGTYLAAQYRRLVPRRGDKRALVAVAHSILVIAYHVILRKEPYRELGADYFERRKPEATARRLAPQIERLGFQVTLAQVAAVA

SEQ ID NO: 223110 - protein, 428 aa, unidentified
MAYRIAAVDVHKKMLAVVVADVAGEGEYRFERRKFGATPGELHVLAQWLDQQEVEEVVMESTAQYWKPVWGTLERYWKPARQKRECAPKMAGTLHLCQAKSNHGPRGRKNDFADGERMIKRLVAHELVLSFVPDPEQRLWRTVTRRKHQLTRTKVGFKGQLESLLEQAHIKLSSFVSDLLGVSARRMLKALADGETDPAVLAALADCRLRATPEQLRDALGACTQLDPVFRRLLKMALEELELIERHIAQLEREAMDLMQEHQDAVQRVAEVPGFGLDSALQMIAEVGPKAAAFEVAKALSSWVGVCPGSEESAGESHSTRSPKGNRQMRRLLDQAAQSAVKVKGSIFEVTFHRLLPRLGYQQAIWAIAHRLCRLLWLILHKGVRYEERGPAVSAKSKRTRTARMIRELHKLGYRVEGGPLPAAGVRA

SEQ ID NO: 223111 - protein, 419 aa, unidentified
MAFKIFRKNCCGLDVHKTWIYACIGITDPNGRTEYKQARFSSFTKGLQELADWLAKYDCTDVCMESSGKFWIPVFNILEKTCWVTLAHPKYTKPQKGNKTDRKDAKWICDLYMCDMVKPSFIPPPGIRQLRDLMRYRMKLTNMVTGEKNRALNCLTVSNLKLDDVFSDVFGKSSRSIIHHILEYPGETFDVAPFIDRRCKHPVEEVQAAVDGTISHEQAIKLRECLQHLDELETHKTNIEKEILRLAQQYPYQLELLQTVPGFSGNVMTAIALISEIGADMSVFPSAKHLVSLAGCCPRNDQSSKKVKSTRISRAGVYLKPLLVQVANAVIKSDKYPECKERYRRIKARRGHKKAIVAICRMLLTAIWNILSKLEPYSADGYLEDKLTEHSVVITKFQGLELLRKRGYIFKDEVNPAPA

SEQ ID NO: 223112 - protein, 391 aa, unidentified
MSMYFVGIDISKYKHDCCIISAADQQIVSKFTVKNDKDGFEHLLTTLNSLSNPEDIKIGFESTAHYALNLELFLENAHHSFMEVNPVLIKEYKKSTTLRRTKTDSVDCESIARWLMTVEYKPHSKGFYHAYSLKSLTRLRDRLIRQRSFYLVKITNVLDHTFPEFKPFFNERLSKTALYLLENYGSAEKMARMNSASYDKLRCISRGKFSIQQFLRLKELAANTVGVNNSIFDLELNTLLTLYKSLSDEINTLETEIIKLIEEVHPHYMSIPGIGPISAAVIYAEYGDISNFSNPGQMLAFAGIEPGINDSGTESHGGRMVKHGSSQLRYVLLNSCLPLIRFDLTFATYYAKKRAEGKKHRVAITHVAKKLIRVIYALERQDVDFNVQKLR

SEQ ID NO: 223113 - protein, 365 aa, unidentified
MRFYTQQHRFYCGIDLHARSMHVCVLDQAGAVLFDRNLPARPEAFLRAIAPFREDLIVGVECMFAWYWVADLCQAEDIPFALGHALYMKAIHGGKAKNDRIDAGKIARLLRGGTFPVAYAYPKGMRETRDLVRRRAELLTHLQILNAQYNLAPFPKKLSFAANRTAMDIAQRFADPSVQKSAAVNLDLIDRLDELIGELELYLVRTAKVDDVQTYHRLQTIPGVGKVLALILLYEMHDVGRFGDAGPFLSYARLVRCLHESAGKKLGCGGKKIGNAHLRWAFAEAACLFLRASERAKRWKQQQAARRGEGKALAILAAKLGRAVYRMLRKREAFDEGRFWQGGPGRTGTGSSSLSRTEEACHAGD

SEQ ID NO: 223114 - protein, 440 aa, unidentified
MINKDAAGIDIGSGEHWVAVPEDRDEEPVRCFGCFTADLQAMARWLKECGVTTVAMESTGVYWIPCYQILEEHGFEVKLVNARHVKNVPGRKSDVSDCQWLQRLHTYGLLSGSFRPDDQICVLRSYWRHRANLVRYASDHIQHMQKALTQMNLHLHKVLSNVTGVTGMNIIRAIISGERDPEKLALMRERGVKNTPEAIAKALEGDYRQEHLFALKQAVELYDFYHRQIEACDREIERYLHTFEAKVDPVQNPLPKQKRKKEMRYQSFVDLRTELYRVSGIDFTQIPGLDVVTVQTILSEIGLDPGKFPTEKRFVSWLGLCPNNRITGGQVKSTKTRKTANRAANAFRMAAQSLANSNTGLGGFYRRIRGRLGAPKAITATAHKLARIFYRMWTTGQSYTDLGSDYYENRYKERVLRNITRRARELGYDAVLQPIQQRVA

SEQ ID NO: 223115 - protein, 347 aa, unidentified
MDQIIIGVDTHKSSHIAVAINTQGARLGTMTIPTTRQGYRSLEAWATGFGPVKAFGIEGTGSYGAGLSRDLQTKGHTVLDVIRSNRQLRYLHGKSDILDAESAAKSVLNGQATALAKTQSGASEMIRHIKIARDSAVKSKSQAMITLKTLIINAPAELRASLDQIRGPITLVRHISALRPGEITSPTASAKAALRALAQRWLALHEEIQIHEAELERLVADKAPKLMKSHGISTLTLAEMLILVGDNPERIRSEAALAKLCGICPIPASSGKTTRMRLNRGGNRQANAAIYRVAVVRMRDDDRMKAYAARRTAEGKTRREIVRCIKRYIVREVYTALCATKPTQFPT

SEQ ID NO: 223116 - protein, 352 aa, unidentified
MTVGVDVSKDELVYCTRTTAPRSALNTPDGVASFLDSLSPDTVIAMEATGRYYRLLADTAHSRGFKVIVHNPKDTNKYAKSVSPRATTDPIMAQVIAEYSEIRDHRLYDPTPSFVDALKNLIRTRAGLVKDRVSLLNRAAEHCDIAAYLRQATQSLKESIDKLDEHIAQIAKAIPQYQLLIKVPGFGPLVTAYLIAMLSSGTFRRSDSFVAFVGLDLRVRESGKFKGKRRLSKRGDPEARRLLYMAALATCRVQGPFRELYEHYISRGFSRTEATVFVARKLARTAWAIYKHNQPYLPGRVINQPTAQALSHPDAPIVTRQPHAVLPKSTTHTILPRTNNSKKRRIPLDSTT

SEQ ID NO: 223117 - protein, 343 aa, unidentified
MEDVLRSCCAGLDIHQKVIVACIIRSTEGKKRPEKFFGSFDTTTRGLFDLSDWLTSYEVTHISMESTGVYWKCVWRILQNHFELQLANPRHIKNIPGKKTDMKDAEWIARLTRLGVVPTSFVPPEPIQELRDLTRYRKHLVEDLNREKNRGHMVLQNAGIKLASVIKDIYGKSGRGLLYALIKNEQITETLILKCVYTTLRRKVPQLLESLEGFMTPHYRKMLSLHLTQIECLEKQLVEVEETINDSLVPYEEYVERLEEIPGINRRTAAVVLAEVGIDMSVFPSAGHLASWAGVSPGNNQSAGKTRSKRVGKGNSYLKKVLAQGALAVSQGNLIEFKHFSFG

SEQ ID NO: 223118 - protein, 397 aa, unidentified
MYIVGIDIAKRKHEAAVIDGDGAVIIKPFSFTNNCSGYNRLLAMLAKAKLPLDEVSFAMEATGHYWLALFTRLQKEGFRVQVINPVQTNSIRSFYIRQAKTDPRDALLIAEVIRFGHFSESTLHPENIYELRELCRGRHAIVSMQADVKRKVVALLDQVFPEYETAFTNMFGDTSMAILQTCPTPKELSEMPLEELCHLIEVSSHKRFRMAKAQELQALAHGSFGFAMAGDVFSTMIRLYAKHLDFLKQQVREMDRKIAEIMDTLDTPITTITGIGPTLGAYILSEIGDINRFSSSAKLAAYAGIDPTMRQSGEYNGVRNRMSKRGSPYLRHAIWLATSSAVLHDPALKLYFQKKRDEGKPYMASVGHACRKMVSIIYAVMRGNKAYTPCIPNEISA

SEQ ID NO: 223119 - protein, 355 aa, unidentified
MTASYDYHIGVDYHKSYSHLVVQDSGGKTLRSGRVKNDRQSLGGFLERYRQNSHAVVEATRNWMVIYDWLDDICDDVVLAHPLKVKAIADAKIKTDKIDATVLAHLLRADLVPEAWAPGERARELRVALRERMFYVRLRTMTKNRIVTVFDRYPEQTAQLKKLGDLFGKAGRVQLAQVNVSEIDRIQIDRGLAFIGDIDGRIKQSEATIRTMTKANANVRLLKTIPGIGEFFARLIDAEIDDIGRFRNPKKLAAYAGLVPSTYSSGGKTFHGKIIKQGNKWLRWAFVEAVTPAIVTDPQLRAQYEHLKIRGVNKARVAIARKLLTIAFQILRDQRAYEPRGASPTEGASTISRLS

SEQ ID NO: 223120 - protein, 366 aa, unidentified
MKKISTVQVFGNELFKEQKLTIGVDLGDRWSFYCVLDEAGKIILEQKVATTPEAIKQTFGKIPRSLIALETGTHSPWVSRLLSELGHQVLVAHAQKVQLITKSTRKDDRHDARTLARLARIDPELLGPVRHRSAKAQIHLTVIRARAELVRARTALVNAARGLVKSYGQRLPKCGTRQVSRELGAGLHAELREVLEPLLKEIESLNERIKEYDERMEKIARESYPHVELLKQVKGVGTQIALTYVLTLDDPRRFAKSREVGCFLGLKPGRRDSGESQPQMHISKEGDRYLRTMLVQGAHYILGPFGEDSDLRRWGLRLAERGGKSAKKRAVVAVARKLAVLLHRLWVSGEVYEPLRNSQKAMRAVA

SEQ ID NO: 223121 - protein, 387 aa, unidentified
MPQPNDLSRSLTALDQDSTLIAVIEMSQASWLVGAIVPGVERHPLKKLAPDAEELLRLLQRWRDEATKASRTVTRIAVAFEAGRDGFWLARWLQARGVEAHVIHASSVAVSREHRRAKTDRLDVELLKRAFLGWLRGERDHCKMAAIPTLELEDARRPSRERETLVSERTRIINRMKSTLARLGIRNFRPNLRKARERLGALRTPEGVVIPANTLAELQRDMARLQLVKEHIKEIEQTRLTRLAQPPADAPHAMLILLARVVGVGIETAEMLVHEVFVRNLRDRRAVARYAGLTGAPDESGARRREKGLARAGNARVRRGMLQLAWRFLMFQKDSALAQWFQARTADHRAGTRKTMIVALARKLLIALWRLMTTGEVPQGVVLRAAA

SEQ ID NO: 223122 - protein, 403 aa, unidentified
MNNVAGVDVSKGKSMVSVLRPFGEVVAKPFSIGHTGSELKELADYLKSLDGETRVVMEHTGRYYEPVARFLHEEGVFVSAVNPKLIKDYGNNTLRKVKTDKADSRKIARYGIDNWAELRQHTPMDTIRMQLKTLNRQQSLYAKTKTMMKNNLIALLDQTYPGVNALFDSPVREDGSQKWVDFATAFWHVDCVRNMSLTAFAERYRKWCKRHGYNFSQSKAVEVHTGAQDLIAMLPKDALTKTMVRQAIDALNAVSASLERLKAEMQALAAQLPEYPVVMAMHGVGDSLGPQLMAELGDVARFTHRNAITAFAGVDPGADQSGTHEAKSTRVSKSGPPELRRALFLVMDCLLKTQPQDDPVYRFMDKKRAEGKPYLVYMTAGANKFLRIYYGRVKEYLASLEEN

SEQ ID NO: 223123 - protein, 350 aa, unidentified
MTIVADVYTHIVGVDTHARTHTYAVLDTRTSAVEATDVFPTTLAGMRRAITWIKRRTGDATTLLVIECIGSYGAQLAKLADQTGYTVVEPLPVAAGVKAGKGKSDPLDAGWIARSVLGADTDRLRQPRDDEGTRAALRVLIVARDMITADHTRTVNALTALARTIDLGVDARRPLTKTQITQIAAWRQRDEPIAETTARSEAIRLATRITDMNKELADNRAQIDTLVRASQAAPLLNHVGIAAINAAVILIAWSHPGRIHSEAAFAVLAGVAPITASSGNTTRHRLSRYGDRRLNQALNSIVLTRLRFDQATRDYQDRRLAEGLSSKEIRRILKRYIARQIFRKLANPTT

SEQ ID NO: 223124 - protein, 315 aa, unidentified
MIHTPVFVGIDVSKAQLDVAMRPDGRFSVVHNESGMAELVTQLQAIRPTLIVLEATGGMELPLTSALALAGLPVVVINPRQVRDFAKATGQLAKTDAIDAQVLAHFAEVIRPEPRPLPDEQTHALAALVARRQQLIEMLTAEKNRLASARTSVRKNLRAHIAWLERALRQADTDLADTIRQSPVWREKDELLRSVPGIGPVLTSTLLANLPELGTLTHKQIAALVGVAPLNRDSGTLRGRRTVWGGRAHVRTALYMGAIVAARFNPVIRAFYQRLCAAGKAKKVALVACMRKLLTILNAMLKHRTPWSPTLVPHA

SEQ ID NO: 223125 - protein, 420 aa, unidentified
MVYLERGYNLKELPWSKTVSNSFLFKEACMILVGVDVAKDKHDCYIMTSEGEVLFKSFTIANNMEGFNQLYEKILSVIDNFDNVKIGLEATGHYSYNILGYLLDKGLTPYVINPLHSNLYRKSLSLRKTKTDKVDSRIIASMLMSDVSLKPYSNTLYHNEELKSLTRYRFTKVQERAKLKISISRLVTILFPELEKLVPTLQMNSIYALLYEFPSAHAISKAHLTRLTNLLNTTSKGHYTKDKAVLIREAAKNSIGSNMPAKSLELKHTIKLIKELTSEINEIEEEIKIIMNKINSPILTIPGIGLSTGAQILAEIGDFKNFSSPDKLLAFAGLSPSTYQSGNMYSSNAKMEKRGSKYLRFALFNAAIYVSYWEPTFSQYLKKKRVEGKHYYVAISHVVKKLVRLIFHLEKTNERYSTVV

SEQ ID NO: 223126 - protein, 373 aa, unidentified
MAKIQDGFAKCKPVYVGIDVHKRDWVVTVLCQGEELYHATVVPDPAGLVRLLKRFEASEVHTVYEAGPTGYWLHEALAEAGFDSIVTPPSLVPHVGGRVKTDRRDSRKLAAMLAGGFLRRVYVLAPEERAHRQLLRTRNQIEQHRRKAQNQIKSLLLFHGKRAPATLKERWSETHVHWMETTEWEYPSLKISLNAMLTMYRNLTEQYKDLTHEIELLALTEKYRERARLLTQIPGIGMFTAMAILIELQDIERFARADQLASFLGLTPSQHSSGERIRMGHITRCGNYHVRTRLVESSWTLIRYDAGAKATYERIKHQTGSGRKAITAIARRLALRIRRVLLDKAPYRLSDGGRLATGRDKTREAKRFVLRPL

SEQ ID NO: 223127 - protein, 361 aa, unidentified
MSESMALVGLDVHKSRTVAAVLDPATGELRMERLRGEPERVVPIFLEELDRPVAAVYEAGPTGFVLARVAEQRGLDIRVVAPGSIPRAPGDRVKTDRRDAKRLVRLLAAGGLGFVFVPSETDERFRDLVRCVDDVRRDLMRARHRLSKFLLRRGVRFQGKTWTQQHERWLCTLHFEDPLSQAVFVDYVCAVQGLGQRRKTLIGVLEGAVPDSSHAETVGRLRCFRSVDTLTAAGLCAEVGDFRRFPKPALLSGFLGIVPSEYSSDERRTQGHITKAGPANARRLLVEAAHNYRHRPRVGENLKARQSGQDPRVVQIAWRCQQRLHQRWLHLAAKRGKPAGTVAVAVACELAAFCWEAATLN

SEQ ID NO: 223128 - protein, 376 aa, unidentified
MSNVRFIGLDVHAETIAVAVAEPDGEVRSVGVIPNRPESIRKLVKKLGPAEQLRVCYEAGPTGYVVYWELTALGVNCEVVAPTLVPVKAGDRVKTDRRDALKLARSYRAGDLTAVWVPDAAHEALRDLVRAREAAKKDQLRARHRLGKFLLRHGRRPSTAMHAWTQTHLTWVKTVHFAHAAQEATLLDYLHEVEHMADRIERLERAIDEAVKIAPERMRSVIEALQALRGIAQVSAVTIVAEVGELSRFAKPRQLMGYSGAVASEDSTGKRIRRGGITKTGNAHLRRIVIEAAWAYRYRPAVGAALRKRQASVSPEVKAIAWKAQHRLHARYRHLTARGKCKQETVTAVGRELLGFIWAIGVHVEAKESQTESVAA

SEQ ID NO: 223129 - protein, 355 aa, unidentified
MSIVGGVDIHRKQLTFDYVEPATGRWERGRITPADREHLAKWLTRFDGVPDVQFAMEGCTGWRYVAEEMRAAGVRPHLAEPAETAALRGRKRRAKTDRADALHLRRLLADGRLPGCYIPPSPVLEWRALMELYHDLRAQHSGWAQRVQAVCFHQGTTAPGTAGVIRGDRQRLAAIVDEQLSPVGRLQVNTALAVMDALDEHVDRLRRRLLATARHVHGARVLMHEIYGVGGMTSLALCAWLGGADRFASARKAVRFVGLDITVHSSDNKRSPGRLSRQGPEVLRWLLFEAAKTSARSCAPGYGYYTAVKERIDANRARLSQARRIVRHAVHLLADLGDEAFTIVAQPAAPSTIAR

SEQ ID NO: 223130 - protein, 422 aa, unidentified
MSYCPVAGIDVSKRFSDMCILSPDNKIFAQEKIYHDETSINRANALLQKAERLFFSKPVIVMESTSHYHLILFQFFSEHGYDVIVVNPLQSNSMKDFSIRKRKTDRVDAFKLAMMYRTKTLRPSQIPQTATRALRQLCRHRAELLNDVSSYKNRLTALLDQTFPGYDKVFSDVGGVTSCAVLVRFPTPTILLVEEESELVEVIAAASKSGYSFAKKKAGLLISAAQKAQTLGIHSCADETLIVCTIQMLRTLSESVLQIETAIDNLLAQIKEMRNNVSLLQSIPGIGSHSAALLLGEIGDISLFKKPKQLAAYFGLDPTERQSGSFRGTKNKLSKRGSPYARAALHMGVVNSICKRGKDSAANPVLLSYYEKKCKNKPAKVAQAASMHKLVFIVFAVLRDQMPFELKTPEQHAVEQGFVKAA

SEQ ID NO: 223131 - protein, 380 aa, unidentified
MNRVALQSKDNTVERKLYMAMELSDKCWKLVFSDGGEKRRHETMEAGHRMELVEAIRKAKEKFGLSAEVGVVSCYEAGRDGFWLHRYLVSLGIENQVVDSSSIETNRRKRRAKTDRIDGVKLLTMLMRYWGGERGLWSVVRVPSVEDEEGRRLHRELASLNKERTRHRNRIRGLLVAQGLHLEPKGDFLQRLEALTLWDGAPLPLELKGELEREYQRLRLVEAQRRALEKTRKSRLRQADTASVQRVVQLMGLRAIGPNCAWLLVMEFFAWRRFRNRRQLGACAGLTGTPYDSGGSKRDQGISKAGNRRVRTMMVEIAWLWLRYQPNSKLSRWFRERFAGGGARMRRVGIVALARRLLVALWRYLEDGMLPEGAELKAAA

SEQ ID NO: 223132 - protein, 337 aa, unidentified
MDTDTGECGERRLEHREEAEKFYRELAAHAMTVRVGMEASGHARWFERLLAELQVELWIGDAAEIRTKRVRKQKTDRQDAQLMLRLLLENRFPQVWVPSWENRDLRQLLWHRHRMVQARTQIMNQLQAVALNEGLRCKKRLWRDSGREQLESFRLAPWASRRRHDLLELLDRLTPTIAELSDAIEHEVERCPEAQRLQRHPGVGALTALAFVLILGRADRFQCGKQIASYLGLVPSEESSGQRRRLGHITKQGSALLRFLLVEAAQVTVRSDQEWRSKYFHLTLRRGRKIAKVAMARRLAVRLYWMWRKEWNYQQLTKFGSHAGEPGHRDGVQSSTE

SEQ ID NO: 223133 - protein, 363 aa, unidentified
MKKTFDHPQTIIGIDLGDKKHAVCVLDKDGKVICEKSISNQRKSLEALCKDYAASRVAIEVGAHSPWVSRLLRDAGMEVIVANARKLRAIYQNERKSDELDARMLAKIARMDPEMLHPVTHGSETSQRDLLLIKLRDNLVRQRVNLINGVRGALKSLGIRLSLTTTQASVRRVREELVEHEGLAVRIEPLLAVLESLNEQIAGYDGMIAKAVEERCPQAGKLQIIGGVGPITALSFVLSIEDPGRFDDARDVGAYLGLVPRRDQSGNTDKQLPISKAGNGYLRRLLVQCAQHVLGPFGADSDLRRYGLKLAERGGKAAKKRATIAVARKLAVLMLTLWQKRAEYEPLRNAVRLEAESQMRAAA

SEQ ID NO: 223134 - protein, 322 aa, unidentified
MNADLTPLGIDVAKAKLDCALLVGAKYRTKVFANSAPGFAQLAAWLTQHGVEHVHVCMEATGIYGDSVALFLADAGHVVSVINPALAKAHAQSLGLRSKTDTIDAKMLAHFCREKRPSAWQPPSLAERRLRALVQRHQALIAMQTQEKNRLESLREEVRESLDTHLAWLATELERIEAAIRQTLDDDPTLRGKRDLLDSIPGLGERTIATLLAFGLGDERFTQARQFVAFAGLSPRLDESGSSVKGPARMSKMGHAFLRRALYMPAMVTCHRTAWGQRFHQRLAARGKAPKLIIGAMMRKLAQVAFGVLKSGKPFEPALHGA

SEQ ID NO: 223135 - protein, 404 aa, unidentified
MEERTAGIDLASEEHRLVVVEADGRRRQERRFTHSEEGVSGLVQCLVELDVARVALERPNGLVVDRLLEAGIAVVPVHPNQLAAARDRYRSGGGKSDGFDAYVLAELARTDMHRLRALEPDGDETQALRALTRAREDLVEQRVCLANQLRAQLEAFWPGAARIFSEVDSPICLAFLERYPSPQDARGLGEKRLGGFLARNGYCGRRSAAELLTRLRSAPQGRTGELEAEARRQVVLALVACLRPLVEQIRLLTSEIRGLLAEHPDGAIFRSLFRDPKSVVTAAELLAEIGDRRERHPASSSLEAIAGQAPVAVESGKKKVATFRWACNKTLRSAVGVLADSSRKHNPWANKIYQDAIARGCDHPHAIRILGRAWLRVIWRIWQDGVPYDPALHGSLQRLLTAEG

SEQ ID NO: 223136 - protein, 444 aa, unidentified
MAMRKREDEVFPNAAGIDIGASSHWVAVPRHLAEAAGDEPVREVGTMTDDLNGLARWLVKLGVETVALESTGVYWIPVFEVLEQHGLKVWLVDARQIKYVPGRKSDVQDCQWLQKLMSLGLLRAAWRPSAEVCVLRAVARQRETLIAEQASWVQRMQKALVQMNIQLTEVISDVMGQTGQAIIRDIVAGQRDAAVLARHRSRRIKASEVDIAKALTGNWREEHLFVLKQALAMYDDIDRHLAECDSRLDQLLDERAGQTVDIGKLPRAGSKARTEHDIRQRLANWAGVDLTRINGLGVTTVMKLLSEIGPDVSRFASVKHFCSWLGLCPGTKISGGKVLSSGTKRSANRARQALKIAAQALHRSESALGAFYRRLCARMDKPKANTATAHKLARMVYFMLTRGEAYVDQGQQHYEQQQRQRSIAALKRRAAALGFQLNPVEATV

SEQ ID NO: 223137 - protein, 427 aa, unidentified
MNPAAGCTAYAAVIGLDWADQKHDVCLWAPGAVQPERTVLTHRAEAIAAWVGQLQQRFGGRPVAVALEQSRGGLMAALMAHEFLVLYPINPGALAKYRRSFVTSRAKDDPTDAELLAELIIKHPEKFRPWRPDTAATRQLAALVEARRHAVNLRTRLSHALRSSLKGYFPQALELVGEDLFTPLACDFLAKWPSLPALKRVRTETLRRFYTAHNSRRHDVIGQRLKAIAAMQPLTTDEAIVTPSVLTVQLLVAQLRSLSAGITRYEQQIAAVFAAHEDASIFASFPGAGPTFAPRLLAAFGSDRSRFASVENLQQYSGIAPVTERSGNRCWVHWRWACPKFLRQSFHEYANESIRHSLWARAYYRQQIQKGSSHAAATRALAFKWQRILWRCWQDRTPYNEAYYLTMLQKRGSKLLKLIAEPVEQTT

SEQ ID NO: 223138 - protein, 416 aa, unidentified
MLRVYRRCCGMDVHKETVVVCVLPPDGEEGEIVRKVFGSFRNELARMRGWFKQLKITHVAMESTGVYWMPVWNVLDGHGFELKLVNPGQVKALQGRKSDQRDAKRIAEILQDERLDGSFVPPREIRELRQMLRHRQSILEARNEVHNQIRDLLETANFKLSSVATDLMGLTGRNILRALADGLDSPERLSWKARGSLRHKEAKIKEAMKGQASEFFRWMLKSHLEHYDFLTNLIATLERQIEGYMAPYEEHILRLITMTGVDRLVAWNLIAELGVDMSVFPTAAHCASWAGLAPGTHESAGKQKTGRTKRGNRTLRRILTQSAWANTRCKYGYLKAFFLRIRARCGWSKAIVATAHKILVIAYGILKNHQPYQDLGGDYYDRLNPDKTIRRIQNRLAKLGYQATLTLLPAPTMRST

SEQ ID NO: 223139 - protein, 362 aa, unidentified
MSHRAQSFIGVDLHKCTVTLTAVDPSGEKIDRLKISTKSTGKIQDWLLKLPRPIHLAVEACPFVEWFIDRFAPCVERLDIADATELANLRGKRRKTDLNDSLDIAKRLARGECPLGYIADFELMQLRKLGRHWRHLSRLSSRTKHSMKSLLNAANIRGPKFDSASAQRWFLANRDLLAPVQQQAFADLIDVLMLTDRQRERLRREILFATRSERFAPITSLLMSVPGIGDVWAAIIAAEIGPFNRFPNADALEFWAGLTADMKESAGRTQSGNITKAGSVTLRWALCQAAVTLCQCDARQEAIRQRLVKRIGKPKANVAMGRRLLRILYAMVRDNKPFERGPARDRTAAANKARLGRKKQAA

SEQ ID NO: 223140 - protein, 431 aa, unidentified
MLGGNQEKLMSQNQPEIQYAAFVSIDWADQKHVWSLQEANSSTREHGEVGHMPEAIEAWIAQMSQRFVGRQIAVAVEQSRGALVFLLSKYEQLHIFPVPPAMTANLRKAFYSSGAKTDPADTDLLQDVLQMHREKLRRLSPDTEATRLIQNLVEERRKLVDEKTAQSNRLEAHLKIYFPQIPQWFGDVDSPLVCALLERWSALEALQKARPDTLRSFFRKHQCRKEELIESRLKAIGEAMPALKDRAVVEAQLAVVKVLVQVIQVLHQGIEDFNRQIQEAAEAHPDFFIFESLPGAGAVMAPRLLAAFGSQRERYRNAAEVQTSSGIAPVTESSGKSSWIHFRFACSKFVRQSFHEWAALSITQSQWARAYYELQCRRGKRHHAAVRALAFKWIRIIFRCWKERVAYDEKVYLAALAQHNSPLLAATKIAL

SEQ ID NO: 223141 - protein, 338 aa, unidentified
MKAYAGIDLHSSNNYIGIMDQDHKRLFGRRLPNSLDKILMVLEPFKSDLKGVVVESTYNWYWLVDGLQEHGYRVHLANPAAIKQYEGIKHTDDKWDSFWLAHMKHLNILPEGYIYPKEQRPVRDLLRRRLFFVRHRTANILSLQSTITRNLGIKMSSNEIKKLDMDDACDLFDSSNLVFMAQNNISTIKHLGKIIKGIEKEVKTQVQLRKEFVMLTTIPGIGIILGLTIMLEVGDISRFYKVGNYSSYCRCVGSKRLSNGKKKGENNKKNGNKYLAWAYVEAAHFAKRYIPKAQRFYQQKMAKANGAVATKALANKLARASYFIMRDQVPFDEDMLFR

SEQ ID NO: 223142 - protein, 346 aa, unidentified
MEQISRIGMDTSKRFFQLHGVNTAETVVLRKKLRRKEMVGFFEKIAPTVVGIEACGASHHWARLLQSFGHTVKLIPAQLVKPYVKRGKNDMADAEALCEAMSRPTMRFVPIKSAEQQAALMLVGLRDRLIRNRTQLSNAIRGYAAEFGLTAANGLANLRPLLERIQADEGVPDLARELFAVQAEEYAQLEEQIAEISGKLMAWHKADECSRRLAKIPGIGPIGAALLMMKTPAPELFRSGRQFAAWIGLTPRDHSTAGKVKLGVITRAGDEALRAVLVSGATAVIRHAVGCKGRASSWLIDLLKRKPPKLAAVALANKLARIAWKLMVTGEAYAATSTPIASASAV

SEQ ID NO: 223143 - protein, 364 aa, unidentified
MRRQTADAMMRWCYSLPMKTNITKTSPTPSVVPTSSAAVSSGFTLGLDLGDRQHHVCVLAAAGNIVREASLPNTRPALAQLLVEFPKATVALEAGTHSPWISRYLTEQGATVLVANPRKLHDISRSERKCDRRDAQMLARLARVDAALLHPIQHGSAQAQHDLLGLKLRDALVRNRVSLINAIRFTLKSLGHPVRNPSSESFHKTVLQDIPADCRPVVQPLLTVLAHVTEQIKAMERDLVRRSKKDYPATQRLQQIAGVGPLTALCFVLKVGDPQRFSRGRDVGAYLGLCPRRNQSGGTDKGWLRAVNKLSKLAKSTHGRQAAKKFEIRWPEILPLTEIAQAKNEKIISFRKNQMARGFGLESE

SEQ ID NO: 223144 - protein, 343 aa, unidentified
MQIRSVGIDLGKTTFHLVALGDNGKVLLKKKFTQKQLITFTANLQTSLIGMEACSGAHFLGRALREQGHDVKLIPAQFVKPFVKSNKNDFIDAEAIAEAVDRHNMRFVPIKTDDQLDLQALHRVRDRLMARRTSVINQIRAFLLERGMVFAKSPIRLREAIPEVLENANENLTPRMRHLVAMLWCEWKDMEQQILEMNDEVERIASSDAACVRLRQIPGIGPLVATAIVASIGNGAAFRNGRQFAAWIGLVPKHHSTGGKAKLYGISKRGNLYLRKILIHGARAVVLRSKRDRIAMGPWMTALGRRAPRNVLIVAMANKLARIAWAVLSTGQDYRTVPNAISG

SEQ ID NO: 223145 - protein, 316 aa, unidentified
MNENLSETFVGIDVAKDTLDIQIEPAGDCLQHRHDEAGRSAVCEHLKGLSPTLIVLEATGGLEVPLASRLAAAGLPVVVINPRQASDFAKAMGQLAKTDRVDAGVLAAFGRAIRPQVRPLKDEDTRALDEMVSRRQQLIAMRVQEELRLQTAASRALQKSLQSHIAWLNQRIAEGDADIDARLKASAVWQAKADLLSSIPGVGRVTCATVLAKCPELGCLNRREIAKLVGVAPLANDSGSHRGRRFIWGGRAEVRTVLYMAALSAVRCNAAIKAFADRLRQTGKPPKVVIVACMRKLLTIMNAMVKSNSRWNPKIA

SEQ ID NO: 223146 - protein, 345 aa, unidentified
MSHFVGLDVSQKMTAICVIDKDGRRIWRGQCPSVPEQISVALRRYAGDKARIGIETGAMTPWIVHELRNLGFEVVCLDARHARAALKMQINKNDQNDAEGLAQIVRTGWYRSVHVKSFDSHRARAILGARTQLVGMTTRLSNHIRGVLKTFGLLPGAMRGLPFDRKVEVLLEARSDAAPIVRPMLVTWRQLLVQIAAFDKAIRAMVRMSGASRLLMSVPGVGLLSALAYASTVEDPSRFARSRSVGAHLGLTPRQYQSGEVDRSGRISKCGDTLTRTLMYEAAGVILTRVKKASGLRDWAAAIAKRSGPGKARVALARKLSVILHSIWRSGEPFRWSEPKHAVVA

SEQ ID NO: 223147 - protein, 487 aa, unidentified
MAKRKKSTFERLSSGGMNRKQRRDLARRLAGQDPGLTIIHCNAGGIDVGNESHFVAVPPDRDANSVQEFGCWTADLKRMAAWLKACRIDTVAMQATGVYSIPLYDILTGYGIPVVLVNAQHTKNVPGRKSDVQECQWLMKLHTYGLLRDSFRLEERMESVRTIWRLRDRHVKDASRAVQHMQKALTKMNIQLANVITDITGVSGQAIITAILKGERDPWKLADLKHEMVKASREEVARSLEGNWRDDLLFELRQAVESYHFAHLQMRECDRQLERFLASLPTRILERPPQLSDATAAPAPQTKKTRKPKKTRRNQPTVDLATELKRICGVDLTSIDGIDVITAQTILSEIGTDMSGFKTEDHFASWLGLTPNKDITGGKIIGSAKRKVQNRVAMALRMAATTLLRSQTYLGGRYRHLRKQLPSHASAIKAMARYLAVLVYRILTHGEAWVDRGAARFEQRRTELEMASLNSRALAKGFKLVPITEAS

SEQ ID NO: 223148 - protein, 416 aa, unidentified
MKNQETLFFAGIDWSRNFHQVCVIDHQGSLIGEASFEHSGRGLFEMTQWIREISGSEVCNISVAIEVNHGPVVESLIEQNFRVCSINPKQLDRFRDRFSPSGAKDDRKDALVLASALRTDSHHFRLIESQDTEVMFIRELNRKRAELVEQRTRLINQFRELIWRYYPQFAALLGDRVRMWHLELWKLVPCPDSVKGKRISTVQNLLKRHKVRRIDAEEVLHILRAEKINVSAATRDACVNRLGSIVELLELLERQIKETEASINKEIETLDSKLKTDSEGPTDIEILRSVPGAGPVVLATIIGETWELLQRRDFEALRCFGGTAPITRQSGRTKQVVRRKAVCRSLCDAFHVLGGTAARSDPVSMAKYKSLRAKGHGHFRSARTVCDRILSVVCVLLKKRELFDKEFKKPWHDAAA

SEQ ID NO: 223149 - protein, 394 aa, unidentified
MILVGIDIGKNKHTFSIIDKNSGEILLSPSDFSNNLKGFLFLIQKLSSYTKSELLIGMEDTGHYHFALLKYLLDRRYTVALINPTTTDLTRKLQGGITKNDPLDSLTICDVISSNHRNKPYRVTTLNRFDLYEQKQLTRHHHNLKEELNTYKNRLQKCIDIVFPEFNSLFHSKYGIVYMNILKTFSSAKAIANADIRSIRKCFEFKGQGKRISLSAEQLKLTAKSSIGIPSVAEEIQIRHLVSQIELLEKQLSEIDKRIEEFSLKNNSPILTIPGISHFSGTSIISELGDICNYTKASQIIKFAGVAPYHYESSQFTAQHTAITKKGSKYLRKTLYQIILPVISNNEVFYAYYTKKLNEGKGHRCAQGHCIRKLLRVIYHLLSTRQPFNPKLLV

SEQ ID NO: 223150 - protein, 405 aa, unidentified
MNELLVGVDWSQSHYDVTILAPNGAKLTQFRISKTPAGFTQLAEKIDKFGLPASTCHVGLETAHNILIDFLWSRQYAVYVVPPSIVNSSRGRFGNSGAYTDARDAHLIADLLRTDRLRFAPWRPDSKLVTTMKTKLAQLTNVTKIITRQTNRLRAILWRVYPQASEAFSDLTTFIALRFLTAFPTPVALEDLSYTDFTAFCQHHGYARRDWITAWYRGLQRPQTPGNPTLTAAYQAEIVFLAQLLSQLLREKKQIIQQIQSLFQQHPDHTIFTSLPGAGILLQPKLLVMFGEDRDRFPSPQDIRALAGTCPVTKQSGKSRRIQFRRACNHRYRDTAQQFAISSAQQSDWAVTYFNNALARGLRKNHAYRCLANRWLGIIWKMWQTGKPYDEAYHLKQIHQHRSLH

SEQ ID NO: 223151 - protein, 391 aa, unidentified
MICVGIDVAKDKHDCCILDSEGTTLADCFTIPNNLDGFKRLLQTIKDCTQKSDKIKVGLEATGHYSYNLLGFLLDNGLATYVLNPLRTNLYRKSLSLRKTKTDRVDARTIASMLLSDAGLKPYTDTAYHNEELKSLTRYRFDKVKERAKLKSSIARLVCILFPELEKLVPSLHIASVYALLEEFPGAKQVAAAHLARLKALLETASNGHYKRDMALEIRDAAKNSIGSQMPAKSLELQHTIRLIRELNCEIDEIEEQIQFIMDELHSPITTIPGLGFRMAAMILAEVGDFTRFDSPDKLLAYAGMSPSTYQSGQLKNCYPHMEKRGSRYLRYALYNATKYVCHWDLAFADYLSKKRAEGKHYNIAISHAAKKLVRLIFAMEKSRQPYCSAA

SEQ ID NO: 223152 - protein, 322 aa, unidentified
MPSNSPSNIGIDVCQHKLDVAVYETNEHFVVSYQLPECVDLIERLKRLNPVRIVIEASGGVEHFIVSLLATAGLPVIVVNPRQIRDFARATGKLAKTDRLDAFAQARFAAMVKPEVRPLKSEETQALDALLTRRHQLVEMTVAERQRMTQARQQRRLEVAEDIKAHLEWLQERLTKCEAELANAIRQSPMWREREQLLRSAPGVGRITALTLMADLPELGQLEHKQITALCGLAPHPNDSGKSHGRRSTHGGRSRVRATLYMATLTAIRNNEIIQTFYQRLLANGKTKQLALTACMRKLLVILNAMVKSNSPWRSDTNPQIS

SEQ ID NO: 223153 - protein, 311 aa, unidentified
MTPSVYVGIDVAKAWLDVATVPPVLAVVQYANDPAGIARLVRALEAITPSLIVLEATGGHETAIASAVALAGMPVAVVNPRQVRDFAKALGQLAKTDALDAGVLALFAERIRPTPRALPDEAHAELLALVTRRQQLLDILIAERNRLAVARPSTKRSLDEHIRWLQARIRDTDELLQAALKRSPVWRAQEQLLRSVPGIGPQTASRLLVSLPELGRLSSRAIAKLVGVAPLNVDSGHQHGRRQIWGGRAPVRSALYMATLVGVRHNPLLRRYYQHLRALGKPPKVALIAAMRKLLVILNAMIKHQQPWQPA

SEQ ID NO: 223154 - protein, 318 aa, unidentified
MTQTTHTSALYVGIDVSQETLVVATYPTNAVWVLPNDADHCAALADELAQQPVQLVLLEGSGGFERPIVHALQQAGVPVVIVPPQRARYFAKSMRGNLKTDRVDAQLLARFASCYPVPEMPETPAMQAQLKELWARREQLVQALESEKKRLQVAMHPLIRASLERTIAHLQAECAEIEAAIEALIASDEALQPKAALLQTAVGVGRVVAYGLLAELPELGCVSHKTIAALAGLAPVRRESGRWRGSARIGGGRRRVRRLLYVASVVAVTHDARWRAVYEGLLAKGKAKKVALCAVARRLLVVLNAMVRDGRAYARVQE

SEQ ID NO: 223155 - protein, 393 aa, unidentified
MDILYHCRAGLDVHKKTVVACVRRIGPDGQVEQETRTLATMTADLLALADWMAACGIGHAAMESTGIYWKPVWHLLEDRFTLVLVNARHMRQVPGPKTDVKDSQWIAQLLQHGLLSPSFVPPPPIREPRDLTRRRTQLVADRAAVANRVQKVLEAANVKLSSVATDVLGASGRAMIARLIAGETDAELLADEARGTLRRKLIPLRQALAGRVTEHHRFQLRMLMDQVRHLEEWIARLDGRVVEVMTPVVAGEPDRPPPLGEAVRRLMTVPGIGRRAAEVIVAEVGPDVRNFATAGHLASWAGLCPGNNQSGGKRRSSQTPKGNSSLRVMLVQVAWAASHTKQTVLSQTYRRLAKRLSKKKALVALGHKLLRIIHRLLSRGVDYVEYQNPGLAA

SEQ ID NO: 223156 - protein, 331 aa, unidentified
MKNVNESAGIDVSKLTIDVHLFKKNKHHQFVNKSNGFKEMIQWIKKEGLVVEEVLFCFEHTGWYCLELSFFLHEIALKYTCVNPIEIKRSIGLKRAKTDKDDAGYLAHYAWLRREEIKQSVPPSQNIIELQRMMSLREQLVKQSVALKNLRTGMLQIVISREIDPSILILDQTIKELEQQTKNIEKEMELLIKSDTNLKENYLLSKTVKGVGKILAVQMLIHTHNYTRFLSWRQFSSYCGLVPYPYQSGTSIRGRNKIHSISDRKMKSLLSMSEISAIRSDKELKMYYEQRVKEGKPKMVVINIIRNKIVARVFSTVKRGTPYVELNKFTA

SEQ ID NO: 223157 - protein, 360 aa, unidentified
MAKAKTLVGLDVHATRIVAAVLDAESGELRMFRMNGDAGDAAAFCAGLPRPVRAAYEAGPTGYGLARELAKRRVECVVAAPSKIPRASGDRVKTDRRDAELLVRLLLAGKLHAVRVPGLEEEALRDLVRAREAVRVDLMRCRHRLSKLLLRHGIQFDDGPAWTQRHRDWLATITLPWPAAQATMLDAQGAIDALAHRRDQLEREIVVLIPGSPWVVQVGRLRCLRGVDTLTAVGLCAEIGDFERFARAEQLMSYVGLVPCESTTGQQRRLGSITKTGSGHARRLLVEAAWHYRPRPRIGKALTDRQSGQPAEAIAVAWSAQQRLHRTWARLEQRAKRRTIIAVAAARELAGFAWAVTQIE

SEQ ID NO: 223158 - protein, 452 aa, unidentified
MENDSISMKIINPKAAGIDIGSRSHWVAIGQEDKDVREFGVFNEDLYDLAQWLTENQIRTIAMESTGTYWQNLYAVLMAQGFEVILCNGKFTKNIKGKKTDIKDCQWIQRLHSLGLLSSSFLPDVQTEQLRTYCRHRANLLHMVASTSKKMQKYLRLLNLRLDVVVKDICGLTGLKIIRSICQGETNPRKLAELRHFNCRRSEDEIARALQANGRQDYLFALKQELETYDHLQLKISQCDIEIEQLLNQIIENDDNKKQHCIDPKSYKRINKNTPKNIDLNLKAYQLLEGIDLLAIEGMSYGTVLALISEVGLEGIKRFPSAKHFASWLRLAPNNKISGGKVLSSKVPKGSNRLKIALRNAANAIGNLKDSTPLRDFFHRVNFRKGRTSAISATARKLAVIIWNMVVNNTQYINPEGYLFLDQKRKLGLTKRIKKQIDKFGLNPEDLGFSIT

SEQ ID NO: 223159 - protein, 409 aa, unidentified
MPLFCGIDWATEHHDVAVIDGDGHVVARGRVGNDAPGFAALLTLLAEAGDSAADPIPIGIETDHGLWVAALRETGRTIYPINPLAASRYRARYAVSGAKSDATDAVLLANIVRTDRGAHRPLPADTEAAQAIRVLARAQQDAVWSRQQIGNQVRDLLKDFYPAATVAFADLDGGLTRPDARTILAAAPTPAQAAKLTPARLRRLLIKAGRKRYLDRDIARLREVFTDTYLHQPPAVENAMGIHLTALLGQFEAACTAADELAEAAIAHFEQHPDTEINPSFPGLGMLAGARVLAEIGDDRSRFADARGLKAFAGSVPITRASGKKTVVLHRHIKNRRLAAVGSIWALGSLRASPGARRHYNARRTVGDWNQQAQRHLFNKFLGQLHHCLHTGLLYDEHAAFPPPLQLAA

SEQ ID NO: 223160 - protein, 422 aa, unidentified
MSYCPVAGIDVSKRFSDMCILSPDNKIFAQEKIYHDETSINRANALLQKAERLFFSKPVIVMESTSHYHLILFQFFSEHGYDVIVVNPLQSNSMKDFSIRKRKTDRVDAFKLAMMYRTKTLRPSQIPQTATRALRQLCRHRAELLNDVSSYKNRLTALLDQTFPGYDKVFSDVGGVTSCAVLVRFPTPTILLVEGESELVEVIAAASKSGYSFAKKKAGLLISAAQKAQTLGIHSCADETLIVCTIQMLRTLSESVLQIETAIDNLLAQIKEMRNNVSLLQSIPGIGSHSAALLLGEIGDISLFKKPKQLAAYFGLDPTERQSGSFRGTKNKLSKRGFPYARAALHMGVVNSICKRGKDSAANPVLLSYYEKKCKNKPAKVAQAASMHKLVFIVFAVLRDQKPFELKTPEQHAVEQGFVKAA

SEQ ID NO: 223161 - protein, 319 aa, unidentified
MGKSNIEYEQVIDRGCGLDVHRDTVVATVMGKGIKTETRTYGTTTSSLNELGVWLESLNVYDGAMESTGVYWKPVLHVLREYPVNLIVVNARHIKNVPGRKTDKADSQWICKLLLSGLLKGSFIPPENIQELRGLHRYKKKLVGTVASEKNRIIRVLEDANIKLSSVVSDTSGVTASYLIKGLIEGRKDLEDLIAECYHKKLQASPEQIKEAITGRLTPHHAFILKCMQKHIASVEAQIAEIDVEIEKYIKDFEKEIELLQSIPGVGKEGAIGIVAEIGVDMDVFPSEHHLASHSGMCPGNNESAGKKKVQEHDKGTNI

SEQ ID NO: 223162 - protein, 337 aa, unidentified
MQVTTLGIDLSKNVFQLHGIDAQGQVVLTKRVSRGKLLSVMTHVPSCRVGLEACGGAHYWGRELRQLGHEVKIMAPQHVKPYRHGNKTDRRDAQAICEAASRPYVKALPVSTMLQQDIQTLHRVRQQCLKSRTALVNQLRGLLAEYGIVIPKGIHQVRKRVGRILTNPDNGLSELCRDVLQDVYQRVGELDAKMTDYNARLVRVCQQIEPCQRLSQVAGVGPLTATAFYAAVGNGHTFDNGRHVSAWLGLVPNQRSSGERTVLLGIHKRGDRYLRTLLIHGARSVVYRATGKRDTRSQWIQRLQARRNTNVAVVALANKTVRILWAMLAKGTTYQAA

SEQ ID NO: 223163 - protein, 363 aa, unidentified
MMTPPVAGIDPHQDGFTVGIVDANGVELAVGSFPNTAAGYVAAIDLLAAHGVVRVGVEGSASWGAHVAIALVAARLDAREVPPQRSAAQRRARRLDKTDTVDALSTARALLAEPTLGPVQTLEVYDPLVAEIEAVLEHRRMLVEVRTLVLHHVQDQMSKLPTEIRDQLTATGKIESRLRRLEQIDTTAVSTMAGAYRLSWLIPLIDQDRAARREIRQLERELDRLLDEHGTTLRDEPGIGPIAAATLIAEVGDPFRFTRESKFARWCGTGAVAVSSGEGAGAPIRHRLDFGGNRRINSVLYIASVTQHRDIDDARVYINRKLGEGKTRREARRAHKRHLANRVIRRMWNDERQRQQRPTHLAA

SEQ ID NO: 223164 - protein, 403 aa, unidentified
MNNVAGIDVSKGKSMVSVLRPFGEVVAKPFSIGHTGSELKELADYLKSLDGETRVVMEHTGRYYEPVARFLHDEGVFVSAVNPKLIKDYGNNTLRKVKTDKADARKIARYGLDNWAELRQHTPMDTIRMQLKTLNRQQSLYAKTKTMMKNNLIALLDQTYPGVNALFDSPVREDGSQKWVDFATAFWHVDCVRNMSLTAFAERYRKWCKRHGYNFSQSKAVEVHAGAQDLIAMLPRDALTKTMVRQAIDALNAVSASLERLKAEMQALAAQLPEYPVVMAMHGVGDSLGPQLMAELGDVARFTHRNAITAFAGVDPGADQSGTHEAKSTRVSKSGPAELRRALFLVMDCLLKTQPQDDPVYRFMDKKRAEGKPYLVYMTAGANKFLRIYYGRVKEYLASLEEN

SEQ ID NO: 223165 - protein, 348 aa, unidentified
MMIIGCDYHPSWQQICWLDTVTGETGEKKLEHASGEAEKFYRGLPGPALVGMESTGNCQWFVEMAAALGHDVWIGDAAKIRVADVRQQKHDRRDAALILKLLLEGRFPRIWTPSREEKDLRQLLIHRYKLVRIRAQVKTELQHLAMNQGVTKKRKLWSKAGEKVLRELPLALWASRRREDLFRIREMLNGQIGLLDQAVVEAAEKNEKARLLMTQPGVGPITSMAFVLTMGDVSRFQRGKQVASYLGLIPREYSSGGHRRYGSISKQGNRFMRMLLVEAAQGAVRCDPGMRSEYLHRCHRKAKGVAKVAAARKLAIRLYWMLRTNTGYPEVVRVESSSRVPVVVRHGG

SEQ ID NO: 223166 - protein, 320 aa, unidentified
MSASSVVVGIDVAKAHVDVAVLGAQFDAQRFDNQAESHSALIAALKPLEVALVVMEATGGYETELACALQAAGLPVAVVNPRQARDFAKSMGRLAKTDAADARMLAEFAAVLLRREDLARFLRPLADPQQQWLAALVTRRRQLLAMLLAERQRLQITPKGLHPSIEAIIAAIQAQLDDIEGQMVGHVREHFAELDRLLQSASGIGPVASATLVAELPELGRLNRRRIAALVGVAPMANDSGASRGRRRIQGGRFDVRRVLYMAALTASRRNPVIKAFYERLIAAGKCPKVALVACMRKLLTMLNAMVRTNKPWNDALHGT

SEQ ID NO: 223167 - protein, 324 aa, unidentified
MEVEAVYVGIDVSKARLDVAVWPGAERFSVANDPRGIAELVEKVTALEPQAVVLEATGGLEALAASELHAAEVTVAVVNPRQVREFARSLGRMGKTDRLDALVLAQFAQSAHSNDRLPKLHLRDEAEAELKALVTRRRQLLGMLTAESNRRERAPKVIRRSIVASIRALKRSIKEIEQQVREVMSDSPVQQAKAVLLGAVPGVGPQLTATLLAELPELGNLGRRKIASLVGVAPHPHESGKFYGRRRCWGGRATVRTTLYMAALSGVRFNPALRACYQGLLGRGKSRKLALVACMRKLLLILNAILRDSASWNPHHQLDFQHSR

SEQ ID NO: 223168 - protein, 443 aa, unidentified
MNTSHPHDLVIGLDRSDKKADLCLIDTRTGQRRTQIIDTAPEALWEWLLELRQQHPQARVGLCLEQPAVHLIAFLESHDWITLHPINPITLQKYREAFVTSRAKDDTKDADFLADLLLTHHAKLPVWSPEDSATRAVQQLVFHRRAVVDERTGLSNRLIALLKSCFPQALVLCGQDLWRPLATAFLLKWPSLQAVQKAKPATLKQFYYLHGSRSAKLMEQRLALMAKAVPVSDETAVIESFALRVQLVCRQLQLVQRSVSEFDRQVAAAYATHPDRMIFASLPGAGPVLGPRLMASMGSQRERFGTAENLQHYTGIAPVTKRSGGSCYIHRRHLCPKFHRQSFHEYAKESILWSRWAAAYYLQQRSKGSPHHTAVRALAFKWQRIIWRCWQDHKPYDEPKYEAALQKNGSPLLALFDRVELGKSPFKNPVNKLKKSVDGLPQR

SEQ ID NO: 223169 - protein, 443 aa, unidentified
MGEHSEVFVAFDTAKLKHALAIAESGRAGEVRFVGEIENRPATIERTIRKLAGRYRKLQVCFEAGPTGYGLYRQMQALGHDCLVVAPALIPKRSGERVKTNRRDAITLARLFRAGELTGVWVPDEVHEAVRDLVRGRTTAAEDVRRKRQQLLSFLLRHGRIFTGGKHWTGRHRRWLAEQSFDHPAQQIVFQDAVTAVDDAVERQRRLEDQLAGIVPTWSMAPVVVAYQAMRGVSFLVAITFAAEIGDVRRFDTPRQLMSFLGLVPAERSTGETVRRTGLTLAGNRRARRVLVEAAWSYRHPARVSETLRARLEALPKAVRDIAWKAQVRLCGRYRRLNAAGKKRPVIIAAIAREMAAFLWAIGCHTTPCRSHLIQTIHRPCAAKSAGVLAAVKDKPLRARRGAPLTAAARASLASCAGRDEGTDARAEPRNRTTEGTTHIRHQ

SEQ ID NO: 223170 - protein, 344 aa, unidentified
MQKYQKNFMGIDVSKPYFDVGLMPVTDYVKGTIVQERFANTLDGLKLFSKWLKSYKVSFDTNTILVIENTGVYHRLIQNFCNENNIPIHIGNATHIKWSFGIARGKNDKIDSIRLCKYAYKHEDDIKANPVLSSIVNELKDLQTLRTKLIQQKNSLVTHLNELKLSNMVSVQKSIEKVCKNALDGIKKSIEKVELSIKDKIKSDEAIQKNYRLLLTIPGIGPGTALMLVLATGNFIGKPSGKQLASYAGVVPFEHSSGISVKGKMRVHKMANKELKCILHMCALSAIQHYSEFSEYYHRKTNEGKHALSTINAVKNKILLRVVAVVNKGEPYVDKTKENEKKQA

SEQ ID NO: 223171 - protein, 455 aa, unidentified
MAAKRLKKRKHSNPAPEPKPDAAGIDVGSTEMWAAVGPDRDENPTRCYASFTENLHELADWLQQCGIRTVAMESTGVYWIPLFQILESRGFEVCLVNAHYPKHAPGRKTDVDDCQWLQYLHSVGLLTASFRPPQAICTVRAVLRHRDSLTALAASHVQRMQKSLDQMNLHLHHVISDITGLTGLAILDAILAGEREPQKLARLRDRRIKASEETIMKSLVGDYRSEHLFTLRQALATYRHYQIQISECDQEIKALMAGLDSQYQPAPPVAGPPVKRGRGRPKGSHTSDALLQRELHRIFGTDLTLIPGIDVTTVQTILSEVGPNLSAFRSGPAFASWLRLCPDNKISGGKVLATKTRPTKNRLTQALRMAAQSLVHSLSAVGDYHRRLRARLGPPHAVTATAHRLARIIYHLISTRQSYNDSIFTQLEKQHQQRAENRLKAHARARGFQLVPLEA

SEQ ID NO: 223172 - protein, 356 aa, unidentified
MSSIVSEEYDFVIGVDTHAATHTFAVVAGSTGAVLDHAVFPTSPAGLKRAKGWLVRRCGDARSLIVIEGTGSFGAIVTERLMAAGRTVVEAARMPAGDRRGKGKSDEFDAARIARAVLGLAITDLRIPRTLTGNRSRVAMRVLVVAREEMTGERTRAVNALTALVRTIDLGVDARTSLSAAQITAIAGWRTRVEDTNARICRQEAVRLAQRIRTLDGEITSNRATVTKLIAQDTPQLLELTGVGAIVAASVLVAWSHPGRVRSEAALASLAGTCPIPASSGNTVRHRLNRGGDRRLNRALTTIVIVRMRTDPATRAYVARRRAEGRTTKEIMRSLKRYVTRQLFRTLAAAHPIPVT

SEQ ID NO: 223173 - protein, 410 aa, unidentified
MEVLYPVCCALDVHQASVTACLRAPGDGPQRRQQVRTFGTTTPELLRLAGWLTAAGCTHVAMESTGIYWRPVYNILEGSFELSVVNAQHVKMVPGRKTDVRDSEWLAQLLELGLLRRSFVPPAAQRELRDLVRYRKRLIEERAREANRVQKVLETANIKLASVVTTVLGVSARAMLKALIAGEQAPEQLADLAQRRLRRKRAALGEALTGRVTAHHRFLLDHLLRHIEFLDGAIAACDRQVETLTAPHAEALTQLDTIPGVARRTAEVIAAELGCDMTRFPTAGHAASWTGLCPGNHESAGKRLSGRTRHANRTLRQALVESARGAVRKRDSYLAAQYRRLVKRRGDKKAIVAVAHSILVIAFHVLRDGQPYRELGGDYFERLNADRLTRYHTKRLAALGYTVTLTKDAA

SEQ ID NO: 223174 - protein, 367 aa, unidentified
MGKSSTAFIGMDVHKESIDVAIADEKEARHYGRIGGDAHSVDRLIRKLRGAHRAPLFVYEAGPCGFWLYRKLKAQGLECMVVSPSKTPRNAADRVKTDRRDSLKLARLARAGELEPIYVPDAKDEAVRDLVRAREDAVCMQRQARQRLQALLLRNEIRYVGRSTWTAAHRRWIAHLKLPNPAQQIAFEEYVQAVQEAELRLQRLAMAIGAQLEHWRWRPAVEALQALRGVSAIHAVRIVAELGDFQRFASPRKLMGYLGLIPSEDSSGPRRRQGSITKAGNSSARRALIEAAHAYAHPARVSWVIARRQTKLSKSACDIAWKAQLRLCSRFRRLAARGVPRNKVIVAVARELAGFVWAIAREVKPLH

SEQ ID NO: 223175 - protein, 451 aa, unidentified
MVFVRGADQAEFVSRLRGIPGDRVLLVPVDVGKRSAMSLVANQLGEVIVDPFEFQLDRPGVDQLLDQVAGAEDASDATVVRFGIEAAGHYHRTLTTVLQAEPVEVVELHPGAVHKARAEMGQRRLKSDLRDLAAMVELMARGTGRSSRWEDDPIAIQAVWSIHRRRKVKARVTMSVQILSQLDLVFPGLGDCFKDVIRAKSGHTILRHCPDPVRIQRMGPEGLRTFVGNRGVRMARSKAALIVATAQQALLVPKGERRARMQALQADMAIYDKVCGEIERAETELAKVLGDTPASVLTSLPGVGVTRASAYGAALGDPWRFASAAAAWRYSGLVPIQYESAGKKRAGMRISREGSTTLREAILEIGKGLSDHHPEFKAYKRSKIAQGKKKTIAAVAVAHRAHRLAFSMVTTQTLFDPDRWNESTVGGPVTATRSDRNDVTRPPPLTMTAAR

SEQ ID NO: 223176 - protein, 364 aa, unidentified
MFIIGCDYHPGFQQIACVDTDTGEVNEQRLAHREQAEQFYRELKQQNLLVRVGMESSGHSRWFERLLHELGFELLVGDPADIRTKRVRKQKTDRQDAQLLLRLMLENRFPRIWVPDAENRDLRQLLWHRHRLVQMRTRVMNQLHVVPLNEGLRRKKALWRPAGRKELESIPLAPWASRRRQDLLDLLDQLTPKIQDLTHALEEEVEKRSVTRRLMTHPGVGPLTALAYELVIGTPERFHCGKQLASYIGLVPTEESSGDRRRLGHISKQGNVLLRFLLVEAAQVTVRSQQEWRNKFFHLAMRRGRKIAKVAMARKLAVHLYWMWRQGCDYAQTQKFGSYAGKPGHPDGVQSITDVMIGHPAPSK

SEQ ID NO: 223177 - protein, 379 aa, unidentified
MVPPGQRDVVGEMVPPLPFVPAIGRYLGPLDRAEPACKVDPAERRLDANMGQEAMMTTYVGVDVSKAYLDLFLLADERVRAKRVANDSAGHAAAAEWLEGITDDDVHLCLEATGAYGFAFAAAMIARGHRVSLVNPAQIKAFAQSELLRSRTDKVDAALIGRFCRAMNPRPWVPPKPAALELRGLVRRCAQLKDLRTQEINRQKAGTTAAAADASIARLISALDAELASISAEVERLIAADSELAHQASLLQTIPGIGAKTAAVLLAEIPDLRSFASGKQLAAFVGIAPGEKSSGARIQKSAPISRVGNPLVRSQLVLCALSARRRNPVARAFADRLAAAGKPGKVVLVAVAKKLLVHAFGVLKSDRPFDAARPLADAG

SEQ ID NO: 223178 - protein, 381 aa, unidentified
MKRNKKLTPTSHQQTDATAEVIKLGIDIHKTKYVVIRQIDNLAPQSPQKFSPEEFLVWVQRQRLLAKRVVSCYEAGCFGFVLHRKLKEVGVENYVVRPRNWDEYGSSVKTDARDARELCGHLDRYLAGNDRALCVVRVPTEEQEQARSLSRQRETLAKERKRLQNVGTSSGLYHGVDVPANWWKPKVFAKLCTEIPEFLKRILEPFQQVLEMIDKHLRETTAREERKANRKIPVGLGALTTSILDQEFVDYSRFNNRGQVSSFTGLCPGESSSGNKRQQGSINKHGNPRIRHMLLEAVWRMMQFQPDYKPVLHWKARMANEPFGAAKKKKMAVAIARQFAVDWWRIQTGRISPEDVGLRVEFPSAYSTRALREGRVSQVYA

SEQ ID NO: 223179 - protein, 355 aa, unidentified
MDKVKYIGMDVHKETISIAVLDSSGKLVMESVIETKGSTIVQFIRGLRGELHVTLEEGTWAAWLYDLLKPYVHEVLVCDPRKNALLKAGNKNDQIDARKLAELLYLDRLTAVYHGEHGVRALKELSRSYLTISGDAARVMTRLKAVYRSWAIPCAGKQVYAPRYRDKWLGKIREAGVRRRAEFYYQQLDELRALRQQVRREFLAESAKHQASKLLCQIPSIGPIRAAQLIAILQTPNRFRTKRQLWAYGGLAIETHSSADHRYVDGQLRASKRPVSLRGLNRNHNHELKNIFKGAAIIAATKAGPFQEFYAALVAKGIRPEMARLTLARKIAAITLIVWKKGVSFDAQHLKPQTA

SEQ ID NO: 223180 - protein, 315 aa, unidentified
MTQTNITTAGIDTSKAKLDIAVHGQTERWQVPNTRPGWRLLASNLAKAGVTRVGIEATGGYECGVVEHLRAADFIVLVLQPMQVKAFGRVHLRRAKNDALDAILIAACAAAMDPPKIGPDPRLAGLARDLTFLEQIEEDIVRFKTRLEHIDEPRLRSLVRSDIRRLKARRTAEIRTIAKHLRSHDDLASRLELVLSIPGIGERTALALIIRMPELGRVSREEAAALAGLAPFDDDSGKYHGQRHIAGGRGRLRRSLYAAALPAAFRWNKALIALYERLTASGKSHKQALVACARKLLIYANTVVQRGTPWTEKAA

SEQ ID NO: 223181 - protein, 342 aa, unidentified
MTQYKRIGIDTSKAVFTLHGIDLQDRPVLRINLRRPQLLSFFTKLPPTEIAMEACGSAHYWARELIALGHDVHLIPPQYVKPYVKRGKNDRKDAEAICEAAGRPGMHFVPVKSVTQQAQGMVLKVRETLVGQRTQLANALRGHAAEFGVIAGKGISKIEPLLTAIEQETAIPPETKDMASLLGQQIEDLDARIKELDVKLTTAHKTNEVSQRLATLPGVGPVTALTLAVEIDPIAFESGRHLAAWAGLTPKEHSTGGKQRMGGISRAGNERLRALLVAGAMSVIRAATKPGSKQMTEWLRALLARKPRKVAAVALANKMARVAWALMTRGEVYRRPAGAAAA

SEQ ID NO: 223182 - protein, 373 aa, unidentified
MSKVSRFVGLDVHKETIAVAVARGDSAAESLGSIPNDADAVVKLVHRLGADDGLWCYEAGPCGYELQRLLSELGVNCIVVAPSLIPTKPGDRVKTDRRDALKLARLLRSGDLTAVWVPDAAHEAFRDLTRARQAAQEDLTRVRHRLTKLLLRLGVRAPATAWSKAYRQWLDALTLPQSLQQLVLDETRLAVAQGEQRVERLTAAITEAASQVSQAAPIAAWQSLRGIRLTTAAMVGAEIGDVTRFRSPRELMAYAGVVPSEYSSGGSTRRGRITKTGNAHLRFALVEAAWHYRHGPRLSKALKARQQGQPAEVLAIAERAQRRLNSRYRHLVARKTKQQAVVAVARELLGFIWAIAWAVHPDQRLRPAQRQAA

SEQ ID NO: 223183 - protein, 408 aa, unidentified
MDVLHPRCAGLDVHQKTIMACARIVSATGVSHHVQVFGTTTRDLFALADWLVSHRCTHVAMESTGVYWKPVWHVLEAQFDLLLANAMHVRNVPGRKTDVNDATWLADLLAHGLIRGSFVPPPAVGELRDLTRTRAQLVRESTRHTQRVQKILEDAHLKLTGLISDVLGKSGRAILDALVAGERDPERLADLTTGRLKATRAELVEALRGRLTDHHRFLLRLHLGQIDALDAALRDLEAQIGEQLRPFRHAEALLTTVPGVSDTVARVVIAEIGIDMDRFPTAGHLISWAGLCPRLDESAGKRRSTRTRRSAQWLKTTLVQAAWAAVRTKDSYLRAQFLRLKSRRGPKKAIIAVAASMLRAIYFMLQRGVAYCDLGGSYFDRRDKARIARRLLDRLRDLGVDVTVTAPV

SEQ ID NO: 223184 - protein, 342 aa, unidentified
MKFTYAVGCDVGKLSFHYCILKPSGQRIYESMMNNDQDSIQGFIEQIKSLLSLDSLSDCLLCMEYTGIYTNWLAQLWLAQGGQLSIVPAQKISSLIAGDQGWDEKNDCLDARRIAEYCIRFSDKLRPYQLKKRSLEQIELLQRQRQRLLNAVNMLEIPVKEAKGFVEDQQVDLLKEHQNESVKALRADIKKIEQQLKVIIEQDEELSILFEQVSSVEGVGPVTAREILIATQGFTKFKPSQAKAFARYAGVTPREWSSGKSVRKRSPNSKRANQRIKALLTQGARSVAATNGELGIYYQRKRAEGKPFLSVINALRNKIILRVFAVVRNQVMYEKNLNICLD

SEQ ID NO: 223185 - protein, 339 aa, unidentified
MKNTKYYIGLDVHKERTSYCVRDKLGNILTEAEAATLYSELEHRLKPYLAASMIGLEASTSYYTLYQNFLRNNYHIKVANTIQLRQLIAKNDKLDAQRLSEMLRLGTFPCSYIPEEKIQHLRSLIQMRHALMQEKVRCNNRIQAFLDRNGVMMPLCKAFSKKWKHALMQHLGSGNISTELRYEYNHYVYLEKTNEQADQEIIGYTKTYWNQEYQLLRSITGFGVLLPCYIIAFVHPIERFLSNRKLRRYAGVIPVAKESGGTTSKGRIPKTTSKALLRWALVQAANTIGKTNTTLGRYYRRKKNQKKNTGIAKIAVASTLVDIIYKVLTTKKPYISTAC

SEQ ID NO: 223186 - protein, 411 aa, unidentified
MEVVYQRCCGLDVHKRTVVACRIVPGPQGGWQREVRTFGTVTRDLLALADWLKAAGVTHVAMESTGVYWRPVYNLLEGQFTVLVVNAQHLNAVPGRKTDVKDAEWIAELLQHGLLRGSFIPDRPQRELRELTRYRMSLVQERARVVQRVQKILEDTNLKLASVVSDITGVSARAMLEAFLAGQTDPVLLAELARGRLRQKREELEQALVGVVRAHHRFLLAEHLGHLDFPDDAIERVSREMEERLRPFEAEIQRLDTIPGVNRPIAEVLLAEVGTELDRFPTAHHLASWAGMCPGNDESAGKRRSGKTRKGSPWLRTTLIEAAHGAARSKTYSAAQFHRLVARRGKKKALVAVGHSILVIAYHVLLQKTSYYDLGANYFDERQSLYVQHRLTTRLERLGYRVTLEPLSAAA

SEQ ID NO: 223187 - protein, 373 aa, unidentified
MDQHSRAFIGIDTSKLRNAVAVGEEGRGGEVRYLGEIDTTEAATRKLVTKLAAKYRQLTFCYEAGPTGYGLYRLIRKLGHDCIVAAPSLIPKKPGERVKTNRRDAIGLAKVLRAGDLTAVWVPDERHEAMRDLSRAREAARKDLKGKRQQVSSFMLRLGRHFPGKKTWGPAHMNWLMLQKLEHREQRIVLEELLGAVRQESERVARLEQAIRDAVPEWSLAEVVTALQAMRGIDLVSAVTVMAEIGDLSRFQNPRELMGYLGLVPSESSTGDTVNRGGITKAGNGRARRILVESAWSYRYPPRVSREKQMKVAAAPGAVREIAWKAQMRLCGRFRSLTRKGKRPTVVATAIARELAAFIWAINREVMAHATAS

SEQ ID NO: 223188 - protein, 342 aa, unidentified
MNKVYVGLDLGSSSFQQAAINQDGVTIMNRSYPTSEANLRIAFTGLRGEIHVHLEAGELAPWAAAVIAPLVKRVVCSHPRDNAWIAKDNDKCDRVDAYKLADLLRLNRFKQVHYAPDQPRRNFKQLVQHYDELTAHQARWKTKLKARLRMQGVIVTGERLFSGGGRTAVLARVESRDVRTAIKQLYEVLDQSVAAQEQARLLMLRAAQAFPEIKLLRTVPGVGPIGACRFSAYIHTPQRFSSKRKLWKYCRLSVSHRSSNGKPLRRPKLDYSGCGRLKDVSRKAFEVALRSRTDNGFKRTYQRALETTHDKTHARLTVQRKILSTLRAIWLTRTPYREELSR

SEQ ID NO: 223189 - protein, 436 aa, unidentified
MRVMYERVAGLDVHKKTVAVCRMRVHKDKRIVWETKTFGTMTGDLLKLHDWLSEWEVEQVAIESTAEYWKPVFNILEEEFEVVLVNAQHVKKVPGRKTDASDAEWLAELMLHGLLRASFIPPKPQRVLRELTRYRTTLVRERARVVNRVEKLLESTNIKLSSVVTDVMGVSAKAMLNELAAGATDPQALAELAKGRLRNKIKDLQAALVGTVDEHHRFILAQQLGHIDFLDEQIEILSQQISQHLAQMAQPSVDDDDPPGSSGTKTGEPLSWSAAVELLDTIPGVDQRTAEIILAEIGLDMSQFPTADDLTSWAGFAPGNHQSGGKRYSGRTTKGNRPIGAALNQAAWAASRTKDTYLKARYHRLAARRGKKRAIVALGRSILISIWYMLSRQQPYQDLGPDYYDQRRKDTKVSYLTKQLAKLGYVVTLDTAPTAA

SEQ ID NO: 223190 - protein, 346 aa, unidentified
MSYSTTVGVDLAKNVIQISVVNGRGKETLNRSLSRTKFAEFLGKQKPSLIAFETCATAHHWARAAERHGHEARIIPAKAVAPFRQGHKTDSNDALAVAEAACRPNIKEAPIKTVEQQGLQAILRARDRLIAECIAQSNHMRGILLEFGIAIPLGFAALLRTLPEVLEDGDNELPDFYRPTLHRMYHRMLELREDIDAMTREVGELVKNHPVCSRLTDIEGIGPIGAMSLYATLGSGAAFSKGREASAYVGLTPRQYSSGGKANIVGLSKYVGNRKLRSVVIQGALAYVYRMKEPRTSKDRWLKDLIERAGPRRAAVALANKNVRTAWALIAQGTEYQRRPQLEMAA

SEQ ID NO: 223191 - protein, 310 aa, unidentified
MSSVAEVVPDVTPATRSIIYLGMDVHKESITIAVLPAGAKSPTRVERLPNDLAKLKRFLERVSRDGEVRACYEASGAGYVLHRVMREWGYRCEVIAPSLIPKRPGVQRKHDKYDAAELARLYRSGELTAVRIPTEAEERVRDVVRCRETFQKEILKSRHYILKFLARRGFVFREGTNWCTPHLKWLQHLTTEQSPLEAADRLVFREYHALLLYKLQRRDELDKEIERLAELPMLAPAVRRLQCFRGISLHSAMVLATEIVDWRRFERPSQLACYLGLVSRENSSGDRERRGSITKAGNCYLSPRLLSPGT

SEQ ID NO: 223192 - protein, 374 aa, unidentified
MTRIIYVGMDVHKENYTVCCYNQETDMILNAQTLPADYMMIVKYIAGVRAGFERSGETNVTFKCGYEAGCLGYSLYHQLSNSGLECEILAPSTMASIDNKRVKTDKRDAANIAKCLAFGTYRPVYIPTAEDESVKQFIRMRDDAKRMLKATKQQILAFLLRHGQIFDQATHWTKTHIRWLRAIRMGGVLQETLQEYMTTFDYMTDKLERFDIRIEELAQGATYFEKVKKLSCLIGVKTHTALSVIVEIGDFARFANPQKLAAYLGLVPGEHSSGAKQVRTGITKAGNVHVRRLLVEAAQGYTRGAIGYKSITIKRRQQGNPPEIIAYADKANERLRRKYYRMTLQKGKKSNVAKTAIARELICFMWGLMTNRIA

SEQ ID NO: 223193 - protein, 415 aa, unidentified
MALKIVYKICCGIDVHKTFVVACIASTNAKGVTTYESHRFSTYTKGLRDLLQWLLARNCKDVCMESTGKYWIPIYNILENDCTIVLAHPKYVKAIRGKKTDKKDAKWIADLFKHDLVAGSFMPPADIRQLRDLMRYRFKLTCFRSSEKNRLQNCLTVSNIQLGNVVSDTFGKSAQAILDKLLENPADTSFDLEPLVFKSLKKKLPELRDAIDGFITPEQAGKLKVIKGHFEDLESRKAELEELILALAAPYQQELAILQTAPGISSVFTAIGIISEIGTNMEAFPSAKHLCSWAGLTPTNNESAGKKKSVRVSKAGCYIKPLLVQCANAVVTSKKHPEIRNRYLRLKKRRGHKKAIIAIARMLLTALYHMLKNGENYNAELYRKSNLPPVDREITVEQAIIIARNQGYKIRSATA

SEQ ID NO: 223194 - protein, 349 aa, unidentified
MTMLAEHVDVVIGVDTHKHTHTGAVVRAATGAVVEKITVSTDPDGYAELIEMADRHAALRAWAIEGTGTYGADLTRHLGDAGELVLELDRPKRPPRRMGAKNDELDAVRTARDALGREHNATPRRGTDRAALSVLLAGRRSAVEAAKVAQVQLQALICAAPEQLRTKFRGQRSKTVTNTAARLRVRGDWDLETRTYATVLRDLARRRIALLKEAKTHEGAINLIVKSWRPDLLDDFGVGPIVAATILCAWSHTGRCRNDGAFAKLAGVAPIPASTGVTNRHRYNPFGDRQLNRALHLIVVHRMRRDATTRAYTERRRGEGKTDREIRRCLKRYVARQLFQQLEQPVDSQ

SEQ ID NO: 223195 - protein, 343 aa, unidentified
MQSITTIGLDIAKSVFQVHGVDAGGRVLVRRQLKRRYVLAFFQKLPPCLVGIEACASSHHWSRELKAFGHTVRLMPPAYVKPYVKRQKNDAADAEAICEAVTRANMRFVETKSPEQQSCLMLHRTRHLFIRQQTSVINAIRAHLAEFGIVASVGRKGVEELLDVVADSSDKRLPEVARVCVAALGAQLRTLKVQILDFDRQIIAWHRSNEMSMRLDDIPGVGPALATALVASVADPRAFRSGRNFSAWVGLVPKQRSSGGKERLGSISKQGDRYLRSLFTAGALAVIRYAKIHGTKHRPWLTALLARRPTKVAAIALANKIARMAWAMMAKGERYKEPVTLAA

SEQ ID NO: 223196 - protein, 356 aa, unidentified
MTKTLMAGIDLHSNNVMIGIVDQDGRRLKHQKLACDLPEVERFLRPYKSRLKSVAVESTYNWYWLVDGLKARSYPVVLANPAKIDQYSGIKHADDQNDAYFLAELQRLNILPTGYIYDPQVRPVRDLLRRRILLVHQRTALILSFKSLYTRTTGQPMTLSRLKTLEPAQAVALYEHPANQLIARVQKEHIEQLNGSIEQIEKVVLESVRELPCYEKLNTLPGVGRVLGMTITMEVGEIGRFKSAGDFASYCRAVDARRTSNEKSKGCNNRKCGNKYLGWAFVEAANFAKRYNEPCRRWFDRKAARTNTVLATKALACKLAKAAWHVMAHNVDYDAERVFGRALGSQVKGLAKSPAN

SEQ ID NO: 223197 - protein, 344 aa, unidentified
MDNHTQYSGFAGVDLAKKVMQIHFVSGDGEITDKQVKRAEFLDFFRNRSKCLIGMEACGASQDWARKLEAMGHEVHLMSPKAVKPFVSGQKNDYNDAIGIYKAIFNGVRRVPVKSTEIRDLQTLRRIRSQVTKDRVKEINHVRGLLAEYGIVMGKSITAFNKGISSALESLKERGDVSPLVAEELQTTVESIKTKIERQKRLDREIEQLARGCKNYENFLKTPGVGPFAAAMLCVLLCDPAIFANGRQFAAYIGLAPRSRGSGGKNFIIGIPSKFNCDSESRAVFVECAQALARYKNKSPWVDGILRRKPKKVAVIAIANKLARQVWAMANKGESFKQMTILTA

SEQ ID NO: 223198 - protein, 352 aa, unidentified
MTVTIVETRVQARAITGGVDTHADVHVAAALDSIGGLLGVAEFPATPAGYAQLLGWLGGFGTVCLAGVEGTGSYGAGLARYLAAAGVRVVEVDRSDRQDRRRAGKSDPLDAVSAARAALSGRAAGAPKGRDGQVEAIRALMVAKRSARSVRTQTINQARALIVTGPDDVRARFAAHGPAELVAELAALRPRPGSMVRYHTLLSLRELGRRAQFLDAQLARLDEFIVPLVTARAPGLLALYGVGPDTAAMLLVAAGDHPGRLRSEAAWAHLCATAPLSASSGKVTRYRLNPGGDRQANHALYRIVITRLSSHPPTRAYAGRRTKEGLSKKEIIRCLKRYVAREVYPHLRPPAG

SEQ ID NO: 223199 - protein, 369 aa, unidentified
MDKDTTYVALDDSKRKIVAGILRPADAHPELREIANDPRQIRRLFERLKREGPVTACYEAGVSGYDLHRQISALGVACAVIAPALTPRRPGQRIKTDRRDAAKLVRLFRAGELTAIHIPDEAEEAVRDLVRCRDDIRRDVLRWRHRVLKLLARHGRACLAGKNWSHAHWRWVREQRFDLPPLQRAFEATVFALEQALARQAELDKELEALAATAPYREPVGWLRCFRGIDTLSALILIAEVVDFQRFRRPRELMAYLGLVPTEYSSGETQRRGALTKAGNSHARRVLVEAAWHYRHRPTIGRALASRSQGQPDEIVSHAWRAQQRLHRRYRHLVGHGKRTPVAVAAIARELVGFIWAAMTRHESRRQAA

SEQ ID NO: 223200 - protein, 346 aa, unidentified
MNYIGMDCHITTLDFAVVNEAGRLIKANSVATSVNGLVEFVKTVPSPRTIYMEEGTLAAWVLETCVRFKENLVITDPKKNRWIGSSGQKDDPLDALKLAQLARGGYIKEIHHPVGQRRRFRELMIAYHDTVKSTTRIKNKIKAKFRQNGVQCSGKTVYSEAYREEWKRKLPQEATVLLILEGLWSQLEQSEQSEKELLTAARAQAKHYPEIKHFEALPGIGFISAATISAILETPYRFADKRKVWMYSGLGIMTRSSGGKTYSEKLGIDYNRLLKYTMKQAVEVAIQAKDNPFRQKYLDMTLLHGTAPHRAKLTIARDMLATMWAMWRKGEKYSPEIREKAAYKQG

SEQ ID NO: 223201 - protein, 347 aa, unidentified
MGKSITDLSSVTTVGLDLAKHVFQVHGVDASGRVIVVKALRRKDVLAFFAQLPECLVGMEACGSAHHWARELIKLGHDARMMPPAYVKPYVRRQKNDAADAAGICEAVTRPSMRFVGVRTLENQAALMHHKLREMLVAQRTQLINALRGHLAEIGVIAAQGLKNARDLAWVIKAEGDETIPACVRAALAPLVRQLHALDQEIARSDQTIAAMARDDEMARRLMTIPGLGPVTASAMATSVQDVSVFSGPREFAAFLGLTPRQNSSGGKERLGRVSKMGNRYLRKLLVVGAHAVLYHRKPHDDALRSWAKKLMQTKPFKLVAVALANKMARIAFAIMRGKTSYSAAPA

SEQ ID NO: 223202 - protein, 360 aa, unidentified
MDIIGLDLHKRESQLSITVEDGTITDRRIVTSRERFTAVLGDRPRARILLEASTESEWVARHLESLGHEVIVADPNYAPMYANRSRRTKTDKRDARTLMDACETGAWRPAYRLSEPRRHVRAELAVRDALVRTRTRYIALAKALVRRDGLRVPTSASAWVPTRMAELDLSPALTTELAPLFAVYASLNEQITAADRRIAAVAASDPIVARLATAPGVGPVTASAFVATIDDITRFRSAHELEAYLGVVPSERSSGEKRQLGRITKAGNGRMRWLLVEAAWRILRSKSPATAALRAHEREQKAEQHLEGRTDNRQGPNGKRRNTPLGLTRSVASQKKEIQSGLWEYVGVVGVCRGRGSVDR

SEQ ID NO: 223203 - protein, 346 aa, unidentified
MDKLYYAGIEISAERLLVGLQTERATPARREFPNTPEGHRALVPWLVARGRRVRVVMEATGLYGLDLALRLEREANLELMVANPRAVRHFAQALMKRSKNDPIDVQVLVQFAQRMPFQRWQRPSPAALHLHALARRLEALCDMHAAEKNRQHAAQLSEAWPEDVQRDLKRSLRALERATNRLTRQAVEVIAQDPDLNLRYQLLLSACGIGPTSAVQILAQLAVLSPHLDVRQWVAQAGLDPRQYASGSSVHQKTRISKAGNRHLRRALYMPALVASVREPHLRAFYLHLLERGKTKMQALVAVMRKLLHAIFGMFKHRLPFDGAKLYQLPQETSLLQPSFSTAEVA

SEQ ID NO: 223204 - protein, 344 aa, unidentified
MSKVTIGLDIAKSVFHLVFMNQSGRVLRKKKLRRHQMLSYFSQLEPCIVVMEACGSCHYWCRELTKAGHEVKAIAPQYVVAYRKGNKHDYNDAEAIAEASQREGMRFVPFKSQDQQDIQLMHRIRERMIAQQTALSNQIRGLLSEYGIVYARGVATLVKELPFTLEEADNGLSMLARRQFQGLLNDLRELREHIKEMDKELKAFSQSQPVCERLMSMTGIGPLIATALYAGIGQGQAFNSGRHLAAWLGVVPKQHTTGDNPRLLGISKRGNTYLRTQIINGARAALRHIGDKTDKVSEWCRACLARMSFNKACVALANKMVRMAWAMLHYQQDYQPGLINKVAA

SEQ ID NO: 223205 - protein, 453 aa, unidentified
MSNDSTSKEKFLKKMPMLHINAAGIDIGSTQHFVAVPEGRDDHSVRSFQTFTADLFELADWLKKCDIETVVMESTGVYWLPLFEILEAKGFEVLLVNAYHVKNVPGRKTDVSDCQWLQQLHTYGLLRGSFQPVAQIRELRTYLRQRDMLIKYCSSHILHIQKVLTLMNIQLHNVISDITGRSGMRIIRAIIQGEKDPDTLVLKCDKRLKNPLWVIKKSLEGNYNTENLFVLQQSVELYDYYQKQITDCDVHIQTLLESFDSPKERVESNKNDNQERIKKEKKQIVNPKIQSEIKRIAGVDLTQIDGLNTTSVLTLISEVGLDMTKWKTEKHFTSWLGLAPNNKISGGKVLSKNTKKTKNRAGNIFRLAANSLSRGDSYLSGVYRRYRSRLGPGKANVALARKIAVIFYNMLKHGQEYFDLGCDYYEKKVAERNYKYLKVRAKHLGFDIVPLSA

SEQ ID NO: 223206 - protein, 392 aa, unidentified
MFAGIDIASERHVLARLDDAGEPVGKPLPFTEDRAGYDAALAALGPPPVLVAMEATGHYWKNLFAVLTAAGHHVALLNPLLARRFQEASLQRTKTDAIDARGLARLAFEKRPRPTRLPGDADEALRELVMHRDRLRRDFDDRVRQLHRLVDLGFPEFNRYVRSLDSMLATCLLAECPTARDFAAADPRRLAKIRCDGRHFVGAELAGQLVEAAKRSVGQHHGPAYALQARHICQDLDLWRRRLADIDRDIEGLLEAHEVGRLLATIEGLGPQSCARIIAAAGDPARFKSAAAFAAFVGVVPGLQQSGKQSARARAPLAPVGNAGLRKALWMPVLGAVRRNPWLRAFYERLRAAGKPAKLALVAAMHKLLLAVYSVAKHRKPFEVRQPQPSAG

SEQ ID NO: 223207 - protein, 514 aa, unidentified
MAPVYGDHGYGGGTFVFREGLDPVGETLKSIANRAEPTALLWRRSIMRDWQKMNQKQRKELFRRVSVEDPGLDVIHSNAAGIDVGNASHFVAISPKRDSQPVREFRCFTEDLRRLAEWLVSRGIQTVAMQSTGVYWIPLYDILKEHGIEVFLVNAKYTKNLPGRKTDIQESQWLLKLHSYGLLSNSFRPPAQILAMRTYWRLRAEHVREVSTTILRMQKALTQMNIQLANVISDISGVSGMAIIRAIVAGERDPLKLSQLRDRRIQATPEQIAKSLEGNWRRDLLFALSQQLLNYDHFQKQIQLCDEQLRFHFQSLPATHRSGQTPGAPSAAKLRTKKRQKPHGNTPSFDLAAELKRTLGVDLTLIDGIDVMTAQTVASEIGYDVSPWKTEAHFASWLGLCPDNRISGGTVLSRATRHVVNPLTNALRIAASTLLRSQSYLGAQYRRLRTRLGAPKAITAMAHRLARLIYRMLKFGEEYVDKGAQFYENKYAQLQILHLKKKAARLGLQLTPLQ

SEQ ID NO: 223208 - protein, 388 aa, unidentified
MTYYVGVDIAKYTHFASIIDSNGTVIENPFSFANNEIGFKLLLAKLQNYPKSEIVIGYESTAHYHLNLHHFLDDSGYKTALINPILTKRLRSISIRNVKNDKVDSLTIALFLYSNYSKLKLSDNGIQELRVICNQVHELKQTKAKLYIQLTACLDLTFPEIKAAFFKGNLKSNAAHNLLKKYNTAKEISAITPTQLVKIISKNSKRFNKNRVESLVDLAKHSVGINSKSISIKIRQIIEQVELIERQIEDLLDVICNDEIVRDCALLQIPGMGYLQAANILSVIYSIERFDSPEQVLAYAGLDPIIRQSGLFNAKSTRMSKRGNSLLRYTLIWSALNCSKNSKTMSEYYLKKRNEGKSHYNALGHCARKLTNYIFWILTHPNDKFNLD

SEQ ID NO: 223209 - protein, 336 aa, unidentified
MAIVRVGLDIAKQVFQVHGVDGHGKTILQKTLSRPQVLTYFARLPVCLIGIEACSSSHYWARELRRFGHDVRLMAPHFVTPYRKNGKNDANDAEAICEAVGRPNMRFVPVKTEEAQAVLTLHRARELLVSERVALSNQIRGLLGEFGIAVATGMAKLRQVMTELHTGARALPLLAKETIAELYERMLSLDSKAAEYERKIAMLAAQSEPAKRLMKIEGVGPITATALVASVGDGKLFRSGREFAAWLGLTPKQYSSGGKSRLGGITKRGDVRLRTLLIHGTRSAMRSMAGKTDHKSRWVAELQRRSCNPVAAVALAARNARTIWAMLVRGTEYRVA

SEQ ID NO: 223210 - protein, 381 aa, unidentified
MTTAATYHEPGNTPAGTLFVAFELSEKTWKLGFTTGHGQKPRERTVTARQQERVLDEIAQAKRRLRLPDTAPVVSCYEAGREGFWLHRFLQGHGITNHVVDSSAIEVNRRRRRAKSDGLDVRKLLSMLMRYAQGERQVWQVVKVPSVEAADHRHLHRDLETLKQERASTTTRILGLLSSQGLRVTSLTKLPEQLEALRLWDGSPVPPGLRRRVLRVYAHHTFLSEQIAAVEAERRAQLQVSTDARIDKVRQLMLLKGIGINGAWLLVMEFFGWRALKNRREVGGLAGFTPTPYQSGESAREQGITKSGNRHVRWMTTELAWSWLRFQPDSTLSVWFRERFGGGGKRLRRIGIVAVARKLLIALWRFLETGVVPEGAILKAA

SEQ ID NO: 223211 - protein, 318 aa, unidentified
MDKDVYVGIDVSKTELVVAVRPSSESFTLAYHRAGLKQLVGRLGELKPKLVVVEATGGLQRQVVAALWTGGIAVAAVNPSWVRSYARGGGLLAKTDRIDARLLALFAQREQPVPRPPLDAETQALQELATRRDQLLEMRVAEQQRLKRSSAQVRKELRQHIAYLEGRITQIDDDIDKTVRRSEAWRRKSEVLRSFPGVGKVFCTTVLSKLPELGTLSGKAAAALVGIAPFPDDSGARRGRRVIRGGRYPVRSKLYMCALSAIRFNPLLKQFYERLLARGKLEKVALVAVMRRIIVILNAMLKTNTTWRQPCAVALDKN

SEQ ID NO: 223212 - protein, 363 aa, unidentified
MIIIGVDYHPSGQQIAFLDQETGECGERPLNHSDGEAEKFYRDLQQRGVSVRVGMEATGHSRWFERLLAELGIETWIGDAAKIKRQRVRKQKTDREDARLVLKLLLENRFPRIWVPSPENRDLRQLLWHRHRLVQMRTRIMNQLQAVAMNEGYRWKKKLFSAQGRALLEKLSLAPWARRRRKELLELLDQLDPKIAELTAAVEQEAQQRPEVLRLMTHPGVGPITGLAYVQVIGTPDRFPCGKQIGSYTGLIPCEDSSAGKQRLGHLSKQGNTLLRYLLGEAAQAAARCNPDWRRQYVHLAMRRHKNIAKAAMARKLAVRLYWMWRNGWDYSQLVEFGSHAGKLATGHGVKQSVVHLIGHPAP

SEQ ID NO: 223213 - protein, 418 aa, unidentified
MEVLHRRCAGLDVHKKTVVACVRLARDGGVEKEIRTFKTTTSDLLALGEWLDGHAVNHVVMEATGVYWKPVWHILDDGERELVLANAAHVKNLPGHKSDVRDCDWLSDLEAHGLIRGSFVPTLPTQELRGLLRLRKQKVRERSSNTLRLQKTLEEANVKLDSVISNVLGVSGRRMIEAMIGGETDPVALAGLADRRIKAPAEVLCEALRGRVTEHHRFLLGLQLEHIDALDGMIDKIDRQIEASVEPFRAVAALLPTIPGVDDLASRAIVSEIGVDMSRFETAGHLLSWACMCPRSDESAGKHRSTRIRKGAPWLKEILVQCAWAATRTKGTYLHAQFVRLRARRGPKKAIIAVAASILTAVYHMIKNGVPYRDLGSQHFDSRNKQAQAKRLLARLRNLGFSADFDSLKPIPQPVVSY

SEQ ID NO: 223214 - protein, 427 aa, unidentified
MNLTQDAKICQVTDTTIIIGVDIASETHYARAFDWRGIELGKVFIFGNSAEGFYGFSNWISELAKKTNKDHIMIGTEPTGHYWFSLGTYLRDNGIKVVLVSPYHVKQSKELDDNHPSKTDRKDPKTIAKLVIDGRYIEPYIPEGIYADLRVAMNCRWRIIREQTVLQNRIQRWLKIYFPEHRNVFGSFDCISSLMILRTAPLPADVIALGADGINAIWRKAKLRAVGLKRATSFVAAANESIGCADGSTAARMELMLLLDDYESKLQQYNAVMKTVEELCDQLPEVAELVKIKGIGLVTVAGILAEVGDLRRFDSPRQIQKLAGLAIRENSSGKHKGRTSISKRGRAKLRCILFRSAIVLSSQNQEFKEIHRYFTTRTDNPLKKKQSIIAMSCKLIRVFHTIITKGYEYDPTKLLADIHRNKMPSAA

SEQ ID NO: 223215 - protein, 354 aa, unidentified
MFNKPNSTVATMGIDIGKYSFHVVGLDQRGAIVLRQKWSRGQVEARLANMPPCLIGMEACVGAHHLSRKLQSHGHDARLMPAKYVRAYLKGQKNDFRDAEAIAEAVQRPTMRFVATKTTDQLDLQALHRVRERLVSQRTGVINQIRAFMLERGIAVRQGLRFLRTALPNILATRSDVLSPRMMHVIEELAGDWHWLDERIEGVSTDIKALADQDPACKRLMTVPGIGPIISSATVAAIGNGAAFSKGRDFGAWLGLVPRQISTGDRTILGKISKQGNRYLRVLFVQAARVVLVKPTMWERHGLKSWIEAAKKRLHHNVLAIALANKLARIAWAVLNKERNFECARTNGMASRSV

SEQ ID NO: 223216 - protein, 409 aa, unidentified
MAPDLLRKELFPMKVVYSTCCGVDVHKTFLVATIIKTTKGVQPSYQKKRFSTFNSDIRRFKQWLLDNSCFDVCMESTGKYWIPVFNLLEDQINVTIANPKWVKAVKGNKDDAKDSKWIGDLFRLGLVPGSFIPCKEIRILREYTRYRFKLTCCKRSEKNRFQNAFTVCNVALDAVVTYMFGKSTSSITDYLITSDEFDPETCKSFFQKSLKKKADAVIESIEGYQMTSSQKERMLMVRSHLEFVQQSIDSLDSKLDELTAPYENAVSLLCTIPGVDRASAITIISEIGTDMTQFNSSKRLCCWAGLTPGNNESAGKKKSVRITRAGVYLKPALVQCAHAAVKSTATPYYKNKCERLAKRRGKKRAIIAIARMILTAVYHMLSTGETWNPCDLYKIDMPKEMQDKQKLKL

SEQ ID NO: 223217 - protein, 352 aa, unidentified
MVVTIGVDSHKATHTVVAVDEVGRVLGEKKVRATSEGHLALAQWSARFSEVIFALEDCLHLTRRLEGDLLRAGHVVVRVPTRLMAQARRSARDPGKSDPIDAEAVARAALRYPDLPRAELDGPAREVKLLSDHRRDLVNQRTRIAAQVRWHLHELDPALEIPSRGLRRKTVVGQLQQRLNHVPGVVARITRDLLIRCEQLNAQIAGLDAELRDLVRVLAPSLLAIPGCGVLSAAVIIGETAGVHRFRSRAAFARFTGTAPVPVWSGASAGKVRLNRGGNRGMNCALHNIAITQARRGVGNGAAYITKQTERGKDTTAALRLLRRRLSDTVFTALRTDQDAAGNPPITLPQAA

SEQ ID NO: 223218 - protein, 428 aa, unidentified
MKKHNTCKLEAITPNTLIVGVDIAKSLQWARFTDYRGLELGKAIKFKNNKEGFERILASIETTCKLKKLDKIVLGMEPTGHYWKPFANYLQLNGITVVMINPYHTKRAKELDDNSPTKSDKKDALIIARLVRDGRYYQVYMPRDEYAELRVLSNSRISLMRRHNALKNTITTVMDEYFPEIVNVFKHPLKGKASLQIMKSCPFPSLILELGVDGVLREIKKAVKKTVGRKKAQELVEAAQTSIGVNYGITASKLKLGLMIEELELLTKQLEQIENAMEMALAKTGLKELMLSIPGVGVVTAASFLGEIGNPLRFEHPRQISKMAGYNLVEDSSGKNKSGTSISKRGRKNLRSILYQMARTMVAQNSEMKELYRYLKTRSNNPLKSKQALVVISKKIVSIIYNLVKRQTEYQAELVFNEFRKNQMRQAA

SEQ ID NO: 223219 - protein, 351 aa, unidentified
MKIVVALDVHRSQITFKALDRDTGEVRRGRIAPAARAEVRAWLSQFADCAAEFAVEGTTGWRFVVEEIERAGHRAHLADPAETAARRGRKRRAKTDNADCDLQLRLLLTDELPESWIPPPQILELRTLVRLRKTLIDQRTAWQQRIHAQLFHQGVPGGLKLRTQAGRAALQRAELSPAGRELVALGLRMLDCFDLELAPLDRQLRAFSRRQPGCRALIDELYGVGPVSATAILAELGDCRRFASSDDAVRHAGLDITVYQSDEKRAPGHLSHEGPPVLRWALYEAAVSAARASSPDRSYYLQVAERLDHNRACLSVARKLCRRAYHILRELGDEALAPIEQPPDKEFAAAA

SEQ ID NO: 223220 - protein, 347 aa, unidentified
MRFYTKQHQFYCGIDLHARSMYVCILDQAGEILLHQNMKASPEAFLRAITPYRADSVVAVECIFTWYWLADLCAREGIPFVLGHALYMKAIHGGKAKNDKIDAHKIAVLLRGGMLPQAYVYPAEMRATRDLLRRRMYLTRKRAELLGHVQNTNSQYNLPEIGKRLAYKANRTGVAERFPDPAVQKSMEVDLALIDSYDHLLGDLELHIVKAAKQHDAQTVYLLQTVPGIGKILSLVLLYEMHDLARFPSVQDFASYCRLVKCAKESAGKRYGTAGTKIGNAYLKWAFSEAAVLFLRDNPAGQKYLARLEKKHGKGKALTILAHKLARAVYYMLKRGVVFNLDTFLHH

SEQ ID NO: 223221 - protein, 390 aa, unidentified
MQIIADRPEAPSAIRSDLGAIFISLELSRSTWLITSLSPGSGEKMSKHSVPAGDICVLLARFSELRQKAFARTGKSFPVIVVQEAGLDGFWIHRVLQNEGIESHVVDPASIATSRRRRRAKTDRIDGEALLRALLAYKRGEPRVCAMVKAPAPQEEDRRRLCRERKVLIAERVKHVNRIKGLLFSQGVSGYEPRRRDRRRRLDELRTGDGRPLPKHLKAQISRELDRLELLLEQIKAAEIERDALLAAQQVAAPASAAMLLDIKGIGPEFAAILWSEGLFRHFDNRRQIASFAGLAPTPWRSGSVDREQGVSKAGNPRLRSTLIQLAWLWLRHQPQSVLALWFEERVRRNGGRLKKTTIVALARKLLVALWKYVTAGVVIEGAVMKAARR

SEQ ID NO: 223222 - protein, 414 aa, unidentified
MYYVGIDIAKKSHVACIMREDNSLEVNPFSFASSIEGFSKLTAILSSLACAKDDVLIGMEATGMLFDNLYRHLKSIGYRVVLLNPYQTAKFREMDTMKRVKNDNIDAKMIAALIKSGRFSEGYVNEDELQSLRSLYRHFNSLQDQLKSIKRQTQSIITVTFPELEEVIGDLFSVSALALLQKYPTAKHYHKASVDRILKTFRNIKGNNFNEDKASKILKLAKESIYSGVGKDGYEITIRSNITLIYSLQKQIETIESAMLSLFEKKEQKATNEEQESMSELIDNLRTIPGVSDKTILALLAECGNLDRFHSAKALVGYLGLYPTLEQSGDSTKHKHLAKRGARLAKKAIYLASIAAVRHNDELRQVYINYRSKGRAKKEALIITARKLLQIIYAIYVHNTPYDPKRVFVAQPTK

SEQ ID NO: 223223 - protein, 362 aa, unidentified
MFVAGIDAHTRYVKVVVVERTGARVLGPVRVKMEEPARLVALLAPYRPLEVVVETSSSWPRLDAVLSTAGVRFVLAHARRLRAIAEATYKSDDIDAELLARMHLAGLIPRVYATPPAQREWATLIRHRTLLVAQRTALVNRIHAPLHLCGLYLERGRLRTRAGWQWVRATAWPQLSVEQRALARTHRRLIHGLSGLIRALDRRIAQVAAPIPEARLLATVPGIGPHRALLICAEALPITRFRTAGHLASYAGLVPGSSQSGQRGVRHGALPAGANRWLRGALVRAVVSHVQHAPDSWLTAYYATQKARRGWPVARVAAARKLARAIHAMLRTETPWRDRPARPDSSLGESSAPRLADSRHVN

SEQ ID NO: 223224 - protein, 428 aa, unidentified
MEIPVASPEVVAWVGLDWADQRHEVRLQAVGSGASESFTVEQKPEALHGWIAELRARFPQGKVALALEQSRGAVIYALMNYDFLLLYPIPPKSLARYREAFASSGAKSDARDADLLLELVRAHRDRLRVWQPDDALTRQLRLLVEHRRRTVADRTRLTNRLTALLKTYFPQALDWAGDLHNPVACQFLRAWPTLEAVEGASRSELRRFFHEHRRLSAEGLQQLFQEIDHAQPLTRDPALVEASALMAQTLAAQLEAVIAALERFDQALGGLFGQHPDRELFDSLPGAGAALGPRLGAAFGTDRHRYQSAEELQQFSGVAPVTESSGKTHWVHWRMACPKFLRQTFHEFASCSLKKSLWARAYYEQRRRGGASHHAAVRALAYKWIRILYRCWKTRTPYDESVYLQALKRRRSPVWLAVGTLSIQEAHA

SEQ ID NO: 223225 - protein, 310 aa, unidentified
MERLFVGIDVSKDRLDVHVRPTDESFAIQADETGIAALLARLAGLQPSLVVLEATGGYEAAVAAAIAHAGVPVAVVNPRQIRDFARATGQLAKSDTLDARVIARFAETVQPPVRGLATDQAQALASSSPRRRQLVDMLAAEMNRYRQARNRPLQKRINAHVTWLTRAIEELEDDIKRLIRSSPVWRETENLLMSVPGIGDITAHALIADLPELGHLDRRRIAALVGIAPLNRDSGLWRGRRTIGGGRPTVRRALYMATMVAIRYNPMIAAFYRRLTAAGRPKKVAIIAAMRKLVTILNAVLRDQRPWQTA

SEQ ID NO: 223226 - protein, 407 aa, unidentified
MIFAGVDWAEAHHDVYFQDVRGRRLAGGRLPEGVEGITRFHELAAAHADEPDEVVIGIETDRGLFVSALVAAGYQVFAVNPMSASRYRDRHGSSGAKSDPGDAKVLADLVRTDRHNHRPVAGDSDLAQGIRALARAHQSMIWAGRRQANQLRSALREFYPAALAAFDNLTSGDATAVLKAAPQPMLGAALSRAQITAALRRGGRTRRLAERTAAIQAALRTPQLQPAPALAAAMGAAVAATAAVIAEMNTQITALEHQLAADFEQHPDAQVVRSLPGLGTILGARVLGEFGDAQGRYATAKSRKNYAGTSPITRASGTRRAVLARHTRNKRLADAIYLWAFAALTASPGARAFYDHRRAAGDTHHQALRTLGNRLVGILHGCLASHTPYSEHTAWAHRTSQQTPHAA

SEQ ID NO: 223227 - protein, 410 aa, unidentified
MQSAPTTLPRTPDGGLTSGIDWASSDHAVAVVNTDGLEVDRFITEHNQAGLRAMTRRLRKLGVGEVAIERPDGPVVEALLGAGFTVVVISPNHVKNLRGRYGSAGNKDDRFDAFVLADTLRTDRARLRPLVPDSPQTVTLRQTCRARKDLVAHRVAVANQLRAHLQLVFPGAVGLFADIDSPISLRFLDRFDCQERADWLSPKRFEAWLASVGYCGRTDPAVLHARLVAAPRGAAGTTATVHITRAMTAVLRTLVEQIKALSEQIDEQLAGHVDAHIFTSLPRSGTVRAARLLAEIGDCRARFPTPESLACLAGVAPSTRQSGKVRAVGFRWACDKQLRDAVCDFAGDSRRGNPWAEHLYQQAIARKHDHPHAVRILARAWLFVIWHCWQDGVAYDPTKHRALKNLGLPA

SEQ ID NO: 223228 - protein, 367 aa, unidentified
MSSLAHRGYTHIGMDVSKDSISVAVLSPDRDVAEVDKIFNDEASVRRLVKRLGRPSGLWASYEAGPTGYDLYRLLSALHVRCDVVAPSLVPKGSGDRVKTDRRDARRLAGLHRAGELTAVAVPSPAQEAVRDLCRTRGDMVQDLTRARNRLSGFLLRHSVIWRGGSTWTCAHERWLAGRHFEDRALASTYAHYLATVRLRDASLEAVEADLVPWCDTEPFGPQVTRLAAYRGVTRVGALCLGAEVFDWRRFPRARPFMSFTGLCPGEHSSGLSQHRTHITRAGNAHLRGQLTEAAWSYQHRPNVGAGIRLRQRDCTPATIARSWHAQVRLSARFRQLAAHKNVRSVVAAAIARELAGFLWAEMVAED

SEQ ID NO: 223229 - protein, 356 aa, unidentified
MLYLGIDQHARQLTISLRDDSGDVLQARQVSTQPEKVQAFFARLTQERIRDGESFIAVVEVCGFNDWLIRLLRDYRCHKVILIQPEERKRRKTDRRDAAALSELLWVNRDRFLAGKPVRGLRQVDIACTTDQENRRLTTLRKEASQTRTRIVNTIKHILRRHNLQWHMPTKTFPTRRAIAWLKQLVLPEMDRLEMDYLLVDLEHAQQRVGELEEVIIERCGDSKDAQLLRSMPGVSYFTATSLACRIGRVKRFPRARSLANYWGLTPGCRNSGEHNQRLGRITKAGSNMARWLLAQVTHQALRKDAQLREWYKRIRRRRGSTIARVAVMRKLATVIWHMLSKQQTYAECRAIAAAC

SEQ ID NO: 223230 - protein, 461 aa, unidentified
MIGIGIDVSKGRSTVSAVGEGKKVIQKPFDVAHTKTELSGLVKFAEKFDEEVRVVMEHTGVYYRVVAETLYEAGVRVSVVNPVLIKQFGDNTLRKGSTDKSASMKIARYTLENRDELRDYTSDDILRDNLKSFARQFNFEDKSLSAHKNRLYSLLERSFPSIDGFFSSPAKSNGHQKLIDFVIEFWHSDCVSSLSLAKFTEKYKKFCKKNRYIADEKTAAEIHAVARENLTTMAKDDATKMLVADAAKHVLAISIRLETLRSEMIRIAKKLPEFDAVIALYGVGETLAARLMGEIGDVRRFESKRALVAYAGVDPGKDDSGKKVSKSGTMSRSGDAFLRKAAYLVVESHLLNSPVDEPVYQFLDKKRAEGKNYYVYMTAAANKFLRIYYARIKEFMDSLQIENPHDTDGISESTATESIDATVSEQTNTAFTCEQCSAMQECNVSASQGFVKQARIAGDSS

SEQ ID NO: 223231 - protein, 432 aa, unidentified
MKYKLKQKQNQRITRINEATLVVGADIAKKVHVARAVDFRGIELGKDCVFHNDAEGLTKLSAWMKELGQAHGKTEIMFGIEPTGHYWFPLAAFLQEQGIQVVVVNPSHVNKTKELEDNSPTKSDYKDAKVIADLIRNGKYSEPKLPTKEYADLRILMNLREKVSASLTQAKGRIGNWFDRFFPEYSRVFKNWDGKASLMSMRKFPLPADIVAMGARDVLAHWKTDVKRGVGIKRAEALLVAATTSIGLTEGTVAARMELSTLLSQFELFSEQLEQIMEQVMVILDSIPGAAQMLTVPGVGAITVAGFLAEVGDLNNYDHGQQIIRLAGLNLKENSSGKRKGRTSITKRGRSRLRALLFRAVMPMVAKNEAFKALHKHYTTRSQNPLKKKQSLIALCGKLIRVLHTLGTKQKAYNAVDVIGPVRQSQMHQAAA

SEQ ID NO: 223232 - protein, 467 aa, unidentified
MSPSILYRAVPVKTATLRFLKHVARRSTVHIGIDIGKNKLYAVIRWTAPRAKHAIYEQPWFVENPNELAELTKKLQKIAKQNPTIIGIESTGSYGDPLRQALADAGLTVYQVRTKVTSDYAEVFDGVPSQHDGKDASIIAELLAQGKAKEWNFREPTEEENEMKYIVAKLKDSHKDLTRLRGKLEGLLARHWPEITKILPLTSLTLLKLLKKYGGPQKIRIDREAVAAIRRFSYGRIDGERADRIIDCVRSTNGVRQMTWDCRYVMDVAARMLDLHKETSRCKKRLAELIGMSCVELQRLSKLLGGATAAVVWCNIGSPHFYHCADAWLKAMGLNLVEKSSGEYQSNVCISKRGDSETRRWLYLSALRWVQGSPVKQWYQRKKEQTGTKIRGQENKRTSGKAVIAVMRKMMKGIWHALVHGHAFEMEKLFCEGSSKKEDARPGSKRFRKHRKNKRAARTSTSNVTSR

SEQ ID NO: 223233 - protein, 315 aa, unidentified
MQTPLDIGADISKDYVIVACTQHSFDRHKLANQRAVLLAWLKTLPAGSRIGMESTGSYHELLAHLAHRLGLSVYVLNAKDVRHYGQATGQRAKTDRVDAALIARYVAKEHEHLHLWYPPSAAQRQLQRLMRRRAKLTSTRCTIRATFKDVASLRTHSRALLKGFDALIAQIDAQARELIKADPEREQAFQRLDAIPAVGNAVGVGLLASLERWVLPRADAFIAFIGLDPRPEDSGKKSGRRRLSKRGDPELRRLLYVAAMSASRTRVWAPLYQRALARGLSRIEALVVLARQIARTAWSIYTHKTHFDPQRLQKA

SEQ ID NO: 223234 - protein, 412 aa, unidentified
MTVTNQFAAHVGLDWADKKHDVCVQFKNGERVFDVIEHTAEALDAWLIELHQKVKGRIAIALELKKGPVVYALQKYPFITVFPVHALSLARYRQAFSPSGAKDDPQDAELALELMLRYPQKIKAIEPNNADIRLLQQLVEQRRQLVEDKRRFVNRIINTLKQYYPQPLEWFSHRGSLLLCELIIRWPSLQKLKRARRDTIRNFLNAKGGRAMALTEQRVASIDNAIPLTTDPSVIEANALMATALATQIKVVSEIIKTYDERIETLFDTLPDAGLFKSLPGMGPCMGPRMLAALGDNRDRFNSAEEIQNYAGIAPVTERSGQKSWVHWRWQCAKFVRQTFVEWAAKTVNSSYWDKLYYQNLREKGKSHQSAIRALAFKWIRIIYRCWKTRTQYNEAKYLLALEARHSPLLKP

SEQ ID NO: 223235 - protein, 376 aa, unidentified
MNEKLRFLGLDVHAETIAVAVAEPNGEVRSLGMIANREDSIRKFIRKLGSPEHLRACYEAGPTGFVLYWQLTQLGVKCDVVAPSLVPKKPGDRVKTDRRDALKLARSHRSDDLTAVWVPDEGSEALRDLVRAREAAKQDQLRAKHRLTKFLLRTGQRPPLGVKAWTEKYVEWVQQVRYTHPAQEATLLDCLNEVQHMEERVKRLEQSIVEVIQLAPAPMQEVVRGLQALRGIAHISAVTIAVELGNITSRFESARDLMGYSGAFPSEDSSGERIRRGGITKSGNAHLRRIVVESAWSYRYRPAIGARLRKRQEGLPAEITEIAWKAQNRLHKRYMTLMARGKEQRKTMTAVARELLGFIWAIGIKAEASCKQQLAA

SEQ ID NO: 223236 - protein, 335 aa, unidentified
MNHIAIDLGASKSQICVRDPQGKIIEEKHLETAKLAGYLKRRSTSRVIMETCSESWRISDAAQEAGHEVRVVPGHLVRSLGVGHRQMKSDRKDAQALSEVSTRIDLPSVHLRSRESREIQTRLKMRSQLVSSRTQLINNVRGWMRTEAIRLRTGSVPTFTKRLRAKKKEVGLPFYVERQLEQIDALTQALVSTEEELEELAQETSGIAILKSVPGVGTLTALAFMATIDQLDRFRKAHHLQSYLGLTPGERSSGNKQRSTSITKAGSSMLRYLLIQASWTLYVHRPQEPIVLWAKKIEKRRGKKIAIVALARKLAGILFAIWKTKRPYQPKLTSG

SEQ ID NO: 223237 - protein, 317 aa, unidentified
MEKTSMIVAGIDTAKDKLDVAICGQTQRLQVANSMRGWKQLRLELTKAGVERVGIEATGGYERGVVRHLQAAGFVVLVLQPIQVRAFARMHRQRAKNDALDAALIAACAIAIKPHEIGPDQRLTALADSLTFVEQIEEDIARFKTRLEHIAEPRLKRMVLADIARLKVRRLAQLRLIAKQLRAHHDLAVRLDLVMSVPGIGERTALALIIRMPELGRISREQASALAGLAPFDDDSGKYKGQRHIAGGRARLRRSLYAAALPAAFRWNKALINLYSRLTAAGKTHNVAMVACARKLLIYANTVVARGTPWRENAVPT

SEQ ID NO: 223238 - protein, 324 aa, unidentified
MSDAIVGIDVSKETLDASCARGHRKQGKTFANSPDGWKLVRAWLKAMGSKQAHVCMEATGRHSLGVALALHDAGHVVSVVNPAQIRDFGRTKLGRNKTDKVDAALIREYAELFKPEPWTPPSPAMRRLCELQTMRAGIIRSRAEWKNRMGSGLGDSTATKLGAATIEHFTSQLEAIDRAIGETIDQDAELRGRRELLLSVIGVGETLAASLMAEMPEPGVLRRSGEMVAYAGLNPSHHRSGSSIDRPTRISKIGNATLRSSLYMPALSAMRFNPAVAALVARLKSAGRLQPKQIVVAAMRKLLVLCFGVLKTGKRFDPAIAMPA

SEQ ID NO: 223239 - protein, 428 aa, unidentified
MLKINPLSTLYVGIDVSSKSNYVCALDFYKNKYINSSFANNQPGAEELAKKILECLKEHPDLNTIVAALESTSVYSIHIANFLSSCEELMHFKPYVFVLNPKCTANYKKSYIGLGKSDPVDAFVIADYARAGNIETEPWRGSQFLALKRLTRHRLHLVECMTREKTYLVSNLYLKFSELQMLEGDDQPFCDIYGATSSSVLTEYLSPEEMIDSSEESLINFLAEKSRNRIKDISKTAELLKKAARDSYRLDKALYEPLNVSIASSFNCIETFKKEIKLIDTAIEREIKGLNPNAFIILQSIDGIGPVFAGGIVAEIGDISAFHSSDALAKYAGLMWKSNQSGDFDGEDTPMSKAGNRYLRYYLGEAANSMRKHNVEYGAYYRRKYNEVPKHQHKRALALTSRKFVRLVYGLLARNQLYSGVSLDTSNE

SEQ ID NO: 223240 - protein, 477 aa, unidentified
MRPTCRGRPTVVCFNPSTKLTRVRPAELIVARSKELSTRRKFVSYFAPLVGRGSDEERLLREVGTGMQVVHERCCGLDVHKKTVVTCILITLANGEVQRHIRTFSTMTAGLLALSDWLESLAVTVIAMESTGIYWRPVFNLLEEGRSVILVNAQHMKAIPGRKTDIKDSEWLADLLRHGLLKASFIPPAPIRELRDLTRSRKSLVQERAREVNRVHKVLETANVKLSSVATDVLGKSGRDMLSALIEGTTDAQILADLARGKLRKQLPQLQQALDGRVQAHHRLLLKHILAHIIFLEETLEQLQQEIEQHLGPLEEAMTLLMSIPGIAALAAAAILAEVGDDMTRFPSAKHLASWAGVCPGNKQSGGKRLSGKTTQGNATLRAMLAEVVWVISHMKDTYLSAQYHRLARRLGKKKAVVAVSHSLLVIIYHVLSTKQPYSDLGADYFEQRDSTRLTQRSVRQLEALGYTVTLVPKEVA

SEQ ID NO: 223241 - protein, 359 aa, unidentified
MTATMTYVGLDVHARSTHAAVIDVASGELRRARFGGGSDEVIGWLQALPQPLKGCYEAGPTGFALYRAAEAAGLQLDVVAPSKTPRAPGDRIKSDRKDAELLARLLLAGQLKPVAVPPPPFEAARHLARAREQVRGDLMRARHRVSKLLLLHGRVYEGSGWTKTHRRWLAQQRFDQAATELAYLDALAAIDGLIARKTALDERLSRLAFEGDWSETVARLRCFRGIDTLTAFVLCLEIGDFARFPRPAKLAGWLGLVPSLDQSGESRRQGAITKTGSGYARRLLVEAAWHYLPQPSVGPALAERRAGQPDHVLQIALRAQRRLHRLYGRLRARGKPGNVTTVAVARELACFLWAAAVAE

SEQ ID NO: 223242 - protein, 356 aa, unidentified
MSRDIKYIGMDVHKEAIVIAVRNTRGHVVMESIVETKANSILQFIHGLQGELHVTWEEGTWAAWLYDLLKPHVHQVLVCDPRRNALLKEGSKNDKVDARKLADLLRTGMLRPVYHGEHGLRTLRELARTYQTLSQDLNRVMNRLKALYRGWGIACGGTQVYAPRYREEWLGKIEPVGVRRRAELLYQQLDGLQALRRTLRPELLAESRKHKAAKLLRQIPCIGPIRAARLLALMQTPHRFRSKRQLWTYSGLGIETRDSAQYRFVRGELQRAKKPQQIRGLNRNHNHEMKDIFKGAATRASCGVGPLRNFYVALLDKGMKPEMATLTLARKIAAIALTLWKKEERFDAEQLKMQAA

SEQ ID NO: 223243 - protein, 358 aa, unidentified
MRSTAATGLVVGVDTHRDTHRDTHTAALCDLAGQALAVRQFIAGPGGYAAALAWARQEAGEAGLAWAIEGTRHYGLGLARYLTAAGEHAGEIDASKHAGKRRNGKSDALDAVRAAREMLARPAAAQMRADGDREALRLLMCDRDNAVASAKTARTLLTSVIVTAPAAVREQLRNIPRDRRATVCASLTSPPGADRQTRVLYQTLARLGQRITTLARTAADLQKQISALVEDMTPGLVAAEAGLGALTAAQLLLSYSHHGRIRSEAAFGMLPGTAPVPVSSGRTDRHRLNRLGDRQLNRALQVIAVARMRSHPPTQAYVQRRLTEGKTLREIRRCIKRYLARHFYRALRNQPGLELDRT

SEQ ID NO: 223244 - protein, 412 aa, unidentified
MSLLQMALEPSTLVVAVDPGKVMNRVWVSDGSGWLAEPVSMPVSRVGIETVERMVTIHGVNRGETVIAIEATGSLHRAWASELERRHPGAVRLFAPSETKAARTQLGSGRFKTDDRDCAALTYLARQGAGRRWADELGVETLRAVVRHRHGLVQDRKVLQQRLHDQLNTLAPGLSAPAGHGRSLALEHPGGQAVLACAAAFAGRAPTVRSLQARAPGRFSRADAQYWADRWRGCLPPPHDAEQRAQRLGRDLARYLALQDDIGALEADLQHLLGGTDGQVLTTLPGVAVIRAASFAAHSLPINRFPDAEHLYSATGLAPALYESATVRRRGRISRQGLAEHRDALMGIAWGLSRYSPSFAERDHEYRARGMAPIQARVALARHACRLAYRLLSTQDSFDEERYRRGRHSRGR

SEQ ID NO: 223245 - protein, 389 aa, unidentified
MQCFDANKSLIVLDQDSTLVAVIEMSLSGWLVAGVVPGLKRQPKKKLDPDPDALLALLQRWRNEAMKAGRQVERMTVAYEAGRDGFWLARWLNGRGIEAYVIHPSSIPVPREHRRAKTDRLDTELLMRAFLGWLRGEVKHCTMAAIPTLEEEDAKRPNREHQMLTGERTRLINRLKSALIRLGIRNFKPTLGKAAERLAELRTPEDVPLPENTLAELKRDMARLSLVKDQIKAIERDRLVRIAKAANHGPNVMVQLIAQVIGIGLETADMLVQEILSRNLRDRRAVARYGGLTGSPDESGSRRREKGLPRSGNSRVRRGMIEFAWRFLQFQSDSPLAEWYRNQTQSGRKDVRKRTIVALARKLLIALWRLATQGVMPEGIALRKASAIH

SEQ ID NO: 223246 - protein, 354 aa, unidentified
MNYVGVDIHKRYSVLVAVDERGRELARGRISGNSVHAFAQFFEALQGPGKVVLEACWNWGRIYDVLSEIEQVEEVVLAHPLKTRLIAEAQIKTDSLDALALATLLRGNLIARAHVPSKATRARKELLRQRLYWARLRTRVRNRVHAVLDRQRELEMPQCSDLFGRKGLNALSKLRLAEPDATLLSEELDLLKLIDSQIKAQEGRIVAFNANEQATQYLQSLPGMGKILAAVAAAEIDAIERFDGAAKLCAYAGLVPTTYGSGGKVHQGHLLKSRNQWLQWAFIEAAWVAVGCSSYFGGIYRYQRARGKKANIAITIVARRMCRIAFTLLKERRNFQEQHRTFPGRSAVRLTAAA

SEQ ID NO: 223247 - protein, 402 aa, unidentified
MNAVGIDVSKGKSMVAIMRPFGEIVSAPFEIKHTAGDIHSLVELINSVEGESRIVMEHTGRYYEVLAHQLSKANLFVSAINPKLIKDFDNDSLRKVKSDKADAVKIARYALDKWQNLKQYNVMDELRNQLKTMNRQFGFYMKHKTAMKNNLIGILDQTYPGVNTYFDSPARSDGSQKWVDFASTYWHVDCVRKMSLNAFIDHYQNWCKRKKYNFSQSKAEEIYGKAKELVPVLPKDAITKLIIKQAVYQLNSASTTVESLRTLMNETASKLPEYPIVMAMKGVGASLGPQLMAEIGDVSRFTHKGVITAFAGVDPGVNESGSYEQKSVPTSKRGSSDLRKTLFQVMDVLIKTHPQDDPVYQFLDKKRAQGKPYYVYMTAGANKFLRIYYGRVKEYLSSLPES

SEQ ID NO: 223248 - protein, 320 aa, unidentified
MMTQDEIVVVGIDVAKDKVDACIRRFKLRQTFPNTLQGRRKLTVWLRKYQVGKAVMEASGGYEREWRNVLHSAGIEVRIVDPRRVRNFALSAGRLAKNDPIDAEMIAWFAETFSQAPGQVPDAAREELAALAKARKALVDVKIRLQAQNEHAAPEPARKALARILKSLAVEIDKLEAAIFAKVKATPEFAERAEIIQSVPGLAQTTSAILIAGMPELGQVSDEVAAALIGLAPYDDDSGKQRGERHIKGGRRWVRNAIYMPCLGAATQNNPVLKAFYQRLIAKGKEPKVALVACMRKLIIILNTMLARRQKWYPGCHAVA

SEQ ID NO: 223249 - protein, 433 aa, unidentified
MNASTSTPTTNFAAFIGIDWADKEHEIWLQPTDGSPARRSTLSQNPVAIQEWVSQLRQQFGGQLLALSIELSHGPLLAALLGVEFLVIYPINPKSLARYRQAFRPSGAKDDRSDAELLCEFLRHHYAQLKPWQPEDAQTRLLGGLTQVRRHWVDEVTGAVERVRANLKHYYPVILELFTEGLAQPMVVHFLQRWPNLKSLQAASQSELRKFFYGHNSRSAQLLDARLQLILKAKALTEDPAVLGIYQTDTLVIAELLGVLLKKIKEIQKQIAKLFAAHSDAFIFQSLPGAAQVLGPRLLTACGTQRERFAEAVALAQLSGIAPITVQSGQSEYQMFRFTAPQFMHQTFWEFAKCSIKYCLWAKAFVDQKIHNGMGFNAAVRALAFKWIRIIWRLWQNREAYDETKYLAGLRRAKPACVEPLITSVSSLDSALL

SEQ ID NO: 223250 - protein, 377 aa, unidentified
MATTRTVLRDQLTAKPGDLYMSLELGDKHWHISIGGERRSVSHYIVEAGHTEEVADCIAKAAARLHTARVHSCYEAGRDGWWLHRWLTELGVDNIVVDPASIEVNRRARRAKTDRLDADKLLAMLVRHHRGERVWSVLREPSPSDEDARRAHRELQRLTHERIAHTNRISSLLVLHNLRPRIVIGGRDWPVWWNAHREQVPPTLRAELEREAVRLKVVKEQVRAIEAARARELAEGKQPLVAQLVRLRAIGAKGAWVLVKEVFGWRHFANRRELAGSLGLVPTPYASGDSEIEQGISKAGNRRVRALLVELAWSWSRLQPGSALTQWFNRRFAGAGKRMRRVGIVALARRLAIALWRYLQTGEIPIGARLKPAGSGI

SEQ ID NO: 223251 - protein, 338 aa, unidentified
MMQFKFFVGIDVSKDTLDFSVVREGKEISAFKIENSLRAIKTTLLNLKKIKGYELSQVVFCLEYTGLYNNHITHCLHSVGAHIWVEKAIQIKRSSGLQRGKSDKVDAQRIAFYAFRNQDKARLWVAPRAVIQQLKKLTGVRERLLIMVAQLNKPIQESKRFDTKEVFDVIKKSCQSSLKAIKTDLKKVEKKITEVIKADASLNHLFELITSVDGIGSVIACEMILTTNEFKNINDPKKYACYAGVVPFEHTSGSSVRGRNRVSHFANKNTKRLLHMASLSIIRYQGELKTYWLRKLQEGKHKMIILNAIRNKLIQRVFAVIKRGTKYEKNYSHSLQGS

SEQ ID NO: 223252 - protein, 400 aa, unidentified
MKGPIVSIDVSNGNSHFQCFTQRGTKMGKVHRISHTVEGFNFLKSKIEELEKKTNEEVVAVYEATGVYTKPLERFLEKNEIKQYSISPLQSAKQRKTEIHNKKTDKKDPESIAEVYYIKELREDEKEADLYHELRTANRVYEDCLVHLRKYKVTFQSHLSIVFPGYMKLFQDGYSQISLQLLEMYPHPDRLKNKQPEKVAKKLNKHTDHSFEVCLKTAEKAIEFANKTYPGCDKEDAWVAVLVDDIHHLQDTMEEAEAKLDKIIELAKATPYYSIILSIDGIGPNLASRIIAEFGDISKFKTRGAMVAYVGNDPNRAESGDIEGYHLSISKKGNKRLRCILYLAVTCSIRSRKENPINAFYQKKRQQSTPLKSKAAKVACITKLIRTIHGMCKTGTVFTS

SEQ ID NO: 223253 - protein, 355 aa, unidentified
MKRGHFIGMDTHCQFCELAVVNHSGAVVRRERCATCIPDVLKLIEQVPRPRSLVIEEGPLASWLWRNLHEAVDQLVVSEPRRNRLIAKDGDKDDDLDAEKLAQLLRGGYVKAVHQVQTLERALLKQYVSLYYHRVRQRVREALRISSLFRQHGVMIRERAFVAEADRAALLARLPEVCRFQEAVAQCWTAYDALVEQEEQWRKQLLAMARQEEVVQRFQAVPGYGWLRAVTFYAYVDTPWRFRSKAALWKYLGVGLQRRHSGNGPEHLGVPVFMHRPLKNVVLGAALSAVVSGNNPFADLYRRYGEQGLSSKLARRNVARAQVATLWGLWKNGSAYRPEWVGVAAAAAAAVPVSG

SEQ ID NO: 223254 - protein, 404 aa, unidentified
MGAISGIDWASEWHDVRIADAETGEPIVQRRFAHDEAGVCALVGVLREHGVERVAIERPDGLLVGRLLGAGLAVVAIHPNQVKAARDRFRAAAGKSDEFDSFVLCELARTDAHRFAALAPSGDETLALRALVRTREDLVAARVGLANQLRAQLDAFWPGATQIFADVDSPIALAFLERYPAPTDARGLGPKRLQAFLARHAYSGRRPADELLERLRSAPTAVCGEFETDARRAAVLGLVAALRPIVAQISELTSQIRGAIRTHPDGPIFLSAFRDPKSVVTAAGLLCEIGDNRARYPHRDALAADAGQAPVAIESGKRKTAAFRWACDKRLRNHVAVLADTSRHHHPWARDIYQRARARGCDHPHACRILGRAWTRILWRCWQDHTPYDPTKHRNPNRPLNTRG

SEQ ID NO: 223255 - protein, 308 aa, unidentified
MELFEGIDVAKDTLVVALSSGQEWACANDAVGITLLVERLTAARPALVVLEATGGYEVELLAALLAAGLEARRVNPREVHHFARATGQLAKTDRIDARMLARFAERIRPPARVLPDPEREHLKALVGRRGQLLQMITAEHNRRARVPRWLAKSLERTIRALERELKVIDREIAERLSTSITLKPPCDLITSLPGAGPVLGATLIARVPELGRLSRRQIAALIGVAPFTRQSGQWRGRDVIFGGRASVRATLYMAARATLDPSVTHQSDSAASVRLSVQQLFDATAPFRALDVHQIGACQCRKSNRRPF

SEQ ID NO: 223256 - protein, 334 aa, unidentified
MNFKNFIGIDVSKGTFDLALIRESIANAIVSGEFCNDLKGLVRLEEFLKKLDLQMDETLFCMEHTGIYCRLLSQYLTEQKYNVWLEMPVQIIRSLGLQRGKNDQIDAKRIAEYACLKKDKAVLWMPPREVVIQINDLLTLRDRLVESQKSLRQPIKELKDVGFIDAAKLIEKSCSKTLAAIGIEITQIEKDLDKLINNDNNLKKLYKLATSVPGIGKITAWTMLYFTNEFKLYNNAKQLACYCGVAPFEHTSGTSVRGKTRVSSYANKRLKKLLHLVAMSTIHTDNELSTYYNRKVAEGKNKMVVINAVRNKILHRLCAVINRETPYERNFQIA

SEQ ID NO: 223257 - protein, 344 aa, unidentified
MYVGLDVHKDFCQAAFLDQDGKLVREERFENTDSGLLELAQATQQQQVVMESSSSSMHVYDSLVETCKVKVAHPSKVKAIASARIKTDKIDARILAQLLRADMIPESYVPPKAYRQARLLVRYRASLVSARTRIKNQIRSLLTKEGIKNPFKTNAAFGKKGLLFLRNVDLEEMQRISMDSLLSLLESFNKQIADFDKRIINMASQDSYAKLLVTMKGIGHLTALAVASEICDINRFSSYKKLCSYFGLVPSVYQSSTTERRGHITKQGNALLRSMLIQDARVAVRYSEYFKRKYEKLLAKGVKEKKAIVAIARRMVVIMYIMLVRNEQYVEERKGEKPVGSLGH

SEQ ID NO: 223258 - protein, 336 aa, unidentified
MNYCGIDLASKASALCIMDAQGEIIEEYEIPTDEDGIRARMGKTPTLRCVIEASPLAEWMARQVERYGHEARIIDPRRAKAVLCTKKKTDRINARDLAQMGRTGWYTEVHRKSEPARLLRTYLGAHAGLKETAKAQNARVRGLLRAHGIKVGKVSEKEFAPRIRELVKVRAPRLTVIVEPLLRVWRQAVDEAQAMQKTIAAMAKAEPLCQLLMSAPGVGPLTASAYVATIDDPHRFRRSEQVGAYVGIVPRIYQSGDTAYLGRITKEGDRLLRWLLVEAAHCLLTHTKKDCTLKRWGLQLQARKGAGKAKVAVARKLAVILHRMWITGEKFDWQRA

SEQ ID NO: 223259 - protein, 451 aa, unidentified
MKESISMKIVNPHAAGIDVGSRSHFVAVGQDKGDVREFGVYNDDLQSIVLWLRENEVSTVAMESTGTYWQALYAVLQESGFQVILCNGKFTKNIKGRKTDVQDCQWIQKLHTIGLLSGSFLPDEATEQLRTYCRHRANLIDQAADTTRKMQKYLRLLNLRLDVVVNDITGLTGLNIIDSVCKGEKNPQKLASLRNGNCKKSEEEIAKALQSNGRKDYLFGLNQEYQLYRYIQEQLKACDREIEFMLNEQINSNDSKREHYIDRKSYKRVNKNTPKNIDLNLMSYQYFEGVDLLAIEGISHSTVLSLMSEVGLEGLKKFSSAKHFASWLRLSPDNRISGGKVLSSRIPKGSNRLKTALRNAANVIGNLKNTPLSNFFRRISFRKGRSSAVSATVRKLAVIIWNMIVNNQPYRNDHGYEFLDQKRNRKVLEAKKLIQKFNISMNELALCVNTI

SEQ ID NO: 223260 - protein, 355 aa, unidentified
MAADEIAVIGGIDTHTDVHQAAVIDTVGRHLATEAFPTTPDGYQQLLDWLRPHGELLAVGLEGTGAYGAEIARFLTANGITVVEVDHPDRKVRRDNGKSDPVDAYAAATAVLSGRASGTPKTRNGIVEAIRTLRVARSSAVKARTQTINQIRNLIVTAPAVVREKLRALTTSELIGTLARSRPVGDLSDPEHAARVTLRRLARRYQRLCEEIADADADLGPLVTRAAPRLVALPGVGPETAGQLLTTAGDNPDRLRSEASFAHLCAASPIPASSGRTHRHRLNRGGDRQANRALHTIVLVRMRYDQRTRDYVARRTTEGMTKKDIVRCLKRFVAREVYRHLPRPQITTEQLAQAA

SEQ ID NO: 223261 - protein, 372 aa, unidentified
MDRVCGLDLHKDSVFMCILTEKGEKIEEVFGTLTPDLDRLRDTLASHNVGKVAMESTSIYWIPLWRILECDFDVKLVNPYFIRQLPGRKTDVKDAHWIATVLQKELIKDSYVPEARIQQLRQYNRRMFNLNRSKQRAEVAIDLILQRCNIRLSNYVSDIGSKSMRKVVKALMEGETDAEKLLLLVHKRIRNKHSDQTIKDSLTGIISVTDIDMIRMSMQEVELFERQLQECEDKMTAICEEHFAPEIEILQTAPGIKQRSAMSIIAEIGVDMKTFITAAALVGWAGLRPRNDQSAGKIKGRKTLHGNKYLRIILTQCAWGASRTQSERFYVRYNRLKKRMNHNKALIANARKLLVIIWNMLAKKQAYTPLVA

SEQ ID NO: 223262 - protein, 346 aa, unidentified
MHSTTIAVDLAKSVFEVAVSQQAGRVAERHRFSRGQFSRFLAEREPATVIMEACGTAHFWGREARARGHQVVLLPPHAVRPYVTRNKTDGADAKGLLEAQRNEAIRPVPVKTLEQQALGGLHRLRSCWMATRTARLNTLRGLLRELGFVIPLGARQVVPRVWALVSDADSGLPEALRPVLSEAAREIRELEARICGVEQQLEGLARESSVVTRLRTIPGVGLLTATALVAFVGDVARFPSGRHLASYLGLTPRETSSGLQRRLGRISKRGDPYLRMLLIHGARSVLCHAKRTQREHDGLRRWALERVRARGHNKAAVALANKLARIAWAVCRSERAYGVPIQEVHD

SEQ ID NO: 223263 - protein, 333 aa, unidentified
MRTIGIDVSKEHLDLALLDQQEGLLEEAHVENKAGTLTKLMRTWLKTGRCTADVLICLEPTGSYSFGAIKTLLALGLKVWLAHPMDIKQSIGMKRGKTDRVDARRIAEYALRFKDKAMLLDERFVRLQELKDLLAIRQQFIEERAKYRLQRGDRMKAMEGSARACFARCSERMVTELDRSLKRVEKSIEAFLNADPQLRAKRELAMTVTGVGPLLSSVLLVVTQGFTRFNNPRQLLAYAGLAPYPFSSGSSIRGRTGVSEKANKRLKSLLHMAALNAIRTPGDLQDYYQRKRAEGKAAMSVLNAVRAKIVHHLWAVMGSGRPYTPFKTNLQMP

SEQ ID NO: 223264 - protein, 389 aa, unidentified
MLLDHPSDGPTAIRTHIGAIFVSLELSRSTWLVTSLSPGKGEKMSKHSVAAGDMAELLTLFAELRRKAEVRTGQSYPIITIQEAGLDGFWLHRVLQQNGIESHVVDPASIATPRRRRRAKTDRLDGEMLLRALLAYKRGEPRVCAMVVAPSPEEEDRRRICRERATLIAERIVHVNRIKGLLFAQGISDYGPLRRDRRARLDALRTGDGRELPSHLKAQIGRELDRIELLLKQIKSVEAAQEALLAAARKPASEKAVPDPVTTLLALKGMGANFAAVLWSEAFYRSFSNRRQVAAYAGLAATPWQSGGIRHEQGVSKAGNPRLRTTMIQLSWLWIRHQPQSALTRWFKERSPQGRKRAIVALARKLLVALWKYVTQGVVIEGAVMKPAA

SEQ ID NO: 223265 - protein, 339 aa, unidentified
MSDVVFDHYIAVDWSVKNMAIARMTKKSNKITAIDVPSDISELQVYLKNLEGSKILTIEETTTSQWLYTELKDYANKIIICDPTRNRLLDDGPKTDKIDATKLVQLLRAGLMKEVYHSADKFIYLRRIVSAYEDLVKAGVRLKNQRYSLLRVCGLKGNEEEDVKLGSSGEQYVLECLDRQIEAYEEEKKGYEREFKKLARKYPEIRYQISLPGIGAINAVKVVSRVVTPYRFADKGHYLSYCGLIKLDKVSGGRNYGKKNPRYCRQLKSVYKTGALAAIGGNNPINDYYEYLIKEKSYPAYNARHKAARRLAILSLGVFKSGRKYQPYDSRYRINKENN

SEQ ID NO: 223266 - protein, 320 aa, unidentified
MSESSVVVGIDIAKAHVDVAVLATPTLAERFANDDEGHRALIERLEPLNVQLVVMEATGGYEAPLACALQAAGLAVAVINPRQGRDFLKAMGRLAKTDRIDAAGLAEFGRVLLTRDDLSSYLKPLASEEQQDLAALVDRRRQLVTMLGMERQRLSRSRRVARPSIKAVIRTLERQLDRADHDMGQHVKTYFAQFDQLLRSTKGIGPVASATLIADLPELGRLNRRQIAALVGVAPMARDSGTTSRRRRIQGGRAKVRRTLYMATLVASQHNPVIRAHYERLVAAGKLKKIALVACMRKLLTILNAMARTHTPFNPEHHHA

SEQ ID NO: 223267 - protein, 343 aa, unidentified
MKLSRVGIDLAKNVYQLHGVDRSGKTVWKRRLKRHQWFKVLLDTVGPECEIGMEACAGAHHWGRQLQSRGYTVKLIPPQFVKPYVKSNKSDAKDAEAICEAMSRPNMRFVTVKRVEQQDVQATHRIRAELMTQRTAKANQIRGLVAEYGLVAPKHLSSLRAAIPCWLEDAENGLTGDFRTLLQGVWADLLLLDDRVCEMDQTIKRLADNNEDCVRLQQLRGVGPMTSTAMIATVGDARQYQKSRQMAAAIGITPKQHSSGDRDRLLGISKRGDVYLRTLMIHGARAVVARAKHRDDRLSRWVTNIANKKHPNVAAVALANKTARMAWAMLRHETDYDPDFAIR

SEQ ID NO: 223268 - protein, 442 aa, unidentified
MRLLNANANEHPLRIKLSAHIRTGTIMELQRNKVCGIDVHKRFLIATILSRDGKKDTQRFSVTLEDLLKFRDWVIENGCEQVAIESTGIYWHPVHSVLEGKIDLIVANSYKIKHTPGRKTDVNDSEWIAELCLNGMIEPSRIFPKDDRELRRLTRAREGYVKQMTQEKNKIHQSLDSACIKLASVISDIFGKSGMYLLNCVLEGRDIDEIIDGIPSGRLKKKADQIKESIKSRLEISQVILIRGSLSLMRSIQERIDELDGEISARIQYRKNDLAIAMSIPGTGFVSATAILAEIGNYIDFKKPEQLAAWCGLVPSLYQSAEKTILGGITKQGSKHIRRMLIQVAYAISRTKDSKLKKFFLRIQAKKGSKVAAVALARKVLCILHHLLMNQEMYLEDRDKKNMRQKPLKQPSPIEMSIQEMIDCIVRAGYVVTKSDSIGGFG

SEQ ID NO: 223269 - protein, 406 aa, unidentified
MNQNTCITIDVSQNKSHIQGFIGPNKPLSKARTMRNTKQGFQFILILKNLIESKTNETPLIVFEFTGIYHKPLEKFLISQNLKYHIVAPLKAAKARNSEIREQKTDARDCLSLSKLFYSNNLGIFYSENETYSNLRKLNGYYDTCMKHLIKIKVNFRETLAVIYPNYKKLFSSIYSDDSLTFLKEFPHPSLYTSKLEDRIIEILKNKWDHLESWTSSKVKILTPLINEVVSGCNVTEPDIIMLLSYISQIEYYLNQIEITVSQMNELAKKVPLYNLVHSLPGIQDILTCKFIAEVGDISRFSNYKQIVAYAGIDPMIRQSGDKDGLHLKMSKKGNKRLRTILHLMVSSLIKANREPNAIKDKYQKKTHQLNPLKPKVASMACANQLVRIIFYMHKTSSTYTYHECK

SEQ ID NO: 223270 - protein, 319 aa, unidentified
MAQNDRVVVGIDVAKDKVDACIRALSQRQTFPSTAEGRRALIRWLRKHKVGKAVMEASGGYERDWAKALREARIEVRIVDPKRVRSFAQSAGRLAKNDAIDAEMIAWFAETFDEARGQAYDAAREELVQIVNARQALLEQQTQMQNRCEHTVPIPVRKMHERLLKAIALEVTKLEAVIAALTKASPHFAETAEIIESVPGLGKITSAGLIAAMPELGQVSNEAISALLGVAPYDDDSGKRQGERQIKGGRRKVRNLFYMACMGAATQHNPVLKTFYRRLIAKGKKPKVALVACMRKLIVILNIMIARREKWDASRYAVS

SEQ ID NO: 223271 - protein, 400 aa, unidentified
MASKGNVVVCVRCCDRPGKVSEEVRTFSTMTADLLALADWLAERGVTHAAMESTGVYWKRVFNILGDRFAVILVNAEHIKQVPGRKTDVKDCQWIAQLLQHGLLKASFVPPEPIRELRDLTRQRTQLIQERTAAANRIQKVLEDANVKLAGVATDVLGASGRDMLEALIAGETDPAKLADLARKRLREKIPALRLALQGRVTAPHRFLLRMHLDHITHLEELIGRLGARIEEALVPFAEAEEWLQTIPGISQRVAETVVAEIGTRMEQFPSADHLASWAGMCSGNNESAGKRRSGRTTKGNRWLKRILVQAAWAASHTKGTYLAAQYRRLAKRRGCKRALVAVGHTLLVIIYHVLKRGTPYTELGADFLERLEPARLTRQLVKRLEALGHKVTLEPCPAV

SEQ ID NO: 223272 - protein, 340 aa, unidentified
MGWALEEVVENQVFVGIDVSKERLDAALRPRDESFKVANNPRGIATLIKRLKKWRVSRIVLEASGGYEIAAAYDLAAAGLPVAVVNPRQVRDFARATGRLAKTDAIDARVLAHFAEIIQPQTRPLPDMQTRELMALVARRRQVVDMLTAETNRHGRAVDAVNRAIAAHVRWLRKQLADLDAALERAIRNSPLWSEKARLLRSVAAVGSVTVITLLSHLPELGTLNRRQIAALVGVAPFNHDSGKLRGTCAIWGGRAQVRAVLYMCTLGRNPQLQAFYARLIAAGKKPKVALTACIRKLLIMLNAVLRQRIPWNPELATLPSPFSAARGGAVIGAGSIATT

SEQ ID NO: 223273 - protein, 356 aa, unidentified
MLYLGIDQHARQITVSLRDDNGDVLQARQVSTQPEKINTYFQRLTRQRLRNGECFVAVLEVCGFNDWLIRMLRDYRCHKVILIQPDDRKKRKTDRRDAAALSELLWVNRNRLLQGKPVRGLRQVDIASTSDQENRRLTTLRKDAGVDLARVINKIKQILRRHNMQWEMPTKTFPTVAAIAWLKQLVLPEIDRLEMNHLLTAVGHVQQRMKELEQVIAQRSDACKETTILSTLPGMGSRFTALSLLCRIGRVERFPRACSLANYWGLTPGCRNSGENNQRLGRITKAGSTTARWLLAQLVYKVLRKDARLREWFKRIKRRRGSSIARVAVMRKLATIIWHMLSKRKTYAECRELAAA

SEQ ID NO: 223274 - protein, 345 aa, unidentified
MPIVGGLDIHRRQLTFDFLDTVTGEARRGQIVPADRAHLRAWLARFAGRDDVEFAVEGCTGWRYVAEELAAAGIAAHVGEPADTAFARGRKRHAKTDKTDARHLRTLLAEGRLPECWIPPAQILEYRALLELYHDLRAEHTAWVQRIHAVFFHQGAPRLGEGTLRTEQGLAGLRAAAAAHLSPAGQLQVATALDMIAAVEARLGPLRHQLLDAARHLTGARVLAARLYGAGPVTALALTCWLAGEGRFSSARKAVRFAGLDITVWSSDRKGPPGRLSRQGPPVLRWAAYEAGKTHGRAAAPDHGYYAAVRDRKNGKRAALSEARKIIRQASHILTELGDDALTAA

SEQ ID NO: 223275 - protein, 429 aa, unidentified
MNSCEQTAQDWLAHRAFGGLDWASEKHNVIVVDPRGKVVEDFEIAHSALGWKKFRERMAPYGAIPFAIETSQGAAVEQLLEAGMKVYPINSKSAKSYRERKAPSGVKDDWLDAWSFADACRIDGQDWRALRPEDPLVKELRLLCRDEVELIQQRTSFICQLRHALGEYYLTALEAFEDWGSMSAWMFVQRFPTPQLLEAAGKRQWEKFLHARHLWRTESGPRRMELFAHATELCGTVPMANAKSQLALSLISMLFALEKQLGIYRRRIEEIFSRHPDHDLFGSLPGAGPKLAPRLLSEIGDDRGRFEEGPQALQCLAGSAPVTRRTGKCKVRANPDHWPCHQRWACDRHLRHAMHLFSEHSLGQCVWAQIYYQHHRQKGSSHADALRRLAQRWLKIIYRMWMDRKPYDAMLHHQNQLKHGSWVFELKTA

SEQ ID NO: 223276 - protein, 331 aa, unidentified
MSPRRHGKPTAEAILANPVSFITLGIDVSKDELVCCNYAEIDQIDRVPNTLAAIRTWLSTFQGPLRIAIEPTSTYHVEVVEVAIERGFVVYLINPRQLVHYREAVNEVNKTDPVDAYLLARYLDREVDQLRPFQPQDRRAQQLWALLKRRATVVDARKRLQQSLAGIGLPHKALLGQIDVVLKRIDLRMQQLLHELGWWADYLHCKSIPGVGPLNATALIAAYHRGTFSSVDAFIAFIGFDIRLRESGRFKGKSKLTKRGEAELRRLLYCAAAPSRSYLPFKLFHQRQLDKGMPKIAANVVLARKIARIAFALIRKHQDFIKLTNEVAIQA

SEQ ID NO: 223277 - protein, 394 aa, unidentified
MFFIGIDVAKRSHQAAVTDISGNVIVKPFNFKNSSDGFTKFLSVVESNAIEKNDCTIGLESTGHYWYPLYFFLIENGFDVKVFNPIQTAAFREITIRKVKNDNLDSLLIADFTRFGRYSETYIPDENMLALKNLTRFRLSISDICGSLKKKVIAILDQVFPEYTGVFSDVFGKTSKQLLEQFSTPDEFMDISTTKLTNLLLKVSRGRNGREKAELIKTAAQSSIGISYALDAFSFELKQLLAQIEFMENQLSDVDAEMEKLLSQSEYGVITTISGIGPMFGSVIVSEIGDINRFETPSKLVAYAGLDASVKQSGEFNSSKNKISKRGSPYLRRALWMAAFMSLQCDPALYDYYSKLRARGKTHRCATTAVARKLCIIVWAIMKSKKPYSPVLKN

SEQ ID NO: 223278 - protein, 377 aa, unidentified
MKRVKFVGLDVHAETIAVAVAEPDGEVRSLGVIPNREDSVRKLARKLGAVEELRFCYEAGPTGYVLYWQLARMGAKCEVVAPTLVPVKSGDRVKTDRRDALKLARNYRAGELTAVWVPDAAHEALRDVVRAREAAKKDQLRARHRLSKFLLRHGRRPPMGVKPWTMKYLEWVKREVHFEQLAQEATLLDYLNEVEHAAARIARLDDAIEEAVKVAPPKMRAVIEALQALRGVAHVAAVTVVAELGELSRFGRATQLMGYGGIVASENSSGERTRRGNITKAGNAHLRRVVVEAAWAYRHRPAVGATLRKRQEQVSEEVKEIAWKAQQRLHGRYRKLLAKGKNKGVVVTAVGRELLGFIWAIGTKVEAAQKESLQRAA

SEQ ID NO: 223279 - protein, 341 aa, unidentified
MEPMYYIGLDVHKRKISYCVKDSSGKIYAEGSLPATRMDLDLWMKTLPCPWSGAMEATMFTGWIYDHLKPHAAALKVAHPLMLRAIAAAKKKNDRIDASKICDCLRCDFLPECYMAPTAIRERRRTLRYRNLLVRQMVQMKIKISSLLMEAGVSYNKQRLHKAGYFRELLASNPDIDEGLGALLRLCRETVVRLEKTESAMVRSLERDSLLIDRVERLMTIPAVGPITALTWALEVGDVQRFSSIKKAISYCGLCGAERSSGSTVQRTPLSKQRNKHLQTTLIEAAKMAPRNSPELAMLYDKEKQKGNANRATLAVARKLVAYLVAKTEHRVSQIEQTAMC

SEQ ID NO: 223280 - protein, 412 aa, unidentified
MLFAGDDWAEDHHDVEIQDETGRKLAARRLPEGAAGIAALHELIAGHLGQNGDPGQVVVAIETDRGLWVQALVAAGYQVYGLNPKQVARFKERYNLSGAKSDAADAHALADMVRTERHQLRAVAADTPEAEAIKVVARAHQTLVWERTRHTLRLRSALLEFFPALVAYAGLGLTGADTLELLVKAPDPASAARLSAAQITAALKRARRRDVAVKAEAIKAALRVRHLIQPAAITAAYAAAIRATASVLITLNEQISELEGQVEAHFRQHPDAAIYLSQPGIGTINGARVLAEFGDADGRYASARARKNYAGSSPITRASGRSKIVLARFARNDRLADALQSQALSALTGSPGARAYYDKQRERGLGHNAALRQVSNRLVGILHGCLKTCTLYDEATAWPDHHATQHASRLAA

SEQ ID NO: 223281 - protein, 442 aa, unidentified
MNSNCEVVGRSAFQGLNPAIFFYSRQQGGEKLIKTLFVGIDVSKKSLVAYALDDNGDDVFGPLNVTNNRPGAIKIADTVIEHTASLKFNCVKIGMEATNVYWENCYRFMQQYDKLSSPDFTLEIITINPKVVKNFKEVYNNLNKSDSVDAWVIADRLRFGRIKKSSSPQVLYKPIKQLTRFRFKTAENLKREKSRALNLIFIKFSDYDKTPIGNLADSSMALLEHFSLEEIINKDLNEIASFLIENSKNSLGDQHTVEKISKAVKKAANDSYRLKPKMNQAISQTLSMTFDNIRFLTKQIKKANKVIARELKAIPQTLTTIPGIGPVFASGILAEIVDINRFENQANLASYAGLTWRQKQSGSFKAEETPLSKKGNKYLRYYLVGSANSLRVHNDEYRRYYLKKHRESNSHHHKRALVLTARKFVRLVFALLSKGEIYQPRG

SEQ ID NO: 223282 - protein, 407 aa, unidentified
MHVFLGIDWSHTHHDACWLDERGHVLSRLTVPHTVEGLTQLDGAREQLGVTRAECGVGLETAHTLLIDFLWDQGYPHVFVIPPGAIKGARRRYRQTNAHTDQSDAWVIADVLRTDPATLHPWRPDGLIVRQLRAKVSLLHFLTKEARRLSNRLGAVLARYYPAALHVFHDFASPVSLLFLQAFPTPQAAASLTRQAFGQFARAQRYRQPDAVLSAAYARLQAAYPVASATTVAAYHEEAAWLAHHLLATIEHKKREIVQLQALFQQHPDQELFASLPGTGDFLAPALLAKFGDDRDRFPDPKSVQCLAGTCPVTEQSGKGRRVRFRQACDHEFRQIAQQWARASISQSSWAATYWHDVRQHSRSASHAYRCLANRWLAIAWKCWHGRQPYDEAVHLQNRARRLATRA

SEQ ID NO: 223283 - protein, 430 aa, unidentified
MEIVYPRSCGVDVHKSFIVAVICISESVKPKYIKKRFSTFNNQLIQFRDWLIENNCQNVCMESTGKYYIPVYNALEGHISNVVVANPKWVKAIKGEKDDNKDAKWIADLFKFGIVRSSYIPEKDIRILREFTRYQYKLVNMRSSEKNRFQNALTTGNCKLDIVFSDIFGKSASAIVDTILSNNPYTSEDILSKVHARCKASHEDILSAVDGIQLTQFQKARIRIVQKHMEYLDSLLDEIQHHIDLMVANYEEYIQILCTIPGINRKSAITIISEIGTDMSQWSSHRKLAAWAGLAPGCNESAGKKKSVKISKAGVYLKPCLVQVAHAAVKDKNCDYYATKFKKISKRRGKKRAIIAIARKILIAVYHLLKTGEVFNPTDMADVETTKKQRIEYVKNNLRNAFNQLSRTGLSEAEILQLIRKEPTNSPQIE

SEQ ID NO: 223284 - protein, 386 aa, unidentified
MFYIGIDIAKHNHEVSIIDDNGKALGKSFSISNSQKGVDKFNTYLDSFNITSENCVIGMESTGHYWINLFSFLVNLKFNVFVINPIQSDAFRKMYIRKTKNDSKDSYIIAQIMRFGEYSSSNISDENIFALRQLSRYRTSLVDECSSWKRKIISILDQVFPEYSNLFSDTFGVTSKELLSKYPLPENMLELSTEELTNLLNKASKGRLGNEKAQEIKESAKNSFGVSFAKQTFSFQIKQIINQISFIESQLKELDNEISNMLKELNSEITTITGIGDVLGACILSEIGDISRFEKASQRLDVAVKQSGEFTGTEMKITKRGSPYLRRAIWLAATVASFKDPALSIYYKSLIARGKKHLTAIGAVSRKMCNIIFSVLKNKKVYTPNI

SEQ ID NO: 223285 - protein, 347 aa, unidentified
MDHIGIDLHKKDSQMCILAEGGELIERRIRTDPHRFAEVLGERAPARILVEASTESEWVARCLEGLGHDVVVADPNFAPMYATRTRKVKTDRRDARALAEACRLGAYRPAHRLSDAQRHVRARLTVREALVRTRTRYISVIRALLRQHGWLVPSGSAEGFPQRVLALPLPGRLRSEVAPLLAVMRHLRPPLAYSDERIAAVTATDERVRRLQSVPNIGPVTAAAFVAAIDEASRFHRAHEVEAYLGLVPRELSSGETQRRGRITKAGSTRVRWLLIQAAVSMLRLRDPRTATLREWAGRLAARRGKGIAVVALARRLAGILFALLRDGTVYEPRRRHACHVTQAVPA

SEQ ID NO: 223286 - protein, 394 aa, unidentified
MILVGIDIGKNKHTFSIIDKNSGEILLSPSDFSNNLKGFLFLIQKLSSYTKSKLLIGMEDTGHYHFALLKYLLDRRYTVALINPTTTDLTRKLQGGITKNDPLDSLTICDVISSNHRNKPYRVTTLNRFDLYEQKQLTRHHHNLKEELNTYKNRLQKCIDIVFPEFNSLFHSKYGIVYMNILKIFSSAKAIANADIRSIRKCFEFKGQGKRISLSAEQLKLTAKSSIGIPSVAEEIQIRHLVSQIELLEKQLSEIDKRIEEFSLKNNSPILTIPGISHFSGTSIISELGDICNYTKASQIIKFAGVAPYHYESSQFTAHHTAITKKGSKYLRKTLYQIILPVISNNEVFYAYYTKKLNEGKGHRCAQGHCIRKLLRVIYHLLSTRQPFNPKLLV

SEQ ID NO: 223287 - protein, 421 aa, unidentified
MRKADTGKVKIVRDGTLIVAIDVGMEMNQGYCTTIDGKSSKPFKFDNSREGMDKLWGMIVASKNRFKCNEVIVGYESTGPYGEPLIHFLITKPVKVVQVNPMHTKRIKEINDNSPLKTDDKDPRVIADIIKLGRALSIVIPEGDAAYLRRLNNSRERHVKERTALLNQLQQLVFLLFPEFRKVFKDIKCMTPLYLLKKYPAPEAIGVLDKRVLGEEMRKRSMGKYREPDADSLINLAQNTIGIKEGVLGLSMDIQHILIQLEMLKTLIAEVESEMEIALGRIPYSSKLLSIKGLGVVSVAGLIGEIGDFKKFETRSEIMKLAGLDLYEISSGKMKGQRRISKRGRSLIRKILYYTAIQTIRKNGILHDYYKRLTDRGMKRMKALVAVSRKLLGIIYAIVRDDGEYSADFESMKRQVIRKAA

SEQ ID NO: 223288 - protein, 405 aa, unidentified
MFYCGIDIAKYKHEATVIDQTGVSLLDSISFSNSKEGCEKLLALFQRLNIAKEDLLIGMEATGHYWLSVYGYLLEQDFEVKVINPIQSEAFRKMYIRQTKNDRKDSFIIAQIMRFGQFSATSLSEEVIIAMRQLSRYRLALVDACGDCKRRVIALLDQVFPEYDALFSDTFGVTSKEILSQYPVPEELLTVSTRKLTTLLENASHGRFGREKAEQLKAAAANSFGVSFAKNAFAFQIRQLVEQLEFLEGQIMELEAQISSLLKQTGSYITTIPGIGDTLGAIILSEIGDIHRFNAPNKLVAFAGLDVRVTQSGEFTGTRQKISKRGSPYLRRAIWLAASRAAFCDPILSEYYQSLRARGKHHLTAVGAVSRKLCNTIYTILREERPWQPVPPRDKKVSNHTEQQR

SEQ ID NO: 223289 - protein, 396 aa, unidentified
MLRIGRSAVQSHKRKEPVNEESKVCRFGCPCGDDCGVAVAEQNGEVRSLGVIPNREDSVRKLVRKLGPVEEPRFCYEAGPTGYVLYWQLTRMGAKCEVVAPTLVPVKSGDRVKTDRRDALKLARNYRAGELTPVWVPDAAHEALRDLVRAREAAKKDELRARHRLNKFLLRQGRRPPMGVKLWTIKYLEWVKREVHFEQMAQEATLLDYLHEVEHAAARIARLDGAIAEAVKLAPPKMRAVIAALQALRGIAHVAAVTVVAELGELSRFARAKQLMGYGGIVASEHSSGERTRRGGITKTGNAHLRRVVVEAAWTYRHRPAVGTSLRKRQEHVSEEIKEIAWKAQQRLHQRYKKLLANGKNKGVVVTAIGRELLGFIWAIGIKVEAAQKESLQRAA

SEQ ID NO: 223290 - protein, 334 aa, unidentified
MQNVTLIGIDLGKNSFHIHCQEKHGNTLLRKRFSRIQLTQFLATCPPCIVAMESCAGAHFMARHISQLGHQVKLISPQFVRPFVKSNKNDFIDAEAICEATSRPSMHFVTPRTEDQQAMSALHRVRDALVRERVKATNQMHAFLLEFGISMPRGIAVIKRLATVLEEHELPPYLVRLLTRLHQHYGYLCEQIEEIERELKNHLADDETAQRLLTIPGIGTITASLLATKLGDGKNYLSSRDFATSTGLVPRQYSTGGKSTLMGISKRGDKNLRRLLVQCARVYMQRLEYQSGRLAEWVNGQLTRHHSNVVACALANKLARIAWVVTTQGTVFSK

SEQ ID NO: 223291 - protein, 353 aa, unidentified
MTDIATHNDRIATIGMDLGKRSFHLIGMDSRGKVIMRQQLSRGRFERHMANLQPCLVGVEACAGAHHIGRRLSAFGHNVRLIPAQYVKPFRKGQKNDYRDAEAIAEAVQRPTMRFVPIKSAEQLDLQALHRIRSRLVGHRTAVINQLRGFLLECGIIVPQGPGTLRKILPSVLAQRTDVLSPRMVRLIEELADDWRRLDDRVDAVTGEVQALARQDEGCRRLMSVPGIGALTASAVVATIGNGAAFTKGRDFGAWLGLVPKQLSTGDRTILGRLSKRGNKYMRTLFIIGARAVLAKPGSWAKFGLEGWLAAAAKRLHHNVLAAALANKLARIAWSVLYHGRSFARDFEPQSVS

SEQ ID NO: 223292 - protein, 431 aa, unidentified
MASPCRTSSVSFWRRFSLAFKIFRKNCCGLDVHKTWIFACVGITDANGRTEYKQARFSSFSGGLRELSDWLATHGCKEVCMESAGKYWIPVFNILEQTCQVTLAHPKYTKPQKGNKTDRKDAKWICDLFMCDMVKPSFIPPPDIRQLRDLMLTNMLASEKNRALNCLTVSNLKLDDVFSDVFGKSSRSIIGHILEHPGETFDVAPFVDRRCKHPVAEIQAAVDGAVSREQAAKLRECLQHMDELEAHKKNVEREIFRLVEPYSVQLSLIRTVPGLSGDPMTAITILSEIGADMSVFPTAKNLVSWAGCCPRNDQSGGKVKSTRISRAGAYLKPILVQVANAVVKSDKFPECKERYRRLKARRGHKKAIIAICRMLLTAIWNILSKGEPYSAAGYLTDKLTEHSVVITKAQGLELLRKRGYIFKDDLVAESG

SEQ ID NO: 223293 - protein, 443 aa, unidentified
MTRKNQKRFEVVHPDCAAVDVGGSEHLAAVDPAKCADPVQRFSAFTDDLHAMADWFSSMGVKVVAMEATGVYWIPLFEILDRRGFEVYLVNSRATRQITGRKSDVLDCQWILQLMTHGLLRGAFRPSDEVCSLRSLVRQRANKVRDQAKSLNRMQKALVQMNIQLAQVISNIAGVTGMSILRAVVEGERSPDVLVRLRDKRVKADEATVARSLRGNWRAEHLHALSQELAAYDFLEKQIGECDQAIADALDRLPVLQSDVTTPTKTLRSAHRSNEQQLALHQALNKVMGVDLTAIPTIGIDTALVLASELGADLSRFPTSQHFCSWLGLAPPTRISGGKPLPGKSAKVINRSAQALKQAASIARNDKSFIGASHRARLTRMDTCCAIKATAHQLARLIYAMLTKGQPYVEKGIEEFEERSRDRQLRALERKARKLGLQLVKAA

SEQ ID NO: 223294 - protein, 342 aa, unidentified
MNEYDGKQFVGIDLHRQRSVIVRQSESGEQLSAVRIVNDSVALGLQLEDAGSNPEVVLEATYGWYWAVDALQAHGAQVHLAHPLGVKGFRYRRVKNDVRDAGDLADLLRMGRLPEAWIAPPATRELRELVRYRAKLVAIRSGLKAQVHAVLAKAGVSIAVSDLFGVGGRKRLAKVPLATAYAERVRSLLELIDTLDGHEARFAALIAKRLDADRGYQAIQQVPGIGVTLAAVFVAEIGDAGRFSGPAQLCSWAGLTPRHRESDTVVHRGHITKQGSKLVRWAAIEAVQRHPTTAKIAADKDRIEARRGKNIAKVAAARKLLTLVYYGLRDGHIRALDRANAA

SEQ ID NO: 223295 - protein, 409 aa, unidentified
MLYVGIDLHKDHHTAVLLDCWNEKLGELQFLNKPSAFPRLLARLEPYSKNGFTVVYGLEDTGGYGWALGLYLIQQGQWVKSINPAFSAAKRQSYATVHKSDSWDAECVARVLKDDLKHLPDFMPDEHFWVMRQLVTRRRGIAKNLTGLVKQLHIQLSYVYPSYRRFFSEVEGKTALAFWEAHPLPSYVLDTTPQALKQFLQQQSNYACSTKKAELILHCVQEDGNTCLTYAEEKELVIRGQVRQIRFYQDEIREIEATLRRMLEQTGCLLHTMTGVDVVTSAELSAEIGDIRRFPSANKLARYAGVAPIFAGSGGKGRYYKSRQGDRSLHDIFLGMAVRQIAVHRTTKTPRNPAFYAYYQRKMAEGKTKKQALVCIMRRLVNIVYSILKYQKPYVLPVADTSSIAENSD

SEQ ID NO: 223296 - protein, 472 aa, unidentified
MENVKTIFVGIDVSKGYADFILLDQNKMIYETNFQLDDNHTGHDLLQKKLAMLSRQGFKVVCGLESTGGYEQNWVRCVKQLTENELSVELYKLNARGVKHQLESELRRTITDGVSAEGIAIYVINNYATKLHDWKRGIAKDEKTTGRQMLCKLIISQQKHLTAKYNQLEKVIYRQFPELLQYCKHGIPLWITRLLEKYPSLTAIKNAKLSGVDKIKCVTEAKANILKGLAKSSIGNTIKDPVMDIIMQTLCSEIIHIDNQIDSLKKQLIAHEVDEEVNLLCSIRGIAEWSAVGILVHLDDISQFADSHQIASFFGVHPTYKQSGDGKWASKMSKAGNKTMRSVLYNAANNVVLHNAYFKAIYARHRANGKKHQAAIGVIMHKLLRVVYGMLKSKRPFNEQTDIANQVKSNQEIQNEAIKVSVNKTSRRYQELGTVAPLSGRNYKKRKIALEGCQASIDANTASPKSNLLMQT

SEQ ID NO: 223297 - protein, 317 aa, unidentified
MAEVSFPSQVLRGCGIDVHLKVVVATIKGEGIRKETRSFDTFTSSLTELKEWLLQNGITHVAMESTGVYWKPVYRVLEDAIPNVWIVNARHIKNVPGHKTDKMDSEWICKLLLAGLLKPSYIPPKEQRQLRDLTRYRNKLIQHVASEKNRIMRILEDCNIKLSSVVSNTSGTTATKLIDWLCEGKFITLQDVESIYHGKLSATPEELLKACTGFVESHHVYMLQMIRRDIDQTMVLIDELGVKIREVLSKYDNAIELLKEIPGFSDKVVEDLVAEIGFDMSKFPSEKHLASWAGICPGNNESAGKKKAEESPTETNK

SEQ ID NO: 223298 - protein, 389 aa, unidentified
MKIFVGIDIAKLNHFAAAISSDGEILIEPFKFTNDADGFQLLVSKLESFDKNSIIIGLESTAHYGDNLVRYLVAEFYQVCVLNPIKTCQMRKNNVRKTKTDKVDTYVIAKTLMMQDDLRFITFFDLDMMDLKALGRFRQKTIKQRTRLKIQLTTYVDQVFPEIQYFFKSGLHQHAVYALLKEAPSPKEIASMHMTHLANLLKVNSHGHFTKEQAKELRILAQKSVGANDSAISIQITQTIQQIELLDSQLEKIEAEMTDIMKFNDSVIMTIPGIGYINGGMILGEIGDIHRFSNPNKLLAFAGLDPSVYQSGNFQAKTTRMSKRGSRVLRYALVNAAWNVVRNNATFKAYYDAKRAEGRSHYNALGHCAGKLVRVIWKMLTDEVEFNLE

SEQ ID NO: 223299 - protein, 343 aa, unidentified
MQVVRIGLDLAKYVFEVHGVDSLGKVAVRKTLRRDAVARFFANLPRCLVGMEASNGAHYWARVLSDLGHEVRLISPQFVTPYVKSNKNDRNDAEAICEAVGRPSMRFVPPKSTDQLAVQAVHRIRRRLVADRVRLVNQIRGLLSEHGIVIARDISQLRRSLAVIVGNGDDGLSGMVRSLMRELQAEMAEIDDRVATYDRRIREIFRSSEQCQRLGKIEGIGPVTATALIAAVGDRTCFKNGRQFAAWLGLVPKQRSSGGRARLFGISKRGDRYLRTLMIHGARAALGKAAGKQDPRSLWLGKLRQRRHPNVAAVALANKNARIVWAMLSGGTFYEHDPSVKAA

SEQ ID NO: 223300 - protein, 344 aa, unidentified
MNSTTIAVDVAKSVFEVAVSEHPGQVRERHRLSRGRFSRFLAEHPPATVVMEACGSAHHWAREAQSRGHRVVLVPPHAARPYVLRNKTDRTDAKGLLEAFRNDDLRPVPVKSETQQALAGLHRLRSTWVATRTARFNTLRGILREFGVVIPTGAHHVVPHVRALLEDLDAGVPGLLRVALGEAIREVGELEERIRAIERQLATAAEPALLIRRLRTVPGIGVLTATALVAVVGDVQRFPSARHFASYLGLTPREHSSGQRRHLGAISKRGDTYLRMLFIHGARSVLHHAKSKTAPARDRLRTWALQVERLRGHNKAAVALANKLARIAWAVWRSGNDFITAAVV

SEQ ID NO: 223301 - protein, 460 aa, unidentified
MNSITLSVGIDLARRSNHMAVIATAPDGRHTPSRGFSFAHEEDGFRALQERIQCLRGSDSLQGVAIVMEPTSGAWRDVAAFFNPLGASVFFVRTDVVSAVRKTQSRFAKTDRIDAAALASMPWTFPGRLVPVLSDEGRLRKLRELSAQRFRLVEECTRWKNRLLAHLESVWRPLVIQLPQGVSLSQSLLLFWEKFPHPQDFMEYGAKRFHRWFEQHAHGSLSPNVEETILACAQKAAAFRFRLGAVETEREIARQLVPHTRKMTQLFEREIALVETWIKEARRDVPECDILDEIPGVGPVVSVSFATALMPIGRFANVKKCAAYTGFVSRKKASAGHEVKGLRITKAGNRRLKRDLALAADFAMRRDPQLAAFAIRLLAAGKHYNQVRVAVGRKLAMRAYALLKRLERGERDVHYEYRDLKGRAISKQEARALAEALWRDREDQKSASGGKNTKSRKPAA

SEQ ID NO: 223302 - protein, 398 aa, unidentified
MTRKNTLKSLPTDTDFRVVGLDLAKSDVSVAAIPVDDNTPSLVDRMTYADLLDWAGKISPTLFAMEPCNGYSLLCLQLENLGHEIKVISGWTVSMWINTHLSGQKTDLNDAIALARLAVSDAELTPIRHKSITEIRIQTVQAVRQQLMSQRSRSIVSFKALAQQWGIPCAAGHRNLKKLRESIEAKVDLITRPVANAMLFLLDAVKSLDRQIGQLNQTLQELVMSDERGRLLQSVLGVGTQISARVITVVGNVERFNSPRSLVAYVGVAPRNFITGHKNLTKKKHGNCPDLSHKGQGKISRRGDKLLRSLFIQGAACLYMQFCKDQLPECQLKRWILKQLASQKPYGKLIVSLAAKLIRIVWAVLTYGEKFNIQKAGMTRSMWSEMALETPLNKEVPA

SEQ ID NO: 223303 - protein, 429 aa, unidentified
MRTESTPGARGPVFCGVDTHADSHWLYVLDWRGRRVLSRRFPADAAGYEALAGAIAAAGEPACVAMEGTSSYGAGLTRHLASLGMPVREALSPARTQRRRPGQGKCDESDAERAARAAMSGSKLGTPKSQDGRVDGVRCMLAARSGAVKARTSAINTARSLLTTAPEGLRSRFRGMGGPRLMEELPSVRAEGALGAALGALADLWAAARDAALDMELAIEASLEENCPALLAMYGCGPVSAAKLAVAAGDNPGRLRSEASFAAICGACPIPASSGKTVRHRLNRGGDRQANSALHEIARQRVMRDPETAEYAERARARGKSDREVMRCLKRYVAREAYRALMRPHEIRRPADASELVAARRAAKVSQVRAASILGTSEKYISMLERGQRELKPIRRAYEAWVEAGLPLDWDRQAFEAERKMDSKKHLAK

SEQ ID NO: 223304 - protein, 356 aa, unidentified
MVMVLGVDVHKDTHTVVAVDEVGRADGERTVRATDTGHRQLLDWARRQVPQDRMWAVEDCRHVSTRLERALLAAGETVVRVPPKLMAGARSSARTRGKSDPIDALAIARAALREPDLPLARHDDTSRTLKLLVDHRDDLVIERTKMANRLRWHLHELDPELDVPARGLNRLNLLDRLITWLAEQSRPDRLGQVLARLAAELLTDIRAATVRINALEREINTLARQAAPRLMTLPGAGGLTTAKIVGETANITRFRSEACFAMHAGVAPIPASSGRTQRHRLARGGNRQLNAALHRIAITQVRITASPGQLYYQRRRAQGDTAMEALRALKRRLARVVFNLLQADTTIAINDLSTAA

SEQ ID NO: 223305 - protein, 429 aa, unidentified
MPYRIAGIDVHKKMLAVVVSNVEVESEFQFERRMFGGNPEQLRSLAAWLLEQEVEEVVMESTAQYWKPVWETLERYWKPIREKREDARRRSGTLHLAQALSNRGRRGRKKDFLDAERLVKRLVARELTLSFVPDVEQRLWRTVTRRKYQLTRDRARLQNQVESLLEEAHIKLSSLVSDLLGASARRMLKALADGETNPAALAALADKQLRATPEQLCDALGACTELNPVYRRLLKMALEQLQFLEQQIGDLDQETASLLRQHQDAVERLAEVPGLGVDSATQIIAEVGPTAATFPSGKHLSSWVGACPGNEESAGVNYSHRSPQGNRHMRRLLNQAANAAVKVKGSIFEIVYRRSVPRLGHNQVIGAIAHRQCRLIWLILHQGVRYEEHGPAVTKQSRQARTARMIRQLRKLGYQVELPNSQPANSAGR

SEQ ID NO: 223306 - protein, 349 aa, unidentified
MKTYVGIDFHKNYSYGVIMTQDRQILKHGKFANHPQAVAQFLNSHRGQHCTAVLEATRNWTIMHDWLEELTDGVTLAHPGKLKAIAEAKIKTDKIDATILADLLRCDLIPPAHVSSPQARVIKRLLRHRIFLVRVRTMLKNRIHDLLDRHPLLRSQWVAEELFSRNGLAWMRALDLPPADRRILDSELTMVEQLGLQIKEVDRLLANVGRQDPRVARLRTIPGIGPFSAMVLVAEIDDIHRFSSAAKLHAYAGVIPSTQASGGKTYHGRIIKHSNKYLRWAMIEAAWPAIRKDGTLREIYQRIAVRRGGNIAKVAVARRLLTIAYRLLIENRDYLPGTTIQTSAGLISA

SEQ ID NO: 223307 - protein, 423 aa, unidentified
MEVMHERVAGLDVHKATIMACVRLMEGGKVRRECRSFETTTAGLEALLGWLKECGCTHVAMEATGVYWKPVWSILSDGPFELLVANAAHIKNVPGRKTDMNDAMWIADLVACGLLRPSFVPQQSVQELRVLMRTRKQLGREQTRHVQRIQKTLEEANIKLGSVLSDIMGASGRRMIEAMIAGVRDPRKLAALAHRQIKASPKELYDALHGRLSEHHRFLLKLHIGQYDAIEAAIAQLDRQVDAALDQLDREVATDQATFRDLIGLLCTIPGISTLAATSILAEIGRDMSRFATAGHLVAWAGLCPTQNESAGKRKPARLRKGSPWLKTMLVQCAWAAKRKKDSYYRAQFYRLSPHRGPQKAICAVAASLLTAIYHMLNDGTPHHDLGIDYFRRRAPEAVAKRLVAQLAKLGYHAQLQPLPEAA

SEQ ID NO: 223308 - protein, 319 aa, unidentified
MSRILIGVDVSKEQLDATARPANDSRRFANDPAGIEALVAWAKPFAPDRIVFESTGHYQKMAVGALLAASLPAVIVNARQVRDFAKAIGQLAKTDAIDAGVLAHFGEVIPTTVRPLESQEILEFREIYDRRGQLVKMLAAEKNHRHVGGCKPVLKNIAAHIAYLEKQIGSLEDRMDAIVAACDAFRAKDEILQSIVGIGPQVSRTLLVHLPELGMNSRQKIAALVGLAPYNDDSGNQTRGRHIRGGRSKVRIGLYQSAISAIRYCPAMRTFYNHLKARGKASRVAIIAVARKILVLANALIRTMKPYQPRPNSVCPQNA

SEQ ID NO: 223309 - protein, 404 aa, unidentified
MSNVAGIDISKGKSTVSVLRPFGEVVAKPFSVGHTGSELKELADYLKSLDGETRVVMEHTGRYYEPVARFLHDQGIFVSAVNPKLIKDYGNNTLRKVKTDKADARKIARYGLDNWVELRQHTPMDTIRMQLKTLNRQQGLYSKTKTMMKNNLIALLDQTYPGVNALFESPVREDGSQKWVDFATAFWHVDCVRNMSLTAFTERYRKWCKRHGYNFSQSRAVEIHAGAQDLIAMLPKDALTKTMIRQAIDALNAVSASLERLKAEMRTLAAQLPEYPVVMAMHGVGDSLGPQLMAELGDVTRFTHRNAITAFAGVDPGADQSGTHEAKSTRASKSGPPELRKALFLVMDCLLKTMPADDPVYCFMDKKRAEGKPYLVYMTAGANKFLRIYYGRVKEYLALRENAD

SEQ ID NO: 223310 - protein, 352 aa, unidentified
MNTIHYIGFDVHKKTVSFCAKTADGEIADEGTLIAQRTVLREWAAGRSQPWQGAMEATLFSGWIYDTLEPYAQELAMGHPLMMKAISAGKKKNDRMDARTIADLVRCNLLPACYVAPPEIRDLRRLLRYRNLVVGQSVRMQNKIAGLLMETGSPYNKQKLHGKKYFAELVKTLQEVPESVKDLLKMSRGAMELFQAMQKRLVKQLLANPKLAERVERLASIPGVGEITALTWALEIGEPQRFSSSADVMSYCGLTSALKSSAGKQQRGPLSKQRNAWLQTALIEAAKLAPRWNPQLEAVHARELERGHRNRATLAVARKLAAYLLAVDKSGKPFELRAPSGVSETAIPEKAA

SEQ ID NO: 223311 - protein, 417 aa, unidentified
MLGPEIRCVVGIDVAKQAHVVCALEVPSGAVRHKPSRIEATAAGYALLRSWLQTWAEGGPPETVLIGLEATGSLWEPLYDILTQAGYAVLLLNPRQTAAWASSLGLRAKTDGIDAQTLARGLAAGWARGSTLPSEAVQALRALTRARRDLVQSRTMARQRLHDELVVLFPEFVRFLPSLPGRTDLGDPAILQLLSSSSSACALAQLPLNELTDLLARVSGGRWGLDQAQALQALARGSTASSRAVAARSIVARTLAQQLLELAAHITEVEAAIAELLHDDVQGQQLQALPGIGPQGAATIRAELGDVTRFSRVDEVVAYAGLDPRTRQSGAFSGQKRLSKRGPGALRHALYLAAFVAARCAPEWRTRYQRLLDRGRAKKEAYTILARAFLRVIYHLLRTGDAYDPTLLNRQAPVPAC

SEQ ID NO: 223312 - protein, 419 aa, unidentified
MKVVYPICCGVDVHKSFIIATIIKTENITPKYARKRFSTFNNDILRFKQWLLENDCRDVCMESTGKYWVPVYNLLEDEINVVVASPKWVRAVKGNKDDKKDSKWIGDLFRLGLVPGSFIPPKPIRVLREYTRYRYKLVSCKTSEKNRYQNSFTVCNVALDSVVSDMFGKSATLITDYLIQTDNFDPEHCKSLLQRSLKKKADTVIDSIAGYKIDPAQKERMVMVKSHLSYVEKAIETVDAGIDALVEPYENHISLLSSIPGVDRRSAITIISEIGTDINQFTHSKRLCCWAGLTPGNNESAGKKKSVRITRAGVYLKPALVQVAHAAVKSIESPYYKNKYQRISKRRGKKRAIIAIARMILTAIYHMLKTGELWNPTDLFKVDLPPVLMERQKQKAIQNAIKLLASEGITLSANKHPAA

SEQ ID NO: 223313 - protein, 375 aa, unidentified
MATNTITWVGMDAHKNSIKVAAWLPGEAEPVEWSEDTTAEAIRRLARKLRRLAPGEVRACYEAGPTGYGLQRLLGAEGVICEVIAPSLTPVKPGSRIKTDRRDARKLGELLRGGLLTEVHPPSETDEALRDLCRCRDDVRVDLLRARHRLTKFLLRRHVIYRQTKHHWGSRHVAWLEQLRFDDAMSQTTFDSYFLAVQQLEERQRQLDQQLAGFGAQEPYREPVAALRCFKGIDTVTAVCLVAELHDFRRFRSPRQLAAYVGLVPSENSSGERERRGPITKSGNRHVRRLLVESAWHHRHRPALSRPLRARREGQPARVLAIADRAQERLAARFRRMSEAGKVHPKTIVAMARELCGYLWAVLHPAAQATRPKSA

SEQ ID NO: 223314 - protein, 419 aa, unidentified
MENIKTKKLRVVKGKTMIVTIDIGKTIHYGYFRGTDGQDINPFPFHNVKKSYEEFWMKALQFKQQKNLEDIVVGFESTGPYAEPLMSFLAKKPVRLVQVNPMHTKRLKELTGNSPNKTDSKDPRVIADVIALGHALTVVVPEGPAAELRRLTQARQRVSKNRNAMINQLHHLVFVIFPEFTQAIKMIASKSALYLLKNYPSPADIVDLGLDGLQTRLRKVSLGRLKQCQIKSLFEAAGNTAGIDNGRKSLLIEIKHLACCIEQESEFIAHLEKQMSQYLKQIPYSQNILSIKGIGEVTLAGLIGEVGDFRQFKTIAEIMKLAGLDLYEISSGKHQGQRHISKRGRSYLRKLLFFAAINTIRTKGIMNGPYRKMIDRGMPKVKAVVAISRKLLRIIFAMVRNHTTYKENYEQQYHEKLAA

SEQ ID NO: 223315 - protein, 386 aa, unidentified
MKDETFVPREYDVFAGLDVDKKSIAATFSSPQGFIRSLHMPYSVDYLLNHVRKHFGDQKVAFVYEAGPTGYGLYDGLVAQGYRCLVAAPSMIPRAPGQRVKTNRLDSRGLSESLRGGQLKSIHVPSPIYRELRHLTQLRDTVVREAAAHKQRIKALLLLEGIGFPSATAGRQWTLRVKAQLRKLRCSRIVRFKLDQLLDSLEFCEKQVVSSTKEIRRFCKEDVELFQSIEYLMSIPGIGWIVASQLLARMGDWREIDNVRQLGSFLGLVPTENSTGDSVDRGSITRAGDGRLRSKMIQAAWSAIRQDGELREFYRSVCQRNPRGKGARIAIVAVARKLSTRIYAVLKKQRPYIVRKQVHSAPLTQEETSPQGTTRRCAEPGETDNS

SEQ ID NO: 223316 - protein, 340 aa, unidentified
MPGVELWPNAFGRALAAPTPLGGDAMASICETQVTIGVDPHPGSHTATAVSPLGEVLGSVTVSNNEEGRQDLRSWVRQHTSRRWAIEGAGNRYVARFVSELIEEGEQVYSIPPSMTAQYRSRRGRKKDDEVDAENAAKALLANPGISHYLPARYEQRLKELTRSYQRLSHQLKATRMAGKATDDPLLSQVTMKVTKALEEGLVELKREMEKTVRMVAPRLLEIRGVGPVVASVVLAEAGRITRFANRDHFVAFAGCAPIRWESGAHQTVRVNPGGNRRLNWAAHIMVISRLRIDEATKAYRDKKLGEGKTQRQAIRLLKTYACRELYKALKQSLCSADMT

SEQ ID NO: 223317 - protein, 313 aa, unidentified
MKNVIGVDVCKLRLDVFCSGDESVHAFANDAAGHAALVELVQGQGTELVVLEATGGLERAFVGQLLSAGLPVAVVNPRQVRDFAKALGHLAKTDALDARVLAAFGQAVKPRVRRLDEEDTQALADALTRRRQLMEMRTMEKARLTQASRTDVRKSLKAHIQWLDNQLRATDSGLRQAVEQSDAWMAQCDLLKAVKGIGTVACLSLTAWLPELGSINRKQIAALVGVAPLNHDSGAYRGRRRVWGGRAAVRAVLSMATLSAIRHNPTIAVFHQRLRAAGKPKKVAIVACMRKLLTILNAMVRDRQPWHDSPPIA

SEQ ID NO: 223318 - protein, 401 aa, unidentified
MAALRDQAFIGLDIGKTHHWVCALDGEGKPLLSRKIANDETEIVTLLTTASALAQQLVWAADIIGAPSALILSVLTRAGQSVRYASGWIVSAMSRAYPGEGKTDAKDAYVIAETARIRRDLPVIDHDTDLVRNLAVLTGYRADLIADRVRMINRLRDLMTSVFPSLEREFDYSSHKGALVLLTGYASPDRIRRVGQTRLAGWLRHRKVRDYASIAVRAVDAARAQSTVLPGQDLATTIVAELATSILALDERLKTLDDQIEQTFKQHPQAAIIQSMPGFGPFLGAALLVGAGDLSAFPSAGHLAAAAGLVPVPNDSGRRTGNLHRPHRYSRPLRHVFYLSAQTSMMRAGPNRDYYLKKRAHGRTHSQAVISLARRRVDVLWSLLRDNRRWVADPPGHALAA

SEQ ID NO: 223319 - protein, 338 aa, unidentified
MKTYAGIDLHSSNNYIGVIDAKDKRLYSKRHTNRIEEVLKVLGKFKSSLQGVVIESTYNWYWLVDGLMDQGYTVHLANPNAIKSYDGLKHTDDKWDSFWLAHMLRLGILPEGYIYPKHQRPIRDMLRRRLMFVRQRTSQILSLQSMATRNRGLNFSGAQVKRFRDEFIEKMFSDPNLVFTAKRNIATIRFLDRIVGEIEREVISQIKLKKEFIKLLTTPGIGNILGLTIMLEVGDIRRFDKVGNYSSYCRCVESKKTSNGKKKGENNKKNGNRYLAWAYVEAANHAIRCCPKAQKFFQRKMAKNERTLATKALANKLTKATYYIMRDQVDFDEDLLFR

SEQ ID NO: 223320 - protein, 347 aa, unidentified
MRFYTKQHPFYCGIDLHARTMYLCILTQEGEILVHRNMPAGPDPFLKTIAPYRENLVVCVECIFTWYWLADLCAREGIPFVLGHALYMKAIHGGKAKNDKIDAQKIAVLLRGGMLPQAYVYPAEMRATRDLLRRRLHLTRKRAELLAHIQNTNSQYNLPEIGKKLAYKANRDGVVERFSDPAVQKSVEVDLALIGYYDQLLSDVELTVVQTAKQHDAHTLYWLQSVPGIGKILSLVLLYEIHDISRFPRVQDFVSYCRLVKCAQESAGKRYGTSGAKIGNASLTWAFSEAAVLFLRNNPVGQKYLARLEKKHGKGKALTVLAHKLARAVYYLLRRDTVFDMNKFLHG

SEQ ID NO: 223321 - protein, 365 aa, unidentified
MSFVFPSTCPKRYLATFDTTTKGLRAYHDFLSQFHVEAVGMESTGVYWRLVWHALCDDFELILAQPAHMKAIPGQKTDKKDAHWIAKLTRIGLLPRSFVPDETIQELRELTRQRKHYVESRNRETNRIHKFLQSGGIKLTTYIEDIMGLSGRNLLQLLVDGTPITPRIVHQSVYTSLKKKVPQLLEALDDYFSDHHRFMLKQSLEIYDFYQKQIELLEERMNVYLSQYEKHVEILDSIPGIDVITASVIISEVGVDMSQFPTFGHLASWAGLCPGNNESAGKKRSTKIRHGNSYLKKCLCQAAFAVKRQKGSPLAERYYQIQSRRGSQKATIALAHQLLKIAYILLKEQMTYPEFLAQKRLLGTS

SEQ ID NO: 223322 - protein, 345 aa, unidentified
MKNTMIGVDLAKEVIQVCIYTNKKVHSNKEMTHNEFLLWLFNTKPTLIIFEACGTSNYWKQKAIEAGHEARLISAKLVSTVRQNQKTDKNDALAIVQAAQLPEIRFIKGKTEPQQQLQTVLRLRELSIKQKTALSNQLKALLLEFNIRVSSKNGGLTGTIELLLEDAENGFSSAFRQALNSAWEQYSQLLESIQVYDDCLESSIEEHGDCKRLLKLEGVGTVNAINLYIALGCAELGTFTKGKAASACIGLTPIQYSSGGKSNFGSIGRHVKNSILRSQLITGAMAAVSQMVRREAKTKKEAWIQGLVERRGKKCAAVALANKTVRTAFAMLTQGTEYKAELLTA

SEQ ID NO: 223323 - protein, 400 aa, unidentified
MRAVFGIDVSKASSEVAILVNSEKVHGYSMTNDAIGFSRLLKDLNTVSNPEIIFEATGVYSRRLQAFLEENAYAYTRLNPLEAKKQLDSLRVRKTDKIDAKKLAESQFILNRKSTYGQEEVYQNLRDLSRFYQNLTEDMVRTKNRLHKILQVTFPELEQLLSAPTGEQYWNLVFSFPSKDFVLDLSPSELAEVIRQSTSKRISEKRVTLLSDKLTELAKQSYCAVKKTSPMIEEIKYYAQELLRLTERRQVILDEMVNLAQPLPEYEILLSIPGIAETTATSIIGELGDVRRFHSANQINAFIGIDLRHYESGNFLAQEHITKRGNPYARKILFKCIHNIAAASHTNPCHIADFYEKRKRQSQTTSTKPHTIAAVHRLIRTMYYLITHNKLYDYTATQSH

SEQ ID NO: 223324 - protein, 428 aa, unidentified
MIANSVSTQQGTFVAIDVAKQVHEVLVQPPTGHRQRWRIRNCRPDYEALRDRLRAMETPVLIGFEATGNYHRPLAYYLGQCGFELRLISSLAVARTRDALYNSWDKNDPKDTQVVLHLLKTGVSQRDHDPLVHCTNNLQELAQTHYQISLRKVQVQHSIMTHYLPLYFPEAERYYTNSRAQWFTQVLHRFPCPAAITRYSPEAFEHEAWTVVGRKVNKRGFLADLYTTAAHSIGLAVAEDSEAIQMFRVMLAEHQHLCAIRTTIEHQADQMLQSYPDYQRLRTLPGVGPILALTILAEAGDLRRFQHHRQFLKFCGFDLCTQQSGQFRGMSRLSKHGNARLRYAFWMAAQGAVRMRENTFRQKYARYIKSDPQNPDRKRKALCAVAAKVARVAHGLIKTEADYRPYFEATLPSGALRSLGPSRQLLTS

SEQ ID NO: 223325 - protein, 334 aa, unidentified
MNFKNFVGIDVSKGTFDIALLRESAANSIVSAQYTNDFHGLVKLEEFVKKQGLNMDETLFCMEHTGIYCRLLSHYLVENKYHVWLEMPVQIIRSLGIQRGKNDRIDAVRIAQYACLKKDKAVLWQPPREIVNQINDMLTLRDRLIESRKSLKQPIKEFVDAGFKDTAKLIENMCCNTLKALDKEIEQIEKELDKIIKKDSNLKKLFKLATSVPGIGKITALTLLYFTNEFKLYTNANQLACYCGVAPFERTSGTSVKGKSRVSSFANKRLKKLLHLVAMSTISCDKQLSQYYQRKVNEGKNKMLVINAIRNKVLHRLCSVIKRGTPYQVEYQIA

SEQ ID NO: 223326 - protein, 330 aa, unidentified
MKNYVDVIGIDVSKLTIDAHIHNRAVHRVFSNTTKGYKALLSWTETYLKEQVYFFCFENTGHYSTKLSVYLSENNIDYIEQSPLAIKRSVGIVRGKTDKLDAGMIARYAWLHKEELLLSTPKENHVQELGRLLSIREQLVRDRTGKMSSLKEMQSLLSSPSTDNCCRIIKKTIHYLTKQIEALELCIKKLMKSDKSLDKNFKLLNTLKGVGLILSCQIIYHTSNFKRFNSWRQFSSYCGVAPFEHSSGTSIRRRNRIHHIGDRKMKTLLTLASVSAIQCDKELKQYYKKKLEEGKPKMVALNNVRNKILSRAFAVVKRGTPYVEIQKYAA

SEQ ID NO: 223327 - protein, 350 aa, unidentified
MIIIGCDYHPGFQQIAFVDTDSGEWNERKLGHREEAEQFYRQLKVRGKKVRVGMEASGHARWFERLLTELQFELWIGDAAEIRTKRVRKQKTDRQDAELLLRLLIEDRFPRIWVADGENRDLRQLLWHRHRLVQMRTRIMNQLHVLALNEGVRRKKALWRPAGRAQLQSLVLARWASRRRQDLLELLDQLTPKIQELTRALEQEVEKRPVARRLMTHPGVGPLTALAFELVIGTPERFGCGKQIASYVGLVPSEESSGDRRRLGHISKQGNSLLRFLLVEAAQVTVRTDPDWRRRFLHLAMRRERRIAKVAMARKLAVRLYWMWRKEWDYEQMRKYGSHVGEPVHRQGAS

SEQ ID NO: 223328 - protein, 388 aa, unidentified
MQVAADRTDASTAIQTDLPAIFASLELSRSTWLITSLSPGAGEKMSKHSIRAGDVAGLLVRLAQLKEKARGRTGRDFPIIAIQEAGLDGFWIHRVLQSEGIESHVVDAASILTSRRRRRAKTDGIDGETLVRTLLAYKRGEPRVCAMVKAPTPEEEDRRRICRERKTLVGERVEHVNRVKGLLFAQGVSDYEPLKRNRRARLEELKTGDGRPLPAHLKAQISRELDRLELVLPQLKAVEAERDALLKPVSEGSATPAAMLAQLKGMGPEFTAILWSEGLFRSFSNRRQLAAYAGLAPTPWQSGSVAHEQGVSKAGNRRLRTTMIQLAWLWLRHQPTSALSVWFQERVQSNGGKMRKTTIVALARKLLVALWKYSTSGVVIEGAVMKTI

SEQ ID NO: 223329 - protein, 449 aa, unidentified
MREPQEICDVEHEQILERVAAVDVAKASGMVCVRGPQAGRPDRRRSLVWEVPATTNAVLELAEHLARERIQKVTLEATSDYWRIWFYLLEAAGLDVQLVKAHDVKQAPGRPKTDKLDAVWLAKLTERGMLRPSFVPPAEIRNLRDYTRLRTDLTRERTRHYSRLEKLLEDALIKVSAVASKLDTVSVRDMIEALIAGERDPQVLAGLARGRMRVKHHALVEALTGQFDDHHAELARMLLDQIDSLTGQIGRLTARIEQLIAAIPAAQGVDPDGTTGPGAGLAKGAPVLPAIDRLDEITGIGRDTAQQIIAEIGLDMGRFATPGHLVSWAKLTPRTIQSGAKNRSGRTGKGNPYLKGALGEAAAAAARTDTFLGERYRRIVKRRGKLKALVAVARSILVIAWHLLTDPAARFRDLGAGYYASRTDKDRKARNHIRQLEALGFTVTLAPAA

SEQ ID NO: 223330 - protein, 338 aa, unidentified
MKLYVGLDVSLVRTAVCILNESGEIVAERQVDSEPDAIAGSLAKVQGIIERIGLEAGPMAPWLFAGLSGQGLPVVCIEVRQMKAFAKVSPVKTDKRDARLIAQAMRTGLFKATHVKTDESQRLRLLLRHRQAVMRRNKDLINTVRGTLKAFGIRTGGGKNTPYARRVREAVADPSLLTVTEPLLVAYEQGLAVLAELDRMVLAAAREDAVCRLLMTVPGVGAVTALAFRTGIDLPERFAKSRLVGAVLGLTPRVYASGESEHIGRIAKCGDGTRWLLYEAANVMLTRVKGDNWLKSWALGVAQRRGMRKAKVALARRLAGVMHAMWISGQAFSLAKPL

SEQ ID NO: 223331 - protein, 410 aa, unidentified
MEVLHPHCAGLDVHKDSVVACVRHMTAGKVTNAVRTFKTTTSDLMALSEWLSAEGSTHVAMEATGVYWKPVWHVLADGELDLVLANAAHVKNVPGRKTDVNDAVWLADLMAHGLIRGSFVPDEPTQQMRNLLRTRKQFVRERGSHIQRIQKALEDANIKLDSVVTDLLGLSGRRMIEALIGGQTDPQALAALAHRRLRATPQELEAALLGRLTDHHRFLLKLHLDHLNALEAAIDRIDKEVNANVEPFRAAIELLSTIPGVSRLTAEVIVAEIGTDMSRFPTAANLISWAGLCPRNDESAGKRRSTRMRKGAPWLKTNLVQCAWAAARTKNSYLQAQYLRLKSRRGPKKAIGAVAASLLTAAYHMLKNETHYQDPGPNYFDQRAKNNQTLRLLTRLRNLGYTVQITPLAA

SEQ ID NO: 223332 - protein, 322 aa, unidentified
MQGKMTSVRAGTAVYAGIDVCKAWLDVYLHPTGQSFRVANNKEGCERLALTLTSAAAGLIVMEATGKLHRLAHRELSAAGFAVAIVNPYRSRKLADALGQLAKTDKIDARVLAFYGAAIGPDATPVPAKSLAELQELVLARQAAKAGETALKNQAAAAASPVLKRLLKAQLKAQARLIAGLEAAIATLLARDAGLKRRCELLASIKGIGPVVAATLAACLPELGMLAGGKIAALAGVAPMNCDSGEMRGQRRIKGGRAHVRSALYMAAVAASRCNPDLKAFYDRLRAAGKAAKLALTAVMRKLVLIANTLIREDRHWTLKHA

SEQ ID NO: 223333 - protein, 360 aa, unidentified
MFTERTSVGLDVHARSVAAAAIDGVTGELVQAKLTPSHDHIRSWLEDLPGPVAVAYEAGPTGFGLSRALAAAGIRCEVVAPSKLQRPSGDRVKTDAKDAVHLARLLRLDEFTTVSVPTVDQENARDLVRAREDARGDLMRARHRLSKLLLRQGIVYSGGQAWTTTHDTWLRRQRFEASALRLTFESDYEAVLAVKARRDRLDEAIAAMAADSEFTPIVRRLCCLRGVSTLTGFALAVEVGDWHRFTGNTIGSFIGLVPSEYSSGTSRVQGSITKTGNTHLRRLLVEAAWHHRARYAPGKTMRDRWELATPAARVRGDAGNRRLNARWDAFRARRKRHVVANVAIARELAGWCWSLAVLED

SEQ ID NO: 223334 - protein, 418 aa, unidentified
MEQEDVIYERCAGIDVHKRMIVVCLRIGRTTELRTFGTLTYELRGMTAWLKESGCQMAAMESTGPYWKPLYNIFELEEIPAMVVNAQHMKAVPGRKTDMKDAQWIAKLLSQGLLKPSFVPDREQRDMRDLTRFRKSQIEERARNLNRLQKVLEGANIKLASFVSDIDGKSAMGFLELILGSPDFTVEDVEARRRGNMKATTEELFRSLEGIMSPVQRELFRHIIRIIREQTKQIEQTDALIQQFMGEAYRQAAQAITELSGIGIVSAQQIVTEIGYDMSRFPSDGHLCKWAGVCPGNNESAGKRKSGKTGHANKALKSTLVQCAQSGIRDKNTFFSAQYQRLVVRRGKNRAIVAVAHSMLIAIYHILKGANFRDLGADYYTRFNREKKINAHIKQLKTLGVSIPDDVLRTAIAQGAVA

SEQ ID NO: 223335 - protein, 341 aa, unidentified
METQRHIGIDLHRNQFTCCVRLENGRNYLTDWKLEDLPRFIKKLRPNDEIAVEVTGNTRLFRDAVAPHVARVVAVDPNQFKVISHSVKKTDPNDARNLALYLEKDLLPEVRMKDKTQAQLASLTQTRDTLVKLRTALKNKVNNILSAHGINLEKEALSSEKKLNEILAMKFDPMVKLELEVIIEEIRSLNQRIAKIEKAISEEGSKLEGHKNLTSIKGIGPLTGSILLSVIGDINDFADEGKRAAYFGIVPRISNSNETERSGRITKRGSKLGRTALVQCGLIAQRYSPYLKRYYEKIKARRGTGKAIIALARKLLGIIYRTLKNKWVFEDFPNFVLAEGD

SEQ ID NO: 223336 - protein, 370 aa, unidentified
MKYVGIDLHTNRFTCCYLFDNPKEKKMETFDLNKEGLSGFYSTIGKDTYVLVEATINTFAFVALFKDLVKEVIVANTYQLKSVGVPGKKTDQLDAAKLAEKLKAQVVSGVRQIVPVTVPPKEIRDLRALFASYRTLRKEIGRTKNRIHSLLKENLYPFTKEYIFGKKARKEIRNISDDCLLSFQINLFMDTLEHLEEAFERLVVEIKKAGSLFMPQIDILTSMSGISVVTAIAVIADVIDAGRFRNSKHFASYLRSVPRVESSNDKTIIKSTTKAGRKLAITLLSQSLNHFRDGNEKLSRWVERVSKYKKKGVVRMALCRRVITEIYQMLKKEEYHYFYNPTLHGKKMAEYQNFLEKDKKYFSKEFCISA

SEQ ID NO: 223337 - protein, 408 aa, unidentified
MRFIGLDVHRTFAEVAVLVEGQVHAAGRVATTALALEAFARTLRADDQVVLEATLNTQAIVRVLRPHVARVAIANPLRTRLIAEAKIKTDKIDAAALAQLLAAGFLPEVWMLDETTAALRRRVARRTQLVRQRTRLKNQVHAILARNLIPPCPAADLFGHKGRAWLARQPLPSDEQSAVATYLRALDLAGIDLRAVEENLAQAALPRADVRHLITIPGVDAIVALSLVAAIGDVGRFASPLKLIGYLGLDPRVRQSGLQPARSGPITKQGRAQARGMLVEAAWVVAKTPGPLRAFFLRVRARRGAQVAAVAAARKLAVLAWHLLTKGQDYTWARPSLTAQKLRGLELRAGLPARRGHRGAAHDYNLKEVRAREHALSTQAERAYQQLVARWQPRRPKTGAGATSGERR

SEQ ID NO: 223338 - protein, 330 aa, unidentified
MRKWNVILGVDVSKLTLDISSYELELHVKIDNCSAGFKVFQKWCKTHHIDLKETLVVMEHTGGYEYRFIQFCEAFSIAYCRVPGLEIKSSMGMTRGKSDQADSFRISKYGEQKIKELEPSKPLDKNILTLKQLLSFRKRLIRESAGLKSTITERKHMYEIKTADTIIHVSKAKIKSNTKHIDQVEKEITAIIKANEAMLLNYRIITSIKGIGKVNAWMTIAYTENFTSFPDGRTYAVYVGVLPFGHTSGTSIKRRTKVSKLANKELKQELNQAGKTAMRHDPEIRAYAERKLKNKCFSLVLNNVKFKLILRMFSLVKRQQPYVENYRRAA

SEQ ID NO: 223339 - protein, 355 aa, unidentified
MNSIKYVGLDVHRDTISVAVLNSEGKLVMQSIMATRASAILDFLHGLRGTLHVTFEEGTHSGWLYDLLGRRVAQVVVCNPRKNALLKAGSKSDAIDARKLAELLRAGLLSPVYHGQNSTAAVKHLGRSYAALTEDTTRIMGRLKALYRSQAIACVGSKVFGARHREQWLAQLADSGLQHRARRLYQELDVLQQLRREAKRELIVECCKHSETKLLRTVPWLGPIRVALLIGRVQTPHRFRTKRQFWAYCGLALETRDSGEYRVVNGQIERKKKPVFIRGLNRNHNHDLKNLFKSAATTASSGDGPFAEFYQNLLRKGMRAEMARLTLARKIAAITLHVWKKGEAFDADYLKSQAA

SEQ ID NO: 223340 - protein, 317 aa, unidentified
MSIPTASFVGIDVSKQQLDVAVRPSGETWSVAHDEAGLSALVAQLRALAPALIVLEATGGWEVALASALAAGPLPVVVINPRQVRDFARSTGTLAKTDRLDAQILAQFAEVIRPQPRALPDAQAQELAALLQRRRQLVEMLTAEKNRLTLASRRIRPQLQAHIEWLHKQIAQFDEDLRQLIRASPLWREKDDLLRSAPGVGPVLATTLVAALPELGTLTRRQIAALVGVAPLNRDSGTLRGRRSIWGGRAQVRAVLYMSTVVAMRHNPVVAAFYQRLRAAGKAPKLALTACMRKLLTILNAMLKHHTRWAPVLAQHA

SEQ ID NO: 223341 - protein, 400 aa, unidentified
MLSIGIDVSKGKSTVCGMKPGGEIVYTPFEVQHTREGMSELVLLLHNSGEEVRAVLESTGSYHCPVVAALLENGIFVSVVNSLRMKRFCSQSIRKVKTDRIDAMQIALYGLAYWQELQPTKLPEDTYRELQLLARQYYQMTSLLIKAKVDFNAICDQVLPGMQELMNDHAGRHKLSDFVLRYRHTTHILEMGETRFRKDYCKWAEKKGYRNCERMAALIFATAQNGIPVLPNAPSTQIVITEAIRVLHTVEASRDAILTQMQALAKTLPEYSLVREMPCIGDTLAPRLIAEIGDVRRFHSKRALIAYAGIDAPPYQSGKFCANNRHISKRGNRYLRKTGYEVMQSYVMHKPANDPIFTFIEKKRGEGKSGKLAMVAGLNKFLRVYYGKVTELYRSLPAIE

SEQ ID NO: 223342 - protein, 425 aa, unidentified
MNYKQNEKINQVKESTLVVGIDIGSTTQYARAFDWRGIELGKVFPFSNSREGFESFKAWMQHLQDKYRKPDVIVGIEPTGHYWFDLGAYLEDEGILLVMVNPYAVKQTKELDDNSQSKNDRKDPKVIAKLVTEGRYSAPYTPDGVYADLRIMVANRKRLIREMTQIKNRFARWFAIYFPEYTDVFGDYEAQSSMLLLKKVCTPEAIVELGAEKINQIWRDAKLRAVGMKRATTLCETAKRSIGLKKGSSAARYEMKLLLEDYEYKKAQLDAVMEEIEKLCRKIPESEQMLAIKGIGVITVAGFLAEVGDVRRFESPRQIQKLAGLSLRENSSGKHKGQTTISKRGRSKLRAVLFNAAIPLIAKNPEFKSLHEYYTTRANNPLKKKQSVIAISCKLIRVFYAILANGVTYDAQKMLSDIHRQPQAA

SEQ ID NO: 223343 - protein, 445 aa, unidentified
MKNLFIGIDFAAKKFDVAVIYAEGLQEQAPAEYNQFENTDEGFKAFVSWVKKNSHKTKAQDWLFCGEDTGDYCRRLCNFLCRKEYDMWLENPKCIKDSGGLRRAKSDKMDARAIAEYAMRNYDRARLYKEPPKILSDLRELFQYRQWLVRDKVANTLRWKIKKENLEKSSATGFVVRKNQETIKHYEKQIKQVDDKIQKLIKSDEKLLATYKILKSVKGIGPVNICCLIVYTENFTKYDYDPRKIACQCGIAPFGQESGTSVHVSPHVHYMANKTIKALLTQAALAAVRFNPLISRYYNRLIDAGKIHPVALNNVKNKLIHIMTAMVKNGTEFDENYEAKRKTRTALNTESSTVSTNEKGIYTPAEQPTDAVSQLPELPIDEAFHEASQLPELPADGASQLPEDSNQDTQMHIDFPQESMVTGHAHIPLKGSESCRPIEKSHIPI

SEQ ID NO: 223344 - protein, 408 aa, unidentified
MNSLFVGIDVGSKNNVAYLMKPDGSKHSGFSVQNNLGGAKLLSEGIVSALKSMQLSDVVIGLEATSIYGDSLVYALREDGSLGRFQRKIHVLNPKQVRKFKEAYPDLPKNDWVDAFVIADHLRFGRIAKEVYVDDYRYQALRTLTRSRFDVIQNLTREKQRFANYLFLKCSGIAQAKDIQNTSATTIALMEHFESVDDLANADLNELTAFISKAGRGKFADPNATAKAVQAAARGSYRLPKTVNDTVNQAMAVSITSMRALKEQVKTLDNAIEQQFEIIPNTLTSIPGIGKVYSAGIIAEIGDVHRFASQASVAKFAGLVWTQHQSSEFEAETTHLIKSGSRYLRYYLLEAANSVRRCDSEFQRYYDLKFHEVNRFQHKRALALTARKLVRLVFRLLKDNRLYIPLEG

SEQ ID NO: 223345 - protein, 343 aa, unidentified
MEVMIGVDPHKGSHTATMLDRTERELTRIKVRAGRRQVEQLLEWANGHEERTWAVECAGGMGYLLSQQLVAAGETVLDVPATLASRVPVLGTGQSTKTDPNDARSVAVAALHAPSLTMVRAADHVTVCRLLAKRHTDAARWRTKLCCRLHALVGELVAGGIDKEVVVNQARSLLDDIEPDGVAAVERHRQAVELVAEIEHLDVVLQDSRTRITAAVAASGTTLTEVFGVGPIVAFMLIGYSGDPTRFTTASRYAAYTGTAPIEFSSGGRVTHRLSRRGNRRLNHALHCAAITQIRHRHSPGRGYYDRKLAEGHTPREAIRSLKRRLSDVVWRHLVADARRVAS

SEQ ID NO: 223346 - protein, 332 aa, unidentified
MNYVGIDVASKELSVVFGVNGKHRKAQSFENKAEDFKRLTALIQKLSGETIVCMEATGVHHFDLAVALSRAERIKVMVINPKTAHNFAKALNQRSKTDSIDADVLASHAERMEFVPWVRPSEEALCLRALARRISAIGKMKAQLKNQLYSLTATEETPDIVITQTKTLIETLEEQINSFRSSALEIINKNDEIQKKHTLIVSVKGIADASAVQLLGELLSLPAELTVKQWVAYAGLDPRQFESGTSVSKRTRISKAGNRYIRQALYMPALVACRSEPNVASYYDHLQNKRGLKKIQAICAVMRKLLHAIYGMLHNNMPFDGDKFFKMEVANT

SEQ ID NO: 223347 - protein, 347 aa, unidentified
MVHAGLDLSRKRLDVQLMNDAGKRLGYLAVPPDADGLRLLARQVQERYGEPVRAALESMTGARFVHDQLELAGWQVAIADAQKVKGVAPLACKTDRVDAGVLAELSRRDLVPAIWLPEPAVRAARERARWRLHLVRHRTALKNRIHQTLIAFGYQGRVSDLFGRQGRQLLQRLELPEPWLNTVLASVSLIDELEQRIAAFERELRTLGADHPYVSLLVTVPGIAWILGYTIAAEIGDISRFASPAKLCGYSGLCPTVRQSGQRDRRGALAKNGPKYLRWALIEAAHTAARNPLYARRYQATKRRLGPQRGSKVAAVALARTLAEAIWHMLTRNQPFAPAGAACALAA

SEQ ID NO: 223348 - protein, 391 aa, unidentified
MTEYFDAHRPATAFDHDSTLVVAMELSGKSWQLGAVVPGVSRRPKRGLKVGDTDELLRVLERWKAEAAKAGRTIARVVVAYEAGRDGFWIARHLIERGIEVQVMQPASIPVERKGRRAKTDRIDLDMLLRTLLAWLRGEPRVCAMVRVPSEEEEDARRPGRERHKLTRERVSIENQIQSLLWLHGIYGFRARLKKAKEKLEALRMRSGASLPRETMAQLRRLMIRQRLLGEQLAEIDAAREAELAAAAKAPDPERGQRMIRLLVAICGVGLETATQLVREVLCRPFRDRRAVAAFVGLTGTPFQSGGMEREQGVSKSGDKRVRGLMMQLAWRWLKFQSDSALSRWYVERVGDAKGRIRKIMAVALARKLLVALWRYVQDGVIPEGARLAAA

SEQ ID NO: 223349 - protein, 355 aa, unidentified
MLYLGIDQHARQITISLRNDQGDVLMARQVSTKSEKINAFFERLTRERLQSDEQFIAVVEVCGFNDWLIRMLRDYRCHKVILIQPDARKKRKTDRRDAAALSELLWVNRDRLLQGKPVRGLRQVDIASNTDQENRRLTTLRKDTRRARTRIINMIRHMLRRHNLQWDMPTKTFPTKPAIAWLKKLVLSEIDRLEMNHLLADLEYIKQRLEELEKVIAERCSGSDDAALLASTPGIGEFTAIALACRIGRVERFPRAHSLANYWGLTPGCRNSGENTQRLGSITKAGSSMARWLLAQVAHQALRKDAKLREWYKRIKRRRGASIARVAVMRKLATIMWHMLTERKTYTECRAFAAE

SEQ ID NO: 223350 - protein, 363 aa, unidentified
MRFYKNQHQFYIGIDLHARTMYICVINNIGQTVFHKNMECSRDNLELVTNTFGKDIVVGVECIFTWYWVADFCAEQGIDFALGHAYYMKSIHGGKTKSDKIDSEKIANLLRGGMFPIAYAYPKEKRAVRDLLRRRLFFVRQRAELSVHLQNTNHQYNINEPLASSRMRSEVYRNTIPQKFTDPATLKMVNADLAMFQSYHDIITKLEFQIEDSMEVQDPVSYSIINSVPGLGFILSLTILYEIDDIHRFSDVGKFVSYCRLVKCSHESAGKKEKGGHNKIGNVHLKWAFSEGAVLFLRNNERGQRWHDKLVQRYGKAKAMSIIAQKLGRTVYYMLKRREAFNPDKFYGDKKIENKDSGGEHLA

SEQ ID NO: 223351 - protein, 353 aa, unidentified
METPIKQAAGIDCGMQALVVSFGLLTSNGSFTCKLTRTFSNTAQGFKQLLKWVKEISTEDVPLLFVMEATGVYHEKLAYYLIANECRVSIVLPNKVNAFAKTCISKKQDDQQASKVLAEFGCVKHIDQWQPPHPLYAALKQLTREKYQLQQELTLIKNQLHAEQTKAITAAASIKRMKARCRLIEKQIAEVEKEIIDTLNDDAAIKEKINKICTIPGVGLSTAVTVIAETNGFNLIRNARQLVSYAGLDVVQKQSGISVKGRAHISKKGNPHLRHCLHLPSFVAVKYNLPMQQLHHRIVEKQAIKMKAYVAVQRKMLMLIYTLWKKNEAYNPSIKFLEQPVEAALTELDYIRS

SEQ ID NO: 223352 - protein, 410 aa, unidentified
MRLFVGDDWAEDHHDVEVMSEAGKVLARRRLPEGVAGIAQLHALIGGFLGEEADAEVVVGIETDRGPWVTALIAAGYLVYPVNPLQASRYRERHGVSRAKSDSGDAHMLADMVRTDSHQLRPAAGDSPEAEAVKVLARTHKTLIWERTRAVQRLRHQLREYFPAALEAFEDLDAPDTLELPGKAPEPARAARLTRAQVSAALKRARRRNIPDKATAILAALRGEHLGQPEVVTAAYAATARSLIAVITTLNEQVKILQGQVGEHFGRHPDAEIILSQPGMGAILGARVLAESGDDPHRYRDGKARRNYAATSPVTRASGKKKVVAARFIHNDRLVDALRAQAFTALSASPGARAFYDELRARGIEHNDALRRLANRLVGILHGCLKTRTLYDEATAWGHRENLPQSSVAA

SEQ ID NO: 223353 - protein, 358 aa, unidentified
MQPLCVAGIDAGQRFLDLGLAPSGQTARFHNTQADIARLVARLRQAGVARVVLEAIGHYAQPVVQALVEAGLQVGIVNPRRIKAFREAEGRRAKTDRLDAGLIARFALVMSDAVRPLPDADAQALKALSVRRRQLTELIAIEKTRLKQATEPLVLESHKATLAALAEACAAIEAEISGRLARDPERAAAQRLLRSVPGIGARVCAVLITELPELGQRDRKTIASLVGLAPQVSQSGAAPPRAAIAGGRPCVRAALYMSALVAVRHDPVQKAAYQALRAQGKPAKIALVAIARRILVTANAILKTKQPYNPNFRLDPKTVAGLALRAIRNDSVHRLRAARCHPPGAGGRRATACPPPRP

SEQ ID NO: 223354 - protein, 331 aa, unidentified
MAQDEVIVVGIDVAKDKVDGCIRSLSQRQTFPSTAEGQRALIRWLRKYKVGRAAMEASGGYERNWAKALREARIELCIVDPKRVRSFARSAGRLAKNDAIDAEMIAWFAETFTDAPGQAYDAEREELVQIVNARQRLLDLQTSLQNRGEHSSPDIVQKMQARMLKQIALEVAKLETAITALVKATAHFAELAEIIESVPGIGKTTSAGLIAAMPELGRVSDNIAAALLGVAPYDDDSGQRRGNRHIKGGRRKVRNLFYMACLGAATRHNPALKAFYDRLIARGKQPKVALTACMRKLIVILNTMIARRQKWDAARHKGSDPARLPPSACPA

SEQ ID NO: 223355 - protein, 387 aa, unidentified
MYFVGIDISKYKHDCFITTETGTVIQQSFSFTNGKEGFNELLSILNSLDNSKEIRIGFEATGHYNMTIMLFLEKNNYSFMEFNPFLVSKFVSNTTLRKTKTDKKDAMHIAHYLKTKEYKPHPKQFYHKQSLKALSRRRDAIIHQRSYYLVQITNILDITFPELKPFFKNKFSATFLYLLNKYKTANKVASMKDYDSLRKVSRGKFSYPQFLKLKDLANNTVGIENDLFTFQLETFLDLFSTINIKVDVIDDKISQIIKELNPKTLGIRGIGIITCAAIISEYGDISRFSSSDAMVAFAGIDCKIVQSGTSDYQGKMVKRGSSHLRYYLLLAAEKVFMFEPIFTVYYYKKREEGKPHSVVLSHIAKKLIRVIYKLETENIEFDSSKLR

SEQ ID NO: 223356 - protein, 392 aa, unidentified
MKFVGIDIAMDKHDIIIIDDTGEIIYDHFIIQNNRFGFKKLHTVIRSCTKSVNEIRIGMEATGIYHENLRDFLISKGYTVYCTNPMLVSLSRKAASPRRTKTDKIDAMAVCRHLMHNLDRLHPYTPPLYHLQELKQLTRDYNTNREKIAKSKTELKRLLQTIFPEFLKHFDPFASWALELLDDYPLPSDYKGLHVDKLADRIQMHSNRWSQAVLLKQIAKDSIGKSDDLNSHLLRFCVSDLLHFDSQNKVLRKVIASTMNLYPKILSVPGVGPINGATILSETGNINRFSNKHKYTSLYGIDPIVHASGKYKLKHSHLSKRGNKFLRTAIYSAARVACVAPNVRPNKFRTKYLEMTARDNKHHNTIIFAIAKNMVHSIYKLLKTDSFFDDLK

SEQ ID NO: 223357 - protein, 421 aa, unidentified
MDVVHERCAGLDVHKRTVVACVLVPGEAGAVQPETETFSTMVGELERLAGWLAERRVTHVALEATGVYWKAVYNVLEGADRWTVRVVNPEHVKAITGRKTDRADAQRLAFLLRHGLLSGSFIPDRAQRELRELTRARTALVRERARVVQRLEKALDGANIKLGAVVTELLGVSGQAMLDAALQGVTDPDELAGLAHRKLRPKHDLLVQALAGRLTRPLRFLARQHLDHWRELDARVAAFDTEIADLLRPFDHLVERLDAIPGVGRRTAEVILSEIGTDVAAFPSERHLAAWAGLSPGNRQSAGRRKPARTRHGNPWLKAALTEAAWAASRCKDGYLQAQHRRLAPRRGRKRAIVAVAHSLVTSIFFMLLHDVPFEDLGGDYFDQRDRDRREQRALATLRTLGYDVALTPRPAPPAPAPEAA

SEQ ID NO: 223358 - protein, 430 aa, unidentified
MKRGVVGNQEFSIYVGLDWGTEFHRACVLDASGEVVRECQVDHSGPAITDFVRLLNAMIHGKPERIAVAIEVPRGPVVEAFLEGGFAVFSINPKQLDRFRDRYSVAGAKDDSRDAYVAADSLRTDQHCFRRVAVQHPDVTRLRELSRTEENLSGDLRRIVNQLYQLLLRYYPQLLQLNSTPEEPWIWALLEAAPLPQRGARLTVARLKQLLSKHRIRRWTAEQLHDVLVSPPLPLAAGSADAISEHALLLLPQLRLLYRQRQDIRDRIETLLDGMVAQGREGSEFQEHRDVGLLLSLPGVGCLIAANLFTEGSDPLAQRDYLALRAHSGIAPVTRQSGKTRQIIMRRGCNERLRNAMYHWARCSVQHDPLSKVHYARLRQAGHKHGRALRGVADRLLAILIAMLKSGKPYEASRRQNGRSHDDASPANNP

SEQ ID NO: 223359 - protein, 342 aa, unidentified
MDYYAGIDVSLECSSVCVVDASGKILREARVASEPEALIAWFRQSGFEFERIGMEAGPLSQWLFAGMKAAGLAVELLETRHVRKAFEAMPVKSDRNDARGIAQLMRLGWFRPVHCKSISAQETRSLLTARKLVQSKLLDVENSLRGILRGFGLKVGKTTGQTFAGRIEELVHGHPHLQMIAKALLAVRAVLRTEFAAFEKQTRRMVRSDMQARLLTSVPAVGPIVALTYASAIDDPTRFKSSKQAGAHFGLTPKKHQSGETDYTGRISKIGDASVRTALYEAANVMLTKPLKGCSQLKSWAMRIKKRAGMSKAKVALARRLAVIMHRMLADGTPFNAAAAAA

SEQ ID NO: 223360 - protein, 400 aa, unidentified
MLSIGIDVSKGKSTVCGMKPGGEIVYTPFEVQHTREGMSELVSLLRGSGEEVRAVLESTGSYHCPVVAALLENGIFVSVVNSLRMKRFCSQSIRKVKTDRIDAMQIALYGLAYWQELQPTRLPEDTYRELQLLARQYYQMTSMLIKAKVDFNAICDQVLPGMQELMNDHAGRHKLSDFVLRYRHTTHILEMGETRFRKDYCKWAEKKGYRNCERMAVLIFATAQNGIPVLPNAPSTQIVITEAIRVLHTVEASRDAILTQMQALAKTLPEYSLVREMPCIGDTLAPRLIAEIGDVRRFHSKRALIAYAGIDAPPYQSGKFCANNRHISKRGNRYLRKTGYEVMQSYVMHKPANDPIFTFIEKKRGEGKSGKLAMVAGLNKFLRVYYGKVTELYRSLSAIE

SEQ ID NO: 223361 - protein, 326 aa, unidentified
MEHELHYIGIDTAKEKLDVDVLRPDGRHRTKKFANTTKGHDELVSWLKGHKMYHAHICIEATGTYMEPVAECLYDAGYIVSVINPALGKAFAQSEGLRNKTDTVDARMLAEFCRQKRPAAWEAPHPLERALRALVVRHQALTDMHTQELNRTETAREVQRPSIDAHLLWLEAELKRLEKQIKDLTDDDPDMKHRRKLLESIPGIGEKTSAVLLAYIGLKDRFAHARQFAAFAGLTPRRYESGSSVRGASRMSKAGHVSLRRALYMPAMVATSKTEWGRAFRDRLAANGKKGKVILGAMMRKLAQVAYGVLKSGVPFDASRHNPVAA

SEQ ID NO: 223362 - protein, 408 aa, unidentified
MNPLFVGIDVSSKNNVVYLMKPDGSKHSSFSVQNNLGGAKLLSERIVSALGSMQLERVVIGLEATSIYGDSLVYALREDGRLGRFQRKIHVLNPKQVRKFKEAYPDLPKNDWVDAFVIADHLRFGRIAREVYMDDYRYKALQTLTRARFDVIQNLTREKQRFANYLFLKCSGMAQDKGIQNTSSTTIALMERFETVDDLANVDLDELTAFVAKAGHGRFVDPESTAKAVRAAARGSYRLPKTVNDTVNQAMSVSIASMRALKEQIKVLEKAIEQQFEIIPNTLTSVPGIGKVYSAGIIAEIGDIHRFESQASVAKFAGLVWNRNQSGDFEAEHSRMIKSGNRYLRYYLLEAANSVRRCDSEFRRYYDLKFKEVNKYQHKRALALTARKLVRLVFRLLKDNRLYIPPEG

SEQ ID NO: 223363 - protein, 406 aa, unidentified
MQEFNAAEQPIETAAALAAVGAGGLPGGHAAYIGLDVHKETIAIAVAEAGRGEPSYRGEIANTPKKVEKLIAKLSEAYDGGLLVFCYEAGPCGYVLYRQLIASGHDCQVVAPSRIPKAAGERIKTDRRDALKLARLLRSGDLSAVWVPDREQERMRDLSRARDDLKAQERKARQQLNAFLLRHGYHWPKGKSRWTPAHENWLAGLKMDDPWQQVALQTYIDAERAAGERVAQLTDQLMRALPEWSLAPVVDSLVALRGIDKLAAIVLLAELGDISRFDSPKQLMAFLGLVPSEHSSGGRRRQGAITLTGNTHARRMLVESAWSYRFPARQTKHLKAKASNASPAAQQIAWKAQVRLCGRYRTLTRAGKDTKLVCVAIARELAGFLWDIVRQEMPQLAQAQATPQGI

SEQ ID NO: 223364 - protein, 346 aa, unidentified
MNQIIRIGMDTSKHIFQLHGVDTAERPVLRRKLRRHQVLAFFAKLPPTVIGMEACGAGHYWARELRKLGHEVKLMAPQHVKAYIQRNKNDGRDAEGLCEAMSRPTMQFVPAKTAEQQGALMLAGVRQQLIARRTQLGNAIRGYAAEFGLITAKGLDKIEPLLARIAQDESLPKLARELFAFQGRDYARLQIELKAIELELKAWYRANADSRRLARIPGVGPIGATALVMKTPDPRAFPSGRHFAAWLGLTPKDHSTAGKTRLGKITRAGDEMLRSVLVAGATAVIQQARNGRGRPSPWLVALLKRKPPKLAAVALANKIARIAWKLMVTGESYDGARIPAASAHAA

SEQ ID NO: 223365 - protein, 330 aa, unidentified
MPQPARPPSACFVGIDVAKARLDLAVRVADAPPTAVPDRWSVPHDEAGIAALVARLIPLAPTLVVLEATGGRELPVVAALAGAGVPVVAVNPRQVKAVGTAVGQLAKTDALDAALLARVAETVRPPVRPLPAAATQQLSALLTRRRQVQGMRVAEENRLETALPVVQPRLKRHIAVLAEELAELEQELARELARQIRASPVWRERDALLRSVPGVGVVLATTLLAELPELGLLSHKAIAALVGVAPLNHDSGGQRGQRVVWGGRSRLRAVLSMAALVAKRCNPVIRAFAERLQAVGKAKKVVITACLPKLLTILNAMLRHGEPWRTPTAA

SEQ ID NO: 223366 - protein, 348 aa, unidentified
METIGLDLHKRESQLAIQAEDGTITEQRIVTSRERFTAVLGHRPRARILLEASTESEWVARHLETLGHEVVVADPNYAPMYATRSRRVKTDKRDARTLMDACGQGTYRRAHRLSEPRRHLRAELAVRDALVRTRTRYVALAKALVRRDGLRVPSSTAERVGDRVQALALPAPLAAELAPLLTLLPPLNATIAAADHQLRAREQTDPIVALLMTAPGVGAVTASALVATLDDITRFPSAHQCEAYLGLVPGERSSGEQRRIGPITKAGNRRTRGLLVEAAWRILRAQDPESAALRAWTLRIAARRGKRIAVVALARRLAGIVYAMWRDGVPYDGRKIRAPHPARGAQAG

SEQ ID NO: 223367 - protein, 334 aa, unidentified
MQNVTLIGIDLGKNSFHIHCQEKHGNTLLRKRFSRIQLTQFLATCPPCIVAMESCAGAHFMARHISQLGHQVKLISPQFVRPFVKSNKNDFIDAEAICEATSRPSMHFVTPRTEDQQAMSALHRVRDALVRERVKATNQMHAFLLEFGISMPRGIAVIKRLATVPEEHELPPYLVRLLTRLHQHYGYLCEQIEEIERELKNHLADDETAQRLLTIPGIGTITASLLATKLGDGKNYLSSRDFATSTGLVPRQYSTGGKSTLMGISKRGDKNLRRLLVQCARVYMQRLEYQSGRLAEWVNGQLTRHHSNVVACALANKLARIAWAVTTQGTVFSK

SEQ ID NO: 223368 - protein, 343 aa, unidentified
MQTITTMGLDIAKSVFQVHGVDAEGNVILRRQFKRRYVLAFFQKLPPCLVGIEACASSHHWSRELQALGHTVRLMPPAYVKPYVKRHKNDATDAEAICEAVTRPNMRFVATKTAEQQSCLTLHRTRHLFIRQQTSVINAIRAHFAEFGIVAPVGRNGVDQLLGVAADSNDKRLPEVARACVTALGAQLRMLKAQILHFDRMIMAWHRSSEASRRLDDIPGVGPVLATALVASVADPKMFRSGRDFSAWIGLVPKQNSSGGKDRLGNISKRGDRYLRSLFTTGALAVIRYAKIHGTRHRPWLTALLARRPTKVAAIALANKIARMAWAIMAKGERYKEPAALAA

SEQ ID NO: 223369 - protein, 461 aa, unidentified
MKKQKRRAAARVDQGSKLSMIQPDVAGIDIGSREMFVCGPADPQGRREMRVFATTTQQIQECVRWLKQLEVRSVAMESTGVYWIPVLEIMESSGLEVLLVDTRPLSRVPGRKTDAEDCQWLQTLHSHGLLRGAYRPSEQISELRTIVRQKAVLVRQQADWIRRMHQCLDQMNVRVHHAVKDTQGATGMAMLRAIVAGERDPRNLVKLRDPGCQKSAAEMVELLTGNWRSDHLFNLKQHLAMYDSATGQIAVYEEEIQRRMQEVTPAGRKDVKAPPLANLEKRKTMKRRDQEGKRQGQYRAMGVDLTTIDGIGVETVEVILSEYGTEMSQFPTEGEFVKHVGLAPHRPVSGGKVLKNKRKKQKGTRTAEVLRNAASSLKHSRSALGAYYRRIARRKDSGVAVFATARKLGALVYRMLRHGQQYVDVGQAEYENRYEQTRIRALKSTANQMGFDLVKQEAVSV

SEQ ID NO: 223370 - protein, 346 aa, unidentified
MTIVEDRPVITGGVDTHADVHVAAALDRIGGLLGVREFPATAAGYADLLEWLGEFGSVTLVGIEGTGSYGAGLARYMAGAGVRVVEVDRADRQDRHRQGKSDPLDAVSAARAAQSGRASGAPKGRDGAVEAIRALMVAKRSARHERTQAINQARALILTGPDELRARFAGHSTAALAAAIAALRPRPGNVPGYATRVALRELGRRVQFLDAQLERLDELIGPLVTARAPGLLSLHGVGPDTAALLLVAAGDHPERLRSESSWAHLCGVAPIPASSGKTSRHRLNRGGNREANSALWRIVITRLKSHPATRAYLERRSKEGLSKREIIRCLKRYVAREVYHQLRDGA

SEQ ID NO: 223371 - protein, 425 aa, unidentified
MKVTYLTCCGVDVHKSFLVATIIKTTGGFEPSYQKKRFSTFNNSILEFKQWLLENDCSDVCMESTGKYWVPVFNLLEDQINVTIANPKWVKAVKGNKDDTKDSKWIGDLFRLGLVKGSYIPCKKIRILREYTRYRYKLISCRSSEKNRYQNALTVCNIALDSVVSDIFGKSSTSIIDYLLEQSDNSINHEEIASKLLRRLKSKEDAVVESIEGYQMTDPQKYRMRLVRAHMDYITAEINDVDSMIESMISSDPDYENAIQFLMTIPGVKRASAITIISEIGIDMSQFCTSKRLCCWAGLVPGSNESGGKKKSVRITRAGVYLKPALVQCAHAAVKSEKSPYYKKKYESLAKRRGKKRAIVAIARMILTAIYQMLSTGEAWNPSDLYKIDMPEALVEKQKAKAIKQAMKLLEREGLYPPLKEPLAS

SEQ ID NO: 223372 - protein, 402 aa, unidentified
MISIGIDVSKDKSMVCIVSPQDNVMVKPYEITHTDKELERLCSYILSLDKEARVVLEATGAYHLPVVLKLKAHNIFVSIINPLLMKKYSSIKIRKGKTDKIDALKIATYGIDNWFHLVDYTCSKDVYDELRFLGRQYSHYVKVKIQAKLSLSNILDRTMPRITSLLTSHNTAKPSKNKLLDFVEEYWHYDNILAFGEDSFIEDYKRWTKEKGYRASDKKAKAIFNAANIGILTLSSSLPSTKTLTLENIRVLKEINKTLDTILSQMQELAKTLPEYPIVRQMSGVGEVLSVRLIAEIGDVRRFKNGSSLVAYAGLDSPPYESGQFIATKRSISKRGSSLLRKTGYEVIQCIKSIKPTEDSAVYDFVMKKQNEGKPKMVANIAGLNKFLRIYYARVKEIYSVI

SEQ ID NO: 223373 - protein, 348 aa, unidentified
MAHFVGLDVSVEETSVCVVDDVGKVLCERKVRTEPEDIAVLLTSIGGDYVRIGIEAGPLSQWLVTGLTEADLPVVCVETRHMKALLKAQQVNKSDRNDARGIAQMMRVGLFKPVHVKTLVSQEQRMLLTSRKLVQRKLMDIECDMRGTLRNFGLKVGVVSSIGYEARIRNLVEGFPRLAAIMEPLLTVRRVMRQQLATLHKLLLNAVRVDPVCRRFMTVPGVGPIVALTYRASVDQPHRFIHSRAVGAHVGLTPKRHQSGEIDYDGGVSKCGDSMLRAMLYEAAQSMLTHSKKWSWLKAWGMRVAQRRGMRRATVAVARRLAVILHRMWIDGTDFRWSNGSTAAVQVA

SEQ ID NO: 223374 - protein, 353 aa, unidentified
MDKYIGLDMDSKKTVACVIQEGQKDQYATIGSDVNSIRAFLLQQKSRGCRVHAAFEISGSAGYLYDQLVDGVDTLKIVSPSKATWIYRTAKKNDRIDARKIAVLLRLGELPTVHMPNREIRQWRQIILHRQKTVQKVGRVKNRIRALLKSEGYFQPAAGGGWWKRVNRQWMAALIQGQEKGGGLWQLQLGDLLAELTLLEAQRDRVTDHLDKYLEKHPGGGLLMSIPGVGPRTAEAVLAYTDDIRRFGHYKQYCAYFGLTPKLDESGSTRRLGHISKQGPSVVRWVLCESSWKVVRYCPALRAFYERVMAGQTSRKKIANVAVARKLLCIMRAMQMTGEMFNVKMVQEVLKVA

SEQ ID NO: 223375 - protein, 407 aa, unidentified
MSYKVAGIDVHKKVLMVVVCEVAEPESLPQRRRFGTTTSELRRLSQWLREGGVEEAVMESTAQYWKPVWYELEPYLRLQLAQAYSNRAPRGRKHDFKDAERLVRRLVADELRLSFVPTGEQRAWRTLTRMKVQLSREASRLHSQLECLLEEMRIKLSSVISDLLGRSGRRILQAIAAGESDPQRLASLGDHHLRCTQEQLIDALSGNPQALHRQLLALYLERYQLIQQQIEQLNQMTAAAMQAHSEAVTRLAEVPGFGADSAQQVIAEVGVEAATFASAAQLSSWVGTCPGQHESAEQNHSSHSAKGNRYLRRILNQAAHAAVKKNGSHFQAVFRRLLPRLGYKSAIWAIAHRLCRLVWKILHERVRYVEAGSEPSPRAKRQRAQRLLRSLRRLGYQVTVNPLPAAA

SEQ ID NO: 223376 - protein, 355 aa, unidentified
MTVTIVEEARPVTCRAAVTGGVDTHADTHVAAALDPVGGLLGVAEFPATTAGYARLLGWLGGFGTVFLVGIEGTGSYGAGLARYVTAAGIRVVEVDRSDRQDRRRQGKSDPLDAVSAARAAQSGRASGAPKGRDGAVEAIRTLMVARRSAAGERTRTINQARALVLTGPDDLRARFAKHKPAALITGLAALRPRPGDVAGHATRIALRELGRRAQFLDGQLVRLDELIVPLVTARAPGLLAVYGAGPRTAALLLIAAGDHPERLRSEAAWAHLCGVAPIPASSGKVTRHRLNPGGDRQANHALWRIVFTRLGSDAATRAYAERRTAEGKSKAEIIRCLKRYVAREVYRQLRPAVG

SEQ ID NO: 223377 - protein, 344 aa, unidentified
MQIARIGLDLAKYVFEIHGVDAHGKTVLRKTLRRHAVSTFFANLPPCLVGMEASNGAHFWAKTLLDLGHDVRLISPQFVTPYVKSNKNDRNDAEAICEAVGRPNMRFVPVKSAEQLAVQAVHRIRTRLVADRVRLVNQVRGLLGEHGIVVAKDIGNLRRALAGLGGDNEDRALNPMVRALMGELREELTELDARIVGYDRKIRELYRNSEICQRLGKVEGIGPVTATALVAAVGDRSSFKNGRQFAAWLGLVPKQRSSGGRARLFGISKRGDRYLRTLLIHGARAALGRVRDKQDPRSLWLGKMRQRRHPNVVAVALANKNARIAWSLLTSDNVYDASLSVGAA

SEQ ID NO: 223378 - protein, 436 aa, unidentified
MNREVSEMNYNTQNAKIASITEKTLIVGIDVGSETHYARAFDWRNYEYSKKPFAFNNDEAGFAAFKAWMEDMADKHGKEAVIPGMEPTGHYWLNLGAYLQEQGMKPVHVNPHHVKKSKELDDNNPNKNDRKDPKTIAGLVNEGRFSYPYIPTGIYAEIRNLSNLRIQTQEELTRIKNRIARWFSIYFPEIKDVYKNPDAVSGMMVIKKAPLPCDIKELGVDGVNQVWRDAKLKGAGLKRARTLVSAAEHSIGSTEAPGSARIEIRNLLNDYEVYKNRMDDLMREIEAKLSEIPYIDKLMEINGIGLKTVSCFIAEVGDIRRFDNPKQLQKLAGYAIVADSSGKHNGESRISHRGRKRLRYALYEAAISVIGKNKEFREIHDYYRTRKQNPLKKMQSVIAIACKLIRIFYTILTKGVDYDGQKMLSDIVRPETIMAA

SEQ ID NO: 223379 - protein, 338 aa, unidentified
MYYTGIDLHKFTSYLTTVDSVGNIVKQQNIKNVDYNFVQYFNSIPGEHKTTVESTMTWYWLNDLLDSLKIPLVLAHAKYVKAIAYAKVKTDKVDSHILAQLLRLDFIPQAHKISNENRTLRDALRARLKIVQRHTSITNSMCLLLAKYNFDSPIQLTGIAKYQYEQLEEVELLLKEQILDLEKQLYPSLIPNEDIQRLLWIPGIGKLNAFNIILEVDDIYRFDDVKNFFSYCRLVPSARNSAGKSKQRSSKDGNKYLKVVFSDAAIHAIQYYPVIRKYNNSLLRKKNKQIAKTIIAKEIANIVYHVLKKRTNFNNKFKGNDLEHTKSLQWPRVISPYA

SEQ ID NO: 223380 - protein, 364 aa, unidentified
MEHTTIAVDVASSVFEVAVSTQPGRVTERLRLTRARFAKFLGERSPATVVLEACGSSHHWARRAQAAGHTAVLLPPHAVKPYVVRDKTDRADAKGLLEAFRNEDVRPVPVKSESQQAITALHRLRSAWLAERTARLNIIRGALREFGVIIPSGAHQVVPHLLAALEDADSGVPDVLRPALAEAASEIRDFERRMKAVEVQLEAVSRQTPAVTRLRTIPGIGLLSSTALVASVTDIRRFPTSRHFASYLGLTPRENSSGLKRRLGAISKRGDTYLRMLLIHGARTVLWHGKRLQEPDRLRTWALRLERERGHNRAAVATANKLARLAWAVAVATANKLARLAWAVWKNGHDFREGLQPNDTTAIA

SEQ ID NO: 223381 - protein, 450 aa, unidentified
MRSKPNQTPVPEEIPDAEHELVIERVAAIDVAKASGKVCVRSPRERRRVSKVWDVAATTGTVTDLAGQLTELGIEKVTVESTSDYWRIWYYLLEAAGLEVQLVNARDVKNVPGRPKTDKLDAVWLAKLTEKGLLRPSFVPPTPIRQLRDYTRLRVDLTRERARYWQRLEKLLEDALIKVSSVASKMDTLSVRDMIEALIAGERDPRRLADLARRRMKAKRLALIAALDGRFDDHHGELARMLLDQIDALSAQIVTLTTRIEALLEAAEPDDAGDRAHPPHDVGAAPAGPSTIERLTEIPGIGPTAAQIILAEIGRDMTQFPTAAHLVSWAKLCPRTIQSGPVTRGGKTGKGNPYLKGALGEAAAAAAKTDTFLGERYRRIVKRRGKLKALVAVARSILVVIWHLLNDPAARFRELGSDYHTRRIDIERRMRTHIAHLTAMGYRVTLEPAA

SEQ ID NO: 223382 - protein, 326 aa, unidentified
MQGKEVSEQEAAVKSSAGIDVSKSWLDVHVVPAGATLRVANTRDGIRKLKRWLMQFDLNLVVIEATGKWHREVRRSLHAADIAVAVVDPFRVRMFAKACGVLAKTDRIDARVLAQFAAVMAPAVRAPAPQVLEQLAELVTARTSAVAEETALKNQLSAAMAPFLKRQLARRIKCIDKDIAAIAHEILRCIHADPGLARRYDILTSIAGIGPVVATTLIACLAELGTCSRRQISMLAGLAPVADESGERQGIRVVWGGRPNVRRVLYLAAITAARFNADMKAFFDRLTVDGKAAKLAIIAVARKLVVLANTLIAENRPWQPHSPKYA

SEQ ID NO: 223383 - protein, 353 aa, unidentified
MITPKLDIILGIDSHRDTVVCAALDELGRRLAVRSFPTTSAGYGALLTWAHGLGTVRDAGIEGTASYGAMAMKYLRAVGIRVTEVNRPDRARRRRRGKNDATDAENAARAVLSGDAEAVPKAQDGAVEALRTLMVVRRSAVKARTQAGNQLRALLVTAPPSEREALGRGTLATSMARCARLAQDASDVLGRARQQALRALACRWLQLTGELRELDAAIAKLASATAPRLLSRFGVGPHTAATLLVAAGDNPERLRSEAALAALCGVSPVEASSGQTTRHRLNRGGDRQANNALWTIALVRMRSDTRTRAYVERRRAEGRSLKEIMRCVKRYLARELYPLILADLSSQRQTALT

SEQ ID NO: 223384 - protein, 317 aa, unidentified
MIEARKVVGIDVSKATLDCAAVPGRASLQVSNDESGVAQLISWLGELAPDLVLLEASGGYETSAATALAGALFRVGVVNPRQVRDFAKAKGILAKTDRIDARVIAEFGLVIDPQVSALPDEDTKALQGLLGRRSQLVAMRTQELNRIQQAAAAVRPQIKDHIAWLNEAIRRCDIDLTAKLRSSSAWKAKDDLLRSMPGIGPINARMMMACLPELGRLNRQKISALVGLAPFNCDSGTFKGQRRIWGGRAQVRETLYMAALTAKRCNPVIRTLYERLTARGKPHKVAMVACMRKMLVILNTMAKNNVPWNCSTQTAGN

SEQ ID NO: 223385 - protein, 312 aa, unidentified
MIEHSYGGIDVSQDRLDVVVLPQGKGFSVTNERAGWNALIERLQGLPLVAIGLEPSGGYERGVLCALLGAGLSVRRINPNRLRQFARARGALAKNDRLDARLIAEYVAIMPPRAVRHDPAAGRIAEVVTMRRQLSDEHVAVENQAAHLEDAMLRRLAKRRLARLNADIRLLDKRLAEMVAAEPALARRYEVLASMPGVGPVLAFTLIALLPELGEMSRKQIAALVGLAPYDFDSGKLRGHRSIYGGRMPVRNVLYMAALSACRYNPALKAFRDRLVGARKKPKVVIVAVMRKMITTLNAMLRDGAAWQPRSA

SEQ ID NO: 223386 - protein, 400 aa, unidentified
MPNFVGLDWGGAGHAVCVVDDGGRIVARLETRHDAAGLADLLARLGRIAPAGELPVAIERPSGLLVDTLAAAGHPIVPIHPNVVKACRPRYRSAGKSDPGDAYMLADILRTDGHRFHPLAPLSDEIRALRALVRGRDDLVVQRVAMANQLRALLQGFWPGAAAVFADIDSAIALAFIRRYPTPHSARRLGEARMAAFLAQNAYCNRRSPAELLARLKAAPAGQTGEAETEANGQLACALAELLRNLLSQIANITGRIEHAIAQLPDGRIVMSFPRAGRVCAAQILAELGNVRERFQTHDQLAAEAGVTPITRQSGKHRSVVFRWACNKRLRNAITGFADNSRHASQWASAIYQNARTRGCRHAHAIRILARAWIRVLWAAWTQKTTYDPTKHNAAKQIPI

SEQ ID NO: 223387 - protein, 333 aa, unidentified
MSRIGNLLEVGIDVSARELMVAASRDRQLLGRCSFENTAEGRAALCRWLGSRGKTVRVCLEATGIYGLELCLAVERSGGEVMLLNPRVSADYAKARMQRSKTDATDADVLLDYLQRMPFVRWVVPAPERLKLRAMLRRISAIKRMVVEEKNRLAAAEAVDEMTDLVRNDIEVTIGHLERRIALMDRQALELVRAEPSLLRCYELLLTVSGIGHVTALLLTAELMMLPADLTARQLVAHAGLDPRRFESGSSVHKAPRISKAGNRHIRAGLFLPALVAIRHDAYVRAFHDRLVARGKKPISATVAVMRKLLHAIHGVLASQTPFDSTRFTPMPT

SEQ ID NO: 223388 - protein, 331 aa, unidentified
MQRKETFIGIDVSKETLDVAVSGSLHHIRITNGADGFKQLQAWLKALKISLENCWFVFEHTGGYEYRLVQFCISKSIRFTRFAGVEIKRSMGIQRGKSDKVDSKRIADYGYEKREKMIPEKPGSAAILRIKQLMTQREGFIKDKKANEHRVKELLSMMDFKNSDMIIRNYRMAVAFAQKMIERTEQAIKEEIERDDALKNTYELLISIPGIGNVNAWLTIAFTENFTRFDSARKYGSYCGVVPFDYSSGKSIKKKSRVHFMANKDLKAKLDMAAMAAITHDKEIKEYYDRRKALGKHHNSIKNEIKFKLVLRMFAVVKKQQKYVDNYKIAA

SEQ ID NO: 223389 - protein, 412 aa, unidentified
MSHGHVMWVSREAAFRSTDDWKDTTMPSAISPPKAVLGIDVGKSSHWACLVTREGEVALNRRVRNSEGDLDGLFSQVACDTIVVVDQRRNIGLLAISRARLAGLGVAYLPGLAAHQAARLFAGDAKTDERDALVIAKTALGIPDALLPVPEPDEALEAARSLAAQRSHMVTCATRDKNRLRSILLESCPAFEALADLGDRHWLNMLEKLGGPWGCIDAGKPAFGAVTKGANRARMDAAWNAAMASTRPSKRRVDAENPQVRMLARRIREALEEADGIDREIAALLAGDGTYECLVTIPGIGPRTASELVIGINIEDFPDHDHLASYCGIAPRNRQSGTSISSVSASRQGNRRLKNLLIFSCNSLVRSENRFGEYYRACRGRGMCHGEALKAVARKRLKVIYAIMRDKVPYSA

SEQ ID NO: 223390 - protein, 436 aa, unidentified
MIKVLYPNCAGLDVHKKFVVACRVRMDAGGNTQKQMRKFSTMRADLEEMAKWLQESGSTHVAMESSGVYWKPIYNILEGLFEVVLVNAQAIKRMPGRKTDMKDAEWIATLMQHGLLQGSFIPERQQRELRDLTRYHQSLVEERSRFANRLQKLLEDTNLKLGSVATDLQGVSAQAILRAIAQGETDPKTLAEMTHGSLRSKRNEMEQALVGTVSNHHRFMLQQLLTQLDFLNQQITQIDARIEEQLANMPAPFEKAVQLLDTIPGVNRPLAIVIVAEIGIDMSRFPSDRHITAWAGVAPGNNETGGKQRSGKTRHGNEHLETALVLAAHAAARTKQTYLRSLYNRLASRRGKQRAAVAVGRTILQAAYFMLKNGETFVELGQDYLDKLDRERTAKRLVRRLKKLGFEVNLIEQDTAHTSDEYLRALPNQLLLPTTG

SEQ ID NO: 223391 - protein, 423 aa, unidentified
MLEETQDEQEIIERVAALDIGKAELVCCVRVPDPAGGSRRVQEVKTYSTMTRSLQVMADRLMDLGVTRVVMEATSDYWKPAFYLLEAHGFQTWLVNARDVKHLPGRPKTDRLDAVWLCKVAERQMMRSSFVPPIPIRRLRDLTRYRVALVSDRTGEKNRVEKLLEDAQIKLSVVASDIFGVSGRDMMAALIAGERDPRVLAQMARSRMRTKIPQLQEAFVGYFTDHHGFLLTKMLARIDALSSDIADLDVQIEAQIAPFADAVARLDEIPGIGPTAAAVIIAEVGTDMTRFPTPAHLASWAKFAPGVKESAGRKKGNGATGHGNRYLARVLGEAAVSVGRTDTFLGERHRRIARRRGKKKAIVAVGRSILVIVWHLLGDDNAHFHDLGSDYYDSRINPERTKRNHIRELQALGFKVTLEPAAA

SEQ ID NO: 223392 - protein, 281 aa, unidentified
MKRKLVVGIDVGKERYAVSLFDGERFRDFSVPSSPQELLRRVTPYLPGKTRRVLFVMEATGVYHLKLALFLKERGYPVSVVNPFVVKKYAEMLQKKAKTDPVDARILAQFGFFASPPPFVPKDKKAYLLEEIQKTIEDYQKRRTEILNHLEALKHHPFPHPRLQKLYEEELQRIKETLKALEKEAEDLALQYAPRAYELLLSIPGVGKRLACAILGILSPLTRFARSKELASFLGLTPQIDQSGKRKERAWMKKGESLPAETPLSFRPQCFPVQRAVQGAL

SEQ ID NO: 223393 - protein, 311 aa, unidentified
MEHAYFVGIDVSKAHLDVHVRPTGDSFRVPHDDAGFATLLERVRPLMPTVVVLEATGGYEMPLAATLAGAGLPVAIVNPRQIRHFARATGQLAKTDLLDARVIALFAEAIRPTPRLIPDEQAQALGEVIARRRQLVEMLGAELNRRRLLRDRRLQHHLDAHIAWLEEALRRLDHDLTTLIRSTPLWREADDLLRSVPGIGPVTACTLIADLPELGRLDRRRIAALVGLAPIARDSGTFRGRRMIFGGRGHIRRVLYMATLTAIKHNPAIRAFHHRLVAAGRPGKVALTAAMRKLLTILNAMLRDHRPWQST

SEQ ID NO: 223394 - protein, 361 aa, unidentified
MTGMVTYAGLDVHVRSTHAAAIDVSTGELLRARFGPGVEEPVAWLRSLPGPVRACYEAGPTGFGLYRAASAAGVAVEVIAPGKTPRGPSDRVKTDRKDAELLARLLLAGSLTSVVVPPVEVEAARELMRSHDACRRDLMTARHRVSKMLLRHGRVYPESSTWTVAHRRWLSAQQFDETASELVFADLIASVDGLTARKSAIAERLSRLAEDEQWWPTVARLRCFRGIDTLTAFALHLELGGDWQRFKRANALSAWLGLTPSLHQSGESSHQGSITKTGSGFARRLLVESAWHYGRPPRIGATLQNRQQGQPDHVLQIANRAQQRLHRVYHRMRGRGKAHNVIVVACARELACFLWAAATAD

SEQ ID NO: 223395 - protein, 429 aa, unidentified
MNLIPVAGIDVGKRFSEMAVLSPSNEVFARIRINHDSFKNFEKAFELLKKAEKEFAAKPVVVMESTGHYHKILFHALNNVGYEVSVINPIQSDSIKNIGIRKVKNDKVDARKLALLYRFEQLKGTKIPNEDIDCLRSLCRHYYKLSDQLTAYKNKLLGIVDQLFLSFTDVFEDVTSVTALAILDKYPTPEDILNADRDELITLIKKSSRKNLKWATAKYELLCSKARDFKPLSINSIANTAMLKANLSMIKTLSQLLENALDAIHELIEQDSQKDMPLLSLTIDILCSIPGIGILTAVTIIAEIGDFSAFSKPDKLVAYFGIDASVKQSGQSEGTKNKMSKRGSRLLRRVLFTTALANIRKKRNGKEHNPVLYEYYRKKCVSKPKKVALGAVMHKLVLIIYAVMRDRKPFVLRKPEEHAAMLKAKNSAA

SEQ ID NO: 223396 - protein, 417 aa, unidentified
METYAALIAIDWADRQHAVCLYDQRTGKREESVVKQTPESLQQWVLSLRARFAGQPLAVCTEQSRGPLIYALLQYDFLVLYPVNPATLAKYRQAFSPALGKDDPSDADYLLDLLQHHRDRLKAWRPDDEQTRTLRLLVEQRRRLINDRTRISNRLTAQLKSYFPQVLDWFPDLCTLLVCDLLTRWPTLTALQKARPATLLKFFQAHHSVRAATNERRLTELKTAVALTSDAAVLNCSTLMVKVLVAQLRTVWAAIAEYDRHIEALCQTHAEYELFASLPGAGPVYAARLTAAFGSDRSRWKSADELLCLTGIAPALERSGKQQWIRWRYFCPKFLRQSFHEYAAESVHHSFWAKAYYNMQRLKGKKHHAAVRALAFKWIRIIWKCWQTRTAYNELLYLESLRRSSSPLLKFIANNQG

SEQ ID NO: 223397 - protein, 347 aa, unidentified
MRFYNGQHRYYCGIDLHAKTLYVCILDASGNVLVHRNLHSEPKAFLELIAPYRDDLVVAAECTFTWYWLADLCAKESIPFVLGHALAMKAIHGGKAKSDKIDSEKIAVLLRGGMLPQAYVYPAEMRATRDLLRRRLHMVRKRGQLLAHIQNTIHQYNLPAFEKRIASPANREGLVEHFPDPAVQESIAVNVALLERYDELLSKLELSIVRQAKRHDADAFHRLRSVPGIGKILALTILYEIHDVNRFSRVQEFASYARLVKCAHESAGKKLGTGGAKQGNVHLKWAFSEAAVLFLRHGGEHQKLLARLQRKHGKGKALSILAHKIGRAVYYLLARKTVYSAEKFLKA

SEQ ID NO: 223398 - protein, 454 aa, unidentified
MTLIYRRCAGMDVHQKSISVCARIRTARNTFTTETAVFRTFTQDLEKMAVWLRERRIRHVAMESTGVYWKPVWNVLEAGKRGFALVLVNPQHIKALPGRKTDQQDAERIATYLQEGLLRGSFVPPQPTRELRELTRRRTHLQGDRNRVINRIIRLLETANIKLSSVLSDVVGKSGRAILNAIVSGETAAGDLATYTSSRVKRSREEFELALEGRYSDHLRWLLGQLLEELDHVDRRVALVDLRIGQLTQPHTDLIARLCTLPGVDIITAHIILAEIGTDMSCFPDARHLASWAGLCPGNSESAGKRFSGRTRKGDRYLRRVLIQNAWAVTHMKDCALTALFHRIAARAGMKKAAVAVAHRILMLAYYIIRDGSLYREAGGDVYDRRNPERTAKRLARRLQRIGFEVTITPGQRSMPSPQGPPLPGQTCSKCNAWGIACIHVRPRQTKPRNKLTR

SEQ ID NO: 223399 - protein, 391 aa, unidentified
MIFVGIDVAKDKHDCFILNSEGTVLADVFTIANNRIGFETLLSRIQSCSQGESKIKVGLEATGHYSYNLLGFLLDSGLATYVINPLHTNLYRKSLSLRRTKTDRIDARTIAMMLMSDVDLKSYSNTAYHNEELKSLTRYRFDKVKERAKLKSSVARLVNILFPELEKLVSSLHIAVVYALLSNYPGASYIANANTEELAETLCTASKGRYTKSKTAKIQVAAGVSIGSKMPAKSMELKHTIALIRELDKEISEVESAIDKITSQMDSPIFTIPGIGRHMGAMILAEVGDFSNFASADKLLAYAGLSPSTYQSGQLQNCYAHMEKRGSRYLRYALFNAAKYVCLWCPTFSAYLEKKRSEGKHYNVAISHAAKKLVRLIFAMQLSGKAFLADY

SEQ ID NO: 223400 - protein, 437 aa, unidentified
MSDQKALELRVSVDVGYRRHSVAIGLPSGEVLEEFEIAHRPEGFEEFFSRIEKHHKARRCGVAVAMEGYNGCARPLDRMVRRRGYRLYNINNLKLARFKEIFPGAAKSDRIDARKGLELFQLSDHLPLAKEVLQEVKGTPQENEVLKRLTRRRRRLVDERIRVISNLQTDLQAVCPGLLEMTKNAGNQWFLNFLVSAQSLPQLARLRPSTLLKIPAVGRKYARLIEDWQKRAHFSEEVEWVSEMIHEDAQRGLELDEKIKALKAKIKEVAKDSKMAKILLSIPGFGTICSAELAGEIGTIERFSKEGSLALYIGMSTLDNSSGKYQGSKQPKHVNTRAKAAMMIALDRHRKYVPESQRYYEKKRSEGKKHNQAIRSLGRHLSRIIYKMLTEGREYEMRPEKGNTKGKVSPRSLIKTQIRKPKISAKGKNNNIYQQNT

SEQ ID NO: 223401 - protein, 345 aa, unidentified
MQTTQVAVDLAKSVFQVAVSHAPGRVDKQHRLSRQRFRNFFLHHPPTHVLMEACGSAHHWGRELQALGHQVSLLPPSHVARYRQGNKTDRADAKALLEAARNEDITPVPVKSLDQQAINALHRLRSGYLGTRTARINAVRGLLREFGIPVPLGARTFLAKAHLTLDDDTLPAYLRAALTQALTEIKELQAKADDLKSQLEHLAPLIPGVPFLMTVPGIGILSATALVASVGDVHRFPSGRSFAAYLGLTPRESSSGGSRRLGPISKRGNRYLRVLLIHGARSALLAAHRSREPDDLQAWALRTAQARGHNIATVALANRMARIAWRVWRDQRPFQRRFTAQEDAA

SEQ ID NO: 223402 - protein, 315 aa, unidentified
MTSTQVFVGIDVSKKQLDLAFRPEGRFAAPTDEAGFAQVLGRLSTVSPALGVLEATGGIAIPLAGALAAAGVPVVVVNPRQGRDFAKAAGKLAKTDGLDAHTLAHFAEVMRLELRPLPDEQTQTLAAILTRRRQLVERLTAEKNRLGQARKPVRKSLRAPIAWLKRELAQTDRDLAHTIHESPVWREKDDLLRSTPGVGPVLTTTLRANLPELGTLTGQPIAALVGVAPLNRDSGTWRGKRTVWGGRAQIRATWYMAAVVAARVNPVIRACYQRLCAAGKAKTVALTACMRKLLMILNAMLKHRTPWRTELVHCA

SEQ ID NO: 223403 - protein, 410 aa, unidentified
MEILHPHCAGLDVHKESVVACVRHVADSRVTSQIKTFKTTTQELMALSEWLSTEGITHIAMEATGVYWKPVWHILSDGEFELVLANAAHVKNVPGRKTDVNDAVWLADLMAHGRIRASFVPDEPTQQMRDLLRTRKQLVRERSSHTQRIQKTLEDANIKLDSVVTDILGLTGRRILQALIDGQTAPHALASLAHWRIEATPAELEATLRGRVTAHHRFMLKLHLDQIDSFDAAIARIDKEVDANVEPFRAAIKLLTTIPGINSLSAETIVAEIGIDMTRFPTAGHLISWAGLCPRNDESAGKRRSTRMKKGAPWLKTTLIQCAWAASRKKNSYLQTQYLRLRSRRGPKKAIGAVAASILTAAYHMLKDGTTYQDPGPNHFDNRAKAKLALRLVNRLQTLGFNVHIAPSTA

SEQ ID NO: 223404 - protein, 335 aa, unidentified
MTITTVGIDLAKNVFAVHGVDQNGRTVLVKPKVSRAALPELIASLPPCVIGMEACSGAHYWARLFRQYGHEPRLMAAKFVSPYRMAGKSGKNDAADAQAICEAVRRPHMRFVPVKDESQQAMQCLHRTRQGFIEEKTATYNRLRGLISEFGVIAPQSADALRHMVSVQKSSLPLQVQQCVDDLMEHVDRIEANITEYDRILSHIAKTDHRSQRLMELKGVGPTTACALVASIGNAHDFKNGRQLAAWLGLTPSQYSSGGKSKLGRITKAGDSYLRTLLVQGARSVLIGAGKRTDSFSRWVCMLVERRGYWRAVVAIAAKNARLCWASLHYGDDFR

SEQ ID NO: 223405 - protein, 348 aa, unidentified
MVVIGTDSHKRTHTVVAVDGNGRKLAEKTVATTPDGHLELVRWARRWRERTWALEDCRHLTRRLEADLLRAGEHVLRVPPKLMAGARQSAREPGKSDPIDAISVARAALREPNLPTARLEGSERELRLLVDHRVDLITDRTGHQARLRWFLVELGISEPPPRTLGRAAVLAGLEAELANRPELSARISRDLVVRIRELTLAIDALEREIQTRIGVLAPTLLSLAGCGPLSAAKLVGETGGIDRFRSRAAFAAHNGTAPVPVWSGNIVRHRLNRGGNRQLNLALHRIAVTQLRMIGPGRDYVAHRMAAGDTKTEAIRALRRRISDEVFRRMMIDHAALAAREERTVAAA

SEQ ID NO: 223406 - protein, 385 aa, unidentified
MPKLKDLSRSLITLEQDATLIAVIDMGHSSWLVAGIVPGIERQPLKKLGVDESALLKLLYRWREEAEKAGHKIKRIAVAFEAGRDGFWLARWLNAHDIETHVIHASSVAVSREHRRAKTDRLDTELLKRCFLGWLRGERDHCKMVAIPTIKDEDAKRPNREHESLVGEQSRIINRMKATMARVGIRGFNAKLKKAAERLDGLRTPEGEPIPPNTLAELRRDMVRRRLISDQIKQIEDARLGRLTQAPSDGPHTMVRLLARVIGVGVETADMLVQEILSRSMRDRRAVARYAGLTGSPDESGKKRREKGQARSGNARVRRGMIQLAWRFLIFQKDSALAQWFRARTENARGARKTMIVALARKLLIALWRFVREGVVPDGVVLRPA

SEQ ID NO: 223407 - protein, 285 aa, unidentified
MKKFTSFCGIDVSKDTLDYCIYHANNDKAIYKQITNDAESIKKVFSSSKFDNILFILEATGNYSSKLIYGLKQLKRPCQVVNPLRSKAFMVAMGYNNKNDKQAAYCLSKMGQQSNHNNLYEMPSKEIEMRKQQLSVLQSLIKQRLMLENQIHAIKQLAIIDQTAIECLEKALEIIKEQIAIIEKKMYQPSKDKDFKAKKKLAQSVVGIGAKTAIALLIATNGLNNFDNANQLASFLGLTPYSHYSGSSVRKKGKITKHGSSQVRALLYMATTSAIRYNKTCKDLF

SEQ ID NO: 223408 - protein, 406 aa, unidentified
MNKLFVGIDVSSQNNVSYLMDSDGVKYSSFSVQNNLGGAKLLTEKIVSAMETLKLSDVVIGMESTSIYGNHLVHSLREDGTLGRYQRKIHVLNPKQVSKFKEAYPDLPKNDWVDAFVIADCLRFGRIRSEVYMDDYRYEALKTLTRARFYAVQNLAREKQRFANLLFLKCSGLAQSADIKNTSSTVLSLMEEYETVDDLANADLEDLTIFVTAAGRGRFADPENTAKTLQAAARGSYRLPKTINDSVNQAMSVSIATMRSMKEQIKVLEKAIEQQFEIIPNTLTSIPGIGKVYSAGIIAEIGDINRFQSQASVAKYAGLVWTQHQSGNFEAENTRMIKSGNRFLRYYLLEAANSVRGCDPEFQRYYDLKYHEVNKGQHKRALALTARKLVRLLFRLLKDNRLYNRW

SEQ ID NO: 223409 - protein, 482 aa, unidentified
MAKRKKSTFERLQDGHLNRQQRKELQRKFDADSAELVIVHAHAAGIDVGSGSHFVSVPPDRDEMPVREFGSWTNDLRKMAKWMKSCGITSVVMQSTGVYWIAVYDALEQAGFEVYLVNARGTKNLPGRKSDVQECQWLRKLHTYGLLRKSFRPPQQIREVRTLWRLRSRVLEDSSTSVQHIQKAMITMNVQLTNAISDVSGVTGMKIVRAIVAGERDPSKLAKLRDRHIRASEEEIAHSLEGNWQRDVLFELQQALETYDYHRHQLRKIDAELEGYMAALPTREVVGEVSAEASNLSAKLRKKLKANRKTKDNRPAFDIGAELARLMGVDLRLIDGIDVMTAQTIYSELGADLSAWPNEDAFASWLELTPRNDITGGKVIKKKKRPSNNRVTTALRNAAEALVRSDSYLGAKYRQFTRRLEGLKGVKAMAHYLACLVYRVLTKGQAWVDRGAAYHEDKRHQRELAGLQLKAAAAGMKLVPLA

SEQ ID NO: 223410 - protein, 400 aa, unidentified
MELDTSRTPVGIDLAKDSFAAAVSDGESEVVRAFPLSREGLADLIHFLEPYGPFPDAFVFGLEASGPYTEPLLSWLLQRHARVFQLNPLLISRFRRAQSLRRTKTDAIDARTILHFIGQLPPSVQPCEPGDDLQALAAEYEQITQQVARLKTQIRQQVHALFPELAGSSTLFSQRILHLLLAFPSAHAIALATPAQLEAACKDLPSGRRSRLTALSLYDSACASIGCSTPQREAVLQSKIRQLQTLVQESSTMRDALIRAVRAAHPTAWRLLLSIPGLGPITTALFLAQVRSLSRFPSHRQLSAFIGIDPTTYESGQFKAQGHISKRGSPHLRRTLYLMAQSVARYSNTFRLYMDQLRARGKAYRVAIIACANKLLRVIMALNRSSTLFVDSSLQEVSHS

SEQ ID NO: 223411 - protein, 367 aa, unidentified
MKKVSTAAAKQSKNLSQQKLTIGLDLGDRNSWYCVVDEAGQMQLEQRVRTHAKALQEVFGAMPRSRIALEIGTHSPWVSRLLSELGHEVIVANARKVRLIGESRKKDDRLDAQTLARLARIDPELLYPVKHRSAQAQADLMMIRARAGLVRARTALVNTVRGLAKSYGERLRGCNVRNMNPEKAEGLSPELQAALEPLLNAIQSLSERIVEYNERIEALAQQSYPQVALLKQIKGVGTLIALTFLLTLEDPHRFQKSRDVGCYLGLQPGRRNSGRSEPQLHISKEGDPYLRTLLVQGAQPILGPFGIDCDLRRWGLRLAERGGKSGKKRAIVATARKLAVLLHHLWISGEVYEPLHNSSRATVAAAA

SEQ ID NO: 223412 - protein, 364 aa, unidentified
MDNATHLGLDVHKDTIAVAVLRPGQIEPDERTIANTPEALRALIRRGSFEYPVACYEAGPTGYETHRLLGTLGVPCDVVAPTMIPRRAGARVKTDRIDARNLARLHRAGELTPIRVPTPSEEAIRDLVRVREDIKDDRRRTQHRVKSFLLRQGRRYPGRDKGWSDKFDLWARSQRFEEPAADAAYRHYLAALDVRRSQLATITAEIDAAAQLPLLAEPVAKLRCLRGIETLSAVSITAEVCDFRRFPSAPSFMAFTGLVPSEHSSGPSVHRGSITKTGNAHVRRVLVEAAWSYRHRPAIGINLRRRSEGQPPEVLAYAWAAQCRLYSRFHSIAATKNRNVAVVAVARELSGFIWGLMTDRVDVA

SEQ ID NO: 223413 - protein, 350 aa, unidentified
MMEGTGVTMGWDVGDKFTEVCALGADAAILEQEHVRTTKHSLEKQLARHPGALVVLEVGVHSRWISDLVRGRGHEVIVANARQVQLIYKRKSKTDRSDALLLARLGRFDPTLLAPIRHRSKSAQLDLACLRGRDMLVSARTDLINHVRGILKPFGVRVPDCGSGAFVRHAEEVVPQELVPALSPVLECLRVLEGELGHYEKQVQQLAAVSYPETARLSQVGGVGPITSLAYVLTLEEPSRFKASRTVGGFLGLTPARDQSGESDPQKRITKAGDPFLRKLLVQCAHYILGPFGQDSDLRRWGLRLAERGGKAAKKKAIVAVARKLAVLLHRLWVSGKDYQPIGYGSTVIG

SEQ ID NO: 223414 - protein, 304 aa, unidentified
MTKSTWVGLDVHQDSITAAILRDDSTQPEVVRLSGDLMKIRRLFRRLSAEGPVRSCYEASGAGFVLHRVLADDGFHCEVIAPSLIPKKPGDRRKTDRLDAVNLAHLYRGGHLTPVHVPSSEQVELRQLLRLRGRYQQQAKSTKLRITSVLRSHGYRFTGTRSLWTKQHRRWLEQTRRELTGPLHIVIAAELEHHEYLEMQRTSFDAEIARVAQSPAYRRSVEALCCFRGIQTLTAMTILCEVGDIRRFDSPRRLAAYLGLVPSERSSGDIQRRGPITKAGNSHARRLLVEAAWAVFRAKDPDVA

SEQ ID NO: 223415 - protein, 334 aa, unidentified
MSNVTTCGIDLAKNVFSLHAVDGRGAVVLRKTVNRARLVAVVAQLPPCLIGLEACSGAHEWARRFAQHGHTVRLMAPKFVAPYRKSGKNDCNDAEAICEAVSRPSMRFVPVKSVEQQAMLTLHRVRLGFVEERTATINRIRGLLAEFGVVMPQRVVEVRRGAAATLDQLPTLAQRALRDLLAHVRVLDERIGEYERELEQHARTDERAKRIQKLSGVGPISASAIASSVAEGHEFKNGRQFAAWLGLTPKQYSTGGKSRLGRITAHGDAYLRTLLIMGARSMLQTALRRSDRLARWALAVRARRGYHRACVAIAAKHARIIWAMLAKNEPLQLT

SEQ ID NO: 223416 - protein, 343 aa, unidentified
MTVKQAVGIDVAKKELVVSIGRMSHDTGVDIYAHKTFSNHARGFMDLVAWVDRMTMRGVQTRYVMEATGVYHECVAYYLSGHGHQLSIVLPNKISNYFRTLDVKTITDKTASQAICQFGLERKLDDWQRPKKVFRELRQLTRERDQLITDRTVLKNQLHAEMAEAFPNQGSIRRAAERIQLINGQELEIRAELAGIIKRDAELARKIGLITTIPGVGRLTAVTVLAETNGFELISNKKQLVGYSGLDVRLKDSGTSVKGKPRISKRGNRHLRKAMHMPALAAIRHNREHKMLFVRLVSGHGIKMKSVVAVQRKILELIYTIFKTDKPFDRDYVRIEVPEALNG

SEQ ID NO: 223417 - protein, 442 aa, unidentified
MQEGWRGAVGVWCAAASINRRWDVPAAAADRGSHAKVTGLPPAAQTAGALTSSRTQVIEGYRRPVMRIVGIDLGVDHIHVCEIVEGVVQRASLRRLSELERILGPGSEPAQVGFEACREGWHVYDQLKEWGHEPVMLDTTRIRQIGVGQHRRKNDALDAEVIARAIESGRYPKAHVLSPARRKLRAQLSIRSALVETRTKHIVTIRGLMRAMGLRIASSRPDCFLKKLEEAPVPETLRAELAPLVAVLEVVQEQLERKDEELVALAKADDTVKLLATAPGVGLIVAATFVSVIDQASRFKSAQAVGSYLGLAPSESTTGGTKPRLGSITKHGNSMARAMLVQAAWQIIRSKDENDPLYQWVQHIRAKRTGKVAATALARKLATVLYAMWRDDNVYDGGKEARASRRGVTRSAQTEQLRALKLHKAEGKFERRKHKPVISEAT

SEQ ID NO: 223418 - protein, 388 aa, unidentified
MLSGRVTNRARYMENRMRLDIRDVPPTCVGIDLHKDTLTAAVLNRLTGEISFVKLSCKCRQQIIEFFSKLPRPHVVAIETVGFYRWLWDLLEPICDKLVLADATQCRALAGRRLKTDREDASNVAELLSAGRCPLAWAPDSLVAELRSRTRQRNRLSRWHAKVLHVVKSVLNSVNFPGPSRADAAALHRWLEGAHAKLADHHRVVIEDAVDQLVMIERQIERAEREITRIVQGDRFKRNYEILDSIPGVGLVSAATILAEIGDFKRFGDRRAIACYAGLTPRVYNSADTVRHGRISKAGPRDLRWVLQQAAWTIIRDDGHTRGVFTRISKRAGRKKAAVAIARRMLTWAWTIVGKDELFVRKTINKLDATNGDTTKSANKAERRKRTA

SEQ ID NO: 223419 - protein, 387 aa, unidentified
MAQVNDLSRSLTAFDPISTLVVVVEMSKASWLVSGAVPGVERQPLKKLEPDATALLRLIERWRNEAVRAGRPISRIALAYEAGRDGFWLARWLIARGIEAHVIHSASVAVSRERKRAKTDRLDAAMLMRVFLGWLRGERGHCGMVAIPTMEEEDARRPGRERESLVNERSRITNRMKSALARLGVRGFKPHLRKAPERLAGLRTAEGTGLPMNIIEEFRRDMARLALVREQISSIEKTRAERLERAPDTGPHAMVRLLARVIGIGIETADMLVREVLSRKLRDRRAVARYAGLTGSPDESGLKRREKGLAKAGNARVRRGLIQLAWRFLVFQKDSALARWYRTRTEGPSGARKTTMIVALARKLLIALWRLVTTGEVPDGVKLRPAL

SEQ ID NO: 223420 - protein, 345 aa, unidentified
MDLGDKTSRYCALDRNGEVVREGCVGTTKKAMTQVFGAMPRCLVAMEVGTHSPWVSRLLGRLGHEVIVANARQVKLISASSRKDDRLDAQTLARLARVDPQLLRPIRHRSEKAQGHLMTIRVRAGLVDARTSLVNAARGMAKAVGERLPACDTDQMGVEKMQSLPPELQETLQPLLQSVESLTEKIKACDVKIEQIARSEYPETELLRQVSGVGTLIALTFILTVEDRERFQKSRDVGCYVGLRPKRSESGKSQPQLRITKEGDIYLRKMLVQGAHYIMGYRGPDTDLKRWGVKLSERGGKNAKKRAIVAVARKLGILLHRLWVTGEVYEPLRNSKQGQPVGTAA

SEQ ID NO: 223421 - protein, 424 aa, unidentified
MLKIVYPICCGMDVHKSFVVACIATTNDHGVTNYKSKRFSTFTGDLRRCADWLSENNCKDVCMESTGKYWIPIYNILEHTCNIVLAHPKYVKAIRGKKTDKRDAKWIADIFKHDLVSGSFIPPADIRQLRDLVRYHWKLTNFNVGEKNRAQNCLTVSNIKLDDVFSDVFGKAASAITTRLLESNEPFDVKPYLTKNIKKPIEQIQAAVDGEMCAEQAEKLRIIRSHMDSLELCKLNLESLILSTAEKYIPQLNLVMTAPGIQSFAAIGIISEIGVDMSVFPTSKHLCSWAGLTPQNNESAGKKKTTRISRAGAYIKPLLVQCALCAIRTKQFPEVRNRYLALKKRRGHKKAIIAIARMLLTAIYNILKWNEVYNSELYRKADRPPAHREVSVEEAVFILQRQGYLVTAPLETREGFWVPPPAVT

SEQ ID NO: 223422 - protein, 482 aa, unidentified
MKKNNIYQNQSQQVLNLFEQAANNAKVMCVPIDYAKKDHVVMFCNGYGDILRKPFSVKNSPQGVDYLTDQVMRSCLQRAISQKHVFFGGEQVGSFADNFVSTLRSQGWLVAGVNAHEAKTQRENLQASTDRLDLMGIAKSLLNRRADCSPAQSGIYLNMRTVVRHRRKLVDITTEVKNRIHAVADRLFPSFLDESKSGITPFSKSSLWLMKARFSAAQIRRRRRSSLIESLRRLGTKKPEDTADMLQQYASQVLKPPQEYVHMLQLSLAQHVKHFCCLQQSIGQLETEIALNLAQTQGAFLTSVRGIGIVLAAGVSAEIGNPFEQKPLNNLVSYCGIIPRVKQTGGPQGETKTGKVAKRCNRILKDYIVKSASHLGLHGPADLMSDYKRRDAAGQHADFGMARRYLRMAMCLMRTSQIYLPSQLRKADAQIQQRADYYVMTWPQLCDKWQKSGALETAFNADQPLGQWRKIVQQFYGIKLTL

SEQ ID NO: 223423 - protein, 407 aa, unidentified
MSLDHPREEPTAIRTNLGAIFVSLELSRSTWLITSLSPGSGEKLSKHSVPAGDIAALLMRFCELEQKALARTGKTFPVIVIQEAGLDGFWIHRALRSEGIESYVVDPASIATSRRRRRAKTDRIDGEALVRALLAYKRGEPRVCAMVRAPTPEDEDSRRLCRERKTLTIERVQHVNPRRMRSIRPVIKGLLFSQGVSGYEPLRRNRRQRLDELKTGDGRPLPPHFKAQISRELDRLELLLGQIKAVETERDALLAPTAKNDEAPAPQAQTSARNRLAMLMQLKAIGPEFAAVLWSEGLIRSFTNRKQVAAYAGLAPTPWQSGSVALEQGVSKSGNARLRSTMIELAWMWVRHQPHSALTRWFNERVKRNGGRLRKTTIVALARKLLVALWKYVNAGVVIEGTVLKRG

SEQ ID NO: 223424 - protein, 398 aa, unidentified
MYLNIGIDVAKNIHEACLVNDSGEQIGKFMKLRNSRKSMDKFREHIKSVSEELKAKPRIGLEATGIYWYSLYSEISRDYEVSICNPAQIRGFASVNIRGSKTDKIDAKTIANMLRFGDAPKTDYQNRQRLELREYARFYVKLSKKKANLKKRFRRNLHLVFPGYDQVFKNVFTKTSKEILAQSPTPDDILEMGEAKLLELMKKASNNYIDHGKARELIEKAEDTIPSEILKESALFELQILLDIIENIEKHILALESKMLAIWGEVKSNHYIQTITGISEIRAAIIWAEIGDIENFKHPDQIVAFAGLDPKVKKSGNKEVIGGPTKRGSSTLRWALGWAVQESKNVNPVLASYFKKKITEGKHYNTARCAAAKKLVRIIWSVEKNKKPFQIPGNLQSS

SEQ ID NO: 223425 - protein, 364 aa, unidentified
MITIGIDPHKRSHTGAAVDATTGEPLSELSVPATEEGHERVRAWAHGLAGEGVLLFALEDCRHVSGRLERSLLARGERVVRVPPKLMGQARRGQRQSGKSDAIDALAVARATPREPDLPVAHLDREARELKLLLDHREDLVRERTARVQRLRWHLHDVEEGLEPPARALRSERTRRSLARRLARREQAVEVTIARELVSRIGEISRRERALQIEIRERVRAYAPALFELPGCGELTAAKLIAEVAGAGRFRSDAQLARHAGCAPLEASSGRRRRHRLSRRGNRQLNCAFHRIAVTQARIHPQARAYLERKRAEGKSTREALRCLKRHLVRRAFALLRARGPELPISISPKMQEMKASPPAMALT

SEQ ID NO: 223426 - protein, 366 aa, unidentified
MKKTSTVRVNGNMIFKEQRLTIGMDLGDRWSFYCVLDEAGKIILEQKVSTTPEAMKQAFAKIPRSLMALETGTHSPWVSRLLGELGYKVIVAHAQKVQLITKSNRKDDRHDARTLARLARIDPELLGPVRHRSAEAQIHLTVIRARAELVRARTALVNAARGLVKSYGQRLPKCGTQQVSRELAAGLNAELREVLEPLLKEIESLNERIKEYEVRMEKIAKESYPHVELLKQVKGVGTQIGLTYVLTLEDPHRFPKSREVGCFLGLRPGRRDSGESQPQMRISKEGDRYLRTMLVQGAHYILGPFGEDSDLRRWGLKLAARGGKSAKKRAVVAVARKLAVLLHRLWVSGEVYEPLRNNHKAMRAAA

SEQ ID NO: 223427 - protein, 338 aa, unidentified
MSESALIGIDLGKHTFHLHGQDKSGREVFRKKCSRAHMMQFFASSQSCVVAMEACAGSHCVARQLAAIGHTPKLISPQFVKPFVKGNKNDFVDAEAICEAASRPSMRFVTPKTESQQTLSVLHRMRESLVRDRTRTANQMHGFLLEFGVSLPRGLAIMKRLAVVLAEHELPVRLTVLLQRLHNHLIYLDEQIKAMDKELACQVADDDLGSRLLSIPCVGPITASLLAVEMGDGKQYRCSRDFAASVGLVPKQYSTGGKANLLGISKRGDKHLRQLLVQCSRVYMQRLDHQKVALADWVRSLLSRRHSNVVACALANKLARIAWAIAAHHTQYEAGPGA

SEQ ID NO: 223428 - protein, 468 aa, unidentified
MAKRKSSRQGQRREKTEKAVAVSAGPTQVKQDVAGIDVGSEHHYVAVPAGRDPEPVRRFGSFTADLYRMVKWLLDCGIKSVVMQATGVYWFGLYQVLEDHGLAVTVTNARYTKMLPGRKTDVAECQWLQQLESFGLLTQSFRPTEEFRVLRSYMRQRENLVADIGICIQRVQKVLTEMNLQICNVLSDINGKSGMAILRAIIKGERDPYRLADLCDSRIQAPRQQVAESLEGTWQNELLFILKQQLEIHDALAAQVSQCDRQIETHLQTIQQKVVPEVTPMPAARRPSKLPNRKHTSQYDLRKYLYQITGVDLTQIDGIGEQTALTVVSEVGVDMSRWKTEKNFASWLGLSPTNEKTGGKVIQRGTKKVVNRAATALRLAAQNLRTSQSFLGAKYRRFRGRMDAAKAITAMAHNLATLIYRMLKFGHNYTDKGMQFYEQRYRERQLQYLKKQAAKQGFQLTPAQGVVA

SEQ ID NO: 223429 - protein, 316 aa, unidentified
MSIEPVRQHIGVDISKSTLDAHMYPEGRTITVPNDKKGFRQLLNWMAGCHLKQLLYEPTGQYHLAFEKFFLKAEIPLGKVNPRQARRFADALGVSAKTDSIDAGLIAKYGAMISVRRVSDRTIKFNEMKELQSARRALVKDRTRASNRSSARIAPLLRRQARERIEQIDRHLKAIDEALRSLVRDDEFLKARFNILQTIPGIGETTAIMLLTEMPELGFIDHKAAASLAGLAPIARDSGTFRGKRYIQGGRAHLRQALYMPTLVGIRHNPEFSAKYQTMVATGKAPKLAITAIMRKLIVLANSLLRDSRNWVPSRT

SEQ ID NO: 223430 - protein, 440 aa, unidentified
MSAKTLFVGIDVSSTSLDVCFMDQGGKRISSIHTYPNLPDGFKLLRQDALAFSRLLGKRTPIVFGFESTGNWHRNLEKFLRARKSKRFTIRIINPYRIKEFRKSHFKLSKTDKIDSFMIAKFLIAFPEPSSPYLSPQQLSLRSLTRFRRTLIEERTRYINRLRKNLRLVYPGYKKIVGEKLTTRFLSFISTYPFPEDVKDSPIPSSFRKFLPLFSLLQDKESVSFLRNEIKWTAERIISLQKQIESIEHEITRIMDTYYPDHILFSIPGIGKITVATIIGEIGGSVDRFPTAKHFIGYIGLYPVVYQSGKNKVFFKMTWKGNKWLKMAFILATASARRNNPQMRNFYNRLRARGKSKKAAGGALARKLACLVYAILASGKKWDENIAFKSIKRANEMSIQNFPVVENDIIKASRPTIDFSTHNTGLSPKGNSGSTRLLYS

SEQ ID NO: 223431 - protein, 356 aa, unidentified
MTRIAQLEPTRVTVGVDTHRDVHVAVALDQLGRRLGEIELATTRAGYQRLLSWAERFGAVEAFGIEGTGCYGAGLARHLRARRVLVIEVMRPNRQTRRRKGKSDPTDAEAAARAVLSAEAAGAPKAGDDLVEMIRVLRVARSTAIKARTQAINALRSLLVTAPPELRDELRALSSTRLVAKAAQLRPGEQLNPLAASKVALRHLARRCQALQAETQSLDAQLAHLTATASPQLTKAFGIGPDTAGALLVAAGDNPERLRSEAAFSMLCGSSPIPASSGQTRRHRLNRGGNRQANAALYRIVLVRMRYHQPTKDYVVRRTSEGKSKREIIRCLKRYVAREVYTALTQTSEENLARTA

SEQ ID NO: 223432 - protein, 368 aa, unidentified
MMDEGYFRKVWSLADFRHHSAQYGIQKVPSDWRLHSMKYTPVGVDIAKHVIQIHFINENTGEVVDKLIRRQDFLTFFSNREPCLIGMEACGGSQHWARELKKLGHEVQLLQARFAKAFVMGNNNDVMDARAIWMVVQQPGKEIAVKTEEQQSVLVLHRTRRQLVKFRTMQINSLHGTFLEFGETLHKGRAAMDREFPEALERLKERLPPYVISALENQFNRLNELDLQIDDIEKQLTSVAKQNETCKRLLDIPGVGPLIATAAVATTGETSAFKSGREFAAYVGLVPKQTGSGGKIRLLGISKRGDTYLRTLFIHGARAAALLTKEPRQPGGCKSGAGTRYLLRHPYVWSSSQLASACACVCNLWRSE

SEQ ID NO: 223433 - protein, 322 aa, unidentified
MTPPEIYVGIDVAKEQLQVALRPDGETWSVTNDRPGLRDLVKRLAVSKPALVVLEATAGMEMPVAAALAGAGLPVVAVNPRNAREFARAIGRLAKTDVIDAHVLAQFGEAVKPPMRPLPDTATQELNALVTRRHQLVEMLTAEKNRLGQAVAKAVRTGIREHIRWLEKRLADIDRDLADAIGRTPVWREKDELLRSVKGVGPVLSTTLLAGLPELGALGRKQIAALVGVAPLNRDSGRYRGKRMVWGGRARVRAALYMGTLVATRFNPVIRVFYQRLLAAGKPQKVALTACMRKLLTILNAMARHETPWQTMHLTLARQDGC

SEQ ID NO: 223434 - protein, 441 aa, unidentified
MVDEHPQFNEEPQWAAYVAIDWADKKHVWKLQPAEGTASEHGELEQTPEAIEAWASHLAARYGGRAIAVALEQSRGAVVFALSKYSHLHLYPVHPSTLAHFRQALVPSGAKNDPGDTGLLLELLVHHRSRLRRLQPDTEHTRELQFLVEVRRKLVDDNTCFTNRLTAQLKIYFPQLLRWFYKLSSPVACDFLSRWPTLQAAQKASPRVLREFFRRHNCRDEDLRIEQIRKALPATHDQAVIRSSVLMVQAVVRLIRDLKQDISRCDERIEELTRSHPDFVIFDSLPGAGEALVPRLIAAFGTQRDRFSRASEMQAHTGIAPVVRQSGNTRSTHCRKAYPRFLRQTFHEWAAHSIQQSQWAREYYQRQLSRGKKHHAAVRALAYKWIRVVFRCWKDGIPYTEAIHAETLQRRCPAPPSTQPPAVNLEWKNVAGFCKLSVAAS

SEQ ID NO: 223435 - protein, 393 aa, unidentified
MLTSEKTNLFKATVSNDLIGVSEIKKQILDFQSKYQFSKIVLGMEATSIYSFHPAFFFKEDQELKALKLQVVVINPRSTKRYKDVFEDNKTDRIDAYYIADYLSIGRYSVGIVKHEEYQALQRLTRSRFEITKSLTRAKQHFLENLYYKVNKLATGALENSSVFSATMFDLITGELTIDELAQMPLKDLAELLNKKGHGKFAQPEKFAKALQKAIRGSYRLDKVLADSVDIVLSIYANEIRNYQGLIKQLDKSIEKVITILPESQILESIPGIGQVYSAGIIAEVGQIERFSDETKLAKYAGLAWRQHQSGNFKGDQTPMTHSGDNYLRYYLIEAAGSVIRYDDTMRTYYQKKYSEAIRSPRKRALALTARKLIRVIYTLLSRHQIYQKEELV

SEQ ID NO: 223436 - protein, 469 aa, unidentified
MAARKQEQKQRRMSAQVVEDEDYQLRYEIVAGIDVAKESAVVCVRMPPAAGRKHRTSHLQTVPATVPAIGELAAELKALGVQMVSMEATSDYWRIWFAVLEEAGLAVQLVNSSQARNLPGRPKTDKEDARWIARLTEMGMLRSSFVPPPEIRALRVYTRHICDLTADRTRYWQRLEKLLEDALCKLSAVVSKLAGHQTARAVIEAMIAGERDPRALAALGQGRMRNERLPALAEALSGMQFGPQHAHAAASLLRAIDLLEAELRDLQERVTAHLAAIPASWGVDADGVTGPEAGRAGDAAALPAADRLDEIPGLGREAAAALIAEIGLDMSRFATPQALVSWAGLTPTARQSGPRKGRGKKGHGNTYAKRIAVLAAYAAANTDTFLGERFRRLASRPGGGGRKKAGCAVGRSILVIVWHLLNDPAARYRDLGPDWHARHTDRSRKARNAQRQLEALGYDVIITPREDAA

SEQ ID NO: 223437 - protein, 313 aa, unidentified
MSHKETFVGIDVSKKELQVYVRPDGKRDVFANTEEGVAQMLTFLKSFSPTLVVLETTGGLEIEATNALVDHSLPVVIVNARHVRNFAKALGTLAKTDRIDAEIIAHFAEAVRPEIRPLRDEQAQRLHALNVRRRQLVQMITSERNRLSQASKWTAKTIQDHIDWLSREISKIDKEISHLIKNSPVWREKDAILQSFKGIGSITSSVLLAALPELGTLNARKISALVGVAPLNRDSGIFRGKRFVWGGRKEVRCALYMATLSAIRFNPVIKAFYKRLIQAGKPPKIAITACMRKTLVILNSMIKNMTYWQPSIP

SEQ ID NO: 223438 - protein, 357 aa, unidentified
MKENETVLKLVAGIDVAKDELVVTLGQLDRELNIKKLGTKAFKNNFPGFKKLINWVKKQKINPEEVVFVMEYTGVYYEHLAYYLYKNGYEVVVLLASKVSNYVKSLNQKTINDITASEAICRLGLERKLDLWMPPDPVYRKLRRLTRERHGMQKEKTAMQNKLHAMKHEFGEDNEDSIKRLEERIELVKKQIKEVEKEIKRILKSNEKIKKASAVLKTAPGIADITAANILAETNGFAYMRNLRQVTSYAGLDVIQKESGKTIRKKRSISKRGNKYLRGALYFSALTAIKHDERYRKLYERVVARTGIKRKGIVAVMRKLLELSYTLYKTESEYISDYEIRKGRLNNDPTPSLQADL

SEQ ID NO: 223439 - protein, 393 aa, unidentified
MIHNALGEIVTPTFEIDIFKTGFKQLCQAIDEAIEQTKADWVLAGMEPTGHYFKNLAWHLQQRPQAVTLVNSYAVSQNRKQQMMQREKTDPIDAAAIGDLLRRGEGSAYQPLKGIYLDRVRQSKVKIRTMLKNQIIGHLDRIFPGLVIIGDGAKKRYTPMFATDFWECQTMQHLIRVCPDPHQVAAMSPTELITAFHTHNFKMGAKTASKIITYTQKVLLPDPEVISIRSELLHHDLILLDVVAQRITVMEERLVGLVSQTPYQIWTKLKGLSDIQVARLAAAIGDPNHYTHAKQIFRRSGLVSGRNDSGMRQNRGKGIIKTGDVHLRRAWMDVINTLVLHQPVLFRSYAKLKLTKPDLVARVATVRCANGILWAILRDQHSTTLVYKAGVHM

SEQ ID NO: 223440 - protein, 316 aa, unidentified
MTKDNHNTCCAGVDVSKSKLDVVLWPCGTYQAFDYTAEGLRQLSRFMAEHKVGRIGFEASGGYERRLLEHLRAGAIPAVRLQPAQVKSFARAKLKRAKNDRLDAMLIAAFTASLESLPGLPSEVTMELAEHLTFIEQIEDQIVVVKTSLATTASVRLRRLYEAEIRRLEARREAELLRLAKVVEASEELSRRLARLCSIKGIGLRTGLALLIRLPELGSLSREEVAALTGVAPFDKDSGKTSGKRTVQGGRSRLRKSVFMAAFSARQWNPDLKAFYDRLRAKGKHHMTALVAVMRKLVILANAVVARDTDWQPTRP

SEQ ID NO: 223441 - protein, 335 aa, unidentified
MKEITTVGVDLAKSVFTVHAVDAAGRTVLRKTVRREKLMELIVALPPCLIGMEASGGAHEWGRKFEACGHRVGIMMARFVAPYRKSSKNDGNDAEAICEAVGRPNMRFVPVKSAEQQAVLSLHRVRQGFIEQRTATINRIRGLLAEFGMVLPQRADQVRRAAVVVAEGLPVLAREAIADLRAHLAYLDERISRYERQLTALAKQHEPARRIQQLTGVGSLTASAITASMATGHEFANGRQFAAWLGLVPRQYSTGGKSRLGRITKRGDAYLRTLLMLGARAVLQSAAHKTDRLSRWAMALRARRGYHRTIIAIAAKNARIIWALLAKKRAFALPV

SEQ ID NO: 223442 - protein, 355 aa, unidentified
MDSKKYIGMDVHKESISIAVMNGAGKIVMECLIETKASMILQFIDGLRGDLQVTFEEGTSAAWLYDLLKPHVTKLLVCDPRKNASMREGNQNDKIDARRLAELLRLNHLSPVYHGEHGLRSLKELVRSYLTITKDLGRVMSRVKAIYRSWAIPCTGKQVYAPRHRGEWLAKIGEPGVRRRAEFYYQQLDALRTVRQQVRRELLAESKKHQAWKRLCQIPSIGPIRSAVLLGILQTPHRFRTKRQLWTYSGFGIETHSSADHRSVNGQLERAKKQVSVRGLNRNCNHDLKNVFKGAAIVASSKPGPFQEFYTALVTKGIRPEMARLTLARKIATIVLMVWKRGACFDAQHLKPQTA

SEQ ID NO: 223443 - protein, 354 aa, unidentified
MKNNTFYVGMDVHKATTIIRVLNAAGKEQMQQIVETKGELLIAAIKALSGDVRIAFEEGTQANWLYELLKPYASEIVVCNAQCLVKPQSGNKNDLIDAYRLADALRQGAIKSVYKGDASFRTLKELAHSYQCLVEDCTRVKNRIKAIFRGRAIKCDGEKVYQTKEREHYLTHLSEAGVQQRVKRLYQELDLLTDLCGAAEKDLIKEARKQTAYQLIDSVPQLGPIRTSLILAAVMTPFRFRTKRQFWAYCGLGVVMQGSSEYQMCHGQIKKVVKETNTRGLNRNYQHTLKAVFKAAANSVHRGPFKQYYDQLRTKGIKDEMARLSVARKIAATTLAIWKKGEKFQPELLNQQTD

SEQ ID NO: 223444 - protein, 347 aa, unidentified
MRFYTKQHRYYCGIDLHARSMYVCILNPQGEIVLHRNLPCTAESFLKAIAPYREDIAVAVECIFTWYWLADLCSKQNIPFVLGHALYMKAIHGGKAKNDKIDAHKIAVLLRGGMLPMAYVYPPEMRATRDLLRRRMYLMRKRAELLAHVQNTNSQYNLPEIGKKIAYKANREGVAERFCDPSVQRSIEVDLKLMGHYDQLLTEVELYIVRTAKEHDANAFYRLRSVPGIGKILALVILYEIHDINRFPTVQDFVSYSRLVKCAKESAGKRHGTSGKKIGNVHLKWAFSEASVLFLRANPKGQRFVEKLSSKHGKAKALSILAHKLGRAVYYMLKRKQAFDMNKFFNS

SEQ ID NO: 223445 - protein, 343 aa, unidentified
MHIASIGIDLGKTTFHLVALGERNKVLVRKKFSRTQLLAYTANLPLSLIGLEACAGAHFLGTVLREQGHQVRLIPAQFVKPYRKSNKNDFLDAEAIAEAVTKQNMRFAQIKTQEQLDIQAMHRVRDRLVQRRTALINEIRGFLLERGITFAAHPIHLRKNLPGVMEDAEQNLSPRLRWLLDRLWQEWKQIDSEVQAISDEIERFSDEDVRCQRLRQIPGFGPLVSTATVAAIGNGAAFRRGRDFAAWVGVVPRQYSTGGKARLYGISKRGNIYLRRMLIHGARAVLFRIKHDTGGFGQWVHRLAARAPRNKVIVAIANKLARIAWAVLSSGRDYRHQPLQAAA

SEQ ID NO: 223446 - protein, 437 aa, unidentified
MKHLAIVDPRAAFVDVGSEHMHVSVAGDEPVVFGSVTSQLHALRDWLKSQGVRSVAMEATGVYWLPLFGVLEAAGFDVRMVNGRQTRNLPGRKTDMQDCQWGATLHAHGLLHAGFVPPADIRRLQDYLRLRADHVASAATHVQHMQKALERMNIKLHDVISSLAGLSGLAVIRAIVAGERSPEALLARCDQQIRRAKAEQVKESLRGTWGAEHLFALRQALQSWEHYQRQILECDREIEATLPPHDPDTTPLARPKAVKRAGVNSPDIPKLREILAQMCGGRDLTQLPAHTHYGVLQLIGEVGTDLTKWPTEKHFTAWTGLAPGSHDSGKRKGRVKRGRNRAGRLFCMMAQCLARSKDIALGGFYRRMCARRGGLVATMALARKLAAWFWRVMVKGDDFVEQGIAHYEAQVLQTKQRALKRLAKELGQQLVPVVETP

SEQ ID NO: 223447 - protein, 348 aa, unidentified
MQISTIGIDIAKNVFQVHGVDAAGKPVLKKQLRRGQMLEFFGKLPPCLIGMEACATSHHWARELKKLGHDVRLMPPSYVKAYVKRGKNDAADAEAICEAVTRPSMRFVPIKSAEQQGALMLHRTRDLLIRQRTQLINAMRAHLAELGLVAQKGREGVQQLMRTVADADDEQLPSDARVACQAIIAQLQAVQMQITGLEKRIHQAHRANPASKRLDAIPGFGVIVSTAVVATMTDPKAFKRGREFAAWIGLVPRQNSTGGKERLGSISKQGDRYLRRLLIVGALAVIRSARARPDKYPWVMKLLGRRPAKVVAVALANKMARMAWAILAKGETYRAPMHKNSGVIAARA

SEQ ID NO: 223448 - protein, 353 aa, unidentified
MNDTSSIAWLGLDAHSKNCVLGQLDDHGTELKWWQFPTQPQKLIEHVQAIPATDKRLMLEESNLARWISQLLKPHVQQLIVCDARRNRLISHDHHKHDRRDAFALARLLRLNEFKPVWQPAEDQRVLFKRIAKSYENAVQRQTRLKLQLKSLFQHWGLFPAGATIFSKSGRVAWLKQLPHDPLRAQALLLYELLDQALAGQAQFRRLMCQTGRQFPEVQRLSTTPGVGLVGSHLFVAYIQDPKRFAKFSRLSRYCRLGIRDRTSDDKPLGYEQLDRQGIGTLKAISYRAYLQAAKRRTGPVWEFYQLSLRQTGSTTHARLNTQRKILLTLWTLWLTGREFDPKQFFRAQPIDV

SEQ ID NO: 223449 - protein, 319 aa, unidentified
MTKQAIEFEQVIERGCGLDVHRDTVVATVMGKGIQTETRTFGTTTSSLKELGEWLESIQVTDGAMESTGIYWKPVLHVLREYPLNLLVANARHIKNVPGRKIDKADSQWICKLLISGLLKGSFIPPENIQALRDLHRYKKKLVGTVASEKNRIIRVLEDANIKLSSVVSDTSGVTATYLINGLIEGRKDLEKLVSECYHKKLRSTPDQIVEAINGRLIPHLRFLLKSMQKHIQSVEEQIAEIDTEIETHIKYFEQEIELLQTIPGVGKEGAIGIVAEIGVDMDVFPSEHHLASHSGMCPGNNESAGKKKVQEHDKGTSI

SEQ ID NO: 223450 - protein, 331 aa, unidentified
MNYSHFVGLDVGKKTFDASLMSAAEKELSHKSFDNTPTGIQSLLDWIAGYHLSLSKLLFCAENMGSYVTELSVSSVSMGFSLALVCPLTIKKSIGLQRGKNDRIDAKRIANYAVLHYRKLELYKLPNKDLVRLRGWIIIRDNLVKQKVSSIKLLETFSWMAKLADVTESISFLEEQLKSIKEKILEVEEDMEQLIAASTSLYTNYLLLRSIKGIGIINAIVLLCVTDNFQRFDNPRKFACYCGVAPFEHTSGISIRGKTQTSSLANKEVKVYLTRAAITAISWDPQMKAYYKRKIAEGKHKASVINAVRAKIIARSFAVIRRQTPFVALAV

SEQ ID NO: 223451 - protein, 467 aa, unidentified
MREQYSDHGEIASGGLRLTIRVWSALGRRDFHLEQSVMSSTESSNQNPVAAFIGIDWADQKHAIVLRAAASTASLEHRSIGAEPDALAEWVLEVRERFAGQGRILVCLEQSRGALIHFLMGYECFELYPINPKQLASYREAFRPSGAKDDPIDAELLYQFVSLHHRQLRPWHPDDGLTRKLALLCQKRRQAVDARTTLSNQLKSELKQYYPLALAVLDNDLTTALAADFLLQWPNFESLKKTAPHKLRKFFYGHQCRSEQKLQARLERIAAAQPLTRDAAIIEAGTLTVQMLAQQLKALVPYIARYEKEIAQLFEIHPDSALFNNLPGAGPTLGPRLLVAFGTDRERFHSPLEAVTFFGVAPVTEQSGKSRWIHFRWACPKFLRQSFHEFAGQSIRFCDWAALYYQQQRARGKGHHAAVRALAYKWIRILFRCWKTHQPYDPQLYLTALLQRGSPYTSPVKNSSPKT

SEQ ID NO: 223452 - protein, 428 aa, unidentified
MEVIHPRCAGVDVSKKDAKVCVRVQGSGRRGTSTTITTWGSTTGEVLALGQHLLGEQVSCGVIESTSDYWKPFYYLLEESLPVMLVNAKAARNVPGRKTDVSDAAWLADLGAHGLIRASFVPPAPIRVLRDLTRARTTITRARTKEIQRLEKLLEDAGIKLSAVASNIIGVSGRAMLEALIAGERDPVVLADLAKQRMRAKIPALTEALRGRFSAHHAFMARLYLDRIDAHAADIARLDGRIEEAIAPFRSVRELLMSIPGWSQIVADVFIAETGADMSVFPTAAHLASWAGVVPGCNESAGRIKSAATRPGNRHLKAALGVAALSAARTKDTYYSARYRRIAGRRQPVSSRKNKSRGSSIAGMIALVAIEHTMLTDAWHMLVNGAFYRDPGSDYYTRHQPGRTKTRAIKQLETLGYKVTLEPLTQVA

SEQ ID NO: 223453 - protein, 343 aa, unidentified
MGEVSTIGLDIAKSVFQVHGVDVAGAVVIRKRVSRAKVLEYFGELPPCLVGIEACPSAHHWGREIQALGHTVRLIPPSYVKAYLKRGKNDANDAAAICEAVTRPSMRFVPIKTKEQQTALMLHRARQLLVRQRTMLSNALRGHLAELGIVSAKGRNGTAELLRIIADGRVSPAVCGILKVLARQYGAIGTEIASIDKSIMALHRGCEASRRLAEIPGIGPIGATALVAEIGDWNAFSSGRSVAAWIGLVPKQHTTGGKDRLGSITKQGNRYLRWLLVVGAMAVIRYARKHGTQKRPWLGRLMERRPTKVGPSWSGARDTRSRNCCWRHDARRQIDRQHQLARA

SEQ ID NO: 223454 - protein, 362 aa, unidentified
MTNFIFAGCDLHEETLVNRIAIGQEPSERKTVGNSRAGREKLIAALKRESNKHGGARIIFGYEASGQGFGLHDQMVEAGIECYVLAPTKMESSVKQKRNKNDDRDAERILKRLRAHKLAGEELPSVWVPDPQTREDRETVRARQDLGDKLSSVKVQVRSLLQRHGIEKPTGVGKPRTKSHQQWLEQLSCDSQQGIGVRTALGSLLRQVRHLEQEIQQLDEAVDQLSRKPHRQAVVDALDQETGIGRLTATAYAVEVADFTRFRRGRQIGAYWGMTPSSDESGEVNDRKGHITRQGSPRIRKLLCQATWYRVQKDPQVRAIYQRLVIRNPKKKKIAVVACMRRLAVRLWHIGRQAQLAMKEAK

SEQ ID NO: 223455 - protein, 400 aa, unidentified
MLSIGIDVSKGKSTVCGMKPGGEIVYTPFEVQHTREGMSELVSLLRSSGEEVRAVLESTGSYHCPVVAALLENGIFVSVVNSLRMKRFCSQSIRKVKTDRIDAMQIALYGLAYWQELQPTRLPEDTYRELQLLARQYYQMTSLLIKAKVDFNAICDQVLPGMQELMNDHAGRHKLSDFVLRYHHTTHILEMGETRFRKDYCKWAEKKGYRNCERMAAHIFATAQNGIPVLPNAPSTQIVITEAIRVLHTVEASRDAILTQMQALAKTLPEYSLVREMPCIGDTLAPRLIAEIGDVRRFHSKRALIAYAGIDAPPYQSGKFCANNRHISKRGNRYLRKTGYEVMQSYVMHKPANDPIFTFIEKKRSEGKCGKLAMMAGLNKFLRVYYGKVTELYRSLPTIE

SEQ ID NO: 223456 - protein, 336 aa, unidentified
MQRTIAVDLSKSVFQVAISVSPGKVADSKRLSRSRFERFILNEPPSHFLLEACGSAHYWGRRILSHGHTVSLLPPHHSRKYRTANKTDRSDTKALLEAARNEEIHAVPVKSEDQQCLTGLHRLRQGYIKTRTRRMNAARGLLREYGYAIPEGTKKLKEALHEDALAEVPAPLRRMLLEVRLEIDELERCIALVETKLEGLCETSPMVDRLRTIPGVGLITATALVAQIGDARRFPTARHFASYLGLTPKEHSSGLKRRLGSISKQGDTYLRTMLVHGGRVVVRWSKTKEGTSPLYDWAQERVRRSGYNKAAVAVANKLARYVWAVWTQDRDFRQTA

SEQ ID NO: 223457 - protein, 384 aa, unidentified
MTKHNILFIGLDTHKEFIEVAYIEDNRGAQPIHFGRIYSSKVTIKKLIRQFESKYPNTTLHFVYEAGPCGYWIYRLITSLGHCCYVVAPSLIPKKPGERVKTDKRDALKLAKLLKSEDLTPIYVPEPEDEAIRDLSRAREVAMKDLKDAKYQLKAMLLRNNINYAGTANWSLKHLRWLTELVLPHPAQQIVLQEFIQTINERTARLERLDNELSHHVYQWRYYPVVKAIQAMRGVRLLVAAGIVSELGDLTRFDHPRKLMSYLGLVPSEHSSGGKRHIGAITKCGNGRARRLLVEGAHSYRHAANISTELQKRQEGLPKQLIDIAWKAQLRLCKRYKKLINKGKHYNLVVTAIAREMIAYIWAIAKQVVLSPVNPKLRLSRVPA

SEQ ID NO: 223458 - protein, 419 aa, unidentified
MAQRHDRPIISVVHPICCGLDVHKASIAVCCVATAADGGEDMEIAEFDTFTDDLLRLRDWLIERDCPVVAMESTGVYWRPVHNVLEGYVKVVLVNARHTKHVPGRKTDLADSQWLAGLLRHGLLRGSFIPPQQVRQWREMTRLRKAYQESLADFKRLIHKLFECANIKLGVVVSDLFGATGRYIMNLLATREAELSADDIAAGAHGQLKQKINELCRALQGFFTDHHRYQLRLLLATVTELEHHSEQISQRVKELMADHYTVLSRLQEIPGVSEVAAASILSEVGATLEEFPRCAALTSWSGLCPGNNQSAGKRKSGRSPVRAHRLKTIMVEVAWSAIRKPGSYYKDKFQRLRARRGAKRAIVAIAHRLLKAVYYIIKEGRHFRDLGAEYLTHKHQTGKLGSLKKQAKLLGYELTPLAA

SEQ ID NO: 223459 - protein, 406 aa, unidentified
MIGLIFVGNDWAEDHHDIHVMNTDGSKIAARRFPEGVAGISDFHALIAQHATDPAEVVVGIETDHGLWVASLVGAGYQVYAINPKAVARYRDRHHVGGAKSDAGDAKVLADLVRTDAHNHRVLAGDSSAVQAVKVLARAQQALVWSRNREVNRLRNALREFYPTALDAFEDLHARDALAVLGRAPDPAGGARLTLSQVKAALRAGGRRRNLDATAEKIQAVLRAKQLHAPAAVAAAYAVVVKAQVGVITALNTQLADLETELEQSFEQHPDANIILSLPGLGDILGARVLGEFGDDPERFADAKSRRNYAGTSPLTVASGKKRAVLARHARNQRLYDAIDQWAFCSLQASSGARTLYDHRRDAGDTHHQALRALGNRWVGILHGCLKHRSTYDEHTAWGHRQPAAA

SEQ ID NO: 223460 - protein, 345 aa, unidentified
MEKTKYFIGLDISADDFTASCITTPDNIIFSAQKFQNNLNGFNEFFDFLLSREIQPTETIVCMESTGVYCEEIAYFLYSKGFSVSIEAPHKVKQKIKDTPRKNDFIDSLAIAEYSYRYLDKLPIWKPQVEILQQLKTLLSVREHLITQKTASENALKTLKRKYIKTPLALAIYEENVKKFNEQIKQIDKEIETLIEKDDNFKMKMDLAMSVPGIGLLLATNLLVLTDGFTKHLNYKEMASYVGICPYERISGSSLHKKPRSKRYGPSRLRKLLYLAALSVIKHNLNFRKYYLRKIEEGKSKRLVINNIENKLLKIIFAVIKSGTKYIENYRSVNPIYLKKCLNMS

SEQ ID NO: 223461 - protein, 388 aa, unidentified
MQDVADQSAAPTTIGADLCAIFVSLELSRSTWLVTSLSPGRGEKMSKHSMSAGDIASLLMRFSELRRKACARTGKSFPIIVIQEAGLDGFWIHRVLLSEGIESHVVDAASIATSRRRRRAKTDRIDGETLLRALLAHKRGEPRVCSMVLAPTPEDEDRRRICRERKVLIMERVQHVNRIKGLLFSQGASGYEPLRRDRRARLDALQTGDGRRLPQHLKAQVCRELDRLELLLEQIKAVEAERDALLNAEQTKASAPPPMLLGVRGVGPEFASVLWSEGLSRHFDNRRQVAAYAGLAPTPWQSGSVNREQGISQSGNARLRTTMIQLAWLWIRHQPGSALTLWFQDRINRNGGRRRKTTIVALARKLLVALWKYVSAGVVIEGAMIRPA

SEQ ID NO: 223462 - protein, 319 aa, unidentified
MAQNDRIVVGIDVAKDKVDACIRRFTLRQTFPNTAQGHRKLVAWLRKYKVGKAVMEASGGYEREWRNVLHKAGIEVRIVDPRRVRSFAQSAGRLAKNDPIDAEMIAWFAETFSQAPGQIPDAAREELAALAKARTALVGVKIRLQAQDEHAAPEPARKAYARVLKSLAAEIDKLEAAISAKIKATPEFAERAEIIESVPGLAQATSAILVAGMPELGQVSDKVAAALIGVAPYDDDSGKRRGERYIKGGRRWVRNGIYMPCLGAATQCNPVLKAHYQRLLAKGKEPKVALVACMRKLIIILNTMLARRQKWNPGRHAMG

SEQ ID NO: 223463 - protein, 355 aa, unidentified
MNNTKYIGMDVHRESISLAVMNSAGKIVLECVVETKASIVLQFIGGLSGSLHVTFEEGTWAAWLYDLLKPHVTRLVVCDPRKNASMKEGNKSDKIDARRLAELLRLNHLNPVYHGEHGLRTLKELVRSYLTITKDLGRVMTRVKAIYRSWAIACTGKQVYAPQHRAEWLAKITEAGVRRRAEFYYQQLDALRSLRREVRRELLEESKKHQAWKRLCQIPSIGPIRAAVLLGILQTPHRFRTKRQLWTFGGLGIETYSSADHRYVEGQLQRSKKPALIRGLNKNCNHDLKNLFKGAAIIASTKPGPFQEFYAALLAKGMRAEMARLTLARKIAAITLIVWKKGVSFDAQRLKPQTA

SEQ ID NO: 223464 - protein, 339 aa, unidentified
MWYSGIDQHKRDSVLTTYGPDGPRVKQARVANTPLAIAQYFAEFPGPHTAVVESTGGWYWLADVLAPLGVELVLAHATRLKAISAAKVKTDQVDSDVLALLLRADLIPVAHMIRPDQRGPRDLMRARLRLVEKCVSAQNSVGRLLEKFNVPEVGALAELYQLPAACHAAQIQLLTEQIATLERALYPHLIPNPDVQRLLWIPGLGKVNAFTIYTEIDGITRFPSAGQCFSYSRLVPGADNSGGRTRHRSGSKAGNRYLKLAFSHAGIRAVQYYPEIRAFFKAKARRKPIRIARPLVALELARIVYHVLTKQEDFNGQFKHRPLSRQKHAQWPRRASPPA

SEQ ID NO: 223465 - protein, 377 aa, unidentified
MSQSTTLFVGMDVHKDTIAVAYIAQEHGAEVTYLGTIGTRQCDLDQLIRKMQSKAQHLIFIYEAGPCGYWLYRYLQNKHYDCWVVAPSLIPKKAGERGKTDRRDAVQLARLARSGDLTLVYVPQVNDEAIRDLTRAREDTISDLKDAKFRLKAFLLRQDIRYAGRANWGPAHLRWLAEVVCPTPAQQMVFQEYVRTVTEHTERLGRLDQELREQVTTWRLHPVVDALQALRGVQCTVAVTMVAEIGDLTRFEHPSELMKFLGLVPSEYSSGARRQQGAMTKTGNTHARRVLVEGAWAYRYPAKVSRQLQRRLENQPHVIQDISWKAQVRLCKRYQRLVAKGKHANVVTVAIARELVGFVWAIAKEVPLTLESPRDRL

SEQ ID NO: 223466 - protein, 352 aa, unidentified
MLIIGCDYHPSMQQIAYVDTETGESGERRLMHRGGEAERFYCELKQRQIEVRVGMEATGYARWFERLLAELGFELWIGDPARIRARRVRKQKTDRKDAQLLLVLLLEGDGFPRIWVPSPENRDLRQLLWHRHRLVQMRTRIMNQLQAVAMNEGLRRKRALWSESGRKQLESFLLAPWATRRRQDLLELLDRLNPTIQELTAAVEKEAHNQPEVRLLMSHPGVGPLTALAFVLIIGTAERFQCGKQMGSYLGLIPCEDSSAEQQRLGHISKQGSSLLRFLLVEAAQVAVRVNPEWRRRFLHLAMRRGRKIAKVAMARRVAVGLYWMWRKQWHYQQVVKFGSHVGQLELRHGVQ

SEQ ID NO: 223467 - protein, 316 aa, unidentified
MANLTQSKSVVNVGVDVGKSFLDVCIHEKQIYFQEENTVKGIQSILKRLSYYRIERLVVEATGRYEFALVEAAYLKAIPVCIMKPLSIRRYAGAVEQLAKTDKIDAKIIAEFAAVIKPRPTPEKSKNLLAIKDLLARRRQLIEIRTQELNRLQIMGKRLEASCKRIIKVIDKEIDRIETLLTEHIDEETEWSQKRELLISTPGVGNTLVFTLLADLPEIGTLNNKEISALVGVAPMNRDSGAMRGKRKVQGGRATVRTILYMATLSATQCNPVIKSFYRKLVAQGKHKKVAIVACMRKFITILNAMVRDKKEWCHA

SEQ ID NO: 223468 - protein, 375 aa, unidentified
MREKVRFLGLDVHAETIAVAIAEPEGEVRSLGTIPNREDSLRKMIKKLGPTDKLRVCYEAGPTGYVIYWQLAELGVKCEVIAPTLVPVKSGDRVKTDRRDAEKLARCYRAGDLTAVWVPDEGSKALRDLVRAREAAKQDQLRARHRLSKFLLRSGQRPPSGVRSWTRAYLIWVAQLRFTQMAQEATRLDYLHEVEHMRERVERLELAITEAVKLASPALQQVINDLQALRGIADISAVTIAAELGQVSRFDSARQLMGYCGAVPSESSSGKRTRRGSITKTGNAHLRRIVVEAAWSYHRPPGIWYGLRKRQESISEEAKEIAWKAQHRLHKRYLRLAAAGKDKRKITTAVARELLGFIWAIGTRAETEVRQRIAA

SEQ ID NO: 223469 - protein, 341 aa, unidentified
MKKNLFFIGLDISKVDFAASIYQTPGQPIVTKEAIPNDRKGFEMLLLWLKDNHIDKKNCRICMEATGVYSQAIAYYLLFQGFPVSVEPPLKVKRAFDPVGHKTDPVDSKQIAEYAYRFQDELTSWQPRDEILEKIRQLLSVREQFTKQKVALDNSIQAYSKQRVQVTLIRKAQKETLNQLKKQIARIDKELANLIKQDPQIFQKANNLKSIPGCGMLLAAHLLVITENFTKIQNSKRLAAFIGIVPYQHQSGSSVSKRAKIRHFGPGPSRKLLRLAAQSVATHNVIFRSYYLRKLDQGKAKPLVLNNIANKLLKIACTIIRNNTRYIKDYRSIHPMYLKSA

SEQ ID NO: 223470 - protein, 414 aa, unidentified
MERTYKIAGIDVHKSMLAVVVADAGQEGAFQFQRRKFTTLASGLEQLAAWLRQEDVQEAVMESTAQYWKPVWQELEGQCDLSLAQAQSNRAPKGRKGDYKDAERLLRRHVAGELILSFVPNPEQRLWRTMTRGKHQLTRDVVRMHSQIESLLEDAHIKLATQVSDLLGVSSRRMLQALADGEVDPARLAAMADPALRATPEQLQDALRAAPTMGALHRQILGLFLARLELVESHMQILEKSIGQGLQAHQDAVQRLAEVPGFGVDSATQVIAEVGPTAGSFSTAPELCSWVGVCPGREESAEVSKSNRSPKGNRMMRRVLTQVANAAVKSKGSVFDVTYRKLVVRLGHKKAIWAIAHRLCRLTWKILHQGVRYIEYGMRLNKKAVQKRARRLLRDLQSLGYQVQITSSPSRSMA

SEQ ID NO: 223471 - protein, 344 aa, unidentified
MHIASMGIDLGKTTFHLVALGERNKVLVRKKFSRAQLLAYTANLEKSLIGVEAGAGAHFMGAALRDQGHEVRLIPAQFIKPYRKSNKNDFLDAEAIAEGVSKENMRFVQIKTEEQLDLQAMHRVRDRLVQSRTALINQIRGFLLERGITFAADPIHLRKNLPEVIEDAEQNLSSRLRLLLERLWQEWKQLELDVKTITEEIERISKENALCRRLLQIPGFGPLVSTATVAAIGNGAAFRRGRDFAAWVGIVPRQYSTGGKQKLLGISKRGNIYLRRMLIHGARAVLFRVKYDTGGFGQWVHRLAQRAPRNKVVVAIANKLARMAWAVLSSGKPYRHQSLQPAAA

SEQ ID NO: 223472 - protein, 358 aa, unidentified
MAVTGGTRRIVGGVDTHKDLHVAAVVDEQDRVIGTRSFATTRQGYRQMLAWMRSFGELQRIGIESTGSYGAGLLRFMQQAKVAVLAVTTPDKQDRRRRGKNDDLDAQNAAHAAFAGQRTVTPRSRDGMIESLRILMACRKTAVSARRVALQMIHNTIVCAPDGLRDQLRRLTRMQLVRTLASWRPDLTAYRDLDSAYRIGLKSLARRYLELHDEIADLDVMIAAIVDELAANLVARNSIGHIGAAQLLLTAGDNPERLRSEASFASLCGVSPVPASSGKTVRHRLNRGGDRAANSALHIIAIGRLRTDQRTKDYVARRIAEGHSKLDAIRALKRYLAREVFTLITQRRKEINATRIAA

SEQ ID NO: 223473 - protein, 350 aa, unidentified
MRFYTENRKYYCGIDLHTKTMYVCILNESGEILLHQNIPAKPTPFLKLIADYQDGLVVGVECIFSWYWLADLCDSEGIEFILGHALYMKAIHGGKTKNDKLDSEKIARLMRGGNFPMAFVYPAELRPYRDLLRRRNFLVRMRSEVLAHIKLTNYQYNLPVFEKHIGKRGNREDLAERFRDATVRKNVEVDLSVADHFHDQINQLENYIIRHVKQFDPRTYFRLQSVPGVGRVLALVMLYEVGDLSRFPTVQSFCSYSRLVKCPKESAGKKYGYGGGKIGNAHLKWAFSEATALFMRESDRAKAFVAKHEQKHGKGKAMSILAHKLGRAVYFMWRRNDAFDEKYFFSIDVV

SEQ ID NO: 223474 - protein, 466 aa, unidentified
MDLRLGIDIACRTAHQASLADHTGQLLWRGHRFHTITAELDRLWQRLPEGTDPTQVMVIMEPTRNAWVPLAAWFRRRGACVILVPPERSADLRAYYHKHTKTDRLDATLLARLPLLHPDGLHPEHGLGPADPLRRETKLRATLVKRRTTTLARLDALLELLGPGWLTALGVDLANKTPLRLLAAGYADPHTLKRLGRARLARFIYRHSRGAWGDAHAEALLAAATQTLSLWDDELDYAELADDIAVEARLALHLTEEIKELDERIGVLLVKLDPDGIITSAPGVAQITGAQILGRLGDPNRFDSLAGVRAFSGLVPSLTASGVTGKHGGPTKAGDAVLREALFIAADHARRLDPTLAARYHRLMVQAGKHHNSAVCHIAAALLTRMVACWRRGERYVVRDLDGREVTLQQARRIIAERYTIPPDRRRQANSITRPPQHRTSRRSKQSPCAPSTGPSTLHATTSSQT

SEQ ID NO: 223475 - protein, 391 aa, unidentified
MVCVGIDVAKDKHDCCILDSDGTIRADCITIPNNMDGFKQLLQTIRDCTKKSDKIKVGLEATGHYSYNILGFLLDNGLPTYVINPLHTNLYRKSLSLRKTKTDRVDARTIATMLLSDVDLKSYTDTAYHNEELKSLTRYRFDKVRERAKLKQSVSRLVTILFPELEKLVPSLHIASVYALLSEYPGAKQISEIHLTKLTNLLATVSKGRYGKDKAIQIRDAAKTSIGSVMPAKFLELKHTIKLIRELTSEIDEIEVSIQKIMDELNPPILSIPGVGIQSAAMILAEIGDFSNFESPDKILAYAGCSPSTYQSGKLTNCYAHMEKRGSRYLRYALYNATKYVCHWNPVFAEYLAKKRAEGKHYNVALSHATKKLVRLIYALQKSGKAYLVAA

SEQ ID NO: 223476 - protein, 342 aa, unidentified
MKEITTIGLDLAKNVFQVHGVDKEGRVVEQRKLRRDKMMKYFAELSPCLIGVEACATAHYWGRELSKLGHEVRLIPPSYVKPYVRRGKNDAVDAAAICEAVTRPHMRYVAIKTEAQQAALMLHKARDLLIRQRVQLGNALRGHLAEFGYVFAQGEAGLRQALACVEDAASNLPAPAIKALQRLAAHYLEARTDILALEKEIIVWHKKSADSRRLATVPGIGPLIASAIAATVGDASQFKSAREMAAWLGLTPKQNSSGGKEKFGGITKQGNAYIRRLLVLGATGQLRGGRRVKTVGGAWFKTLYGRKPPRVAIVALANKMARVAWAVMAKKADYRPDFRTSV

SEQ ID NO: 223477 - protein, 414 aa, unidentified
MAEETFAWFAGIDWGSEKHHACLVDAHGTIIGEREFPHSGKGLAELGDWLLSMAGTASAAIAVSIEVPHGPVVDVLIDRGFVVHAINPKILDRLRDRFSVAGAKDDRRDAYVLADGVRTDRRLFRRLHVADPRLGELRAWSRLAEELREERVRLSNRMHHQLWRYYPQMQKLTDDLATPWLLELWSVAPTPAKAGQLRKSTVERILKQHRIRRVDAETVLGTLQECAIKVADGVTEAASIHIRSLVARLGVVNRELREAERKLDELCAAISEVDTASGESLQRRDVVILKSMPGIGRINLAALLSEGSGLLSSRDYQGLRTLCGAAPVTKRSGKSHIVIMRYAAHGRLRNTVYHWARVATQHDPKCRARYAALRKRGHSHGRALRGVADRLLGLACILLQRGTPFDPHFARPTT

SEQ ID NO: 223478 - protein, 343 aa, unidentified
MSQFKRIGIDTSKAVFTLHGVDQAGQPVLRTNLRRAQMIPFFKNLPPTEIAMEACASSHHWARLLAALGHTVRLLPPQYVKPFVKRGKNDRNDAEAICEAAGRPGMRFVPVKSTAQQAEGMVLKVRETLVCQRTQLVNALRGHAAEFGVIAAKGIRQIPPLLEAIAAETAIPSDAREMLALFGQEIEHLDSRLKAIEVKLIAMHKANPISRLLATIPGIGPIIALTLAIEVDPAAFKSGRHLAAWLGLAPKEHSTAGKQRMGGISRAGNERLRQLLVTGATAVIKVATRPGNKLATDWLLKLLQRRPRKLAAVALANKMARTAWAMMTSGEAYRHPPVAAVSA

SEQ ID NO: 223479 - protein, 390 aa, unidentified
MSQSFDASRSLTAFEQDSTLVAVIEMSQSKWLVAAVIPGIARQPLKKLDADAGALLKLLQRWREEARTAGREVKRIACAYEAGRDGFWLARWLQAHAIEAYVIHATSIAVSREHRRAKSDRIDTELLMRSFLGWLRGEKRHCSMVAIPTMAEEDARRPSRERENLVGEQTRIVNRVKAVLALFGIGGFNPRLRKAVQKLETLHTAEGMPLPENAHAELRHDLERLRLVHDQIGTIESERLRRLAQAPAAATGPHAMVRLIARVLGVGIETADMLVNEVLTRNLRDRRAVARYAGLTGAPDESGKRRREKGLARAGNGRVRRGMIQLAWRFLIFQKDSRLVQWFRERTADGRRTTRKTMIVALARKLLIALWRLVTTGEMTEGVKLRPAGT

SEQ ID NO: 223480 - protein, 422 aa, unidentified
MRSVALDVHLDFCEVAIVEDGEVRSAGRIETKPEQIELFASSLGPGDRVALEVTGNAWEIARTIQPHVAEVLVVSPSDTGIRQARAKTDRLDARTLARLLAAGSLDGVWVPDRWTWVMRRRLSRRSQLVWARSRAKNQVHAVLMRQLVGRPPVADLFGVKGRRWLSELQLAPEESETVSAAMRQIEFFEREIAEVEQLIALAAMESAEIKRLMSVPGVNVIVAASFMAAIGNIHRFQSPRKLVGYLGLDPRVHQSGVGPASHGHISKHGSVRARHALVEACWTTVRQPGPLHAFYQRIRARRGHSVAIVAAARKLASLFWCLLTRGEDYAYQQPSLTRKKLRRLQIAAGAERYTPKASGIWSANDAVREAERELARQAEVAYARTVRDWHAAQAVKVGASVTPGRASKKPSKGEAARQTTSP

SEQ ID NO: 223481 - protein, 410 aa, unidentified
MSLFCGIDWATDHHDVAVVDSGGQVVARGRVDNDAAGFAQLLMMLAEAGDTREHPIPVGIETDRGLWVAALRETGRVIYPINPLAASRYRARYAVSGAKSDATDAVLLANIVRTDAAAHRPLPGDTELAQAIRVLARAQQDAVWARQQIANQIRDLLKDFYPAALVAFAELPTGGLARADARAVLAAAPTPAQAATLTPARLRRLLVRAGRRRDLDRDVERLRAVFADTYLHQPPMVENAMGIQLATLLRQLEAACAAADELTQAAIAHFERHPDAAIITSFPGLGNLTGARVLAEIGDDRNRFADARGLKAFAGSAPITRASGKKTVVTHRHIKNRRLTAVGSIWAVAALRGSPGARRHFDARRAAGDWNRQAQRHLFNKFLGQLHHCLQTGQHYNEHQAFPPPLTLAA

SEQ ID NO: 223482 - protein, 355 aa, unidentified
MAMLAEDYDFVIGGDPDRDTIDLAVLDTGTGRVLAHVAEAADGAGYERMLTWADEHAPGRRIWALEGTGSFAASLAAVLIDADETVAEVGALKRSHGAKNDRIDAIRAARQALARDEQGAPRAGGLREALRMVFACREGVLVSRTKAINELKSLIVVAPEQIRAQLRGRTLRSQLTRIEELQVSATASIEHRLCVFSLQSIAARVKFLFTQLAELDPQLLELIKQHPAGPVLLDEPGVGPVVAAQLLISWSHHGRVRNEAAFASLAGVAPLETSSGQHSRHRLNRGGDRALNRALHTVAITRMRCHPETRAYEIRRTAEGKTHRDIRRSVKRALARRLYRRIEAAAQLVTTPAAA

SEQ ID NO: 223483 - protein, 339 aa, unidentified
MSKLTQPKQAMVFCGIDVSAATLAVAVQQENQRFEERVFDNTASGHRTLIGWLRKNKVPVRVSLEATGIYSLDLALALDQAEGIEVAVLNPKLIHRFAQTLRRSKTDSADAQVLAEYSCRMPFVPWSAPELSGLRLRTISRHIQSLVVEQTRQNNRLHNAEKSATTPRCVVNDLKRSMASLKLRIVRLRREALELVRSDEAMRKRFDLLVLIPGIAAISALQLLGELAPLSPEMSVRQWVAHSGLDPSHQVSGTSVHRPSRISRAGNRHLRRALYMPALVAVRRDPHLKAFYETLLNRHKAKLQALIAVARKLLHAIYGILRTQTAYDGSKLFPLMGTT

SEQ ID NO: 223484 - protein, 410 aa, unidentified
MEVLHPHCAGLDVHKETVVACVRHMVNGTIKREVRTFDTTTTSLLALADWLASEGCTVVAMEATGVYWKPVWHVLSDGDFELVLANAKQVKNVPGRKTDVNDATWLADLLAHGLIRASFVPDADTQVLRNLLRTRKQLVRERSSHVQRLQKTLEDANIKLDVVISDIIGKTGRAMLEALIAGETDPSKLAALAHPRIKAPPAQLREALRGRIMEHHRFLLRLHLRQIDAIDTAIAELDREVNERIEPFRTTIELLTTIPGISELGARVIAAEIGNDMSRFATAANLISWAGLCPKNDESAGKRRSTRMRKGAPWLKTTLIQCSWAAARKKGSYIQAQFHRIRSRRGAKKAIGAVAASILTAIYHMLKNGTCYQDLGPDHFDRRAKTTKTKHLVARLQNLGYAVQITPLAA

SEQ ID NO: 223485 - protein, 392 aa, unidentified
MYIVGIDIGKNHHEASIVSPEGKQIGRSLRFATTHKGADSLMSFIFKNIGNSPCVFGMEATGHYWYPIYSFLKAKGYTIYVINPIQSDSLRKMYIRQTKNDSIDSFLIAEVIRFGQFGTTSMADENILAMRQLCRYRDSVISSRTEIKLRIGTIMEQIFPEYEKQFSSLWVSTSMGILEKYLTPENIENAPIDELFEIIKDKSHNRLTKAKAISIKEAAADTFGIKIAQDAFSFQLKQLIDRMNFLDKQIEALDCQILEYYEKFDCYLHTIPGIGIIGAATILAEIGDISRFKNSSSLIAFAGIDPTVRQSGEFNSTHNHMSKRGSPYLRHAIFLAATTCSFHNSPLNAYYKKKRDQGKHHLTATGAVARKLTSVIYAVLRDSKPYEPKSFC

SEQ ID NO: 223486 - protein, 415 aa, unidentified
MDLLVERCAGLDVAKDEVVACVRTPGPGRQRRQQLRTFPTFSADLEALADWLVAEGVTQVVMEATGQYWKPIWYVLEGRGLELLLVNARHVKIVPGRKTDVADAAWLAELLEHGLLRSSFVPPPAIRQLRDLTRTRTTLVRERAREIQRLEKLLEDAGIKLSSVASDITGVSGRAMLEALIAGRRDPTELAELAKRRLRSKIPALTEALTGRFAEHHAFLARLHLDLIDQHSRAVEELTARIEVVIEPFRGARDLMITIPGISVGVADVIIAETGPDMSRFPTAGHLASWAGTCPGSNESAGRIKSTKTRPGNPYLKGALGVAAMSAARSKDTYLSAKYRRIASRRGPVKALVAVEHAMLIAIWNMITTGSFYSDPGGDYYTRLHPDRTKQRALDQLKNIGYTVTLSPLAEAVAG

SEQ ID NO: 223487 - protein, 350 aa, unidentified
MIIIGVDYHPEFQQVASVNTETGDFREVRLQNPEQAEQFYRELSGLSTQVRIGMEASGHARWLERLFSELQFDLWIGDAAQICSKRVRKQKTDRQDAQLILQLLVEDRFPRIWVPGSENRDLRQLLWHRHRMVQARTRVMNQLQAVALNEGLRSKKRLWRERERQQLESFQLGPWANRRRHDLLHLLDELNPIILELTQAVERESEKYSQARRLRTHPGVGALTALAFVLILGDVERFYCGKQVASYLGLVPSEKSSGSRRRIGHITKQGSSILRFLLVEAAQATVRSVPEWRRKYFHLMQRHGRNIAKVAMARRLAVRLYWMWRRGWSYEQLQKFGSHVGEPGNPYGVQ

SEQ ID NO: 223488 - protein, 325 aa, unidentified
METKKLCCGIDVSHTTLDVCYQNNLGELFHLQVGNNIKGFAKILEHTGINYHFVMEATGVYYIRFAFYLHQQGCKLSVVNAISIKRYIQMHLERNKSDKKDARWICRYAIEQHPPYWEMPDSAYFECKQLYNTIREYTEQIKRFNNQLHSIKLLPVPSKDTIRSLEKTNKQLAEQVEYLEIKLETILQQWQPEQLKNVSSIKGIGKRATAMLIVFTQGFKNTHNHRQLISFAGLSPTEYSSGSSIHGKSRIHKRGGKNLRDVLYMCAMNAIKTNAACKALYERLRANGKTGKQALIAVCNKLLKQVFAVVKNNTLYQPNYCSPKP

SEQ ID NO: 223489 - protein, 344 aa, unidentified
MQIDILGIDLAKRVFQLHGAIRGGAVVHRSKVSRPGLMQAIVRLQPRLVVMEACASAHHWARQLEASGIKVQLISPQFVTPFVKTNKNDRNDAEAIVEAASRPTMRFVAVKSVEQQDIQALHRMRQLLVHQRTAVINHLRGILGERGVVVAKSPAAFHSAMPAVLAAESNELTATCRGLLVESLQHLDVIERRIEEADARVRRLMSSCELSRKIGAIEGIGPLTATAVVAAVGDASAFKNGRHLAAWLGLVPRQHSSGGRSQLHGISKRGDTYLRTLLIHGARSVLRWLGEKQDAHSRWLRDLIERRGFNRAAVELANKNARIIQALLSSERAYRPRSLVAAPA

SEQ ID NO: 223490 - protein, 402 aa, unidentified
MNAVGIDVSKSKSMVAIMRPFGEIVSTPFEIKHTASDIRSLIELINSVEGESRIVMEHTGRYYEVLAHQLSEANLFVSAINPKLIKDFDNDSLRKVKSDKADAVKIARYTLDKWQNLKQYNVMNELRNQLKTMNRQFGFYIKHKTAMKNNLIGILDQTYPGVNTYFDSPARSDGSQKWVDFASTYWHVDCVRKMSLNSFIDHYQNWCKRKKYNFSQSKAEEIYGKAKELVPVLSKDAITKLIIKQAVDQLNSASTTVESLRTLMNETASKLPEYPVVMAMKGVGTSLGPQLIAEIGDVSRFTHKSAITAFAGVDPGVNESGSYEQKSVPTSKRGSSDLRKTLFQVMDVLIKTHPQDDPVYQFLDKKRAQGKPYYVYMTAGANKFLRIYYGRVKEYLSSLPES

SEQ ID NO: 223491 - protein, 401 aa, unidentified
MKIVIGVDPHKLSATIEVVDQRENLLGSGRFTTDKAGFAAMRKYVHQWPEREWAVEGSLGVGRPLAQRLLEAGERVVDVPAKLAARARLLDTGHGRKTDAHDAHSVAVAAVRAKDLRVLAPDGQLEALRMLVDHRDQLANQRVATVNRLQRLLAELTPGQAKKDITALQAKAILASVRPRDLAGKTRRRVAADELANLMAIEKKVKALTVEIKVIVKERGSNLMDLSGVGPVVAARILADVGDVARFADRNRFASWTGTAPLDASSGEQTRHRLSRAGNRRMNRMLHIAATTQIRLDTEGRAYYRRKLADGKTRMEAMRCLKRRISDAVYRQLIADAHANNQGVGAGPGGHCGASQESSAVDLPPHIDTSDQPLPGPADPTLQPTPRPRKTATERPLKQAG

SEQ ID NO: 223492 - protein, 356 aa, unidentified
MNKISKLDFEGQQIYLGMDVHKKSWSISVLTDEFEHKTFTQPPEVSTLVNYLKRNFPGASYKSVYEAGYCGFWIHDCLQEHGVQCLVVNPADVPTKDKERRKKTDRVDCRKLAKSLRSGEIEGIYVPCRPKVEDRTLIRTRHSMVKKQTRCKNQIKSILQFYGIQIPEELADSHWSKRFITWIEAIRMERASGNFALKAYVEELNHMRKIIAELTRGIRSLANAEEYRQNVCLLKSVPGISILTAMTILTELYEISRFRNLDKLCSYVGLIPDTHSSGETDRDMGITKRRNAQLRGILIESAWVAVRKDPALLMTFNTLCKKMPKNNAIVRIARKLLSRIRYVLKNQQKYASAIVQ

SEQ ID NO: 223493 - protein, 409 aa, unidentified
MQVVHPRCAGLDVHKKDVYGCAVVIDEKGKKHQEIRRFGAVTRDLLELADWLKGHAITHVAMEATGVYWRPVWAVLEGQFELLLVNPHHVHALPGRKTDAKDCEWLADLLQHGLVRSSFVPPTDIQDLRDLTRYRVELTQAQGRVANRIQKVLELANIKLSSVASDTLGVSGQLMIEAIIDGEDNPEHLADLAKRRLRQRIPDLQLALRGKVRDHHRFLLKEHLSEWKALSERIIRVEQEIERRIVPFEHAVTRWKSIPGIDHVTAWCLVAELGVKMDQFPTAQHLASWAGICPGHNESGGKRISGTMRDGNRWLKRTLCQAAWAASRKKNSYLSAQFKRLATRRGIKRALMAVAHSILIIAYNMMRRAESYHELGADYFDRINQTQLQNYLIRRLQNLGVTVTVQRVV

SEQ ID NO: 223494 - protein, 327 aa, unidentified
MYLCILNQEGAIVLHRNMKANPESLLEAIGPFRENIVIGVECIFTWYWMADVCAREGLAFVLGHALYMKAIHGGKAKNDKIDALKIATLLRGGMMPEAYAYPAEMRSTRDLLRRRMHLMRQRAELLGHVQLTNQQYNLPEIGKKIAYRSNRSGVAERFADPVVASNVEFDLKRITFYDDLLNQIELEIVRHAKQHDANTFQLLDTIPGVGKILALVMLYEIHDIKRFPTVQDFASYCRVIKPKKESAGKVYGSSGGKIGNAFLKWAFSEAAVGFLRNNPPGQAYLARLEKKHGKAKALTALAHKLARAVYYMLRRKEAFDMKRFVNR

SEQ ID NO: 223495 - protein, 381 aa, unidentified
MTKNIRYVGLDVHRDTIAVAVADSGRDGAESLGTIPHREEAVARLMRKLGPARTLRVCYEAGPCGYGLYWQLAGLGIACAVVAPTLVPVRTGDRVKTDRRDAVKLAQCNRHGALTPVWVPSPAQEALRDLVRAREGAKQDQLRARHRLGKFLLRHGRRDPQPGRAWTATHLAWVRAQTFGLPAQAAAFLDYLHEVDHAADRIRRLDQALDQAVATADPGPRAVIAALQALRGVSQVVAVTVVAEVGVLSRFARPKQLMGYSGMVSREDSSGPRVRRGAITKTGNAHLRRVVGEAAWAARYHPARSPALQRRQAALPAEVVAMAWQAHVRLHTRYRRLLGRGKVKQQVITAVGRELLGVIWAIGVWTERQQTTASAVPARAA

SEQ ID NO: 223496 - protein, 300 aa, unidentified
MEYYVGLDVSLKQTSICVVDQTGSVVREGVVDSDPEAISVYVRSKAPDAVRIGLETGPTSTWLWTELKQLGLPVICIDARHAKAVLKMQINKSDRNDAIGIARIMQTGWFKEVHVKDIDSHSVRALLASRALLVKIKRDLENHVRGLLKNLGLVIGRAKFNVFAVRVDELIEGRPELVAAVRPLLEARNAVEQQVSELDRKVMRLARHDAHVRRFMTVPGVGPITALAFKATIDDPARFARSRSVGAYVGLTSRRHASGEVDWSGRISKCGDAMLRSYLFEAAGVLLTRVPKWSAVKAWG

SEQ ID NO: 223497 - protein, 356 aa, unidentified
MQTQVTKKIDFSDKDLYIGLDVHKKSWSVTIVVDGIEHRTFTQPPDPNALFNYLQRMFPGGIYNSAYEAGFCGYGIHRELNSLGIKNIVINAADIPTTQKDKLQKRDPVDSRKIARSLEKGSLHGIHIFNRELEELRSLNRTRFYLMRDLRRSKNRIKSFLQYYSEPIPPEFDNNQWTLKFVSWLKQVKMQTTSGQDSFSHLIKSYEHHRKQLLELSRLVRQRIRDHDNELYSLLRSISGIGPLTSSALITELGDINRFNNIDQLSSYVGFIPKIRESGETTHTGGITFRCNTFLRTLLIEASWQAVRRDPAIMQYYHKHLVNNKGHKVIIKVARKLLNRIRYVMKNRQPYITGVA

SEQ ID NO: 223498 - protein, 342 aa, unidentified
METVTTIGLDTAKSVFQVHGVDAAGQVVMRRQLRRRQILAFFQKLPPCLVGIEACASSHHWSRELQALGHTVRLMPPAYVKPYVKRQKNDTADAEAICEAVARPNMRFVPTKTVEQQSCLMLHRARHLFIRQQTAVINSIRAYLAEFGIVAPVGRRGVEQLLEIAADTVDRLPEIARACLVALGVQLRTLKAQILEFDRRIIAWHRSNATSKRLDAIPGVGPALATALVASIADPRAFRSGRDFSAWVGLVPKQNSSGGKDRLGSISKQGDRYLRSLFTAGALAVIRYAKIRGTGHRPWLAGLLARRPTKVAAIALANKLARMAWAMMARGQCYQEPAALAA

SEQ ID NO: 223499 - protein, 350 aa, unidentified
MEKSAKPKAAVQVFVGIDVSAHELSVGMRRGFEDRLKITTFTNSAAGHKALLVFLLQGNARARVCLEASGNYSLDLALTLQAHRQVEISVINPRRARRFAESLGERSKTDRVDARVLCEYAARMPWMPWQPPSPVALHLRALTRAIADLSCIHTQQNNRAHAAAASHALPGLVVKEMQRHQKYLEQRMTRLRREALRLVAGHFELDRRFRLMLTATGIGETSALQILGELAVLPDTLDARQWVAFSGLDPRLFKSGKSVEKRPRISRGGSRHLRRALYMPALVALRRDPYLRRFYQKLVARGKARLQAVVAVMRKLLHALFAMFRTNQPYDGSKLCCTVDMAGNAIVACV

SEQ ID NO: 223500 - protein, 371 aa, unidentified
MEGPIISIDVSNGCSHFRCFIDRNKAFGKVHKIKHDVDGFQYLLDCMERLNEKTNEEVCVVYEATGVYTKPLTRFLNKHKVRHYMVNPLQAAKMRKTDLHSKKTDKNDPNSIAKVYYDKDLYEYADEEPIYHTLRVMNRNYEDQLDHLRKYKVTFQNILSIVFPGYGSLFKNPYCDIALAILKKYPHPDMIRNKKPETVANYIEKHTCHHKDSCLKWAVKVIEYANKTYPGCDKDEIEVIELLRIIKELEVCIASCDTQLNEMVQLAEQLPNYFLILSIDGIGPNLACRILAEIGDIKRFGNTKQLISYAGIDPHISQSGDVDGLHLSISKKGNKRLRCLLYLAVTCNLRLKKENDPIQQFYKKKKQQSVP

SEQ ID NO: 223501 - protein, 456 aa, unidentified
MNERSKKQRRRKSSPKHFPIVHRNAAGIDLGSRSHFVAVPEDRCQESVREFGCYTPELHRMARWLRDCGIETVAMESTGVYWVPVLELLEDYGFEVLLVDARQVKSLSGKKTDVVDCQWIQRLHCYGLLKGAFRPQAEITSMRAYWRQRSGLVKECARHIQLMQKALEQMNVQLHKAVSDISGKTGMNIIRSIVKGERDPKVLALHRDRRLKASYDELVQALTGNYREEHVFALTQAVQGYDFFQQQMENCDRQLESYMQRLPTKKPSQAPSPTRRGTRRKNQPYFDLRSEVVRIAGFDASLIPGIDALSAQELICECDIDMKSFPSAKNFASWTTLCPNNRKTGGRIRSRNTRSGANRAATVFRRAAQSLHRSQTALGAFHRRQRARHSGPEAVTATAHKLARMYYRLAKYGDEYVEQGQRAYEEQYKRQSISALKRRARHMGFQLLQPETGEVL

SEQ ID NO: 223502 - protein, 357 aa, unidentified
MGQSNRISFKGQNIYVGIDVHLRSWSVTILSETSVLKRMSQGADPDALHRFLASHYPEAEYHSVYEAGFCGFWIHDRLTELGIHNIVVNPADVPTMGSEKLRKTDAVDSKKLAVSLRARQLKGIYTPDGEALEIRSLIRLKNSITKDTTRQKNRIKSQLRYLGIEIPAEYLEPHSNWSKRFLNWLKEVDMRTPSGRHSLDILIMQFEALRKQKAEMTRKLRELSHTERFEETLKLLMSVPGIGQATGLALISEIVDIARFANAEQLAAYVGMIPMCHSSGDHEGVGDITLRKHAILRSNIIEAAWVAIRKDEAMQLCYLNNCKRMVPSKAIVKVARKLVNRIYFVLKRRQPYVNAVA

SEQ ID NO: 223503 - protein, 334 aa, unidentified
MDKLPVFVGLDYHKDSVQVCVLDSGGKVLGNRACDNDPRRVVEYVATHGGVRGAAMESCEGAADFAEGLMAAADWSVDLAHPGYVHRLRQNPDKTDYSDARLLADLERVGYVPKVWLAPQAIRELRRLVRYRRQLVNERRNVKLRVRALLRAHRRGCAAPRWGVAWFQWMRDVDLPEQSRWILDRHLDRLEQLNGDVQGVERRLDVVTKDDAVVQKLLTLPGVGSVTAWVLRAEVGRFDRFRSGKQLARFCGLTPWNASSGSRQADAGLIRACNHDLRSVLIEAGHRLKRCDPRWSALANQLRQAGKPGSVIAAAVANRWMRWLYHEMTAAQAA

SEQ ID NO: 223504 - protein, 431 aa, unidentified
MKYKQSKKQNQRIQQITELTLVVGADIAKKTHVARAVDFRGIEIGKDCVFGNDHSGLTKLVSWMKELQRQYAKTDIILGIEPTGHYWFPLAEFLHRENIKVVIVNPHHVNKSKELEDNSPTKNDYKDARLIADLVRNGKYSEPKLPTSVYADLRILMNLREKVMVNFGQVQRRIQNWLDRFFPEYSLVFKDWEGKASLITLREFPTPQEIVSLGASTIVNRWKEDVKRAVGSKRAAQLLQAATNSIGLTEGLTAAKIELKALLEQYELFSRQLEEIMAQVEALLAQIPGTNEMLTVPGIGVVTLAGFLAEVGDLSGYDHGQQIIRLAGFNLKENSSGKKKGKSTITKRGRSRLRALLFRAMMPMVAKNAEFKALHHYFTKRSHNPLKKKQSIVALCGKLIRVLYTLGTKCIPYNASDVLGPVRQSQIQMVA

SEQ ID NO: 223505 - protein, 399 aa, unidentified
MDPVIGLDVAKGESQVQAFLQRKKTYKQSFKFEHNLQGLHIFYQFYQEVEQVSGQPPAVIFESTGHYHEPVLQFLEEHGVTYYLINPVISYEARKTNLRKVKTDKIDAFHLGELYYKEDLEVYQKKTEQFLNLRQLTRQHSALTDSYVEVKLQFQAALDQIFPEYHGVFSKLYGSLSLNILQQYPTSWDIQNVSHQVLATEMRQFGAKRSHAWFWNKASELKDAAERNPFLNPINQGQLISLRLYIQLLFQYQEHLSKLEKEIDALATTFEEYDLIRSIPGIGTKIAATIIAEMGNIDQFNHPKKLVAYAGIDPSVFESGKFKATINRITKRGSSRLRHALYTAVDCGLTQNRNKKLIAFYNRKRNEGKPHRVAVIACANKLVHWIHAMFKREEVFVDQ

SEQ ID NO: 223506 - protein, 400 aa, unidentified
MRTVFGIDVSKASSEVAILVNGEKVHGYTMPNDCIGFSRLLSDLDFVYRPEVIFEATGVYSRRLQTFLENNDYTYTRLNPLEAKKQLDSLRVRKTDKIDAEKLALSQFSLNRKPSYVQKSVYQELRDLSRFYQNLTEDIVRTKNRLHKALQVTFPELETLLSAPTGKQYWSLVTAFPSKDFILDWSEADLTKVIRQSTAKRMSDKRVSYLVTKLLELAKQSYCAVKKASPMIEEVRYYAQELLRLTERRQVTLDNMIELAQPLPEYDILLSIPGIAETTATSIIGELGDVRRFQSANQINAFIGIDLRHYESGIYLAQEHITKRGNPYARKILFKTIHNITTAGHYHPCHIAEFYEKRKRQSQVISTKSATIAAMHRLIRTIHYLIVHNKLYNYDLAKSH

SEQ ID NO: 223507 - protein, 341 aa, unidentified
MNYVGVDLHKERSWFYVTNDQGKRIDSQSISNLPDVLRTYYETLPRPFTLAVETTYNWYYFVDLAEEYADKVYLANSYELKAFAKRNKKTDKIDARLIADILRKGYLPTVSIPAKKTRDIKELLHCRMNIVSERSRNVTRLKSLLDRHGQMSTGCFTSTKRLNSIAVDKLSEPCRIAVANLTEQIAGLEQRANHIEWQISKIAKSDNDASNLTSIPGIGYFGSLLIKSEIADISRFASFNRFCAYAGLAPKTFQSADKEYHGPLNKNRRKHLQWILFESVYHFSKSSPERTAKYEAIAKRKSPNVARVVLARDLLKIIYRVLKDKRPYYERTMAPLALDRV

SEQ ID NO: 223508 - protein, 312 aa, unidentified
MDAMVVGIDVSKDRLDVAVRPTGESFVFKRTAAGIEDLVARLKARSPTLVAIEATGGFEAVVAAGLAGAGLPVVVVNPAQVRAFARALGKRAKTDPIDAVVIAHFAEATKPQLRQIPDEMTRLLAELVARRRQIVDMIAAEGQRAGRMSDHRLTRSIGRLRKALEKELDELDRLIDDHMRGSAVWVETEKLLVSVPGVGKTIARTLIADLPELGSLDRRQIAALVGLAPWTRQSGQWRGKSFIGGGRKSVRSSLFVGAMVAARYNPQLKRFRDRLVAAGKPKLLALVAVARKLITILNAILRDRRPWQPLAA

SEQ ID NO: 223509 - protein, 432 aa, unidentified
MSQFINDFVVGIDVSSEFSIVAMLAPTGELIRKPFRIDHNPAGFHKLLDILKKEEERLNRKPIYFVESTGIFHLPLFFFLKSNDLKGFVLNPLCVHSTKNFDLRKVKNDNKDSVAIARLAKYQDIKVSMMPEPQILALRMMTREYYAVSDMLTEMKNRLCTDLYLLFPGFLDVFSGPLGKTALAVLRSYPSPRALREAGTDVLTLLISKTSRKSSEWASKKVALLCDCAQLASSMPSEFSLLDTKIKFHIDGIEHMQASLKGLEAQIKTMIGSKEFPAEARQNIELLDEIPGIGFLTAATLIAEIGDFSLFNSPKALTAFFGLDPSVNQSGKFNGDRNKISKRGTRIGRRILFTVAMASIRTTRNGKEINPVLREFYTSKCVSKKKKVALVAVMHKLLHYIFAVLRDQKPFEIKRPEDHQSWRKTKLQPSAA

SEQ ID NO: 223510 - protein, 423 aa, unidentified
MMKLKYSICCGLDVHKNVIVATIVTTNKDGISEYLQKSFSTINSDIQRFHNWLIENNCYHVCMESTGKYWIPIFNYLENDIDVCLTHPKYVKAIKGKKTDKKDSKWIADLYKFDLVRCSFIPPKDFRQLRELSRYRFKLVCMKSSEKNRIQNCMTISNVGIASVLSDPFGKTATEIMSYLLEHTADSMDEKAVRKLIKKGAKAKSDEIIEAIKGYNIETDQAKKLELAQGHLEYLDDMITQTEVELYVRIKPYYEFVEFVSTMPGMTELSSTIVLAETGVDMDIFDDAKHLCSWCGLSPANNESAGKKKSVRIAKAGDYLKPMMVQCALAAIKSKKQPYFAIKYGRIKKRRGHKKAIIAIARMMMVCIYHMVSEKKPFTPTDYEELMDPQNHVESVVLNENNVFAYLESLGYDSSKLVKRNDN

SEQ ID NO: 223511 - protein, 395 aa, unidentified
MSAEGEAIRSNDYRKDTTVKAPSTRPATVLGLDVGKSSHWACLIDRDGEVLSSAPVRNREAELDALFASVPAGTLVVVDQFRNIGSLAVRRARAAGLGVAHLPGLAASRAAGLFAGEAKTDERDAAVIARTALGVPDSLSGVPGRGEALEAARALSSQRDHVVACATRDKNRLRAVLLESCPALEAAVDLSDRRWLELLAGFGGAWGIARSGAEGPQAEAAGEAAAASTAPPPALIEAENRQVRFLAARISEALDEAGALEAETAALLEGDETYACLLTVPGIGPRTAAQLAVSVDIGRFPDHDHLASYCGIAPRVRSSGTSVRSVRASRRGDARLKSLLIFSCNSLVRSSGRYGEYYRACRARGMGHGRALKAVARKRLRAIYAVMRDRVPYRE

SEQ ID NO: 223512 - protein, 377 aa, unidentified
MSTVADTYKYVIGVDTHAKTHTYAVVAAATGAVIDTASFPTTDAGTARAIAWIERRSDGQQLAAVEGTGSYGATVTRALTTAGIRVCEVKPPKRQARDGHGKTDQIDAVAAARTALGTDATALILPRADGLRSALRVLLVARHSIDSQRTSDRNALNALLRIINLGLDVRAPLTNTQVDIIAAWRDRSSDDIAAAVARSEARRLASAIHQRTRELETNHAALSKHVDELAPGIQDIPGVGPFTAAIILTAYSHQGRVRSEAAFAALAGVSPIPASSGNTTRHRLNRHGDRQLNRALHIIARCRMITDPTTKSYVDRRTAEGKTRREIHRCLPRRSIVMILLWAENFSARRTCGVAHSHSHPRAGHRKASVFVMPLSA

SEQ ID NO: 223513 - protein, 419 aa, unidentified
MRAVALDVHRDFCEVAIVAEGRVRSAGRIQTRPEALELFAASLDPREWVALEVTGNAWAIAAILEPHVARVIVVSPTDTGIRQARAKTDRLDARTLAKLLWAGELDGVWTPDERVRAMRRRLARRAQLVRARSRVKNEIHAVLMRCLKDRPPASDLFGIKGRRWLADQQLALCERETVDAGVRQVDFLDTEIAHVERLIAADALGWPEVKRLMTVPGVNVIVAATFMAAVGDIRRFGDRRKLTAYLGLDPKVRQSGAGPANHGHISKQGSNSARHALVEACWSTVRQPGPIAAFYARVKAKRGHSIAIVASARKLACLFWCLLTRGEDYAFAQPSLTAKKMRRLELTAGAPRRRGGRDVWSTNTKMRSAERALALQAQRAYERTVADWKAAAKVGASATPGRASKGSSKDQAARQTTSP

SEQ ID NO: 223514 - protein, 399 aa, unidentified
MPSTKLQNSVDFNGQKFYVGLDVHKRSWAVTIRSIGIEVARFTQPPSVSILAAHLQKYYPGGQYFSAYEAGFCGTAIHEQLCKAGINNIIIHAADIPTTDKQKRNKTDVRDSRSIADYLERGKLTGIHVLTREQQELRSLFRLREAKVRDVTIANNRLKSFLMFFSIELPETIGKKEYLSLKALEWLRNLEMACTAGTITLRQHIEGLQYQRKQLYQVTKLLREQIQATDPQTYRCLLSVPGIGGVTAMGLIAEIADFTRFEDPDHYSSFLGLCPWEDSSGDTIKTKGMQPRCNRHLRPLLVEASWMAIRKSPALFAYYSKHAVRNPKRAIIKVARRLAMIAKGVATTHQLYQEDYLQKMKQKQHEQKQDRKTKRFSSGITEQHKNKQPNNDIPISLPG

SEQ ID NO: 223515 - protein, 428 aa, unidentified
MTNRDTIPPGAVLVALDIAKLRNEVLIEMPGQQRRRRLSVLNNRTEHDRLIDILKAFDAPVVCAFEATGNYHRPIAWRFMEAGFDTRLVSSMALARTREALHNGWDKNDPRDAQVILHMLRVGASQTYHDPMKAGINDVQELSKTHEAIANAKTEIQHRILTHYLPLYFPEVERFRGNTRSDWFFAFLEAFPTPGSIVALSREQFISDAWQVVGRKVSKERLLSDIYETARTSIGLPLPLNSPAVRMFRMVIAEARGLIRQRDEIEELADTLLHGSADYQALRQIPGIGPIIALTIIAEAGDLRRFRHHRQFLKFCGLDLSTQQSGQYRGQTRLSKFGNARLRRCLWIAGQVAIRQRENGFRDKFERYIARDRDSPDLRRKALTAITAKMARVVHAIIKSGSDYRPFFEGRVPGGRTPLRRAVRAPVG

SEQ ID NO: 223516 - protein, 347 aa, unidentified
MEKASQAEVQVFAGIDVSARELSVAVQCGIKEGIAITTFPNKAAGHKALLAYLLRAKGRARVCLEASGNYSLDLALTLQAHSQVEISVVNPRRARRFAESLGERSKTDPVDARVLCEYALRMPWVPWVPPSLAALRLRSITRAIEDLVAMQAQEKNRQHALLASDALPALLIRELEQHLRYLKLRITRLRREALRLIARNPELNRRFHLMLTTPGLGETSSLQILGELVVLPETLDARQWVAFSGLDPQQFSSGTSVEKKPRISRGGNRHLRRALYMPALVATRHEPFLRDFYQRLLRRGKAPLQGVVAVMRKLLHALFAMFRRDEAYDGSKLCPAEFARHTAVVCV

SEQ ID NO: 223517 - protein, 327 aa, unidentified
MKDTFLGIDIAKDKFDICLLMGDSKLIGKFDNKESGFHKLLSWLEKKKVDLTSIWACMEATGKYGEDLAYFLSSKDIKVSIVNPASIHYFGESNLKRNKTDKIDAELIAKFCEIQQPDIWIPPTEAEREIKEIVRLIESLEAERQRHKNRLESRLVSEAAIEATNNLIRSLNEQIKVLEKRKNELAKKDEVLKQKIELLKSIPGIASKTAIRFTAEIPNIEGYDSAKELAAMFGITPSQKQSGSSVNSTKISKKGNRKLRKAFYMPAISAMQHNKFVREFIDRMRAKGKKGKELICAAMRKLIHIIYGVLKSGKPFDANYQNISFSS

SEQ ID NO: 223518 - protein, 350 aa, unidentified
MLIIGCDYHPSCQQTAFVDTESGEFGERRLVHPEEAEQFYGDLQRRNIAVRVGMESSGHSRWFERLLHQLGFELWIGDPAEIRTKRVRKQKTDRQDAQLLLRLLMEDRFPRIWVADAENGDLRQLLWHRHRLVQMRTRVMNQLHVVALNEGLQRKKALWRPAGRKELESLVLARWASRRRQDLLELLDHLTPQIQKLTQALEDEVEKRAVTRRLMTHPGVGPLTALAFELVIGTPNRFHCGKQIASYVGLVPTEASSGDRRRLGHISKQGNALLRFLLVEAAQVTVRSLPEWRSRFFHLAMRRGRKIAKVAMARKLAVHLYWMWRQGCDYGQMQKLGSHAGAPGNPDGEQ

SEQ ID NO: 223519 - protein, 369 aa, unidentified
MEKRIKNIGLDVHKNSISIGIADDGRDGEVRFYGKIDNDMNQLDKVIRKLISKGAVLRFVYEAGPCGYGIYRYLTNNDMDCAVVAPSKIPQQSGNRLKNDRRDCLSLARLHRAGELTAVYVPTPEDEALRDLVRARIDATRALRVAKQQLGAFLLRHDMIFSGKTKWTKTYFVWLSSVTMAHSAQLIVLQEYIDTVTDCIDRVHRLTEQIRLQSRQSSRHELIQALQAMRGISLIVAATIASELGDLTRFENPGKLMAFLGLIPSEHSSGDQVKKGSITKTGNRHVRNALVEATHAYRFSARKSRTIRKRQEDLPKKVIDISWKAQCRLCARYQYFMAKGKKVNVTKTAIAREIAGFSWAIAKELSKAV

SEQ ID NO: 223520 - protein, 445 aa, unidentified
MAGRNRIRRLEVAHPNAAGIDIGSASHFVAVPPDRDERPVREFRSFTEDLEALAQWLKDCGVDIVAMESTGVYWIPLYELLDSRGFIVHLVNARHVKNVSGRKSDVLDCQWLQQLMSYGLLSGAFRPTDEICVLRSVSRQRDMLTKYQAQHVQHMQKALTQMNVQLDNVISNLVGETGQKILRAILAGERDPVKLAKLRNERIRASEAEIVKSLQGNWREEHLFALKQAMALYDAYGKTLAECDQQLALVLNRLARHQIPAEPSQRRGRPRNLAKFDLRSALFRACGVDMTRIDGVDTGTALKVIAEVGPDLSRFKSVKQFTSWLGLCPGTKISGGKVLSAASKRTANRLAQALRMAAVSLRHSESALGAYYRRLCSRLDKPKAIRATAHKLARLIYTLLTKGTEYLDQGQDYYEERYQQRILHNLNRKAAAMGYRLLPIEPSPT

SEQ ID NO: 223521 - protein, 448 aa, unidentified
MSHGNGISRGDRNRNARLARLRELVPVTNAIVGIDLADDKQMVVVTDHDSRVLARKTFRCMAWAMGAALDWARPHAVEAGFTGVTVACEPTGHRWRVLGQLAADRGMPFVCVQPMITSWSRRTEDLTFDKTDEKDAVLIARATAQLRCYAPEPLDETWGRLRHLGGRRDHLLVETVAQVQQIRDLLECVWPAALTAARQPFKSHTWAAALSVVLERDGGDLDRTRRRGLARFEAAVRRVLGRWGGQKPCGRIIRNLFAALTDPAGVTAHRRGALERVELLLDDWRHTRARLAEVETRMVTVLDELGVTGLVTSIPGLSAVGAAAILAQTGDLTRFTSARAVVKHAGLAPREKLSGTFTGRTKLTGQGRPGLRLAAWRAVWGALRANPVYAARYTHLTTRERNKLTATQAQTVIAAAILRQLHAVVVTGRAWDAEIAAHGTRHASRAAA

SEQ ID NO: 223522 - protein, 307 aa, unidentified
MFVGIDVAKDRLDVHVRPAGESFVISRDDEGIEELAKRLSAMVPTLVVLEATGGFETVVAAGLAAADLPVAVVNPRQIRDFARATARLAKTDALDAAVIAHFAEAVNPPVRRLADPQQRLLGELMARRRQLIEMMVAEGNRRRLLTARRTLKTVDRVLATLKAQLEEIDHDIDIAVRGTPAWREAEDLLISVPGIGHKIARTLLAEMPELGRLDRRQIAALTGVAPFNRDSGTRRGRRAISGGRIVVRSALYMSVLVAIRRKLPLAQTYHRLRASGKPAKVAIVACMRKLATILNAILRDKTPWQTA

SEQ ID NO: 223523 - protein, 337 aa, unidentified
MKIFIGVDLHKKTQTWAGIGLSGPEKLFIKEFQVTPEGVSEAIEFVKGKYGKDVNISLSIEPCCGWMWVVKQLKENKIDVHITNPRKVRAIADSLQKTDENDAYTLALLLRTGMLHESRIIDPETQKLRSLVRERSFCVRLRASVKCRLEGIVTREGRHLITGSLSSKKGKDQITKSNHPEWLTHIGIIQDLDKHIDVLEKELIKKSKELPVSKLLQTIPGVGHITALTIISEVGDFKQFSKPEKLCAFSGLVPTERSSGGVQRLGHITHAGSKHLRYILVEAAMHIREDNSKTLYNFYKKIKEKSGAMRARVALARKILTISWYMVTRNESYKIII

SEQ ID NO: 223524 - protein, 328 aa, unidentified
MNSICLSTDQGKLPVLGLDVAKNSVQAELRIAGKNVRFGFANNPKGFAQLARILDRHNAPKIWAGLEATGPYSHALALWLHARAHRVSVLNPRRVKQYARSAGNRNKTDRLDAAVVADFLCAHRPAAWRPPRQEVVELRALVRRREELSLMLQAEKNRLEGVASQVRCSLERIIVMLSAEKARVEKLILKQIRSHQQLCRDHQLLCTIKGIGSLTAAILLAEMAAPGQVQRARQAAAHAGLVPRHEQSGTSVRRNRGIGKEGNRYLRKALYMPALVAIKYNAPLRYFASRLRAAGKPKMKIVCAVMRKLIHIAFGILKHQQPFNPSLA

SEQ ID NO: 223525 - protein, 418 aa, unidentified
MKKHSKSSQRSEPTLKRTKARGPVQRDAKEVLAEVLRKLTGKLDAPAVSTSAKENRRGSTVGPNRDRLTVGVDLGDRWSQYCILGLEGETLAEGQLRTTQEDVREFFQALTVARVVIEVGTHSAWVQDVITEWGHEVLVANPRLMEGSKRRKRKSDRIDANKLARLGRVDPQSLYPIRHRSREVRQDLVVLRARDALVSVRTELINTARGLVKSMGTRLPRCSSPSFAQKVKDAIAVEVREALLPLVQLVETVNDCIARYDENIEELGRKKYGHTTLLRQVKGVGPITSLAYVLTLENPQRFASSREVGPYLGLVPKQEDSGDSQPQLGISKAGDRMLRRLLVGSSQYMLGAFGPDTDLRRYGLRLCERGGKNAKKRAVVAVARKLAVLLHHLWVTGGVYEPLHQARAGTGTAQAAAA

SEQ ID NO: 223526 - protein, 412 aa, unidentified
MEAVYECVRGLDVYSKSVQACVRRLIGGGRTKQEVRTFGTMTRDLVMLADWLSEEGVTHLAMESTGVFWKPIYNILEGRFTVLLVNAHQVKHLPGRKTDVKDSQWLAQLLQCGLLQGSFIPERAQREWRELTRQRAQLVNQHSSVINRIHKTLEDANIKLGTVASNILGASGRDMLRALIEGRQTPTEMADLARRKLREKIPALQEALYGHVTDHHRWLLGELLDQVEDLERRIERFSCRIEELSGPFEDAIKKVDAIPGFDRRGAENVLAEIGVTMKQFPTGGHLAVWAGICPGNNKTGGKSKSGRTTKGNRWLRTALVQAAWAASHAKGSYFHAQFRRLVGRRGKKRALVAVAHSLLVVIHVLLSTGAEYEDLGADYFNRRDEDRIVRSHVNRLERLGYKVTLETYEEAA

SEQ ID NO: 223527 - protein, 313 aa, unidentified
MSIPIVYIGADISKSTIDFRFRDQSFTLPNSPAGFLQLQTRIKPLQVQFRPHLICEATGGYQNALVESLHKHSIPLSVINPRQVRHFARSRGILAKTDRLDARVLADFGAANSPAPQEPIPAHLQRLASLLAARDHLVSSRAVEKTRLHQCQDSWLLAQIRRTIAFFDREVKKLEAQILALRDANPALKANADRLDQVAGIDWRGAVGLLGLLPELGTLNRRAIAKLAGLAPLNQDSGQYRGQRHISGGRAPVRRLLYLASLSAIRYNPIFKTFYKKLRAAGKPGKVALIAVARKLLVLLNSALKNPQLSLAN

SEQ ID NO: 223528 - protein, 334 aa, unidentified
MKYVGLDVHKETVHGTVMDEHGRVLKRKGFFNTPKGYEKFFGGIDDAKVAMEAGYCWQPPYELLERMGYRVKLAHPYETRIIAKSKIKTDATDSEKLAQLLRTGFLPEAYAPPKHVRELRELLYRRAYLVRMRAQLKNKTRAELAKRWVRPERKELFTRPGKAVLRGLGINAIDDYLVVIDTLDEPIKRLEKQIEFLASENADAKLLMSIPGVGYFSALTILAEIGDIHRFGSSEELCSYAGIVPSTRESGGIVKRGGITKQGRKLMRWTLDLCVLVHLKCDTKLTRYWKRAAKLKGKKVATTAAARKMLKVMYWMLKRREVYRPEGVKLGKYR

SEQ ID NO: 223529 - protein, 416 aa, unidentified
MRVHRNCCGLDVHKQTIAACLISESEDGTVSQQKRIFGTMTQQLRELAQWLVEAKVTAVAMEATGIYWVPVWNVLEPHGFELLLINPEHYKAVRGKKTDLKDGERIAELLQDGRLAGSYVPPVAIRVLRDLTRYRTKLVQYQSSIANRIQRLLEQCNVKLASVASDVLGVSALAMLRALAAGETNPQRMADLAKKQLRKKIPALQLALEGCLLPHHRFLLSDMLEELDHIGSKIARVEQAIAEQMRPYQKAVDAWMTVPGVKQRLAWNLVAEVGPTVDAFPSDADLVSWAGICPGNNETAGKRKSGTTRNGNRWARKALCEAAWAASKTKATYLQAQFRRLAAIRGSKRAIIAVASTILTIGYHMLKQGTTYRELGGNYFDKRNLLRTTRRLVKRLEALGHRVILEPTQSPFQPSD

SEQ ID NO: 223530 - protein, 375 aa, unidentified
MSRIIYIGMDVHSQSFSLCAFEPSFNSKGKYFAETKVAAEPINIKKYVERLRKSIGNNCRFVTGYEAGSLGFSLYNALVSMDIECVILAPSTMLCPKGGKRIKTDRRDARNIAERLAYGGYSPVHVPSEQDVAVRDYIRMRDDHAAMLKALKHQICSLCLRNGFCYTATKWSAAHLKYLRDISLSPLNRECLDEYLATLEQLQGKINAFDVRIEEMSHMEEYDVRSTRMSCFLGITRNRAISILSETGDFGRFRSPASFAAYLGLVPGEKSSGADTKRTGITKAGNVHIRKELIEAAQSICRGRVGHKGKALAERQNGNPTDAVAYADKCNERLRRRYYKMINSGKNRNVAVTAIARELACFVCGMMQEYIHGAA

SEQ ID NO: 223531 - protein, 343 aa, unidentified
MNVVIGIDPHKASHHAFAVDDRELELSQLSVRATRNQTQRLLAWAEPFASRTWAIEGADGLGYLLSQQLVAAGERVVDVPATLAARTRVLGSTRSNKTDPNDARSVALTALRHADLREVLPVGHDEVLRLLAKRNIDIGDRRTQIVCRMHALLVELAPGGIAKEINASDVDGFLAQLSPVTPVEQIRYQLAVELLDDIRRLDEQLKASHKRIRAAVLVSGTSLTELFGIGPIIAAMLIGYTGDIGRFANRDHYAAYNGTAPVEFSSGGRTVHRLSQRGNRQLNHALHMAAICQMRQPHSDGRAYIDRKVADGKTKREAIRALKRQISNAAYRQLVIDAGRNNH

SEQ ID NO: 223532 - protein, 372 aa, unidentified
MAILNVGIDLAKNVFALHGVNEHGQVDLRRPSVPRAKLHALVAALPPCTIGMEACSGAHHWARLFAQHGHTVKLMAPKFVAPYRMSGKRGKTDAADAAAICEAMQRPNMRFVPVKTAEQQSRLMVHRARQGYVEARTALFNRIRGLRAEFGVVLPQKAEVVRREAARHMDTLPGYGKTVIEDLLAEVRHLDERIGQYDVHVRAIAKDSTPAQQLMQIVGIGEVTATAIVATVGNAREFSSSRQFAAWLGLVPGQYSSGGTTRLGRITKAGDAYLRGLLVMGARSVLNAAGNKTDSISRCATNIALRRGYWRAVAAVAAKNARLAWAALTKGESFTLQPERGRNARSSGPAPCVSYSPLGTIAALITGVSATA

SEQ ID NO: 223533 - protein, 419 aa, unidentified
MSFKILKFNCCGLDVHKTWIYACIGITDSNNRTEYKQSRFSSFSKGLHELCNWLAKYNCKDVCMESTGKYWIPVFNILEQHDIWVTLSHPKYTKPMKGNKTDRKDAKWICDLYMCGMVKPSFIPPADIRDLRDLVRYRFKLTCMITGEKNRAQNCLTVSNLKLDDVFSDVFGKSSRSITEQILQHPGEKFDVSPYVDSRCKTPIAEIQAAVDGAISKEQAVKLRQCLDHIDELQKHISEVEQEILRLSDKYEAALNLIRTVPGFDKNPMTSIQVLSEIGGDMSVFPTAKHLVSWAGCCPRNDKSDRKIKSTRISRAGSYFKPVLVQVANALIKSKKHLEFTTRYKRIKARRGHKKAIIAICRMILTAIWHILSDLKPYTPEGFLESRPVKEGKVLSTSQALNLLKQRGYIIKGEPLAVS

SEQ ID NO: 223534 - protein, 357 aa, unidentified
MKKQSEHVLKNEKVFVGLEDSKKTWKLCVRSEGTIVHETTMPARYEVLRNYFNHKFPECQIQVIYEAGFRGFGLHDQLEADGWECIVTPPHTVTEEKCQRKKNDRTDCRRLAKNLENGDYQSCFVPDKELREDRQISRTCGQVQADIRRVCNRIRRMLEFHGLDERFPAGRWSPGMYDRAKRQLAEMEMSDSLRYSFDVMFGELEKLRELKKGLLLQLRRLAKSDRYKKNVDLVKSAPGIGWLTAIRLVLEWGDLSRFRRKEEFASFLGLVPSDYSSGEQERQGHITKQGKRGPRSWLVEGSWVAIRYDPVLLGKYRQVLRSCGSKKKAIVAVARKLGLRLRRVLLTGEPYVVGVLE

SEQ ID NO: 223535 - protein, 347 aa, unidentified
MRFYTQQHQYYCGIDLHARSIYLCILNQAGEVLLHRNMRANPDAFLKAVGPYREDLVVAVECMFTWYWLADLCRRESIHFVLGHALYMKAIHGGKAKNDRIDALKIATLLRGGMIPQAYVYPPEMRATRDLLRRRLHFRRKRAELLTHIQNTNSQYNLPEFKKQLTYASNRSGVVERFADPSVHKTIEVDLGLLAYYDQMLRELEHFILRTAKDHDHNTLYRLRTVPGIGKILSLVMLYEIHDINRFERPQELASYARLVKCAKESAGKITGSSGRKIGNVHLKWAFSEAAVGFLRKNEEGKKYYARLERKHGKGKALTVLAHKLARAVYYIWKKDNVFDQEKFLTA

SEQ ID NO: 223536 - protein, 396 aa, unidentified
MPTTNSTPTTELPYCGGMDVHQRTTTVAILDPGGNLLERVTLPTTLKALDAWNRHLIELAGSHQIVLGLEASTAGQAVFRHLRVLGRDVRMAHPRRLKDLLGETKTDKNDALALATVLRLGSFPEVYVPDDDIISLRTLVRVREEVVDKLRRCKVQVRSLLVKNHLYHEAAKYDDIFGEQALRWLRSTELKEGWDQAQLALLLEEGELYTRQVHTLTTELAKVGVRTEEVRLLQSVPGINYVLALTIIAEVGDIRRFRNRKKFAAYCGLVPQNHDSGERTAKHAPLRHGNPRLKWALSMAVSVIRQSRTGRFYRQLKAFEIRVGMAKAMSAVAHRLAFTIYGLWKGKRLYEEVPLARYVVKRRGMLRRSEEASGIPAIHPTIDKLIRTGQNLGALS

SEQ ID NO: 223537 - protein, 402 aa, unidentified
MKNLVGGIDVGSDKHHVIIMTEKEEILYDDREVAHSISEFHKASEEFRAIEAREKATITFAMEGKNGYGSPLDRILIENGFTLYNVDNLKLKRFKDVFGAEWRNDRRDARMLAKMLKLKDHVDNEKEKAFIEVGKSPVVNEKLKILSRHQQSLIHEKIRLQNRFKKRLLEICPDIQELGDLDSKKLLRLLIKYPDFSKYKKLTMEGLLKIKMIGKKHASLMLESLRNIQCFEELAGTYKTIISSSARRLLELKEEIEMLDRKLEEIGEKSAEVKRLKSMSGIGTKLSSRLIGEIGDIGRFENEGQLAIYTGVACVDDDSGKSKKTKAVYKANKICKATMIDIAGCTIRYIPESKAYYEKKRAEGKEHNHAVRCLARQLIKVFFKMLKEDRDYIMKEDVKKAA

SEQ ID NO: 223538 - protein, 348 aa, unidentified
MNLINNKKENNIYQYDHYLAIDWSQINAAIARMKKNSTVPQIKEMGNDIREVRRYLSGIKGRKILTIEETTSTHWLAVELKDSVDRILVCDPYRNKLLNHGPKTDKIDAGKLCQLLRANLLHEVYHNLAEDYSIRKFVSAYEDMIQSGVRVKNQRSALYRSEGLDHKRDKLPLGSSLLQFIEENQMKALELYEQEKEEYHKYFNKIKNKNKLIKNLETIPGIGTIFAVKIYSVVIDARRFASKYQYYSYCGLVLNDKESGGRSYGKRRPRFSRQLKGIYNGAALAAIGGNNDIAEYYNHLLGKGLSERQARGSISRYIAKVSYGMLKNGEKYIPYKWRKTKAKKEENK

SEQ ID NO: 223539 - protein, 444 aa, unidentified
MRIIFERVAGLDVHKKTVTATRMRVTEDSRLEWETKTFGTTTPDLLELHDWLQAWGCRQVAMESTGDYWKPVFNLLEGDFEVWLVNARHVQQVPGRKTDALDAEWLAELMLHGMLKRSFIPPKPQRALRDLTRYRSRLVQERARTINRVQKLLEGANIKLASVVSDIMGVSARAMLEALGAGQDDPALMAELARGRLRNKLPELEKALTGIVEAHHRFLLSQQLAHIDFLDEQIVEISAEIARRIEAMSQAPLPATSETDRAGANTDMSSDQQQPPLTWSEGVTLLDTIPGVDRKTAEVILAEIGLDMSQFPTDKHLAAWAGLAPGNHQSGGKHYSGRTRHGNQVLKSTLVQAAWSAVRTKDTFLKARYHRLAARRGKKRAIVATAHSMLVSVWHMLTRRQPYQELGGDYFDQRKKEVKVGYLIRRLEKLTGASVTLEIQPAAA

SEQ ID NO: 223540 - protein, 312 aa, unidentified
MDASIVGIDVSKDRLDVAVRPSGESFVIARTGAGIEDLAERLQKIAPRIVAIEATGGFETVVAAGLASAELPVIVVNPAQVRAFAQALGKRAKTDPIDAAVIAHFAEATKAVPRPLPDEMTRLLADLIARRRQIVEMMAAEGQRARRVTDQRLKKSIVRLRKALEKELAELDGEIDDHVRGSPVWVEKEDLLASVPGVGPVVARTLIAELPELGSLDRRKVAALVGLAPWTRQSGKWRGKSFIGGGRKTVRNALFMAAMVAARHNQVLKRFRDKMVAAGKPKRLALIAVARKLLTILNAIVRDRRRWQPETA

SEQ ID NO: 223541 - protein, 355 aa, unidentified
MSQEKYIGMDVHQATISVAVADSRGKLIMESILETKAATILEFLRGLQGSLSVTFEEGISAAWLHDLLKPHVTHLVVCDPRKNALLKEGSKSDRIDARKLAELLRGNQLTSVYHGEHGMRTLKELGRSYLTITQDLTRVMSRIKALYRSWAIPCSGTSVYAPRHRAEWLDKIPEPGVRLRAERLYQQLDLLQPVRQQARRDLLTESRKHHAVKLLRQIPSIGPIRAALLVAQLQTPHRFRTKRQLWAYSGFALKTHDSGEYRYVRGKLQRNRERMTVRGLSNNHNPDVKNLFKGAAISASTHPGPLYDFYVALLENGMRPTMARLTLARKIASITLTIWKKGVDFDATQLHRQEA

SEQ ID NO: 223542 - protein, 410 aa, unidentified
MRYHLGVDWADQTHAVWVVDERGTKITARTVPHTAEGLSEWGRELDEWRAHGIELWAAIERPEGRVVDFLLDHGIVVYPVNPKALDRARDRFRQSGAKDDPFDARVLADFLRTDHAHLRPLRPSSEAAQELKLLTEDYQRQVRQQTRLVNQLTITLKAYYPRALEVAELTTGLAQAFLQAYPTPAAVAALTERQWQRWARAHRLSATRTRELWEVLQRPQLPVPAHVVRAKARLMRSLVAQLTPVVAAVGEYREAIEDFFARMSTAQWIRTLPIGDHGITAPTLWARLGDAPGRWEAFRHLQAQAGAVPVTKRSGKQQRVVHFRVACDKALRYVVDQVAFLSLRSCEWARAYYDQQRGRGHSHRRALRALGAKWLKIIFVMWQRHASYDEPYHLATMARQQLRQPQTKIA

SEQ ID NO: 223543 - protein, 403 aa, unidentified
MTVEEDSGQVYGGVDTHEDSIHVAVISSRGHDLADQEFPTTPAGYRRALAFIASHGDPIAIGIEGTSSYGVGITAAATAEGLLVVEVIRPERAERRRLGKSDPIDAYQAARAALGNHRIAPAKNNAAIEGIRALHNARRSAMKARTAAMRQIHAQLITAPPVIREKYRDLSSEKRLVVLARMQVPANRTPVDRAVLLVLKTLSQRANELQREHERLGAELDQLVTAANPALRAAYGVGPDTAAQLLLTAGGNSDRLRSEAAFAALCGASPIPASSGKTVRHRLSRGGDRAANGALYRIALVRMSSDARTKEYVARQRAAGFTNKEILRKLKRAIAREIFRLLTTPVAVPSVDDLRPLRQTKNITLTAAANHLGVWPTTISELERGIRRNDDLAQTYREWLNVA

SEQ ID NO: 223544 - protein, 372 aa, unidentified
MMARNKKCRGENSAEVLKEVVLGVDTHLDAHVAVALDSLGRRLGELTVPTTKKGYEILVSWAEGFGPVGCAGVEGTSSYGAGLARHLRSAGIRVFEVERPKRRHLRRKGKSDSKDAESAARAVLAGETAGESKSGDGCVEMIRVLRAARRSAVKARTQAVNQLRGLVVTAPEALKQRLRGLSTKELVAVAARFRPGGDPGDIETATKFALRSVARRYQALSVEVSELDAQLDHLVTEAAPQLVSLPAIGTDHAATLLIVAGDNPERLGSEASFASLCGVSPVEASSGKVVRHRLNRGGNRDANRALHLICVVRMRVDERTRHYVARRTAEGKSKKEDIRCLKRYVAREVYRVLISAASPPPMGPCTSPASSP

SEQ ID NO: 223545 - protein, 342 aa, unidentified
MDKIEACGIEVSAQELVVAMGGKTQEAVLRRFANTACGHRQLRHALTRGGKRVRACMEATGLYGLDVALCLSAHAGIELMVANPRAVRHFAKARMQRSKNDQLDAVVLREFALRMEFTAWTRPQKSTLELWAIARRLEALTKQCTAEKNRQHAAGISQAMPACVRASVARTLRSLQREMQKLRAIAQRCIAGEARLQQRYRLLRTIPGIGESSALRILAELALLPADRDVRQWVAYAGLDPREHRSGSSVNKHARISKVGNRHLRCALYMPALVASHCEPHLRGFYEHLVAEGKKKKQALTAVARKMLHAIFGMFRWDRPYDGNCVYRLPLPGLAPQATKIA

SEQ ID NO: 223546 - protein, 399 aa, unidentified
MNAVGIDVSKGTSMVCVMRSFGEVVASPFEVTHTVGELGKLAHLLKSLSGETKVVMECTGSYHLPVARALHASGFFVSTVNPVLIHGFGNNTIRKRHNDKADSVKIANYALSNWLALPKYAPEEEIRQSLKSFSRQYNKYNKVKTMLANNLISLLDQIFPGLKELFSSPTRESDGHEKWLDFAARFWHCECVGGISLNAFTEAYRKWCKRSGYYCVGADEIHALSRQCAAVMPKNDTTKSLITLAVAQVNAVVESLAAIAREMKRLAEQLPEYSTVLAFRGVGKILAPQLIAEIGDVRRFPKKSSLVCFAGLEPTDNQSGKFQGDEKISKKGSPHLRKALFQVMDCLLQHSPSGDPVYQLLDRKRAENKHYYSYMNAGAAKFLRIYYARVKAFLDTLED

SEQ ID NO: 223547 - protein, 425 aa, unidentified
MQFKCNEKINQVTENTLVVGMDIAKRVHYACFVDERGRVIEKAFAVHQSKEGFESLYEKIRQTMKEAKKTDVIVGIEPTGHYWMNLAYFLDHYGIPLVMVNPMHVKRSKELDDNLQTKNDKKDALVIARLLKDGRYSYPRLLKEVEAELRIGSTLRSKLTEDLASIKNRIIRWLDRYFPEFTQVFPSFGKMALAALEMTPFPQDIEGKTAEELVYLYREVDGMRTPQLPKARLLIEVSTNSIGLTEGEQMARHEIATLLRQYRLLETEIASVNNQLAQMAQTTMEYELLTSVPGLGDATIVDLLSEVGSFSLYENPRQLIKLAGLTLRENSSGQHKGQKHISKRGRKKLRYILFKVMVPLIRHNSAFKQLHEYYTTRQQNPLRGKQSMVVLCGKLLKILHGICKKKVHFDEQYMMKDLHCLAETA

SEQ ID NO: 223548 - protein, 421 aa, unidentified
MQQEASDFAAFVGIDWADRKHDVCLHVPGASALEASVLEHRPAVIDAWARRLRERFSGRPIAVCIELAEGPIVSALLEHEIFVIFPVNPTMLAKYRRAFVPSGAKDDPSDAALALDLLLRHPERLAPIKRESEDMRALRRLVQARRDLVQDRVRVTNRLTFTLKEYFPQIVEWFRDKETDVFAAFLERWPSLQTVQRARRETIVAFFHAHGVRHAGAIERRVNAIQTERPLTTDAAVIEPALAVVTTLLPQLRALSVGVARLDADIAKRCQALPDFRLFAALPGAGPVFASRLLAGFGENRQRFADAAAVQKCVGVAPVTERSGNKHWVHWRWACPTFLRQTFVEWAASSIAHSFWARAFYESHRAKGSSRNATLRALAFKWIRILFRCWVDRTPYDESRYLSALQKRQSPLLKFAAAQTQ

SEQ ID NO: 223549 - protein, 414 aa, unidentified
MNDAKYIGLDVHQATITVAVRDSAGKLVIEAILETKAETILQFLHGVRGSLHVTFEEGTWAAWLHDLLKPHVTRVVVCDPRKNALLKAGNKNDRIDARKLSELLYMNKLSAVYHGEQGIRTLKELARSYLTVTRDLTRVMSRLKAIYRGWAIPCAGEQVYAPHYRAEWLAKISEAGVRRRAELYYVQFDTLAALRQGMRRKLLAESRKHPATRLLRQIPSIGPIRAALLVALIQTPNRFRTKRQLWAYCGLATSHRARTYSEHSAPCSRRGNFSLDVPSYRTRLSETCEPWGAHLCLTKHAMKQVIVLRRDLQMSTGKPTVQACHASVAAVLGAKEDALESWNVEGQTKIVLEVNSLAELQNLKTRCEQVGILHVLISDAGRTELAPGTITALAIGPADDLLIDKITGSTPLLK

SEQ ID NO: 223550 - protein, 348 aa, unidentified
MDHIGIDVHKRESQIYILAEEGEIIEPRIRTEPERFAAVLGSRPRARMLIEASTDSEWVARCLEALGHEVIVADPNFAPMYTTRARKVKTDRRDARALAEACLLGAYRPAHRLSDPQRHVRGRLGGRDALVHTRTRYISVIRALLRQHGYRVPSGSADRFVDRVGRLPLPGRLRSVVAPLLAVMGHVNQQLAYSDATIEHRAGQDPRGPRLRAVPGVGPVTTAAFLAAIDDAQRFRHAHQLEAYLGLVPREYSSGETQRRRPITKAGHSRVRGLLIQAARSILRCRPPAAEALWTWALRIAARRGKHVAVVALARRLAGILYVLLRDGTVYVPRRPAALPDSVVALSA

SEQ ID NO: 223551 - protein, 337 aa, unidentified
MSLYIGVDGSRDTLAVALFRAGQDSSPQYLGSFPNRLEKFETLFRQVQQQSRGEEVIWVIEPCGGYERPLMYWLYEHRQCILYPNPRQVRQWQQGRGYRAKTDPLDSQMLALYGAEHRQDLHPWKPWPEPAGRLLRLAERWRELEVERQREQNRLEAYLSQGISPDAPEVRDLQEHIQFLEGLIRRTKKHIGRLYRDFPDLDGLRRRLLSVPGVGEKTVHALVALLIRWAQLGRRDAKGLVAYLGLDPRIHQSGKRPPRGRISKQGDTRWRSLLVAAARGGLKGTSSPLARFYRRLRQRGKPHMVALVAAARKIVVWAWAVYCCGEPFDLRRHIARV

SEQ ID NO: 223552 - protein, 359 aa, unidentified
MREQRNKISFRGQKIYVGIDVHLKSWSVTVLSETSVLKKFSQHPSPEALYGFLTRSYPGAEYHSVYEAGFCGFWIHERLTALGIDNIVVNPADVPTKSSEKLRKTDTVDSGKLARSLRANELKGIYTPDSVSLEMRSLIRLKNSITKDTTRQKNRLKSQLRYLGIEIPQEFLTPFSNWSKRFFAWLKEIETLTPSGRQALDIHIRHLEELSRQKLEMTRALRTLAKTDRFREPLRLIMSVPGFGQATGMAFLSEICDITRFRNAEQLAAYIGMIPMCHSSGEKDGTGDITIRKHAVMRCNLIEAAWVAVRQDPAMNLFYTEQCKRMPKSKAIVKVARKLVNRLFFVLKHQTEYVNSIVS

SEQ ID NO: 223553 - protein, 322 aa, unidentified
MYKYKETFGVDISKDVFDVHGSSTGHKQYKNDEIGFKKLLKDLPKESLVAMEATGYYHYRLAQFLYKNAVVVSVVNPLSVKRFIQMKLAKVKTDKSDAKAICEYALINEVPIYNALTDVQSECLQLFRLLDVYLKHRTATKNKMHGEEVLGIPSKFVYRSLRRNKKHLNGEIKAIEAKILSLVKEDQQQQLTLLTTVPGIGQKTALFLIVVTDGFSKFETASQLCSYVGITPTIRESGSSVRGRARISKVGNRKLRNLLFLCSFNACKHNKACRELYERIVNKGKSKKLALIAVANKLLKQCFAIAKSGRPYDETYVSILPR

SEQ ID NO: 223554 - protein, 394 aa, unidentified
MKRVFVGIDVAKDSSNGHGLNAEGASLFVESFPMNGEGFSKLLDHIKGTSEDLSEVLVAMESTACYHINLFSFLTAHGIDAVVINPLLISNFARLSLRKTKTDKKDAGTIAHFAMIHRDSISQLSVTQDLQDLRDLARESETLCQQISINKTEIKRLLQTLFPELEAICEPSTKVMLDFLQKFSSARMVAAAKPKAVARALTRKGVDTRLTYTAADLIQAAQHSVATVSPAKELILTGKIATLKHLYERRHELTRALTEACKAMMIEDLEILTSINGIAVTTATAFLAEIGKITNFPSVKNLVAFAGIDPSVYQSGKYEGSSRLSKRGNRHLRRIIWLMTMCVIQHNPTFREYFTKRKKEGQPFKKAAFATAHKLVRVIFAMLSQRTQFRQGCV

SEQ ID NO: 223555 - protein, 389 aa, unidentified
MSQQFDARKSLTALEQHSTIIAVIEMSQSKWLVAAVVPGIKRQPLKKLDADQESLLGLLHRWRNEAERAGHPIKRVVVAYEAGRDGFWLARWLRMHDIEAYVIHPASVAVSREHRRAKTDRLDTELLMRALLGWLRGEKRHCSMAAIPTIEEEDARRPSRERASLVTEQTRIVNQIKAILIRFGIRTFRPKLRKAEEQLKQLRTAEGSPLPDNTRAELCRRLAGLRMVRDQIQAIEKARLQKLTADQGRKESPHAMERLIARVLGIGVETADMLVNEVFSRRFRDRKAVARYAGLTGSPDESGKRRREKGLARAGNARVRTGMIQFAWRFLKFQKDSTLAQWFQTRAADRRGGTRKTMIVALARKLLITLWRLVTTGEMSDDIVIRPAA

SEQ ID NO: 223556 - protein, 430 aa, unidentified
MGLIVPSTIHPAREDQPLPYEWFVGIDWGSQRHQVCVLDRDRRQVGERVVDHDGASLAQLADWLWTLSGGQPQRVAVAIEVPRGAIVEGLVERGFHVFAINPKQLDRFRDRHSVAGAKDDRRDAFVLADSIRTDQPSFRRLQLDDPQLLRLRELSRAEETLLADFRRSANRLQDQLHRYYPQMLKLCSAADASWLWELIDLAPTPAHAALLSEEQVQRVLKAHRIRRVKAQEVLTCIQAPALPVAPGAAEAAQAHCAFLLPCLRVLAEQLQACSQQVSALLRALAQEPGEGEGPSDVAIVLSLPGVGRKITAWLFAEAAQPLAERDYQVLRTHGGVAPVTKQSGKRRLVVMRHGCNPRVRHALYHMARVAMQHDAHFSSVYAALRAKGQRHGQALRNLGDRLLRILMAMLRERTCYDATRIRREPVVQMG

SEQ ID NO: 223557 - protein, 326 aa, unidentified
MNKVIGIDISKQTFDVSFREETEVVHKVYANNEKGFKAFKLCIGQLKETRVVMEASGPYYVKLASYLHANKIDVSVINPLKIRRFAQMKFYRAKTDKKDSNMIMEYGEFELESLAIWKPEGKGVQTLKQMRTTVELLQKQLSQSKNQLGAFKSSGLLDKEVEKGLKKVIRVTEKTIKDLEEQMLNVCETHYKESLALLTSIPSIGNKTAMMLIAMTDNFSKFEHYKQLIAYVGLAPRVYQSGTSVKGKGHICKMGKALIRKLLYMCSWTAKRCNKTCREMYERLKAKGKPERVIKVAIANKLLKQAFAVVTSKQKYIENYQPNICF

SEQ ID NO: 223558 - protein, 343 aa, unidentified
MAAKAKIIKLGIDVHADSFSVVRQIDNDTPPPAQKFTPEGFVKWVAKQLPAAEKVHRCYEAGPFGYSLHRQLLRMGVQNVVVRPQNWDELGRKVKTDRIDALALVQRLDRYVQGNRHALAVIAVPTPEQEQARGLGRHRQQLVQERQTHEAQGRSFLLYHGRRVQGQWWQPFAWEVLQQELEPWQCRILENFRAQILLADQQLAQVEKQVVAEAVSPAKGFGALTCQLLGREVLDWKRFANRRQVASLTGMCPSVHASGGHSRQGSITKHGNPRIRRLLVELAWRVVRFQPNYPPVRKWRPQLDSKRARGGRKKAAVAIGRHLAIDLWRMETGRSTAAQLHLT

SEQ ID NO: 223559 - protein, 297 aa, unidentified
MSQSSTLFIGMDVHKDSIAVADVAQDHGAEVMYLGAIGPRQCDSDQLIRKMPSNAKPLIFVYEAGPWGYWLSRYLSKTGYDCGVVAPSLIPQKPGARVKTDRRDAVQLARLARSGDLTAVYVPKVEDEAIRDRPRAREDAISDLKDAKCRLKALLLRQDSRSVGRATWGPAHLRWLSEVGCPPPAQPIVCQEDVRAVHEQTERLQRLEQERQEHVKAWRLNPAVEALQAVRGVQCTVAVTLVSESGDLTRVDHPRELMNFFGLIPAEYSSGEQRRQGAITNAGTTHARRALVEGAWA

SEQ ID NO: 223560 - protein, 418 aa, unidentified
MLRQIRERCAALDVHKKMLIGCAITPEGRQVRRFATHYADLLRLAEWLQGLGVEEVAMESTGVYWKAPWNVLEARGFKLTLVNARDAKAVPGRKTDIKDAEWLAELHQHGLLKASFVPDREQRELRELIRHRKQLVEQRSATAQRLQHVLEGGNVKLGTVATNVLGVSSRAILDQLVAGADNAEQLAELAIGRLRNKREDLAQSLTGSVEPHQRFMLATLLRQIDFVNREIAILDEEVKARTAGRFRAAIELIDQIPGIGALAAEQILAELGINMEHFPSAQACASWAKICPGTHQSADTNKRVGTGKGNIWLRNALIEAAKAAVRKRDSYYSALYRRIKARSGSGKANVAVAHSILVTIYHMLKNGSAYQDLGPAHFDREDRERVQRSFVRRLERLGFKVSVEDTIALSQDAGGAVA

SEQ ID NO: 223561 - protein, 337 aa, unidentified
MKLTTYGVDIAKRVFQIHWVVPETGEIQRKKLKRADVMAFFRLQAPGRVVMEACGAAQHWARQWQPLGHTVQLIHPKFVRPFVMANKNDAADAQAIWTAAQQPGMRFVLIKSEAAQAVLALHRIRSQLVKFRTMQMNQLRGLLGEFGIELPGGREAGLAALRDIDWERVPALLHAALQMQMQRLRELDEQMALIERQLAQWLRSDDTCRRVAEIPGVGLLTATAMIAAMGDAHHYRSGRAFAASLGLVPRHSGTGGHVQLGGISKRGDRYLRTLLMHGARSVILHQGKDKASPWLRDLLARRPFNVAVAALANKMARTIWALVAHQRRYESGYGIVA

SEQ ID NO: 223562 - protein, 343 aa, unidentified
MTIKVLGIDIAKNTFQLHGADDAGKAVLKKRLPRNRLSPYVANLHPCTIVMESCGGANYWARVFQRSGHTVKLISPQFVKPFVKTNKNDANDAEAIVEAASRPSMHFVPIKRPEQQDVQSIHRVRSRLVKNRTALINEIRGLCLEYGVIIALGAARVKKSLCAVVADSGNGLSPSSRDCMQDLYEELVDVEARLKKLDARNRQLCRQNDSCRRILSIPGVGELTATAIVAAVGDAQEFKNGRHMSAWLGLVPRQSSSGDKRVLLGISKRGDRYLRTLLIHGARAALSHYKTTDNDYGLWLARKKATLSFNKAAVALANKNARIIWSLLNSGEEFNYGVQTAAA

SEQ ID NO: 223563 - protein, 425 aa, unidentified
MSEKIVVGIDVSKAFSDICILSPNNDIIKRLKISNDITGMRSLIYVLEKVEDEYKDRAVIIMEATAHYHQILANFFRKHNYEVIVINPIQSGALKNINIRKIKSDKTDAYNIALLYRIRNYNETITHSDTVNSIKKLCRQHKELTDEIVEHINRLIAFLDISFPDFKKVFADLQGKTPLSLLEKYPTIQEVLSPENKQDIIQLIKENSHKSSSYAEAKYEKLFKAAEKSIEVCIVSLSSAVLIQTTVRVIFSLQEALKAIDDEIKRLSLLDEKFHKEIVLLQSIPGVGEYTACVVLSELGDISNFSKPKELVAFFGLDPGVSQSGTYNRKNNKISKRGSPHVRSILHMLAKSNVYPNRNREYLNPVMRAYFEKKIAEKPYKVVMCAIMRKMVQIIFAVLRNQKSFELRTPEEHQKLIREKSKLVA

SEQ ID NO: 223564 - protein, 308 aa, unidentified
MSSHPIHLGVDFAKEKFDYYGAELHGSLPNTPAGHRRFLAMLPRGAHLVCESTGNCHRALVSAAHAAGVALTVANPRQVRAFAEGLGRRAKTDPIDTQSLYDFGRLTEPKADRAPSAAQSALQDLVVARQQAVLERSTLQLQAAGYQLPLLKALARARLKVLSAQIAKIEAAIAKTLAAEEALAAQAARLAEVQGVGALTAATALALCPELGTLTRGEAAALLGVAPFNHDSGQLKGQRHIAGGRYRLRCALYMAALSAARANPILRTFYQRLRAAGKPAKLALTAVMRKLFILLNHLLKNPNFKLAT

SEQ ID NO: 223565 - protein, 442 aa, unidentified
MNPNAAGIDVGSAEHWVAVPEDRDNQPVRSFKCFTADLHAMADWLKTCAIQTVVMESTGVYWIPLYQLLERRGFDVKLVNARHVKNVPGRKTDVSDCQWLQRLHTYGLLSGSFRPEDSMCVLRSFWRHRDTLVRYTSSHVQHMHKALTEMNIQLHKVISDITGLTGMRIIRAILAGERDPVTLAHMRDHRIKSSAEQIAKALEGDYRQEHLFALQQAVELYDVYQEKIQACDRQIEHYLTHLDSKIDLTCNPLPASTKRNKTPKGNTPHFDLRTHLYRISGADFTQIDGLDVVSVHTILSEVGLDPTAFPTEKHFSSWLGLSPNNRITGGKIKSSKTRKVINRAANAFRMAAQSLTHSSSALGGYYRRMSARLDGPQAITATAHKLARIFYHLWKNGGTYHDPGVLYYEQKYKQRVINNMIRKAKQLGFQINIEPLNGLQVS

SEQ ID NO: 223566 - protein, 345 aa, unidentified
MKITTVGIDLAKNVFQVHGVDARGKVALCKQVKRAQVAVFFANLPPCLIGMEACASAHHWARELQGFVHTVRLIAPQFVKPYVKTNKNDVADAEAICEAVSRPNMRFVAIKSIEQQAILSVHRVRQGFVKARTAQANQIRGLLGEFRLVMPQGIYNVDKRVPEILEDASNELPVPFRHLIDRLTQHLKELDRKVKEFEQEIIAWHRGSELSRRLEKIPGIGPLAATALVASIADAHSFKSGRQVSAWLGLVPRQSSSGGKPTLLGISKRGNTYLRTLLIHGARSAILAAKNKVDNTQGWLTDLLKRRHPNIAAVALTNKNVRTVWAMLAHGREFKADYVPIRMAT

SEQ ID NO: 223567 - protein, 395 aa, unidentified
MLFIGIDVAKDYSIAQGLDREGRRLFNVEFSMDGEGFSRLLSMVNTHCEDVSKVTVGMESTGCYHINLFAFFSSKGIATVVINPLLITHFARLSLRKTQTDQKDALTIAQFLLAHREGLSQIVYSQKGQDLKDLARERESLAVMIAGLKNDTRRVLHLTFPELEHHCKLFTETMLPFLIKFPSARVIRTTQPKEISKTLIHIKGKRKRVFISAEEIIQLAKNSVASDSAANELILSEKIETLLYLEEKKKKITEALIKACQSMRVDELEIITSIDGISDITGSTFLAELGDIRTFKSHKHVIAFAGIDPSIHQSGQYEGIGRISKRGNRHLRRVIFLMTLCVVRSRNVFREYFLRRKGEGIPAKKAILATAHKLLRVLFAMLSRKSYFQKEVVEA

SEQ ID NO: 223568 - protein, 345 aa, unidentified
MTTTSTIPDQGLKACLGIDVSKATLDACLLQDSADRQRCRRRFANSLSGLQELLQWLEKLHPQPTEAVMESTGSYGELAAHLLHEAGHRVSVVSPLRIQRYAQSRCRHNKTDQVDAEVIARFGFTQEQNKKLPQWLPTPEPQAMLRELLRRREDVACQLQAERNRLEAAAAKSAVLQSLRRSLCWIEEEMTRLEEEIAQLLASQPDLAEDCKRLEAIPGIGPKSARWLVAELPRTLQSSRAAAAWAGVAPGLFESGTIRKPSRISPAGNRYLRKTLFLGAVAARHHDPRFKTFADRLAARGLSKMAVVCAVLHKLLRTAFAILKNKSTYEPSHCSVLPKTTQNPA

SEQ ID NO: 223569 - protein, 337 aa, unidentified
MDYFAGLDISMDETHVCVLDREGVMVYESKSESTAAAIAIELSKAPSCRRIVFETGRMAPILFHGLSQLGLPVVCVESRQAYQALKSLATHKTDRNDARGLAHLARTGFFKPVHVKSLRAHALRSLISARKKLVGQRVTLENQIRGLAVVFGVRLPRALTAAFIDNALKASEGIAGLSAAMRGLIAARTAVMTAVAAIDTDMRRMTRASAACRRLMTIPGVGQLTALAFVAAIDDPSRIRRSRDIGAYLGLVPTRHQSGELDYTGGISKCGDRRVRTLLYEAANVMLTRYKGQLKLKDWAFAIAKRSTMRKARVALARRLAIIMHAMLRDGTEFASA

SEQ ID NO: 223570 - protein, 315 aa, unidentified
MELLPTAPSFVGIDVSKDRLDVHVRPSGQTLTAARDSTGLQQLVGSLRKLAPALIVLEATGGFEITVAAALASAGLPLAVVNPRQIRDFARATGRLAKTDALDAQVIALFAERIRPEPRPLADADSQNLAELIARRRQVVEMIGMETNRLYQVRNARVQRMLRTTVNTLTAQLAELDRDIDDTIKRSPVWRAADNLLTSVPGIGDVTAHTLIADLPELGQLDRRRLAALVGVAPINRDSGQMRGKRTIAGGRSDVRNALYMATLSAIRWNPIISQHYKSLVERGRPKKVALVACMRRLLGILNAIMRTNTPWQCA

SEQ ID NO: 223571 - protein, 359 aa, unidentified
MSEHYAGRQIVGMDLHRRRSVLVRMTDIGEQLETVRISNDPQYLKAVMARAGEAPEVVLEAAYGWYWAADTLAELGATVHLAHPLGVKMFSYRRVKNDQRDAADLADLLRMGRLPEAWIAPPATRELRGWVRHRAKLVGLRSSLKCQVHAVLAHAGIWVPMSDLFGVAGQQLLAELSAGDRLSIESRSRLDSALRVITALEFEIELFTKLVAGRLRTDPGYRTIQQIPGVGPVLAAVFVAEIGDITRFHRPQQLASWAGLTPKHHESDTTVHRGRITKQGSRLVRWAAVEAVQRVSPHTRLGQHRDRVAARRGHNIGVVAAARELLTLVYYGLRDHHIRALNPPPTVSSSASSSGRPAA

SEQ ID NO: 223572 - protein, 458 aa, unidentified
MRKGTAAVMNKPEQIEEIPDAEHEQLIERVAAVDVAKESGKVCVRLPDPARPGRRISRVWDVAATTNAVLALAERLIDLDVQKVTLESTSDYWRIWFYLLEARGLDVQLVNARDAKNVPGRPKTDKLDSVWSAKLTEKGLLRPSFVPPAPIRALRDYTRMRIDFVREATRHWQRLEKLLEDALIKVSSVACKLDTLSTRDMIEALIRGERDPHVLADLARGRMRGKRAALVEALTGRFDDHHAELARMLLDQIDALNRQVDQLTTRIEATIAAIPAAHVPTPGDGDGPADTTPRAQLAAIERLDEIPGISRLTAQVILAEVGLDMTRFPTANHLASWARLTPRTIQSGAKHRAGKTGKGNPYLKGVLGEAAVAAAKTNTFLGERYRRIVKRRGKLKALVAVARSILTIVWHLLADPTRRFQDLGADYHTTRINRGRKIRNLVRQLEALGQTVTLQPAA

SEQ ID NO: 223573 - protein, 352 aa, unidentified
MDHIGIDVHKRESQIYILAEGGEVIERRIRTEPERFDAVLGTRPRARIVIEASTDSEWVARCLEALGHEVIVADPNFAPMYATRTRKVKTDRRDARALAEACLLGAYRPAHRLSDPQRHVRGRLVVRDALVRHAHALHLDRPGPAPPARLSRPLRQCGAFCSPGPKPPLPGRLRSVVAPLLALMRPLNGQLTYSDATIEHLAVQDPRVPRLRSVPSIGPVTAAAFLAAIDDAQRFHHAHQLEAYLGLVPGERSSGDTQRRGAITKAGHSRPRWLLIQAAVSILRRRPPQAEELRTWALRIAARRGKHVAVVALARRLAGILYALLRDGSVFEPQRVRSPRHPAAAAAARVSR

SEQ ID NO: 223574 - protein, 371 aa, unidentified
MVAVIEMSQSKWLVAAMIPGVARQALKKLDADANALLKLLQRWREEARKAGRVVKRIVCAYEAGRDGFWLARWLQANTIEAYVIHAASIAVSREHRRAKSDRIDTELLMRSLLGWLRGEKRHCSMVAIPTMAQEDTRRPGRERESLVSDQTRIVNRVKAVLALFGIGGFNPRLRKAVQQLETLRTAEGTPLPDNTHAELRRDLERLGLVRDQIRAIERERLRRLAAAPVAATGPHAMIRLIARVLGAAIETADMLVNEVLSRNLRDRRAVARYAGLTGAPDESGKRRREKGLARAGNGRVRRGMIQLAWRFLIFQKDSRLAKWFRERTADGRSTTRKTMIVALARKLLIALWRLVTTGELTEGIKLRPAGA

SEQ ID NO: 223575 - protein, 391 aa, unidentified
MDEEGKEMGYPTFPNTLSGAKALEAHLLQLIKEKGFSTLKIATEATSFLDLHLVDFLASSPILAPYNPSIYQFNPKLVRNFKRAYSDKEKTDKIDAFVITDRLRFGRLPEPYESHRPYLPLRRLTRYRFHLIKAISREKAYFITHLYLKFSAFSLEKPFASLFGATSLALITEFSPDELVNLPMEDLTQFIIKNGKNRFKDPEKVVEALQRAARESYRLRPALASSIDLILATILQTLRALGEALKEVDKAIEKEFQAFPNTLQSIRGIGPVYSAGIFSEIGDIARFPAEDAIAKMAGLTWKRYQSGNFEAEETHMSKTGNEYLRYYLIEAANALRVHNAEYKAYYETKFQEVTLHQHKRALALTARKLVRLVFALLKKGQLYRANYQQEA

SEQ ID NO: 223576 - protein, 405 aa, unidentified
MDVMIGVDPHKGSHTAVAIGPAAGPLGKLRVGACGAQAEKLAAWAAAWPERTWAVEGAGGLGHLLAQQLVAAGERVLDVPPKLAARVRLLEAGDTNKNDPNDALSVAIAALRSKAKRPVAAEDYAAVLKVWSKRHRDLSRARNQVACRLHAVLCELVPGGFSKEITAGQAARVLDAVTPSGAIAQARCELAGQFLSDLRNLDVQLRQTKKKLTAAVRASRTTLTEIFGAGPVIAGTIIGGIGGISRFTSRDHFAACNGTAPIEVSSGGRITYRLSLRGNRRINHAIHMAAITQISHRHSTGRAYYDRKIAEGKTHKEALRCLKRRISNAIYARLLADAQQARAAGATGPGGQPGNDSVSSAAGSHPERRLFGQATPEPRPSLRPATPRKRARPSKPRPKKTRRSP

SEQ ID NO: 223577 - protein, 343 aa, unidentified
MQAIRTIGLDIAKSVFQVHGVDVEGNVVLRRRLKRRYVLAFFQKLSPCLVGIEACASSHHWSRELQALGHRVRLMPPAYVKPYVKRQKNDATDAEAICEAVSRPNMRFVETKTPEQQSCLMLHRTRHLFIRQQTAVINAIRAHLAEFGIVAPVGRRGVEQLLGVVADADDKRLPEVARTCVAALGAHLQMLKAQILQFDRLITAWHRSSEVSKRLDAVPGVGPALATALVVSVPDPKAFRSGRDFSAWIGLVPKQNSSGGKDKLGNISKRGDRYLRSLFTTGALAVIRYAKIHGTTHRPWLTALLARRPTKVAAIALANKLARMAWAMMARGEQYREPAALAA

SEQ ID NO: 223578 - protein, 410 aa, unidentified
MDVMIARVAGLDVHQATVVATVRLPSAAGGRQLITHTFGTMTDDLVALREWLQAYEVTHVALESTGIYWKPVYYVLEGAFTLLLINMRTLKHLPGRKTDVKDSEWLAQLLECGLLRSSFVPPPAIRELRDLTRYRVQQVRDHTQEVNRLHKVLEDAGVKLSTVMTNVMGVSGRAMLTALVEGTTDPAVLADLARGKLRKKVPELRRALVGRFRPHHAFLLEQALAKIDFLDETIDRITAEIDRRLAPFEPMLANLDTTPGVNRIGAVSLIAETGGDMSRFPSAEHLCSWAAICPGLDESAGKRRSGRIRKGNAYLRGALIEAALGAKRKNGSALQARYYRVKRHRGHKKAVVAVGHQILEIAYYIMRDGVTYHELGADYFERRTTARTVRRHVRQLEALGYRVTLEAPAA

SEQ ID NO: 223579 - protein, 402 aa, unidentified
MNCVGIDVSKGKSMIAVMRPFGEVVVSPFEVRHTANELSELAGLLKSLDGETRVVMESTGNYHAPVAWLLHGAGLYVSVVNAMLVHDYGNNSLRRGKTDKKDAVKLANYGLDHWLTLPRYVPEEDTRLMLKTCYRQYQQYSKVQTMLKNNLISLLDTAFPDANRLFTSPPRTDGSEKWVDFVATFWHCECVCGLSKKAFTATYQKWCRKHGYNFSQDKALDIYASACGRFGVMPKTNTAKLLVEQAISQLQTTSAALAALKQEMQSLAASLPEYPVVMGMFGVGPTLGPQLIAEIGDVRRFHSKKALVAFAGIDAPPYQSGQIDVRSRSISKRGSASLRRTLFLVMGVLLQCAPMDEPVYQFMNKKRSEGKPYRVYMMASANKFLRIYYASVKAYLDSLEHD

SEQ ID NO: 223580 - protein, 377 aa, unidentified
MPDTKTLVKNADKLFIGMDLHKNTSTFVVKDKEGKLINSAKVLTDKNDVTRYIDSIKRNSGGRDLSLAVEPVSQWYYYADLIENLGVDVHLAHPMEVKAIAHARIKTDKIDAAVLADLLRTNFLPEAYFSPAEVRSWKEQCRFRASLINLRTQVKNKVHAILFKHSLKHTFSNLFGKGGRRWLAGLELKDPFKGNLDKYLLLVDYLTEQIVLAEEIITNTVINCPQAKLLISIPGISYCSALTIMAEIGNIERFISVKHLQSYAGLIPSTYNSGDKQIHGRITKRGSKWLRWIMIESAYHQMNCKRIPGFGAYYNGIKIRKGSKTAAVATARKLLAVVWRLLKDNRPYEVADPRCWKSRPIASKISSVSTVINTTED

SEQ ID NO: 223581 - protein, 409 aa, unidentified
MVVVTDHDSKVLARKTFGCHAWDLGTALDWAAGQATSRGFAGITVACEPTGHRWRVLGQLAAQRGMPFVCVQPMLTSWARRSEDLTFDKTDEKDAVLIARLTAQLRCYVPEPVDEVWGRLRHLGARRTQLLVESGRQVQQIRALLECVWPAALQTARQPFRSLTWTVTMHVIVQRDGGDLARTRRLGLARLESAVRKEIVQRGRQRPCLRIVRTLFAALSDPAGVLVHRAGALERVALLLDDWLEGHRRLADTETRMTTVLDELQLTELVTSITGLSAIGAAAILAETGDPTRFATARALVKHAGLAPREKLSGTFVGRTKLTGQGRPGLRLAAWRAVWGAQRANPVYAARFAHLTKREQNPLTVTQAQAVIAAAILRQLHAVITTGKRWDPIIATNGAERPTAMPMAA

SEQ ID NO: 223582 - protein, 342 aa, unidentified
MKKSYYIGIDISKKTLDASIFVENMNEKRYPHVKEDNDKAGFKRILKWASSEKVDLKDCLFCMEHTGDYGLELCLFLEQKHIEYCAVSPLVMKRAMGISRDKNDKIDSARIATFAFEKAYKMKPSKMASEDILALKKLQAERNLHVRERAKYKGYLSDKCTKNDGLRKRMTIMVKTLDCQIEEVEKEMQAIIQRNHELSSNYELLLSIPGVGKVIAISTLVYTNNFKAFDNARQYACYASVAPFVHTSGTSIHGAPTVSKMGNSQIKSELSMGALNAMSNDPQMSEYASRKRKEGKHNGVILNAIKFKLIERMFAVVHRGTPYVATHEYKTLRHPNRVSEAS

SEQ ID NO: 223583 - protein, 414 aa, unidentified
MKAVYPVCCGVDVHKSFLVATIITTTHSLEPHYEKKRFSVYNRDLHLFADWLISNNCFDLCMESTGKYWIPVFNILEERGIHVVIANPKWVKVIKGNKDDTKDSKWIGDLFRLGLVPGSFIPPKKIRILREFTRYRYKLVSMKSSEKNRFQNAFTVCNVALDSVVSDMFGASASAITDYLISSDSFNPDYCRSLLKRSLKKKADSVLTSIEGYSMTSEQKFRVKVVREHLSAIDHSIAKIDNAISKMVSEYESLISLLCTIPGVDRNSAITIISEIGTDVDLFGSSKRLCRWAGLTPGNNESAGKKKSVRISRAGVYLKPALVQVAHAAVKSTASPYYRLKYERLSKRRGKKRAVIAIARMILTAVFSILKTGEVWNPTDLFKVDLPEHLKELQRTKAIKQAFKFLLSQGVLSS

SEQ ID NO: 223584 - protein, 429 aa, unidentified
MNYNTQNAKIASITEKTLIVGIDVGSETHYARAFSWRNYEYSKKPFAFSNDEDGFASFKAWMDDIAEKHEMEKVIPGMEPTGHYWLNLGAYLQGQGMRPVHVNPHHVKKSKELDDNNPNKNDRKDPKTIAGLVNEGRFSYPYIPTGIYAEIRNLSNLRIQTQEEITRIKNRIARWFSIYFPEIKDVYRNPDAVSGLMVIKQAPLPCDIKGLGVDGVNKIWRDARLKGAGIKRAKTLVTAAEHSIGNTEAPRSARKEIRNLLNDYEIYKSRMDELMEEIEELLSEIPYIDKLMGICGIGIKTVSCFIAEVGDIERFDNPKQVQKLAGYAIVADSSGKHNGESRISHRGRKRLRYALYEAAISVIGKKKEFKEIHHYYRTREKNPLKKMQSVIAVSCKLIRIFYTILTKGIDYDGQKMLRDIVRPGMQSAA

SEQ ID NO: 223585 - protein, 414 aa, unidentified
MEGEINKSCGLDIHKRFVIATILSRSGEKQLQRFDRDDDGILALKNWVTSEKCDVVACESTSDFWVPIYEALIDHLPVIVGNARDMKAFTHKKTDKIDSEVIAQLALNKMVQPSRVFPKRHREFRSYVRLRLTLVRKRTDIKNEAHAILSSEMLHLGDVLTDIFGKNGRAILAGISSGKNVDQIIESLSPNVRKKGVQIREILDREISQSAAIRLQICLDLIKHLDDEIEVLEREIFNYAYQKHKREMEILLSVPGIGEIGAATLIAEIGNFSDFLSGDKLASWLGLVPNVYQSADKYHNGRITKRGSKVARWILTQIAQAAARKKNSKLKEFFNRKKKTIGHAKAIIALARKIATIVWHLITKDEMYEDETGYEKGEVKKRKIVETEIFSVDERITIISGIIAMMGKKDGEST

SEQ ID NO: 223586 - protein, 367 aa, unidentified
MKKVSTAAAKQSRNISQQRLTIGLDLGDRNSCYCVLDEAGRIQLEQRVRTTAKALQEVFGAMPRSRIALEIGTHSPWISRLLRELGHEVIVANARKVRLIGESRKKDDRLDAQTLARLARIDPQLLCPVKHRSAQAQADLMMIRARASLVRVRTGLVNAARGLAKSYGERLLGCNVRNLNPEKAEGLSPELQRALEPLLSAIEEVSERICEYNDRIEALAQTSYPQVELLKQIKGVGTLIALTFLLTLEDPHRFRKSRDVGCYLGLQPGRRQSGKSDPQMHITKEGDPYLRTLLVQGAQHILGPFGIDCDLRRWGLKLAERGGRNGKKRAIVATARKLAVLLHHLWVSGEVYEPLHNSSPMSSAAAA

SEQ ID NO: 223587 - protein, 430 aa, unidentified
MKSNTQNAKIEAITEKTLVLGIDVGSETHYARAFDYRGIEYSKKPFKFSNTEAGFVTFKEWILDLKERHEKDKVVPGMEPTGHYWFNLGKFLQDNEMKPVLVNPHHVKKSKELDDNNPTKNDRKDPKVIAGLVREGRYMIPYLPDGVYADLRTASNIRFQLQAELTRIQNRISRWFNIYFPEYKTVYGKPDAKSGMLILKAAPLPEDILTLGIDGVNQIWRDAKLRAVGKARAKTLIEAAEHSVGSKEGAVSARMEIRMLLEDYESRNMRLQEVMVLIEELVKQIPMAEKLLEIKGVGIRTVSGFLAEVGDISRFNNPKELQKLAGLALVENSSGKHKGETTISRRGRKRLRYLLFEVAMSLVAKNPEFRELHTYYTTRRLNPLKKMQSLMAVAAKLIRVFYVMLTKGVDYDPKKMVGDIKRPAVYLQAA

SEQ ID NO: 223588 - protein, 345 aa, unidentified
MDKISRIGMDTSKHIFQLHGVNAAEAPVPRKKPRRKDMVAFFAKLAPTVIAIEACGASHHWARLLQSFGHSVKLIAPQLVKPYVKRGKNDAADATALCEAMSRPTMRFVPVKTAEQQAALMLVSVRDRMIRNRTQLANAIRGHAGEFGLTAAKGMAHLVPLLERIEADETLPALARQLFAIEAREYAQPQGQIAEVDAKLMAWHRANECSQRLDKIPGVGPIGAVLLRMKASEPELFRSGRQFAAWIGLTPKDHSTGGKVRLGVITRAGDEGLRSVLVQGATAVIQHALRGGKASPWLAGLLRRKSPKLAAVALANKTARIAWKMMVTGETYIAKSVPAALARTV

SEQ ID NO: 223589 - protein, 434 aa, unidentified
MEDVEDEPLFAGRAAGIDIGKKTVMATVRVPGEHGSARRRQETREFGTTRRELEALAAWLHSWEVERAGMEATGDYWKPVYFLLEKAGLDCTLYKASQVKALPGRPKTDKLDSAWLAVITERGSLQGSFVPPEDIRRLRTCTRYRRHLVQARTAQKQRAEKLLEDAHLKLSSVLTDIHGASGRDMLSAIIAGERDPAVLAQLARGMARRKLRQLEEALDCTFLTDGHVFVLKRMLRHIDQLNAEITEVTTRIVELCRPWEDKIARLSTIPGFSAATAQDLIAEIGVDMRVFPTPGHLASWARQAPGVSESAGRRKNKGAGHGNPYIGGTLGEAAASAARTLTFLGAKYRRLIRHMPKLKAQRATMRSQLVIVWNVLSSDDAVYNDLGTDYYETRADTSRRARSHALALERLGYKVTIEPFHPEPDDPVPVTRAS

SEQ ID NO: 223590 - protein, 444 aa, unidentified
MILMGFAGSAPDHRAGGKREGAQVQVLYERCAGIDVHKDQVTVAVRLPGQGPGGRDTKIRKFAAFYGVLREMTRWLASQGVTHVAMEATGVYTMPVYHALLEPGCFEQVLVCNAAHVKNVPGRKTDAVDASWLAELLECGLLKGSFIPAAQIKAVRDVVRYRRKIVQERAAETQRLGGVLQDAGIKLDSVASSIDTVSGLAMIRALIDGERRGQVLAELARGVMRTKIADLSQALEGRFDDHHALMCQLHLDHIAHLNEMIAKLDAQVEAMMVPFARQRDLLATIPGIGPKAAAAIISEIGTSPAEFFTTGAHLASWAGLCPGNHESAGKRKHGKPRKGSQHLQPLLVECAWSAVRTNGRLKARYHRLVRRFGGYRNPAAKKRAIVAIAHTLAVVIWHMLATGNPYTDLGPDFYTTRSDPEKEAQRLIAKLEALGHKVTLAPAA

SEQ ID NO: 223591 - protein, 348 aa, unidentified
MRFYTEQHQHYCGIDLHARTLYLCVLNAEGNVLLHKNLPCDRARFLEAITPFQDDLVVASECIFNWYWLADLCAEHDIPFVLGHALYMRAIHGAKAKNDRIDALKTASLLRGGLLPMAYVYPAEMRSTRDLLRRRTHFVRKRAQLMAHVQNTFHQYNLPRPSGRLVHKYQREPIPDAFEDPMLKKSVETDLALCDTYDKLIRDLEKTVVRQARVHDPQTLLRLNTIPGIGEILSLTLLYEIHDIGRFASVQRFASYARLVKCEKSSAGKRVGTSGHKIGSAHLKWAFSEAAVSVIRHLPQSQRLHERLKRKYGKGKALSILAHKLGRTVYFMLKRNQAFDADRFLANA

SEQ ID NO: 223592 - protein, 346 aa, unidentified
MQTQIIKQAVGIDVSKDSVTVRYGSMDKEQNQLITNSVTFDNAPNGHEKLFIWAQKQKLSDDVPLWFLMEATGVYYENLAYFLSEKADQKVVVILPNKAKSFSKTLEQKSKTDDIDSKNLTILALEKPLTAWNITPELMRQLKALTREHLTLKEMATQVKNQMHAKKNSYKPLKQTIRRLQQQLNLYYKQLKDIEKQIHELVDSDKDLKDRIDKIDKIEGLGLMTIVTIIAETNGFALIENQRQLTSYSGLDVVHNSSGLKKGKTSISKKGNKFIRRALFMPALVAIRYNQKLKELFIRLVAKKNVKKVALIAVARKLLVLIYTIWKNNTDYIPNYTPANAGKNIR

SEQ ID NO: 223593 - protein, 351 aa, unidentified
MSHKTAATAAHTIGIDTGKNTLHLIGLDEKGAIVLREKIARGRIAARFANVPRCLIGIEAGMATHYVARELIALGHDVRQVPPAYAKPFRQGHKNDFRDAHAIAEAVQRPSTRCVPVKTDDQLDLQALHRVRSRLVGQRTAVINQIRGFLLEHGIAVRQGLRFLRQQLPDILAKRGDVLSPRMIRIIEDLSGDWRRLDERIKHITEEIEVLAHGSESCRQLMTAPGIGPLIASAMVAAIGNGTAFAKGRDFAAWLGLVPKQMSTGDRTILGRISKRGNRYLRTLIMQGARVILLRPANWAKHSFGLWLTAAAQRLHHNVLATALANKLARIAWTVLAQGRSYEARVEPKVA

SEQ ID NO: 223594 - protein, 295 aa, unidentified
MKTETTALVPKLYIGIDVHKKSWTFHYQTDLFDGKTITQPVNPNTLIEWVQKHYPSHEVTCAYEAGFSGYSAARLFQKQNWNVLVLNAADIPKPQKQNVVKTDQIDCRNICKQLKNDALNSITIPEEQRESFRSLFSERNNLVEGLRNVKLQIKSHLMYYGIVIPEEFDNPNWSKNFIEWIQTQKMSYETGTEKINFLLKRFNFMHYELLNISNQLRAYARKHYKKDYYLLMSVPGIGGIVAVSILAELGDLRKYNRFDDLASSVGFVPGIYSSGDTTIVSGITPRAKLTMAYRI

SEQ ID NO: 223595 - protein, 316 aa, unidentified
MTNMPSFVGIDVSKTQLDVALRPSNEQDTLVHEAAGIDTVVTRLCRMRPTLIVLEATGGLERPLVRALVAAALPVIVANPRHVRDFAKATGQLAKTDRLDALVLARFAEAVRPALRPHPDAATESLAALLARRRQLLDMLIAEKNRLSTAPTRVQRRIRAHVTWLTAELARLNEELDEAIRQSPVWCEQEDLLQSTPGIGPVMSRTLLADLPELGTLNRKQIAALVGVAPLNRDSGTLRGKRQVWGGRAPVRAALYMATLVATKCNPVIRSFYLRLRGVGKAPKVALVACMRKLLTMLNAMMKHRTPWRSSAVQKA

SEQ ID NO: 223596 - protein, 494 aa, unidentified
MVPGVVGCITGGVRWWLPRLEECYWRPTLAGADLHFRFRRAGMSRRGRPRRKHLQMEVVNPNAAGIDIGSEVHYVAVPPDRDPEPVRSFKCFTADLHALADWLDACEIETMAMESTSVYWIPLYQILEARGFEVVLVNARHVKNVPGRKSDVLDCQWLQQLHSYGLLRASFRPEDRICVFRSYIRQRDNLIKSAGAHIQRMHKALEQMNIQLHKAITDITGVTGMRIIEAILDGERDPIKLAQLKHYNTRSSDETIAKSLEGDWREEHLFSLRQEFELYGIFRQKIAECDRKIEACLSSFESKVDPDHKPLPPYKHGNKKPHGNQPDLDLRNPLYRMIGVDLIAIDGFDVLTVQTIISEVGLDMTKWPTEKHFASWLGLCPNNKVTGGRVKDTRSKKVVNRASCAFRMAAQAAGKSHSALGGYYRRIKTRPGSSKANTATAHKLSRIFYRMLRYGTDYVDPGLHYYEQKYRQRVLNNLKRRARLLGHELIQNLE

SEQ ID NO: 223597 - protein, 367 aa, unidentified
MKQSSKNFVGMDVHKDSIDITLAEQGGEVRRFGEVGGDRTALLKAVRKLSSRGGELVFVYEAGPCGFWIQREITALGRVCWVVSPSLIPQRPGNHVKTDRRDSENLARLARAGELTPVHVPDVRDEAIRDLVRARDDAVIAQRRARQQLKALLLRNDIRYVGKTSWTSAHLRWLSELKLAQPAQQIAFQEYVDAITVATARIERFEQAMRDEVLTWRFAPAVAALQAMRGIQFVHAMTLVAELGDLTRFASPRQLMAYLGLVPSEDSSGQRRHQGSITKAGNAYARRALVEAAWAYRHPARLTRIIALRQDALPKQACDIAWKAQLRLCAKYRRLRARRVLETKIIVALARELSGFVWAIGQHVKPQ

SEQ ID NO: 223598 - protein, 314 aa, unidentified
MVAQTVQDIGIDVAKGWLDVAVFQTQEQARFDNDKDGWAKLVRWLRGRTVRAIGMEPSGGYERGVAKALRSADLPARNVNPHKLRHYARALGRLAKNDRIDALLIARYTAELPTRPVRCDPIAEQLADLVVARRQLSDDKVSLANQLEQLREPMVKRIFTQRLRRIELDIALLAKRMAELVASQPALAAKDRLIQSFHGAGPVLSHTILALAPEIGQASRREIAALAGLAPYDFDTGTFKGRRVIWGGRHALRRVVYMAALTASRSNPVLKAFHQRLIANGKQPKVAIVAVARKIMTILSAMLRHNQPWYPDKA

SEQ ID NO: 223599 - protein, 309 aa, unidentified
MFVGIDVSKASLDVAFRPEGASFQVGNDEAGIAECVRRLQEVKAQLVVVEATGGFETALVAAAAIAQLPIVVVNPRQVRHFAKAIGRLAKTDRIDAAVIAHFGEAVRPELRPLESEASERLTALLSRRRQVLEMIVAEKNRLGAMREKQMRQRITYHLHFLKQELAELDEDLDAEVRSSPAWREKDDLLRSVPGVGRVLARTLLAELPELGRLDRKRIAALVGVAPMNNDSGSLHGQRRIQGGRAHVRTALYMAALVASRFNPRLKRFYDSLRASAKTGKVALVACMRKLLVILNALVRSGQRWNAEVA

SEQ ID NO: 223600 - protein, 345 aa, unidentified
MQPMYYIGLDVHKHEISYCVKDSAGKIHDEGWIPATRFDLDRWMKRLPQPWNAALEATMFSGWIYDHLKPHAAALKVAHPLMLRAIAAAKKKNDRIDANKICDCLRCDFLPECYMAPTAIRERRRTLRYRNLLVRQMVQMKIKISTLLMEAGVSYNKQKLHKAGYFRELLATNPDIPEGLRPLLRLSREMVVRLGKTESALIHSLQQDRLLAERVERLMSIPAIGPITALTWALEIGEVQRFSSIKKAISYCGLCGDEQRSANSVQRTPISKQRNKHLQTTLIEAAKMAPRYSPTLALLYDRETQKGNANRATLAVARKLVAYLMAVDRGQCRFLVIDQETRTAA

SEQ ID NO: 223601 - protein, 370 aa, unidentified
MSQSRTLFLGMDVHKDSIAVAYVAQAHGAEVTSLGTMGTRQCDIAQLIRKMPSKATHLIFVSEAGPCGSWLSRYLRKKNDDCWVVAPSRMPKKAGDRVKTDRRDALQLARRARSGDLTAVSVPKVEDEAMRDLTRARDDTLSDLKATKFRLKAFLLRHDSRSTGRANWGPAHLRWLSEVICPPPAQQIVLHEYVRAVNEHTERLQRLAQALHEHVQAWRLHPVVEALQALRGVQCTVAVIMVAALGALTRFDTPRELMKFLGLIPSAYSSGARRQQGAMTKAGNTHARRALVEGAWAYRYPATGSRHLQRRLEQQPKILQDISWKAQGRLCKRSRRLSTRGKHATVVTVAMARELVGFLWAIAKEISGTP

SEQ ID NO: 223602 - protein, 354 aa, unidentified
MPATAQTAIAVIGIDIGKNCFHVVGQDTRGQIGLRQKWSRHQVEARFANMPPCLIGMEACVGAHHLSRRLKALGHDARLMPAKYVRPYSKGQKNDFRDAEAIAEAVQRPTMKFVATKTADQLDLQALHRVRERLVGQRTGIINQIRAFLLERGIAVRQGQRFLRAELPRILATPPDVLSPRMVRMIEDLTSDWRRLDERVERLSDEIETIARQDAGCERLMSVPGIGPIISSAMVAAIGAGDVFTRGRDFAAWLGLVPKQISTGDRTILGKISRRGNRYLRVLFVQAAWVVLIKPKIWERHGLKPWIEAARKRLHHNVLAIALANKLARIAWSVLARGRAFEARKMDQAAPQPT

SEQ ID NO: 223603 - protein, 310 aa, unidentified
MDNFVGIDISKDSLDLCIKPNSEVLHVAYDDKGIIQVVKRLMQVAPTLIVMEATGGLEMRLASELAAKGLHVAVINPRQARDFAKATGQLAKTDLVDAAVLAAFAQAIRPAVRPIKDADTRELDDLVTRRRQLIDMRVQETLRLGTASKVQSKSLKAHIAWLDKRIANLDDDLTKRLRASDAWRTKDDLLQGIPGVGAVTTLTMLAKCPELGTMNRRQIAALVGVAPRANDSGRHRGKRFVWGGRADVRAVLYMATVSAIRFNNDIKIFAERLKQAGKPAKVVIVACMRKLLTIMNAMVKNNAQWTPKTA

SEQ ID NO: 223604 - protein, 416 aa, unidentified
MNAVGIDVSSRKTTVAVLRPLGEVVCLPFDVTHDIAGLASLAEKLKALDGETRVVMEHTGRYYEAVEKALHEAGLFVCAVNPLLIKEYGANSLRRVKTDKADAVKIARYALDNWADLRDFTPMDAIRYDFKTLNRQFQLASKQRTASANNLIALLEQSFPGIRKCFDSPVRSDGTQKWVDFAHSFWHVDCVRKQPFAAFCERYRKWCKRHAYLFKLSNAEEVYALAKRAVVLTPKSKVVKVLVQEAANQLISISRSVEVYRAEMDRLAAMLPEYPVVMAMYGVGKSYGPQLMAEIGDVRRFERKQALVAFAGIDPMPNQSGDKNVRSNKSSKRGSPYLRKTLFNVIRTYLQCAPQDEPVFQFLNRKRAEGKPFYVYMLAAANKFLRRYYAKLRDYFASLDTLQSVAPIPTILKATL

SEQ ID NO: 223605 - protein, 408 aa, unidentified
MEVLHRRCAGLDVHKETVVACVRILHAGRLRQEVRTFQTTTEGLLELADWLAQNGCTHAAMESTGVYWKPVWHILEDSVELVLANATHIRNLPGRKTDVNDAMWISDLLAHGMIRASFVPETPIQELRDLTRTRKQLAREIAQHTLRIQKTLEDANLKIASLVSDTLGTSGRAILEAIVSGESDPQKLLEVTQGRLKATPERLLKALRGRIRPHHRFLIRLHLGQIDAISRAIQDIEARLKETLQPFRADIDLLTQIPGMSELAAWVVLSEIGFDMKRFPTAGHLVSWAGLCPRSDESAGKRRSTRTRNGDPWLKTLLVQSAWAASRKKNAYFRAQFLRLRARRGPMKAIVAVAASLLTTIYYVLLRREPYRDLGADHFDRHDPAKLAKRLVRRLNDLGFEVDIRNAA

SEQ ID NO: 223606 - protein, 339 aa, unidentified
MNTSVVGLDIAKHIFHLVTQGTDGKMIKKKLKRSELLTFFANYPASIIGMEACGSAHHWARELTRLGHEVILLNARYVKSFVVGNKNDYNDATAIFDAVARPNKRVVAVKTVAQQDIQMVHSIRKELVDKRTALVNQTRGLLGERGIVINQGITQLRQQLPLILEDAENGLTDLSRELFAEQNEKLKALDDDIKAQDQRINRLCNANELSKRLLDVPGVGPLTATMVAADIGDGGKGYPSSRDYAASIGVVPRQHSSGDKQIYLGISKRGNRYLRTLLIHGARAVLKNCAHKTDKLSLWLQALIERRGFNKAAVALANKNARILWAMASNGKDYETLTA

SEQ ID NO: 223607 - protein, 315 aa, unidentified
MVDVPCFVGIDVAKAQLDIALRPAGERWAVPNDASGIAPLVDRLQALHPTLIVLEATGGLERAATAALAAAGLPVVVVNPRQARDFARATGQLAKTDALDARALAHFADVIRPTPRPLPDAQTQELRALLGRRQQLIVMRTAEQNRLAGTSERLAKDITAHITWLNTGIATLDDDLETMLRASPLWRENDDLLQSAKGIGPVCARTLLLELPELGTLTRQQIAALVGVAPLNCDSGTLRGRRTIWGGRAHVRTVLYMGTLVATRYNPQIKAFYERLLAAGKVKKVALTACMHKFLTILNAMLKHRTPWQPQEVQS

SEQ ID NO: 223608 - protein, 367 aa, unidentified
MEEGTAYVGMDVHKRTIAVTVRFPGGGRDERTIPHETRAVNRLVRKLKREAPGAILCAYEAGPCGYGLQRDLQEQGLECQVIAPSRIPRKPGDRTKTDRRDARMLAELLEGGLLTEVHPPNPEDEAVRDLCRAREAAKEDQVRARHRLSKFLFRRELRWGRKNWTLAHQQWLRGLRLEHAADQAVFDAYCIALDQATERVRMVDLGLKDWALIEPYATPVSWLRCFHGIDTVSAMTLVTELHDFRRFRRPRELMSYLGLIPSEHSSGGRTQRGGITKTGNGHARRILIECAWHYRHQPRVSRALRERREGQPARVIAIADKAHRRLSGRYRRMTARGKEHNKVVVAIARELVGFLWATLAVEERTAA

SEQ ID NO: 223609 - protein, 414 aa, unidentified
MNDPTVTAARTGAVFAGIDWASADHAVCVVDAAGAVLWRHTVAHSRAGLARLTARLTGLGVARVGIERPDGPVVEALLNAGLPVAVVPPRQVKNLRSRYRGAGKDDRFDAYLLADTMRTDGHRYTDLARDTASTTGLRALVRARQDLVEIRVGLVNQLRHTLELAFPGAVGLFFDLHSPIARAFLRRFPTAAEAAVLDEETMAAWLTAEGYCGRTPAAVFIDRLRTAPTGLAGAEADARRHITLALLAGIDAIEDQAAELTRRIKETLALHPDAPIFTSLPRAGQIRAAALLAEIGDARGRYPTADALAAAAGACPVTFESGKHRAVGFRYAADAKLRRALTDFADDSRHANPWAADIYNRARARGMRHPHAVRVLARAWTAVIWRCWQDQTTYDPDRHGALNRYLNQDAAAAA

SEQ ID NO: 223610 - protein, 320 aa, unidentified
MYSIGLDISKSSIAVHIPQGALDLEIDNSAKALKSLYARLKKLYKKEIDQVVWVFESTGSYSSLIYRFCANKKISVFMPNPKQARGFAKAIAQRNKSDKIDARVLAQSIVIAKDSEIKVPLINSLVEHFKEQIGYYRLLVKQEGQLKNHQESLEAKGGSKELIRSVQKRIKALKKEQQTIIATMKSMIDQDETLKHKLDAIASIKGVGELSALILLHLFLRYPHANQRQIVSLSGLDPIIRESGTSVRGKTKISKAGDKIYRAALFMPAMVAIRHNPRLKSYYERLKENGKHTTVAQVAVMRKILIIAHSIYNSGEHYRQ

SEQ ID NO: 223611 - protein, 377 aa, unidentified
MSKIIMCGCDLHDRSMLLRYCVDSSSPVQASFVNEAEGRAKMVARLKKYAQEQGATRIIFAYEASGQGFGLCDLLHEEGIECHVLSPTLLPKTPKSAKQKTDARDAQMLLEQVRGYVLAGNPLPVVWTPPQRLRDDRELVRARIDSANEATRIKLQVLSMLKRRGIPKPAWYTCPWTKRFVRWLREIADGLEATVAPVLASLIDRYELYVAEQGKLNKAIQKLSQTDRYQAACGELRQLPGVGLLTAMTYLTEMGDLHRFHNRREIGAYLGLCPTSFESGEANDRKGHITRQGPARLRKLLCQAAWVSVRYCPESAATYARIRGGKRQRTKKALVALMRRLAIKMWHRATACGVACELQGRGGPHGLPPTPFLPSTA

SEQ ID NO: 223612 - protein, 394 aa, unidentified
MFMFYLGIDIGKNTHVASLMDEKAKVIFKAHSFSNTLDGAATLLEKITPYSAELEIGMEATGHYWLSLYSFLVENNFVVHVINPIQTDGWRKGTEIRKRKTDIIDSVLIADFIRYGDFLETSLANEDTLSLRNLSRFRNYLVGSIGDLKRKTICVLDQIFPEYHLAFSDIFGKTSKELLLQLNSPSDYEEVTSEQLEELLSQVTLKSFAAQKFKDVSALAKSSFGITFCVNSFSFQLKLLIEQINFIEKQVSDVESQMSELLEKIKTPITTIPGIGNILGATILGEVGDMNRFSSGAKLVAYAGIDASVSQSGEYECTNNHMSKRGSPYLRKALFRAAFIASNSDPVFKAYYQKKRMEGKHHNVAVGAVARKLCYTIYAVIKNNSPYEVQAPRN

SEQ ID NO: 223613 - protein, 373 aa, unidentified
MENSITYAAMDTHKKSHEVALYYPGNPRIERFSVRNSASEISKMVKKILRKAPAEIQFCYEAGVCGFALKRKIESSGCKCAVIAPSLTPVKPGERIKTDRRDALKLLSMFRSGLLTEVYAPNPQQEAARELTRLYQTARQNLVRIHHQLLKFLTRHGYIYTEGNHWTGRHLSWLRSLEFEEPLLREVFDSYFTEMQHCMQRLDSLAKRVEQLAESEPYKELVGLLRCFHGIKTLTAISIITEIFDFGRFSSPRDLMSYLGLTPSESSSGEKQKKGPITKSGNKRVRRLLVEVSWHYRHPYHISKTLKQRRDNQPQWAIDIADRAGRRLRKRYWYLINRGKMPCKATTAVARELVGFIWSVFREYQLRNIKKAA

SEQ ID NO: 223614 - protein, 343 aa, unidentified
MSEISIVGLDLAKNVFQVHAVDGSGKVVLRRQLRRGAVEKFFAQLSPCTVGIEACGSAHHWARVIGRYGHQVRLMPPAYVKPYVKRNKNDGRDSEGICEAVGRPTMRFVAVKSVEQQATMAVHTARALLVRQRTMTANSLRACLSELGIVAAQGMEGLRQLMTRLEAPSEDIPEVMRSALLILARHWQALDADERALEQQIAKAARGDRQARRLMEVPGVGPIIASTVLAKVPDAKVFRSGRDFAAWIGLTGRDHGTGGKHRPGRISKQGDRMLRALLISGASAHMRQQKRRGVSDPWLRDLLARRPYKVVMVALAAKTARILWAMLVKGEPYRDRASAPAAA

SEQ ID NO: 223615 - protein, 371 aa, unidentified
MTVKFIGLDVHKDTIAVAVADGDGAREVRFHGTMANTPEAIRRLVARLSGPGVVLRFCYEAGTCGYGVHRQLRRLGVDCMAVAPSMTPRRPGDRVKTDRRDAMTLARLLRAGELTAVWVPDEEHEAIRDLVRARRQAKDDLVSTKLALRSFLLRHERRFPGRSAWNKTYWRWLGEQAFASPHQQLVFGEHLRRIEEAQARCDRLDAALAEAVAGWRLAPLVEALQALRGIALVVAATLVAEIGDLGRFETPKQLMSWLGLVPSEQSSGARVRRGAITKTGNGQARTMLVEASWCYRLPAREEQRYRARVQGLPEEIRSIAWRAQVRLCGRFRRLAAAGKPLPKVTTAIARELAGFVWDIARRVRPAVAGQA

SEQ ID NO: 223616 - protein, 343 aa, unidentified
MKLMRIGVDLAKNVFQIHGVDRHEQPVWRQRLPRDRWLQTVLEKTEPGCEIGMESCGGAHHWARQLQARGFRVRLIAPQFVKPYVKSNKNDANDAEAICEAMSRPSMRFVAVKTIEQQDIQATHRIRAGLIEQRTAKANQIRGLIAEYGLVAPKELLMLRRAIPCWLEDADNGLTARFRRLLNGLWDDLRALDERVSELDGEISAIAASEPSAVRLQQLRGVGPMIATALVAAIGDASQFANGRQLAASLGLTPKQHSSGGKDRLLGISKRGDAYLRTLMIHGARSALRTAKSKDDRLSQWVVRLAERSHPNVAAIALANKTARMAWAMLRNGTDYQPDRAAA

SEQ ID NO: 223617 - protein, 356 aa, unidentified
MNEGSCVGLDVHARSVVARVIDMGSGEVRSLRVPSGAEATVAWLKTLPAPVRVVYEAGPTGYGLARSCAEAGISCVVAAPSKIRPAADRVKTDRRDAERLARLLRLGEITPVRVPGPAEEAARDLVRAREDARGDLMRARHRLSKLLLRHGAVYDATAWTRAHDAWLRKHRFQDGPLAIVFDECYSRMIDAKTRRDTLDKAIAELAASEPYVDVVERLVCLRGVSTLTAFALTVELGDWNRFRPESLAPFLGLTPSESSSGERRRQGGITKTGNTHARRLLIEAAWHQRSAPRLSVTLERRRTGKSLAVRAQADSSARRLHGRWNALEARGKPRLIVVVAVARELAGHCWALATIE

SEQ ID NO: 223618 - protein, 362 aa, unidentified
MTFFIGVDLHKTQFTVHVRTEERSETLNQIRQYKTDDKGYADFTTRIKAYKEIGAVVKIGVESTGNTRFFKHEVEKAGAEVTVINTLKFKVITESAKKTDKHDACTISEFLSKDMLPESYLCSKETENIRRLLKSRERLVRSIVGQKNEVHALLVSMGLKDESRSLQSKKGRQKVLDVLESNNDNVLEAQSVQLMFEIIRQMEESVKIIEKQLTELTKDDQMVNRLLSIRGCGKITAWTIRAYTEDMGRFASAKKYAAFCGLVPWVSDSNESIRHGKITKRGPQELRVSFVQLVMGIRRCKDTACWRLMQRYEYMKTHKGSGKSIIAAARKLAEIVWAMLNNKEDFDCERMKGTYNRMNLAV

SEQ ID NO: 223619 - protein, 323 aa, unidentified
MNKYKETFGVDISKDVFDVHSNGSGHNQFKNNEKGFACFLKTLSEGALVAMEATGYYHYRLAQFLYKNNVMVSVVNPLSVKRFIQMKLAKVKTDKSDARAICDYALANEVPLYNALTDVQAECLQLFRLLDSYLKKRTATKNKLHGEETLGIPSKFVYRSLKRNKKHLDQEISGIEERLLALVKKEQQQQLTLLTTVPGVGTKTALFLIVVTDGFSKFETAAQLCSYVGITPTIRESGSSVRGRSRISKVGNKKLRNLLFLCAFNACKHNKACRELYERIVNKGKSKKLALIAVANKLLKQCFAIAKSGLPYDDKFVSVLAVK

SEQ ID NO: 223620 - protein, 372 aa, unidentified
MTQSNILFIGMDVHKQSIVISLADDDRSEVRRYGSIGGTLIDFKKLLRKLVSTNKSLFFCYEAGPCGYELYRFIVSQGHQCIVVAPSLIPKKPGDKVKTDKRDADQLVRLLRAGELTPVYVPNAEDEAIRDLSRAREDAVLVMKSARQRLKSFLLRHNHRFDGTANWSEKHLRWLAECVSLAFPAQQIVFQEYVNATTEAKQRVIRLEEEILFHTKQWRLYPVVEALMAMRGVRMVVAVTIVSELGDLTRFDNPKQLMSFLGLTPSEYSSGERQRRGAITKTGNQHARRVLVEAGWAYRFPAKVSKEMQKRQEHVSLPIRDIAWKAQVRLTKRFRVMANKGKPNNVIVVAMARELAAFMWSIAQHTPISPRD

SEQ ID NO: 223621 - protein, 421 aa, unidentified
MSDDRCRLGSDDVVIGLDLASAEHQAVVVTAAGQRLTRFRMPHTRAGLEELLRRTAPAALGRPGGARVFAFEATGHLWEAVAYVLRARGEPYVVVNPLATFRVREARQLSREKTDLTDAEQIAELCRTGLVTRTQLEARPYLALRRAWGEYARLREERARLKVLVAHQLYGLFPEFLRVWADLLQPGALAVLRTGLTPAAIAALSLTEFVAQARAHGAGHRLWRDKLAQVYRAAAQTMACPDGLDVLAREVQRAVARMDLLTAHMTAVVTEIDVLLAELEEVPYLRTIPGLGWASVAGLLAHIGAITKYHHGRQLIKLAGTNPSRRDSGQTVGRGQRMSHRGRAGLREVLYLATISCLQHNPRIRAHYDRLIQRPDRPLPKMQALGACMNKLLLYAFAVMHRREAFQLDHDWQRTTMARVA

SEQ ID NO: 223622 - protein, 428 aa, unidentified
MSNKENIPHEPQFAAFVGIDWADQKHVWCLQTAGTTQRETGELKHTPETVEAWVGQLCQRFGNRPIAVALEQSKGALILMLSKYEALHLFPVPSSMSASLREAFYPSGAKDDPRDADLLLDLLLQHRDKLRRWSPDNEITRRIQNLVEERRKLVDEKTAHSNRLTDYLKIYFPQVLDWFEDLDTELVCALLANWPSLEELQKVPPTELRAFFHQHHCHARDLIERRIPAIRQAKAAIQDRPVIEAKRAVVKVVVQLIHTLLQGIAELDKKIAEACEAHPDFFIFDSLPGAGEVMAPRLLAALGSQRDRYGSAADVQRYSGIAPITERSGKKKWVHFRWACPKFLRQSFHEWAGHSIMKSAWARAYYQQQRGRGSDHHAAVRALAFKWIRIIYRCWQDRVAYDENKYLGALVKRGSPLSAVVVPGGIVV

SEQ ID NO: 223623 - protein, 336 aa, unidentified
MTITTIGLDLAKYVFQVHGVDIEGNVIEKRRLRRSQVIAYFASIPRCLVGMEACATAHFWGRELARLGHEVRLMPPQYVKPYLKRGKNDAADAAAICEAVSRPSMRFVSIKTEAQQAVLVMHRARDLLVRQRTQLINAFRGHASEFGIIGAQGRWNVARLLTAIREGRAVPEPARTIIEMLASQLDAISTRIDEIDAQITAWHKANPVSQRLAAIPGIGPLIATAIAATVADPAAFRSAREFAAWVGLTPRQRSTGGKQRLGRISRQGDQYIRRLLIIGAQTTLLRSKEARANPWIQNLLARCPRLKVAVALANKTARIAWALMAKGESYRPMASA

SEQ ID NO: 223624 - protein, 369 aa, unidentified
MTSITQSTAPCHIPADAEDVLLGVDTHKDVHAAAVITVLGAALDGRSFPATADGYRQLPDWARSFGVLRRAGVECTGSYGAALTRHLRAAGIEVTEVNQPDKAARRRHGKTDAIDAEAAARAVRTGRATAAAKTGDGPVEMLRLFKLAKGSAIKSRTQAINQLKSVLVPADSALRESLAGLSNPQLFKRCANLDTQPTSGPAGAARHTLRLLARRIRHLTEEIDDLQKWITEAVEASTPGLLEVRGVGPDSAAALLVSAGDNPERLVSEASFAALCGTSPVEASSGKTQRRRLNRGGDRQANAALYRIVLSRLRWDDRTRDYLQRRLAEGKTRREIIRCLKRYVAREIYRLLVPSKPSADQAGPVRAAA

SEQ ID NO: 223625 - protein, 343 aa, unidentified
MNAFYYIGLDIHKKVIAYCIKTMDGRLIVQGKIDADRKSLGEWVQGLPGPWIGAMEATIFTGWIYDFLKPYAVDLKVAHPEMLKAITAAKKKNDRADAEMIADLLRVNLLPECHMLSEEIRELRRILRYRNHIVRTAVKMQNKMSGLLMEVGASYSKKRLHGKKYFNELLERVEEIPPSVKELLKLSRSSFEMFRAVQKRLVETLRDNSLIRDRVRRLMSIRGIGEVTALTWVLEIGDPERFGSVRKAISYCGLCSAQKESAGKEQRGPISKKRNKHLQTMLIEAAKIAPLWNPQLAAVHERELKKGNRNRATLAVARRLVAYMLAVEKKQADFTLPAEQEAA

SEQ ID NO: 223626 - protein, 306 aa, unidentified
MNIAPGYIGIDVSKHHLDIFDGTPRRIVNSGEAIAAWIGGLGSTELVLFEATGRYDRQLRQLLTQAGIDFARVDPAKAHSFANLSGRLAKTDPIDACMLALMAQTIKPPLHQERSSERDRLAELHGRRDQLVDMRQQERTRQHEATDLDAAADIAAHIDELTTRIARFEKAIAALIESSAELAQTNRLLRSIPGIGPVTAATLMALLPEVGSRSPKTIAALAGLAPFNNDSGRFRGKRSIRGGRPRVRRAMYMAALATIRRPGRFAARYNAMTQLGKPPKLVLVAIARKLLVIVNAVLRDKTPFAA

SEQ ID NO: 223627 - protein, 400 aa, unidentified
MISVGIDVSKGKSTVCILKPYGEIVSKPFDITHTEKDLCELATMILRFEDEVKVVMEATGIYHLPVLTYLQEKGIFVAVINPYLMKVYRSGDLRKAKTDKIDSRIIANYGIEHWFTMKAFQATEDIYGELKLLGQQYRHYMKLHITSLHELTHLLDYTMPGIKNMLASWNEGSRKDKLSDFVERFWHFDMITMHSEQEFIEQYRLWAKEKKYHQSQDKAKAIYSLALNGIPTLSSNTPSVQMLVIEAVRVLKEVDATLGTILSRMQELAKSLPEYSVVREMGGVGDVLAPKLIAEIGDIRRFHSGKALIAYAGIDPPPYESGQFVGSNRNITKRGSAALRKVGYETMRCIKTHPRPDDPVYQYVIKKEAEGKAKKAAKIAGLNKFLRIYYARVKEVYEKL

SEQ ID NO: 223628 - protein, 367 aa, unidentified
MFSSNYTVGCDAHKHFSLFAVLDGRGNLVQCTRVGHVTGAIQAFLAPFPAGTPVALESVGNWYWIVDEIEAAGCLPLLANPAKAKVMMGNVHKTDKLDAQGLATLQYLGKLPSVWIPPAEIRDERELPRTRMSFTKHRAMVKNRIRSTLGKYALALETDSDIFTPKWRADLESLLKQLPPETERCARQQLQILDALTHHIQQLEARIVDRLEVSPTMQLVQSVPGPAKVLAIVIDREVGSVERFPSPHHFAGYCGLVPKVSASAGRAHYGRMVKQCNTYLKWAFIEAANVIVAHRHHPNWRRKYVVHLYDRTRRRKGHAVAVGAVARYLAESTFWVLKKGEPYREPPHWRPAGAKSPVSLSQEQARA

SEQ ID NO: 223629 - protein, 408 aa, unidentified
MKKEQKAKRAKAQRPAQREPKEVLAELVEKLRGKLEVKATSASPAEAGPRAELGPNLDRLTVGVDLGDQWSHYCILGLQGETLSEGQLQTREAEVAEFFQALPPARVVMEVGTHSPWMQEIISGEGHEVVVANPRLMEGSKRRKRKNDRIDAKKLARLGRVDPQSLHPIRHRSREVRQDLVVLRAREALVAARTELINATRGLVKSMGTRLPKCSSPSFGQKVKDAIPEKVREALLPLVQFADALSDSIQSYDQKIEELGSEKYGHTKLLRQVKGVGPITALAYVLTLENPEHFAKSRDVGPYLGLVPKQEDSGESQPQLGISKAGDTMVRKLLVGSAHYILGPFGPDSDLRSYGLRLCERGGKNAKKRAAVAVARKLAVLLHRLWMSGEVYEPLGYASSRAIVQQAA

SEQ ID NO: 223630 - protein, 430 aa, unidentified
MKSNTQNAKIEAITEKTLVLGIDVGSETHYARAFDHRGIEYSKKPFKFSNTEAGFVTFKEWILDLKEKHEKDKVVPGMEPTGHYWFNLGKFLQDNEMKPVLVNPHHVKKSKELDDNNPTKNDRKDPKVIAGLVREGRYMIPYLPDGVYADLRTASNIRFQLQAELTRIQNRISRWFNIYFPEYKTVYGKPDAKSGMLILKQAPLPEDILTLGIDGVNQIWRDAKMRAVGKARAKTLIEAAEHSVGSKEGAVSARMEIRMLLEDYESRNIRLQEVMTLIEELVNQIPMAEKLLGIKGVGIKTVSGFLAEVGDISRFNNPKELQKLAGLALVENSSGKHKGKTTISRRGRKRLRYLLFEVAMSLVAKNPEFRELHTYYTTRRLNPLKKMQSLMAVAAKLIRVFYAMLTKGVDYDPKKMVGDIKRPAVYLQAA

SEQ ID NO: 223631 - protein, 343 aa, unidentified
MKQKATVLGIDLAKRVFHLVGMDDAGHVVLKKRLTREALLPFIAQVSPVIIGMEACGGAHYWARQFRAYGHTVKLIAPQFVKPYVKSNKNDPADAEAICEAVTRPTMRFVPIKEIDQQDLQSLHRARARVVKARTALVNEMRGLLAEYGIVLPQSVTQFRHAFLATLEAERAKLTPWSTELFGQLYEEFGVLEKRLAYYTKKIAAIGEAHPVCQRLMTIPGIGPLTATALVAAVSNATAFKNGRQFAAWIGLVPRQHSTGGKPRLLGISKRGDVYLRTLFVHGARATLRWLRLKTDRRSTWLRGLMDRRGKNKAAVALANKNARIAWVLLTTDQVYIAEQAAA

SEQ ID NO: 223632 - protein, 407 aa, unidentified
MIAIGVDISKDFFNVCAVDEGLNILHKESLPMNQEGFFSFSKIVSSFSNPVIALESSGKYHIPLLCFLSSLRVKVCLVNPKAIKNFSKVIFPSTPSKTDRKDAFIIACFIIKHPDLAAKHAIPEEIKVLARQIESISCEISQVKTKIKDLIFVLFPEAERHFNIFSLWFLKIIRKYPSSKAIAKASANSINKIIRKSSRGRKPTAGPLDIIELAKNSIGIRNKGFEVSLVFYIDKLLFLDSQLGLLKKTFEDLIKERFFRQIEILCSIRGISKILAGRLMAEIGSIKLFPSSRHFISYAGYDPVIKESGRWRQRMSISKQGNPHLRNVLFQMAVMAIVHNPVFRVYFEKKRKGFGSYKKSVVAVINKLIRVIYAMLTREEKFDPSKVAPSCYIKVKSSMEVNFDHAA

SEQ ID NO: 223633 - protein, 384 aa, unidentified
MKTVPFEQVILRGCGIDVHKDMVVATISGEGLKTETRSYKTFSSSLTELKEWLLSSGITHVAMESTGVYWKPVYKILECPDMKVWIVNARHIKYVPGHKTDKKDSAWICKLLLAGLLKPSYIPEREQRELRDLTRYRNKLIQHVSSEKNRIVRILEDCNIKLSSVVCSLDGVVANKLIDMLIDKGHVTMDDITCIYHKKLEASPELLYQACEGFIEPHHIYMLQTIRKDMEQTKAIIADLTCRIKEVLSPYENVMELLQKIPGLSRKTVEDLIAEIGVDMEAFPTEKHLAAWAATRTKNTFYSARYHRLAARRGKKRALVAVGHSILKSVWHVLKEACEYKELGAEYLNQRMEQKRKNYLKKELEALGYKVKISRDDGPIPEVG

SEQ ID NO: 223634 - protein, 343 aa, unidentified
MKIYALGIDLGKTVFHLVGLDASGQVVVRKRCSRKQLLAFTANLDVQLIGMEACSGAHFLGRALRAQGHEVRLMPAQYVKPYVKTNKSDYIDAEAIAEAVQRPRMRFVPIKTEEQLDLQALHRVRERWVMRRTAVVNQIRSLLLERGLTLPKGRRYLEEQLPRILEDAELNLSGSFRVLLSQLKLELEQLAGRIEQMDGVIQKMAKENEDCQRLTEIPGVGPVTATALIGAIGNGSAFGKGRALSAWMGIVPGEHSTGGKQKLLGISKRGNKYLRRLFVQGARSVLQQRQKQAPGLRDWLAQLLARTHQNVVVVALANKLVRMAWAVLCKNERYRAPLLAVAT

SEQ ID NO: 223635 - protein, 349 aa, unidentified
MTTVPSRPGAVIGGVDTHADIHVAAACDHLGAVLGTESFPTTPVGYRRLLAFLVSFGPLASVGVEGTGSYGAGLARHLTDAGVHVVEVNHPNRQVRRRHGKSDTVDAIAAARAVISGQATAIPKTHDGSVEALRALQIVHRSAMKSRTQALNQLHALVVTAPEPVRAQLRGLNRRQLLATCQAYRPGTGDDLVTVTKFALRHLANRIDELTLETTAITKRRRRLLTHCAPELMAIIGVGPDTGTALLLAAGDNPDRLSSPAAFAALLGASPIQASSGKTVRMRLNRSGDRQGNSALWHIVMSRMATQTATKAYVERRTEQGLSKPEIIRCLKRYVAREVFNALPREVLA

SEQ ID NO: 223636 - protein, 353 aa, unidentified
MDIGVDTHKKTHVLVAVGAQGQTLGMRTVANTPAGWAAALQWAREQQQHIRWGVENTGSLGKGFAQFLLAQGEADVREVVPHRTAQYRRRGRTQDKTDTADALAMARLLGAEGEGLPRVRADDASTELRLLSDHRDNLVADRTRLVNQLHAQMLQLDPQYQERSGPLTRAAGVRYCEQFDPPLADALVCTRLLIVRQLAARIAALTTEIAELTALMGRRVLALGTPLLQLRGVGPVIAARLLGELGGTLRVHSAAALAALAGIAPIAVASGGHHGHRVNFGGNRQLNRAIHIIALTQRRCEPLAQAYYAKKRAEGKTARAAMRCLKRRLVDVLYRLWHARPVESPQPVAAIAA

SEQ ID NO: 223637 - protein, 420 aa, unidentified
MPNIEIGVDFMVKENFIYVGIDLHKETHTAVMIDCYNQKLGEITFPNRPADFPKLVTKVKKCNTDGKEVVYGLENAYGYGRALAVWLIDKGYLVKDVNTAISHRQAKHRGAMYRKSDSDDAKAIALATLNMLDKLPDACPNDAYWSLGQLVHCRDNIMKQRTRLVNQLHEQLCIAYPSYKQFFNDISRPTALYFWEHYPSRKYLKGKSVEDLRAELVPVSHNKCSTKTCEKILDAVASDKVKNNAYQDARDMVTLSIVSDLQHYDSQLAEVDKMLEQMYKMLGCTLTTIPGVNVITAVKILAEIGDIKRFSNANKLAQFAGIAPLHLSSSGKGKDVATKQGNRRLQATIYFLAIQMVQVSSKGTPRNSVVRAYYEKRKAEGKTSQQALICISRRLISIIYGMLKHGTEYRMPVVESAGEK

SEQ ID NO: 223638 - protein, 410 aa, unidentified
MEVLHQRCAGLDVHKDMVVACVRIAEGGQTRREVRTVQTTTRELLALSDWLAGHGCTHVVMEATGVYWKPVWHVLDDGGFALVLANAAHVKAVPGRKTDVNDATWLADLLAHGLIRGSFVPDAATQELRGLLRTRKQLVRERTGHTQRIQKTLEDANLKLGSVVSDVVGLSGRRMLEAVVAGETDPATLAALAHRRLRASPEALADALRGRVTRHHRFLLALHLRQIDALDEAIAAIDREVEAHLGPFRAAVRLLSTIPGLGPLSAQAILAEIGTDMTRFPSAGHLVSWAGLCPRNDESAGKRRSTRLRKGAPWLKTTLVQCAWAGVRTPASYLQAQFHRLRARRGAKKAICAVAASILTAIHHMLTDGTPYHDLGNDYFDRRAKDVQARRLVARLQHLGYAVNIEPAAA

SEQ ID NO: 223639 - protein, 450 aa, unidentified
MDKKSKAIESLQLAVIHPRSAAIDVGSMMMMVAYTDKDGNQNLLEVDAFTESLQHLAATLHKAGVTHIAMEATGVYWIVIYEILEQQGFQVTLVDARHFKNVDAQKTDVKDCQWLHQLHASGLLRASHIADEVYRELRSYLHERNLLQKQKSDTLNRIHKLLTQMNIKVQHLISDIEGVSGMKLLCGIASGITDAKELLALIDVHKLKAGEEDLLKSLQGIYKKQYVTILKNTLRSHDFFKAQMRAYEKLIEEVLNKMLPEDGNGNKAVIKSKTSYTRKNQYTINLKEYLKHIIGIDVTRIDGIDEISALEIIAVTGLNMSKWPSAEHFASWLNLSPRPKISGGKIIGYEKRPTNNNATQAFRMAAQTMWQNKGSLGHLYRRLSAQKGSKKSNKAIARKLAVIFYHMVKNKTEYNKNKLQVNTERQRAKRISFLNKEARKYGYVLQNAVD

SEQ ID NO: 223640 - protein, 331 aa, unidentified
MNYIGMDIHKQFTFAVVKDEQGNKLGEEKFANSRENFGKFLEIYSPDNTKILIESTCVWEYIYEILEAMKYDVKLANPVRTRAIAEARVKTDKVDASTLADLLRANLVAESYIPPKEIRRLREITRERRTFVKQTTQIKNKIHAILIKRGVSMPSKTFCASTMLWLKDKFESDDITHRYANLLEYHNEELDFIDDKIRKIAESNNNAKLLMTIPGIAGLRAIDILAEIGEITRFQAADKLCSYAGLVPSIKQSGNTLRFGRLIQQSSKSLKGTLIEASWNIVRTKESNPLQEFYKRLTKKKGKQKAICATARKLCCVIHSMLKKQKEFMVL

SEQ ID NO: 223641 - protein, 356 aa, unidentified
MRQVKQLDFSGQKIFCGIDVHKKSWKVCVRSEQMELKTFSQKPSAIELVRHLRKNYPLANYQLVYEAGFCGFSPQREFSKEEVSCMIVHPADVPTTDKEKKRKSDAVDCRKLSATLSDGKLTGIYVPGIEQQDDRSVIRAYQQFVKDQTRCKNRIKGWLSFQGISILDDDDDNKYWSNNFIKWLKELSLTQSARISLDLLIQSYEQTRKMVLAATKQVRGLSRQERYKEKIKLLRSIPGIGQIAALLFTTEIGDINRFKTFDQLCDYIGLVPNVYGSGEREIILGLTNRGHHKLRETIIEASWVAIRLDPAMTMAFNEFTKTMKKNKAIIKIARKMINRIRFVMKNQSEYVMAVVE

SEQ ID NO: 223642 - protein, 402 aa, unidentified
MNCVGIDVSKGKSMIAVMRPFGEVVVSPFEVRHTANELSELAGLLKSLDGETRVVMESTGNYHAPVAWLLHDAGLYVSVVNAMLVHDYGNNSLRRAKTDKKDAVKLANYGLDHWLTLPRYIPEEDTRLMLKICYRQYQQYSKVQTMLKNNLISLLDTTFPDANRLFTSPPRADGSEKWVDFVATFWHCECVCGRSEKAFTTQYQKWCRKHGYNFSEDKALDIYASACRHFGVIPKTDTAKLLVEQAISQLQTTSSALAALKQEMQSLAASLPEYPVVMEMFGVGPTLGPQLIAEIGDVRRFHSKKALVAFAGIDAPPYQSGQIDVRSRSISKRGSASLRRTLFLVMGVLLQCAPMDEPVYQFMNKKRSEGKPYRVYMMASANKFLRIYYASVKAYLDSLEHD

SEQ ID NO: 223643 - protein, 357 aa, unidentified
MKRNNRSNVSIEWKEKPAITVGLDLGDRFSHYCMVNQEGEVVEEGRIQTTESAVKDHFEDVSRMRIAMECGTHSPWISRLLEKLGHQTIVANARKLRAITENESKNDRHDAEMLAHLAYSNPRLLSPIRHRSVERQRDLNLVHARDALVRARTMLVNAARGLAKSSGARLPRCAAKCFQLRVAPAIPADLSAALEPLLQEITALTIRIRAIDKEIEQLAVRYPEIRVLRTAPGVGPIVAAAYVLTLDRFDAIATSRGAGAFLGLRPKQGQSGNRDPEYPITKMGNMYLRRLLVQSAHHILGRFGRDSTLRRWGLMLAASGGKRGKNRAIVAVARKLAVILHSMWRTGECFRPFPGEA

SEQ ID NO: 223644 - protein, 357 aa, unidentified
MRCIPTSAAGITLGVDTHKDFHVAVALDGLGRRLGTLSIPTTRSGYEKLAEWANGFGPLESVGIEGTGSFGAGLTRFLRSEGIRVFEVDRPRRREQYRSGKSDPIDAELAARAVLSGTATAQPKDTDGEVEMIRTLRLARRSAVKARAQAVNQLKNLLITAPEGLRSELRGLSTAKLVAKVSGLRPGANPSDVEAATKFALRSVARRHQRLSEEISELDEQLDRLVAEAAPELVAMEGVGTDTAASLLIAAGDNPERLKSEAAFAHLCGVAPIPASSGKSVRHRLNRHGNRDANRALYVIALCRMSREERTRAYVAKRTTEGKTKKEIIRCLKRYIAREVYRILASVSLSNPPILAP

SEQ ID NO: 223645 - protein, 423 aa, unidentified
MKNSQIRTNNPAGSLFVGIDVAKEFHCARGLNGFEVDFTKPLFFKNRREGFKNLKKQIRRWLKFYGCERVVIGMEPTADYWRPLYAWLVENGLEVKLVSSLKVKRSKDLMDNSPLKSDKKDALVIAELTKANMVLSFGPKQKEIEEVRKCVGHVEDLEDMACREKNHIEHYLSVHFPELCHILELRSVTMRKFLMTFATPAEVVKAGPEKVKSLLKEVSCSRINAAKADAIYAAAKDSVGLPCSSAERLALSFHLEILEKISEDLRKFHKLLEDLLEPMGEYHILRSIDGVGLMCSAAIIAHLGDLRLYGNYRQVIKKSGLNLFSLSSGGYKGRDHISRRGSGFLRRNLYMASLRHTRPGSAFYEKYRRMRDRGKGFRSSMVAIMRRILKVAFALVRDDRFFNKEYDPGAERNEIVIRRARVG

SEQ ID NO: 223646 - protein, 371 aa, unidentified
MGESSKTLFVGLDVHKDTIAVAYAAEDRSTEVVSLGMIGTRQCDIDKLIRKLESKGAPFAIAYEAGPCGYWLYRYLTRRGLSCIVVAPSLIPRKPGDRVKTDRRDAVTLARLLRSGDLSSIYVPTVDDEAIRDLSRAREDAVRDLKRSKVRLKAFLLRQDIRYEGRANWNAAHLRWLARVVCPTAAQQIVFQEYVHTVTEQTERVQRLEVELHTAVKTWRLHPIVEAVQALRGVDLTGAVTLIAEVGDLTRFDTPRKLMSYLGLTPSEYSSGERRRQGGITKAGNGHARRALVEGAWAYRYPAKVSRHLQLRLENVPTEVRAIAWKAQLRLCKRYRLLSARGKHVNQVVVAIAREMAAFAWAIARTIPMAS

SEQ ID NO: 223647 - protein, 348 aa, unidentified
MALTIVETRAITGGVDTHADVHVAAALDPIGGLLGVREFPATAAGYGRLLSWLGGFGTVCLVGIEGTGSYGAGLARHVTAAGVRVVEVDRSDRQDRRRQGKSDSLDAVSAARAAQSGRARGASRGRDGAVEAIRALMVAKRSAAGGRTQTINQARALVLTGPDDLRARLTGHTAAALVAELASLRPRPGSTVGYATRIALRELGRRAEFLDGQLERLDELIGPLVAARAPGLLAVFGIGAHTAALLLIAAGDHPERLRSEAAWAHLCGAAPIPASSGKTVRRRLNPGGDRQANHALWRIVFTRLGSDPATRAYAERRTAEGKSKKEIIRCLKRYVAREVYPHLRGTAG

SEQ ID NO: 223648 - protein, 350 aa, unidentified
MIIVGCDYHPGFQQIAFVDTETGELKEQRLEHREPAEKFYRELAAQGMKVRVGMEASGHARWFERLLAELNIELWIGDAAKIRAKRVRKHKTDRQDAQHILQLMLKDDFPKIWVPSWENRDLRQLLWHRHRMVQARTRLMNQLQAVALNEGLRCKKRLWREKGRKQLEAIRLAPWASRRREDLLQLLDGLNPTIAELTQAIDQEVEKSVAARRLMTHPGVGPLTALAFVLIIGRAERFQCGKQVAAYLGLVPLEDSSGERRRLGHITKQGSSMLRFLLVESAQVVARSIPQWRNRYFHLAMRRGRKIAKVALARKLAIRLFWMMRQGWDYEQMTQFGSHAGQLGTGDGVR

SEQ ID NO: 223649 - protein, 344 aa, unidentified
MYYFAGPDVSVKDTSVCIVDDTGKIIREVKVASEPDALVTVLTNRSYHFKRIGLEAGPLSQWLFSALAEAGLPVICVETRHMRAALKAQINKTDRNDARGMAQMMRVGLYRPVHVKTLRSQKLRMLLTHRKLLQSKAIAVDNDLRGTLRNFGLKVGVVGVARFEARIKELVENLPDLALLVEPLLVVRRVLREQLAVLHRRVLTVVRDDEVCRRLMTVPGVGPVVALTYRATVDVPARFRHSKSVGAVFGLTPARDQSGEHDHPGAISRCGDEMMRAMLYEAAQSMLVHSTRWSWLKAWAMKIAKRCGMKRAIVALARRLAVIMHRIWVDGTEFRWTREATAGA

SEQ ID NO: 223650 - protein, 296 aa, unidentified
MGMLEGQVEFVIGVDTHRDTHTAAVCDPAGALLVHATVPTTTVGHRQLLGLAQRHASGRRVWAVEGTGSFGAGLTSLLVDHGELVVEVDRPKRPARRNGAKSDALDATRAAREVLAREHLAQPRAGGDREAMRVLLATRRCVVDARTKAINQLKALIVGAPPPLRERLRHRCTAAQVRCCSRLRIHANHSIEHRVTVQAMRATARRIQFLEAEAAQHQAELDRLVAKIAPFLLSELGVGALTAAQLLVSWSHPGRVRSEAAFAMLAGVAPLEASSGRVTRHRLNRAGDRQLNRALT

SEQ ID NO: 223651 - protein, 364 aa, unidentified
MTILTDPAPTRGRRSPGAWVIGVDTHTDTHTATLIDDLGAELAQTELPATPAGYAQLRAWAEALTPAGQRVFWAVEGTRSHGHGLTRHLSTAGHRVVEAPKPDARRRRNGKSDPLDATHAARAALATDRHPTARHAEPRADGPREALRMLLVTRRHDTDMRTATVNLFKSLLLGAGDLRETLRGLTTVRQVNTVAGLSDDPSADLETRVRLQALRRAATTIRDLDQAITANEKQLRTLVQQACPGLLDLPGVGPITAAVLLTVWSHHGRVHSEAAFAALGGISPLEASSGRVTRHRLNRGGDRTLNAALHTIVTARRRMKHAPTSDYITRRTTEGLNPKEILRCLKRYAIRNLYRFLEANAVTA

SEQ ID NO: 223652 - protein, 355 aa, unidentified
MKYYTSSTEFNCGIDLHARQMYVCLMDRQGNKRVHTNVKDNDFRFFLKLVEPYKHDLTVCCECMFGWYWLADACQAAGLTFVLAHALYVKAIHGGKNKNDRVDSEKLTHLLRSNLIPPAYVYPADKRPLRALLRQRIFYVWRRSELLTRIHSHQLAHNRIPARQTRRTRDPWEEQLLGAEDHPLRQIALKNDLAMIRHFDQQIFALEEELQRQTKKVAGRDYALLQSVPGIGENLGLTILYEIGDINRFPTVKDFLSYGRLVKGTVASAGKIKGLRGAKLGNPYLRWAFGEAAVIAKRDHFRIRPLAQRLEEQMNGNKFKANTVVAIKLARAVYFMLKNKTVFDPDRLVAALARN

SEQ ID NO: 223653 - protein, 346 aa, unidentified
MNNKRILRQIVGIDVAQKELVVSLGRLDEDLTPQIYANKALPNNEKGFISLIAWVRKNIQEEAPVLFVMEATGVYHESLAYFLDDKNWEISIVLPNKISNYFRTLEVKTITDKTASQAIAQFGLERKLDRWKRPKQIYRDLRQLTRERDQIVQERTMVKNQLHAEKSEAFPNKTSLMRIKQRIQLLNKQESQIKAEIGELIKKDKEVSEAVEILSSVPGIGQLTSAIVLAETNGFELIRNKKQIASYAGLDVKEKESGTSVKGKPRISKRGNKYLRKALYLPALSAIRSDPRFKGIYTRLVSKHGIKMKAAVAVQRKLLELLYTLFNTKTKYDKEYLTKFDIMIEQ

SEQ ID NO: 223654 - protein, 410 aa, unidentified
MEVLHPICAGLDVHKETVVACVRHMSGGKVKTEVRTFATTTGALLELSAWLGAGQVTHIAMEATGVYWKPVWHILADGDFQLLLANAAHVKNVPGRKTDVKDAEWLADLLAHGLIRASFVPDQPTQQMRDLLRTRKQLVRERISHTQRIQKALEDANIKLDMVVTNILGLTGRRILQRLIDGETLPEALATLAHRNIQASRDQLEAALRGRVTPHHRFLLTLHLDQIDALDAAIASIDKEVEGNLEPFRAAQQLLSAIPGISQLSARVILSEIGLDMSRFQTAGHLVSWAGLCPRNDESAGKRRSTRMRKGAPWLKTILIQCGWAAMRTKGSYFQAQYYRLRSRRGARKAVCAVAASLLTTIYHMLKNGACYQDLGANHFDQKAKTKHVQHLVNRLESLGYDVKILPKAA

SEQ ID NO: 223655 - protein, 313 aa, unidentified
MQFDYFIGIDVSKATLDFAVAKANQVLFHQQVSNDKKGITGFLKVLRQQTKATMGQCLFCLEHTGIYNNPLLKALHQLSTNIWVERAVHIQESMGMTRGKTDQVDAKRIALFAYKNRDEARLWTPPRTVIAQLDRLTAQRARLVKVIKQLQTPLTDSKGFIDKVDRKAEQQICAGSLKALKADLKSADKAIVELAQADPELKRLFERVTSIIGISQTTAAEIIVTTNEFKSITDPKKFACYAGVVPFERSSGQRKGRPQVSHMANKKVKSLLHLGAMSAIQHCTQLKTYYQRKVKEGKNKMLPGRRSGAQQRP

SEQ ID NO: 223656 - protein, 303 aa, unidentified
MKQVTTIGLDIAKSVFLVHGVDAAGHVVLRQKLSRSRMLEFFAKLPRCLVGIEACASSHYWARELITQGHEVKLMPAQYVKPYVKRGKNDAADAEAICEAVTRPTMRFVGVKTVEQQSVMMLHRVRLILMRQRTQLSNALRSHLAEFGIVSAIGRVGLDRLLTIVADTDDGRVPAEARASLEMLAVQLAGVKAQILENDRRIIASARATEVGRRLLEVPGVGPVLASAFVASVADPAIFKSGRDLSAWIGLVPRQNSSGGKERLGGITKAGNRYLRQMLMVGAMAVIRYAQRNSTRRPWLVQL

SEQ ID NO: 223657 - protein, 394 aa, unidentified
MKLVGIDVGKNSHHFCVMDKETGELNVTPSSFSNNKEGFDFLINSLKPYSKKSILLGMEDTGHYHVALLKFLLSNGYTVALINPKTTDLTRKMEGGITKNDKLDTITICDVLDTPERKKQYRITKVDRFDLYEQRQLTRHHHNLKEELNIYCNRLQKSIDLVFPEFNTLFSSKYSIVYMNLLKTFGSAEAIASTDIRTIRKCFEIKGKGNRISLTPEKLKECAKNSIGISSEVETIQIKHLVSQIMLIKEQIAEIDKKIEEFSIKNNSPILSIPGISHFSGTSILAELGDIGNYSKPSQIIKFAGVAPYHYESSQYNAQHTAITKKGSKYLRKTLYQIILPVINNNPVLKKYYLLKISQGKGHRCAQGHCIRKLLRIIYHLLETGQSFDPALLR

SEQ ID NO: 223658 - protein, 324 aa, unidentified
MQNQTIVGIDVSNATLDICVSNHEQRSFVINNEVKAICQFFKAYKEKLVIGMENTGRYNWALYEALKETNHRIFVISPLHLKKSMGLVRGKNDKIDAVRIADFTAKNYNELPQWKPSSQAVQKLKILLTERSCRVKSKRQLLKQQYDYAKMKHLGMDKYLMGLNKQELALVNKQIAMIETEIEALIKTDEQMHNQAKLIRSVPGAGKVLCWMMLAKTEGFTTITEPRKMACYSGVVPFSNQSGTSIRGKNRISPYADKAIKAVLHLAAMSAIRLKNDLREYYLRKIAEGKNKMSALNAVRNKIVHRIFAVIKNQTHYQNHLLLS

SEQ ID NO: 223659 - protein, 353 aa, unidentified
MKYVGLDWAYRTAQWCALAPGGEIAGEGRIAADRDGLARLVLELGDEVTACLEMMSGALWVRDQLVDCGWQVEVADARKVKTVAPLAAKTDKVDARLLAELSRRELVPALWLPSLDERALRERLRRRMHLVRLRTSAKGRIFGLQTQWGVRVSLARLRRADGLTLLERAGVPEVWRRSVGECLALIDFLDARLEPLDAELRPFAKADPRAVLLDTIPGIAELLALTIAVEVGEISRFASPEKLVSYGRLAPRVRQSGQARPRSGPLSKSGSRLLGWAAVEAAQQAWRESNPWHGLYLDVSARSGNRNSAKAAVARKILIAVWHMLSRNEPFNPAPRSTRGDSVPASSRLALAA

SEQ ID NO: 223660 - protein, 336 aa, unidentified
MQLMTVGLDLAKHVFQVHGVDPAGNVVLKRRLRRGQMITFFAGLAPCLVGMEACATAHFWARELTALGHTVRLMPAQYVKAYVKRGKNDAADAAAICEAVTRPSMRFVPVKGEGQQAALMLHRARDLLVRQRTQPINAVRGHLAEFGIVEAQGAWNLDRVLAHLEAEGEIPEVARQVLRLLAAQLDEAERRIEELEGRIAAWHKADPVSQRLATIPGIGPPVATAIAATVPDAGAFRSGREFAAWLGLVPRQRSTGGKQRLGRISREGDKYIRRLLVIGAQAVLPRSKAARSDPWTQGLLARRPRLVVAVALANKIARTAWAVMTKGQTYRQPAPA

SEQ ID NO: 223661 - protein, 342 aa, unidentified
MDEYDGRQFVGIDLHRQRSVVVRQSESGEQLSAVRIINDAVALQLELEQAGADPEVVLEATYGWYWAVDVLQAGGARVHVAHPLGVNGFRYRRVKNDVRDAADLADLLRMGRLPEAWIAPPQTRELRELVRYRAKLVAIRSGLKAQIHAVLAKAGVLIAVSDLFGLSGRQRLAKVPLGPAYAERIRSLLELIDILDSHQAHFAAMIAERLDTHCGYQAIRQVPGIGPTLAAVLVAEIGDVHRFADSAHLCSWAGLTPRHRESDTVVRRGHITKQGSKAVRWAVIEAVQRHPTTAKIWADKHRIEARRGTNIAKVAAARKLLTLVYYGLRDGQIRALDRARAA

SEQ ID NO: 223662 - protein, 351 aa, unidentified
MIIIGCDFHTRYQQIAMANDETGELLLERRLDHESGEAHAFYRGLQGPVRVGIEATGPIHWFERLLAELGHELWIGDSAKIRASEVRKQKTDERDARLILDLLLAKRFPKIWVPTPAERDLRQLLWHRHKLVCLRTMLGNQLHFLAMSQGLCRKRKLFTKKGRTELTGLALGPWTRRRREELLKLLNQLDPAIAELDRAVLEEAQRRDDAVLLMTHPGIGPVTSLAFVLAIGPVARFSRSKKIASYLGLNPSEDSSGQRRRLGAISKQGNTMVRWLLIEAVYPAVRKDLALRQDYQRLKFRRGHAVAKVAIARKLAVRMYWMLRSGAAYAQLVRRQGSPAATLVDANPSLG

SEQ ID NO: 223663 - protein, 317 aa, unidentified
MSTSLSSAPPFVGIDVGKDRLQVHVRPQGLSFQEANDEPGIQALVARLAGLAPALIVLEATGGYQNSLVGALAVAGLPTAVVNPRQARRFAEATGRLAKTDALDAGVLAHFAEAVRPQPRPLPNAATQELAALLGRRQQLLQMRIAEQQRLATASGAVRQGIRKHLEFLERHLQKLEDDLDQTIRRSPVWRAKDDLLQSVPGIGPQVSRTLLAELPELGQLPCRRLAALVGLAPFSRESGRWRGQRRIYGGRAHVRAALYQAALVAARFNAPLARSYQGLLARGKAKKVALARRLLSILNALLRDRCPWDEKRVVPT

SEQ ID NO: 223664 - protein, 401 aa, unidentified
MKEEKIEMSVVNPKAAGIDIGSRSHFVGIGQGKEHVREFGVYSEDLMELVQWLLDNNIETVDMESTGDYWQNLYTELIKNNIDVYLVNGKFTKTMNRKKTDVIDCQWIQKLHSLGLLHRCFLPDESTEKLRTLCRQRGNIIAAKADASRKMQKYLKFLNYRLDVVVKDITGQTGIAIIDAITKGEHDPYKLAKHRHYNCRKSEEEIAKALHGNNREDYLIGLQFEYERHLFCVSQLEKCDIHIAELLNIHIASMADVIDELPSDKKHKRLNKNSIKTIDLNIIAFQYFGGVDLLEIPGVSYGTLLSIMSEVGPNGLDNFPTAKHFTSWLRLAPNNKISGGRRISSKVPKGSHRLKVALRNTAYSIARLKDSPLNKFYNKIAFKKGGIKAVTATARKLAVII

SEQ ID NO: 223665 - protein, 409 aa, unidentified
MRVMHARCAGLDVHQKTVVACVLTGAAGSEARQEKRTFTTVTSDLLKLGDWLGEREVTHVAMESSGVYWKPVWAVLEGQFDLTLANAAHIKNVPGRKTDQKDAEWIAELLRHGLIEKSFVPPVAIQDLRELTRYRAQVTGERSSVGNRIRKLLEGANIKLGSVASDVMGVSGQRMLDALVAGESDAVRLAEMALGQLRKKQAQLEVALDGRVREHHRRLLRLQLANWRFLDRLTEELDVEIDRELGPVREAAALVETIPGISALTAWNVVAEIGVDMSQFPSAAHLGSWAGLCPGNNESAGKHYSGKTRSGNIWLKRALCQAAWAASHTRDTYFAAQFRRLAAKRGKKRAIIAVAHSLLVVIYTMLKQGKGYLELGADYFENLHAGDFKRYLVRKLEAQGYKVTLEAAA

SEQ ID NO: 223666 - protein, 377 aa, unidentified
MVPVACRPANKKEMNSKGMISVGIDVHKKRCQACLKDQDGHLIEELSFQNSEEAISQIRTLLTSYPEVKVALESTGNLWTRIYDELHAQPTLRVILANPYKTRIIAEAKIKNDRMDSRVLADLVRADLVAESYVPDPEIREQRALLRQRRSLVEDTAAIKNRIHNQLDKYGLKAPYSDLFGKQGREWLRGLQLHPIEKTILDVNLQQLESIEQAIDKLTTQIAKEAVDRPDVKLLIGFTGIDYYSAMLLINEIGDIHRFPSADKLVSYAGLAPSQRQSADHTFHGHITRQGNKYIRWILIEAAQHASRFDPQLKPFYERIAARRGRQRAIVAVARKLLIYIYQVLKKQEPYRAQRNDLAAKKLKRLQRKAQSSLQAN

SEQ ID NO: 223667 - protein, 350 aa, unidentified
MNNVIGIDLGDKSHIAVVFDEHGAESKPQRITNTATSMEKFLSKYPGCTVVMEAGTHSPWISRLVESCGCTAHVGQPRKIRAIWDADDKSDERDARMLGRLYRFDVKMIPPVHHRGVEAQADLAMIKARKQLMDARQKLINHVRCTVKSFGERLKTCGAASFAEKTWEEVPEALRPALGGVYASIEALSEQIKDMESKIHRMSMERYPETEWLRQIPGVGPLTALSFVLVLEDPGRFAKSRDVGPFLGLTPRRDQSGECDKQLRITKSGDQGLRSLLVNCATYILRESSPDCDLKRFGERICERGGKRSRKTAKVAVARKLAVKLHRLWMDKADYEPFHTVGGGSKRAAA

SEQ ID NO: 223668 - protein, 339 aa, unidentified
MKNTKYYIGLDVHKERTSYCVRDKLGNILIETEAASLYSELEHRLKPYLAASMIGLEASTSYYTLYQNFLRNSYPVKVANTIQLRQLIAKNDKLDAQRLSEMLRLGTFPCSYIPEEKIQHLRSLIQMRHALMQEKVRCNNRIQAFLDRNGVMMPMCKAFSKKWKHALMQHLGSGNISTELRYEYNHYVYLEKTNEQADQEIIGYTKTYWNQEYQLLRSITGFGVLLPCYIIAFVHPIERFLSNRKLRRYAGVIPVAKESGGTTSQGRIPKTTSKALLRWALVQAANTIGKTNTTLGRYYRRKKNQKKNTGIAKIAVASTLVDIIYKVLTTKKPYISTAC

SEQ ID NO: 223669 - protein, 332 aa, unidentified
MQMLAIDLGKQSFHIYGITGDGEVVSRKVSRAKLTDAVNRLQPQSVAMEACASAHHWGRTFDARGYTVHLIHPRFVKPFVKGSKNDAVDAEAIFEAANRPTMRFVPLKSVQQQDLQALHRTRDRLIVQRTALINHTRGLLAEYGIVMPTGASRFRLQIDEVIESAELSELAKNLFLKLAEEYRSLAARVSTLDDMLAEICRKDERCKRLTTLPGVGPIVATSLVAAIDDGRHFASGRALSAWIGLVPRQYTTGGKPRLGGIGKRANHYLRRQLIHGARSALLRIAKHDDQRSKWAQELQSRVGHNKTLVAMANKTARMAWAMLRSGESYKTA

SEQ ID NO: 223670 - protein, 319 aa, unidentified
MNTTTAAHIDHRERNVGIDIGKSMLDICIFEPDVYLQYPNTPEGIRELLKKLSRYNLTRILVEATGGYERGLVEACAEKELPIIIVQPTQVRQFAKAQGIIAKTDKMDSRLIAQFSAVMKPEVRPLNSKKVRYIRDLLSRKRQLNEMRTQELNRQHKAPTALAATHKRLLKVLDKEIESTNKLLAKAVNEVTEWQRTYEILSSVPGVGDGVTFTLLGELPELGQLSPRKIAALCGLAPFNRDSGIMKGRRRIKGGRAPIRTVLYMAMLSAIQCNPIMKKFYKKLVEQGKHKKVALTACMRKMMTILNAMVRDNCEWQAN

SEQ ID NO: 223671 - protein, 316 aa, unidentified
MEAIFDNCCGIDVHKKTLTACIMIGREGKITKAEIRTYSTMTEDIEGLRDWLKSEGVTHVAMESTGIYWRPVYNILEEGFEIMLVNARHIKNVPGRKTDVADSEWLCRLLRNGLLNGSFIPPIYIRQLRDLTRYRSKLNNNIAAEKNRLQKYLEDANIKLSSVATDTLGVSGRLMIRDIIKGNTDAVGLSELAKGRLKNKKEELKKSFNSRVTEHHRMLIEMSLKHIEYIESMMVKLEGKMDELIKKQDLAKDLELLDTIPGVDKIGATAIVAEIGADMSKFPTDAHISSWAGMSPGNNESAGKKKAQGPRMETYG

SEQ ID NO: 223672 - protein, 361 aa, unidentified
MSQTLNAAIAVVGIDIGKNSFHIVGHDERGAIVLRQKWSRGQVEARFANLPPCLVGMEACVGAHHLSRKLNSLGHDARLMPAKYVRPYSKGQKNDFRDAEAIAEAVQRPTMKFVATKTADQLDLQALHRVRERLVSQRTGIINQIRAFLLERSIAVRQGQRFLRAELPRILATPPDVLSPRMARVIEDLASDWRRLDERIEGLSTEIGVLARADSGCARLMSVPGIGPIISSAMVAAIGAGDAFNKGRDFAAWLGLVPRQMSTGDRTILGKISKRGNRYLRVLFVQAAWVVLIKPTVWERHGLKPWIEAAKKRLHHNVLAIALANKLARIAWSVLARGRAFEVRGRAFEVRKLDEAATQPA

SEQ ID NO: 223673 - protein, 321 aa, unidentified
MTSQPSPIHIGIDVSKASLDIALGEHGPVQRIDNTPLAIRAWLRTLPSGPLHIGCEATGTYHLALRDAVIKAGHPLYLIDGYRLSRYRGATSVRAKTDPIDARLIARYVAKEGSHLRPYTLPPEATQRVQQLLRRRATLVRTAVILRQSLFDLPGFKREVRALLAKADRLAQQIQAQIVEKLKASDWIDDHRRCQGIEGVGPLSAAALCATFHRGAFKSADAFIAYLGLDVCVRQSGNQNARGTLSKKGDPEVRRLLHNAAMAASRSATWKPFYQACIARGFSCTQALVALARKIARVAFSLMKTGSQYQPREHKNTCAQT

SEQ ID NO: 223674 - protein, 408 aa, unidentified
MEVLYPRCAGLDLGKDSLVACVRIHGGPVQHTVRTFGTTTRELLALSEWLTAQRVTHVAMEATGTYWRAVWHILEDGATLVLANAGHIRQVPGRKSDVKDAEWIADLLAHGLIRSSFVPPAAIQDVRDLTRTRKQLIREVTQHTQRIQKTLDRANLKVTGVVSRMLGVSGRAMLRALIAGETDPTHLADLARGTLRKKRAALIEAFTGHVTAHHRRLLQLHLELIEILEAKVAALDTDLQETLAPFHEAVRRLDAVPGIDTIAAQAIIGEIGVDMSRFPTHQHLISWACLCRRLDESAGKRHSTRTRKGACWLKSLLIQTAWTTIRGKDTYYRAQFLRLRARRGPKKAIVAVAASMLTAIYYILRDGVEYRELGAHHFERLDRGQTTRRLVTRLEALGYHVQLEEAIA

SEQ ID NO: 223675 - protein, 317 aa, unidentified
MTPIICGVDVSSISLEAFVGPAGPAGSFANNAEGIAALACFCQQHGVELVALEATGGYEKQAFAQLWAQGLAVAILNPRAVRDFAKALGLLEKTDRIDAQIIARFAAVKGCVATTPLSAEQQHLKALVTRLRQVTQLHVDQRNQRRLVTDATVRASINKLLKTLESQKRKLAAQIAAALASDPLWKELDQAFRSIKGVADRTVAAVLADLPEIGSLSNKAVAKLGGLAPLARDSGKMHGRRPVRGGRRQLRAVLFLVAGVVARHHPDFAAFQQRLSAAGKPKKVIRVALAHKLLVRLNAKARDVRIQFTTPSLAQIA

SEQ ID NO: 223676 - protein, 350 aa, unidentified
MTISHYIGFDVHKKSISYCVKTADGRIVEEGRLRATHEALRQWASQRQEPWHGAMEATLFSGWIYDVLKPFAAKLQMGHPAQMKAIFASKKKNDKLDARKISDLVRVDLLPACYVGPPEMRELRRMLRYRNLVVGQAVQMKNRMSGMLMEVGAAYSKRRLHGKEYFSELLDQLEEVPESVKDLLRLSRGALDLFESVQRQLLDRLRKEPLLRQRVELLRSIRGVGAVTALSWALEICDPRRFASIGDAVSNCGLTSALVESADKQQRGPISKQRNAHLQTVLIEAAKLAPRWNPQLAALHERALQHGHRNRATLEVARKLVAYLLAVDKSGQPFQVRTAPATETEAQQVA

SEQ ID NO: 223677 - protein, 328 aa, unidentified
MMHAGLDLSRRRLDVQLVNDQGDPVERLAVVPTADGLRDLVAGVARHGQAVRAVIESMTGARFVHDQLELLGWEVAIADAVKAKGLAPLTCTTDRIDAWVLAQLSRLNLIPEIWLPDPAVPADRERARWRLHLVRHRTALKNRIHQTLISFGHPCPVSDLFGVRGRQLLRGLALPQPWLGAVIASLRLIDDLDRQIDACDADLEALGTEHPYVTLLRTVPGIGWVLAYTIAGEIGDITRFASPAKLISYTGLCPFVRQSGDRDYRGPLTKQGPKYLRWALIEAAQHAAMSSTYRDRYQATKRRLGRQRGTSVANVAVARELAKAICTC

SEQ ID NO: 223678 - protein, 408 aa, unidentified
MELLHPRCAGLDVHKDVVMACARIQVREYAKHPTAEFSTTTPGLLALADWLEEHQCTQVAMEATGVYWKPVWHVLEGRLELLLVNPAHARNVPGRKSDVSDAHWLADLLAHGLIRASFVPPQPIQELRDLTRTRKQLVRQIARHTLRIQKTLEDANLKLTGVISNLLGTSGRAILQALIAGETDPERLLAHTTGKLKAPRERLLDGLRGVVTDHHRFMLKLHLRQIDSLESGIRQLERQMEKLLRPFRERVEQLVTIPGVSDVVAQVLIAEIGLDMTRFPTAGHLVSWAGLCPRMDESAGKRRSNRVRQGAPWLKTTLVMAGWAAASARDTYLRAQFQRLKTRRGPKKAVVAVAASILTAAYYILRDHVPYHDLGADYFDRRDRTSVVRRLRRRIESLGYRVDVHEVA

SEQ ID NO: 223679 - protein, 400 aa, unidentified
MRAVFGIDVSKASSEVAILVNGEKVHGYTISNDALGFARLLGDLKTVHKPEIIFEATGVYSRRLQAFLEDNGYAYTRLNPLEAKKQLDSLRVRKTDQIDAEKLAQSQFVLNRKPTYVQEEVYQELRDLSRFYQNLTEDIVRAKNRLHKVLQVTFPELETILSTPTGEQYGNLVVAFPCKDFVLDLSKDELSESIRQSTSKRISDKRVAYLAEKLIALANQSYCAVKKTSPMLEEVRYYAQELLRLSERRKAVLDQMVELAQPLPEYDILLSIPGITETTATSIIGELGDIRRFQSANQINAFIGIDLRHYESGNFLAKEHITKRGYPYARKILFKCIHNIASASHTNPCHIADFYKKRKRQSQTTSTKLHTIASIHRLIRTMYYLIMHNKFYDYASTQNR

SEQ ID NO: 223680 - protein, 355 aa, unidentified
MESVKYIGLDVHQSTISVAVLNAEGKLRMQSVIATKATAVLDLVKGLRGVLHVTFEEGTYSAWLYDVVVRQVARVVVCNPRKNALLKSGNKSDQIDARKLAELLRAGLLSPVYHGEQSTRTLQQLVASYSALTEDTGRAMGRIKALYRSQAIACAGQKPFGKRHRGEWLARLTDSGQRRRAEWLYQELDAVQVLRQEARQAVMVECHKNPAAKLLRTMPFFGPLRAAVLIARVQTPHRFRTKRQFWTYCGLGLETRSSADYVEKDGQIMRRRKLVYIRGLNWNYSHELKNVFKSAATTASAMDGPFRAFYEMRVANGMLPAMARLTLARKMAAIALILWKKGETFAAEHLNLQAA

SEQ ID NO: 223681 - protein, 345 aa, unidentified
MQTITTVGLDIAKSVFQVHVVDAQGKVIVRRQLKRRYVLAFFQKLPPCLIGIEACASSHYWSRELQALGHTVRLMPPAYVKPYLKRQKNDPADAEAICEAVTRTNMRFVPTKTTEQRSCLMLHRTRHLFIRQQTAVINAIRAHFAEFGIVAPVGRTGVEELLKIASDGNDKRLPDVARVCIAALGAQLQMLKARILEFDRLIMAWHRSNQVSKRLDELPGVGPALATALVASVADPKAFRSGRDFSAWIGLVPKQNSSGGKNKLGGISKQGDRYLRSLFVAGALAVIRYAKKRGSKHRPWLAALLARKSTKVAAIALANKLAKMAWAMMAKGERYKQPVALAAAW

SEQ ID NO: 223682 - protein, 428 aa, unidentified
MRSIALDVHRAFCEVAIKEGTKLRSGGRIKTSVAELELFAQSLGANDQVALEASGPALAIKRIIEPHVGRVVVANTRRVRAIAEAKVKTDKVDAQTLCELLAAGFLPGVFSPDEWTRSLRRRLQRRSKLVRTRTRAKNELHAVLARNLKGRPPVTDVFGKAGREWLRGLELAPDERETVDGALRQVDFLDEEVALIERELAAQALASEEIRRLMTVPGVSLISAATFVAVVGDITRFPIQKKLVSYLGLDPKVRQSGETPARHGRISKQGSPEARHMLCEAAWIVVRSPGPLRAFYERVRARRGGQIALVATARKLSVVFWHLLTREEDYAFGRPTLTRRKLRALELKVDKGWRQGKYSGPRVHETRKDREHEREFAEQAEIAYRRLVADWQPKKRKGAGVPVGRASSSHLLSEETAARQDTAPDPAL

SEQ ID NO: 223683 - protein, 416 aa, unidentified
MKLFVGIDVSSEKLDTCYLTDEMVVLLNHTYGNDTQGAWELKEQILSFHETYSFDQIVIGMESTSMYSYHPAVNFHQDEQLQAIHAITTIENPHRIKQYMKMFDADKTDPIDAFMIADYLRIQRYTNSPIKGEKYMALQRLTRTRYQIVRQLVEVKQHFIENLSYKCNTLKKELREAEGSTTVFSAAIMDLFTQDLSLDDLANLPLKDLAEWLQSKGRGRFKDPEGLAKTIQRAVRSSYRLDQVMSESIDMILGILVREIRSLEKAVKDCDQGIEDLVQTVPEYQCLTSIPGVGPVYAAGLLAEIGQIERFPDQTSLAKYAGLTWPKHQSGRHEAENTPLTKKGNRYFRYYLIEAANSVSRHLPEYQAFYRKKYQETPKHQHKRALVLTARKFVRLVDTLLRNHQLYTPPRSVIEK

SEQ ID NO: 223684 - protein, 337 aa, unidentified
MPTLTIGLDIAKNVFQVYGVDRGGRPVIQRKLRRADVLKFFSKLEPSLIGIEACHGSHFWARELTSQGHTVRLLPTQYVKPFLVGGKNDANDASAICAAVSRPGIHPVPIKSAEQQSLQSVHRMRERLVHERTAKSNQIRSMFAEEGFIFPIGIVHLRQGVVALVNDADARITILLRRLGSMYIEQLAALQRWIDELASEIAEIFKRNESCQRLATVPGIGPLVATALFSGVGDPLQFKNGRQFAAWLGLTPRQRSSGGKSKLGGITKHGDTYLRTLLVQGARAVMRFVARREDRHSRWIKAVMQRRHVSIAAIALANKTARIAWAILTSNYSFKLA

SEQ ID NO: 223685 - protein, 452 aa, unidentified
MAKKAKKIKTEKGLRLKIVNPDSAGIDIADKEIQVCVPEDRDGENNRRFGSFTRDLHEICSWLHACRIRTVAMEATGIYWLNLYLMLRDAGIDVILANPLQVKNLMDEKTDEADAEWLMLMHSYGMVKPSFQPENITRKIRNLTRHRSNLLESASVEILHMQKAMEMMNIKLSTVISDVTGKSGQAIIRAIVAGNHDPVSLSQLADGRCKASKETIAMSLEGTWEDDVLFMLEQSLKAYDFYQEQVGDCNNKIESLLMEYAAAIDTKGTEFVRTKKSAAHKNVLTFDMEKYAFDIWGVNVRAIPGMNVGSMLQLVGELGHDFVDKFDTCRKFCKWCNIVPNNKISGGKLLSSHLPKRKNPVGQIFRMCANAVKDEKTEMGNYFRRLKSRSGSAQAIVATAHKIARIFYTMIKNRQEYNAKLVGSDEKELLIRKIERAKKALFKLDQRLAEAS

SEQ ID NO: 223686 - protein, 420 aa, unidentified
MNSLTNQEFTAFIGIDWADTKHDFCLQPANSDQREFGQFPHTVNGIDEWASSIQQRFGGTIAVALELSKGPIVYALQKYDFIVLFPVNPSTLAKYRQAFKPSRAKDDPTDAEYALELLLHHRDVLKPLQPQSAQMRTLLYLVEQRRRVVGDKTRFTNRLRNALKQYYPQALDWFGDSDTYVFCDFITRWPTLLQVKRARRASLEAFFSEHNVRFPKLIEERINSIKNAQPLTNDMAVIKAHQLQAEILVNLLRVTLQSIDRYDKEIAAIAPTLPDYALFNSLPGAGALLAPQLLVAFGEQRDRFQGADEFQKYSGVAPVTERSGNKSWVHWRWQSPTFLRQTIVEWAAQTINKSYWAGAFYRQQRAKGCPRQTAIRALAFKWIRILFRCWQTHTPYDESKYLNALRRRGSPLLKQLGETT

SEQ ID NO: 223687 - protein, 342 aa, unidentified
MTYYAGIDVSLEYSSVCVVDGAGKIIREQRIASEPEALIAWFRGLGFGLERIGLEAGPMSQWLYPAMRAAGLAVELLETRHVRDAFKAMPVKSDRNDARGIAQLMRLGWFRPVHCKSLAAQEMRALLTARKLVQSKLLDVQMSLRGLLRGFGLKVGPSTPSRFAGRIRELVEGNATLEVIAAALLVVHETLRREFAGFEKRVRSIARSDGRVRLLMSTPGVGAIVALTYVSAIDDPARFKSSKGVGAHFGLTPKKYQSGETDITGRISKIGDEGVRTALYEAGHIILTQPLKGCTALKSWAMRLAKRAGMKKAKVALARKLAVIMHRMLVDGTLFASAAVAA

SEQ ID NO: 223688 - protein, 347 aa, unidentified
MRFYTHPHQVYCGIDLPARSMYVCLVNRDGEILVHRHLKAAPEPCLKAVAPYREGLVVAVECIFTWYWLADLCAAQGSPFVLGHALSMKAIHGGKAKNDQIDSQKMAALLRGGMLPQAYVYPAERRATRDRLRRRTQLLRTRAELLAHVQNTNSQYNLPEIGKKLAYKANRDGVAERFEEAAVHKTLAVDLGLITYDDELLKDLELSLLKTAKQHEAHTLYLLQTVPGIGKILSLVLLDESHRIARFPRVQDFASYGRLVKCSQESGGKRLGPSGKKIGHAHLQWAVSEAATLFVRNNPQGQKLLSRLEKQPDKGKALSLLAHKLGRAVYCMLKREVAFDLERFLQT

SEQ ID NO: 223689 - protein, 379 aa, unidentified
MSRTPRIPEPSHLPTSSPDIASAQVVEEAVLGVDTHKDVHVAAVISGLGVLLGTRSFPTTASGYRQLLDRAGGFGTIRRAGVECTGSYGAALARHLSANHIEVIEVNQPDKASRRRRGKTDTVDAEAAARAVLSGRARATAKAGDGPVEMLRIFKLAKTSAIKSRTQAINQLKAVLVSADPQLRESLSGLRNPTLIRRCAQLDTSPPHDAPTVAAYTLALLARRILELTTEIDDLNQQITAILTSHAPTLLQRNGVGPDTAAALLIAAGDNPERLHSEASFAALCGVSPVEASSGKTHRRRLNRGGDRRANSALHTIVLSRLRWDRPTRAYPTRAYLARRLTEGKTRREAIRCLKRYVARELYRLIAPPTEPQRQTPAA

SEQ ID NO: 223690 - protein, 339 aa, unidentified
MSVSTLGVDLAKTSFSIHGVDARGKVQLRKNLNRSKLLDCIANLPPCLIGLEACSGAHYWAREFQKQGHQVRVMAPKYVIPYRTGAKNDVNDADAICEAVSRPRTRFVPIKSAEQQAVLAAHRIRKGWVKERTALINQIRGLMAEFGIVVAQGRWSFQRELPRILEDAENELPTIARALLHECYEHLQVLNQRIDDLERCFDIVAAHNETVQRLMTIPGVGAQTATAIVASVGKGQQFDKARDFAAWLGLVPRQYTTGGKSRLGRITKRGDTYLRTLLVHGNRAVLARVANKQDHLSEWSKGLIERRGYKRATVALAAKNARIIWAMLRSGKEYEAFAA

SEQ ID NO: 223691 - protein, 376 aa, unidentified
MKNTLYLGLDVHKDSITIAIAAAGRNGEVRLYGAISNDLHALEKALTKIRQAHGGAGLEVCYEAGPCGFGIARRLAQLKVACLVVAPSMIPKRSGDRVKTDKRDARKLARLLRAGELTPVYIPEPTDEAMRDLCRARTDAVDDRRRSRHRLKGFLLRHGYRYQGKSAWSAAHERYLRELVLPHSAMKVILEEYLQAIAAAGAGIDRCEVGMRALLEKWRLAPAVRALMAMKGFQTVAAMILVSELGEVHRFAHPRQVMAYLGLVPTENTSSDQRRQGSISKCGNAHARWLLVECAQHYVPPPKVSKELSRRQQGQPQEVRAISWKAQNRLHHRFMRLSARRLQRNKALVAIARELCGFIWELLRTQRCYQAHSISV

SEQ ID NO: 223692 - protein, 335 aa, unidentified
MNYFSAIDLHSNNLVLVILDEQDRSVVEKRLDNNLVGVLAELEPYRDSNQGIAVESTFNWYWLVDGLMAAGYPVHLVNTAAVQTYSGLKYSNDVHDARWLAKLLHLDILPTGYIYPKEQRKVRDLLRKRGGLVHQRSQNISSFKCLYARQQGITLNINAIHKDIEQFCFDDPLLEASGAPHKHIYRLLTEEISTLENLVISQIKESDIYSHLRTTPGIGKILAATISLETGDVRRFEQVGNYASYCRCVKSTRISNNKIKGKGNAKCGNKYLSWAYSEAAHFAIRYNKSIKRFYERKKRKSNGIIAMRAVAHKLARACYFIMRDGVEFDTKLAFG

SEQ ID NO: 223693 - protein, 402 aa, unidentified
MYNAVGIDVSKGKSTVAVLQPAGVIIRKPFNVNHTSSELDELAKYIGSLEGETRVVLECTGRYHEPVVKTLSEAGLFVSAVNPHLIKNFGNNSIRKVKSDPADAKKIARYTLDNWIELRQYSSMDNTRTQLKTLNSQFSFFMKQKVAAKANLIALLDNTYPGVNKLFNSPVRDDGSEKWVDYAYSFWHVDCVRKIGLKTFTERYQAFCKKHHYNFQPAKPAELFLASKDLIAVFPKEASYKLLIQQSIQQLNLASSHVEELRSKMNELASTLPEYATVMGMYGVGKTFGPQLIAEIGDISNFSHREALTAFAGVDPGVDQSGTHNSKSNKASKCGSNHLRKTLFQIMSTLLQTAPEDDKVYQFLIKKRAEGKPYYVYMTAGANKFLRIYYGKVKECIRNLEQ

SEQ ID NO: 223694 - protein, 426 aa, unidentified
MKNNVVVGIDVSKDFSYLCMIGPDGKKIGKPFKVLHTLEGLNFALKRLKEVENQYGSKCILVMEATGFYYSRLLFHFFHQSNLEVWMVNPIQSNSIKNIKVRKVKNDKVDAYRIALLFLLGEAVPVRPPREDLAEINILCRQYFRLSDDFTKYKNHLVSLVCQVFPNYDKVFSDITSESSLYILENFPSPNKLLKADKETLVQTIAKLSRKGRNWALEKYDALIDVAREALILGCAPPAAETAILADIAVLRALNEQMRVVENKIRDLSSNVREIKLVSSIPGFGILSAAAFFSEIRDFCSFKSPKKLTAFCGIDPAVLQSGKFKGSQVKISKRGSVFLRRVLYTAALASIRKKRNGDYFNPVLVDYYECKIQSKPKNVALVAVMHKLVRYIFAVLRDEKSFKLITPEEHLKAFEEARLSPLKMSA

SEQ ID NO: 223695 - protein, 417 aa, unidentified
MEKKEQYIEYEQIIERGCGIDIHKKVIVATVMGTGIKTETRTFDGFTESLEEMRDWLKKLRVTHIAMESTGVYWKPVYNILEEYFKILLVNARHIKNVPGQKTDKKDSIWISKLLLSGLLKGSFVPPKHIRNLRDLTRYKRKVIEQISSEKNRIHKLLEDANIKLSSVVSNLSGATATKIIDAMIDGQEDVNELVKLRHGKMQCSFEELAASLKGKLTSHHKFMLQTYKESIENKNDIIKKLDDQIDKLLEKNELLLDAKLLATIPGVGKEGSSYILAEIGNNMDQFPNEQHLASWAGVSPGNNESAGKKKSSRTTHGDKYLKALLTQFAWAATRTKNTYLRSKYDSLVGRIGKKRALVAIGHKILVAIYFILKDEVAYRELGPDYLSELRKEKQVSKHLRILKELGVDVEIKSNVA

SEQ ID NO: 223696 - protein, 404 aa, unidentified
MNTVGIDVSKGKSTVAVLRPYGEVVVSPFDVAHTGSDLRALADLIKKLPGETKVVMEATGNYFESIARYLHEQNIFVSVVNPVLISNFGGNTLRKPKTDKKDSVKIASYALTYWLDLKEYTPQEDLRKSLKLMNRQYQQSIKLKTMMNNNLISLLDLTFPGINKLFTSPSRESDGHEKWVDFVLEFPHCDMISKLTIKAFAKKYKKWSDKNSYHFTESSCEKIYAFAKDCVSSVSSDKAIVFSVVQAAKMLISATENCHAIQSEMNRVASKLPEYDTVMNMYGVGKAVGPQLMAEIGDPRRFHSRKAITAYFGYDSENNDSGQKTTRSNPMTKKGSGALRRTLFIIMQVLLQTKPQDNPVYDFLIKKKSEGKHYYSYINAAANKFLRIYYARVKEVLNVSEQMT

SEQ ID NO: 223697 - protein, 356 aa, unidentified
MISTKYIGMDVHKESISIAIRNAAGKIVMECVIETKASMILQFFDGLRGDLHVTFEEGTWAAWLYDLLKPHVTKLVVCDPRRNALLQDGNQNDRVDARKLSDLLYMNKLNAVYHGDHGLRTLKELGRTYLTVTRDQSRVMTRVKAIYRSWAIPCSGKQVYGTRHRAEWLGKIQEPGVRRRVELYYQQMDALRTLRQEVRRDLLAESKKHKVWKRLCQIPSIGPIRAAELLGILQTPHRFRTKRQLWTYCGLGVVTSSSADHEVANGQLRRKKRKHVEIRGLNENYNHDLKNLFKGAAVVASIKRGPFAEFYAALVGNGMRPEMARLTLARKIATIVLIVWKKGVCFDAKHLKPQTV

SEQ ID NO: 223698 - protein, 362 aa, unidentified
MTINAGVDLHKTQFTVFVKQSGNQFEQYSTEEDGYKKFLTRIQRWKKNGMTVRIGVESTGNTRYFKNRMEQAGAEVVVINTLKFKVVNESVKKTDRHDAATIAEFLEKDMLPESRLCSEESEQIRRLLKVRTTLVRTMVMVKNQIHALLTGLGMKDSRATLQSKRGRQKILDTLRKADNELVVQPLFETIEQLEKSVKSIESELEKLTEGDRTVELLMTIPGCGKIGAWTIRAFTDDISRFASAKKYSSYAGLVPWVQNSNETVRHGKITKRGPEELRTALVQLVMGMRRCRSTVSWRLMERYTEMKRNKGSGKSIIATARKLSTIIWCMLSTGQEFDPSLMIDRQLIRKADSMRTTASQSA

SEQ ID NO: 223699 - protein, 318 aa, unidentified
MSHGYDKFIGIDVSKNGFDVCCHGSGPLGSFDYTADSVSLLLPLLPPAGTCLIVIEATGGYERQLVGDLMTAGHQVSVVNPRQVRDFAKAMNILAKTDRLDAAVLARFAERMQPIPREKPGRLDELRELVARRRQLIEHRTAEKNRCLQGASPFVRKSLLRSIEAINKDVKAIDKVLLSLVHSDDEWKNKFDKITEVTGLGPQTATTLVAEMPELGQVNRQQAAALVGVAPYNQDSGQFRGRRMVKGGRQSVRNVLYMAALSAMKHNPVIRDFAARLHSKGKPPKVVITACIRKLVVILNAILKTNQSWQPRLATATP

SEQ ID NO: 223700 - protein, 402 aa, unidentified
MTAGQVCAGVDVGKEHHWVCVVDDNGSVMLSRRLANDEQPIRELVAEIEQLADEVSWTVDLTTVYAALLLTVLADAGKPVRYLAGRAVWQASAVYRGGEGKTDAKDARVIADQSRMRGADLPVLHPDDNLVTELRMLTSHRADLVADRTRTINRLRQQITAVCPALERAAQPTQDRGWVVLLTRYQRPKAIRQSGVSRLTKMLDDAGVRNAATIATAAVAAAKSQTLRLPGEEVAAGLVAELAGEVIALDDRIKTTDADIEGRFRNHPLAEVITSMPGMGFRLGAEFLAAVGDPALIGSPDQLASWAGLAPVSRDSGKRTGRLHSPQRYSRRLRRVMYMSALTAVRCDPASKAYYQRKRDEGKRPIPATICLARRRINVLYALIRDNRTWQPDSPPIAKSAA

SEQ ID NO: 223701 - protein, 359 aa, unidentified
MQTQKTELDFKGQNFFVGIDVHLKSWTVTILTEELLHKTFTQPASAETLCNYLKRNFPGGNYNSVYEAGFSGFWTHYRLKEMGINNIVINPADVPTSQKEQLQKDDPTDSRKLARSLRSGDLKAIYIPSSSTLEDRSLVRMRATLVKDMVRFKQRIKSFLYFYGIDYPPEFEKSGSHWSKRFMKWLGEVSLQHKSGTQAIKILVQEAEQQRKLLLEVLREIRLLSRSERYAGNIALLRTIPGIGLITAITFLTEIENIERFENTDHFAGFVGLVPNYHSTGEKANNGEMTFRGHNTLRRSLIESSWFAARFDPALMMSYHSYIKKMEPNKAIVRIARKVLNRMYYVLKNKMEYVPGVVK

SEQ ID NO: 223702 - protein, 355 aa, unidentified
MSQEKYIGMDVHQATISVAVMDGNGKLLMECLLETKAATILEFVQGLRGTLSLTFEEGTSAAWLHDLLKPHVSRLVVCDPRKAALLKEGNKSDRIDARKLAELLRTNQLKAVYHGEHGIRTLKELGRSYLTVSKDVTRTMNRIKSLYRSWAIPCPGTTVYAPSHRLEWLAKIVQPGVRVRAQHLYEQLDNLQPIRQQARRELLLESHKHPAVKLLRQIPSIGPIRAALLVALLQTPHRFRTKRQLWAYSGFAVETHDSGEDRYVRGKVQRNRERITVRGLNDNHNPDLKNLFKGAAISASTRPGPLHDFYAARVAKGMRPTMARLTLARKVAAITLTMWKKGVSFDPQQLSRQAV

SEQ ID NO: 223703 - protein, 462 aa, unidentified
MAAKRRFPAPRRSTTSSPPKPQPALTVTNPRAAGIDVHDGVHWVAVPPDCDPEPVRRFGTFTADLEALADWLTACGVDTVAMESTGVYWIPLYELLERRGFKVFLVDARAVAKVDGRPKSDIHDCQWIQRLHSYGLLDKAFRPQDELVVLRGFVRQRQNLIAYASQHIQHMQKALVEMNLKLTLVVSDIVGKTGMAIIKAILAGRRAPAELAKLRHERCKHTEEEIAKALVGNWREEHLLALKQAVDLYEFYHAKIAECDRAIDDYLKRLPNRAGEKPLESQPHKCRKKDNEPMFDARKRLYEMLGVDLTAIDGISAGVALIIASEIGHDVSAFRNEKAFSNWLGLAPNHKITGGKIKSRKTRPGANRIATALRMAAASLLRTPTALGAFGRRMRSRVGSPKAVTAIAHKLAKLVYRMLKHGEEYVRQGAEEYEALYRERRIAALRRSAAALGFRLEAQTAE

SEQ ID NO: 223704 - protein, 350 aa, unidentified
MTKIFIGVNFSKKTFDASVCTQECHEPSYIGKFSNDTDGFEALLAKVNELFEVGDAGDLLLCGENTGAYSTAFARYFAAGGCFVWLEHAARIKHSSGICRNKTDKADSRMIAEYALRFNDKAVRYVPDSRVMADLKTLFRYRSFLTREKVRLNNEIKSNNVLKDDGATMELVQSELKESLTETLRKIKEVEAKIKDKVTENEEVEKNYTIITSVKGVAMVNAVNLIVCTDNFRKPENARQLMSYCGVAPFSHESGTSIHKPAKTGIQCRRATKALLNAAAKCAVIHNPKYKEYYQRLLARGKNFQIAINNVCAKLLREIFALVRDRLISDSATEVKQSKKACFSPQNACA

SEQ ID NO: 223705 - protein, 414 aa, unidentified
MKCFVGIDVSSQTLDVCIMNAEGDTLETLQVRNHLQGASHLRDRILKAADACSALSIHIGLESTSVYSWHPAMFLHEDPALKARKTTVFTLNPKLISKFREAYADMDKTDRLDAWIIADRLRFGRLNTTVVLQEQYVALQRLTRMRFHLVHNLTREKQYFLQNLFYKCNAFQAEVESSVFGHALMELLSEAYSLDDIASMEVAELADYLRDKGRNRFPDVDHVARCIQKAARASYRLSKTVEDSIDLVLATSIQAIRSIQSQLKELDKAICRILDGLPQATCLRSIPGIDKVYAAGLLAEIGDIERFENQAALAKYAGLTWRRQQSGGFEAEDTKRIRSGNRFLRYYLVEAANSVKNRDPEFGDYYRKKYKEVPKHAHKRALVLTARKLVRLVDVLLRSDQLYTPRRKVNSGKG

SEQ ID NO: 223706 - protein, 409 aa, unidentified
MPERKVYVTIDKDAPVLALDVSKGSSHCQGFFSFGKPSGKPIKVARSRSGMAAAAEIAETLRKDSGRDPTVVLESTGVYSEPAVRWAESIGLEALLISPLESAKVRKSRVRPTKTDALDCAVIAEVAYTRSARRHTARSSLYSQLYSLSRRRSAIVDRLVASKNQYRKSLDAVWPLLDESCDPFSGYAMWAVGRYRHPEALAKAKEKSIVSGLEGAKVRTGAISKAAAASKLSAYAKDAMSGCLADGGEVDSLISALDDVIGDMRALDEITGRLLGLAKELPHFAQIASIDGVGGVLAALLCAEIGEPSRFPNRNALVAYAGLDPAILQSGRNDGLHCSITRKGNAFLRRCLYLAVENMLISKADNAVTRFCSKKKSSGLCQKAAATAACRKLLVTIWGMLRSGTFFDR

SEQ ID NO: 223707 - protein, 352 aa, unidentified
MNGLKYIGMDVHKATTVIAVLNFAGKVVGEAIIGTTASSILDFIKSQRGTLHVAFEEGTQAAWLYDLIRPHVATVVVCDPRKIAKQGNKADKPDAKRLAELLRTNALTPVYHGEQSTKAVKELTQSYTSVVEDGTRIKNRLKALFRGRGIDCSGSAVYSPDGRKQWLAKLDTAAVRARAARLWEELDCVERLCEEAQQELVAEARKHAAVKILRSIPGIGFVRAAVILGVAGTPHRFRTKRQFWTYCGLSIVTATSSEYEVVDGRVCRSKRRALVRGLNHNYSRALKSAFKSAAKTAASGPWKSHFDAMVANGTQESLALLTLARKIASITLALWKRGERYDQKKLKMLHAA

SEQ ID NO: 223708 - protein, 410 aa, unidentified
MRVIGLDVHRSFAQVAELEDGVLRQCGRVDLIRDAVLAFARTLKADDEVVLEATGNTMAIVKLLKPHVGRVVIANPLQVRVIAEAKAKTDRIDAAALARLHAAGYLPEVWQPDEATALLRTLVSRRASIVQGMTRTKNRIHAVLHANLIPPFSGKLFQGPGRKWLAEQPLAEHERASVDRWLAGLDAMEQELVAAEAAIAAACIDDDRVRRLMTIGGINMIVAAGVLSAIGDVSRFANADKLVSYLGLDPRVRQSGDRAAQHGRISKQGRSHARGLLVEAAWAAAVTPGPLRAFYVRVQGRKGKQVAAVATARKIAVLAWHLLTKEQDYAFARPALVAMKERQMELKAGAKSRRGGNKPSAARDYSIKELREKERALVEQAEKAYTRFVSAWSEKPKSRNVQSPKGGTAT

SEQ ID NO: 223709 - protein, 369 aa, unidentified
MSQFSGSSQAAVDYSSTIIGALELSAKKWVLAVQLPGVSRHSRHVLDALGDSLVSFIERLKARCAAAGRKITRVILTHEAGRDGFWLARFLARLGIEVHVMQPSSLPVDRRARRAKTDMIDVEMLLRTLMAWLRGEPRVCSMVPIPSEAEEEARRAYREREDLTRERRSIVNKIDGILATLGVKGYKALRRDRREQLNCVRQPNGELIPPQAKARIERLLDRLELVMKLIEQVESARDAVLKKDAPADEAEGMIRSLTELRSIGPDTATLLVREAFVRRFRNRRALGGYVGLGGTPFSSGGSEREQGIGKDGNRRVRAAMVELAWMWLRWQPDSALSVWFRARVGAMGGRIRKIMIVALARKLLVALWR

SEQ ID NO: 223710 - protein, 335 aa, unidentified
MHYLYYVGLDVSKETFDASLVAFENANEMAHRKFANSRKGICSCLHWVEKRHGIRLDDVIFCAEDMGSYISEMAVCASDRTLNFNFSLISPLVIKYSMGIARGKTDRVDARRIAEYAITHYRKIALYLPAEKELCQLRTWLILRAHLAKQRVAKLVLLEKLDYKEKFADVSIQRSMLQEEIAYAETHMKTIEREMKELIAADSNICRNYKLLTSIKGVGPITAIVMLCSTLNFTKITDHRKFACYCGLAPFEHSSGTSVRGGCHTSSMANRDIKVQLNRSALIAIRCDPQLKAYYERKVAEGKHKFSVLNAVRAKIAARCFAVVRRGTPYVALQI

SEQ ID NO: 223711 - protein, 429 aa, unidentified
MNYNTQNAKIASITEKSLIVGIDVGSETHYARAFSWRNYEYSKKPFAFSNDETGFAAFKEWMNDIAEKHGMEVIIPGMEPTGHYWLNLGAYLQGQGMRPVHVNPHHVKKSKELDDNNPNKNDRKDPKTIAGLVNEGRFSYPYIPTGIYAEIRNLSNLRIQTQEEITRIKNRIARWFSIYFPEIKDVYKNPDAVSGLMVIKQAPLPCDIKGLGVDGVNKIWRDARLKGAGLKRAKNLVTAAEHSIGNTEAPRSARKEIRNLLNDYEIYKSRMDELMEEIEELLSGIPYIDKLMGISGIGIKTVSCFIAEVGDIERFDNPKQVQKLAGYAIVADSSGKHNGESRISHRGRKRLRYALYEAAVSVIGKNKEFKEIHHYYRTREKNPLKKMQSVIAVACKLIRIFYAILTKGIDYDGQKMLRDIVRPGMQSAA

SEQ ID NO: 223712 - protein, 454 aa, unidentified
MKILALDLGKFNTMCCFFDSKTRKHEFLNATTDRNYLETIFKKHKIDLVVMEACGPSGWINDLAQSLGLKTLVCSTNEDAWKWSNVKRKTDKDDALKLARMAAMNELKAVHMPSEAHREFRSLVKYRKTLDSRINKMKCKIRAWFVNHGISIDTGEKAWNTGRERINSFRKPLTDCQPHEFWKGELDLELNQLDSLTTILDGVVKKLESIGKTDPRIARVQTIPGVGPRTAEILVACIDDAKRFENGRQVSQYFGLVPRQYQSGETDRNGRITKRGNPLARTILVECAWSSLRYNPWAKHVYDRICGKQKTRKKKAAIALARKIAVLAWALLRDEKDWEPKRMIEVTESYGRIPLGLKEKLLEMPKKECRHKRKNRRISEERAAKRAAAEQAAQTPKSTLQPTKSTPKRSPVRSSAAGPAKRKPTTTTTKGKPTKTKAKPTANPRRIRKLETAG

SEQ ID NO: 223713 - protein, 362 aa, unidentified
MWIIGCDLHARQQTLAILDTATGEVVNETLAHEGDGVREFYSTLPGPVRVGIEATGSMKWFLNLMEELGIDCQVGHPATIRAAEPRRQKHDQRDAELLLKLLVENRFPSIWQPSKELLDLRALLLHRHQWVRLRTRIQNALQAIALANGLRRGSSLWSQRGQQAIRSLPLATHTAHRRSELQAMYERFEAEIEELNERVLEQANRRTTAGLLMTHPGVGPITALATDVFLGDPKRFRDGKALASYIGIIPRENSSGGRQRLGGLTKQGNPLLRFLWCEAAVHAVRRDPELRQFYRRKLMQKGLGKARVAAARKLGIRLWIMLRDRIDYQEFCRRGQKQQRSGDACAGMPGMRYGAKSHRLID

SEQ ID NO: 223714 - protein, 317 aa, unidentified
MTKISTAVAGIDTAKDKLDVAVHDRTERWQVENRLCGWRRLRSELTKAGVSRVGIEASGGYERGVVKHLQTAGFVVLVLQPIQVRAYARLHLRRAKNDALDAVLIAACTAAIDRPRIEPDARLAALADHLTFVEQIEEDIARLKTRLEHVDDGRIRKIVVADIARLKARRIAELLRIVGRLRDHDDLARRLDLVLSVPGIGERTALALVIRMPELGRISREQAAALAGLAPFDDDSGKHKGQRHIAGGRGRLRRSLYAAALPAAFRWNKTLIDLYARLTARGKAHNAALVACARKLLIYANTVVARGTPWVNKPAAT

SEQ ID NO: 223715 - protein, 367 aa, unidentified
MKKVSTTAAGQTKNFRDQKLTIGLDLGDRSSWYCVLDEAGSVVLEQRLGTTPKAMREVFGGMPRCRIALETGMHSPWVSRALSELGHEVIVAHARNVRLIGESRKKDDRLDAQTLARLARIDPQLLCPVKHRSAKAQADLTVIGARAGLVRARTALVNTARGLAKSYGERLRGCNVRNMNPEKAEGLSPELQTALQPLLAGIASLSERIRECNERIEGRAQQSYPQVALLKQIKGVGTLIALTFLLTLEDPHRFGKSRDVGCYLGLQPGRRNSGQSEPQLHISKEGDPYLRTLLVQGAQHILGPFGPDCDLRRWGLKLAERGGKSGKKRAIIATARKLAGLLHHLWVSGEVYEPLHNSHQRALLAAA

SEQ ID NO: 223716 - protein, 342 aa, unidentified
MDKIEACGMEVSAQELVIALSGKKGEAVLLRFANTAVGHGQLLRTLTRGGKRVRVCMEATGMYGLDVALLLSAQEGVELMVANPRAVRNFARAMMQRSKNDQLDAVVLREFAARMPFKAWARPTENALALWGIARRLEALTRERTAEKNRQHAAGVSQAMPACVRRNIARTLRFHQREMQQLRGEALRCIAADARLRRCYQQLRSVTGIGEVSAIQILAELALLPEDRDVRQWVAFAGLDPREYSSGTSVRKYTRISKVGNRHLRQALFMPALVASRREPHLRAFYEHLLASGKKKRQALVAVARKLLHAIYGMFHSDQPYDGARVYQLPASLATPRAAHTT

SEQ ID NO: 223717 - protein, 411 aa, unidentified
MLEVRVERGAGIDVAKKFVVVCVMTGPADQKPVEEVRRFGTSVKELERLRAWLLEKGCTAAVMESTGSYWKPVFNILEGSLNIVLANPEQVKALRGKKTDPKDSRWLAGLLRHGLVQPSFIPPRDIRELRDLTRRRRILLGDGTAERNRIQKILEDANVKIGDVLSDVFGVSGQAMLEGLLENTSNAEEIAERAHWSLQAKIPHLVEALEGHRMSEHHRFMIRQSLNHMHYIEAQVTELDKEIQRRLEPYQKQVKLACSVPGIGVNSAASILAETGMDMSPEGPFPDCHHLASWSTVCPGNDESGGKRKSGHMRRGNRWLRASITQTAWAGVRKKNSSFQARFQRIKQRRGAQRAIMAVAHAQLIAIYWALRNGTPYQDQIRMAENERRQNQIQYHLRQLEKLGHELEESI

SEQ ID NO: 223718 - protein, 397 aa, unidentified
MYIVGIDIAKRKHEAAVIDGDGAVIIKPFSFTNNCSGYNRLLAMLAKAKLPLDEVSFAMEATGHYWLALFTRLQKEGFRVQVINPVQTNSIRSFYIRQAKTDPRDALLIAEVIRFGHFSESTLHPENIYELRELCRGRHAIVSMQADVKRKVVALLDQVFPEYETAFTNMFSDTSMAILQTCPTPKELSEMPFEELCHLIEVSSHKRFRMAKAQELQALARNSFGFAMAGDVFSTMIRLYAKHLDFLKQQVREMDRKIAEIMDTLDTPITTITGIGPTLGAYILSEIGDISRFSSAAKLAAYAGIDPTMRQSGEYNGVRNRMSKRGSPYLRHAIWLATSSAVLHDPALKLYFQKKRDEGKPYMASVGHACRKMVSIIYAVMRDNKAYTPCIPNEISA

SEQ ID NO: 223719 - protein, 316 aa, unidentified
MAPKERYVGIDVSKKVLDIAVRPGDEHWTVANDEDGIDELVTRLRSIGPRLVVLEATGGIELAATGSLADAGLLVAVVNPRQVRDFAKAIGRLAKTDRLDAQVIAQFGEVVQPMPRPLRDAEAQALSALLSRRRQLVGMMTQEKNRLHAAQFSVQRDIRGHIVYIEKRLAKLDDDLGSTLRKSPLWRERDDLLRGVPGVGRVLSVTLLAELQKLGTLNRKQIAALVGVAPLNRDSGLLRGRRTVWGGRARVRATLYMATLTATRYNPVIRAFYERLCASGKAKKLAITACMRKMLTILNSMLRHHATWQPDYALNA

SEQ ID NO: 223720 - protein, 357 aa, unidentified
MSMLAGQVEFVIGVDTHRDTNTAAVIDAITGGVVDHLECSTDAFGYKRVLAFADRNTSGRRVWAIEGTGSFGSGLTTFLLEHGEWVVEIDRPARPARRDGAKTDELDAVRAAREALSREHLASPRARGDREAMRVLLAARQGAVVARTKAIGQLKALIVNAPEQLRDQLRRGTTDQQLDRCARLRTLPSHGVEHRATVRAIRAVARRALFLEAEAAEHETELEQLVTAACPQLLDLPGVGAITAAQFLISWSHSKRIRSEAAFAALAGAAPIPASSGKTVRHRLNRSGDRQLNRALHTVALSRLQHDTTTKAYAARRTTEGKTPREIKRCLKRAIAREIYRLLEAHARAAKQANQVA

SEQ ID NO: 223721 - protein, 324 aa, unidentified
MHQELTSQAIWHLGADVASSHLDIAVHGDKAGVRRIANNAPAIAQWLAQVPSSSRLAMESTGRYHLLLASLAHAHGLQVHVLNPRDVSHYARGVGQRGKTDRLDAQVIARYVAHEHAQLRGWQPVPPALAELDSLLRRRAALVRHQGALRQSMGEDPVTRALLPQVMLPLTQVLQTLDKRIAQVAQGIQGAQQALGSITSVPGVGALSGAALLILFTRLAQASADAVVAFTGLDPRPMDSGHKRGVRRLSKRGPAELRRLMFNAAMSASQTAAWREVYAREIAKGLPRTAALVVLARKLVRVAFSLFKSRATFDPAHHQTLKIA

SEQ ID NO: 223722 - protein, 464 aa, unidentified
MTASKKLWRNRKERKEWARRLQSEDPGLEVVHPHAAGIDVGNSAHYVAVRPDRDAEPVRRFECFTADLHRLADWLQSCGVKTVAMQSTGVYWIPLYEILEERGLEVYLVNARHTKNLPGRKSDVQESQWLLKLHTYGLLNNSFQPVSEIRVLRTYWRQRGEHVREAATCIQRMQKALTQMNVQLANVISDISGLTGQAIIRAIVAGERNPLKLAALSDPRVHASREEIAKSLEGNWRPELLFVLQQEVDMYDIYQKRIAECDQRLQKHLASLTHPLPLQPPTQKPKTKKPAAKNAPRFDLSSELQRVTGVDLTRIDGIDVMVAQTILSEVGLDMSRWKTESHFASWLGLCPDNRISGDKVLGRGTRRVVNRAATALRQSANTLMRSRSYLGAQYRRLRTKLGAPKAITAMAHRLARLVYRMLKYGQAYVDKGTEYYEERFRQQQIQLLRKRAAKLGLQIAEIQA

SEQ ID NO: 223723 - protein, 382 aa, unidentified
MGGAFWLWEAHFLCVQKACFNQRKTWFLCAQNPSRVSIRDGLDNFIKVLVPHCQDFDHVAVVESTYNWYCLADVFEERGWLLRIADPSTVSQANLKSSDDRTEAQYLAERLRVGSLKHYLPLNFSSRALRDLCRYRMAMVQDCASLKIKLINLYRNQLSKNVRVADLLERCQPHMQPNYRFNSDILEEFKDPNIRLRVAFEISRIAMLEEMIEECNAEIQKQCKDQELVKLCKTIPGCGPVLSAVICTEIGTMQRFKSAGDFVSYWRLCSTSKLSNGKSKGLGNANLSWAFTEVAQYASRNPVIREILQRLLRRYGGLRVKAIRTLAAKIARVTFYVLKNKQPFNAAKCFGMELTKSIVKKLPHKPLREDAAVVLPTVAGQA

SEQ ID NO: 223724 - protein, 406 aa, unidentified
MQVYIGIDWSEQKHDVIMMNAAGAALAQFEIPHSPEGFLRLDETRWRMKLATEDCVVGLETAHNLLIDFLWSRGYSKVYVVPPTTVKSNRKRFSSSGARSDPSDALVIADSLRTDHGRLQSWSPDSLLTRQIRAKVSLINHLTSSTVRLSNRLRAVLLRYYPAVLNMFSSWPTKVAIEFIRAFPTPKHAENLTFDQFQRFARQHRYPNPKRLPTCFARLQAPQPEAAQETVEVYQDEAVLLATMLLTAMRAKKGALLELKTLFREHPDHAIFDSLPGAGDFLAPALLAKFGDDRKRFPTPASVQALAGTCPVTDQSGKRRIIKFRRACDREFRAIAQQWAMASLQQSAWANAYWQRARSRSRYSSLAYRRLANRWLAILWKLWQTGQVYDEAYHLQRCALRSKRHR

SEQ ID NO: 223725 - protein, 311 aa, unidentified
MDAIIIGIDVSKDRLDVHGRPDLAPFNVARNNDGIAELIERLRPLAPQAIGLEATGGFETVVVAALAAAGLPVAVVNPAQVRAFAQALGKRAKTDLIDAAVIAHFVEATKPIIRPLPDEQTQTLSDLVNRRRQIIAMIGAESQRHKRASARMQKSIERLLKALQKELNTVEQDIDDSVRGNPHWQQKEALLTSVPGIGSTIARSAIAELPELGTLDRRQIAALVGLAPWTRQSGQWRGKSFIGGGRAGIRSALFMGAMVAMRHNPTLKAFRNKLVAAGKPKLVALIATARKLLTILNAILRDNQPWRTQND

SEQ ID NO: 223726 - protein, 340 aa, unidentified
MEQVIGIDLAKRVFQLHIASPLGKMMKNTVVSRNKLTAFLAQQPPSKIVMEACGSANYWSRQFKRFGHEVKQISPQYVAPFRMGSKNDKNDAVAIVEADRRPGMRYVPEKTQEQPDIQCLHRVRQRLMKNRTALINQIRGLGLEYGIAIPESAHKVEQCLPDYLENAENDLTPLSRELFQELLRELKEQQQRLNVLDKRLDQLNAQQEDIRRLLTLPGIGPLGASALMVALGDSTHFKNGRHFASYLGRVPREHSSGGKVRLLGITKRGDSYLRGILIHGARSVVYRVQKLPDEQSNGLQRWLKGVIARSGITKAAVALANNNARIAWALVNQQSVYEAR

SEQ ID NO: 223727 - protein, 340 aa, unidentified
MTITTVGIDLAKNVFAVHCVDQNGKTVLVKPRVSRAALPELIAGLPPCVIGMEACSGAHYWARLFQQYGHKPRLMAAKFVSPYRMAGKSGKNDAADAQAICEAVRRPHMRFVPVKDESQQAMQCLHRTRQGFIEEKTATYNRLRGLISEFGVIAPQSTDALRHMVAEQKNSLPLQVQQCVDDLLEHIDRIDDNITEYDRILSRMAKSDHRSQPLMELKGIGPTTACALVASIGNAHDFKNGRQLAAWLGLTPSQYSSGGKSKLGRITKAGDSYLRTLLVQGARSVLISAEKRTDSFSRWVCTLVERRGYWRAVVAIAAKNARLCWASLHYGDDFRLYSAS

SEQ ID NO: 223728 - protein, 369 aa, unidentified
MGKHSEVFVAFDVAKKKHAVAIAEGGRTGEVRFLGDVDNSPLPIERTIRRLADRYEKMHVCFEAGPTGYGLYRQVKALGHDCMVVAPALIPKRSGERIKTNRRDAVTLARLHRAGELTGVWAPDAAHEAVRDLVRAREAAGDDLRRKRQQLLSFLLRHSRIYSGGGHWTLAHRRWLAGQKFEHAAQQIVFQEGIDAIEDALQRLRRLEKQLAVIVPQWSMAPVVEAYQAMRGASFLVAVTFAAEIGDVRRFDTPRQLMSFLGLVPAESSTGDTIRRKGLTLAGNRRARRALVEAAWTYRYPARVSETLRARLQGLPKPVREIAWKAQVRLCARYRRLSATGKKLPVVVAAIAREMAAFLWAIGRKVAPA

SEQ ID NO: 223729 - protein, 359 aa, unidentified
MKIVGCDFHPSWEQVAVFDSETGEVEERKLLHGDGEAERFYRDLESPALVGIEACGNSQWLIELVERLGHVVWIGDAAQIRASYVRRQKTDRRDAGHILKLLMENRFPKLWTPSCEQRDLRQLLIHRHKLVEIRTRIKNGLQHLALNRGLQKKSSLWSVRGRAYLEKLPLTGWTARRREDLLRLLGELNKLVEELDEAVKQAAEQHPQARLLMTQPGVGPITSLAFVLTIGDVGRFRHSNQVASYLGLIPSEHSSGGKQRLGSISKQGNRFMRQLLVESVQTVNRLDEGFRKQYAARCHHKPKGVAKVAAARKLAVRLYWMLRQNVGYPEIAHIESSPRVPLVGASQTEGLVGRSRIQR

SEQ ID NO: 223730 - protein, 323 aa, unidentified
MAKRITICAGIDTGKYKLDVAIDGSSEQLCIDNTVEGHQALVEWLKRFKVKRIGIEASGGYEQAVVAELRRKRFVVVLFQPKQVRAYGTFHQLLAKNDKIDAALIAMCTAAVKTIHSAPDPRLQPLAEHLTMIDQITDDIARLKNRLESCRDKRIQGVWKAQIALLAKSKRAELKALLAAIRKHSDLAARLDLIHSVGGCGLPTAVAVLIRMPEIGNIRRGPAAALSGLAPYDDDSGNRTGARHIEGGRERLRRALYNASLAASFRWNPQLKTLYSRLIAAGKCHKCALVACARKLLVTINAVVARGTPWVAEAPQLAKPPAA

SEQ ID NO: 223731 - protein, 338 aa, unidentified
MKLYGGIDLHSNNCVVALLDEADRVVYEKRLPNDLGYILHQIEPHRAELQGLVVESTFNWYWLVDGLQEAGYPVHLANTAGIQPYSGLKYTDDHSDARWLAQLLRLGVLPEGYIYPPAGRAVRDLLRKRSQLVRQKVTQLLSLENLYSRHTGSRPSANQLRVLTVAAVEEQFGETMIAQAIKSSLTVMHCLEEEIEQLERVVKAQVKLQPAFKPLLTVAGIGPILGLTIMLETGAIQRFPKVGNFASYCRCVDSQRLSNGKRKGQGNTKNGNKYLAWAFVEAANFAIRYHESVQRFYQRKCAKTSPVVARKAVAHKLARACYYVLRDQVPFDMKRAFG

SEQ ID NO: 223732 - protein, 341 aa, unidentified
MKQELSTVAIDLAKNIFHLVGADRTGKILWRKRLTRHALMPFMAQLPPVLIGIEACGGAHYWARRFREHGHDVKLLAPQFVKPYVKSNKNDMRDAEAIAEAVTRPTMRFVPLKEVDQQDIQALHRVRERLIGARTALINEVHGLMLEYGIVLPKGVAKFRQAVVEKLEADKDKLTALSHELFWKLVQEFVDLEKRIASYQEKLEDLATTHPECQRLMTIPGLGAITATALVAAVGDVGGFKNGRQFAAWLGLVPKQHSTGGQTRLLGISKRGDGYVRKLLIHGARATLRWVKRKTDGRSQWIQGLLERRGWNRTAVAVANKNARIVWALLSRGGVYGTNAS

SEQ ID NO: 223733 - protein, 393 aa, unidentified
MSNQAHYKVGCDAHKRYSLFAVLDGNGKVLRRRRIDHEPGAIRAFLSPFPPGTPVALETVGNWYWIVDEIEEAGCVPHLAHAAKAKLMMGYVHKTDKLDADGLGLLLHNGTLPSVWIPPGELRDERELPRTRMTFSKMRTQLKNRMHATFAKYGLSLDTLSDIYAAKWRAELTRVIGRLPEETRRCMEQELELLDLVQGQIDRLEARILERVRITPTIQLVMSLPGPAEILSIVIDREVGSIERFSCPKHFCGYAGTVPKVKGSGGKFHYGRMIKQCNNYLKWAFIACPGGLGQGGGECGGSAAASPELAEEVCGAALRTHPAEEGACRRCRCDSPPSSRSQLLGAEERRALSGAELQATDKVTLNHSVQAGADPCLTKSRVLGGMVPVRTAS

SEQ ID NO: 223734 - protein, 461 aa, unidentified
MSKKAAAARQEKSARKSVDWKALEIVHPDAAGIDVGGDEHWVAISPERDAQPVRSFRCFTADLREMAQWLVEKGVRSVAMQSTGVYWMPVLEVLEQQGLEVYLVNARHTKNLPGRKSDVQECQWLLKLHAFGLLNNSFQPTDEIRVARHLWRQRGNLTALAGSTIQRMQKALTEMNLQLGAVLSDLSGVSGMKIIRTILAGEQDPWKLAARVDPGVKAKPAEIAKSLEGNWREELLFILRQEVEMYEFYQQKIAGCDVQLRRHLETFGSKVDLMAQPIGPKPKGKKGSKNAPQFDLRSELYRITGIDWAQVNGIDVLTAQTVITEAGADLKAFPSEKQFASWLGLCPANETSGGKVLNRRSRKVVNRAATALRNAASTLLRSQSYLGAQYRRLRTRLGAPKAITAMARKLACLFYRLIKHGQQYVDQGTEHYEARYREQQIRALTKRAQKLGLQLVTLAAA

SEQ ID NO: 223735 - protein, 386 aa, unidentified
MQYPSDTSRCLAALDQETTLIAVIEMSLSTWLVAGVVPGIERQPLKKLAADEHALLKLLHRWRCEAAKAGHKITRIAVAFEAGRDGFWLARWLRAHGIEAHVIHSSSVAVPREHRRAKTDRLDTEMLKRAFLGWLRGERDHCKTVAIPTLAEEDAKRPNREREGLVGEAGRLVNRMKAVFVRLGIRGFNPKLKKAAERLDALRTPEGEPMPPNTVAALRRDMERLRLVREQIRQIEAARQERLQSAPEEGAHAMVRLLASVRGIGIETADMLVQEVLSRELRDRRAAARYSGLTGSPDESGRRRREKGLAKAGNPRVRRGMIQLAWRFLMFQKNSALAQWFHLRTQNAPRTRKTMIVALARKLLIALWRFVREGVVPEGLLLRPVG

SEQ ID NO: 223736 - protein, 402 aa, unidentified
MTDAPNRYIGLDIHKEYFVAVGVNEQLETVFGPQRVSNYQLDDWILRCLTPGDAVVLEMSTNTYQFYDALLPHVHSVMAVHSPNVAMVTNVRVKTDKKAAMALAQLHAAGLLTGVWIPPYPIRDLRSLIARRDKMVRLSTMAKNRLHSMLHRHHLVTPEKPFAPEQRTWWESLPLSANEQLLVRSDLDTLDFAQKQVEQIEECLKQESAEDVRIPLLIQLPGVAMLTAITILAAIGDITRFPSAKKLVGYAGLGTRVHDSGMTHSSGRITKAGRKDLRCAMVNAANHAVEHHVHWKKELERLAPHLGRSKAIVAIARKLLVAVWHVLSEQVADRFADPRDVASSFIRYAYRIGVRNLPDQQPALAFTRDQLDRLGVGRELKEIPWGSKRFKLPPSKLLLEKE

SEQ ID NO: 223737 - protein, 438 aa, unidentified
MNSLSYVERFRQIKNELVKNHEFLLVGIDISKNSHVACIIDSLKYIYLKKFRFDNSADGIDLIIKTVKTIQQKNNKKETIFALEPTGNYHKPLANYLYGKGYMVCYVSSIAAKENRKTIDGRWRKNDPDDAYNIADLLGQGKIMFYDLEHQKQFNQLKPLLILRKKLQKRLCSIKAKIRNNVFAQCFPEIDFLYNQIDNPEVIEILKNFPSAEQIRNTSFKEFYSALSKTGRITIKKKQRIYNVWNRAVNSIGYPFNSAIKRESEFIIEDITLVKTQIKKIDKETIDTYGNSQDYKLLIGIPGFGPIYASIFLSIIKDIQKFAHPDQIIKLAGLDLEYCQSGNYHSKSRSSKKGNALLRYALCGVVNGALKHKDFKAIFEEQLQKKGDNKDNRRILKVKLAVKMIRIAYAVLSKKENFDIEKIKENSVKKPVFIEREG

SEQ ID NO: 223738 - protein, 384 aa, unidentified
MTQVTLNTNITTNLNKLFLAFDLSHKSWKLAFSDGKKYRFCSIEGKNLAELREAIDKSIEKFHLPKDCEIFSCFEAGRDGFWLHHHLESLGIQNLVVDSASIEMNRRKRQVKTDKVDAKKLLGMLMRHMAGERKHWSIVNVPTREEEDIRRIQRGVDRLVKEQGQHTTRMRSLLNLHGIVIEGVIGGKDWEKTLDQIRLWDNQPIPRFIKAELIRENKRLMLVREQRQELEKEKKRLLEEELDNNPMLQQVQKLQLLRSIGETSSWIYVMEFFGWRDFKNRKEVGALAGLTPTPFTSGDNTIEQGISKAGNKRIRHITIEIAWLWLRYQPQSELSLWYEKRFAHAGPRMRRIGIVAMARKLLISLWRYLETDELPKGAVLKPCH

SEQ ID NO: 223739 - protein, 312 aa, unidentified
MDAIYVGIDVSKDRLDVAVRPSAESFAVPRTGAGIDELAKRLTAISPLLVALEATGGFETIVAAGLAGASLPVVVVNPAQVRDFAKAVGKRAKTDPIDAMVIAHFAEATKPPVRQLPDEMTRLLADLVARRRQIVEMIAAESQRARRVSNPRLKKSMARLHKALEKELSELDGDIGDHVRGTPAWAEKEELLASVPGIGPTIARSLIAEMPELGTLDRRQIAALAGLAPWTRQSGQWRGKSFIGGGRANVRRVLFMGAMVAARFNPTLKLFRDKLVAAGKPKLVAIIAVARKLLTILNAILRDKAPWQPKSA

SEQ ID NO: 223740 - protein, 439 aa, unidentified
MEGPIVSIDVSNGNSHYMCFIKNNKRFGKVKKIDHDIEGFKRLLEDIQKLEAETNEKVCAVFEATGVYTKPLERFLSKNSIKTYIINPLESARKRKEEIHNKKTDKLDPISISKVYYDKEEMMELKKKDGTYNWLRKKNRLYEDQLNHLRKYKVTFQNQLSICFPGYLDLFKDGYSDIPMTILKKYPHPDLLKNKKAETVARYLEKNTCHTHKISLEYALKIIGFAKKTYPGCEKDDVEVEIFKILLDKVIETQRECEKTLNEMITVASTLEEYRYILSIDGIGPNLAARIIAEIGDIEEFKSREALVAYAGLDPHIYQSGDQDGKHLKISKKGNKYLRCLLFLAVGCSIRGAKDNPVNRFYQKKKQQSNPLNSKAAKTACTAKLLKIIYGICKTRPHMKGSLEYIINKNLKKLEKSNLFVVENHQKCVLHGKTQNFMN

SEQ ID NO: 223741 - protein, 451 aa, unidentified
MATKRKKRVQDLPVLHPDAAGIDVGASEIFVAVAADRDAEPVRSFATFTRDLNSLADWLQACGIRSAAMESTSVYWIPLHQILEARGIEVCLVNAQHVKNVPGRKTDVSDCQWIQYLHSVGLLRASFRPPAVICAIRSLWRHRDSLIQMAAEHVMHMQKALDQMNLQVHRVLSDITGFSGLRIVDAILAGERDPIKLAQLCHSRVKSSQDTVAKSLEGDYRIEHVFALRQSLAGYRYYQGLIAEVDQEIQRQLADLKTADGDSKPPKRTKKTPYQRYRYEPAGFDLRGELYRILGVDLTDVPGISSVTAHTILCEVGTDVSRFRNASAFASWLGLCPERQISGGKVLYTKSRRVRNRVALALRLGANSLHHANNYLGEFFRRITRKLGKAQAITATAHKLARIVFHLLNTKEAYNESVFRRCEEEALKHAELRLRKHAARMGFQLVSAAND

SEQ ID NO: 223742 - protein, 356 aa, unidentified
MKRNHFIGIDVHSQFCEVAVMTPAGQVVQRERCATTIPALSELLDKAPRPCSVVLEEGPMAGWLWRNLHDKVNTLVVAEPRRNRLIVRDGDKDDDIDAEKLALLHRGGFIKPVHQSGSLEQAVFKQLVALYHYRVRQRVREAHRITHLFRQHGIVIRERAYADRADRPALVQRLPAEGLLPELVRSMWTSYDALVQQEDQWRKRLLRAAKQGEVVCRVQDLPGAGWVRAATLYAYLDTPWRFRSKAALWKYLGIGLERKHSGKGKEYLGVPKQAHRLLKCTILGAARSAATARDNPFADMYRRWVEEEGLSPARARRNVARRLAATAWGMWKNGNAYHPEWVGVAGTAQAAAQESR

SEQ ID NO: 223743 - protein, 355 aa, unidentified
MTSTKYIGMDVHKESISIAVRNSVGKVVMESVIETKASMILQFIDGLRGDVQVTFEEGTSAAWLYDLLKPHVTKLVVCDPRKNKSMREGNQNDKIDARRLAELLRLDHLTPVYHGEHGLRTLKELVRTYLTVTKDLTRVMSRVKAIYRSWAIPCTGKQVYARRHRAEWLGKINEPGVHRRAEFYYQQLDALRVVRQEVRRDLLAESKKQKAWKQLCEIPSIGPIRAAVLLGILQTPHRFRTKRPLWNYGGLAIEMHSSADHRRVAGQLQRSRKNVLVRGLNRNCNHDLKNLFKGAAAVASSKPGPFQEFYTALVTKGMRPEMARLTLARKIATIVLIVWKKGVCFDAQHLKPQTA

SEQ ID NO: 223744 - protein, 393 aa, unidentified
MRFAGIDIASETHVLAMVTADGGVELKATPFAEDDLGYQKALTLLGTPGGVLIAMEATGHYWKNLFAVLAAAGHSVALLNPLRTHRFAGVDLERTKTDAIDALGIARFAAQKHPAVTPLPDALTEELRELVHLRQRLLQDFGDRVRQLHRLVDLGFPEFTRYVRTLDSELASAILRDYPTAAAFRGVSVRRLAALRYDGRHRVGLDLARLLIEAARHSVGQHHSATYRLQIRYACDDLDTLRRRLRDLDRDLDGKLREHEVGRLLTTIDGIGTQTAARVIATVGDPAYFRSGSALAAYVGTIPALKQSGKRQSVRGAVTPIGNAELRAALWMPTLCAVRSNPWLRAHYQRLLARGKLPKVALVACMHKLLLAIYSVAKHRRPFVPNLTAAVTP

SEQ ID NO: 223745 - protein, 344 aa, unidentified
MDHSMGIDLHRKYFVATIVDEDGEVVRRDRVSTDRLAIAGYLGSLDGERPGKAVMEACYNWSYLYDQLEGEFEEVLLAHPLKTKAIAEARIKNDVLDSETLAQLLRAGLIAQAYAPPRETRDVKNLLRYRSSIIGARTAFKNRVHAVLARNHVEHPALRELSDIFGKKGMAVMRSLELYGHDTAILNGLLDIVDEFAGRELELRKQIKAMNREDDITRLLMTVPGIGDITALLIRYEIDDIDRFLSPGKLCSYAGIVPCTHSSGGKTYHGRITKQGNRWLRWGIIEASHKATVTSPSLSAYHARIKGRRCSSDATVALARKLLKIVYYVWKERRPYYEGPVTIR

SEQ ID NO: 223746 - protein, 371 aa, unidentified
MADIDGVAGIDAHKHVFTVAVLDARGGRCGIESFPTSPDGLAEVLALLDSFGFAIGRIGVEGSAGLGRHVAGFLVAAGYDVREVQANRTAERRRRRRRHKTDREDAEAIARETLADPDLPPAGKQRRPDPCWDELVAVRNRRKSLINQRVRLLNEAEAVLVRLPLTVRAVLPPTNRVRPRLRALDRGAASSIQVTAADRVNLAWLVEAAGDIARLDARVTELDHKIPTLLGRLGCTLTEEYGIAAVGAMDLLVEVGDPTRFTTEAQFARWCGAAPVAVSSGEGDQAPTHHRLDLAGNRQVNSTLHVMHVTQVRSYPPARDYIAKKRAEHKTKREARRAHKRHLANIVIRHMWADHAQRFATPANLATPAAA

SEQ ID NO: 223747 - protein, 414 aa, unidentified
MDVIVERVAGLDVSKTDVKACVRLPRQGPGRRYGHEVRTFATMTRQLMALADWLAESDVELVVMEATGDYWKPVFYQLEERFTVWLVNARDVKKVPGRKTDVKDAEWLAQLAQHGLVSPSFVPPPPIRRLRDLTRQRVNLVRERVRALHRLESVLEDAGIKMSTVMSRTLTMSGRLMIEALVAGERDPYALADLAVGKARPKIIELREALVGGFDDNHAFLAGQALNHIDYLDARIAAFTRQIEHLTQPQTRQRELLISIPGVSDRIAEVILAETGGDMAQFRTAAALASWAGVAPGNNVSAGKNLSGRTTHGNRWLLGALGDAAAAAARTRNAYLNSYYKRMVKRRGPRRALVAVMHKILTAVWHMLTHDVAYQDLGIDYFLSRPDHVERRKRRLLNELTELGVDTSTILATG

SEQ ID NO: 223748 - protein, 417 aa, unidentified
MSRTLTKKMACVKPGSLQVGVDLGVDRNYVVILTERGERVDRFSFRNDRQGYDYFLSRIGQAKGGEADRSVLVGMEPTNYVWKLLATELEQKQQPYCLVNAFTVKKHREGDQLDRSKDDPRDAFTIADLLRTGKFTQTRLLHGGYAELRGYAKACERLQVQVSRERNLIWAAAKQAFPELQQVFKDLGGLTVRALLRHHACAVQIARLSQVEFIQAVRQDFTGQRIELSGLRRVYQLAPTSVGVRDGLEALQIGLLSCLKVLETLEEQLQVARQLLLEQFLALPEAPWMLSIPGLGALTAALILAELGDPHTFSGSQEWIKLAGTQPTPDSSGHHAATKTPMSHKGRSALRLHLFMACLRLIQFNPTFASRYSYYQHRPQKPLTKMQALGVLMNKLLKILWALIHHQTSFQSLPAAL

SEQ ID NO: 223749 - protein, 399 aa, unidentified
MSALRRVVIGADTHLDTNHLAVLTDTGKPLADDEFPTSPAGYATAMRWAQSFGVIAIAGVEGTSSYGAGLTRVLQAAGIEVAEVSRPDRAARGRRGKSDPLDAYAAARAALAGDRLAVPKDEHTTALRALLSARRSAVKAHTAATNQLHALLVTAPAELRERYRRHHITALVAALAQCRPATQGDPTSAAVLTAAKALAQRVKFLEQQRQDLTAQLDGLVGQINPALRAAYGVGPHTAAQLLVTAGTNPHRLRSEASFAALCGAAPVPASSGTITRHRLSRGGDRAANNALYRIALVRMSSHSQTRDYVERQVTKGRTKKEILRLLKRAIAREVFRLLTRPGPVDDYRDLRAARQAKNLTLAAVAQHFGVPIITISRLERGHQRNDTLANHYRQWLTAA

SEQ ID NO: 223750 - protein, 420 aa, unidentified
MVYLERGYNLKELPWSKIVSNSFLFKEACMILVGVDVAKDKHDCYIMTSEGEVLFKSFTIANNMEGFNQLYEKILSVIDNFDNVKIGLEATGHYSYNILSYLLDKGLTPYVINPLHSNLYRKSLSLRKTKTDKVDSRIIASMLMSDVSLKPYSNTLYHNEELKSLTRYRFTKVQERAKLKISISRLVTILFPELEKLVPTLQMNSIYALLYEFPSAHAISKAHLTRLTNLLNTTSKGHYIKDKAVLIREAVKNSIGSNMPAKSLELKHTIKLIKELTSEINEIEEEIKIIMNKINSPILTIPGIGLSTGAQILAEIGDFKNFSSPDKLLAFAGLSPSTYQSGNMYSSNAKMEKRGSKYLRFALFNAAIYVSYWEPTFSQYLKKKRVEGKHYYVAISHVVKKLVRLIFHLEKTNERYSTVV

SEQ ID NO: 223751 - protein, 377 aa, unidentified
MATTRTVLRDQLTAKPGDLYMSLELGDKHWHISIGGERRSVSHYIVEAGHTEEVADCIAKAAARLHTARVHSCYEAGRDGWWLHRWLTELGVDNIVVDPASIEVNRRARRAKTDRLDADKLLAMLVRHHRGERVWSVLREPSPSDEDARRAHRELQRLTHERIAHTNRISSLLVLHNLRPRIVIGGRDWPVWWNAHREQVPPTLRAELEREAARLKVVKEQVRAIEAARAKELAEGKQPLVAQLVRLRAIGAKGAWVLVKEVFGWRHFANRRELAGSLGLVPTPYASGDSEIEQGISKAGNRRVRALLVELAWSWSRLQPASALTQWFNRRFAGGGKRMRRVGIVALARRLAIALWRYLQTGEIPIGARLKPTGSGI

SEQ ID NO: 223752 - protein, 425 aa, unidentified
MKISQTEQKSNKNGVMDVSVDVHKDMLNFFFEAGGKEYADECANRAATVKARLHAYHRIATAQGMDTLRIICEPTGEYHTKLLRIARTMGFSTCFVNTESVARFRMIETNDTGKTDTKDPRVIRTLGKLGKVITHRILDEKYMRLRKLGRIYDETDKSITSLKCRIDKLLVELFCDYSFRKDFLYARSGLALIRCYRCNPVRILKSGFQAFCVRMRKRAPHIQTQTLKRLWSDAQSSILNEQPEGYLKLLEAHLEQLVDDYLELKQRKDAIVQAMIDCIKSLREEDPRIPPSTPGVINDKNIARLLGETGPLYEFAGWRTVMRYGGLNICMRKSGRYQGQNKISKKGRSLLRKVLQHIVLPLVKKGALYGSYYDRKRQIEKMPGTKAMVCVARHFLKKFYGWYRSGETFSHERFFSCTMQHKAVA

SEQ ID NO: 223753 - protein, 421 aa, unidentified
MRGLRTKRVRTVKEGTLIATVDIGATTNTGYCTCADGRDMKVFKFGNTREGFEKFWHMVVAAQNRFTCTEVVVGYESTGPYAEPLVHYLMDKPANIVQVNPLHTKRLKEVNDNSPGKTDDKDPRVIADILRLGRALSVVVPEGDAAYLRRLNNARERHVGERIALLNQMQQLVFLIFPEFKTVIARMAGKTVRLILKKYTTPEKIGSMDTHVLGEEMRRRSWGKLGMKDAELLIKAARQTVGIKEGVAGIVLDIQHIIAQLEVVERFIAEIESEMALTLERIPCTARLLSIKGLGVISIAGLIGEVGDFSKFRTQSEIMKLAGLDLYEVSSGKRKGEKRITKRGRSLMRKILYFAAIQMIGKHGIMREYCERLIGRGTLKMRALVAVMRKLLRIIHAILRDDRDYVGQYCAPKRRVIKRAA

SEQ ID NO: 223754 - protein, 408 aa, unidentified
MRIIGLDIHRAFAEAVAWEDGKLRRLGRVDMQRDRLEAFAATLSKDDVVVVEATGNAAAVSSVICPHVKRVVIANPKQVRLIAHAKIKTDTIDAGVLAQLYASGFLPEVWIADEPTQALRRQVTRRNQIVRQRSRLKNIIQSILHAHLIPACPHADLCGPKGRVWLADQVLPEDERLAVERHLREFDRLGEDLKVVERDLARSALADESVTRLMTIPGIDLVVALALKAAIGDVGRFDSPQKLVSYLGLNPSVRQSGPGPAYHGRITKQGRGHARGMLVEAAWAAARAPGPLRAFFLRVRARRGQHVAAVATARKLAVLIWHLLRKGESYLWARPALHARKVRDLELKAGHKSARGQKGAAHAYNLRSHREQERRWVEQAETAYARFVAGWNPRGPKARTGTATEERR

SEQ ID NO: 223755 - protein, 315 aa, unidentified
MEAAPVFIGIDVSKAQLDVAERPSGERAVMAHTEESITTLVERLRQRQPTCLVLEATGGLEVPLASALAVAGMPVAVVNPRQVRDFARATGQLAKTDAIDAQTLARFAEAVRPAPRPLPDDAMQAFSALLTRRRQLIEMLVAEQNRMQRAPHPIQQQIQAHVTWLKQQLAALDEDLTHRIQSTPIWREQEDLLRSVPGIGPVVSRTLLAELPELGTLTHKQIAALVGVAPLNRDSGTLRGRRTTWGGRAVVRAALYMSTLVATKHNPVIKVFYQRLRAAGKAPKVALVACMRKLVTILNAIVKHRTPWRLAVQNP

SEQ ID NO: 223756 - protein, 342 aa, unidentified
MGFYCGIDLHAKVSQVAVLDEEGKVLVNRQTPNRIDGILALLAPFAPRIHVAVESTFNWYWLVDGLQAAGCDVHLGHPLKLSWISKAKVKTDRRDAVCLAERLLKNDFPEAYIYPKATRPLRDLVRQRGRLVVARAREYAGIRIRLYREGILDHSRNSAKTITTEELDAMLRHPHVRPLVHQEQARIQLLCAQILQLEGAILAALAGEARYQRLRTLPGVGQALGAVILLETGEVTRFASARHYASYCRLIPGCAESAGKVKAGRGKKQGNAYLKAAYTQAATHAVRTDPKVRALYDRLQARHPGRGAVPIATNVIGHKLALAAYFILKEGTEYHEQLLFGN

SEQ ID NO: 223757 - protein, 420 aa, unidentified
MRNAGIHANSLLEVRRMYNAVGIDVSKGKSTIAVLQPGGTVIRKPFDVSHTSQNLNELADYLSSLDGTTKIVMECTGRYHEPMVKALSEAGLFVSIVNPHLIKNFGNNSLRKVKSDPADARKIARYTLDNWTELRQYSGMDNTRTQLKTLNSQFSFFMKQKVAAKANLIALLDNTYPGVNKLFDSPTREDGSEKWVDYAYSFWHADCVRKIGLKAFTERYKSFCKKHHYIFQQDKPEKLFNASKELVAVFPKEKTYKLLIQQSIQQLNLASEHVERLRREMNELASTLPEYSTVMGIYGVGKTYGPQLIAEIGDVSRFTHREALTAFAGVDPGVDESGQHKSKSNRASKVGSVRLRKTLFQIMTTLLQNAPEADPVYRFPDKKRSQGKPYYVYMTAGANKFLRIYYGKVKECLRNLEQTE

SEQ ID NO: 223758 - protein, 409 aa, unidentified
MLLVGDDWAEDHHDVELMDSAGRVLARARLPEGAAGMARLHAMMGEQLGEDAEAGGVRVGIETDRGLWVMALAAAGYAVFGINPLQVARYRERHGVSGAKSDAADAHTLADMMRTDAHQLRPVAADSPAAQAVKVVARAHKTLIWERTRQVQRLRHQLRDYFPAALEAYPDLAAPGTLELLAKAPDPASAAQLTTAQVSAALKRARRRDITARAAAIRAALRGEQLAQPPAVTAACAAVARALAAVITALNTQIKVMEGQVEAHFLQHPDAEIILSQPGLGPILGARVLGEFGDDPHRYASGKARKNYAATSPITRASGKRKTVMARYVHNDRLRDALDGQAFAALSASPGARAYYDRQRARGLSHRPALRQLANRLVGILHGCLKTRTLYDEATAWPHHASQEIKPAA

SEQ ID NO: 223759 - protein, 405 aa, unidentified
MPYILALDVSMGHIYSVLYKDDTCLFEDEIEHTQRGFHALLEEIQHLPERPLIVFEATGIYSRPVEKFFQDHHFSYCLLNPLEAKKQMEESTLRSWKTDKSDAHRLAQTHLKNQRQPKEVQSNFYLEMRDLARFYQEIEKKITRLRMDLHNCLQLTFPELEQFFSNRLTPYALTLIRLFPHPDFVLASTRTKIKNKLINETRKKISANRAEQKADQIIHYAQCAYPAVEKDSIHCQKTIYYAELLQDLLEQKKALATQMIKKAEGSPCFLLYQTFPGIGALTAALLLGELGDITRFKTHKQLNAFVGIDIRRYHSGKYTGQDRINKRGNPKARKIIFFTIRNMIRQQRAAPNHIVDYYYKLKKQPIPKKDKVATVACMNKLLKCMHAIVRAHTEYDYAYAVSVDH

SEQ ID NO: 223760 - protein, 374 aa, unidentified
MTKLRFIGLDVHADTIAVAVAEPDGDVRSLGAIPNRAESVRKLMKKLGPAESLRACYEAGPTGYVLYWQLTGLGIRCEVVAPTLVPVKPGDRVKTDRRDATKLARCYRAGDLTAVWVPDAAHEALRDLVRAREAAKKDQLRARHRLQKFFLRQGRRPVTKMTAWSSRHLAWVRQVTFEQPAHEATRLDYLHEVDHAADRIVRLERAIDTAVQAAPPTMRAVIDALQAMRGIARISAATIVAEVGTLSRFARAPQFMGYCGMGPREASSGASIRRFGITKTGNAHLRRIAIEAAWAYRHRPTIGSPLRKRQALLNPSILAVAWKAQLRLHQRYRHLLGRGKSSPHVTTAVGRELLGFIWAIGSAVERDHQHAHAA

SEQ ID NO: 223761 - protein, 375 aa, unidentified
MVWNGPAIAAPKRQGVVVDYNVTRIGDRSMKQITTVGLDLAKHVFQVHGAEVGGEPVLARKLRRADVLKFFEKLPPCLVGMEASGGAHYWAREIAALGHEVRLIPPVYVKPFVKRGKTDAADAEAICEAVTRKTMRFVPIKSAEQQAASMVLKTRDLLVRQRTQAINALRSHLSEVGIVEAKGLAKVTTLITIVRDPEEMRLPPAARFALTELAKQIESLDDRIGQFEREIVAEAKRDQDMRRLATIPGIGAIIAASIKALVPDPDGFVSGRHFAAWLGLTPKSHSSGGKERLGKISKMGNATLRSLLIVGATSVLRHTRNNASAPKWLTDLLKRRPYKVAAVALANKMARIAWALLTKGGVYRRNTLTIGAASA

SEQ ID NO: 223762 - protein, 450 aa, unidentified
MQPEVEEIPDAEHELLAARVAAIDVAKASGKVCVRLPGRAGRRVSRVWDVAATSGAVTELAEHLVGQGIEKVTVESTSDYWRIWYYLLEAVELSVQLVNARDVKNVPGRAKTDKLDAVWLAKLTEKGLLRPSFVPPAPIRRLRDYTRLRTDLTHDRSRQVQRLEKLLEDALIKLSAVATDITGVSGRAMVEALIAGQRDPKVLAGLARGRMKTKHSALLAALDSRFDDHHAELARMLLDQIDALTTQIDALSARIDELLTAMPDAQPVDPHPGGPTPGPSTDTVSDAALGAVDRLDEIPGIGPNVAQVILAEVGLDMSRFPTAAHLVSWAKLCPRTIQSGPLTRGGKTGKGNPYLKGALGDAAAAAAKTNTFLGERYRRIVKRRGKLKALVAVARSILVIIWNMLDDPTARFRDLGADYHTTRINTERRTRNYVTQLMAMGYRVTLEPAA

SEQ ID NO: 223763 - protein, 346 aa, unidentified
MKKFFVGIDFSKRKMDVSIVEKDFPERTIAYKQFINNAEGAKKMCEWVEYTTNTSTKLEGEVLFCCEHTGSYCLVVCDYLSENGKYIWLGNPLDIKRSMGLVRGKDDISDSRRIATFAAEKHHKAILYMRPEDSTRALKYLLSIRNTLVGHKKALACQIKENSPKLHNITLLCNIEEKLKQMLDSIIKEIKKIEKMMLDIILSNKEYKNTFDILTSMKGVALINAAAIIVFTDNFKRFSFNSRKICTYWGISPFRNESGDSIRRGTHTSPIRNNWLKAILSEAVLCAIRYEKRMKEYYSRLMAKGKHRNVALNNTKNKLLKTLVAMVRDGKKFDENYVSIPQAYAV

SEQ ID NO: 223764 - protein, 407 aa, unidentified
MISIGIDIAKEKFTVCALEQGSKIIWKPFDVHLNKTKVEEFLNKLESLNEEVKIIMEATGKYHLPILYELKDKGYFVTVVNPLKMKQFCRVLNFRKAKNDNIDAIQIAEYGLMYWKELQEYKVDTENFRTLKELNRSYQHYMDLRINQMNFIDQTINQTFPGIKKLIPHGSSDFSKDKLLDFLEIWWHKNLVLEKPEEKFIEDFKNWAKEKRYHPNANKAKSIYKLAEESISTQPSSSSYIKTSIQEGIELIKHINQILHTILSQMIEIAEPLEEYQEAKKFSGISDKLAVQITAEFGDLSKFKNKKSLISFVGIDSPPYESGNFKADQRKITKRGNAILRKVGYQAMKCMMSAKDPENDIYLYMVKKENDGKAKKVCKFAGLNKFLRTYYAKVMASKQKKMLLKVA

SEQ ID NO: 223765 - protein, 341 aa, unidentified
MANVHVVGLDIAKSVFQLHGLDEAGGTILQKRLTRARLLPFFEKLPPCLVGIEACATSHFWARELAKFGHEVRLMPAQYVKPYVKRQKNDMADAEAIAEAVTRPTMRFVAPKNPQEQSAMMLHKVRLMLNRQLVMLTNAVRAHMAAFGIVAPVGRIGVDRLLEVIEDDIDERLRAAARQCLQMLVAQLKLVKQQILENDRQVLGLARSSDLGHRLMEIPGIGPLVASALVACVPDPSVFRCGRDMAAWMGLVPRQNSSGGKERLGSITKAGNRYLRQMLFTGAMAVIRRAMQSTRRTWLVRLLDRRKPKVAAIALANKNARIAWAMMMHGDRYREPVAVAA

SEQ ID NO: 223766 - protein, 416 aa, unidentified
MPTENYAALIGVDWSDKHHDVALQAANSDEVELSVVTHTPETIHAWVAQLRQRFEGQRVALCTEQKQGALIYALCQYDFIVLYPVNPQTVAKYRRAFTPSRAKDDPTDACILLELLLKHRDKLTAWQPGSSQIRELQKLVEWRRKFVDDGVRLTNRITDVLKGYYPQVLDWFTDKNTLVFCDFLTQYPTLKAAQQEASDQLNQFFLEHRCRYKKTNAKRIEKIKVATPLTNDVGVIEPSQTIVKALALQLRTLLLSIGQFNERIEQLFAQMPDADLFAALPGAGEHLAPRLLLAFGEERSRFTSAQDLMQYAGIAPVTERSGKKDWVHWRWSCPKFLRQSFVEWAEQSRQHSFWAQAFYQAQKRKGKTHQQAIRALAFKWIRIVWRCWQDKKPYDEAKYLLALKKKGSPLVAQLAL

SEQ ID NO: 223767 - protein, 330 aa, unidentified
MNSQILFAGVDVSSETLDIHYNLENGTELTLQVPNSPVGHKEVVQKLGTRCYVMEATGPYYLRFAFVLKASGADVRLENPLVIKRYIQMHMERNKSDKKDASWIFRYALEQKAPVWNPPTEQSLKCNAILASIDLYSRQNTQLSNQIHAFSQLPADTNEIIKGLQKTIDHIDKEMAKLELRLQQILQSWKAEQLKCLTTIPGLGKRATALLIIYTDGFTKINNHRQLIALAGLAPREYSSGSSIRGKRGICKMGNGHLRNVLYMCSMSAIKCNKACKDLYERLKAKGKRGKVALIAVCNKLLKQAFAIATKLQMYQSEYVSKKPEKLLGF

SEQ ID NO: 223768 - protein, 413 aa, unidentified
MDVLHSRCCGLDVHKSSISACILLREAGRVQKHQRRFGAMTQELQELAEWLRQFGVTQVAMESSGVYWKPVWNILEGQFTVVLANAQHIKNVPGRKTDQKDAEWIAQLLQYGLLRASYIPCEIIRDLRDLTRMRASLSQETSRISSRIQKVLEDANVKLASVATNVLGKSGRAMLEDIITGNDDPEHLASLALGHLRVKIPQLRLALEGKIRSHHRFLLRRLLDQIQFLEHEIALLDERLEDIGRQRPDLAQAVARWDTIPGIDQVAAWALLAEIGDNMAQFPTAEHLASWVALCPGNHESAGKRLRGTTRQGSTWLGRMACQCAWAAARTKNTYLSSQFRRLAARRGKKRAIIAVAHTLIVIGYHLQKKQSNYEDLGGNYFDRIHSDGLKRYLVKRLQQLGHKVTLEPMEAA

SEQ ID NO: 223769 - protein, 343 aa, unidentified
MDSYVGLDVSLREVSVCVVDEAGSIQCERTVAADPDVIAALLDAHAPTVRRVGLESGPTSVWLWRELAERGLPVICIDARHAKAALSMQINKSDRNDAAGIARIMQTGWYRQVQVKSPHSHAIRGLLNSRALLVKVQRDLENQVRGLLKSVGLIIGRAKDGVFGTRTRQLLAAHADLAAIALPLLEAREAIHQQLTRLERRVRQLAKEHKQTSAFMTVPGVGPMTALAFLATVDDPTRFRRARAVGAYVGLTPRRYASGEVDWTGRISKCGDTMLRTYLFEAAGVLLTRVQKWCALKAWGLRLAKRSGMKKARTAVARKLAVILLRMWRDGTQFHWTAAPAAT

SEQ ID NO: 223770 - protein, 346 aa, unidentified
MEHYVGLDVSLKLTAICIVDRTGKIEREGVVASDPETIAAFIKSHAPHVARVGLETGATSTWLWTELNKLGLPVICIDARHAKAALKLQINKSDRNDAVGIARIMQCGWYKEVRVKDLDSHAIKALLVSRALLVKIKRDIENQVRGLLKNLGLVIGQAKMNVFAVRAAELADARPELAGAVEPLLKAREAIERQIADLDRKVMRLARNVAQVRQFMTAPGVGPITALCFLATIDDPTRFRRSRSVGAYVGLTTRRYASGETDWTGRISKCGDKMLRTYLYEAANVLLTRVAKWSALKAWGIRLAKRSGLRKAKVAVARKLAVILHRMWIEGSEFKWSSKEAANQPA

SEQ ID NO: 223771 - protein, 415 aa, unidentified
MDDFAAIIGIDWADKKHDICELPEGSRDYQWSVISSKPDQLHAWAMALEKRYPDQLVAVACELKKGPLIYALSQYRNLVLFPINPSSLAKYRRAFFLSGAKDDPGDAFLQTEMLEKHMDRLKPIEPESAEVRALAQLLEYRRKLVQDRVDLTNGISATLKNYYPQVLDWFNEKDTHIFCDFVIKWPSLPQAKRARKNTMIEFFNAHNVRYRQVNLRRIDAIKAAVPLTDDAAIIEPNLMLVEILMPQLKQLLDGIKRLDLEIRHRYQSLDDRYLFDNLPGAGAQLAPRLLVAFGSNRARYQSASELQKYSGVAPVIETSGQKRWTHWRYSCPTFLRQTFVEWAGLTVRYSFWARAYYQQQEARGKPHNTIIRALAFKWIRILYRCWQDRKPYDESKYLEALRRRHSPLLKFAVNA

SEQ ID NO: 223772 - protein, 476 aa, unidentified
MAIEKKCGGDASIGGTSEGVEVSQPLLLEVIPMISKAYRATRVNEVDWDRLARGKEGVDIALGVDVGKHTLWPVCRWADGRFERPWRVKNPEEIPALLALTQRMSAGRKLVVAMESSGTYGDALRQALADAQIDLVRVSNKASHDYAEVFDGVPSQHDGKDAAVIAELAALGKAQPWAYQPASPWEQELTYWVEWMVAHRQILTTWQGRLEGLLARHWPEATEVLKLSSGTLLRVLKYSGDPKALAADPEAAQRLARWGRAFLSPEKIEHLLAGARSSVGVRVGDWQRRQIQDYAEHALAARREAERAQRHLRGLAKGHAVLQAQGKVVGVPTACVLWAGVGDPRKYHAAAAYRKAMGLNLVERSSGQYQGRLRISKRGSARTRQWLYFAALRLVQHCGVRPWYEAKKARDEDDARRVIMAVMRELAMALYHVGVRNEAFQPRRLFGQVCRRGGHSAGPRSGARNQPEVEGVSARG

SEQ ID NO: 223773 - protein, 322 aa, unidentified
MMSDSVTVGIDVSKLTLDVHVSPAQLHQTVSNNESGFAELKTLLSMQQVSLVLLESTGGYEDAVVCFLQSLGYDVSVINPRQARDFARSMGRLAKTDRIDAELLAQLASVIHARPDRERFVKKITDDRRRKLACMVARRRQVVNMISTEQQRKSAASNYSTDSINKVLSFLRSELKSIDADISLHVRSHFADISGLLASFKGIGPATIGVLLGEVPELGRLNRRQISALIGLAPFNRDSGFMRGRRTVWGGRAMVRNALYMPTLSAVRFNPAIRVFYMRLISQGKPRKLAQVAAMRKLLCIINAMLSSGTMFNPALHPGPGA

SEQ ID NO: 223774 - protein, 488 aa, unidentified
MKVVYQTCCGVDVHKSFLVATIIKTTSGVEPSYQKKRFSTFNNSILQFKEWLVKNQCRDVCMESTGKYWVPVFNLLEDEINITIANPKWVKAVKGNKDDTKDSKWIGDLFRLGLVPGSYIPCKPIRILREFTRNRYKLTSCRTSEKNRYQNALTVCNVALDSVVFDIFGKSATSVIDYLIEQPDNSINHEEIASRLLRSLKKKSDSVIESIEGYQMTDSQKYRMRLIRAHLDYITSTINDIDTMLNSLIAPYENAVQLLCTIPGVDRNSAITVISEIGTDMTPFSNSKRLCCWAGLTPGNNESAGKKKSVRITRAGVYLKPALVQVAHAAVKSDKSPYYKQKYERIMKRRGKKRAIIAIARMILTAIYQMLSTGEAWNPTDLFKIDMPEPMKEKQKEKAIKQAMKLLIREGKISESQLASLLFKTIVFFCAAIRQLIKVRHLLAVLYFLSQYPLVCCYRDLYVDELQTELGKCCIYFSESVPPDIALP

SEQ ID NO: 223775 - protein, 448 aa, unidentified
MFTMHYKRLLTLIDSVSSYLSVGLDVGADFTWMSIALPNGSFIGKPFKIVHSDPGSRDLAVAKIKEAQETYSLKSRCFLESTGIYHIPLLCFLRDKGFDCSVINPIITKNSTNINIRKLHNDKFDSKKAALVGLNVSLKTSIIPDDSVVDLRNLVRDYYYFKDLQSAVALKLTAELKVSFPAYAKVFSKVTTQSSLKLLSSYPLAEDMLAASKDDIVKIIRSTARFGEAYALRKYDTIIAAAQDAAVFGRALPSNAVRIRLYIDTYQEYQKHLDALLKALHETVDRLQDTLIYDQICLLQSLRGIGFLSAVVLIAEMGDFKLFSSPKKLYAYFGLDPAVKQSGKLNGDKVHMSKRGSSLARRVLHMVALNNVKIDKGSGTPVNPVVYDYYTRKCSGKKKTVAMGAVMHKICNIIFAMLRDNKPFEVITPEEHCRRFAAEHPDKIRKAA

SEQ ID NO: 223776 - protein, 310 aa, unidentified
MDATVVGIDVSKKQLDVYVSPAGDRFVIARNAEGLDQLIAKLSPLGADAVAVEATGGFETVVAASLGAAGLPVIVVNPAQVRAFANALGKRAKSDPIDAEVIARFVAATKPQIRPLPDEETRVLASLVARRRQIIQMIVAEKNREKQLPSRVLRKSAARLIKALEKELNVLDQGIDDSVRGSPLWREKEDLLQSVPGVGKIVARTLLAEMPELGNLDRREAAALAGLAPWTRQSGVWRGRSFISGGRTSVRTALFMAAMVAIRHNPVLKPFYERLVAAGKPKMVALIAVARRLLTILNAILRDKTPWQTA

SEQ ID NO: 223777 - protein, 323 aa, unidentified
MGTPAPETFVGIDVSKAEPAVAVGDDGPAFTTANTPEGRAELVARLLPLRPRRVAMEATGRYGEAAAAALAAAGLPVDVVNPKQAAAFARAMGRLAKTDAIDARSPAAFARALPGEPRPLPDAAARELEALLARRRQLVQMASMEKNRLEAAASRRVARDIEAHLRWLGSHLKDVDRELGEKIRSSPAWREKDDLLRDVPGIGPVLSRTLLAALPELGRLTRGQVSALAGLAPMAAESGGWKGRRHIQGGRAAVRSALYMAALAARRFNPALRAFADRLEAAGKPAKVVLIAVARKLLTIANALLRDMKPWDPGRNATTPDPA

SEQ ID NO: 223778 - protein, 345 aa, unidentified
MEEISVIGIDLAKHVFQLSAVSPAGEEVWKKRLKRAAFMTFMDEKAPRCLIGMEACGGAHYWGRWLLARGFRVKLMAAKPVKAYRQGSHKNDDRDARACAEAASRRHVGSVRVKSERAQAMQAVVRIRTRRIRQMVQTANQLRSLLYEFGIVVPKGHKRMLDSIAKVKEAHSLPAEIIGFVESLCHELVEQGRGVKQATEELTARIKDEESCVRLMTVPNLGPINAASLSVALEMPSAFANARAFAAYLRLVPRQSKSADSETMLGVGRQNANETRRHLVLAAQSLFNRLTRMKELPEDRFLLWAHALLKRKKRNVAAVAVAAKLARIAWAVTAKEQPYAPRLVG

SEQ ID NO: 223779 - protein, 430 aa, unidentified
MIPAVIERCAGIDVGKTLLTVCLLTGPADGEPKVETRKFGTFHADLEALRRWLSEEKCTQAVMESTGCYWKPVFNILETSVTVILANGQDVKGRKGHKTDWNDCRWLAHLLRHGLVRASFIPSRPVRELRDLTRRRKQVLSVAASERNRVQKVLEEANVKIGSVLTDVFGVSGQLMLDALLKGKATVEEIANMARHTARRKIPELIQSLEGHRLNDHYRLLLRLSLDHLAFLEQQLQQIDTEILMRVQEPEFLQAFELLQAIPGIKQDGAASILAEIGPRMAQFPSEAHLSSWAGVCPGNNCTGGKAKPAKIPRGNRWLRTILVECAWAASKKKNCFLKERFWRLAARGKKRALVAIAHAILVLVYRSLSTGQMYEERGAIELNQRKRQRLIRHHVRRLGRLGIAISSLRLAERGGGDPGVLTENSAPTA

SEQ ID NO: 223780 - protein, 416 aa, unidentified
MDAIVERCAGLDVHLDTVVACVLYGKLDIKPKKEVKTFSTTTKGLLELLDFINQKECTHVAMESTGIYWKPVWNILESGAFDLIVANAKKIKNVPGRKTDVKDAEWIASLLRCGLIEKSFVPPERIRDLRDLTRLRKELLGEVNRNKNRIHKVLQDANIKISSVLSDVFGETGKSILNQIIGNQCITEEFIYSLYEGRGKSKLKSTPMEMYEALNGKIRWHHVILLGMHNSNIVFLEKQINELEKEIDILLQKERDSLELLETIPGISKISASSIIAEIGTSMDVFKTEKHISSWAGLCPKNNESAGKKKRSGIKSGNNWLRSMLCECAWSATKKKDSRFKNKYWSMVPRMGRKKALIAIANMMLRLIYHLLKTKSTYKELEIQYFIDKDKRREDRIIKELKSKGYLVEKDSLQMA

SEQ ID NO: 223781 - protein, 305 aa, unidentified
MIIAPGYIGIDVSKDHLDVFDGRAHRISNTAEAIAAWLADLIAPRLVLFEATGRYDRQLQQQLHSAGIGLVRVNPLHARAFARATGQLAKTDAIDARLLAAMAQALTPAPQPPDDPERLELAELHRRRAQLVSCRQQERTRLHTAIPSIAPSIVSHLDWLDTLIKQLEQQIETLIRRSAALARAACLLRSIPGIGPVNAAALIALMPELGQRSGKTIAALGGLAPINRDSGQFRGQRSIAGGRAEVRRLLYMAAVTASRSNSRFAETYKRLTANGKAAKLALIAVARKLLLAANAILKTGQLFKA

SEQ ID NO: 223782 - protein, 408 aa, unidentified
MQVLYPRCAGLDVHKDTVVAHVRCVSEPIHHETRSFATTTSGLLALAEWLAEHACTHVAMEATGVYWRPVWHVLEGQVELVLANAQHIKNVPGRKTDVSDAMWIADLLAHGLIRSSFVPPTPIQELRDLTRTRKQLVREISQHSLRIQKVLEDANLKLGSVLSEVLGVSGRAMLGAIIEGESDPHKLAGLAQGTARRKHDALVEALHGRIRPHHCTLLRLHLNLIVTLEHTVGEIDAVVGKCLEPIHQRARLLTTMPGISDLGAEVIVAEIGIDMTRFATAGHLVSWAGLCPRNDESAGKRRSTRLRKGGTWLKTTLVTAAWAAVRTKASYLRTQFTRIRARRGAKKAIIAVAASMLTAAYFMLRDGVPYRDLGPSHLDQQHRDKTIRRLIRRLQDLGYNLPPNAQPA

SEQ ID NO: 223783 - protein, 332 aa, unidentified
MNMNLQGGAAQRAQRPNAGIDVSKQHLDACWGTEAQRLGNDASGWNELIAKLKASEVDLVVLEATGGYERGLVLALQDAGIAVARVNPRQARDFAKSLGVLAKTDGLDARTLRDFADVLARHKDRHKYITPVIDEQRKLLGALMTRRRQLVDMRVAETSRLEHADARAAKSIRSVLKLLERQLAEIDRDIDDHMERHFKAQRKLLDSVKGVGAVTTLTLLSALPELGTLGRKPIAKLVGIAPLADDSGKRRGQRRIWGGRAEVRAALYMATLSAMRYNPVIAAYYQRLLAAGKPKKVAMVACMRKLLTILNAMLRDGAEWDAVKHLQVPPNA

SEQ ID NO: 223784 - protein, 322 aa, unidentified
MSPYMQGREQKMENYVGIDISKRYFDLHCLPEGKQYRFENNQKGIRQCLKLLADIKPKLVVMESTGGYEIALACELQVSGLPVAVVNPRQIRDFARAIGQIAKTDKIDAKVIAQFACMVEPAAKQVMDGKARQLKSLVARRDQLTDMHVAESNRMEHAVDRSIAHSIKAIVAVIERQIADIDKQIAEHINHDQQLRRKAEIVDSAPSIGSATASMLVTLLPEIGTLNRRQIAALVGVAPMNRDSGVFRGKRMTGGGRGRVRAGLFMPTLVAIQHNPVIRQFYQRLLSMGKTKMTAVIAAMRKLLTILNTMVAKNELWNPKIA

SEQ ID NO: 223785 - protein, 359 aa, unidentified
MQTKSEITNHPAFFLGIDVGKADLFCHLIGPDEALSERFDNTVKGIISLLVWLSKASASKTFVACLEQTGHYGDAIAQALYDTQSTGIHVVNPQRIKAFGMQKLRRNKSDTADAKLIARFIKSEHLELRPWQPKSITQKRITALSRFADSLTQDAARLKTMLESQTEKTIIASLKRQIKGAQKEIKALREEIAKLVKEDPQLLTKNKLIQSIPGLGVIASQIVIAELPNLEQFDDARQLAAWAGLTPRHHSSGTSGKTQTPITKIGSVHLRRGLFMPAMTARVYNPLLKEFGDRLQANGKTPKQVIIAIMRKLLHQIYGILKSGMPYNPNKRGFQNALAIAPSTPSKMPLPPALKACKS

SEQ ID NO: 223786 - protein, 345 aa, unidentified
MSHFVGLDVSQKMTAICVVDKDGRRIWRGQCPSVPEQISVALRRYAGDNARIGIETGAMTPWIVHELRNLGFEVICLDARHARAALKMQINKNDQNDAEGLAQIVRTGWYRSVHVKSFDSHRARAILGARTQLVGMTTRLSNHIRGVLKTFGLLPGAMRGLPFDRKVEVLLEGRSDVAPIVRPMLVAWRQLRVQIAAFDKAIRAMVRMSGASRLLMSVPGVGLLSALAYVSTVEDPSRFARSRSVGAHLGLTPRQYQSGEVDRSGRISRCGDTLTRTLLYEAAGVILTRVKKASGLRDWAAAIAKRSGPGKARVALARKLSVILHSIWRSGEPFRWSEPKHAVVA

SEQ ID NO: 223787 - protein, 402 aa, unidentified
MNSVGIDISKGRSTVAVMRPFGEVVISPFEVHHTDSELSALARRLKSLNGETRVVMEATGNYHAPVAKLLHDAGLYVSVVNAKLVHGYGNNELRHVKTDKKDAVKLANYGLDRWLTLPRYVPEEGARLLLKNCYRQYRQYSKVQTVLKNNLISLLDTVFPNVNRLFSSPVRGDGSEKWVDFVAEFWHCRCVTEKSEKAFTNKYQRWCKTHGYNFSEAKAHTIHAKASGHIGIMPKSETTKLLVEQAVVQLRTTSTTLTALKREMLTLAAQLPEYPAVMGMFGVGPTLGPQLIAEIGDVRRFYSKKALVAYAGLDAPPNDSGDVTGKHKSMSKIGASSLRRTLFLVMSVYLQNAPLDEPIYQFMDRKRAEGKPYRVYMMASANKFLRIYYATVKAYLESLEQV

SEQ ID NO: 223788 - protein, 339 aa, unidentified
MKLHCGLDLHSNNTYVGIIDQNGKRVVRTKLKNIPENIVQFLDPYKEDLASIVVESTYNWYWLVDLLMDEKYKVHLANPSAIQKYSGLKHSDDTDDAFWLAEMRRLGILPEGYIYPKAERPIRDLLRKRGHLVKLRTSLIISLQNIISRNCGVKLSANDIKVIQEDRVAPFLSDQEELFLAGAVSKDAIDFLGGKIRYIETEVRNRSRLKEPYTLLRTMPGVGNILSLTIMLETGPISRFSKVGDYVSYCRKVPSLWTSNGKKKGKGNQKNGNRYLAWAFSEASELSRRTDEKARAYYNRKRQKTNLMVAHAALAHKLARAAYYIMKDQVPFMPEKLFR

SEQ ID NO: 223789 - protein, 405 aa, unidentified
MVPNSVNTFSKENYMIYTGIDVAKDKHDCFITNSDGEILFKAFTIPNNRDGFDELYQKIKSVTDDLTKVKVGLEATGHYSYNILGYLLDKGLTTFVINPLHTNLYRKSLSLRKTKTDKVDAHTIATMLMSEVNLKSYSDTSYHNEELKSLTRYRFDKVKERAKLKSSISRLVTILFPELEKLVPTLHMASIYTLLSEFPSASSIADSHLTRLTNLLSISSKGHYRKDTAILFREAARTSIGSPMPAKSLELKHTIKLIQEITTEINEIEAEIKSIMDSIHSPILSIPGISYRMGAMIIAEIGDFSKFDSPDKILAYAGLSPTTYQSGQLDSSHSRMEKRGSKYLRYALYNATKYVCHWDPNFAKYLDKKRSEGKHYNVALSHAAKKLVRVIYQLERSGQIFMKAS

SEQ ID NO: 223790 - protein, 337 aa, unidentified
MNKITLIAIDTAKSVFHMVGIDRHGKYVWRKQVTRRKLVSTLAQLEPCKVVLEACAASHHWARQINACGHDARLIAPQHVKPYRRGQKNDYRDAEAIISASLSPGIHFVGIKTTGQQAEQALHRVRSRLLSHCNAAANELRGLLGEYGYAFAKGHKALRTGALAFIDSGQAEALGLVELITDVLEEMVHLEQRLQHYERQIEQRVKVDAVSSRMREELSGVGVLSASALRVKVADARDFGDGRNFAAYLGMAPGHRGTGGKVKIGKIRRNHDRYLRQLLIHGARSALRHLGDKQDAQSRWLRALVERRGFNVACVALAHKNARQAWAILAKEQALQS

SEQ ID NO: 223791 - protein, 347 aa, unidentified
MRFYTKQHKAYCGIDLHARSMYVCILSQDGEILLHRNMKPSPETLLKAIAPYREDLVVAVECIFTWYWLADLCAQEQIPFVLGHALYMKAIHGGKAKNDKIDAQKIAVLLRGGMRPQAYVYPAEMRATRDLLRRRLHLTRQRAELLTHVQQTNWQYNLPEIGKKLAYKANRDGVAERFPDPAVQKSVEVDLALIDYYDQLLSDVELTIVQTAKQHHAQTLYRLQSVPGIGKILSLVLLYEIHDITRFPRVQDFVSYCRLVKCAKESAGKRDGTSGAKIGNTYLKWAFSEAAVLFLRHNPAAQKYLARLEPKHGKGKALTVLAHKLARAVYYMLKRDTVFDMQKFLNG

SEQ ID NO: 223792 - protein, 345 aa, unidentified
MELHTIGIDLGKTVFHLVGLNRRGEVVVRKKFSRRHLLHFSANLQVELIGMEACGGAHFLGRALREQGHEVRLMPAQYVKPYVKTNKSDFIDAEAIAEAVARPTMRFVPIKTDDQLDMQSLHRVRERWVMRRTAVVNQIRGLLLERGITLRKGRRHVDAALPGILEDADSKLSGALRMLLAQLKLELDQMAMRIDEADEVLNKTAHENEACQRLVTIPGIGPVTATALIAAIGNGAAFHKGREFAAWMGVVPREHSTGGKQKLLGISKHGNSYLRKLFIQGARAVLQQRAKQAPALSTWLTQLTGRTHHNVAAVALANKLARIAWAVLAKEERYQPQALTSLEAA

SEQ ID NO: 223793 - protein, 347 aa, unidentified
MRFYTQQHPFYCGIDLHARTMYLCILDQAGETLLHRNMPATPEALLKAITPYRDQIVLAAECMFTWYWLADLCADHGIPFVLGHALYMKAIHGGKAKNDQIDAHKIAVLLRGGMLPQAYVYPAEMRATRDLLRRRMHLARKRGELLAHVHHTNSQYHLPAIGTKIAYKANRDGVAERFADPAVQKSIEVDLALITSYDALLRDVELTIVKTAKHHDAQTLYLLQTVPGIGKILSLVLLYEIHDIERFPRVQDFASYCRLVKCAKESAGKRSGTSGSKIGHAHLTWAFSEAAVLFLRDHPAAQKFLARLEHKQSKGKALTILAHTLARAVYYLLKRQTAFDLDTFLRG

SEQ ID NO: 223794 - protein, 416 aa, unidentified
MDTMYERCCGLDIHKKTIEACFRSGKKKTHMSFGTTSAELRKLTMWLVENDCQSVAMESTGSYWKPIFNILELSGTDMKIIVVNARHMKNVPGRKTDVNDAEWIAELLQYGLLRPSFIPDREQRELRELSRYRKSLVEERAREINRLQKMLEGGNIKLTSVVSEVTGYSSRRLLDRLLRSDEPMTEDVISGLVHTSLAGKSKELETALDGLLSELQKELLIKVLDHIDDMSRRIADLDDFCRKQMKKYEDALDKLDEIPGIARRTAETILIETGLDMSRFPTAKHFARWAGLAPGNNESAGKRSSGRTTKGNPTLKSTLIQSAKVAARKKDSFFKARYQKIAAKRGANRASVAVAHSMLIAIYHILKSGERFKDLGEDYYNQFNKEKKKKYYLKKLTKLGVNLKEATLSISIQAAT

SEQ ID NO: 223795 - protein, 344 aa, unidentified
MDHFAGLDVSVKETSVCIVDETGKIVREVKVASEPEALLAILKNPSYHFKRIGLEAGPLSQWLFSALAEAELPVVCVETRHMQAVLKAQINKTDRNDARGIAQMMRVGLYRPVHVKTLRSQKLRMLLTHRKLLLSKAIDIENDLRGTLRNFGLKVGMVGTVKFEARIKELVENLPDLAVLVDPLLVVRRVLREQIEILHRRLLTIVRDDEVCRRLMTVPGVGPVVALTYRATVDVPARFRKSKSVGAVFGLTCSKYQSGEIDRSGRISRCGDEMMRVMLYEAAQVMLTRTNKWSWLKAWAMKIARHRGMKKAIVALARRLAVIMHRIWVDGTEFRWTREQAVAA

SEQ ID NO: 223796 - protein, 407 aa, unidentified
MNPLFVGIDVSSKNNVAYLMKPDGSKHSSFSVQNNLGGAKLLSERIVSALGSMQLERVVIGLEATSIYGDSLVYALREDGSLGRFQRKIHVLNPKQVRKFKDAYPDLPKNDWVDAFVIADHLRFGRIAKEGYMDDYRYQALRTLTRARFDVIQNLTREKQRFANYLFLKCSGMAQDKDIQNTSATTIALMERFETVDDLANADLEELTAFVTETGRGRFADPAATAKAVQAAARGSYRLPKTVNDTVNQAMSVSIASMRALKEQIKVLEKAIEQQFEIIPNTLTSIPGIGKVYSAGIIAEIGDIHRFNSQASVAKFAGLVWHKNQSGEFEAEHSQMIKSGNRYLRYYLLEAANSVRRCDSEFRRYYDLKYHEVNKYQHKRALALTARKLVRLVFRLLDNRLYIPPES

SEQ ID NO: 223797 - protein, 456 aa, unidentified
MGRARARKVSAQLVEDEDYRLRYERVAGIDVAKAKADVCTRLPPAREGGRRGSRVEEVPATAREVLALAGRLLADRVELVVMEATSDYWRIWFYLLEGAGLRVQLVNSRHARQLAGRPKTDQKDAQWIARLAEMGLLRPSFVPPPEIRALRDLTRARLALVRDRTREWQRLEKLLEGALVKLSSVVHSMSRTKTARDILEAIASGERDPGTLAALAHGRVTGGRAAVRQALEGMQPGSHHSMLIRVHLDHITVLDRAVAAVEDEIEAALDAIPAARGADADGVASPAPGPDAAALAAVGRLAEIPGVSPDLARAIIAETGLDMTRFPTPAHLAAWAGLAPVARQSGPRARKPAKGQGDAYLKGYCTQAALGASRTATFLGERFRRLSRRIGGVRAQCAAGRSILVIIWHLLSDPGARFRDLGPGWHERKADRDRKIRSHLRQLRALGLDVTITPAA

SEQ ID NO: 223798 - protein, 456 aa, unidentified
MCLEDRPLLEPNAAGIDIGAREIFVAVPPDRDEDPVRVFATFTEDLEEMARWLVSCGITTVAMESTGVYWIPLYDVLEQHGVRPCLVDARNMKNVPGRRTDWHECQWLQYLHSVGLLRAAFRPESDVCAVRALMRHRSDLAEMSHQHIQHMHKALTQMNVQIHHVISDITGSTGMAIVDAILGGQRDPAELAKLRDPHIRASAETIRKSLVGNWRPEHLFTLQQSQEIYRHYQEQITACDEEIEKWVLRFPPRVDPETRPLPPDRKKKLRRRNRRNLKQSADAKPLFDTRTESYKLFGVDVTQIPGLLLMVFRLFSEVGRDMSRWPTAAHFVSWLALCPDNDISGGRVLWKGRRKVKNQAGQLFRLAAYGLHHDQTPMGDYLRRMKTKLGPAAATTATAHKIAIIFYTIVKNQVEYDATLWAARDAERDKRIEAKLKRQAQQRGYKLVPIEEEPAA

SEQ ID NO: 223799 - protein, 466 aa, unidentified
MLGIFPARDHRCNAAHERRRSIGLAVIPLVRDRDARADVRPDIKRCLELGAVAGFTTGQMEVERVAVEIGLEVDFCREAAARAAERLVLLPPCILPLPDAKHPAIVSMDGSPQPPRVREPEQKRGAPSIGSIGNPNSRLGRKPSPHSQGRVMEHLPAAPSFVGIDVSKDRLDVHILPTGQTLVVQRNEKGFEDLISELRKLAPALIALEATGGLEVTVAAALASANLPVAVVNPRQIRDFARAVGRLAKTDALDAQAIALFAERVRPEPRPLADADSQSLAELVARRRQVVEMIGMETNRLHQARNPRIQRMLRATLKTLTAQLAQLDRDIDDLIKRSSLWRDADDLLTSVPGVGDVTAHTLIADLPELGQLDRRRVAALVGVAPVNRDSGQLRGKRTIAGGRIGVRNTFYMATLSAIQWNPVISTHYHSLVNRGRPKKIALVACMRRLLGILNAIMRTKTPWQCA

SEQ ID NO: 223800 - protein, 414 aa, unidentified
MSYKIAGIDVHKKVLMVVVIDASTPEEKPDRRRFATMPSDLQRLSTWLRAQGVEEAVMESTAQYWRSVWLELEPYMRLQLAQAFSNRAPRGRKHAFKDAERLVRRLIANELILSFVPDGEQRTWRSMTRMKVQLTRDRVRLQSQMECLLEEMRIKLSIVVSDLLGASGLRILHALAEGETDPKQLALLGDDGLKCSEEQLVDALTGRAQPMHRQMLALQLERLQLIDGQIAKLNGLIAQAMKPHQDAVIRLAEVPGLGVDSAQQVIAEVGVKASTFPSAGDFASWVGTCPGKDESAEENHSSRSAKGNKYLRRVLNQAAHAAVKKNGSHFQAVFRRLLPRLGYQSAIWAIAHRLCRVVWKILHEGVRFIEQGSQADPKVRKQRARILARALRKLGYDVAITPINPATTEPAIQM

SEQ ID NO: 223801 - protein, 354 aa, unidentified
MPATAQTAIAAIGIDIGKNSFHVVGQDTRGQIVLRQKWSRHQVEARFANMPPCLIGMEACVGAHHLSRRLKTLGHDARLMPAKYVRPYSKGQKNDFRDAEAIAEAVQRPTMKFVATKTADQLDLQALHRVRERLVSQRTGIVNQIRAFLLERGIAVRQGQRFLRAELPRILATPPDVLSPRMLRIIEDLAGDWRRLDERVEGLSNEIEAIARQDAGCERLMSVPGMGPMISSAMVAAIGAGDVFTKGRDFAAWLGLVPKQISTGDRTILGKISRRGNRYLRVLFVQAAWVVLIKPKIWERHGLKPWIEAARKRLHHNVLAIALANKLARIAWSVLARGRAFEARKMDQAVNQSA

SEQ ID NO: 223802 - protein, 407 aa, unidentified
MSQDYAVFCGLDVGKEAQHATALTPDGERVFDAPMPQGEAELRELFTDLSEHGSVLVIVDQPNTIGALPVAVARETGCEVAYLPGLAMRRMANLHPGTAKTDARDAYVIADAGRVMPHALRPVDVGEEALAELTVLVGFDDDLAAEATRLTNRIRGLLTQVHPALERVLGPKVGQKATLALLAKFGGPEGFKQAGKRRLLTVARKANPRGAEELVEAIWIALGEQTVVVPGMKAADQVLPKLAASLTDTLDQRAQIAAQVEEVLDAHLPHSLSTGTPLLAGVLTSMPGVGVRSAARILLEVGDGSTFPTSGHLAAYAGLAPVTRRSGTSIKGEFPARSGNKHLKRAFFLSAFAALRADPISRAYYDKKRAQGKKHNAALICLARRRCDVLHAMLRNGAYYDPPAQAA

SEQ ID NO: 223803 - protein, 421 aa, unidentified
MPDGGDQPADRDTVAVRAHGPEHRGVDPHKLSATIEVVDDRETVWATGRFGTDKVGYAAMRKHVQAWPERVWAVEGSNGAGRPLAQRLLADGEHVVDVPAKLSARARLFDTGHNRKTDAHDAHAVAAVAVRTRGLRVLSYDEELEALRMLADRREELTRQRVQTVNRLHRLLAELTPGRAKKDITTLQAKAILAGVRPRDMAGKTRRRLAAEQLAELVAVEKKIKALTAELKQMVKASGSGLMDLRGVGPVVAARVLADVGDVARFADRNRFASWTGTAPIEASSGEIVRHRLSRAGNRRMNHMIHIAATTQIRLDTLGRAYYRRKLAAGKTRAEAMRCLKRRISDALYRQLLADARAVPAAGLDAGPGGHRGASHEYSAAGSHPHTDTSDQPLPGPAPTTLPAPSPVRKTNTASHLEPAS

SEQ ID NO: 223804 - protein, 323 aa, unidentified
MFYLGVDVAKKKLDCMLLDTSSGKMKSKSVPNTPAGFAELVEWLKKNKAVEPHIVMEPTGMYHEAAALALADAGLVVSLVNPAQLRAFAQGLGIKNKTDKEDSAVLARFGEAQNPAPWQPPSPSARRLKALLTRRDAVADDLQRERNRQEANDFSSVPEAVSDSIKESIAFLEAELKRLEKMIAKHINDDPDLRNKKKLLETIPGVGPRVATHMTTLFAGRTFERAEQLAAYLGLVPVMWESGSSVRGRPHMSKAGPAYLRKVLYLPAVGARRWNPHIKALNDRLLAKGKSKMAAIGAAMRKLAHLCFGVINSGKPYDPKFAM

SEQ ID NO: 223805 - protein, 353 aa, unidentified
MSLFVGIDVSSSDFKVRILDERGNEPVKKLRALNDQPGCEQVTRYLSEACAKENEDRLVIGLEATSVYSWPLQMFLAEDPCLAPLQPQIYSFNPKVVANFKKAYVDLPKNDWIDAWVIAERLRFGRLPEGSQVDFRYLPLQRLTRFRCHMIEMISREKNYFLTNLFLKFSTLAQGTVFSNTFGATSESLTLEFFSPEEVAARPLDELIDFLMEKGKSHFEDPEAKARELKEAARKAHRLRGSLLQPINLILATSIETIHTLEKQVKKIDKAIEAEIRHFSNTLITVPGIGPVLSAGIIAEIGDIRRFPNEGALAKFIGLTWRSHQSGDFTADDTPLTRTGNTYLRSYIIQAAN

SEQ ID NO: 223806 - protein, 486 aa, unidentified
MNSIVLTANVQPNLDVNYIGMDVHSDNVVVCVRRNTINSSGQLVGKTIKTKKVVIKNSQEPLVELLSKYADGQQHIMTAESTFNWYWLADIAEDHGWNFPLADPCTVSQANIKAANDETDAEYLADRLRTGSLKSTSVLPRQLRGVRDLMRHRLRVMQEVSDKKVRLSNLYHNHCAHPMHGKLLAALQDAYDEINIDAVLESGICNNGSELIIGDLLTGLREAETRLAKIEAAVYARIDEIDSYKAERMLLKTSMKGCGDVLSAIIVTEIGDISRFRTMGEFVSYCRLAPTSKLSNGKSKGQGNAKNGNAYLSWALTELATLMARFNEPIRRYLERKQEKTGLRVVAVRALAAKLARCVYQVLRKKESFDLGLAFGSKPTHGQMTAAAEAAQTPPEPALPPVPAVAGEHHCPAEESDAPIVVKEPVPVKSKRSTRKKAVSAASSEPAVAAEGRQTARKADRVKARCALTATPPSCAGTSCVKSRRE

SEQ ID NO: 223807 - protein, 371 aa, unidentified
MNTIVYVGMDVHKESYTLCCYSYDTDKVEYKQTVPADYKLILKYMEQVRKRYEGEVSFVCGYEAGCLGYSLYHQLKDHAVDCKILAPTTMAITNTSHVKTDKRDAANIARCLAFHTYSEVYVPDDEDNAVKEYIRMRDNQKQMLKKIKQQILAFVLRSGKKFDGGKTYWTIAHLKWLRSLDLEGLDKETLKEYLITYDYLVEKIVRLDQRIEELAYNEKYSRTVKNMGCFLGVKTHTALSMIVEIGDFDRFEKAQKFAGFLGLVPSENSSGDSTNRYSITKAGNSHLRRLMIEAAQSYTRGNIGHKSLALKQRQKGCDPEVIAYADKANERLRRKFYRMTLNKGINRNIATTAIARELACFMWGMATGNIS

SEQ ID NO: 223808 - protein, 403 aa, unidentified
MNAVGIDVSKGKSMVTILRPFGEIVSSPFEIKHTSSDILSLIKLIHSIEGESRIVMEHTGHYYEVLAQQFSAAGLFVSAVNPKLVKNFNNDSLRKVKSDKADSIKIARYALDKWQNLKPYSIVDELRTQLKAMNRQFHFYVKQKTAMKNNLINLIDQTYPNANTYFNSPPRSDGSQKWVDFVYTYWHVDCVRKMSLNSFVKHYQNWCKQKKYIFNKSKAEEIYTKATELVPVFPKNEITKRIIRQAIAQLNSTSATVETIRILMNETASKLPEYPIVMQFKGIGPSFGPQLMAEIGDITRFTHKGALTAFAGVDPGVNESGSYAQKSVPTSKRVSSNLRKTLFQVMDVLIKTMPQDDPVYQFMDRKRAQGKPYYVYMTAGANKFLRIYYGRVKEYLCILSESS

SEQ ID NO: 223809 - protein, 366 aa, unidentified
MFVSVVSLYKTYNMKQTIDFSGQNIYVGFDVHKKDWKVTIMSDQIVHKTFAQPPNPAVLISYLTKNFPGGRYYSAYEAGFCGYWIHYQLMKFGVNSIVVNPADIPTTQKEKVQKEDKRDSRKIARSLAKGELTGIHIPQYSTIQDRALMRARADFVGDVSRYKNRIKSFLLFHGIEMPPEFEKNNWSKKFIQWLRQIQLSEPTGNQTLESYIETYLSLRVQVLKSTRQIRDLSNTERYAKNVLLVLTVPGIGLINGMNILTVVEDIFRFRNNDHFCSFIGLTPGMHSSGDNDIDTGITPRGHGTLRETFIEAAWIAVAKDPALMLAFHKYSRRMDKNKAIIRIAKKLACRVQFVLRNGKPYQTLQN

SEQ ID NO: 223810 - protein, 461 aa, unidentified
MSAGRPFLYDDLRARVSSWPPLRPARLRRERESVGVVSPACSLFYEKEKLMKRIIGMDIHRIFAEVAFWEEGRLRHHGRVDMTRSGLEGFGRSLSEQDEVVVEATGNAMSVVRVLAPFVGRVVVANPLQVKAIAYAQVKTDKIDAGVLAQLHASGFLPEVWVPDERTERLRRCVARRNQVVRHRTRIKNEVHGILHAHLIPKCPHADLFNGRGRVWLDGQVFPDDERAAIVRHIREIDRLAEDLKDLEGDIAKAAVGDPQIQRLLTITGVNAIVATSVIAAIGDIKRFSDASRLVSYFGLNPRVRQSGLRPAQHGRISKAGRSHARAMLVESAWAAARAPGPLRAFFLRIRAKRGHQVAAVAVARKLAVLIWHMLTREEDYQWQRPGLVAAKRRKLDLQSGAPTQRGVGRRGVAYTYNIKELRDQEKAAAEYAEHAYERFVRHWQPRGKKRCTGVTNETRQ

SEQ ID NO: 223811 - protein, 392 aa, unidentified
MTIQAQVSVQSQVFVPRNYQVFAGLDVDKHSIAVTFCNHEGLLRSIRLPYSAAQLLNYVGKHFTGERLAFVYEAGPTGFGLYDELVAEGHPCLVVAPSMVPTVAGARVKTNRLDSKKLSEGLRGGQLRSIHVPSARYRELRHLVQLRDTHVQQLTATKCRIKALLLYEGIAFPSDEGKEKPWSQRVVNELLELPGSESVRFKLDQLVGTLHFNFNSAAAAQKQIRHFCQKDEELRQSIAWLKSLPGIGEIIATHLVARLGDPSLITNVRQIAGFLGLVSSEHSTGDKQNRGEITRAGDSRLRNKLIQSAWVAIRQDPELREFYQRVYQRHPKKVAARKAIVAVTRKLTTRIYAVLKEQRPFVLREVSPALLTTEETAGHRGRLDGQQKQHSR

SEQ ID NO: 223812 - protein, 385 aa, unidentified
MTQPGKPASVTLDYDTTIIGALELSEKKWVIAVQLPGIKRHTRHVLGASGEELALLIERLKARSAAAGHPVTRVILTHEAGRDGFWLARYLIRRGVEVHVMQPSSLPVDRRARRAKTDVIDVEMLLRTLMAWLRGEPRVCSMVPVPSEADEEARRAHREREDLTGERRSILNKIDGILATLGVKGFKALRRDRREQLTMLRQPDDDPVPQMARARIERLLDRLELVLRLIAEVEARRDAVLKKAAPADEAEQMIRMLASLKSIGPEFATLLVREAFVREFRNRRALGGYIGLGGTPFSSGGSARDQGIGKDGNRRVRTGMIELAWLWLHWQPDSALSIWFRERVGQGMGRIKKIMIVALARKLLVALWRYAKDGVIPEGAKMKTA

SEQ ID NO: 223813 - protein, 356 aa, unidentified
MNDFKYHLGIDLHKKTSYWTLIDHDRQTLYKKNLLTSKEGIEQGIREMGIAPSLVEAAIEPVSQWGWYGELLEKEGLTVHLVDAYKAKLIGGTKLKNDKMDSVALAELMRSDFLPTAYRAPEATRDMREFMRHRAFLVRLRARVRGRVHQILWKHGEQCPYADLFGLKAQTWLRSLKLRSPYQEEREELMTMWQETSARITAHDLTCKELTGRNPKAQLLMSIPGIGLITSLTILAEVGDFSRFRSGEKLASYAGLVSSSYSSGERTRLGHITHRGSVWLRTALVEATNTVNPKWGHLHDFYLRIKEKKGSKVARVALARKMLVLSWHLVKSDQYFKASVGHSDSVKQGTRTFLAH

SEQ ID NO: 223814 - protein, 345 aa, unidentified
MTIVEAARAVTGGVDTHLDVHVAAALDPVGGLLGTEGFPADPAGYKAMLSWLESFGEVTKVGMEGTGSYGAGLARFFRHQGIEVLEVDRQSRQARVRHGRSDPIDAVEAARATLAGRAGQPKSMDGAVEAIRVLVVAKRSARQARSKALTQMRHLSYTAPDQLRCQLKGLTIPVLVAKAASLRPTRSPDPVTAGTKASISSLAHRVRYLDVEIAGLDELIEPLLFATAPELLALKGVGPDTAASLLITAGDNPERLRSEAAWAHLCGVSPIQASSGKVTRHRLNRGGDRQANSALWRIVMVRIAHDPDTKAYFERRVKEGRTKREVIRILKRYVAREVYRHLPRG

SEQ ID NO: 223815 - protein, 340 aa, unidentified
MARYLGIDLHRNNFTVCTIAENGRRYFREYGIHSLNHFVSRLRPTDELAVEVSTTTRLFYEAVAPHVKRVVVVNSSQFDVIRKSVKKTDRNDAETLALFLSKGLLPEVRMKDKLHAELASLTQTRDTLVKQRTALKNKINNIMAARGLSPRREQLSSEKALRMVEALPLGPIVMVEVQALVNQIRSLNRTISELEKTIKAEGEKLPGHKNLKSIKGIGDTSATILLSIIGDINDFESESKLASYFGIVPRVRNSNETQHTGRITKRGTKLGRTTLVQCALIAMRYSEYLQRFFLRIAARRGKGKAIIALAKKFLGVIFKTLKNDWVFEDFPNFVIAGESA

SEQ ID NO: 223816 - protein, 353 aa, unidentified
MEQFIGCDAHKEFSVFVSIDEKGVYGRPARVGHDREVFRKFLGQLPAGSQIALETSGCYYWIVDEMEQAGHCPRLAHAFTAKQRMAGRQKTNEKDARGLAMLLRNGTLPEVWIPPGELRDQREMLRWRMQLSRTRTRIKNRIHAVLQRYNVAIDYTDLFGNGGRAELLARSAELPPHSRESVIEQLQTVDFLESQIETCEQRLEKMLYPSAERDILDTLPCVGKVLSAVLALEIGAVKRFAGPDRLVSYAGLVPAARESADWRRQDRCPPDCNVYLKWAYVEAANLISTKRVAWADRHVVQLYQRVKSSSKMHGKATMAVGRHLAEASYWMLSKQEVYREPNSPRQALSSTHG

SEQ ID NO: 223817 - protein, 313 aa, unidentified
MVQSIGIDVSKGKLDVGLINLDQTTSNLQCGNDHHSIPSLVKALQSCQDVRDIPIVIEATGGYHYGITFALIEKGFKKVFVINPIITKKHLSSQIRKVKTDKKDSLLLAKIGLLEDLHVYTESKEEVLFKRDIRLLHFLKKQLQQVNNRLSSAKSLNIENDFEQEMLLETKKKFEIQLKKIKQKILKSVKVEAPMIRGLSELHLKAITVELGNINRFKNHKQIVAYAGLDPSIRESGSSVRGKSKLSKRGSKTMRYFLFQSAWGVMMHNNKYKEYYSKKRAEGKHYYTCLSAIARKLLCEIYHNLKECPYSIN

SEQ ID NO: 223818 - protein, 465 aa, unidentified
MVWDRVASDHSLSIRLVIERLTPLSVRQVANKLDVAETCSSASNLPQGCDAYRQRGRHSPKFAKDRVYSMFFLGIDIGKNTHVASLLDQDGKIVFRAFSFSNTTEGGESLLTKLSTSDIESTELVIGLEATGHYWLSVYSYLHDRGYKLHVINPIQTDGWRKGMEIRRRKTDVIDSVLIAELVRYGDFIEARLPDEEILSLKNLTRFRSYLVDSIADLKRKVICVLDQVFPEYQSVFSNVFGKTSKEILLQFGNPAELESVSAETLSGLLSELSRKKIGLETAEKLTDAAANSFGVTFCRDSFTFQLRMLIEQMKFIEAQVKDVEAEIETIMASLCSPIMTIPGFGKVTSAVILGEIGNIDRFDTPAKLVAYAGIDATVRQSGEFDGINARMSKRGSPYLRRALYQAALAAATGRNPDPVLRDFYLKKISEGKHHSVCVGAVSRKLCYIIHAVLQENRPFEVRNP

SEQ ID NO: 223819 - protein, 348 aa, unidentified
MRFYNGSHAFYCGVDLHARTMFTHVLDQAGATVFARDLPARPDAFLHAVAPYRAGLVVGCECMFAWYWLADLCEDQSIPFTLGHALYMKAIHGGKAKNDRIDAAKIAGLLRGGMFPMAYVYPRQKRATRDLLRRRCCFVKERAQLIAHIVNTNSQYNHPPLTAKLCYARNRTEGIAERFADPATQLSIRADLNLIDHFDEQIDEIERVVLRTAKVDDPLTLGFLRTIPGIGKILSLVMLYEIDQVARFPEVGNFLSYSRLVRPEHESAGKKRGSGAKKIGNGHLKWAFSEAACLMLRAWPDAKKWLARQERKRGKRKALSVLEAKIGRTVYHLCRKQQPFDHKRFFCQ

SEQ ID NO: 223820 - protein, 348 aa, unidentified
MENPMTIAVDLSKNVFEIAVERQGRICQRKRLNRRQMVELFSQCPSATVLMEACGSSHYWGRVLQRLGHDVRLLPPQHVKPYVLGNKTDRRDAEAILSARHRESIVPVPVKSIEQQSVTVLHRLRALWMKTRTSRLNALRGILRELGVTIPEGARRVLPAVSAALSDPNVPIPEVLHPVLLSAMAEVRELDERIEGVKRQLQAVAGTVPLVERLETIPGVGLLNATALAAMTGDFSRFPSGRRFASSLGLTPKEHSSGMRRRLGAISKRGDTYLRTLLIGGARSVLLSAHRTKQPHRLQEWALNVERKRGRNRAAVAVANKLARIVWAVATRGVPFHPIPLAPQEVPV

SEQ ID NO: 223821 - protein, 415 aa, unidentified
MALKIVYKICCGIDVHKTFVVAYIASTNDKGITSYESHRFSTYTSGLKTLLQWLIDRNCKDVCMESTGKYWIPVYNILEKDCSIVLAHPKYVKAIRGKKTDKKDAKWIADLFKHDLVSGSFMPPADIRQLRDLMRYRFKLTCFKSSEKNRLQNCLTVSNIQLGNVVSDTFGKSAQAILDKLLENPADTSFDLEPLVYKSLKKKLPELRDAIDGFITPEQAGKLKIIKDHYDNLESRKAELEELILALTAPYQQELTILQTAPGISSNFTAIGIISEIGTNMEAFPSAKHLCSWAGLTPTNNESAGKKKSVRVSKAGCYIKPLLVQCANAVVKSTKHPEMRNRYLRLKKRRGHKRAIIAIARMLLTALYHMLKNGENYNPELYQKTDLPPVDREITIEQALMLIRNQGYKIKSATT

SEQ ID NO: 223822 - protein, 347 aa, unidentified
MAYIGVDLHTNSFTICRLETDGQEQFETFQLCAADLKRFCLGLSVDDELAVEATGNSAWFRDEVISCVGRVVVVNPGQFQLIRKSVSKTDKNDAHALAFYLSKDMLPETRLKSKAHSRLASLTQTRDLLVKQRTRLINKIHALFNRHGIKLKKERFTSKRSLERLDMSVFCAIERIELGIIRDQALSLTQAIKNADEQIELFAASMDGYEGLTSIKGIGPRAAAIFLSSIGDVNDFEDENKLAAYFGIVPRVSQSNETDHRGRITKRGNKLVRTALVQCTLVAIRYSGYLNSCYRRIRERRGAGKAIIATARRLLKIIYNTLKNNWIFKDFTTFTLEEKQIVPGQTS

SEQ ID NO: 223823 - protein, 346 aa, unidentified
MKKILKQALGIDVAQKELVVSLGRMHEDLSTEIYAHKVFPNTKNGFSTLVSWTKKRVDSNVKVRYVMEATGVYHESLAYYLAQKDYEVSVVLPNKISNYFRTLETKTITDKTASETIVMFGLERKLDLWKRPKPIFKKLRQLTRERDQIVQERTMAKNQLHADLAEAEPHPSSINRIKKRIALLNKQEKEIQQEIAKMAKEDQEVSRSIEGIRSIPGVGLLTAVTVLAETNGFELIRNKRQLTSYAGLDVREKQSGTSIRGKARISKKGNRYLRKAMHLPALAAIRHSARFKGIFVRLVSKHGIKMKAAVAVQRKLLEMIYTVYKSQTLYNEGYLKINTTKESTII

SEQ ID NO: 223824 - protein, 355 aa, unidentified
MDTTKYVGMDVHTEAITIAVVNSAGKIVMESTLETKANTILEFFQGLRGNVQVTFEEGTWAAWLYDLLKPHVTTVVVCNPRKNALLKDGNKGDKIDARKLAKLLHLNNLKPVYHGENGIRTLKELSRSYLTITKDLGRVMNRLKALYRSWAIPCAGQQVYAPRHRSEWLSKITEAGVRRRAEYYYQQLDALQALRHEVRRDLLAESRKQTATKLLRQIPCIGPIRAALLIALIQTPHRFRTKRQLWNYSGLGVKTRDSAQYRFVGGELQRSKRPQLLRGLNENHNHDLKNIFKGAATMATISPGPFHDFYESLLVKGRKPTMARLTLARKIAAITLIVWKKGDSFDAKHLKQQAA

SEQ ID NO: 223825 - protein, 337 aa, unidentified
MDRQYVGIDFHRRRSVIVRLSATGEKRSSVRVANDPLAIAAAVAEAGPDPEVVIEATYGWYWVVDLLQANGARVHLANPQGLNWGQRRVKNDERDAVDLADMLRLGRLPEAWIAPPEVRELRELVRYRAKLVGLRSGLKAQVHAVMAKEGVLPAQGRMFGPAGNAQLDGMAMADSFTTRVASLRDLIERYDREVTMLEGQIHHQLRHHHGYQAIQAIDGVGRTIAAVLVAEIGDVGRFRSAQALCSWAGLTPKHRESDTKTTRGSITKQGSRLVRWALIEAVSRYHGGPRLAGDFRRIAERRGTNKARVAVARKVLTLVYYGLRDGEIRCLAQAPAA

SEQ ID NO: 223826 - protein, 342 aa, unidentified
MQFTTIGLDIAKNVFQVHGIDAAEKVVVRKQLRRRQVLEFFKALLPCLVGMEACATAHYWARELTKLGHQVRLMPAKDVKAYVKRNKNDAADAEAICEAVRRPTMRFVQIKSTEQQGRLMLHRARDLLMRQRTQVINAMRAHLAELGIVAAQGRDGIKELLKIIASEEDARLPVDAHASLVVLAAGLQAVQTMIGSIEKRIMVQHRSNEASQRLETIPGIGVIGATAIAATVPDPKVFGSGRDFAAWIGLVPREDSTGGKQKLGPISKRGDRYLRRILVVGACAVLRYARHKPEKYPWLTQLLARKPFKVVAVALANKMARIAWALLAKGGTYRVPALAAAA

SEQ ID NO: 223827 - protein, 403 aa, unidentified
MEGPLISLDVSKGKSNYRFFENGTDRKGKKGVIRHDIQGFDSIRDEAEKMEERLGIKPSVIFESTGVYSDVVEKYFTDKGFDVYVISPLLSASMRKEGVRPAKNDSLDTLSIAKVFYSKDDLRKCSENDKKAERLREMSYELDMMNRRIRPMKCQFLRLLDKVWPCLDEVSDYSSRFMLDFIIAFGHPENIKTVKGVLSVIRKSEMGTAGRKDKIAQDLFDYCHTHLSAVSKDSSYVELLKRMAIELKAMAKKKSELIDRMAEEARNKEEFARLLTIPAVAKTTALKIMARVGDISRFRNAEALVAYCGLDPRVYQSGKMTGEHRTITKKGDCILRSTLFLAVKLMVMLYPDTKVARFVAAKAKNGLSYKQAVVAGSAKLARIIYSMLTHHENYVEFNADIVA

SEQ ID NO: 223828 - protein, 355 aa, unidentified
MTVTIVEEARPVTCRTAITGGVDTHADTHVAAALDPVGGLLGVEEFPATAAGYARLLGWLGGFGTVALVGIEGTGSYGAGLARYVTAAGVRVVEVDRSDRQDRRRQGKSDPLDAVSAARAAQSGRSRGAPKGRDGAVEAIRTLMVARRSAAGERTRTINQARALVLTGPDDLRARFARHKPAALITGLAALRPRPGDVAGHATRIALRELGRRAQFLDGQLERLGELIVPLVTARAPGLLAIYGAGPRTVALLLIAAGDHPGRLRSEAAWAHLCGTAPIPASSGKVTRHRLNPGGDRQANHALWRIVFTRLGSDPATRAYAERRTAEGKSKAEIIRCLKRYVAREVYRHLRPAAG

SEQ ID NO: 223829 - protein, 338 aa, unidentified
MYQYIGVDVSNQTLQVFDGLRDFTFSNEIKLKEFDLFIRDWKKKIKQSESNDIELVIIFEPTGPYSSYLRDYCSRKNIKAHIMNPMQSSYFAKASGNRSKSDPIDARMLYSYHIMLNHKKCLVPILTDQVKKLSSYLKSYQLLIKTETAFQNHYQSTEREGSASKTLIKVLKKGIQHIQKDKDQVLEEAISYIKADLVLAESYQNLSSIPGVGPLTSINLLIHFLKFPTANRNQLTSLAGLDPAVKTSGTSLNKKPHISKRGNTLLRKTLYCAAISGIQCNPDLAKQYEHLQERKKPKKVALVAIMRQILLMSHSLYLEKRKYEVREMKNAKPILNIS

SEQ ID NO: 223830 - protein, 371 aa, unidentified
MDESTKMLFVGLDVHKDTIAVAYAPDDRGADVVSLGIIGTRQCDIDKLIRRLESKGATLVFVYEAGPCGYWLYRYLTRRGFGCSVVAPSLIPRKAGDRVKTDRRDAVTLARLRRSGDLTSIYVPSVDDEAIRDVSRGREDTMRDLKRAKVRLKAFLLRQDLRYEGRANWNAAHLRWLSRVVCPTPAQQIVFQEYVRAVTEQTERLQRLESELHELVKGWRLYPVVEAIQALRGLELTGAIVLVAELGDLTRFDTPRKLMSYLGLTPSEYSSGGRRRQGGITKAGNGHARRVLVEGAWAYRYPAKVSRHLQLRLEKVPAEIQGIAWKAQVRLCKRYRQLSARGTHANQVVVAIAREMAAFAWAIARTVPVAA

SEQ ID NO: 223831 - protein, 327 aa, unidentified
MTRSIAGIDVSKLTLDVVLMQGEQMQHRVIQNDPKGFRELADWMSETHPAQMQACMEATGRYGLAAAEYLYACGYQVSVVNPARIKAYATSKLRRSKTDKADAKLITEFCEKEKPALWSPLPAHFQALKDLIYHLEDLQSTKQQEHNRMEFQAAHRLVNENRHAHITLLEEQIRKVRKAIHIHILAYPDLMHLVNLLVSIPGIGEITAAWILAEIRDFREFSNARQLAAYAGLNPRINTSGTSVHKKARLSKTGNAKLRKALYLPAVVAKNHNPIIRELGIRLNKRGLCKMEIIGAAMRKLLHLAYGVLKNDLPFDPNYLEKCTATP

SEQ ID NO: 223832 - protein, 347 aa, unidentified
MKHNTQHKFYCGVDLHARSMFTHILDHKGKTVFEKDLPADPDEFLLAIKPFRKNLVVGCECMFAWYWLADLCEAEKIPFVLGHALAMKHIHQGKSKSDKIDAAKLAAMLRGGLFPMVYVYPKAKRQTRDLLRRRSFFVRQRSHLIAHIVNTNSQFNLPPFTKKLSYAGNRSEVIAERFSDPSTRLMIESDLALIDNYDAQIARLELHLTRTAKVDDPVTFGFLRTVPGIGPILGLVLLYEIDQIKRFPEAGNFLSYSRLVRCEHSSAGKVKGSGPKKMGNAHLKWAFSEAACLMIRAVPAVKSWMRRQETKRGKRKAMSVLEARIGRAVYHLWRKQQAFDLKRFLKG

SEQ ID NO: 223833 - protein, 298 aa, unidentified
MIYVGIDVAKDKHDCCILGSEADKLFPVFTIPNNKAGFDELYEKMFSVTDDKTKIKVGLEATGHYSLNLLGSLIDKGLPTCVINPLHTNLYRKGLSLRKTKTDKVDARSIAMMLMTNKTLKPYSDISYHNEELKSLTRYRFDKVQERAKLKSSVARLVNIDEIEDSIKSIMDTCNSPIMTIPGISYRMGAMILAEIGDFTRFNYADQILAFAGLSPSTYQSGQLDSSYSHMEKRGSRYLRYALFNAAKFVCKWDENFGAYLSKKIGEGKHYNVAIGHATKKLVRTIYRMELTGEAYRR

SEQ ID NO: 223834 - protein, 360 aa, unidentified
MTKPRSLVGLDVHATKIVAAVLDAESGELQWFSLRGDVREAAGLCAGLPRPVRAAYEAGPTGYGLARELAARQVSCVVAAPSKIPRASGDRVKTDRRDAELLVRLLMAGKLHPVRVPGPEEEALRDLIRAREAVRVDLMRARHRLSKLLLRHDHRFDDGQAWTQRHRDWLATIDLVWPAAQATMLDLQGAIDALVHRRDQLEAQITRMLPSSPWGVQVGRLRCLRGIDTLTAAGLCAEVGDFTRFARAEQLMSYVGLVPSENTTGTSRRLGSITKTGSGHARRLLVEAAWHYRKAPRVGKALEQRQQGQAAEAVAIAWSAQRRLNRTWTRLEARGKRRTIIAVAAARELTGFIWAIGQIE

SEQ ID NO: 223835 - protein, 317 aa, unidentified
MARAGVGIDVAKEWLDVASTETPATWRVPNTAEGLSALVTQLGDLDVHRVVLEASGGYETRALERLHRAGFAVVLVQPIRARHFARALGQSAKTDAIDAHVLARMALLAVEDTPRWEPVADQVADLKALVARRQQLLTLRDGEQKRLRFARAIVRPDLERTVAALTAQVAELEQRIDVLVAGNHRLAEEVHVLESVRGVGRLTAAALRVAIPELGTLTRQQVAALVGVAPMNRDSGSKTGRRYICGGRAIARQALYMAALAGARWNAVLRARYAHLVATGKKPKVALVACMRKLLIHLNSLMRQHRFGPTPTPIRVS

SEQ ID NO: 223836 - protein, 364 aa, unidentified
MPAPVLKRPRKPHGVFHGEGVILGVDTHKDVHVGAVLTMAGVLLATHSFATTSAGYQALLLWAYRFGEVSAAGIECTGSYGSALMKYLHTQHVLVFEVNQPDRALRRKAGKTDAVDAEAAGRAVLAGRSLSTPKDGIGGSENLRQMRLVKSSAVKARTTAINQLKGLVVGAEPGLRDELRGLTTKALTRACAVILPTSVERMLMAELAHRISYLTDELTRLKTVMTQTVTACVPELRQRSGIGYDSAAALIIAVGDNPERMTNEASFAALCGVSPVEFSSGQTTKRRLNRGGNRQANAALYRIVLTRLRWDPRTQEYLKNRTEKGKSKRDVIRCLKRYIAREIFTIIKTIPDQPKHRTLVDLTP

SEQ ID NO: 223837 - protein, 410 aa, unidentified
MDTVMERCAGLDVHKDTVAACVRFPGASGERVQEIHTFGTTAAELLALRDWLAAHRVSLVGMESTGIYWRPVYYVLEDALECWLLNAGHLRNVPGRKTDIKDAEWICQLVEHGLVRPSFVPPKPIRQLRNLTRYRKAQIEERTREAQRLEKILQDAGMKLSSVATDILGVSGRAMLSALVEGTRDPEILSELARGQLRKKLPQLKEALAGRFGAHHALLVGTILSHLEFLDEAIEHLSAEIEQVIAPFEAEVELVRTIPGVARRTAESLIAEIGVDMGRFGSSARLASWAGMCPGNTGGKHRSGKTRKGSKWLRTALIESARAASRSKGTYLSAQYHRLRGRRGNSRATVAVGHSILVAAYHILDRRQPYTDLGADYFVHRHDPQHHANRLVPQLLALGYDVTLEPVEAA

SEQ ID NO: 223838 - protein, 444 aa, unidentified
MLRFVGCDVHKRTAVFTILQSDGTKLANYTVPVTRESLAAFAERQLHSEDRLAMEATTNTWAVAGVLQPFVKEIVIGNPLKVRAIAEAKIKTDKVDSRVLAELLRCDYLPMVWQPDKETQRLRRLTHRRAALVSDRTRLKNRLHSILHHTLVPLPDCDLFSKKGIAWLKQVPLAQEEALARESDLRLLELTEIEIAQLDELLVREAWQDEKVRLVMSIPGIDYTVAQTCLAAIGDVSRFPNAKKLSAYLGLNPSTRQSGPHCYHGPITKQGNAHARWLLVQAAQHLAHYRGPLGQTMRKIVKRKNRNVAVVACARKLAVLLWHVLSSGEPFRYAQPKTLQAKFARLRVRATGLRRRVGIAKGTPRSAQYGHGRTRAVPSLPQVLTENGLPAVAPLSKGERVMLDRKRLDIFYRELQVPSRTGVNTPKPQVEEEEEVPKSELTQS

SEQ ID NO: 223839 - protein, 312 aa, unidentified
MTQYTIGVDISKAHLDVHRLPDGCARQFENNRTGFAGLIKWIGKLDIDRIVYEPTGIYHRSFEDALARAGLPLAKVNPLQARRFAEARGTRAKTDKVDAAVLAHMGIALEPGICTPPSKKMRDLKELQVARQALIKDRTAAKNRSKSLRVPLLMKQSNLRLRQIIQSLKAIEGAMLALINDDHKTARAFEILCSIPGISKITAVTLLVEMPELGTLEQKAIASLAGLAPFSRESGKWKGKRFIGGGRKFLRDALYMPALVACTYNPDMKVVYQRLKDAGKPSKVAITAVMRKLIILANTLVKNDRMWAEIRT

SEQ ID NO: 223840 - protein, 476 aa, unidentified
MAGSKKAISNMALIPMLPHETLYVGVDVGKSRHVAGFLSRTLLQRHERFEGCPTFVFEQSREGFCSLVDRIREYVPLEQATVLLEHTGHYHKNLEQYLLEWDITVYRIHVQERPKGMTKTDKRDALSLANRLYTQLELGAQVEEKMQLVRRAVHPTQAAMQLRGFMQHRYELSHQRTQLRNKLTAICDELFPEFTHIFHDPNLEVALAFREKFPTPHDIATASLSALRETRVKYFPSEANLLRLQQLAGETIGINNKDRLRGMKLEQELLIKELRLVQGHLERLDTEITDIVRTSREGQILLSMPPIGPVQAATIIATIGHIDNFEKASELKSYFGWAPTRDQTGVTFDRTKLSHRGVRPVKQMLFLMAARATTLDGEWARIYRRLLPRMATYDERVKQYRGKKKVLGRIAGQMVSMIFALLKTDQETLSRVPSGEEPPPPMLYDPEIHRKHQEGSYRSLKPGTQPRKILQLPSKS

SEQ ID NO: 223841 - protein, 523 aa, unidentified
MATTRTRKPRRARRADVLHKPSGVIHPRVQQVGPEHFGIVSIDCAKARSKWMLCDFFGNVLVPPTEVEHNRTALDAAVARVRQALADHDLRDCLVAIERTGRYHRVVQCAFTAAGFETRIVHPFATKQFRQPADPGNKTDDTDLAAIHRAAVTGFALCEAPRDAFWTGLQLLIRHRRDLVYKTSALCCQIREHLEAALPGFAACFDDLWDSATAWHLVQHFASAAALHAAGLAGLSHSLRQAQVRFQQRSLQPVLDWAAHAATSDVAAEQHRRITLALNDDRQRKTLEIQALERDIAARLVHTPYVLLLSFPGINVVSAADFAGEMGPIGHYANARAITGRAGLRPSRYQSDQVDRANGPLVRCANRKLRAAILGIADNLVCCNHHFNVLTHHWRAAGKDPRHTRVKVGVRFCRIAFQMVAGRQVFRHPCLQGRHYILDKLTAFHRQHDTPAPALLGDLQAAIGQLPRKEYPAEARPLHEELQRIQDGRRRGPQPLADILPIVLARLGVGEVQSQASGDHDPT

SEQ ID NO: 223842 - protein, 319 aa, unidentified
MTDSNVFVGIDVSSTSLDLCCSNEPMIRNFSNDAAGIASLIEMLVALTPKLIVVESTGGLEKALVLALLQADLPVARVDPKRVRQFAYGIGQMAKTDAIDARVLMQFAALASPRLAQKKAQNQAELAELLTCRSQLIDTRTAHQNQLARTSSKIARKSLESVLSHLRSRIERLDREIEKIIDNDDDMRGLDELLRSFKGVGPVLAATLISQLPELGKLPHSKIAALVGVAPYNRDSGSYSGKRAIRGGRPRVRKLLYMCTVAALRHNPILKQTYQRLRAAGKLAKVAVIACARKFLRILNAMVRDNQTWAPKLLLETCK

SEQ ID NO: 223843 - protein, 448 aa, unidentified
MSQATKLNVLDEHAAFVDVGSEKLHVSIAGGAPEVFGTVTAELYRLRDWLKNQGAQAVAMEATGVYWLPLYSVLEAAGFVVTMVNGKQTRNLPGRKTDMQDCQWGATLHAHGLLRAGFVPPEHVRRLQDYLRLRCDHIGNAASCIQLQQKALERMNVKLHDVISSLSGVSGQRVIEGILAGERHPERLLEMCDHSIRENKRTRVIESLRGNWQEQHLFALRQAVDSWKHYQRLISACDREIEKVLGEINGPPTKPDEPKRSLRKPGVNAPDIANLHGLLMRWCGGKDLTVLPAHTDYGWLQLLGEVGTDLKAWPTEKHFTAWAGLAPGSHQSGKYRRSTGRKRNRTGRIFCVIARSLARSKHLALGGFYRRMAARRGGLLANVALARKLAVWFWRLMVHGDSYVEQGLAKYEEQVLETKRRALVRLAKQLGHVVIPNLQPKEAIATDK

SEQ ID NO: 223844 - protein, 392 aa, unidentified
MVVSVGIDVSKDKHDCFILSSEGEVLVDVFTIPNTMDGFNCLLQRIQDCTTPQDKMKVGLEATGHYSYNLLGFLLDNGLATYVLNPLRTNLYRKSLSLRKTKTDRVDARTIASMLLSDAGLKPYTDTAYHNEELKSLTRYRFDKVKERAKLKSSISRLVCILFPELEKLVPSLHIASVYALLAEFPGAKQIAAAHLTRLKALLETASKGHYKRDMALEIRDAARNSIGSWMPAKSLELQHTIRLIRELDDEIVEIEEQIQAIMDELNSPITTIPGLGFRMAAMIFAEVGDFNRFDSPDKLLAYAGMSPSTYQSGQLKNCYPHMEKRGSRYLRYALYNATKYVCHWDPTFAAYLAKKRAEGKHYNVALSHAAKKLVRLIFAMEKSRRPYCLAD

SEQ ID NO: 223845 - protein, 352 aa, unidentified
MIIGIDPHKMSHTANAVDPATNTTAASLRIDATLAGYRELMRWSKQFGERRWAVENARGLGRHLAQWLVARGEVVLDVPCTATSRVRELSRGSRRKTDVIDAAAAASVAALHGDASVVEAEDHTTVFAMLEERRANLAAQRVRITNQLHAVLRDLVAGGAGIAITAKSASSLLRTVRPESSAERTRKQLAHDLVRDVRAVDASLVDIEKRMTAALDEHGTRLREIDGIGAITAVRLIGRTGRASRFASPHAFATYAGTAPIEIASGEHSRHRLSRAGDRRLNSAVHLVAVTQVRMRNSIGRAYFDKKIAEGKTRNEAMRCLKRRLANHIWRMMMADEQRLATGLPEIPEIAA

SEQ ID NO: 223846 - protein, 344 aa, unidentified
MEHYAGIDVSMECSSVCVVNASGKIVREAKVASEPAALIGWFDTLGLELARIGLEAGPLAQWLYAAMKQTGLAVELLETRHVYEAFKSMPVKSDRNDARKIAQLMRLGWFRPVHCKSITAQEIRAMLTARKLVQSKLLDVENSLRGILRGFGLKVGNTTRTKFAGRIDELVKAHPNLQTIAQALLRARAVLLEEFSGFEKRVRTMSRLHDQARLLMSMPAVGPIVSLTFACAIDDPCRFSSSKQAGPHFGLTPKKYQSGETDYTGRISRHGDASVREALYEAAHIMLTKPIKRCSELKSWAMRIARRAGANKAKVALARKLAVIMLRMLKDNVPFNPAARATMA

SEQ ID NO: 223847 - protein, 405 aa, unidentified
MLLVGDDWAEEHHDVELQDETGQRLAWAKLPEGVVGIARLHAMIGEHLAEGHDAAQVVVGIETDRGPWVAALIAAGYQIYAINPLQVARFRERHAVSGSKSDTTDAHVLADMVRTDRHQLRAVAGDSELSEAAKVVTRAHKKLIWEQTRHRLRLRSTLREYFPAALVAFEDLTAPDVLELLALAADPVAAAGLSTAQITAALKKARRRQVAAKADAIRVALGTAQLGQPAVVTAAYAATVRAQVAILNTLNTEIAVMQGEVEAYFGRHPDVQIYLSQPGLGQILGARVLAEFGDDTTRYTSAKARKNYAGTSPITRQSGKKKFVMARYVHNDRLLDALGRQAFSSLTSSPGARAYYDQLRHRGIAHNAALRQLGNRLVGILHGCLKTATHYDEATAWPTPPEHTA

SEQ ID NO: 223848 - protein, 443 aa, unidentified
MKELPVLDSRAAFCDVGSEHMHVSIAGGLPKVFGTFTSQLHELRDWLLGEGVRSMAMEATGVYWLSLYGVLEAAGLEVVMVNGRQTRNLPGRKTDMKDCQWGATLHAHGLLKAGFVPPAHIRKLQDYQRLRTDHIASAASHVQHMQKALERMNIKLHNVISSLMGTSGLAIVHAILDGERDPAKLLELCYSTIRHKKAKEVIEALRGTWEPEHLFALRQALQSWEHYHRQIAECDQQIQLLLQEITFNDTQGGGIGEKPKATAGKHPSANAPQISGLHRMLIDLCQGKDLSILPAHTDYSVLQIISEVGTDLSKWPTEKHFTAWLGLAPGTSQSGKRKSNVKHRRSRVGRYFCIMARSLARSKDMALGGFYRRLAARRGGLIANIALARKLAALFWRVMVKGTEFVEEGLAAYEAKFLEGKKRSLRRLARELGQTVSPIPVTV

SEQ ID NO: 223849 - protein, 348 aa, unidentified
MAVYIGVDFHARQQTISYLTTEDGEIQQLVLLHEDPAKVRAFYEQFAGQRVIVGFESSGYAAWFEELLEELGCEIWIGHATYIRKFAKRRQKNDRRDADLILELLLSGDFPRIHRYSRTTRQMLQQLRYRQRLVKMRTMVVNMLLFMASSRGHSFRTQLQSKRGQARLGQLQLPEPLAQQRDELLSLLAQLDQKITTIEQWLEQQTAAEVAVQRLRTHPGIGLLTSICVRYTLEDVGRFATTRKVSAFAGFDPMEDRSDERRRMGAISKQGSRWLRFYLVEAGQVAMRKDADLARVYQRISRRGGHAKAKVAVARRLLVRAFIMLRDEIDYAEFLRRGVAARSSRGSA

SEQ ID NO: 223850 - protein, 347 aa, unidentified
MPIYCGVDFHARQQAVAWCDTNDGEIRFLQLDHSDPRKVREFYASFSGELIVGLEACGYSQWFEDLLFELHIEPRIGNAAEIRKRARSRQKTDRRDAELILDLLLKNEFPRIYRPNAESRAILQKLRHRHKLVQLRTKAINHLHAIAISAGLSLKSKLMTKQGRDKLNALLLGETQKQQRDEWLALVDHLTPIIERIEKELRPVAESNPQVVRIMTQPGIGLLTGLALVHTLGPIGRFANARKATAYIGLDPLEESSGDRRRIGSISKQGSKLVRYLLIEAAQTASRNDPELKRFYHRVLGRRDRPRAKVAVARQLLVRAYIMLRDEIDYAEFRRRAVKASVARLDP

SEQ ID NO: 223851 - protein, 413 aa, unidentified
MGKGALAPCPPSIQLVVGMVGTLRFAHPCNSAIGYRRYVPKRNGLPRTCTPRQAAGDRIEPTLSSLWLPRSVIVVSTFIGPGWLPEQLGSLHKAGSTKMTQTTTMTAGIDTSKSKLDIAVHGRTERWQVPNTLPGWRALAGKLAKVGVARVGIEATGGYERGVVEHLRAAGFPVLVLQPIQVKAFGRVHLRRAKNDVLDAVLIAACAATLDQPRIVPDPRLAELAEYLTFLEQTEEDIRRFKTRLEHIDEARLRRMVLGDIARLKARRLAQIQDIAKRLRAHDDLARRLDLVLSIPGIGERTALALLIRMPELGQVSREEAAALAGLAPFDDDSGQHRGQRHIAGGRARLRRSLFAAALPAAYRWNTALIALYARLKARGKAHNLALVACARKLLVYANTVVQRGTPWTEKAA

SEQ ID NO: 223852 - protein, 419 aa, unidentified
MTHDITKKVKTINEKTMIAAIDIGKTVHYGYLRAPNGTEVKPFAFHNGHKSFEDFWAKICVFKEAQQLEDIVIGFESSGPYAEPLFHFLLKKPVTLVQVNPLHTKRLKELTGNSPNKTDQKDPRVIADVIALGHALTLVVPQGPAAELRRLTQARERAIKHRTMLVNRLQQLIFMIFPEFLTVIKQVTSKTAQYLLQHYPTPQHIITLGIEPLTTLLKKISRGKYRQHHAQNLFTAAHHSGGVREGMHSTVQEIQHLITIIAQENTFIDRIEKQLCCYLQQIPYSHSLLSLKGIGVITVAGLIGEVGDFGKFSTIAELMKLAGLDLFEISSGRHQGQRHISKRGRPLIRKLLFFAAINAVRRTGIMHVPYKRMCERGMPKLKALIAIARKLLRIIFALARNNTTYVENYCAHHTVKQAA

SEQ ID NO: 223853 - protein, 482 aa, unidentified
MKPKQSEKTKKATSRPMRRRWHEMNRKQRRDMMRAIQSEDLSLEVVHPDAAGIDIGNESHYVAVPPTRDSQPVRRFGCTTAELKAMAAWLKQCGIRTAAMQSTGVYWIAVYDLLEEAGLEVYLVNARQTKNLPGRKSDVQESQWLMKLHTYGLLRNSFRPSQEIRTLRTYWRQRDDLVRAAGRHIQRMQKALTQMNIQLANVLSDLSGVTGQAIIKAILAGERDPQMLAAFRDWRVKASAAEIARSLEGYWQPDLLFVLKQEEDGYQFCQTQIAECDRQLEDYLRQTEDRSQGASLPEEKRKERLKKKKGNKPQFDLRRELFRMTGTDLTRIDGIDVMTVMTIISEAGWDMSKWKTEDHFVSWLRLCPDNRISGDKIIGKGRLPTNNRVTIALKTAANTLRLSNTYLGAQFRRLRTKLGAPVAIKAMAAKLARLIYRMLRYGMQFVDRGAEFYEAQHRGLQINYLKRKAAILGFHIIEAPAA

SEQ ID NO: 223854 - protein, 351 aa, unidentified
MEKIYIGVDFHARQQTICYLKTETGELVIVELKHEDKEQVRAFYRQFQEPIAVGLEASGYSPWFETMLEQLGGEVWLGHATEIRRRARWRQKNDRRDAELIWDLMVHHEFPRLHRPAVQSREILRMLRYRQKLIKLRTMTKNSLQAIALQAGLAKGRQLFSAAGQEQLQAAVMSPVLHWQREHWLALLKPFNQQLLETMVWFKEQSKDDLSVRRLRTHPGIGLLTALCLLHTLQPVSRFRNARKVAAYAGLEPVERSSAERQHFLGISKAGSRMLRYLLVEAGQTAVRYDEDLKRFYQRLAERRGRPKAKVAAARKLLIRAYIMLRDEIDYAEFRRRAVAARLARRGQRPT

SEQ ID NO: 223855 - protein, 347 aa, unidentified
MNYCGIDLAGVSSYAFVTDEKGTKLWSGPIATEKVAFERLVKKFAGGGLSIAIEAGNQTAWVHEELVKLGAEVTVVHPTKVKLIAESRRKTDKIDAKILCELLRLNALPHPVHMPGPEARELRGLLVARRQLVSARSKLSNVARGMLRQTGVRLPAGGLSSLAGWKRLLAGGFDQEHLLIIVSAYYDSFRALTKSIRELDRQLARREKSEPRAQRLKTIPKVGRIASLTFLAAVDDVKRFSSSRKLVGYSGLAPTVRQSGERTEYGAISREGRSELRAVWVQIAHLVARDKTKATQPLRSWFNRVAKKRGKKTALVALARRLLVIAYQLLRTEQDFDVGRLKKKRAA

SEQ ID NO: 223856 - protein, 428 aa, unidentified
MHSTQNERINQITYSTLIIGVDIAKFKHVARAQDFRGVEFGKPITFENNREGFELFMSWFQKISMDQGFQDVIVGMEPTGHYWLNLVHFLKEKQVKYGVVNPLHVKKSKELDDNSPTKNDTKDAKVIAQLVKDGRYAVPSLPKGIYAELREAMKIREHLTTDLCVVQARVHNWLDRYFPEFLTVFKDWECKSALQMLNLHLLPHELVHVPDTTLLQHLREAAKRGLGLGRIISLKAAASCSVGIRDGSELAKMELKLLLTQYEWFQNKLEELGAKLDELLIQIPHVQQLLAIKGIGRDTIAGFLAEVGDIGQYRHPKQITKLAGLNLKTNSSGTHIGQTKITKRGRKRLRALLFRVMMPLVAKNAAFQALHEYYTKRQVNPLKKMQSLIALCNKLIRVFFGILTKGHEFSEEKMMQDIPRFTELPQAA

SEQ ID NO: 223857 - protein, 341 aa, unidentified
MKYVGVDLHKQTISVCVMTEDGRKRRVEQRRSLRCADIGGIRQFFEELGTFRVVVEATSSYEWFFLLIEDLADRCLLAHPKKLRVIAESKHKSDKIDAQVLAEFLLLDMIPEAYRPTPRVRQHRVLVRHRNAVQRQITSVKCKLRHKAAFYNADIASLFTARGLQHLAKIAMSDADRFECQALQDQLEFLKKQLKGVKQELETFAKTAPLAEREGRAVLATMPQFGPVTIDVILSETGDVRRFRSAKRIVAYAGLDPGFRESAGKGKRLPITKEGSRLLRWALIEAAWRLVIKSARWRRLFDQLRRSTGHKKKAIVGVARRRLCVLFAMLRDGQAYRLPAE

SEQ ID NO: 223858 - protein, 342 aa, unidentified
MEYYVGLDVSLKQTSICVVDQTGSVVREGVVDSDPEAIAVYVRSKAPDAVRIGLETGPTSTWLWTELKQLGLPVICIDARHAKAVLRMQINKSDRNDAIGIARIMQTGWFKEVHVKDIDSHSVRALLASRALLVKIKRDLENHVRGLLKNLGLVIGRAKFNVFAVRAEELIEGRPELIAAIRPLLEARIAVEQQVSELDRRVMKLARHDAQVRRFMTVPGIGPITALAFKATIDDPARFARSRSVGAYVGLTSRRHASGEVDWSGRISKCGDAMLRSYLFEAAGVLLTRVPKWSAVKAWGVRLAKRNGLRKAKVAVARKLAVILHRMWIDGTEFNWSKEIAA

SEQ ID NO: 223859 - protein, 362 aa, unidentified
MFSERTSVGLDVHARSISASAIDCWTGELVETRLPPGEGYREVLAWVGSLPGPVQVVYEAGPTGFGLARALRAQGVGCVVAAPSKIHRTPGERVKTDARDARLLARLLRNDDLTAVVVPTIEQESARDLVRLRMDNRSDLMSARHRTGKLLLRHGHVYSGGAAWTGAHAAWMRTIWFENTGTRTAFEESVELVRHLEARRDRLDAQIAVMATDSSFTPVVTNLCCLRGIATLTGFALATEIGDWTRFTGSSIGAFLGLTPTEHSSGGSRRQGGITKAGNTHARRLLVESAWLHKPRYVVGKVLQERWDAAPAAARVRADEGNRRLHHRWVRLDQRGKKHTVATTAVARELAGWCWSLATLQP

SEQ ID NO: 223860 - protein, 453 aa, unidentified
MCWEDRPVLEPNAAGSDVGAREMFVAVPPGRDENPVRVFATFPEDLERLTDGLEQCGVTTVALESTGVYWIPLFEILEQRGIRPCLVNARHRKNLPGRRIDWHECQWLQFLHSVGLLRAAFRPGQDVCAVRTILRHRNELVAAASPHVQPMHKALTQRNLQIHPVISDITGLTGRAMVDAILAGQGDGAELAQLRDPRIQADTETIRKSLEGNWRPEHLFTLGQSRDLYRIDQQQIVNCDLEIEKMLQGFAPRIDPAEKPLPSDRKRNRAGSKRRRKNGHPHPEFDLRTEAYKLFGVDVSQIPGLEENPLPLFSEVGRDMSRWPSAAHFVAWLALCPDNDISGGKLLWRGARRVKNRAGHLFRMAAYALHRSLTPLGNYLRRMKAKLGPQAATMATAHKIAVLFYTMIKNQVEYDETIWDARDPQREKKLQAKLKRQAKQLGYQLVPIEPQAA

SEQ ID NO: 223861 - protein, 337 aa, unidentified
MKSYEKVVGIDVSKETLSISLYDGKSHISYETRNTVKSFFNDFVKKEKGIDFSKVLFMLENTGVYHLRLATHLSKECGYIVSVANPLVIKRYSQMNLKRVKTDKADARLIAEYGYINGDDWLFSPRDIDYYKIDMKLKAVEDFHKQINMLSNQIEAIEYLPFKDNSTLNAYKKLIENFKKEIKKIEKELDILLREKYVEEYKLLSSIPGVGLKLTGVILGKLNGFANFDRGKDVTSFVGICPSIYQSGTSVNGRGKISKKGNGYMRTILYLCSLSACKYNKSCAELYERLVAKGKPKKVALIAVANKLIRQAFGVLKSGKPYDPDHANNLTLVAKNA

SEQ ID NO: 223862 - protein, 424 aa, unidentified
MKVTYQTCCGVDVHQSFLVATIVKTTGGIEPSYQKKRFSTFNNSILEFKQWLLDNDCHDVCMESTGKYWVPVFNLLEDDINVVIANPKWVKAVKGNKDDTKDSKWIGDLFRLGLVKGSYIPCKKVRILREYTRYRYKLVSCRSSEKNRYQNALTVCNVALDSVVSDIFGKSSTSIIDYLLEQSGSSINHEEIASKLLRSLKSKEDAVIESVEGYQMTDAQKYRMRLVRAHMDYITAEINDVDKMIENMISSNTDFENAVQFLCTIPGVKRDSAITIISEIGTDMSQFSSSKRLCCWAGLTPGSNESAGKKKSVRITRAGVYLKPALVQCAHAAVKSDKSPYYKKKYESLVKRRGKKRAIIAIARMILTAIYQMLSTGEQWNPSDLYKIDMPVALVEKQKAKAIKQAKKLLQREGLLPPDEPFAS

SEQ ID NO: 223863 - protein, 351 aa, unidentified
MMIIGVDYHPGFQQIAFLFKETGECGERRLNHSDGEAENFYRDLKARGISVRVGMEATGFSRWFERLLAELGFEVWIGDAAEIKTRRAKKQKTDRLDAELLLKLLLEDRFPRIWVPSPENRDVRQLLWHRHRLVQMRTRIMNQLQALAMNENRYWKGKLWSERGRAELEKLPLAPWTSRRRQELLELLDRMNPTIEELTAAATLEAKKRPEALRLMTHPGVGPLTALAFVLIIGTPERFGCAKQICNYVGLIPSEDSSGGRQRLGHISKQGSSLLRFLLVEAAQAAVRCNADWRRRYRHLAMRRQRNIAKVAMGRRLGARLYWMWRNGCEYSPSLEFGSHAGKLGTGNGGQ

SEQ ID NO: 223864 - protein, 369 aa, unidentified
MFYLGTDQHSKQLTISLRNEGGKAVVRRQVSTEPERVREFLHQLENQCFEAGGYVAVVEVCGFNDWLLKLLPEYGCKEVVLVQPEERDRRKTDRRDAHRLSELLWINRERLLAGEHVKGLRRVYIPSADEQHDRQLTQLRKRLGASRTRLINRVKHALVKHNLQHGCPTKGIRTQAARAWLEKLALPAIDRLEVDQALAQWDLIDEQIAAADEQIAQRAESNANARLIATLYGTKPAYAALALAASIGPISRFPRPRSLANYWGLTPSCRNSGETTQRLGSITKQGSKTARFLLCQLSQHVLRRDAWMREWYKRIKRRRGSKIARVAVVRRLATIIWQMLSRQQPYVTGDPGRSRSAAESKSKSRRGAA

SEQ ID NO: 223865 - protein, 371 aa, unidentified
MKKSIMFVGLDVHKNSIEIAFAEGGRDDEVRSFGKVSGNLEALDKVIRKLVSKGCELNFAYEAGPCGYEIYRHLNSKGFDCTVVAPSMLPKQSGNRIKNDRRDAQMLARLHRAGELTKAYVPCVEDEAMRDLTRAREDAKGLEKRAKQRILAFLLRQGYRYSGRSPWSRAHFRWIATLKMPHPAQQIVLQEYLETLSECRQRVAHLTEQIQALLPQWRLSPVVRALQSLRGVSLIVAATTVAEVGDLTRFDSPVELMSYLGLVPSEHSSGGKTRRGSITKTGNGHVRRVLIEAAWAYRLPARVSLKLQQRQEGLSQNICAISWKAQLRLCARYKRLLAKGKATQLITTAIARELCAFMWAIAMAVKAPETV

SEQ ID NO: 223866 - protein, 387 aa, unidentified
MNVVTDKSEPLTAIHTQLGAIFVSLELSRSSWLITSLSPGGGEKMSKHSVRGSDFAGLMQRFAQLQEKAKLRTGRSFRIIVVHEAGLDGFWLHRALQNEGIESHVVDAASIATSRRRRRAKTDKIDGETLVRTLLAYKRGEPRVCAMVKAPTPGEEDRRHLCRERKALTAERVRHVNRIKGFLFSQGISGYQPLRRDRRQRLEELQTGDGRALPQHLKALVSRELDRLELLLKQIKTVEAARDELLAEEQTAKLAPAPMLLDIKGIGPEFAAILWSEGLFRHFENRRQIAAYAGLAPTPWQSGTVDREQGVSKAGNPRLRTTLIQLAWLWLRNQPRSALSIWFHVRVSRNGGRLRKTTIVALARKLLVALWKYVTAGVIIEGVTMKA

SEQ ID NO: 223867 - protein, 490 aa, unidentified
MTSPVRAGKGQPSQAFHQYGVGVDCHSRSFQICVLIPNAREHREWQQTVPAQWDQLRTTHAWVLRVLHDQGLEVAPSDLRYTCESTGQYHMPLCLAWRGHPSVINPSDTSHIRRKTDRLDAHKLAQHSLNGLWRESWMAPDRIQELRVLALQRSKLVGERTRLSNRINGDLLRFGHTIGQVGEINGSVVRPLIEDFCRSGTVRLHREYFSDIAIPPGVSLVFDQRWKRIDELDRQIQVIEQACVHLVDSQEWCLGGSHPVRGSQLRKNLESIPGVGRWTAVVWLAEVGDIRRFATANRLIAYAGLDPSGAISAGKVVDAQVRKGNARLHGALRNAARAMLRHAPSCRFSAWARAYLGRQSRGGKSKALHALARRVGKAMYFCHWKNEPFDESKYGALLRESSYPDCPVEEMGLSAGVVRILKGNGLNTSRQVVDAFDSDLGRRPGCGKVTVQAVATWINSHRCKWPSEPRSARAATLSTRNGPEDCACGE

SEQ ID NO: 223868 - protein, 345 aa, unidentified
MTKVYFRSFHDFQFRAAIDISKHSYAIFCVDQTTGEIFEENRSEKDFLEFFRMKSKSVIAMEACATSKYWARRLSELNHEVLLLPPKKCKPFVDGCKSDRNDARGIYRSMESVRPSPRPITLELQQIDTLVALRKFVVKEYVSYTNALRSHLAEYGKAMPKTIKGFENNASICINELEQEGLGAFLIQRFRDMLARYKDLRREEAEYSREINRLTKESRLGQLLRTIPGVGAIVAACALPMLSDPKAFANGREFAAFLGLVPSHTGTGGRTINGKITKRGDRYLRAMLVQGAMAALRQKVKAPWLERLISREPARKKVAVALAARIARVMWAIANTNQPFELRML

SEQ ID NO: 223869 - protein, 316 aa, unidentified
MTQISTAAGIDTSKAKLDIAVHGRVEHWQVENTLVGWRRLAAELSGTGVTRVGIEASGGYECGVVGYLRDKGFVVLVLQPIQVKAYARLHLRRAKNDKIDAVLIAACAAMIDQARIDPDQRLAKLAQHLTFVEQIEEDIARFKVRLEHVGDRRHRRIVVTDITRLKARRAAELARIVAALRAHDDLARRLDLVLSIPGIGERTAIALIVRMPELGRVSREQAAALAGLAPFDDDSGKHKGERHIAGGRRRLRRSLFAAALPAAFHWNKALIELYARLIARGKAHNEALIACARKLLIYANTVVQRGTPWTERPAAA

SEQ ID NO: 223870 - protein, 344 aa, unidentified
MENYAGIDVSLELSSVCVVDAQGKILKEAKVASEPDALVEFFETLGFAVKRIGLEAGPLSQWLHAGLKRTGFETVLLETRHVKAALSAMTVKTDRKDARGIAQLIRMGWFRPVHAKSVDAQEIRALLIARKQLLGRLIDVELSIRGILRGFGLKVGPVTRKNFEARIRELVAGQATLERIASAMLSARSALKAEYGRLHKAVLAIVRDDAVCRRLMTVPGVGPLVAVTYKSAIDDPHRIVKSKAAGALFGLTPKKYQSGEKDVTGGITRAGDEIVRTVLYEAANVLLSRITRFSKLKRWGMDVAKRRGSKRAKIALARKLAVILHRIWVDGTTYRWAEAGPIAA

SEQ ID NO: 223871 - protein, 327 aa, unidentified
MMRQPGSHTPKIKTQVALDVSSKALDVHFKSDGQAFSVPNTEEGLNSILKIFTAYDVSLVLMESTGGYEDLAACFFQAHGFDVAVVNARHARNFARAMGKLAKTDRIDAAVLADMAFMIDASHDRDRYIKPLTDEQRKRLSVMTVRRRQVVGLISTEKQRLTRADDWTRASIKKTIKALTTELRHIEQQISAHVKKNFVDLSKMLLSIPGIGEQAMTILIGEVPELGKADRRTISALIGVAPFNHDSGNFRGRRRIWGGRLSVRNVLYMGIISATRFNPVIRSFYNRLVSAGKPKKVALIACMRKLLTIINAMMRTGKPFDVALHGV

SEQ ID NO: 223872 - protein, 397 aa, unidentified
MYIVGIDIAKRKHEAAVIDGEGTVIIKPFSFTNNCSGYNRLLAMLAKAKLPLDEVSFAMEATGHYWLALFTRLQKEGFRVQVINPVQTNSIRSFYIRQAKTDPRDALLIAEVIRFGHFSESTLHPENIYELRELCRGRHAIVSMQADVKRKVVALLDQVFPEYETAFTNLFGDTSMAILQTCPTPKELSEMPLEELCHLIEVSSHKRFRMAKARELQALARNSFGFAMAGDVFSTMIRLYAKHLDFLKQQVREMDCKIAEIMETLDTPITTITGIGPTLGAYILSEIGDISRFSSAAKLAAYAGIDPTMRQSGEYNGVRNRMSKRGSPYLRHAIWLAASSAVLHDPALKLYFQKKRDEGKPYMASVGHACRKMVSIIYAVMRDNKAYTPCIQNEISA

SEQ ID NO: 223873 - protein, 384 aa, unidentified
MANEKERFATTTTELARLAGWLAERQVTLVAMEATGVYWKPVYYALERGFDVWLCNAHHVKNVPGRKTDMSGAEWLADVAAHGMVRPSFVPPPAIRELRELTRYRKTQIDARVAEIQRLEKLLQDAGIKLTSVASKVLTQSGRLMVEALIAGQCDPAALAELAKGKLRPKIPQLTEALNGHFGAHHAVAAQRILGHVDFLDASIATLTEQIDARMQPYGAARCLLAPVPGLDRLIIDTVIAETGADMTRFPSAGHLANWAGVCPGNHESAGKRRRVGVVPGNRWLRRALIEAAHAAARTKASYFGAQYRQIARRRGPNKAAVAVAHSLSDLVWHMLSTGECFTDLGADYFQRRRDPQREADRLVRQLQALGYRVNVTEPPTPAA

SEQ ID NO: 223874 - protein, 317 aa, unidentified
MDVKTTADRFVGIDVSKARVDVHIRPDGKAFGCATDAEGLGVLIERLKPLSPCLVVLEASGGYEGVVAGALAEAGLPVAIVNPRQVRKFAGAIGRLAKTDAIDAAVIAHFAQAVRPAARPLPDDLSIRLAELMARRRQLVVMINAEKQRLARAHDRIAQSSFRAVLKRLEAERVRIDKAIDKLIEASPVWCAQQDLLKSVPGIGDVVARTLIAELPELGRVNRHQIAALAGVAPINRDSGRYRGKRKIQGGRVEVRAPLYMACLVAIQHNPALSRFYRRLREAGKPARLALVAAMRKLLTILNAMLRDHKPWANAQI

SEQ ID NO: 223875 - protein, 442 aa, unidentified
MARKPSKQRFTIVHPDCAAIDVGGREHFVAVDPRHDNPVQSFTSFTDDLFKMANWLESLGVKVVAMESTGVYWIPIYEVLSERGFEVYLVNARATRQITGRKSDVLDCQWIWQLMTHGLLRGAFRPDDLTCCVRSLVRQRASKVKDQAQTLNRMQKAMSQMNIQLANVISDISGVTGMKILRAICAGERDPVQLAELTDRRIRAGKEAVARSLHGNWRREHLHALTQELAAYDFLEQQIAECDNAIKTALEQLPVLQNKPEPSNKPLRSPHRNGAQQTELHQTLWKVLGVDLTAIPTIGVDTALVLAGEIGTDLSRFPSSQHFCSWLGLAPPTRISGGHRLAGGGPKIVNRAAQALKQAASNARNDKGFIGASHRARLTRMDTSCAIKATAHQLARLVYNLLTKRQAYVEQGLEEFETRSQDRQVRALLRKARKLGYQLVAA

SEQ ID NO: 223876 - protein, 337 aa, unidentified
MKSATTIGIDLAKNSFSVYGVDDKGKTVLSRTLTRAGVVRFFANLPSCLVGMEACASSDYWARTIESLGHEVRRIHPQYVKAYLLGAKNDTNDAAAICEAVQRPNMRFVPHKSPEQIDIQCIHRTRQGYIKSRTALVNQARGLLAEYGIIIRQGISAIRNQLPLIIADEENALSGLMRRNIASLYESICFFDSQILEQDKLLKTVAKENEACQQLMQVPGIGIMTATILLTVAGVASNFKNGREFAAFVGLVPRQNSTGGKTRLLSISKRGDCYIRTLFIHGARSAITRILAGQTPKYRPNSWVIELIARRGRNKACVAMANKVMCCYFNYFACCAS

SEQ ID NO: 223877 - protein, 386 aa, unidentified
MTNQMLQTNHNNPQGQIHTPRLLVAMEMSVKKWGVALAVEGQPRKRVKTVAGGDYMTLLKAVEAAKQRFGLSVDTPVVFCYEAGRDGFFPYRRLTELGHEVWVIDSASIEVSRRRRQAKSDGVDLDKLMELMQRRARGELKALRVVRVPSQESEDQRALPRERESLMHDAQQLRNRIESALFTQGYRDVPKTAKGLQAWMESPAVALGQQLRERLRRDIERLALLETQFRIVEQALATQVQQEPVTAVAGVAKALMQLCGIGLIGAWVLASEIFGWRKFRNRREVGAILGLTPTPYSSGNDEREQGISKAGNARARSMLVELAWLWLRYQPESALSQWFKTRFSGGGKRMRRIGIVALARRLAVALWRYIDQGVIPAGATLKAAKT

SEQ ID NO: 223878 - protein, 386 aa, unidentified
MPQLNDLSRSLVTLDQDATLIAVIEMGQASWLVAGVVPGVERQPLKKLGVDESTLLKLLHRWHEEAEKAGHKIKRIAVAFEAGRDGFWLARWLRACGIEVHVIHASSVAVSREHRRAKTDRLDTELLKRAFLGWLRGERDHCKMVAIPTTQDEDAKRPNRERENLVGEQSRIVNRMKATLTRLGIRGFNPKLKTAAARLDGLRTPEGGPIPPNTLAELRRDMVRRRLVSDQIRQIEDARLERLKHAPGDGPHAMVRLLARVIGVGIETADMLVQEVLSRNMRDRRAVARYGGLTGSPDESGKKRREKGLARSGNARVRRGMIQLAWRFLIFQKDSALAQWFRARTENAPGTRKTMIVALARKLLIVLWRLVREGVVSDGVILRPAQ

SEQ ID NO: 223879 - protein, 338 aa, unidentified
MTVYTGLDVSDRTTHICAVDEQGRVTWRAVCATDPQALAQMLREHCPQAVRVVLETGALSAFLYHGLIERGVPAVCICARHAKGVLSVRANKSDPHDAEGLAQLARTGWFKAVRIKDDATHLDRARLKVREQLIKSHRALLNQLRGLLKLFGLRLGQATTPGKRMERLVALFAQKPQLRPILAPLVASLTMLEAEIGKATRALKLRAAADPVCARLMSAPGVGPVCAMTFKSAIEDPARFQRGADVGAYAGLVPRRFQSGERDTRGRISKAGDPMLRHALYEAANSLLGRLKRDCALRTWGMALAEAKGAKRARVAVARKLAALLHTLWRTETSFRWA

SEQ ID NO: 223880 - protein, 360 aa, unidentified
MDVGQMVADRDVVGGVDTHKDLHVAAVVDELDRVLESRCFATTRHGYKQMLTWMRSFGQLRRVGVEATGTYGAGLLRYMQNAGVEVLEVMTPDTHDRRKRGKNDDLDAQNAAHAAFAGRRTVTPKSRDGMVEALRVLKACRKTAVAARRVALQMIHNTIVCAPDDLRETLRKMTRMQLIRTLAAWRPNLTDYRSVGSAYRITLKSLARRYLELHDEIVDLDTMIVAIVDELAPALVARNSIGHGCAAQLLLTAGDNAERLQSEASFAALCGVSPVPASSGKTIRHRLNRGGDRAANSALHIIAIGRLRTDLRTKAYIAKRIAEGHSKLEAIRCLKRYIAREVFSLINQRKREINQSRNAA

SEQ ID NO: 223881 - protein, 313 aa, unidentified
MPEPLFIGIDVAKNTFHVASCPAGINTSLPNCPSGTKQLIKTLQPHNISLIVLEATGGYERPIVAELLGANLKVVVASPRQVRHFARGIGEFAKTDPIDAHVLARFAQVVQPKPKLPSSPETNELADLVRRRRQLTDLRVQELNRSQTIRHPKVRKSVRKMLKTLDYQIAELDELIRQHISSDDEFRKKDQILRSTPGVGPHTSAILLSQLPELGRLNRQQIAALVGVAPYDFRSGRFAGKSHIWGGRKDIRCVLYMAALSAIRCNPAIHLFADRLLEQGKAFKVVITACMRKLLIILNTMLRNQTLWRPERN

SEQ ID NO: 223882 - protein, 379 aa, unidentified
MRRVCGLDVHKDSIYMCILYENGSKIESVFGVLTPELDKLRDLLVSHHVCEVALESTSIYWIPIWNILSVDFSLKLVNPYFIKQLPGRKSDVKDDEWIAIVMQQGLIRGSYVPDRMIQCLRQYERRNHELSKNIVHAEQRMDMILQRCNIRISNYVSCISCKGYQKVVNAIISGESNPKVLVTLIHKRTLNKHGRQVVEDSLNGFVSDTDRDILRQYRDERMQMEQHKSENKAKMQAICEAHYCEELELLQTLPGIKEESAANIIAEIGVDMKMFLTASAIVGWAGLKPRNDQSAGKIKSRKITHGNKYLRKILVEAAWSAARTKDSRFMKMYQRLLARGKSKQKALIAVARKLLVLIWNMLSKKEAFNPEYKRRIQAA

SEQ ID NO: 223883 - protein, 410 aa, unidentified
MEILYPHCAGLDVHKDTVVACARHMAEGKVRTQVKTFKTTTEQLIALSDWLSSAGCTHIAMEATGVYWKPVWHILSDGEFELILANAAHVKNVPGRKTDANDAVWLADLMAHGLIRPSFVPDEPTQQMRDLLRTRKQMTRDRASHIQRLQKTLEDANIKLDSVVTDILGLSGRRILEALVDGQTVPQALASLAHRRIHASSDELEAALRGRVTRHHRFLLKLHLDQIDAIDAAIARIDEEVSANAEPFRAAIEQLTAIPGISPLAAQVLVAEIGIDMSRFKTAAHLISWAGLCPKNDESAGKRRSNRMKKGAPWLKTTLVQSAWAAARTKGSYFQAQYHRLRSRRGSKKAVCAVAASLLTTAYHMLKNGSPYRDLGPHHFDQPDKQKQAVRLLKRLQNLGYTVQIQTIAA

SEQ ID NO: 223884 - protein, 427 aa, unidentified
MNDSEYKPTLCVGADVHLDEIVLRAVDKALGHEVLELFRVTNNLPGAQSAATFIARTAMDLGYARIEIGWESTGMLWIPFHRYLTTEPLLHPFELELVCFNPKLVAKFKEAVVLRGPKNDERDALDVAARLRFGELPVSYVPSDFWQGLRRLTRYRYRLSKALTQEKNRFQSYAFLKCSDWKRVKVFSDVFGATSIALLTEFTFAELQDMTHDQLVDVITRRGRGRFHDPTGTARAVRQALRTSYPIDPPMDEMVTAALAAGWDHIRYLKRSMRRLDQLIARYIDLVPNPIITIKGLGAVMTAGILAEIVDTLRFPEEKHLAQYMGLTWRKRSSGGFVSQNTRLTKVGNVYLRYYFVLGANLLRQHNLEYKAYYWRKYQEVSKYQHKRALVLTARKLVRLVHALLTKNEPYVRPRTSYPGQEDDGLQ

SEQ ID NO: 223885 - protein, 351 aa, unidentified
MSHKTAATAAQTIGIDTGKNTLHLIGLDDRGAIVLREKVSRGRITARLANVPRCLIGIEAGMATHYVARELIALGHDVKQVPPAYAKPFRQGHKNDFRDAHAIAEAVQRPSTRCVPVKTADQLDLQALHRVRSRLVGQRTAVINQIRGFLLEHGIAVRQGLRFLRQQLPDILGKRGDVLSPRMTRIIEDLSGDWRRLDERIQHITQEIEVLAHGSESCRQLMTAPGIGPLIASAMVAAIGNGTAFAKGRDFAAWLGLVPKQMSTGDRTILGRITKRGNRYLRTLFMQGARVILLRPANWAKHSFGLWLTAAAQRLHHNVLATALANKLARIAWTVLAQGRSYEARVEPKVA

SEQ ID NO: 223886 - protein, 338 aa, unidentified
MFNLPIFVGIDYHTHTIQVCVMDSQRKILVNQSVGNDSEAVFRLVAPFGSDVHAAIEASTGVADFAEQLIAQYQWHVELAHPGYVARMKQTPDKSDWTDAKLLADLTRASYIPRVWLAPQYIRDLRELVRYRHGLVQQRQQVKLRLRANVRNHRIVCPYSPWTIQGKKWLLDQENITSPTLLFLLQDHYDLIEHLNEKIVAVTERMTAHVADDLVIKQLLLQPGVGIITAITLRAMIGHFDRFRSSKQLAHFCAVCPRNYSSAGKTTTGGLIPSGDDLLRLVLIEAAHRLIRYNAEWKLMADRLRANGKKTCVIVAAVANRWIRKLFHQMREPMAGTV

SEQ ID NO: 223887 - protein, 348 aa, unidentified
MKKIVKQVVGIDVAQKELVVSLGRMYDDWSPEVYANKSFANTQKGFMTLVAWVKKWSDPGCSVRFVMESTGVYHESLAYFLDEKGYELTVVLPNKISNYFRTLDVKTITDKTAADAITMFGLEKKLETWKRPKKIFKDLRQLTRERDQIVQERTMVKNQLHAEQAEANPNPSSVQRIKKRIEFLNKQEREIKTEIATVVKADQEVSSAIKITSSLTGVGLLTSVTVLAETNGFELIRNKRQLSSYAGYDIREKQSGTSVKGKPRISKRGNKYLRKAMHLPALTAIRHDERFRATYARLVSKHGIKMKAAVAVQRKLLEMIYIIYKTNVPYDKNYLKKHNVANADAATE

SEQ ID NO: 223888 - protein, 422 aa, unidentified
MLEETQDEQEIIARVAALDIGKAELVCCVRVPDPTGGSRRVQEVTTYSTMTRSLQAMADRLLDLGVSRVVMEATSDYWKPPFYLLEAHGFQTWLVNAKDVKHLPGRPKTDRLDAVWLCKVAERQMLRPSFVPPVPIRRLRDLTRYRIGLVSDQTREKNRVEKLLEDAQIKLSVVASDIFGISGRDMMAALIRGERNPQVLAQMARTRMRTKIPQLEEAFVGYFTEHHRFLLAKMLSRIDALDADIADVETQIEAQIAPFAPAVARLDEIPGVGVTAAAVIIAEVGVDMTRFPTPAHLSSWARFAPGVKESAGRKKGTGSTGHGDRYLARVLGEAAVGASRTNTFLGERYRRIARRRGKKKAVVAVGRSILVIVWYLLQDEMAQFNDLGPDYYDSRTNPERKKRNHIRELEALGYRVTLQPAA

SEQ ID NO: 223889 - protein, 460 aa, unidentified
MNRKRSKSRVDRTMPVVHPNAAAIDVGATMHMAAVRADRAPEPVRGFGTFTADLHRLVDWFTECGVETVVMESTSVYWIPIFELLDARGFTVFLVNARDAKHVPGRKTDVSDAQWLQRLHSFGLLRASFRPKGHIAELRAYVRQRERLLEYAASHIQHMQKALTEMNLQLHHVVADITGATGLRIIRAILAGERDPEALACLRHYSCHSSAETIAKALTGSYRAEHLFALDQALALYDAYHEKASACDVRIEAVLKELSIHRGRDHGSTPPALRRRNRTDQANALAFDVRAALFGLLGKDVTTIDGLGPYLSLKLIAECGDDLSSWPSAKHFTSWLGLAPSNKVSGGKTLSSRTRRSGGRAAALLRLAAVTVGRTDTALGAFYRRLSSRIGKAKAVTATARKIAVLFYNAVRHGMDYVDPGASSYETRYRTRVINNLHRRAKAFGFVLQPLEPKAGAAVS

SEQ ID NO: 223890 - protein, 338 aa, unidentified
MSKIMTVGLDLAKQVFHVVCCDGRGKVVGKRMLRRAQVLGYFSNLAPARVGMEACAGAHYWARELEGLGHAVKLLPPRFVKAFVRGNKNDYNDALAIAEAVVRPEVRGVAVKTVAQQDIQALHRLRSECADSRTALCNQLRGLLAEYGVVLPRGVSSLRRRLPALLEDGENGLSALFRRLLAQGYQRLCELDAHIAAYNAELARHSRQDDACRRLQTIPAYGPVVASVFHSQVGNGRAYRRGRDVSSALGLVPRQHSSGGKTVLLGISKRGDRYLRSLLIHGARSVVRQAAHKDDRLSRWINRIKAQRGHNKAVVALANKLARIGWAVLRYQRDYQPA

SEQ ID NO: 223891 - protein, 314 aa, unidentified
MASIICGVDVSSETLDTRIGLDGPVAHVRRTPEGIAELRSFCAEHGAELVVMEATGGYEKLPFSLLWASGVPCAIVNPRSVRRFAEALGFLEKTDRIDAGVTADYARVKRIVAQEPASEAQARLRSLVTRLRQLTELKVAQSHQRRLLEAADAQASIDELLAVIRRQIRSFEAMIAELLDSDPLWRALDEAFREIKGVADRTVARLAAELPEIGTVSNKAIAKLAGLAPLAKDSGKRKGKRSIRGGRSSVRSILVIVAAVVQRHDPDLAAFHRRLTLAGKPKMAVRIAVARKLLVRLNAKARDARKALEPPLAA

SEQ ID NO: 223892 - protein, 342 aa, unidentified
MKQYVGLDVSQKETSVCVVNEAGEVLFEGKAKSDPGALAALLCKRAPQAERIGFETGAMASWLWHELRRVDLPVVCIDARHAHAALSVRMNKSDQNDARGLAELVRVGWYREVKVKSQESQKIRAILVARSRLVAIRRDIENQVRSLIKESGLLFPRAIGLQFRNLVRDLLADGHQLLGVIAPLLSIHEQICKQQSKFDDEVRQLARSDETTRRLMTVPGVGVVTALTFRHTIDDPSRFRSASSVGAYLGLTPRRSQSGETDINGKISRWGDRLLRTYLFEAATVLLYRTKKWSSLKAWGIKLAKRIGMRKAKVAIARKIALVLHCIWVDGTSFDWGQAKEA

SEQ ID NO: 223893 - protein, 346 aa, unidentified
MKEVIRRRRSCQSMNAVFCGLDVHKESTYATILDQTGQVVTQRRMKNEEVPEFLEPLEVEKVAMEASTYIIPMYRRLVEEGYDVTVSHPKKTRYIAEARIKSDRVDSKALAELLRLDSLPTSYIPPKELSDLREKIRRRAFIVRQNTKLKVKIRDVLAYEGIKPPTGHGLFTKKGVDWLRGLGLEPVDCYLRLMAPLSREVLLLSKELRGLAKGDTDVQLLMTVPGIGYYIALLIKAEVGDISRFSSGDHLASYAGLVPSTRSSGGVTRHGRITREGSRWLRWALVEAAMVHVRQDSQVTRFYHRVAERRGKKSALVAVARKLATVCYSVLVKGRPYFDPLDAQAT

SEQ ID NO: 223894 - protein, 320 aa, unidentified
MTILDSQVVVGVDVAKDEIVVYRCDEESTLIVANERSALKKWLKLLPDNCALALEATNTYHLDTAEIAHELGHDVYVIDGSRLNKYRDGIGVRAKTDALDAVLLARYLGKESDKLRVWSPPPKAYTQLKSLLRRRAELVRHRVAIKQSWRGEPLLEEALGEYLRCVEQIEKGIQKALKNIVSEAGMDAQVKRCQAVEGIGVLTATAAVTAFMRGEFSDSDGFIAFLGMDPRVRQSGKKDQRRYLSKRGDSEFRRLFHNSAMAASRSPTWRPFYQRYLDRGLKGTQALVILARKLARVVFALMKNQSEYQPNSMFGGSPQT

SEQ ID NO: 223895 - protein, 399 aa, unidentified
MISIGIDVSKGKSTTCILEPYGVVIKKPFIVEHNKDDLTAFVNLIKTYSSESKVILEATGVYHLPILNYLISKDIFVTVVNPLSMSKYINSNIRPGKTDKKDALMIANYGIDNWYKLIPYSEPKFAYDKLRLLSRQYNQYIGIRVKARLTLINLVEQTMPGITNLLENDSTNICMDKLNSFIKKYWHYDNVTKYSERQFVVNYNLWAKKEGYKASDAKAIKIYALAENSIPTLSSKDESTKMLVLEAIRVHREINISTDLILGQMVEMAKHLKEYAILTSITGIGENLASRFIAEVGDINKFHSSSALVAYAGIDAPPHQSGQFISKNRKISKRGSKSLRKVGYEIMTSITRQKSVDDPVFLFIKKKEAEGKAKKVAKIAGLNKFFRIYFAKATEIYEN

SEQ ID NO: 223896 - protein, 367 aa, unidentified
MDQGITYVGLDVSKRTISIAVLWPGRKAPEERTIPNEPRAVARWAKKLQREAPGPVVCAYEAGPTGYALQRQLRGLGLDCRVIAPSLIPRKPGERVKTDRRDARKLAELLAGGLLTEVHPPSPEDEAVRDLSRAREDAKQDHTRARHRLSKFLLRHGLTFGRGRKAWTQAHAKWLRGLPFEHAAQQAVFDDYCLAIDQLEERLRALDAKLAGWAKTEPYATPVAYLRCFRGFDTVTALGLVAELHDFRRFRRARQLMAYLGMVPSEDSSGERTRRGAITKAGNSHARRLLIEAAWHYRHRPWVGPELRRRREGQPARVIAIADRAQRRLYGRRQRLTERGKAPNKITVALARELAGFLWAVLAVDAA

SEQ ID NO: 223897 - protein, 349 aa, unidentified
MQIKSQIRSIGIDLGKTTFHLVALGTRSQIVVRKKFSRSQLLIYTANLPASLIGMEAGVGSHFLGRALREQGHEVRLIPAQFVRPFVKSNKNDYRDAEAIAEAVERENMRFVPIKTEDQLDLQALHRVRDRLVARRTSVINQIRAFLLERGISFRKGPASLRRQMPEILENGDAKLSPGMRRLLDFLWQEWKGLQAQIESLNTDLEQIASSDPSCVRLQQIPGVGPLVSTAVVSAIGNGAAFKRGREFAAWLGLVPRQWSTGGKTKLLGISKRGNPYLRKMFIHGARAAVLRVKREGSTLGKWMSGLETRAARNVVIVATANKLARISWAVLASGNDYHPMHKAAVFSN

SEQ ID NO: 223898 - protein, 335 aa, unidentified
MKKEFFVGIDISKDTFYVCIKQQVDTQITIKGTHSFEQSNAGYIKFLSWVLSKTKNGEPLYVMEATGIYHEELTYFLYSSGKTVAIVLANKIKHFAKSLNVKTKTDKADAQMIAQYGIERNPKPWQPMMSQMKNLRDLCRERLALKKDLVRCKCQAHAMKHAHSKLDMVVQIKEQQIDFLENNIQLIENEIVNITKQDRDFYERVQKIETINGVRLITIVTVLCETNGFDQFNNMRQVVSFAGLDVAERQSGLYKGYSKISKKGNSRIRQCLFMPALTATNHNDKIIALYQRVVERNPTIKMKGVVAGMRKLLILIFVLWRKNETYNPNYQWNGH

SEQ ID NO: 223899 - protein, 356 aa, unidentified
MEQLTTVGIDLAKDVIAACVLDARGAIVEQRVLRRDAFERWAAQLPASHVVMEACGSAHHWGRWFAARGHTARLIAADFVVAFRKGGKNDTADAEAVAIAARQPTMRFVPIKSVDQQAILAWHSVREGWKEERTALLNRIRGLLAEYGVVMSRSADRLLAALPKLSEDRRLPDAVRALLLEVREQFAALHARLARCDAQIAAHARSTPAAKRSAELLGVGPVTASALAATIPDAKVFKSGRQFSAWLGLTPRQHSSGGRTRLGRISLRGNVYLRTLLIQGARSTLQQAINAEPSRASRLQRWILALYERKGYYKTLIAIANKHARILWAILAKGEHYDASAWQRHPMNQPSLASNA

SEQ ID NO: 223900 - protein, 350 aa, unidentified
MKYYKSTTEYNCGIDLHSRQMYVCVMDKEGNKLLHTNIKGNDFDYFLKRIEPYKHDLTVVCESTFNWYWLADACCDAKLEFVLAHALYLKHIHGGKNKNDRIDSEKLAHLLRANLIPPAYAYPAEYRPLRALLRQRMKYVWARASLIGHLKMDQYAEGTVPVSSSSNRDDWEQRILEQYTDPLHRLAVESDMELIRFYDKLIKRIGNELEQRAKKFFRKNYLLLTSVPGLGKIMALTILLEINTIERFPTVKDFTSYARLVKGSVASAGKVKGLTGGKMGNAYLRWAFGQIAILAKIHDPLIKIYAERLVAKHGKFKGNAILSNKIARAVYFMLQNKTVFDVEQLISTNI

SEQ ID NO: 223901 - protein, 334 aa, unidentified
MKKFEFFLGIDISKNTLDYCLLDDQCKVLEKGKVNNEPVSLSKFFLKFENEYCCKTTLLIVFENTGIYSKPVARFLNENKWCYSEVSALEIKRSKGVSRGKSDRVDAHQIAQYGFRNLDKIMLCTEPELIHQQLKILNTEREKMLSAISSFSRTGEAEEFLGKEVFKVVKTHNRQTLSALKKQLKQLDNKISELLRSNEDLKKKQELLKTIPGIAEVGSLYLLLATKGFTRFKNWRKFACYCGIAPFEYSSGSSIRGRNRVNPLADKKMKSLLHLLALTSIRHDPELKLYYERKKEEGKHSLLALNNVKCKLVSRIFAVIKRETPYVKTHQFAN

SEQ ID NO: 223902 - protein, 343 aa, unidentified
MQITTIGLDLAKSVFQVHGIDATGRVVVRKSLRRSQMLPFFAKLPSSLVGMEACGTSHYWARELIKLGHEVRLMPPAYVKPYVKRGKTDAADAEAVCEAVTRPTMRFVPVKSPEQQAALSIHRTRDLLVKQRTQLINMIRGLLAEFGVDIPKGLERALLMARRIVDGKAPDVPIEAAKIVGTLSQQALDTHVRLREIDRDLAIWLRGNDVARRLMTIPGIGPIGATALAASVTDPHQFRSGRQFAAWLGLTPLQKSSGGKERLGRITKMGDKYLRKLLVVGMTALVRRARKNPEGDPRLADLLARKPTRVATVAMANKTARIIWAIMTRGEEYHAGHRPALAA

SEQ ID NO: 223903 - protein, 320 aa, unidentified
MSVTSVVVGIDVAKAHVDVSVLGVKLDVQRFDNDADGHSALVAALQPFAVSLVVMEATGGYEAAIACALQAAGLSVAVVNPRQARDFAKSMGQLAKTDAVDARLLAEFASVLVRREDLASFIRPLPDDKQQTLAALVTRRRQLLTMLGAERQRLQLAIAKVRPSIEAMIKAIRAQLDDVAAQMVGHVKEHYEELDKLLRSASGIGPVASATLIAELPELGRLNRREIAALVGVAPMANDSGTTRGRRRIQGGRFEIRRVLYMAALVAAKHNPPIKAFYQRLLAAGKLPKVALVACMRKLLTTLNAMVKTNTPWDAEFDHA

SEQ ID NO: 223904 - protein, 347 aa, unidentified
MKLHVLGIDLGKTVFHLVGLDSTGRLVIRKRCSRRQLLAFTANLEVQLIGMEACSGAHFLGRALREQGHEVRLMPAQYVKPYVQTNKSDYLDAEAIAEAVQRPRMRFVPIKTEEQLDLQALHRVRERWVMRRTAVVNQIRSLLLERGLTLPKGRSHLDEQLPRILEDGELNLSDSFRVLLAQLKLELEQLAARIVEMDRVIQKTARENEACQRLTEIPGVGPVTATALIAAVGNGSTFKKGRNLSAWMGIVPGEYSTGGKQKLLGISKRGNKYLRRLFVQGARSVLQQRHKQTPGLSSWLAQLLGRTHQNVVVVALANKLVRMAWRSYARTNAIALPFLLCRHKISV

SEQ ID NO: 223905 - protein, 357 aa, unidentified
MQKNTISFKGQKIFIGIDVHKKNWDVAVAPEVGVIKRHPQKASAHELFVFLKKHYPDGDYLAVYESGFTGFSTYYALKDVGINCIVIHAADVPTTQYEEVMKTDKVDSVKLARTLKAGLLKGVYVRERDNLDDRSVIRIRKTIQKDLSSYRIRIKHLLHNNGVSIPERFEKSGSYWSRAFMRWLKEDVNLLSSSKNSLNLLISQVEAIRSTLLESTLLMRELSQTERYKKNVDLLTTIPGIGVTIAMCILTEVYDVSRFRNEREFASYLGLIPTTHSSGEKTMHGEMTFRGNKQLSTMVIEAAWVAIGQDVGLGSLYQHYRERLKPQEAIVRIARKLSNVIFAVLKNRTEYVPYVDN

SEQ ID NO: 223906 - protein, 376 aa, unidentified
MREKLRFLGMDVHAETIAVAIAEPDGEVRSLGTIANREDSIRKFIRKLGTPEQLRACYEAGPTGFVLYWQLTQLGVDCAVIAPTLVPRKPGDRVKTDRRDALKLARSHRSGDLTAVWVPDEDSEALRDLVRQREAAKQDQLRARHRLTKFLLRTGQRPPLGLKAWTERYMRWLAQVRYTQPAQEVTRLDGMNEVEHMSARVKRLEEAILEVVKLAPQPMQDVIRGLQALRGVAHISAVTIASELGNISSRFQSARKLMGYCGVFPSEDSSGNRVRRGGITKAGNAHLRRIVVESAWCYRHLPRVGEKLRKRHEGIPPAIIEIAWKAQNRLHKRYMKLSMAGKDQRKIMTAVARELLGFIWAIAIKAEASCRQPIAA

SEQ ID NO: 223907 - protein, 354 aa, unidentified
MKPEFDIDKSFRQCVGIDISKDKFSACLYMQNAEGSNCRSPFVEFANTKTGFNQLMKWARKGCMKGHAIGFLMEATGIYYEPLAYHLQNLKQTVYVVLPNKARKFAEYKGILTKTDAMDSYVLGWLGCEDRKLKPWTPPKKIYRQLRQMTRFDSAMKVQRTALLNQVEALKHSEMPDSSVVKATLSIINVINKQLEANEKQIKKLIKTDEELEKRISHLSTIPGVSLTTIATIVAETQGFDLITSRKQLASYAGLDIPAHQSGKEDRPRHISKKGNSHLRAALYMPALVATRFNSPLREDYGRIVLKHATKRKVAIVAIMRKLLLLMYTVWKKEEDFDSDIDKKGQETSPYPTR

SEQ ID NO: 223908 - protein, 403 aa, unidentified
MNSVGIDISKGRSTIAVMRPFGEVVISPFEVCHTGSELNALAKRLKSLDGETRVVMEATGNYHAPVAKLLHSAGLYVSVVNAKLVHGYGNNDLRRVKADRKDAVKLANYGLDRWLALPRYTPEEDTRLLLKNCYRQYRQYSKVQTVLKNNLISLLDTVFPNANRLFGSPARADGSEKWVDFVAEFWHCECISKRSEKAFINKYQKWCRKYGYNFSEEKARDIYIEAGGHIGVMPMSETAKLLAEQAVSQLRATSAALAALKQEMQSLASQLPEYPVVMDMFGVGPTLGPQLIAEIGDVRRFYSKKALVAFAGIDAPPNDSGDMTGRHKSMSKIGASSLRRTLFLIMSVYLQNSPLDEPVYQFMDKKRAEGKPYRVYMMASANKFLRIYYATVKAYLEALEHIA

SEQ ID NO: 223909 - protein, 341 aa, unidentified
MGEVSTIGLDIAKSVFQVHGVDVAGLVVIRKRVSRAKMLEYFGGLPRCLVGIEACPSAHHWGRELQALGHQVRLIPPSYVKAYLKRSKNDANDAAAICEAVTRPSMRFVPIKTMEQQTVLMLHRTRQLLVRQRTMISNALRGHLAELGVVAAKGRNGTAELLRIIADRRVSPAVCGILEVLARQYSAIGTEIASIDKNIMVLHRACEASRRLAEIPGIGPISATALVAEIGDWKAFGSGRSLAAWIGLVPKQYTTGGKDKLGRITKQGNRYLRWLLVVGAMAVIRYAQKHGTEKRPWLGRLMERRPTKVAAVALANKIARMAWAIMVRDERYKEPKLLLAA

SEQ ID NO: 223910 - protein, 514 aa, unidentified
MARNQSRQRFELVHPHCAGIDIGSREHWVAVDRDHEQPVRSFSTFTDDLIKLADWLETLKIEVVAMEATGVYWIPLFELLDARGFKVYLVNSRATRQISGRKSDVLDCQWIWQLMSHGLLRGAFRPDDAICSMRALIRQRASKVRNQAQTLNRMQKALSQMNIQLANVISDISGVTGMKILRAIIAGERDPAVLAELTDRRIKASKETIARSLHGNWRLEHLHALGQEVECYDFFEQQIGACDKAITDALSQLPEREEAPQPSRKILRSPHRCAADQAALHQSLWRVMGVDLTAIPTIGVDTALIIAGEIGPDLSRFPTMEHFCSWLGVAPPTRISGGRQLSGKSQKTLNNAAQALKQAASNARNDKSFIGASHRARLARMDTSCAIKATAHQLARLIYAMLTKGQPYVEQGIEAFEERSKEKQYRALLRKARKLGFIFCLMRASLLAKAWFKYPGSRGCTGLFASKLAPTDFLYNEQTSAYQQSPANTLSCTLDFKEPSFPCQHPSAVCAQAA

SEQ ID NO: 223911 - protein, 364 aa, unidentified
MRDTKPAAPRPSAPTLEPVGTWVGIDVAAQTLAVVIAHADQAATPAETVANTAEGWQTLRRSLQAQGIQPASSQVVLEATGAYWVGVATALTAAGWTVSVVSPASARAYAQARLRRAKTDALDAAVLAAYGRDLRPAAWRPPPPEIQALQLLLRQRDDLVAMRTQTRNRQHALAQLPPAAVPPEVHTSWEALLATLETQIAHVTALIEQRVATTPIAEEVARLDAIKGVGWLTATLLLVETAPLGLALGASGIAGAGEVTPKQVVAYAGLDPAPRQSGTSVRGAGHLSKTGHPRLRQALYMAALAAVRSNDRLRAFYHRLLARGKLKRVALVAVARKLLVLMVTLLTHQRTWDPDWPARPARHP

SEQ ID NO: 223912 - protein, 351 aa, unidentified
MTCKKDVAVVRTIGIDTGKNTLHMIGLNEKGAIVLREKVSRNRIAARLVNIPPCLIGIEAGMATHYMSRDLLALGHEVKQVPPAYAKPFRQGHKNDFRDAHAVAEAVQRPSTRCVPIKTDDQLDLQALHRVRSRLIGDRTAVINQVRGFLLEHGIAVRQGPRSLRQQLPQILATRTDVLSSRMLRIIGDIVDDWRYLDDRIERVTDEIEGLARTDVNCGQLISVPGIGPIIASATVAAVGNGTAFAKGRDFAAWLGLVPKQMSTGDRTILGRITKRGNRYLRMLFVQGARAILLRPKSWAKYSFGPWLTAAARRLHRNILTIALANKLARIALTVLVQGRSYESRIVPAAV

SEQ ID NO: 223913 - protein, 277 aa, unidentified
MKGISVVGVDLAKNVFQLHGVDERGQVVLRRQIKRGKLLETMAQLPRCLVGMEACSSAHYWAREIGALGYEVRLMAPKFVKPYLKSQKNDGNDAQAICEAVSRPNMRFVGVKSTAQQDLQCVHRVRSRLMKARTALINELRGLLGEYGLVVPRTPQQVKKLVPTFLEQGCRVLSQPIRALFAEVLEELRWLEERIGLMDERIEREAKGNPLCQRLQQVEGVGPLTATALVAAVGDPRAFKNGRQFAAWLGLVPRQNSSRSTTRLGRITVNRPPAPRV

SEQ ID NO: 223914 - protein, 454 aa, unidentified
MEQKNESLSLEIVNPCAAGIDIGSRSHWVSIGQTEKQIKEFGVFNDDLKAIADWLAENKIKTVAMESTGTYWQALYAVLLSHGFEVILCNGKFTKNIKGRKTDIQDCAWIQKLHSIGLLSGSFLPDEATEQLRTYCRHRANLLDMAAGTQKKMQKYLRLLNLRLDVVVNDTCGLTGLAIIEAICNGQTKPEKLAELRHGNCRKSEAEIARALETNGRKDYLFALQQELDMYKIIQTKILSCDLEIEKMLTTMIDGDDNKKQHFIDKKSHKRINKNTPKNIDLNIVGYQYFEGVDLMAIEGFSHGTILTLISEVGLEGIKKFQTAKQFASWLRLAPNNKKTGGKIISSKVPKGSNRLKIALRNAANAIGNLKDSTPLRDFFQRINFKKGRVSAISATARKLAVIIWNMVTKSQAYVNPEGYLFLDQKRKLGLVKRIQKQIIKFGLTKDDLEVVSS

SEQ ID NO: 223915 - protein, 431 aa, unidentified
MLGGNQEKLMSQNQPEIQYAAFVSIDWADQKHVWSLQEANSRTREHGEVGHMPEAIEAWIAQMSQRFAGRPIAVAVEQSRGALVFMLSKYEQLHIFPVPPAMTANLRKAFYSSGAKTDPADTDLLQDVLQMHREKLRRLSPDTEATRLIQNLVEERRKLVDEKTAQSNRLEAHLKIYFPQIPQWFGDVDSPLVCALLERWSALEALQKARPDTLRSFFRKHQCRKEELIESRIKAIGEAMPALKDRAVVEAQLAVVKVLVQVIQVLHQGIEDFNRQIQEAAAAHPDFFIFESLPGAGAVMAPRLLAASGSQRERYQNAAEVQTLSGIAPVTESSGKSSWIHFRFACSKFVRQSFHEWAALSITQSQWARAYYELQCRRGKRHHAAVRALAFKWIRIIFRCWKERVAYDEKVYLAALAQHNSPLLAATKIAL

SEQ ID NO: 223916 - protein, 343 aa, unidentified
MECYVGLDVSLKQTSICVVSRTGSVVREGVVDSDPDAIAGFVRSKAPGATRVGLETGPTTTWLWTELKRLGLPVICIDARHARAVLKMQINKSDRNDAAGIARIMQTGWFKEVRVKDVVSHSVRALLASRALLVKIKRDLENQIRGLLKNVGLVIGRAKFNVFTMRTEELIADRPQMIAVVGPLLKARQAIEQQTDDLDRKVLKLARYDAQVRRFMTVPGIGPITALCFKATIDDPTRFKRSRSVGAYVGLTARRHASGEIDWTGRISKCGDAMLRSYLFEAASVLLTRVPKWSALKAWGMRLAKRNGLRKATVAVARKLAIILHRMWIDRTEFNWSKKEVAA

SEQ ID NO: 223917 - protein, 357 aa, unidentified
MLYVGCDAHKKYSMFAVMNNEGPVGVPVRVDHDRVVFRRYLDCLPAGTSVAIETIGSWYWMVDEIEQAGHNPILTHARKAKLMMGQINKTDKLDAKGLALLLRNGTLPEVWIAPGELRDQRELPRLRMALVGIRTGLKNRIQSALAKYAIRIDEPSDLFGKAGREALEGRLGELPPQTRLSVESELALLDQVEEQIESAEKRIKEVIEETPAMKLLMTMPGVGAILGVVIAMEIGDVERFGGAEKLASYAGTVPRVSSSGGKTLYGKSRPDVNRYLKWAFMEAANVISSHPRWWAGRHVGRLYQRIRERKGHGKAVGAVARHLSEAAYWMLKKNEAYREPQSHNPDSSTSGGNAILP

SEQ ID NO: 223918 - protein, 349 aa, unidentified
MNSSNKPKADSSLCESMFVGMDVHKNYLQVAVLDEKGKVLDNSRVDNNLTKVNEFFDSLHPNSKIKVVMESSGMWYNIYECLSKRHLDVRLSNPVKTRAIASAKIKTDKLDAIKLADLLRGGYIAECYIPTRGTMELRDIVRHRAALVRMRTKLKNKIHSIMFMRGTSISYVGTHTFTKGYIEKLKELNDYRINGYLCIIESLNDEINTVSKKILLLAEEDEIAKLLMTVPGIGYYSALLIVSEVGDINRFPDSYHLCSYAGLVPSTRSSGGLTYHGSITKTGSKYLRWIMLECVHAHIRNEKNSNVAQFYHRISRKKGNSKAAVAAASKLVKIVYWIMKERRVYNRSQ

SEQ ID NO: 223919 - protein, 471 aa, unidentified
MSKGSGNGTTRGDRRRNARRERLRELLPRDGAVIGIDLAEDKQALAVVDHDVRVLARKTVTVKAFRLGEALDWAVAQARVKGFKQVAVACEPTGPRWMQVQRLCAERGLPLVCIQPLVSHIAREQQDYTPHKTDESDCVLIGRLAAELHCYIPEELDETWAQLRHLGRRRAQLITAATASVQRIGDFLSVAWPVVTEVCAQPFKSVTWLAALQVVTARCGGDPARLAALGPQEFTAVVRAAVPAWGGKKGWGTICGRVFAALTDTEGVVAWSRRGLLRRVADELGDLQRTRAQLRAVEADMVLVLGELGLSRLGDIPGLTAVGAAAILAETGDPRRYDSSSSLVKHAGLSPSENASGAFEGQAHMSRRGRPGLRLTAWRAVWPMLRFNPVMAAKYAALTQAADAAAADAGSRQARAAAAARARRARARVACAASLLRWIYSMVVHGTSWDAAVAAGAADCQHAPRYQPEAA

SEQ ID NO: 223920 - protein, 407 aa, unidentified
MFCGIDWASDHHDVAVVDGDGKLLGRAWIDDDAAGLQLLLGLLVEHSDSPDDRIPVVIETSRGLLVACLRASGPVNLMAAARYRERHSVSRKKFDPLDAMVLVNILRTDADARRQLPADSELAQAIAVLALAQQDSVWDRTQAGNKLRSHLREYFPGYLAAVEALRGGLAAPLARTLLVAAPTPEQAARLTRAQLRAVLKRAGRQRGIDHEVERLHAALRVPQMRQLPMVERAMGRQAVALLGKFEAACVAADELAEASVELFEKHPDAAIITSFPGLAALSGAWVLAEIGDDRTRFADAKALKAYAGSAPVTRASGKSRTVMVRRVKNQRLAAVGFVSAFGSLRASPGARAHYDRRRDAGDRHTSAQRNFYNRFLGCLHHCLATGTTYSETTAFPVLPKLELVIAA

SEQ ID NO: 223921 - protein, 321 aa, unidentified
MSSATFIGVDVSQDHLDVHVRPAALRRRFANTPGGIAELVAWVRPHAAQRIVFESTGPYQKAAVGTLLAQGLPAVVVNARQVRDFAKAMNYLAKTDAIDAGVIAHFAEVATTTVRPLEPQEILDFRELYDRRGQLVHMLAMEKNQRHSAAVAKASAPVLKSIDQHVTYLEARIRELEGRLDRLVEGSAAFRARDEILQTITGIGPQVSRTLLAHLPELGTTTRQRITALVGLAPFNDDSGTHTGQRHIRGGRSKVRVGLYQAAIAAIRHCPRMKEFYASLKARGKASRVAIIAVARKILVLANALIRDMKPYQTPANSVCQ

SEQ ID NO: 223922 - protein, 466 aa, unidentified
MPHARSHRARRVRPARLPPELRHVHLNAAGIDVGAGGHYVAIPPGRDPEGRDVREFGAFTADLYTLAEWLRRCGIETIAMESTGVYWIPLFDLLAERGFEVRLVDPRQLKNVPGRKSDVLDCQWIQQLHTFGLLSAAFRPDDQICALRSYLRQRAMLVTYASHHIQHVQKALEQTNVKLTRVVSDVTGVTGMRIIRAILDGQRDPRALAGLRDRRCQHDEATIARSLEGSWRPEHLFALRQAVELLDFYQQQLAACDREIEAYLGRFDAKHGGETLPTRPRTTKPSRTAPTFDVRTHLYRLTGVDLTRIDGIDAHTALKVVAETGLDMSRWPTEKHFASWLSLAPGTKVSGGKKLSGRTTPSANRAAAALRLAARSLYQSKSALGAFFRRLKARLGTPKAITASAHKLARLIYRMLRFGTEYVDQGQDYYEQRYRARVVSTLTRRAAALGYTLVKTEGLSSAPSEI

SEQ ID NO: 223923 - protein, 308 aa, unidentified
MTLPQHHIGVDVSKNWIDTFTASSQQFTRIANQGLSLAEWAAGLGDVTVIFEATSRYDHDLRARLDEVGIPYVRMNPLRAGQFARAAGFLAKTGRLDARILCMMGEALRPEPTMPMQPVRQRLYDLQARREDIVAMIIAEQGRLSTANDTFICRDLKASIRSLTRRRDALQKQIDAPVETNRQLAAQYRQLQSAPGVGPQVACRLMASMPELGHVDRRQIASLAGLAPHARESGLYKGKRTIHGGRSHVRRAMYMAALVAVRWDHHWKTVYLHMREGGKAAKTAIIAVARRLLVRINAMVRNGLSYQA

SEQ ID NO: 223924 - protein, 401 aa, unidentified
MKTVLSVDVAKNKSMIMLMNSDGEILIDTKEIKHNLEDFEKAKEEIKEISPENLTVFMESTGTYHLPVERYFKENGFNTLVINSLTTKNNYDTIRKTKTDKKDCYRLAKLFFVNEVEYHELSKKDLYANLKAMTRQYFYLLQQNVSCKNRYKRLLNICFPELEKIFKSTRIYDDTALNFIKEFPHAEIVKEKRIDALYNNLYKTNGRNLNFYKRLSETIKIASANSYPGVDKEHKDVKNLSDMAKIVQNNNNVINELRDKMIETAKKSPYYEIINSFYEIGEILTAEILGELGDITRFDSPKQLIAFCGLDPTIKQSGKSINVKGAISKRGNKYARYILFNCSQMVVKLGASNYPEHPVYIYYQNKKAEGKHYYESLTACSTKILRMLYSMCKNNKQFLEN

SEQ ID NO: 223925 - protein, 422 aa, unidentified
MKVFNSSDFAALIAIDWADRKHDVCELDHQNNKPIFSVISSKPEAINAWAHALKQKYNGQRIAVACELKKGPLIYALSKFKHIVLFTINPSTVAKYRKAFTHSGAKDDPTDAAIQLEILQQHMSKLNVITPDSESIRSLAQLVEYRRKLVQDRVDLTNKITTTLKNYYPHVLDWFKEKDTKIFCDFLIRWPSLEHAKRARKQTLLDFFNQHNARYPAVNEQRIEAIKQAQSLTNDKAVIAPNLLLIECLIAQLKPLMLAIERFDTEIKALYKPHKDRFIFDSLPGAGPQIAPRLLAAMGSNRERYHCAQEIQKYAGIAPVTERSGKKEWIHWRYSCTKFLRQTFVEWAGQSVRYSFWAKAYYRQQESKGKPHNTIIRALAFKWIRILFRCWKTKTAYDESMYLEALKRKGSPLLKYAVESKF

SEQ ID NO: 223926 - protein, 324 aa, unidentified
MPVTLGIDIAKKKFDAALLRDGKFKTKVFENTPVGFAALSTWLKQHGADKVHACMEATGILYEALAVFLADAGHDVSVVNPLQIKAFGESVLSRTKTDKADARLIARFCEAIVPSLWLPDPPEIHQLKALGRRRDALVEMRTQELNRDLSAESRVRESIQAVVGVLNQEIDDISKRIKEHIDNHPDLKNKSDLLRSIPGVGDASIEAILSETNGFAHFSKVEQVVAYMGLSPKERTSGSSVRGKAGVCKTGNRRLRKILYMPALVAMQHNPMVKAFSQRLKDKAKNGKLIACACMKKLVQIMFGVIKNNQPFDPAYNAKFTCCR

SEQ ID NO: 223927 - protein, 449 aa, unidentified
MEVLTGPERRRRWTAEQKLAMVRESFEPGKSVSMVARQHGVNPNQLFHWRKLYQGGSLSAVKAGEEVVPASELADALKQIRELQRMLGKMVWTPRHRIMRRRSTRRTQMEPTVVGVDIAKRVFQLHWIAADTGEVFDRQLRRSDFLEHFANREPCLIGMEACGGSQHWARRLTELGHQVKLMPGKLVKAFVTGNKNDVADARAIWAAARHPGVKAVPVKTEAQQAVLALHRIRQQLVIFRRSQSNCLRGLLGEYGEVMGVGRAAMNRAMPDLLLRLELRLPRVLIDSLREQWQRLVDIDKQITLIEQRLRAWLHENPACRTIAEIPGVGFLTATAAVAAMGDPKAFRSGREFAAWLGLVPAQFGTGGKVRLLGISKRGDRYLRTLMIHGARSVMKHPKDPGSWAVQLSMRRPLNVVVVALANKIARTIWALLAHGRSYCESYPPPVTAA

SEQ ID NO: 223928 - protein, 371 aa, unidentified
MIYVGIDVAKDKHDCFLTNSDGEVLFKSFTIPNNRKGFETLFQRVESVSDDLTKVKVGLEATGHYSYNLLGFLLDKGLTTYVINPLHTNLYRKSLSLRKTKTDKVDSRTIATMMMSDMNLKSYSDTSYHNEELKSLTRYRFDKVKERAKLKSSVSRLICILFPELEKLVPTLHIASVYALLSEFPSADAVANAHLTRLSNLLSESSKGRYGKDTAVMFRDAARSSIGSHMPAKSLELKHTIKLIQELTAEIDEIEAAIKRIMDEEIQSPILTIPGISYRMGAMILAEIGDFSRFDSADKILAYAGMSPSTYQSGQLDNCYSHMEKRGSRYLRYALYNATKYVCHWDKSFGNGKIRKSIPASSLIFSVTISF

SEQ ID NO: 223929 - protein, 408 aa, unidentified
MESYRFYAGIDWADQAHFVSIRELGTERVEEKSFDHSGAGLGAMVEWLTKRARGRPEDVAVAIEVTRGAIVEALLERRFVVFAINPKQLDRFRDRHTAAGAKDDRRDAFVLLHSLSTDSHAFRQLNVDKPAVMRLREHARMYEDLKHDLRRLTNQLRAQLHRYYPQILALSSAADEPWIWDLIERAPLPERAARTKQTSVERLLRDHRIRRCSAADVVAVLKTPALPVAPGTAESARDHVMMLLPRIRLTRQQLDGVEVTLGRILDGMESAEAEIGGHHDVTIIRSWPGLGTIVSAMMLGEASIPLGARDYHRLRALCGVAPVTRQSGKSRQVSMRHACNDRLRSAVHWWAGCAAVHDPRARALYQSHKARGHTHGRSIRAIADRLLRDLVVCLAKQEVYRPELRGVA

SEQ ID NO: 223930 - protein, 417 aa, unidentified
MGKRRNRVCGADVHKDLIVATIQSADGTEFQEKFGTTYSELERFRDWLIANNCEQVAFEATGVYWFPVYDALSPSIDTIVANPWMIKGIPGNKSDACDSRWIAENCLDGKIKRSRIFSKEDRNLRTMTRARSGFTKTGTQLRNRIHKYLALCGIKLSSCISDIFGKSGRHILDGLVEVKDIDEILDSIPSGKVKKKRDLIKAALGNGLDDVSRMLVKDTLELLDHLEKKMEKTSLEILSRLQKRAEDLAIVMSVPGIGFTSGSIILAEIGDYRDFHTPEQLAKWCGLAPGLNESAGKKKPCGITKQGSKSLRTVLVEIAQVVAKMSNNKFSRFFHRLRARKNYNVAITALARKLITIIYHLLINQELYQENNCNTATSKPVKKDLLYLSKEERLKDGVAAIVDAFYHMKNRYSEGGG

SEQ ID NO: 223931 - protein, 340 aa, unidentified
MLTFQYFVGLDIAAEQFNAAIGTTPWRLLVKGTEFDNTSDGFEQLLTWLRQHHCAQDHTVLCMESTGVYGEALAYFLVAHDYRVAVEPPLKVKRSFATSGPKTDAVDSQQIAEYACRYVDELVLWQPPTELVEQLKVLLTTREQLVQHSTAQQNALPALRHKHVRTPFAEQVFETMITETKIQVKVLEQEIRRLIDQHPTSRKLLTLLLTIPGVGLLLAAHILVLTQCATRPFPPTKLAAHLGIAPHKRESGSSVYARPTSRHYGPSQPRKLLHLAARSVSTHNTHFRTYYQRKVAEGKAKKLALNNVANKLVKIICAVLESQTAYDPNYGSAHSILAKN

SEQ ID NO: 223932 - protein, 419 aa, unidentified
MKRSEKANMVNEGTLIVTVDIGMTKNHGYCTTADGRSSKTFVFENTRQGFDILWSMVLVSKGAFGCDEVIVGYESSGPYGEPLVHYLKQKPVTIVQVNPLHTKKMKEINDNSPLKTDRKDPRVIADIIRVGHALSVVVPTGDIAYLRRLNNVRERHVKERTMLLNQLQQLVFLTFPEFTRVVKTIHSRTALYILKKYTTPARIASARPEELGKEMMKQSTCKFRTPHAIALIDLARNTVGIQEGLEGLVMDIQHVISQLELLQGFIKSTEHEMEIILKRLPYSRNLLSIKGFGVVTVAGLIGEIADFSKFTTQSEIIKLAGLNLYEVSSGKRRGQRRISKRGRSLLRKMLYYVAIQTVRKNGIMYGYYQKLIGRGKKRIMALVAVARKLLRIVFAIVRDQSEFIANYADRGRQVIKEAA

SEQ ID NO: 223933 - protein, 431 aa, unidentified
MRSRAYGAVGVKQIDGHRIGMGHDGQDLVIGMDIGKYHMMAVGRWPDGSFERPWRVLNPTEIRELVGLLTQLGHGRRLLVGMEPSGTYGDALRQALHDVGIAVVRIGTKISHDYAEVFDGVPSQHDGKDAAVIAELTVMGKGKNWAYEAQDTWEQQLCYWVERMECYRRIQMMGLGSLEALLGRHWSEATRVLEVSSATLLRVVETYGEPAALAADPMAASRVARWGGKPLSADKVQKLLASARDTVGVRPGEWDSRRLREHAERTRAARREVARCKRHLQTLAKGHAVLEAQGKVVGLVTACVLWMSVGDPRDYSCARAYRKALGLNLVERSSGIHQGKLKISKRGSPRARQWLYLATLRLVKQAGVQQWYEAKKARDGHGAQRAVVAVMRKLALALYHVGVRGVEFSSRRLFARIVARKSRPQPVAKTV

SEQ ID NO: 223934 - protein, 328 aa, unidentified
MCTLGIDVSKNKIDLCLLTAGPGGKKKHKVLTNEPAVARKVVDWLNAQKCVPESVTVVLEATGIYHENLAYGLHEAGVSVCMANPCRVREFAHGMDILNKNDAVDAFVLACYGELKSPAVWVPPSPEVRKLRALLRQRDALREDVQRTVNRLEKANSTSTPQEVIRSLERMKSWLNEELARIEKLITDHTDNDPGLKADLDLLKSIKGVKDQVGREMLALLKDGTFKSASQVAAYLGLTPVEKTSGSSVRGRPHMSKTGPSGVRAKLYVAALTASHWNKQAKAIYERLVAKGKAKKAALGAVMRKLVHLCFGVLKTRLPWDENYVATA

SEQ ID NO: 223935 - protein, 342 aa, unidentified
MLYVGIDVAKNKHDVTALNVPGKTVLKPLTFSNNKAGFELLDLSLRQLNQDCLIALEDTGHYAFNLLNFLHEQGYEVYTYTPLLIKEFAKSLSLRKTKTDKKDAHGIALKLLSDPNREQFQHDNRQVELKILARHIHRLKKKQSDWKVQYTRCLDIIFPELDKIVGKHSEYTYQLLTRYPNPQKRIEAGFDKLIEIKRLTASKIQDILSVAPRSIGTTSPAREFEIIEIIKHYKRLIDKVEKCVNDLMAEFNSVITTVTGIENRLGAVILAEIRNIHAFDNPAQLQAFAGLDSSIYQSGQIDLAGRMIKRGSPHLRWALIQAAKACARFSPAFKAYLKTKLE

SEQ ID NO: 223936 - protein, 350 aa, unidentified
MEADVEQFVGLDVSQDVTHVCVIGGGGKIEWQGKCCSTPEAIADVIRSRAPAAVRIGLESGPLSTWHWHALKGMGLPVVCLDARHAKATMSGQVNKTDKNDAYGLAQIVKTGWYREVGVKSLESHTIRSTLGARAQLVGMRVEITNQIRGILKTFGIVLTRRTGAPFEQLVNEACADDDSMLNRTVRALLAVYTGLRSQIRRLDRELIAHARSSEVSRRLMSIPGVGVLTALAFVTAVDDPAKFSKSSSVGAYLGLAPRRYQSGEIDQNRGISKCGDGLVRTYLFEAAGTLLTRVEKWSSLKAWGLRLAKRSGLKKAKIAVARKLAVIMHRMWVSGASFRWSSTEPAPAA

SEQ ID NO: 223937 - protein, 402 aa, unidentified
MNAVGIDVSKGKSMVAIMRPFGEIVSTPFEIKHTASDIRSLVELINSVEGESRIVMEHTGRYYEVLAHQLSEANLFVSAINPKLIKDFDNDSLRKVKSDKADAVKIARYALDKWQNLKQYNVMDELRNQLKTMNRQFGFYMKHKTAMKNNLIGILDQTYPGVNTYFDSPARSDGSQKWVDFASTYWHVDCVRKMSLNAFIDHYQNWCKRKKYNFSQSKAEEIYGKAKELVPVLPKDALTKLIIKQAVDQLNSASTTVESLRTLMNETASKLPEYPVVMAMKGVGTSLGPQLMAEIGDVSRFTHKSAITAFAGVDPGVNESGTYEQKSVPTSKRGSSDLRKTLFQVMDVLIKTHPQDDPVYQFLDKKRAQGKPYYVYMTAGANKFLRIYYGRVKEYLSSLPES

SEQ ID NO: 223938 - protein, 343 aa, unidentified
MQTVTTIGLDIAKSVFQVHGHDGAGQVVIRRQLKRRSVLAFFQKLPPCLVGIEACASAHHWSRELHALGHKVRLIPPAYVKPYVKRQKNDAADAEAICEAVTRANMRFVPTKTPEQQSGLVLHRTRHLFIRQQTAVINAIRAHLAEFGIVAPIGRHGVEELLNVVADPNDKRVPEMARTCLSAFGAQLRRIQEQVLEFDRLIRTWHRSDEMSMRLDEAPGVGPVLATAVVATVADPKSFRSGRNFSAWIGIVPKQHSSGGKNRLGNISRQGDRYLRGLFVAGALAVIRYAKIHGTKHRPWLTALLARRPTKVAAIALANKLARMVWAMMAKGERYKEPVALAA

SEQ ID NO: 223939 - protein, 323 aa, unidentified
MNKYKETFGIDISKDVFDCYGSVQGHNQFKNDETGFKNFQEVLSKESLIVMEATGYYHYRFAQFLHKRGQHVSVVNPLSVKRFIQMKLAKVKTDKSDAKAICNYGLTQEVPLYNALTDVQSECFQLFRLLDSYLKKRTITKNKLHGENVLGIPSKHVYRSLNRNKKHLDVEIASIEAKLLSLVKQDQQEQLTLLKSIPGLGVKTALFLIVVTDGFTKFETASQLCSYVGITPTIRQSGSSVRGRSRISKVGNKKLRNLLFLCSFSACKHNKACREIYDRIVNKGKSKKLALIAVSNKLLKQAFAIAKSGRPYDETFVSALIIK

SEQ ID NO: 223940 - protein, 421 aa, unidentified
MKGLRTKKVNTIKEGTLIVAVDIGMVSNHGCCTTADGRSTKTFSFDNTREGLDIMWNMVLASKTRFQCNEIIIGYESTGPYGEPLIHYLKQKPVTIVQVNPLHTKRMREINDNSPLKTDRKDPRVIADVIRIGHALSVVVPEGDAAYLRRLNNARERHIRERTALLNQLQQFVFLIFPEFTRIIKTIFCKTALHILRKYTTPANVCSENIEKLGEEMRRWSRGKFGVEHAAALINYAKSTIGIQEGLAGLVMDIQHALVQLEMVDSLIAELEHEMETTLQRIPYSRKLLSIKGLGIVTVAGLIGEIGDFSKFTTQSEIAKLAGLDLYEVSSGKRQGQRRISKRGRSLLRKILYYAAMQAIRKNGIMHDYYQRLIGRGMKSMMALVAVSRKLLRIIFAIVRDNTEFILNHKFQRKEEMRRAA

SEQ ID NO: 223941 - protein, 377 aa, unidentified
MSRKTTRKAQKKVVALVEGEGKRKSGPVMGVDVHKSVLAWCVVSEVSILDEGELPNTLEGIKKLQAVIKKRNVDSVAMESTAQYHFKLLYTLIAAGTKVLLANPQQTKDTQGKKTDKLDAKRIAIAHRDGRLKPSVISPHEIMALRKAMRAHTRLVEDQTKIKQRLIQVFHQKDVGFGEMLGTKWGTNVLRALFDTDDLDSLLKTCLPKGRAKQRAELISELDRFKNSMDEVERQVFRSELEMLCFIEFQKERLQLVYCQICKQNKTFAKTMQLLISIPGIGPDTAAKVIAEIVDITYFPSPKQLVKWTGLAPRVHQSGHRKNITGRIRVDKTGLYTSVQGIRLEMPPDSVERAHPPRATWSPFLSRPLTSSPVVHA

SEQ ID NO: 223942 - protein, 372 aa, unidentified
MNQNIVYVGIDVDDVRYHGSALNPSTGEILAFHCRPTLKGLVGQLAKVQGYFGEAQLKLCYEASYVGFSLQRDLRDRGYDCAVVAPSSIPRRAGKSVKTDRIDAAELAEFYANGLLTIVATPEAQLEQDRDLLRSRQQLKQQQGALRRHIQSLLRRNGLHYKVETQHKTLWQTHHYGWLDRTIEGCSGSLKVNLSLLVRQLKSLDETLAAYGEAVETLAAAPKYREPVKALTCYKGIKNLFALTMITEIGDVKRFAHPRQLVSWVGMDIREYASGGKSHRFGITRQGNPYLRTAFIEANQRGYRSARLGKDLKARRANSTPEYIAIADRCLRRLSKKGNRLLLAGKHPNKVKVACAREMVGFIWESLNRAAA

SEQ ID NO: 223943 - protein, 424 aa, unidentified
MSKKKQTAAGLGAIYARVCGMDVHKDVVVACVRILDMKDGTVQSTLRRFGTMTADLLELRQWLAQEQVTHAAMESTGVYWQPVFNILEGHFEVWVVNAQHIKKVPGRKTDMKDAEWIAQLLQCGLLKPSFVPDRQQRELRDLTRQQTKLLQQRSAVANRIQKVLERANIKLGSVATDVLGVSGRKMIEALIAGERDVGKLAELAEKRLRHKIPQLQRALEGELTEHHGFLLRRLLDQYDFFAKEIARISERLAAIAPPSFRAAVERLDEVAGVAERGAQALLAETGTDMSRFPSHKHFASWAGRCPGNRESAGKRKSGKTPAANRHLDAVLTEIAHAAVRKKGSYFKSQYHRLAGRRGKKRAIGAVKHSILVTIYFMLRDNKPYTDLGANYFDKLNPQQQIRYHVRKLKELGQGVELSALNDAA

SEQ ID NO: 223944 - protein, 346 aa, unidentified
MRFYDGQHKFYCGVDLHTKRMYLCVLDYEGNKRLHRNVRAKPHDFLSAIEGFRDDLVVGAECMFTWYWLADLCLDESIKFLLGHALYMKAIHGGKKKDDKLDSEKIARLMRGGTFPLSYVYPREMRATRDLLRRRTFLMRRRSELLAHVQLVNQQYNLDPFEKMLQYACNRDVLDCFEQAGARQSVEADLQMIGHYDQLLKQLESNLLRQAKRHDPQACFLLQTIPGVGKLLSLVLLYEIHTIDRFPTVGDFLSYARLVTPKQISDGKVTGHGGAKIGNPHLKWAFSETALMMLRYSEEARQFLERKQKKHGKGRAMTMLARKIARTVYQMWKRKEVFDAVKFFAS

SEQ ID NO: 223945 - protein, 449 aa, unidentified
MSKPILAVGIDPAKRVHRAIGVLFPDEVVFDCELPNALDAIQSLDLRLAELAATHAAELVYGLEDHRRYGRLLCEVLTERGRDVRVVNPLWTNRQRAFYGQDKDDAIDGRSIAAVVLRRRDQLPLANDFGPVAQAIREAERAIEDLGKKRTELVNRLHLQLNDVYTSAYETYFGKLKSPIALRFFRRFPIPQDLGGQDAVQLSKVILGLANGRVGPHKGRDREKFLQAKAEGILKTSASLRQTPGTPALELKAELIRQLCDELLVNHDRVTRLERMLRKQLLPATGQTITTMPGIGTILAAAIIGETASVARFRSRAAYAVYNGTAPARHSTGGRERHKARRDCNHRLKRAFWLAARAAALHDPLAKAYFNQCKSRGLNYNECIKRIARRMSDIVYSLLKSGRDYDRTIVEQAIQKRQEQVANADDSRVKEALPIPDQKRLSRRSHGGN

SEQ ID NO: 223946 - protein, 327 aa, unidentified
MKEEKQNYAGLDIGLEWIDAAWQEQDKAQHVKVPNTLEGFKQLVKQCGRACHYVMETTGPYYVALALYLHQQGIRVSVVNAMVIKRFIQMQMEKNKSDKKDALWICKYGISQQPQLWQAPQEHIIRARQMQTAIMQLTKQRTAIINAQKSLEQMPVISKESKRSYQHMVDQLNKEISTLEKALDELLKQHEEKKMAALETIPGIGKRTIATMIIVTDGFRKVDNYRQLSSWAGLSPKEYSSGKSIRGKVRISKMGGKELRNMLYMCSLTAIRSNKACKELYDRLKAKGKNGKLALAAVGNKLIKQCVAIAKSELPYDAKYLSKKACF

SEQ ID NO: 223947 - protein, 346 aa, unidentified
MLYTAFDVHKRYTWARVERPDGTVVREKRIAHEPGAFRQFLTGSEPGSPVAVEAIGNWYWVGDEVEAAGCTLQLVHAYKAKLMLGRVNKTDKLDAQGLVRLQRAGTLPVVWIPPRALRDMRELPRARMVLVAQRTRLKNRIHATFSKYGIPLPQVADLFGKRGRQGLQARVGELPSHTGFVVSRLLAQVESLDREIAAFEQRTGALFEVDDTIRLLLTLPGVGFILAVVIGTEIGDVSRFSRAEQLASYAGTTPRVHESGGRRHYGPVRSDVNHYLKWAFVEAANGVCRNRGRHPQRHTSQLYDRVAKRKGYQKAIVAVARHLAEATYWMLTKGEAYRESGSSKGA

SEQ ID NO: 223948 - protein, 338 aa, unidentified
MTVVTVGIDLAKNVFAVHGVNAAGKAVLVKPLVRRAKLLELIATLPACLIGIEACTGAHYWAREFQKMGHTVRIMAPQLVSPYRMGGRHGKNDAADAAAICEAVTRPNMRFVPIKSVEQQGQLFVHRAHQGYVSERTALINRIRGLLSELGIVLPQAFKAFLSGVAQVLEDLPGYCNQVIGDLLNELYHIEEKIKNSEKLIQQLARDHSAAQLLMQFRGIGPMTATAIVASIGNGHDFKNGRQFSAWLGLTPRQQSSGGKARLGRITKAGDSYLRTLLVLGARSVLLGAAKNDDPVSRWALQLKERRGYGRALVAIAAKNARMCWAMLHLRDEFIFPA

SEQ ID NO: 223949 - protein, 316 aa, unidentified
MNSQVFVGLDVSKQHLDVAVRPQGRHFVTPNDDRGIKQLVKRLAALKPQLIVLEASGGYEFLVTAALAEVQLPVALVNPQAVRKFAGATGKLAKTDKIDAQVLAHFAEALRPEPRPLPDQDQQVLKAALQRRLQVVKMIGQEKNRREKTFMPAVRQDIQAHLTWLSQRLEQLDRDLSDQIRQSPLWRDRDRLLRTIPGIGPIVSRAVIAQLPEAGALPGKKAVALVGVAPYNRDSGRFRGKRMIRGGRSYLRRMLYMAAVVASRCNPVIRAFYQRLLAAGKPKKLALTACMRKLVLILNAMLKNNQPWNQFITQAP

SEQ ID NO: 223950 - protein, 366 aa, unidentified
MKKISTVATNRNEIFKEHKLTIGLDLGDRASHYCILDEAGNVILEHSLPTTPKGVHQVFTRIPRSRIVLETGTHSPWVSRQLTQLGHDVIVAHARNVRLIGESSRKDDQLDARTLARLARIDPGLLGPVRHRSAKAQIHLTVIRARAALVSTRTALVNAARGLTKSYGERLRKCGTGQMNREIAKGLSQELRDALEPLLGEIESLNERIAEYDRRIEQIAKEAHPEVALLKQVKGVGTLIALTYVLTLDDPHRFRRSRDAGCFLGLRPGRRNSGMSEPQMHISKEGDCYLRTLIVQGAHYILGPFGEDSDLRCWGLKLAERGGKNAKKRAVVAVARKLAVLLHKLWVSGEVYEPLRNNPKVVSAVA

SEQ ID NO: 223951 - protein, 401 aa, unidentified
MVSDFRKGRYNLMKIFVGIDIAKLNHFAAAISSDGEILIEPFKFTNDADGFQLLVSKLESFDKNSIIIGLESTAHYGDNLVRYLVAKFYQVCVLNPIKTCQMRKNNIRKTKTDKVDTFVIAKTLMMQDDLRFITFFDLDMMDLKALGRFRQKTIKQRTRLKIQLTTYVDQVFPEIQYFFKSGLHQHAVYALLKEAPSPKEIASMHMTHLANLLKVNSHGHFTKELAKELRVLAQKSVGANDSAISIQITQTIQQIELLDSQLEKIEAEMTDIMKFNDSVIMTIPGIGYINGGMILGEIGDIHRFSNPNKLLAFAGLDPSVYQSGNFQAKTTRMSKRGSRVLRYALVNAAWNVVRNNATFKAYYDAKRAEGRSHYNALGHCAGKLVRVIWKMLTDEVEFNLE

SEQ ID NO: 223952 - protein, 343 aa, unidentified
MAHYAGIDVSLETSSICIVDGSGAMLRELKVESEPEALAAALTGMRLGFARVGLEAGPLSQWLHAGLKAAGLPVVLLETRQLRAATKAMPVKTDRTDARAIAQMVRTGWFRAVHVKSELSQELRALLTARKLLVGKLRDIDNGIRGLLRGFGLKVGPIGERAFPSRARELAADRRSLAAVIEPLLQVRETLLSERERLHHLVVRATRDDAVCRRLMTVPGVGPVTALTFCSAVDDPARFSRSRAVGAHFGLTPRRYQSGETDRVGHISKQGDGLARQALYEAANVLLTRTTRWSSLKAWGIAIAKRSGMRRAKVAVARKLAVVLLSMWRRGTEFRWGGEKAVA

SEQ ID NO: 223953 - protein, 319 aa, unidentified
MEQSELVAVGIDVSKEGLGIAVRPSGEQWSERNDVQGVRRLVKRLQALGCRRIVVEATGGYETVLVVELRVVKLPVVLVNPRWVRAFARSQGQLAKTDAIDARILALYAERAELKVRELPDAQVREFGGLCARRAELLDMQTAEENRLEHAGPSVKREITSHIADLRKRIGRLDRELRRRLRESELWRELDQLLDSVPGVGPVLRSAMVAWLPELGRLNRGEVAALVGVAPLNQDSGKWRGTRHIAGGRARLRKVLYMGTFGALQHNPYLRAYYQRLRTTGKKHKVAMVATMRKLLLILNAIVKTRTPWNEATCAGANP

SEQ ID NO: 223954 - protein, 377 aa, unidentified
MTSLSVLQSENTTAQRELHVSFELGDKSWKLSCGDGMRSPSRYSVNAGDQAAVLDCIDKARARCGLDREAKVHTCYEAGRDGWWLHRWLRQQGIDSIVVDSSSIEVNRRAKRAKTDRLDADKLLALLLRYHRGERRVWSVLHEPTPQEEDARRTHREVARLVHERIAHTNRIGSLLVLHNLRPGRIGGRTWQVWWDSHRLQVPPLLRAEIEREYARLLLVKQQLNALETERRHAVAEGAHPLVARLAKLRGIGSRGAWVLDKELFGWRHFANRRELAGCLGLTPTPYASGTSEGEQGISKAGNKRARALLVELAWRWLSLQPQSALSQWFQQRFGTGGKRSRRVGIIALARRLAIALWRYIEHGEVPAGATLKTVDA

SEQ ID NO: 223955 - protein, 341 aa, unidentified
MKDYIGLDVSMKETAVSIRRDGERVWRGKCVSDPAVIAQLVRKRAPAVDRIVFETGPLSVWFYHALRAEGLPAICIDARHAKSALDMAPNKTDANDADGLAHLAEIGFFREVRVKGFDSMLARTLIAARNRLVRITVDLSNHIRGFMKTFGLLIPAGKGSTFEAHVRRLLSDQPKLSEILLPMLDAWCATRLQAARLARQIAAEARQNEGCRILMSIPGVGAITATSFVTAIESPDNFRKSRSVGAWVGLTTRRYQSGEIDYKGHISRRGDHHLRGLLYEAASVILTRSSAESDLRTWGLKLRERIGFKRAAVALARKLAVTMHAMLRDGTLFERGSKPTI

SEQ ID NO: 223956 - protein, 346 aa, unidentified
MKLTRIGVDVAKNVFQLHGVDRSGNTVWKRRLSRGKWIQAIVDVASTDCVIGIEACGGAHHWARTLMARGYAVRLLAPQFVKPYVKSNKNDANDAEAICEAMSRPGMRFVTVKSTEQQDLLAPPRVRSGWLRERTALINRLRGLVMEYGLVAPQSPFALKQAIPDWLEDADNGLSDRFRSVLHGLWQDLLQLDRRIQSMDKQLAAIAAADPVMNRLQQLRGIGPLTATAFWATVGTASQFGKGKQLAASLGLTPKQHSSGNKDRLLGISKWGDTYLRTLLIHGARAVLSQAKRRDDPLSRWVTDLANAKHPNVAAVALANKTARIAWAMLHNDMNYDPALASMALT

SEQ ID NO: 223957 - protein, 387 aa, unidentified
MLDYSKFIGMDVHKDSISVAIAQEGHGELRFYGRIPNSPQAIGKLIKKVCPGGEVMLFCYEAGPCGYEVYRLLIAAGQDCLVVAPSLIPKKASDRVKTDRRDAMSLARLLRAGELTAVWVPDQEQEAMRDLTRAREDFKAAERRARQRLNAFLLRHGLTYTSGKCKWTLAHRRWLESLKLKSPIQQIVFQEYLDAIDQASQRVAGLESQMQSSLSTWSLADVVQGLMALRGLALVAAMTVVAELGDITRFDSPKQLMAYIGLVPSEHSSGGTRRQGGITKTGNGHVRRMLVESSWSYRFPARKTAHLQRRASATSDPIQAIAWKAQKRLCGRYRKMTQVQGKLPVVACTAIARELLGFIWAIAMEVKHSHAAQASSVLMNKNVLTGT

SEQ ID NO: 223958 - protein, 351 aa, unidentified
MSRKTDTVVARTIGIDTGKNTLHLIGLDDKGATVLREKLTRGRIAARLANVPQCLIGIEAGMATHCVARELIALGHEVKQVPPVYARPFRQGHKNDFRDAHAIAEAVQRPSTRCVPVKTDDQLDLQALHRVRSRLISERTAVINQIRGFLLEHGIPVRQGLRFLRQQLPDILAKRIDVLSSRIIRIIEDLSGDWRRLDERIENVTEEIEELAHGTEGCRQLMTVPGIGPIIASAMVAAIGSGTAFARGRDFAAWLGLVPKQMSTGDRTILGRISKRGNRYLRTLFMQGARVILLRPANWAKHSFGPWLAAAAKRLHHNVLATAVANKLARIAWTVLAQERSYEARVTMTAA

SEQ ID NO: 223959 - protein, 370 aa, unidentified
MSVRRILAKTIDTDLEYEAIGIDLAKNCVSAALLTTDGEVVCIDRLDYSELEKSAQALSPTTFAMEPCTEMNYLVQKLEAWGHRCLVIGGKNVQNYVENHFSGQKTDLNDAQALAFLAQDKQLRTIKAKDIEQQKYASLTTLREQYIKQYRQTIVSLKGICQAWGLNISKGISGKAQLKDLIENHAAFPEELRESLVDMVTHAQTTQKVLNKITKTLEVLAKNDKVCQLIQTIPGLGTICSCRLRATIGDIKRFKNPKDFPAYYGLVPRSIATGHNEKKGKITHRGDRTMRSLMVQGAGCVIRLATCGKLKSKQLTKWILKKQKEKMPWGKLVCAVAAKLLRIVRAVLISNKPYNSKIAGVAKCSLPKGS

SEQ ID NO: 223960 - protein, 344 aa, unidentified
MSKVTIGLDIAKSVFHLVFMNQSGRVLRKKKLRRHQMLSYFSQLEPCIVVMEACGSCHYWCRELTKAGHEVKAIAPQYVVAYRKGNKHDYNDAEAIAEASQREGMRFVPFKSQDQQDIQLMHRIRERMIAQQTALSNQIRGLLSEYGIVYVRGVATLVKELPLTLEEADNGLSMLARRQFQGLLNDLRELREHIKEMDKELKAFSQSQPVCERLMSMTGIGPLIATALYAGIGQGQAFNSGRHLAAWLGVVPKQHTTGDNPRLLGISKRGNTYLRTQIINGARAALRHIGDKTDKVSEWCRACLARMSFNKACVALANKMVRMAWAMLHYQQDYQPGLINKVAA

SEQ ID NO: 223961 - protein, 334 aa, unidentified
MALNTLAIDIGKHSFHLFGIDDDGVIVSRKVSRLKLVWTVDRLDPKIIAMEACGSAHHWGRMFQEAGRMVRLISPYFVRPFVRGSKNDATDAQAIFEAAGRPTMRFVPVKSLECQDLQSLHRIRDRLVHNRTSLINHTRGLLAEYGIVLPQGATRFTLQVRQAVVEAELSDLARELFEELLDQLGDLDRRIAHIDKHLIAICRDKAACRRLVGIPGIGPVVAAALLAAVDDGRQFGSGRDLAAWIGLVPRQYTTGGKPRLGGIGRRANHYLRRQIVHGARAVMSQAGRRSDPRAEWMKAVAARRGFNRAVIAVANKMARAAWAILVRGEAYAAA

SEQ ID NO: 223962 - protein, 323 aa, unidentified
MTEEAVCVGVDVAKNTLDLAVSNSKETRQFDNDHDGITSAVRYIADLKPTIIILEATGHFEMPLAAALQTSNLPVVIVNPRQVRDFARATGVLAKTDSIDARILALFGLQIKPEVRLLPDQKAREMGSLLSRRRQLIEMLTSEHNRVLQADDSVRPGIKIHIRWLEKAISTINDDLDRQIRSSPSWREKDDLLKSVPGVGKVVSTTLLVELPELGQLNRRQIAALVGVAPLNRDSGTMRGKRTVWGGRAKLRAVLYMGALVGIRYNSVIAAFYERLLKAGKAKKVALVACMRKLLTILNAMIRSNTAWRELQWRQNEDSCFPR

SEQ ID NO: 223963 - protein, 429 aa, unidentified
MNYNTQNAKIASITEKTLIVGIDVGSETHYARAFSWRNYEYSKKPFAFSNDEAGFSSFKDWMDDIAEKHGMKVVIPGMEPTGHYWLNLGAYLQEQGMKPVHVNPHHVKKSKELDDNNPSKNDRKDPKTIAGLVNEGRFSYPYIPTGIYAEIRNLSNLRIQTQEEITRIKNRMARWFSIYFPEIKDVYRNPDAVSGLMVIKQAPLPCDIKELGVDGVNKIWRDARLKGAGIKRATTLVTAAEHSIGNTEAPRSARKEIRNLLNDYEIYKNRMDELMEEIKETLSEIPYIDKLMEINGIGIKAVSCFIAEVGDIGRFDNPKQVQKLAGYAIVADSSGKHNGESRISHRGRKRLRYALYEAAISVIGKNKEFKEIHSYYRTREKNPLKKMQSVIAVACKLIRIFYTILTKGVDYDGQKMLNDIVRPEIQPAA

SEQ ID NO: 223964 - protein, 339 aa, unidentified
MKKVFIGIDFSKLKFDAAIYSIDTKAIVSSEVFDNEQSGYVDFLQWVKENARCQKSGMLFCGEHTGYYSGNLSVFLYETGYDMWLVSGLEMKLTQGIKRNKTDRVDACKIAEHAYRYQDKVVLFQPVSKALEEIRELLSYRERLVETRKVLTTSAKEMKRVKENSSCDYIYQDSLEYIRSINTSVRECEKRIEVLLKQDISLKTNYKLVSSVVGIGLVNAALILVATANFTLFDNPRKFGCYCGVVPFEHSSGSSVRGKTRVSKMANKHLKTKLTLAAQNAARFDPELKEYYQRKRSEGKNNWLVLNNVKNKLIHRIFAVVRDGQIYEKQYVHPLKQVA

SEQ ID NO: 223965 - protein, 467 aa, unidentified
MLSDAMQTLAGRDADMTAEATGATSQRRVASCPVRERPRISWMRGDAPPRISFGRLRSRALGQAPPHRRREPGMIYAGVDIAKTDHVIGAVDERGAEMRPPMPFKNTEAGLERAVAWLEGLAGSPSDVVVGMEATGHYWMACYSFLVARGYSVAVINPMQVKAVRKLKGLDKVKNDRVDAGLIAEALRIGQYDETRLATDEMASLRSLSRYLQSLRGMVAELKTQCICLMDAHFPEYAGIFSDMFGAGSRAVLSKSPLPFELARRRADSLARDIAEASRRGGKSSGYAAKIKAAAKSSIGVRLGQEAASFQVKSLIRQIEFADSECAGVEARLRSLLDEVEPLVLTIPGVSYVTGAQIVSEIGDVSRFRNAPALVSYAGLNSSVSQSGQFDSGGGPITKHGSPYLRRALWLAANRARQYDPGLRAFYDRKRAEGKPHRVAVTAVARKLCHIVFAVMRDQVPYDPGRE

SEQ ID NO: 223966 - protein, 402 aa, unidentified
MNAVGIDVSKGKSMVAIMRPFGEIVSAPFEIKHTASDIHSLVELINSVEGESRIVMEHTGRYYEVLAHQLSKANLFVSAINPKLIKDFDNDSLRKVKSDKADAVKIARYALDKWQNLKQYNVMDELRNQLKTMNRQFGFYMKHKTAMKNNLIGILDQTYPGVNTYFDSPARSDGSQKWVDFASTYWHVDCVRKMSLNAFIDHYQNWCKRKKYNFSQSKAEEIYGKAKELVPVLPKDAITKLIIKQAVYQLNSASTTVESLRTLMNETASKLPEYPVVMAMKGVGTSLGPQLMAEIGDVSRFTHKSAITAFAGVDPGVNESGSYEQKSVPTSKRGSSDLRKTLFQVMDVLIKTHPQDDPVYQFLDKKRAQGKPYYVYMTAGANKFLRIYYGRVKEYLSSLPES

SEQ ID NO: 223967 - protein, 403 aa, unidentified
MSICFAGLDWANRTHAVCVIDERGSVLTQFEINHDASGLADLHRRLRGAGVTAVAIERPSGLIVDALLEAGLSVVPIHPNVVKASRPRYRSHGGKSDASDAYLLADLLRTDGHRFKPLAPQSDDIRSLRALVRGRDDLVATRVQLANQLRSLLHSFWPGATEVFADVDSPIGLAFIRRYPTPASAQRLGPKRMAAFCTQHAYSGRRSPEELLDRLHQAPAVALGKLEMAAKGELALSLARTLDRLGDQIRLLTRRIENHVSSIDDGRILMSFPRAGRICAAQILAELGSVRERFDSDEHLAAEAGVAPVTYASGKSKAVTFRWACNHRLRAALTCLADNSRHANAWAASVYAKAKARGCDHPHAIRILSRAWLRVIWRAWTDRKPYDPALHGSAKLLLQTQRG

SEQ ID NO: 223968 - protein, 381 aa, unidentified
MAKRSTRTRAIREATNIVGVDPHKRTLTASVLDERGGVLGTQSFRVSGDGHRAMEAWATAFGPVLRWGIEGASGLGRHTSMFLIRNGHDVRDVCPSRTAAQSKNRHQGKTDKLDSVRAARETQTDPGIPVAFKRANGETGPDETLELLALWHKARCSLVKSRQHLLGEAEALLGALPEAIRDTLPDSATVRPRLRALLRQDHAVDADRATLLRLEMLAGHSAAITELDRKDRRIAGEMRALNAQMGTTLTELCGIAERMAAELLVEVGDPRRFAGEGGFARFNGTAPIPTSSGEGDGEPRRYRLNRGGNRRVNVVLHRMAITQLRCDERARTIYDDARRGGHTKREAMRILKRQLSNVVYRHMLRDINNRTRQTGQERDAA

SEQ ID NO: 223969 - protein, 390 aa, unidentified
MNEEKGKRIIGLDMHPDVFAAAALSADQSRQNADWVQDRMPTAGLEAWAKKQLRKEDVVVLEASGNSFAVATRLHAIGYTALVLESAQAGKIRDNFCNDDRHSAVKLAKVYRSGMAKVVWQPDAKTREYREVFFAHRNAVKDATRCRNRIRSFLNEHCVRLKPGVRLTQASGEATAKAAKDWTILQLELLSQKFSQLREVESRRNQLERIMVRELAANGRWASLWRLMGIRHRVAFALMAMVGDVHRFATAKKLVGYIGLAPRKDQSGNDKKGYDKGVGNFGRGDLRGLLIQSAHNALIQKDSPLHKWGWKLLMKKHRNEAAVAVARKLTVSIWHLLMGHFTPLLEATEHLHVKLLKLATVIGKDGLASLGFANREAFVTAQIKSIQLST

SEQ ID NO: 223970 - protein, 340 aa, unidentified
MSLYGGIDLHANNSVIVFINEQDEVIYQKRLPNDLSTILEQLAPYHTEVKGLVVESTYNWYWLVDGLMEADYRVHLANPAAIQQYSGLKYTDDHSDARWLAHLLRLAVLPEGYISPKAERAVRDLLRKRAHLVRQHTANVLSVQNIMARNTGARFSVKRIQELTKQELTTLLAEEPQVLAVTSSLVVLDCLRQQIKMLEKTVHKRLNHTPSYEQLLTVDGIGTILAQTIALETGTISRFPTVGNYASYCRCVDSKKISNGKRKGTGNVKNGNAYLAWAYMEAAQFAMRFQPAAQRFYQRKLAKSRNNTVLARKAVAHKLARACYYIMRDLVPFEATKAFG

SEQ ID NO: 223971 - protein, 405 aa, unidentified
MVRGRRPPKAATIGVDIGGRTHAVARCREGNSKADREIVRVSQSRAGFDALDAWLERQSEPVTLVTMESSGHYWMPLASHLRRRELPIAVVNPLAAKYFAKSRLSRTKSDPADARSLAEMAMRDMPPARDPLAGVELRQAARFAMTLVTEQAQVCQRLVRLVELGFPELGELFDDPTCRTAREVLRIAPTARAAIRRRTSTLANANAGPGHRRLGQAKAVRLQTAAADSIAVPELDAEVTFEVGLLLDQYDLLERQIETADRHVAELLDGELARRLQTIPGVGPSIAATLLAEIGHIERFSDFDQLLAYAGVHPAERSSGRKGASPETAWHMSKAGNAHLRAAAYRLAVIGVQHNPVIAAHYARKRAAGKSKMNALGHCMRKALSLVWGVWRNGQDFDPNWGLES

SEQ ID NO: 223972 - protein, 482 aa, unidentified
MQSKTAKQAERPKRLTRRRRKELARRIWSDQPGLEVVHRDAAGIDIGSREHYVAVGPDRDAEAVRVFGCFTTDLRRMAEWLQRCGIKSVVLQSTGVYWIPVYDVLEQYGLEVWLVNAQDTKNLPGRKSDVQESQWLLKLHTYGLLRRSFRPAPEIRGLRTCWRERGEYVQQAGSCIQRMQKALTEMNIQLATVLSDLSGETGMSIVRSIVAGERDGKRLAEFRDPRVKASKQTIAKSLEGTWLPEQLAVLQRQLGDWDHIQRQIAACDVDLQAMLQQIPAAKAQQQQSLAPAAAPAGKRKRKKNGKSSKNEPKFNLAAELQRVTGVDLSRIDGIKAMTIMTVISEAGLDMSKWATEDHFVSWIGLSPRNDVSGGKVLKRKTRKVKSRLATALRTSATTLRQSDSYLGAQFRRLRSRLGPPKAITAMAARQARLVYRMLKYGQEYVDKGAVIYEQKYREQQIRFLEKRAAQNGFALVPLHQNA

SEQ ID NO: 223973 - protein, 318 aa, unidentified
MNTNTLQNINVGVDTGKSQLDIYIRPLDICFTVPNNEKGISDAIKIIKKHKPQRVVIEATGRLEMPFILACDKAKLPYVIANPLRIKRFAGAIGQRAKNDRLDAALIAHYAERVQPELTKLKSENIRLMSDLVTRRNQLLTMQTMERNRLQILPKNISSTITPILTALKNQIEKVEAKIAKLIESCPEYQAKSTILQSMPGVGKVLTASLISNVPELGFITNKQASSLIGVAPITRESGRFKGKRLIQGGRTQVRTVMYMAMMSAIQCNPVFRATYERLLTAGKPKKVAIVACMRKMVVILNSMLRDGVMWDTDSLKN

SEQ ID NO: 223974 - protein, 360 aa, unidentified
MKKVSKGSVEGKVAKPERSVGLDLGDRFIHYCVLNGEGEVIEEGRMQCSESALRKHFAKEAVMRMAMEAGTHSPWVSRLLKRLGHQVVVANPRKIRAISSSESKNDRNDAEQLARFAAFDPKLLWPIEHRSEQRQQDLNLIHARATLVRARTMIINVVRGLVKSAGGRLPSCSTESFAERTRFAIPAPLREVSLPLLKQISLLTTQVDLMDKQIAKLDRKYPEISLLKSTPGVGPLVAACYVLTLDSPDVLGDNRQAGAFLGLRPGQSQSGDSDPQRRITKTGNTYLRSLLVQSAQYILGRFGPDSALRRWGLKLAGSGGKRGKKRAIVAVARKLAVILHSMWRSRIPFQVFPQPATVMA

SEQ ID NO: 223975 - protein, 428 aa, unidentified
MNYNQNKRIMQISEETLIVGVDIAKESHVARAQDFRGFEYGKTIKFTNDITGFNEFYKWIEKLCAEHDKSKIIVGMEPTGHYWFCLAKFLRQNAIKVTIVNPMHVKKSKELDDNSPTKNDPKDAKVIAQLVKDGRFSEPNMPEGIYADLRLAIDLKEMLTKELCAIKAKIARWLDIYFPEFQDVFSSWEGKAALLTLRNLSTPAKIVNITAEDIVKLWKTEVKRAVGSKRAELLIEKAKSSIGITQGIDMAEYNLQYLLDKYKTVMDNFEKLMVKIETIVDQIPEAKEMLLIPGLGLVTIAAFLSEVCDLTQYSHPRQIQKLAGLTLKEYSSGKHKGQTTITKRGRRRLRALLFKAIMPMVAHNEEFKALHEYYTKRVNNPLKKKQSLIALCCKLIRVLYALGTKGVAYNPQKLMDDIKHPEATGKAA

SEQ ID NO: 223976 - protein, 338 aa, unidentified
MKLYGGIDLHSNNSVVALLDEEERLVYRKRLANDAPGILEALAPYREAIVGLVVESTDNWYWLVDALMEAGYAVHLANTAALVQYSGLKYSDDDSDARWLAQRLRRDELPEGYIYPKAERAVRDLLRRRSRLMQQHTANLLAIQNLFARDRGRSLNANEVKRLTPEMVSQLLSDPNQALAVQATLLAMRGQEGAIDLLEREALAQVRPHPAYRHLQTASGIGQVLGSTIVLETGPIARFANAGHYASYCRCVGSQRLSNGKCKGRGNTKNGNKYLAWAYLEAANFAVRYNPVINRYYQRKRAKSNGVVAIKAVAHKLARACYHMLREGTDFDVNRAFA

SEQ ID NO: 223977 - protein, 344 aa, unidentified
MKHCKRLSIDLAKGVFQICGLSTNSKTLFNRKVTRSKLLLEVLNCKPDMIIMESCYSANYWGRLFESHDLKVKLIPAQHVKPFVKGNKNDKHDALAIAEASMRPDIYFVPIKSVEQQDIQCLHRVRQRLISYRTGLTNQIRGLLSDYGVIFPKGHHKVLQALPLLIENMENNLSFDMRELLSDLLEELKNRNIQIHGTEEKIKTLSKKRKGFENLMNMPGIGLINASALVSAIGDAKQFTSARGFAAFLGLVPKHEQSGTKLKSLGISKNGNRYLRTLLIHGARTIVSRYKDMNDPLKKFAVKINRKRGKHKAYVAVAHKMSRIIWAMLTKDQAYNPDYILTKK

SEQ ID NO: 223978 - protein, 348 aa, unidentified
MKHYAGLDVSVKETSVCIVDESGKLCRERKVPSHPEDLVAILSDPAFNLERVDVEAGPLSQWLFEGLAKAGLPVFCIETRHTKAFLDALQQNKSDRNDARGIAHMMRVGLFKDVHVKTLTSQKRRALLTARSLLQEKAIDLENEMRGLLRNFGLKVGHASGGTFERRILELVEHDTELAEIMEPLLAGRRKLREGLAKLEKRVLAEAKQDEVCRRLMTVPGVGPIVSLAYVSTIDIPSRFRHSRSVGAILGLTPVLKQSGEMSRVGHVSLRGDAMMRRLLYEAAQSMMTRVAKWCWLKAWAMNIAKRHGSKKAKVALARRLAVVMHRMWVDGTEFRWTREDTVSTVAA

SEQ ID NO: 223979 - protein, 336 aa, unidentified
METKTKFIGIDFSKATFDATIYEGEHCKFTNDDQGFKEFLAWVETHINGLSLQDCLFCGENTGNYSVRLSNFLYVHHCTMWLESALRIKRTMGLVRGKDDKIDSAYIARYAARNAEDAVSYEPCCKNIGELRHLFARRQLLVSQRTALMNAGKEANVLGEKSKYDRALENQNTKLVTMLAKEVLRIEKMMLEVIQADERLSRQYQHITSIKGMGPINAIALISVTEGFTKYASDAKKLACHAGVAPFKKESGTSVNGGTHVSHLSNHILKPLLTQAALSAILYNRQIIAYYERLISRGKKSQVALNNVKNKLLHIVIGLIRKDEDYDIQYQPAPKI

SEQ ID NO: 223980 - protein, 272 aa, unidentified
MKNYEETVGIDVLKKTIDVSCHLCSKHKVFGNDIKGYRSMLKWVKKQTGGVSVFCCFENTGNYSLKLATYLSSKGVDYVEESPIKIKRSSGLVREKTDKVDSEIIARYAWLYREELSSSKSKPVVYQELGRLIGLRDQLVRGRAGLLGTLKEIEHLLNSPSTDTSCIVLRRSIENLSKQIKHIELRMEDLIKAEPALSKTYDLLLSLRGIGFVVACQLLYHTENFKRFDTWRQFSSYCGLAPYEYSSGTSIHRRKQCYYLGDIKMKSLFIGH

SEQ ID NO: 223981 - protein, 423 aa, unidentified
MDVMHERVAGLDVHKETIVACVRIMAGGKVTRECRTFDTTTAGLEALLSWLTESGCSQVAMEATGVYWKPVWNILSDGKFELLVANARHIKNVPGRKTDMNDSMWIADLVSFGLIKASFVPEQEMQELRSLLRARKQVTREQTSHVQRIQKTLEEANIKLDSVISDIVGLSGRRMIEAMINGVRNPWELAELAHHRIKATRKQLYDALHGRLTDHHRFMLRLHLRQYDALEDAIKEIDQQVDAAIARMDAEVAAGQATFRSLIALLCTIPGVSDLAAKTILAEIGADMSRFPTAGHLLSWAGLCPGQNESAGKRKSSCMRKGSPWLKTLLVQCGWAASRKKDSYYKAQFNRLRGRHGAKKAICAVAASLLTAIYHMLKDGTQHQDLGANHFDRRSTEIKARRLAAQIAKLGFKVDLRPLPEAA

SEQ ID NO: 223982 - protein, 350 aa, unidentified
MEMLADELDYVVGVDTHLDEHVLAVVAAPSGAVVARRAVRANARGYSAALRFAGEAAGGARVWAIEGTGSYGAGLARYLAGRGETVFEVSRTPRAERRLRGKDDSLDAARTARAALASETLALPRSGERREALRLLLITRRSAVDVRREALGQLRGVIVTAPDRLRQELRGLPLGRLLERCSRLRRSSAMSADEVATRLVLRSLGRRIQAATVEADELEQEILGHVRALAPRLLDEPGVGPIVAAQLIVAWSHHGRLRSEAAFARLAGVAPVPASSGQTTRHRLSRGGDRQLNRALHTIVLHRRQHDPTTKDYIAQRIAEGKTKRDATRLLKRYLARHLYRLLQQEPLMT

SEQ ID NO: 223983 - protein, 359 aa, unidentified
MQRNKISFKGQKIFLGIDVHAKTWEVAVLTESGYKERHPQEASSKSLFDFLRKHFPDGEYHAVYESGFSGFATYYALKEYGIDCVVTHAADVPTTQYEEVMKTDRIDAGKLARSLRAGEIRPIYIRERENIDDRSVIRIRKTIQKQLSGYKARVKHLLYCNGVEMPERFSKPGSYWSRAFIKWLKEDVRLLSSSRLSLDLLIRQVETIRMTLLDATKAMRNLGQTERYSKNCRLLMTVPGIGVSVTMCILTEIYDIRRFRNENQFASYLGLIPTCHNSGEKTSNGEKTFRGNKHLGPMIIEAAWIAVFRDYGLGMAYANYKQYMKPQEAIVKVARKMSNIIFSVLKNGKEYEPYKWGKE

SEQ ID NO: 223984 - protein, 343 aa, unidentified
MAYFAGLDVSVKETSVCIVDDAGKIVREARVASEPEALLQVLANTIYRFKRVGLEAGPLSQWLYSILAEAGLPVICVETRHMRAVLKAQINKTDRNDARGIAQMMRVGLYRLVHVKTLRSQKLRMLVTHRKLLQSKAVAIENDLRATLRNFGLKVGVVGAVKFEARIKELVENLPDLIVLVEPLLIVRRVIREQVDILHRRLLAIVRDDDVCRRLMTVPGVGPVVALTYRATVDVPARFRNSKAVGAVFGLTPAKYQSGQNDRTGAISRCGDEMMRMMLYEAAQSMLARSAKWSWLKAWAMKIARHRGMKKAIVALARRLAVIMHRIWVDGTAFRWTREVAAV

SEQ ID NO: 223985 - protein, 420 aa, unidentified
MPDDRCRLGSDDVVIGLDLASAEHQAVVLTAAGQRLTRFRIPHTRAGLEELLRRTTPAALGRAGGARVFAFEATGHLWEAVAYVLRARGERYVVVNPLATFRVREARQLSREKTDLTDAEQIAELGRTGLVTRTQLEPRPYLALRRAWGEYVRLREERARLKVLVAHQLYGLFPEFLRVWADLRQPGALAVLRTGLTPAAMAALSLAEFVAQVRAHCAGHRIWRVKLAQVHREAAQTIACPDGLDVLAREVQRAVARMDMLTAHMTALVAEIDVVLAELAEVPYLRTIPGLGWASVAGLLAHVGAITKYHHGRQLIKLAGTNPSRRDSGQTVGRGQRMSHRGRAGLREVLYLATISCLQHNPRIRAHYDRLIQRADRPLPKMQALGACMNKLLLYAFAVMSRREAFQLDHDWQRTMSRVA

SEQ ID NO: 223986 - protein, 414 aa, unidentified
MEVLYPRCCGLDVHKSSITACALLREQGRIRTERRRFTTMTQDLKNLASWLRQLQVTHVAIESTGVYWKPVWNMLDGQFTIILANAQHVKNVPGRKTDAKDSEWIAELVQHGLLRSSYVPPEIIRDLRDLTRGRATLSQEASRIASRIQKVLEDANIKLSSVASNTLGKSGRAMLDALVAGQIDPEQLADLALGHLRAKIPQLRLALEGKIREHHRFLLKRLLHQLRFIESEIDLLDQRLEELGQRDPTLAAAVARWTTVPGVDRVAAWSLAAEIGVAMEQFPTAAHLASWAGLCPGNCESAGKRLSGKTRKGSPWLGRMACQCAWAAARTKNTYLSIQFRRLAAKRGRKRAIIAVAHSILVIAYCLQKKQCDYHELGSDYFDRLNAEGLKRYLVRRLEALGHKVTIEAAGDAA

SEQ ID NO: 223987 - protein, 367 aa, unidentified
MAEHSACLYVGIDAHQETLAIAVFPAEASASEPVRVIPNDPGRVRVTFRKLLERGPIQAVYEAGCLGFVLYRQLSSLGVDCIVAAPSRIPKLPGDHRKTDRLDATRLATFLRGGQLTPVSPPTPELEALRTLVRTRQAVQEDLVRARHRLQKFLLARGRAWGGGGNWSAKHMQWIAEQQMDVADDRESLIFLRTELDLRISSLKSLDERIRRRVEQPDVRDKVIALQAFRGVGVLTALATLAEIGDPLRFGSPEQVASYCGLIPSEHSSGQRVRRGGITRSGNPRLRRLLVESAQHSARPIGRGYARETRRARAPAEVVALARKADQRLSQRYRSLAFRKHTNQAKVAVARELVGLLWQTLVITSRV

SEQ ID NO: 223988 - protein, 411 aa, unidentified
MDVFCGIDWAEDHHDIALVDRDGQLLARQRVSDDAAGLTRLLELLAGHGDSEENPVPVAIETPRGLLVASLRATGRKVYPVNPMAVARYRDRYSVAGRKSDHGDAVVLANVLRTDLHAHRPLPDDSELARAVAVLARAQQDAVWNRTTAHNKLRSHLREYFPGFLAAFAAARGGILRPEARVILAAAPDPAAAARLTLAQLRALLKKAGRVRGIDAEAARLQEAFRKEQMRQLPLVEQAMGRQALALLRQLDAACASADDLEAAATGSFSQHPDAGIITSFPGIGALTGARVLAEIGDDRSRFQDARGLKAYAGAAPVTRASGKSRSVIHRRVKNDRLAAAGYIWAFAALTASPGARDHYDRRRDAGDRHAAAQRNLFNRLLGCLHHCLQTGQRYDEATAFPARQATPAAA

SEQ ID NO: 223989 - protein, 366 aa, unidentified
MVKAGLSGEADSENDPGGSLSEDMYYIGLDVHKRTISYCVKDAAGHVHQEGKIGSTRRELDAWIKTLPQPRTIAMEATIFTGWIYDHLLPHAEKVKVAHPLMLRAIAAAKKKNDKIDAGKIADCLRCDFLPECYMTSTEIRERRRTLRYRNLVLKQMVQMKNRISGLLMETGVSYNKQRLHKLGYFTELMSGNEEVDESIRPLLKLSRETIVRSQRLDYALVSSLERDPLLGERLERLRTIPGVGPITALTWALEIGDVSRFQSVKQAISYCGLCSAERSSADKLIRMPISKQRNKHIQQTLVEAAKLAPRYSPELALVYERERQRGNRNRATLAVARKMVAYMLAVERRKQDFVLTGEFSGTAAA

SEQ ID NO: 223990 - protein, 354 aa, unidentified
MSQKLNAAIAVIGIDIGKNSFHIVGHDHRGAIVLRQKWSRGQVEARLANLPPCLIGMEACVGAHHLSRKLQMLGHDARLMPAKYVRPYSKGQKNDFRDAEAIAEAVQRPTMKFVATKTADQLDLQALHRVRDRLVGQRTGVINQIRAFLLERGIAVRQGLRSLRSELPGILATRTDVLSPRMLRIIEGLAGDWRRLDERIEGLSSEIETLARQDKACERLMTVPGIGPIISSAMVAAIGTGDVFSKGRDFGAWLGLVPKQISTGDRTILGKISRRGNRYLRSLFVQAAWVVLVKVKCWERYGLKSWIEAAKKRLHHNVLAIALANKLARIAWAVLNKGRAFECVKTEETASQPA

SEQ ID NO: 223991 - protein, 377 aa, unidentified
MTQFPVSTSNEQSIYAALELSKNSWLLAIQIPGRDNPSLYPIGGGNAEGLMAKLDAARNRLAKVSGQTPKVTLCYEAGYDGFWLTRFLEQRGIECLVMEPASLQVNRRARRVKTDRIDVENILHTLIAWCRGERHVCSMVVIPSVEEEDLRRTHRERNRLVRERTAHINRIKGLLFAQGIRGINVMKDYKTLAPAELITGNGRSLPKRLGREITREIERLALVQEQLVEIEHERDQAPTPCAATERKRHDLLRLNGIGPTISAILAREVYYRRFANRRQVASYIGLAPSPYDSGDGRRSQGISKAGNSLARYSLIQAAWLWLRHQPNSALTQWFHHRTEGQSKRVRCIMIVALARKLAIAFWCYLETGLIPEGAVVK

SEQ ID NO: 223992 - protein, 451 aa, unidentified
MSKASRLSRGDKRRNDRLSKFRGIVRRDYAVAAIDLASKKQVVAVVDHDSRIVARRTFHCAPPQLATAIEWSRTAATAAGFAGIVIACEPTGHRWKTVRDLTAAVGVQMVCVQPIAVPRARETEDFTHDKSDDKDALLIARLTTQLHIYLPEHADEQWTRLRHLGVRRSQQLTRRGAAQQQARDLLEGAWPHALDCAGQPFKSVTWLAAMAVIGCTPETLTAQGSREQAVAWLREHVRAELPCWGGRRVTTRILVAIVDAAFAVQTETTITAEAGALERARYALADFHHARTACEQVEAAMIEVLTGLGLHELAGSIPGVSAVSVAAILAETGDLTRFDSARAVVKHAGLCPRENSSGAYRGATRISGRGRPLLRVAAWRAAFAALTHNEVYAARYRHLTSREANRLNPNQARVAIAAALLRQLYVVITTATPWNPDIAAGRTRPVERTAA

SEQ ID NO: 223993 - protein, 354 aa, unidentified
MSQTLKTSVAVIGVDIGKNSFHVVGQDRRGAIVLRQKWSRGQIEARLANLPPCLIGMEACVGAHHLSRKLQMLGHDARLMPAKYVRPYSKGQKNDFRDAEAIAEAVQRPTMKFVATKTAEQLDLQALHRVRERLVSQRTGIINQIRAFLLERGVAVRQGLRFLRGELPGILATRTDVLSPRMLRIIEDLAGDWRQLDERIEGLSNEIETLARHDQACARLMTVPGIGPIISSAMVAAIGSGDVFSKGRDFGAWLGLVPKQISTGDRTILGSISRRGNRYLRVLFVQAAWVVLVRVKQWERYGLKSWIEAAKKRLHHNVLAIALANKLARIAWAVLNKGRAFECVKTDAMASRPA

SEQ ID NO: 223994 - protein, 412 aa, unidentified
MKLIRDKVAGLDIHRDTVVACCRVHHQGRRVALTKGTFATTTKGLRELADWLSEASVTTIAMEATGVYWKPVYYSLEGRFDELWLCNAQHVKNVPGRKTDLNDAEWLADVASHGMVRPSFIPPTEIRQLRELTRYRKTQVDMRNQQIQRLEKVLQDAGIKLSSVASGVWSQSSKQIIEAMIEGERDPAVLAQMAKSRMRAKIPQLEEALSGHFGAHHAAVSREIIDHIGYLDATIASLTEEIRRMLTPYEAAFTILCSITGISEITAQILIAEMGVDMSQFPTPGHLCAWAGVAPASYESAGKRRTAGTRKGGIWLRRSLIEAAHAAVRVKGSYFSAQYIRIARHRGPNKAVVAVANSMLAVTWHLLTNGTLYEDPGADYFIKRHDPAIEAKRLQRRIESLGYEVTVTANVS

SEQ ID NO: 223995 - protein, 428 aa, unidentified
MEIKDRTRLEEFRQLKKEIRGSERHLIVGIDIAKDKHHAYFGTATGKTLLRRLVFENHKDGFEKLVTYVDAEKTKNALESVVFGLEPTANYHKPLAQYLIERSLTVVLVSPQAVKNNRQSLDGRWDKNDTKDSANVADLISQGKCLYYDYPCIELRDLRNLLSLKRRLKKQEHGAKVRIRNHLLALYFPEFDRYYARAGSEGLAIVKWCLDPSRIAGLEYDEFAHLVAPRIKTLGQAKRLKAIWELAVDSIGCEAGQAMDFEAKLMVEDLNQVKDSIGAVDDHVEEICLGFPEYNCLLTIPGFGPDVSAKVLGAIGSPFRFDNGKQVLKLAGYDLSASRSGNSSDRAVPVISKKGKASLRYALYQAAFIASIRNRRFIIYYTNKLRGREREKGIKTKMRVKLAAKMLIIAWTMMKNKEPFNPEYLNID

SEQ ID NO: 223996 - protein, 407 aa, unidentified
MEVLYPRCAGLDVHKDVVVACARCVSIPMHQEVRSFQTTTSGLMSLAEWLNSLGCTHVAMEATGVYWKPVWHILEEDFELVLANAAHIKNVPGRKTDVNDATWIADLLAHGLIRSSFVPPAAIQELRDLTRTRKQLVREVSQHSLRIQKILEDANLKLGSVLSDVLGRSGLAMLEAIIKGESDPEKLADLAQGHARKKRVELIEAMRGRVTMHHRTMLKFHLDVIRALKRTLEELDAAVGKALTSIHERAQLLTTMPGISDIAAQVLVAEIGVDMSRFPDPGHLISWAGLCPRNDESAGKRRSTRVRKGAPWLKTTLVTAAWAAVRTKGSYLQAQFLRIKSRRGAKKAILAVAASMLTAAFFMLRDGVAYKDLGADHFSRHDKTKTIQRLLRRLGDLGCHVAMAQPA

SEQ ID NO: 223997 - protein, 481 aa, unidentified
MQATTEVTMQTTISGVIACGMDVHKDKIDACVRIGDGSAEGRVVIKTFSTMRKALFELRDWLVSMNCLRVLMESTGVYWMPAYSILEEVDGMNVGIGNARDLKNAPGRPKTDKEDAKWLSRLCMFGLVLKSFVVEKPFRALREYTRYHKKLVQERARQINRIEKLLQMNGFKLSSVLSSIAGVSGTKLLKKLADKGELSVSDVSVEINKQCKSTPEEIENALNGSMKLTSRLLLRLQLQKLERCDREVDEVYDRMLYLSKEHAEAVHIIESIPGMSTLSAIYIIAEIGTDLSSFKSANHIAAWAGLAPKENESAGKARPSRTKKANQYVKSILIQCAWAATRTRNTRLSLWYWRNAKRIGDKKAITAVARKLLCYIYAMLKSGTFYDRSLDVAYANNLRAIKLDAAQKIVGSRKSDTQAIDKSVKSNGIRLALDLDSIHEEPDSSHSQVDYKKQSIDGIASPSVTPTPKKRGRPKKAIPPH

SEQ ID NO: 223998 - protein, 460 aa, unidentified
MSMRFVPEEALVVGVDPHRDSLEVVGIKYPEVKLIEQEWENTPEAHRSLLERAREVASAQGLRLVIGIEDSSNYGYNLARYLAREGCQVKDVSPIKTDRQRDFYGQDKSDHLDALVTAVVVLRAYDRLPDVKPLREAAEATRELSRYHEQLVKGQTATVNRLHNLLANQYPGYKAFFNPIRGVTALAFWSEYPTPHHLEGVSIEELVEFFYEKSHHRLNREAGREKAELILASCEQVLASDRGLLIETQAQIIKDLAGRLVELRESIESVKAQLQVTVSATGQQLETLKGLGIVLAGRIIADTVNTERFDNDPNRYASYNGTAPAFKGSGKHYRHVDNKRCNRRLKDSFQKLAMNAALHEPLSKAYLKHLTEERGMERHHAIKRLMRRLSDIIFAMMRDKTPYDPEIHRKKQGHRGKKKEESTAAAGQRQEPFAFPSPRDASVARPREPVKQREPALEPV

SEQ ID NO: 223999 - protein, 298 aa, unidentified
MKHYAGLDVSLDEMSVCIVDEVGAYVAEAKVASDPAALTEYLHATGLSFGRVDLEACPLSQWLYSGLAGAGLPVVCIEVRRVKAALSAMINKTDRNDARGIAQMMRTGWFQPVHVKTTESHELRFLLVARKLLLKQQYEIEGCIRGSLKVFGLKIDVVTKRMLEARVRELIDKRSLLVTIVEPLLRARALIMAEHNRLHRMVVRVVHRDPVCRRLTSVPGVGALVALTYRTGIDVPARFLKSKAVGAHLGLTPRKHQSGEVDRTGHISKVGDEMVRSALYEAANVMMSRVVRWSALKA

SEQ ID NO: 224000 - protein, 479 aa, unidentified
MEQEEAGQPPARRLVGIDLGIASRHSVRVLEADGRVVCRSSCVPTVESLARLEQVALAGAPAGTALAVVFEPTGPAWLPIAVFFARRGHAVHRVSSAKAADLRRFLRRHAKSNGIDAETLARIPLADPAGLQLLELPGAAAAALDRRVRACTRLTQAAAERKTRIKDLVRQLMPVTPLTGDIGQADLAVLEHHADPRALLALSLAELTQMITTASHHQQGHDRARQWRDAAAAAAELYGGHPAVPFAELAAEVATEVRLLRAIQAELATHAAVREKCYRQADPGQLARSLPGFAEIGAPVLIAAMGRPGRFRDGTKFKSYVGLAPRASETGETDRKGQSMSKAGPSLLRATFFRAADTARRQDPQLAKIYYTQMTERGATHLKACCVVAGHLAERAWAVLHRGTPYVICDNNSNPVTPAEAKQIIAERWTVPEEIRKRRRNRKIAGKAPQPALTRPDTRGDLPRPRSSRPRPKAVNPTT

SEQ ID NO: 224001 - protein, 459 aa, unidentified
MKQSGGRGKQIVVKRAEGTLAVVRGNVAGIDLGSIEHYVACPPRDGQANVKVFGTATPELVALADWLQAEGVVSVAMESTGVYWIPLYELLDGRGIEAVLVDARQLKHVPGRKTDMIDCQWLQLLHSCGLLRGAFRPADAVCRLRTLVRQKATLIDEQATWLNRMQKSLDQMNVRVHRAVADISGSTGMAMIRAIVAGERDARKLAGLRDARCHKNVEQIAEELTGNWREDHLFNLKEALAMYDFILERIAAYESEIQRILKELAPNPELKPAPKPVNANKAKLLRARGQEPLRQALYGACTVDLTAIDGISTSTAEVVLSELGPDLSAFPTEGHFVSFLKLSPRLAISGGKPIHKRPKGTASTRVGAALRMAAVALRNSNTALGASYRRLARRKGASVAVFATARKLAILIYRMLRYGMAYVDEGVQAYEKRFQVARLQMCEQIANQFGYKLIEKEVA

SEQ ID NO: 224002 - protein, 363 aa, unidentified
MFTIADAGQARLVTGGVDTHAEVHVVGMVDQAGRVLGTREFPVGAAGYQAALAWMRGHGELVKAGVEGTGSYGAGLARYLAAEGVEVAEVIRPNRQARRRRGKSDTADAVSASLAALNGEASGTPKSGDGAAESIRALQVARRGAVKARTQAGNQLRDLILTAPEQLRDKLAALTTPRRVTLAARFRPGGLASPAEAAKAAMAAVARRHQALTAEIAQLDASLETLAQHAAPAGFLARAGIGTQVASILLTTAGDNPGRLRTEASFAALCGSSPVDASSGKQRRHRLNRGGDRQANSALWRIVFTRMACDPRTQAYVARRTAEGKSRKEIMRCLKRYVAREIYKALVTQARNPAAGIPLTPAA

SEQ ID NO: 224003 - protein, 395 aa, unidentified
MLFRSQDEQGRRLAVGRLPEGVEGIARFHDLAGGHAAGPGEVVIGIETDRGLFVNALVATGYQVIAVNPVSASRYRDRHGSSGAKSDRGDAKVLADLVRTDRHNHRQVAGDSDLAGAIRALARAHQSMIWARRRQASQLRSALREFYPAALAAFDDLTSSDAVAVLKAAPQPSLGAALSRTQITAALRRGGRTRHLDGRTQVIQAALRTPQLQPAPALAAAMGAAVTAVAGVIAEMNTQISVLEQQLAADFEQHPDAEVVRSLPGLGTILGARVLGEFGDEPDRYTSAKSRRNYAGTSPITRASGTRRAVLARHVRNKRLADAIYLWAFSALSASPGARAFYDHRRATGDTHHQALRTLGNRLVGILHGCLAHHTPYSETTAWAHRTSQPATRAA

SEQ ID NO: 224004 - protein, 398 aa, unidentified
MDLPVYYELETNNGNRDYRIQIGGHYMNYNTVYVGMDVHKESFTLCSCKYEDEKASHYQRTPASYKNVLRYLAFLRTIYGEDTRFVCGYEAGCLGYSLYHQLENFNVECVILAPTTMLEQRSKRRIKTDKRDAEIIAKSLAQHNYSPVHIPTKMDNQTKEFIRMRDDHKAELKKIKQQILAFCLRQGYQYDGSGNWTAKHVKWLRSLKTEGLYKEILDEYLLTYTILTDKLNRLDQRIEELASEEEYKEPVSKLTCFLGIKTHTALSVIVEVGDFQRFASARKFAGYLGLVPGQHSSGDDRNGLGITKAGNTHVRRLLVESAQSYTRGKIGYKSRVLRSRQAGNSPQIINYADRANERLRRRYYQMVLKDGKKYNIAKIAVARELACFIWGMMTDNIY

SEQ ID NO: 224005 - protein, 414 aa, unidentified
MDIVHDRAAGIDISKRDAKVCVRIPGARAGTFSKTVTTYGATTNEILRLRHNLEEAAVTVVAMEATGDYWKPFFFLLDETLNVELVNAKQAKNIPGRKTDVSDATWLAELAAHNLLRASFIPPEEIRQLRDLTRLRANLIHERTREYARMEKTLEGSNIKLSSVTSTLSTVSARRILDALVSGERDPQILASLAHTSMIKKSAALTEALTGRFTDHHAFMVKMHLDRIDQIDQAMTVLETRIDEVMEPFSLARELLMTIPGISKNVANTLIAEAGADMTAFPTAGHLASWAGVCPGQNESAGRVSSAHTRPGNHYLKAALGIAAMSISRSKTTYLAVKYRRIQSHAGAMRAVVAIENSLLVIAWNMLTKGVAYEELGVDHYDRTNPERARRRLLHRMESLGYQPILTPLPTGTT

SEQ ID NO: 224006 - protein, 489 aa, unidentified
MIPLDPVVIRYDISGAPSRCRVKFYDLVVGFGVFRRNEPGQAVVCGDLRGRVVTWPPQRLTRLRCERESVSVVFRPVSSSNRTERRVAVRSIGMDVHRSFAQIAVLEGGVCRDDGRIGVKPEDLRAWAVTLEPDDEVALEATTNSDAIAMLLRPLVGKVVVSNPRKTRAIAEAKVKTDKVDARILAQLLAADFLPGTWVPDDRTRMLRRLVVRRMHLVKQRTRVKNQVHAILARNLVPTCPHADLFSGVGRRWLAAQDLPGDEWRSVDALIRQLDFHGDELAEVDRDIAIEAIDDPVVARLMTVPGIDVTVAIAVVAAVGDFSRFESPDRLVSYLGLNPKVRQSGNSKATHGRITKAGPAQARGMLVEAAFAASRTPGPLRAFYRRIKDRRGFQVATVAVARKMTVLCWHLVTKDEDYAFGRPSLTAHKRRKLELAAGAESCRGPVAGTSRDYHIKRLRDEEKALVEHAERAYEVSVAHWQPQGPRRQG

SEQ ID NO: 224007 - protein, 412 aa, unidentified
MLKIVYPVCCGMDVHKSFVVACIASTNDHGVTTYRSGRFSTFTGDLRRLAAWLHAHSCTDVCMESTGKYWIPIYNILESSCRITLAHPKYVKAIRGKKTDKKDAKWIADIFKHGLVCGSFIPPADIRQLRDLMRYRAKLTGFSTGEKNRAQNCLTVSNIKLDDVFSDVFGKTASAITQRLLENDAPFDVTPFLNKKLKASADRIQAAVDGHICAHQAGKLRVIRSHMENLAACKKSLEVLIFGLAEKYLPTLDLILTVPGIQVFAAIGILSEIGADMSVFQSSKHLCSWAGLTPQNNESAGKKKTTRISRAGAYIKPLLVQCALCAIRKKSNPEIRSRYLNLKKRRGHKKAIIAIARMLLTAIYNMIKKNEKYNAALYRKADTPPKNREVSINEAIYILQRQGYLVTAPQSA

SEQ ID NO: 224008 - protein, 320 aa, unidentified
MRNTVGLDISKLTFDASAMVGNAEYSAKFDNDSKGLDQFSDRLKSLGCQNLHICMEATGNYYEEVADYFAQYYSVYVVNPLKISKYAESRFKRTKTGKQDAKLIAQYCRSAKESELVKRQKPTDEQYRLSRMIAAYAQIKSECAAMKNRHHAAKDEEAAKAYAQIIKAMNEQLEVLKEKIKEQTEKPNCKEGVKRLETIPAIGRMTAAVLFHHLTSSKFETSNKFAAFAGLSPQQKESGTSVRGKGKLTKFGNRKLRAVLFMPAMVAYRIRAFPDFIKRLEEKKKPKKVIIAALMRKLAVIAYHVHKKGGDYDPSRYKSA

SEQ ID NO: 224009 - protein, 268 aa, unidentified
MSITMIGLDTAKSVFQVHAVDEATKVAIRRKLRRSELIPFFEKQEACTVVMEACGAAHHWARVLTGLGHDVKLIAPEAVRPFVKKGKKNDAADAAAICEAASRPDVTFVPIKSLEQQGILALHSARSLLVKQQTMLANAVRGLAAEFGLIAPQGIGKLGELMALVEADEAFPEKARQAVRGLLDQRRWLAESTETFEAEIVVHARHDETARRLATIPGIGPITASLIAATVADIGVFQSARHFAAWLGLVPRQHSTGGKTRLGPTGFA

SEQ ID NO: 224010 - protein, 364 aa, unidentified
MKKSSKKQLSGTVAESKPAQVVGLDLGDRYSRYCMLSSTGEMMEEGRIQTTAAAMEKHFGSEPRMRIALEAGTHSPWVSRLLKSYGHQVIVANPRKIPTLTKSESKNDRNDAEQLARMAAFDPKLLHPIEHRSPERQQDLNLIHTRSVLVRARTMLINSARGLVKSAGQRLPGCSSEAFPKKVPAAVPPALKAACTPLLEQITRMNKTIAAMDKQIDQLDKKYPEITVLRTAPVVGSVVASCYVLTLDSPQAMKTNRQAGAYLGLRPRQQQSGDSDPQCGITRMGNTYLRSLLVQSAQYILGRFGPDSELRRWGLKLAASGGKRGKKRALVAVARKLAVILLSMWRNRKNFVPFPQPAAQLATA

SEQ ID NO: 224011 - protein, 364 aa, unidentified
MDPPLKDGVIMCQHRISIFKKRRRSMKDIKILGVDIAKDVFQLCGIDEWGKVIYTRRVKRAQYVSTVASLKVGCVVMEACGGANHWYRTFMGMGIPTQLISPQHVKPYVKSNKNDRNDAQAIAEAASRASMRFVRGKTVEQQDVQALLKIRDRLVKSRTALINEIRGLLQEYGLTMARGAKRFYEELPLILASEAVGLTPRMKRVLNCLYTELLNRDEAIGDYEEELKAVAKANEDCQRVQSIPGVGYLTALSVYASVGDIHQFHRSRQLSAFIGLVPRQHSSGNKEVLLGISKRGNVMLRTLLIHGARALLRHVKNKTDKKSLWLKALIERRGMNRACVALANKNARIIWALLTRQETYRCGA

SEQ ID NO: 224012 - protein, 333 aa, unidentified
MKNYLFHAGIDISKDKLDINILDSLTLQSQHLIIRNDIKSISDLIKILQKKIDLNRTLFCCENTGVYTNHLSFVLLNKELDLWVVPAIEIKKSKGISRGKNDKTDSKDISYYSYRHLDKLNLFTLADVDVQKLKILFTERAKMIKALLIPQTSRENKEFTQKEIYKEISGVNGALLKQIKNSIKKIEIRIKEVIKSNDQLNKQDQLARSIPGIGAQTSAYLIIATKGFSSFDNWRKFACYSGVAPFEFSSGTSVRGKTKVNHMADKKMKSLLQMCVLTAIKYDPQLKEYYNIKKAEGKNSMLVMNNIRCKLISRVFAVISRGTPYINTYKFAS

SEQ ID NO: 224013 - protein, 344 aa, unidentified
MTRFIGVDLHKNRFTVCAMNEGGEYKLAVFSLELNGLKGFKRTLTQEDEVAVESTGNAGYFAREIKGLVKEIRIINPTQFKIISHSVKKTDEHDAVTIARYLAKGLIPEVRMRSKEESRIASLIGTRDKLVKLRSALKNKIHNILNANGIVTAREGFGSKKGLDKILTLNIDQSYLFELRIIVEQIRSLNQSIDQISREISSRGEKLKGHKNLISITGIGALSATILLNTIGDIKDFSDDKKLAAYFGIVPRVYVSNETSHYGRITKMGNKIARTALVQSTLIAIKYNDYLRSFYLRLKSKKGSGKAIIATARKLLGIVYRTLKNNWVFEDFNKFKLVNSLQAG

SEQ ID NO: 224014 - protein, 320 aa, unidentified
MVRPNAGIDVSKPHLDLCLRDTQRRLPNDASGWNELTAELQAAQVDLVVVEATGGYERGLVCALQSAGVCVARVNPRQARDFAKSMGVLAKTDQVDARVLRDFGDVLARHRDRSKFITPMLDQARQVLAELMTRRRQLVEMRVAENNRLEHAGQRAARSITSVLKLLDKQIDSIDAHIDDHMGQHFKAQRELLDSVKGVGPVTILTLTAALPELGQLGRRQIAKLVGVAPLADDSGGRNGKRRTWGGRSEVRSVVYMAAIVAMRHNQVIREFYERLLSAGKPKKVAIVACMRKLLTILNAMLRDQALWNATRHCKTVEIA

SEQ ID NO: 224015 - protein, 350 aa, unidentified
MACQKKEELEMSLYGGVDLHGDNGYYAIVDQDNKRVYGKRLPNELDVVLEELKPYRSELKGIAVESTFNWYWLVDGLMEKQHSVQLTNPAAMKQYEGIKDTNDKTDAFFIADQMRLGILKCGYIYPKEERAVRDVLRRRMLFVQQRTAQALSLQGLYSRQTGGEIGMNRIRMLTASELEKTFAAEPVRLMGTASLETIRFLKERVDEMEKYVMDRCRLKPEYEKLLGVPGIGKVLAMTIMLETGDIRRFAEAGNYTSYCRCVKAERESNFKKKGKNNRKNGNKYLCWAYIEAANFMIRHSEEAKRWYQRKVVRCGGKKVVAIKSLAAKISKACYYILRDQVDFDVKKIFG

SEQ ID NO: 224016 - protein, 421 aa, unidentified
MTQSAPHTFAAFVGIDWADAKHDVCLQAAGSAKRECCQLDHTPEAIDAWVTTLRTRFNGQSVAVCLELNKGPLVFALRKYDFLILFPLNPLTLARYREAFTPSRAKDDPTDAELQLELLLTHRDKLRPLNPQSPTMRALAQLVEHRRRVVGDKVRLTNRLTSTLKNYFPHALQWFQDKDTLLFCDFLSRWPTLKAAQLARRSTLETFFRDHHVRSSDVIDKRIHAIHAASPLTIDEGVIAPHALLVQALVSQLRVTLQAIETFDNAIAQRAQSHPDFPLFQALPGAGPVFASRLLVAFGEQRDRYASAAELQRYAGIAPVTERSGKKSWVHWRLQCPKFLRQTFVEWAAESTRHSFWAQVYYQQQRDKGKAHQAAVRALAFKWIRILFRCWQDRTPYNESAYLQALNSRGSSLLHNLAKEA

SEQ ID NO: 224017 - protein, 410 aa, unidentified
MQTLVERGCGLDVHQATVVACLLIVLKNGRVQKQVRTFGTKTRELMGLREWLLSESCTHVAMESTGVYWKPIYAILEGAFEIVVANAQHVKKVPGRKTDVKDAEWIADLLCHGLLRPSFVPPSPIRELRDLTRYRRKLVESRTAERNRLLKLLETANIKLASVATDVFGVSGLLMLHALVEGKATAQEMAELAKKQLRKKIPELELALEGKVEEHHRFLLRVQLRRLRTVEEDLGILEQRIQEKLKPYAAQFTLLQEIPGIDETLAAAIIAELGVDMGVFESVSQLSSWAGVCPGNNESAGKRRSSRIPKGNVYLKTALVEAANSAAKAKGTYLRDKFYRLKARRGYKRAAVAVAHKILVAIYHMLSHQVCYNELGDVYLDNLNKHHVTRNLVNRLERLGYAVTLQQKAA

SEQ ID NO: 224018 - protein, 371 aa, unidentified
MKSIVYVGMDVHSSNYTLSCYMVENDRCFATVQVEPDYKKILKYLDNVQKNVGEPCEFHCGYEAGCLGYSLYHQLMDHGVDCTILAPSTMPSYKKNEIKTDKRDAMKIARCLAFNTYCAVYIPTKEDSDVKEYIRMRDAHKLALKKVKQQILAFCLRYDFRFTSGKSYWTQKHLAWLRGLAMDALMREILDEYIQTYQNLVDKLERFDKRIEELAGGASYAEKVKKLSSLIGIRTHTALALIVETGDFARFAKANQYASFLGLVPGEKSSGDKQNQTGITKAGNTHLRRLLTESAQCYGRGRVGSKSKSLKERQYGNTPETIAYADKANERLRRKFYHMVLNNSKKHNVATAAVARELSCFVWGLMTGHTA

SEQ ID NO: 224019 - protein, 316 aa, unidentified
MGERSVFVGIDVAKAQLDLAQRPEGPGLSAANTESGIATVVAHLRIVQPTLIVLEATGGLERPLVRALVDATLPVVVVNPRHVRDFAKATGQLAKTDALDAQVLARFAQAVRPALRPVPDAPTQELAALIARRRQVVEMLTAERNRLGGAPKRVQRRIQVHLNWLTTELARAGDDLDQAIRNSPIWREQEDLLQSVPGVGPVVTRTLLAELPELGTLNRKQIAALVGVAPLNRDSGMLRGRRMVWGGRAQVRAVLYMGAIVAARFNPVLRAFYQRLRAAGKAKKVALTACMRKLLIILNAIMKHRTPWRTEIAQCA

SEQ ID NO: 224020 - protein, 339 aa, unidentified
MNCTVFGLDLAKRVLQLHWVDMETGEVCRRQLKRQQVVEFFANRTPGIIAMEACGSSHYWGRKLTAMGYEVRLIAGQFVRPFVKSNKTDVADAQAIWEAAQRPGMKFVALKTEEQQSVLTLHRIRAQLVKMRTMQINQLRGLLYEFGADLPQGRQRGIARVGEELARLEGRLSPLVIDAIRDQLRRIETLDQDIAGIEKKLLLWKKQDESSRKLMEIPGVGLLTATAAVATMGNAGVFRSGREFAAFLGLVPRQSGTGGRVKLLGISKRGDVYLRTLLIHGARSVIQNQKEHDPWLTKLLSRRPRNAVTVALANKMARTIWALLAHDRRYDRNYAASAE

SEQ ID NO: 224021 - protein, 330 aa, unidentified
MIVIGLDVHKQSVTAVAVDEAGRPIDEAVIRAGSDELLGWAASLDSERLWAVEDCRQLTRWLERQLLNVGEDLVRVPPKLTVPERRAGRTRGKSDPIDALAIARAALREPDLSRPRPDERVYWELKLLVDHRDDVVDQRRRTQQRLRWHLHQLDPTFEVPLRMLGRASHLERVSRWLARREPELQVQLARELVSTIRSLNRAVAELDQDLEQRASEIAPGLLELPGCAAITAAKLLAEIGPIHRFKSDAQLARHSGVRPWRPAPAECSVTGSTAVATASSMPRSTGSRSLRPATTHPPATTSIANALRARADERPSAASNDSSSASSSKP

SEQ ID NO: 224022 - protein, 341 aa, unidentified
MGYYTGIDVSLEVSYFCVVDPAGQMVKEARVASEPEAFIAWFAELGLEMTAIGLEAGPLSQWLYAAMVEAKLPAVLLETRQVRDAFRSMPVKTDRKDARGIAQLMRLGWYRRVHCKSPVAQENRTLLAGRKMLQTRYIDLEMCLRGLLRGYGLKVGPTNRKTFDGRVRELAASVPGLENTVDALLKARAALLEQFRRLDGLVNSRARQDERAQLLMSVPGVGALISLTFVSAIDDPARFRSSRTVGAHLGLTQRKYQSGETDITGRISKCGDQEVRTALYEAANIILTRPVKGSQLKSWAAKVAARAGMKKAKVALARKLAVIMHRMLCDGTFFDPKLAAA

SEQ ID NO: 224023 - protein, 326 aa, unidentified
MAKQKQTQEIAFEEVVERGCGLDVHKKEIVATVSGTGIESETRTFQSTTRSLTALKEWLLALGVTHVAMESTGIYWKPVMNILEPGGFSIMVVNARHIKYVPGHKTDKKDSAWICKLLRAGLLKGSFVPGRNQRDLRDLTRYRRKLVQQQASEHNRMIRIFEDANLKLSSVFSNIRGKMCTRVIDAVIAGETDPQKLAALCTHRRLKATREEIALAVEGCFTEHHKFMIRAIRTSIANIEAEIDHLDKEIERRMKPFEAQITQLCEIPGMDVTSANELLAEIGVYMEVFPSAEHLTSWAGLAPGNNESAGKKKAHTPTTATKPQKR

SEQ ID NO: 224024 - protein, 341 aa, unidentified
MDKTYLRQAIGIDIGSKKLQCRHGVLDSQMKIHLKASKSISNHYGEFDQLQQWIERHSGKYSGVKLIFIIEATGTYHEELLYFLTDHGYSVCVTLPKSTRHFAKSLNTKTKNDRVDAGVLARMGLERELTPWQAPSDQMKTLKDLTRELEQLKKDRTRLLNQLHAKQKAYHVHEEIIERLKSRIAFIDEQIKLVETQIEEIISNSPDLQEPIDRIEKVQGLGRMTIISIIAETDGFALFKSIKQLSSYVGLDVVERQSGDFRGKTRISKAGNRRIRASLYFPAISASIHNPTLSKFYHRLLNKGKAKKLALTAVARKLLGIIYSLWKSGQEYQKDLNTKSL

SEQ ID NO: 224025 - protein, 433 aa, unidentified
MDIVHPRVAGIDVHKKVVWVAVRLPGEGPGERKVVTKRFKTFWRPLQKMAAWLAELGVTDAAMESTGVYWWPVYHALAGAGIEVCVCNAAHMRNVPGRKRDIADCQWIAELHEHGLLRPSFIPAAEVAALRARTRYRKRLIEQRTAEGQRLAKVMEDAGIKIDSVASRLLGKSGREMIEALIAGERNPERLADLAKGVLRRKTDDLQMACDGRFTGSHAQMSRLHLDAYDHLTAKIAELDALIAEAAAPFAAVIARLITIPGIGQRTAEVIVAETGGDMTRFATSARLAAWAGLAPGDNESAGKRRHAAARQGNRHLRAAMTEAAWATARTRTRPGARFRRLARRFGKDHEKKAATAVAHTLICITWAVMAHGQDYADAGEDYYDQRDQRNREHLIRHHQQALARLGCQVSLIPPDDGSPPPGTASPHPGQAA

SEQ ID NO: 224026 - protein, 410 aa, unidentified
MKIAGIDVHKKVLMVVVLDASAPEQKPARRRFVTLPSELQRFRIWLQEQGVEEAVMESTAQYWRSVWLELEPHMRLHLAQAFSNRAPRGRKHDFKDAERLVRRLIADELILSFVPDGEQRIWRSLTRMKVQLTRDRVRLQNQMECLLEEMRIKLSIVVSNLLGASGLRILHALAQGESDPKRLAELGDERLHCTEEQLVDALTGRVQAMHRGMLGLQLQRLQLLDQQMAELNRMIAQVMKSHQDAVIRLAEVPGLGVDSAHQIIAEVGAQASTFSSAAELTAWVGTCPGKEESAEQNQSSRSAKGNKYLRRVLNQAAHAAVAKKGCHFQVVFRRLLPRLGYKSAIWAVAHRLCRVVWKILHEGVRYIEQGREVGPREKKQRAQMLARALRKLGYEVTITPINQLAPQPVI

SEQ ID NO: 224027 - protein, 425 aa, unidentified
MKITQTAQKIKVNFAMDISVDVHKDVLNFFFETDGKEYVDECSNRTTVIQKKLKQYHEVALDHGMRTLRVICEPTGEYQNKLFRTARKMGFLTCYVNAESVAKFRVVETNDNGKTDTKDPRVIRTLGQLNKTIRHRILDDDYLTLRKLNKVLDEVDEVKKGIRCRISTLLVEMFCDYSFKKDFLYIPSGIALVDKFGCNPYRIVNAGYKRFCAVMKKGAHRIRETTLKRLWDDAESSALNEQPEGYIEVIETQLKQLMEDYWRNQGRSEAIIEKMIAILNCLRKKDPNIPKAVKGVINDKHIARLLGETGPLGDFTNWRMLMRYAGLNIRMRQSGRYSGLNKITKKGRSLLRKVLQRIVFPLVRQNSLYGPYYHSKKEVDKMPGNKIIICVSRHFLKKFYGWYKSGEAFDQQRFFSCETQYRKAA

SEQ ID NO: 224028 - protein, 426 aa, unidentified
MRVLYDRVAAIDVHKDMVKVAIRVPGAKRGTRKTDVLEFRTFYGVLQAMARELRGRGVTHVVMEASGVYTDPVYYALRELDFTEVMVINPAHAKALKGHKTDAKDAVRLLDLYECGLLSGSYMPDPDLREVRDLARYRMKTVQARTSEIQRLQKALETAGIKLDSVVSDITGDSATAMIEALISGERRGAVMAGLAQTRMRTAGKMADLSMALTGRFTDHHALMCRLHLDRIKLFDNAVEDLDARIAPKVARHARAAELLQTLPGFGGVIVAGWLGAIGPAPHQHFATASRLASWATICPGNYRSAKKSKGGRTGNGGAYLKPLLIQAAWAAVRVPGRLQARFRRLVRKFGGPRNKGAQKRAITAIARTLLKIAYSVLKTGKPYADLGADFYTRRESPDARQDYLMRQLQKLNPGCVVTITPAEAA

SEQ ID NO: 224029 - protein, 366 aa, unidentified
MSSVASPEGLIHLGMDTSKNTIVVATLLPGEESPVTDRIFNEEEAIRRLVGRFPDRSVLRAWYEAGPGGYDLYRLLASMGVACQVVAPSLIPKGGSDKVKTDKRDSRRLARLGRAGELTPIRVPSPGEEAVRDLARARDEVLADRKRARQRLTAVLMRHGRIWRGGSYWTAAHRAWIAAQRYGEPALASAIGYYRATLEVREAELAAVEAELMPWAGREPLAGPVARLGCYRGIAELGGLTLAAEVVDWRRFPAARAFMSYTGLVPSEYSSGERTRRGHITGSEPVRTALTEAAWAYRHAPAIGAGLRRRQDGAAAETLARSWTAQRRLHARYVHLVHAGGKAAPEAVVAVARELAGFVWAEMTAA

SEQ ID NO: 224030 - protein, 401 aa, unidentified
MKSLSGGIDIGSESHHVIIMDDTGEVLYDRKVAHQFSEFHKVIGEFKGIEEREQGVIAFAIEGKNGYGAPFDRILIENGFKLYNVDNLKLRRFRDVFGSEWRNDRRDAKMLAKMLRLKDHMDAQEEKAFIAVEKPSAVHEKLRILSRHQQSLIDEKVRIQSRLRKRLLEVCPDILEHGDTNSKKLLQLLKKYPDFSRYKKITLGALLKIETIGKKTAVSILEGLRNIQYVEELTGIYKALISSYCHRILELKEEIKMLDRELEEAGQKSAEVMQLKSIKGVGTKLSSRLAGEIGDIRRFNRESQLAVYCGVACIDDDSGKSKRTKAIYKANRICKATMIEIAGCTIRYVQESKTYYEKKRAEGKKHNHALRCLARQLIKVIFKMLTENREYIYKEELKKAA

SEQ ID NO: 224031 - protein, 343 aa, unidentified
MQAITVVGLDIAKSVFQVHGVDARGGAVVRRQLKRRYVLAFFKKLPPCLVGIEACATSHHWSRELQAHGHNVRLIPPAYVKPYVKRQKNDAADAEAICEAVQRPNMRFVPTKTSDQQSCLMLHRTRHLFIRQQTAIINTIRAHLAEFGIIAPVGRNGVEELLYAVADQRDERIPEVARGCLESLGALLGKLKAQILEFDRQINAWHRSNETSRRLDELPGVGPALATALVASVADPKAFRSGRDFSAWIGLVPKQSSSGGREKLGSITKQGDRYLRSLFCAGALAVIRYAKIHGTKHRPWLAKLLERRPTKVAAIALANKIARMAWAMMAKGERYREPLALAR

SEQ ID NO: 224032 - protein, 416 aa, unidentified
MREAAVNLKEKRAVYVPIDVSKYYHKVMLCAPGGRIIRNPFEIDVYSESLDKLLAEVKRVKEAERAKTVIFALEPTSYYHYNLYKRLKALNQTVLLINPSITATIRNLNYRRVKTDDIDLKVLAQAIEEQKGIIAEGRDGQYAELRILTRSRWRKTYIAKRIKTSIHEYVDKLWPGLCNRVDSSQGLVRNLWESTLAWAILQLCPDPKVVSQMTPLELQSLIKGNGFKGICGPKHSVRVIEHAKKAAGMAIHHPHLVSCLQQDLQELNHLNEDMQKLELQIVEYQSVFPELLHLLSLGSISPVLGLTFIAEAGDIRRFSSAKQLVHYAGLSVSYQQSGQYVSQQNHMIKEGNKYLRHTTMMIARNLARCNPEFRERHQELVAKKKRYYTAIGAIANKFIHVAYHLMTNKENYDVKY

SEQ ID NO: 224033 - protein, 342 aa, unidentified
MQVTTIGLDIAKNVFQVHGIDAAEKVVVRRQLRRNQVLEFFKALPPCLIGMEACATAHYWTRELTKLGHQVRLMPAKDVKAYVKRNKNDAADAEAICEAVRRPTMRFVQIKSAEQQSQLMLHRTRDLLMRQRTQVINALRAHLGELGITAAQGKAGLTELLAIIAGSANERLPAEAHASLIVLAAELQAMRTLIASIEKRIIAHHRLDEASKRLRSIPGIGLVGATAIAATITDPKAFRSGRDLAAWIGLVPRQDSTGGKQKLGPISKQGDRYLRRILVVGAHAVLKLARQKPEKYPWLTQLLARKPFKVVAVALANKMARIAWALLVKGGPYRARALVAAA

SEQ ID NO: 224034 - protein, 429 aa, unidentified
MSNTEAVTRTEEYAALIGMDWATEKHDIWVWDAATGEGRHRVVAHTPEALSEWLGDLQTQYPGRRVAVCLEQSRGALIYALMSHAFLALYPINPVTLSRYREAFAPSRAKDDPGDARLLAEILRLHRDKLAVWKPDDEQTRTLTFLNEERRKAVDLRTKLMLRLQAALKLYFPQAVGWVGVHLYTPLACDWLLKWPTLEALQKTKPQTIRAFYYAHNCRRPDQVEGYLQAIVSAKPLTQDAAIITVNRLTVQMLAKQLRILHGSIAEFDRQIAQVFAKHPDAFLFNSLPGAGAALAPRLLSAFGTDRRRHPTAQDVQTYAGIAPVIERSGKQCWTHWRWNCPKFLRQTFHEFAKNSIPYCPWAKAYYELQKKRGKRHHAAIRALAFKWIRVIHRCWTDRKPYDESLYLQTLKQRGSELPRLIAQQPQEA

SEQ ID NO: 224035 - protein, 430 aa, unidentified
MGLIVSAPLPPKQDEQVMSYEWFVGIDWGSQQHQVCVIDLNRRVVGERVVDHDGSSLAQLATWLLALSQGQPHRVSVAIEVPRGAIVEGLIERGFHVFAIHPKQLDRFRDRHSVAGAKDDRRDAFVLADSLRTDQPSFRRLRLDEPRLLMLRELSRAEEMLLEEFRRTANRLREQLHRFYPQMLHLSSAADEAWLWDLIELAPTPSHAALVTDEQVRHVLTSHRIRRVTAQEVMVCLQAPALPAAPGVLEAAQAHCAFLLPCLRVLAEQLRSCAQQVEAILTAWAEEPDEAGGPSDMAMVPSLPGVGRKITAWLFAEAAQALGERNYQVLRTQGGVAPVTKQSGKRRQVVMRRGCNPRLRHALYHMARVAAQRDGHFGGVYEALRAKGQRHGQALRNIGDRLLRLLIAMLRDRTCYDATRNRREPVALMG

SEQ ID NO: 224036 - protein, 345 aa, unidentified
MEPMYYIGLDVHKRKISYCVKDSSGQVCAEGSLPATRFDLDRWMKALPQPWSAAMEATMFTGWIYDHLKPHAASLKVAHPLMLRAIAAAKRKNDRIDANKICDCLRCDFLPECYMAPTAIRERRRTLRYRNLLVRQMVQMKIKISSLLMEAGVSYNKQRLHRAGYFRELLATNPDIDEGLRSLLRQCRETVVRLSKTESALIRSLEDDRLLAERVERLMSIPAIGPITALTWALEVGEVQRFSSIKKAISYCGLCGAEKSSGNTVQRTPLSKQRNKHLQTTLIEAAKMAPRYSPTLALLYDREKQKGNANRATLAVARKLVAYLMSVDRGRCHFLVLDQETSTAA

SEQ ID NO: 224037 - protein, 400 aa, unidentified
MLSIGIDVSKGKSTVCGMKPGGEIVYIPFEVQYTREGMLELVSLLRSSGEEVRAVLESTGSYHCPVVAALLENGIFVSVVNSLRMKRFCSQSIRKVKTDRIDAMQIALYGLAYWQKLQPTRLPEDTYRELQLLARQYYQMTSLLIKAKVDFNAICDQVLPGMQELMNDHAGRHKLSDFVLCYHHTTHILEMGETRFRKDYCKWAEKKGYRNCERMAAHIFATAQNGIPVLPNAPSTQIVITEAIRVLHTVEASRDAILTQMQALAKTLPEYSLVREMPCIGDTLAPRLIAEIGDVRRFTSKRALIAYAGIDAPLYQSGKFSANNRHISKRGNRYLRKTGYEVMQSYVMHKPANDPIFTFVEKKRGEGKSGKLAMVAGLNKFLRVYYGKVTELYRSLPTIE

SEQ ID NO: 224038 - protein, 454 aa, unidentified
MAKRKQRKKRLVVTRLPEQLQHVNLNAAGIDVGSDRHLVAVPGGRDEVSVREFGAFTSDLHSLADWLLKCGITSVVMESTGVYWIPLFELLEARGFEVKLVDARKVKNVSGRKSDVLDCQWLQQLHTYGLLAGAFRPPEQVCVLRGYMRQREMLVQAAAMHIQHMQKALQQMNLLLHNVVSDITGVTGMKIIKAIVSGIRDPQVLARHRDQRCHNSAEVIAKSLQGNYREEHLFALTQAVSLYETYQTKIGECETAIAGYLLQQPNQTEDEPPPGDKSVRNRDRLRGGVDVRSQLYKMTGVDLFSVPGLAADTLLTLAGEVGFNMTPWRSEKHFTSWLALCPGTKKSNGKVLSRKTKRSANRAAAAFRIAAASLARSQTALGAFYRRIRIRVGPAEAVTATARKLAVLYYSLLKYGSAYIEIGQAAYEQKYQQRRLNSIQKQALAMGYQLIPAA

SEQ ID NO: 224039 - protein, 428 aa, unidentified
MRVLHERVAGIDVHKDMIKVAIRSPGEKPWTRTTEILEFRTFYGVLQEVGRLLRRRGVTHVVMEASGIYTEPVYHALCEQDFTEVAVVNPAHVKALKGHKTDAGDCARLAELHECGLLHGSFMPSAEQKEVRDLTRYRMKTVQARTSEIQRLAKALESAGIKLGSVASDITGDSATAMIKALTGGERRGGVLADLAIGRMRTAGKLADLSMALAGRFTEHHALLCRLHQDRIALFDEAVAGLDEQIGTLAARWQREAGLLASIPGFGDVVTQAWLAEIGPAPHRWFPSHQKLACWVTLCPGNNISARKRKHGRTGDAGAYIKPMLIQAAWSAIRTKGRLRSRYNRLVRRFGGEKNPAAKKKAITAIAHTLLKIAYQVLQSGQPYTDLGADFYTRRESPAQRQARLERQLQKLHPGSVITITISPPEAA

SEQ ID NO: 224040 - protein, 372 aa, unidentified
MTIAAGGSSSPVEVVLGVDTHLDFHVAVALDQLGRKLGVITVPTTKHGYESLIRWAQQLGYVQRAGLEGTGSYGAGLARHLRAQGVEVLEVEPPKRRSRRKGKSDPIDAEAAARAVLAGETASVAKSGDGRVEMIRLLKAARRSAVKAKTQAANQLRAFRLTATEELGCRLSGLSTRALAAAALRFRPGDHPENAEEATRFAMRSVARRYRSLSEEIADLDAQLGRLVAEVAPGLTALCGVGTDNAATLLAMAGDNPERLGSEASFANLCGVAPIPASSGKVLRHRLSRGGNRDANRALHLICVVRMRTDARTREYVARRTAEGKNRREIMRCLKRYIAREIYGVLIPSVARSSPEARGVSEARVAAMADTT

SEQ ID NO: 224041 - protein, 343 aa, unidentified
MQIRSVGIDLGKTTFHLVALGDNGKVLLKKKFTQKQLIAFTANMQTCLIGMEACSGSHFLGRALRAQGHDVKLIPAQFVKPFVKSNKNDFIDAEAIAEAVERENMRFVAIKTDDQLDLQALHRVRDRLMARRTSLINQIRAFLLERGIVFAKSPIRLREALPEVLENVNENLTPRMRNLVAMLWSEWKDLELQIVEMNDEVERIASSDAACRRLRQIPGIGPLVATAIVASIGNGAAFRKGREFAAWLGLLPNQHSTGGKVRLYGISKRGNSYLRKILIHGARAVVLRSKRDRIAMGAWMTSLETRAPRNVLIVATAHKLARIAWAVLSTGQDYRAVPEALTV

SEQ ID NO: 224042 - protein, 416 aa, unidentified
MFKIFRFNCCGLDVHKTWIFACIGITDANFRTEYFEARFSSFPKDLRRLAAWLQEYKCEEVCMESAGKYWIPVFNALEATCKVTLAHPKYTKPQKGNKTDRKDAKWICDLFMCNMIKPSFIPPPDIRHLRDLIRYRTKLTNMLTSEKNRAQNCLTVSNLKLDDVFTDVFGKSARSITEYILAHPGEKFDVAPFVNKRCKTPIDQIQDAVDGSICPEQAVKLRECLNHIDELNAHQDHIEQKILTLVEPYSAHLDLIRTVPGMSKDPMTAILILSEIGSDMSVFPTAKNLVSWAGCCPRNDKSAKHVKSTRISQAGSCLKPRLVQVANALLNSKDHPEIHERYRRIKSHRGHKKAIIAVCKMLLTAIWNILSTGEAYNASGYLIQTPRPTDETKVLTQKQALELLRLRGYVIKEESA

SEQ ID NO: 224043 - protein, 410 aa, unidentified
MECLVERCAGLDIGKADLKACVRVPGPRGGRRAQTKTFATTTGALLELRGWLAEQRVTVVAMEATGDYWKPVYYLLEDEFEVQLLNAAHMRNVPGRKTDVSDAAWIAQLVEHGLVRPSFVPPPRIRRLRDLTRYRSALIGERTREKQRLEKVLEDAGIKLSVFISDVFGVSGRAMLAALIAGQRDPRVLAEYARARMRRKIPALVEALTGRFDQHHGFLCRTMLAHIDSLTAAVAELTGQIETEIKPFQAVADRLDTIPGVNQRVAQTIIAEIGVEMDRFPTAAHLASWAGVCPGNNESAGKHHSGRCRKGDSWLRAALGEAAAAGIGTRNSYLQAQYRRLAGRRGKKRALLAVGHTILVAAWHMISNEVDYQDLGPAHFVTRIDPVRQTRRLVQQLNQLGFQVQLNPAG

SEQ ID NO: 224044 - protein, 370 aa, unidentified
MDNITYVGLDVHKATVCVALAESGRGGEVRQIGVFENRPELLIKLAARLSKAGRRLSFCYEAGPCGYGLHRLLTGCGHDCVVVAPSLIPIKAGDRVKTDRRDAVMLAKLHRAGELTPIWIPDAAHEAMRDLVRARATAGRVLSKARQHLQSFLLRHDQIYHGVRAWTLAYRRWLTTIGFAHPAQQIVLQDYIDAVQDAEARHERLTRQIEELLPNWSMAPVVTALQAMRGVALVVAVTVVAEVGDFRRFANARQLMAYLGLVPSERSSGATVRRGGITKAGNVLARRVLIEGAWTYRMPARISRKLHDRNEGLSPAVRDIAWKGQIRLCSRYRRLAAAGKPKVVVTTAIAREMVGFIWAIARLAQPAAQR

SEQ ID NO: 224045 - protein, 352 aa, unidentified
MDEKYVAMDVHKASVVIGVRDGTGKMIARAMVETKAQTLKDYVRGLSGTIHLTFEEGTQSAWLYDLLRPLVAECIVCDPRRNKLLEDGNKSDEIDVTKLSELLYLGGLRPVYHGAQGTRALKELAHNYEALVKDQTRVKNRLKAIFRGRGISYEGDEIYDCQEAEQWLAKLSERGVRERARQLYQQLAQLAEWVGGARRQMLAESRHQKAKKILQLIPTLGEISVAQLIATVDTPFRFRSKRQFWTYCGLAVVRHTSADYHFEQGELRRRLKPGPTRGLNRNYNRRLKRIFKTAAQTGSTKGPFKSYYQGLLGRGLRPELAQVTLARKIAAITLTLWKKGERFDPEKLVKSD

SEQ ID NO: 224046 - protein, 373 aa, unidentified
MPGWLVLGNSSEKGKVMDKITRIGVDLAKNVIQLHGVDSMGRVVIRKAISRQKFLEWFANLAPCLVAMEACSAAHYWARKLSALGHEVRLIAPQFAAPYRKGGKHVKNDKLDAEAICEAAGRPHMRFVPVKTADQQNVLVVHRMRSGFVEERTALINRLRGELVEFGVFLPQGIDAFRAHFVTALENGSNELNGVARTALLQGWNHIQALDRQITWCDAQIAAQVKHDNNAQRAMAVIGIGPLTASAAVATVGDARLFKNGRQFAAWLGTVPKQASSGGKTRLGRITKQGNTYLRTLLFQGARSAVASAHRRNDRLSRWIVQLQARVGWYRTLVAVANKHARILWAILARGERFNPSYAPTRPGAAGPRTATA

SEQ ID NO: 224047 - protein, 340 aa, unidentified
MGSQITGGVDTHLDVHVAAVLDDRGGLLATASFDATAAGYACLVAWLESFGEVVLVGVEGTGSYGTGLTRHLQALGIRVDRPNRQRRRRAGKSDTHDAVSAARAAFAGDALGAPKVRDGNVEAIRVLRVARIGASRDRTRALNQMRALVTTAPEPLRQQLRGLTIPRLLRVTAAFRPNGRTDVTSATRLAFKSLARRVVALDEELAALDAVLAPLVAATAPRMLERLGVGTDTAGALLVAAGENSDRIRNERSFARLCGAAPLDASSGKQQRHRLSRAGDRQANSALWRIVITRLSHDPAARRYLQRRCAEGKTKAEAIRCLKRYVARELYTCLPKNQLA

SEQ ID NO: 224048 - protein, 357 aa, unidentified
MIVIGVDPHKETHTATAVDEVTNTNLGSIRIRSTLEDYARLLVWAQQWPKRRWAVENARGLGHHLALWLVAQREHVVDVPSTSTARVRQLSRGNRRKNDRIDAAAAACVAALQGDGYPVVVEDHTDVLRILDERRRSLVSQSIRVRNQLHALLRELVPGGAKTDLDSEKAAVLLRFIAPNTPSDAMRKAIALEMVGDLRRLHVQVLEITERTQAVLADCETSLLAIHGVGPVMAGRILAHTGNPFRFPSEAAFANFTGTAPIEVSSADNTRHRLSRGGDRTLNAAVHIVAVCQARTPGSEGHTYYHRKISEGKTPRAAQRCLKRQVVKRLWAVMRVDEVRRASASRSHLPPTRLARA

SEQ ID NO: 224049 - protein, 351 aa, unidentified
MIIIGCDYHPGFQQIAFVDTDTGELQERRLEHREEAERFYRDLGAQGAATVRVGMEASGHARWFERMLSALQFELWIGDAAEIRAKRVRKQKTDRQDAQLILRLMLEARFPRVWVPSGENRDLRQLLWHRHRMVQARTRIMNQLQAVALNEGLRCKKRLWRDAGREQLESFALAPWASRRRRDLLELLDRLTPTIAELTQAIEQEMEKCPEAQRLQTHPGVGALTALAFVLIIGQADRFQCGKQIASYLGLVPLEDSSGQRRRLGHITKQGNSLLRFLLVEAAQVTVRSDQEWRSKYFHLALRRGRKIAKVAMARRLAVRLYWMWRKGWDYEQLKKFGSHAGQPGNRDGVK

SEQ ID NO: 224050 - protein, 368 aa, unidentified
MEKSITYVGLDVHKNSIAVAFADEYGAEIRSYGTIGPDPESLDKVARRLVSQGKEPRFVYEAGPCGYKIYRHLRQQKFECMVAAPSLIPKKSGDRIKNDRRDAMMLARLYRSGELTPVRVPSAEDEAMRDLSRARGDAKKAERKARQQLGAFLLRHGFRYSGLSHWSLAHWRWISDIKMDHEAQQFTLQEYVDTVRSCTERVDRITEQIRLLVGKWRLGPVVEAFQALRGVSLVVASTVVAELGDLTRFDTPRQVMAYLGLIPSQHSSGDKIKLGPITKTGNGHARQMLTEAAWSYRMPARVSRRLRDRQQNLPEKVWQIAWKAQVRLCARYSRLLARGKPSQLVITAIARELAAFMWAIARTVEISA

SEQ ID NO: 224051 - protein, 394 aa, unidentified
MKLVGIDVGKNSHHFCVMDKETGEFNVTPSSFPNNKEGFDFLINSLKPYSKKSILIGMEDTGHYHVALLKFLLSNGYPVALINPKTTDLTRKMEGGITKNDKLDTITICDVLDTPERKKQYRITKVDRFDLYEQRQLTRHHHNLKEELNVYCNRLQKSIDLVFPEFNTLFSSKYSIVYMNLLKTFGSAEAIASTDIRTIRKCFEIKGRGNRISLTPEKLKECAKNSIGISSEVETIQIKHLVSQITLIKEQIAEIDKKIEEFSITNNSPILSIPGISHFSGTSILAELGDIGNYSKPSQIIKFAGVAPYHYESSQYNAQHTGITKKGSKYLRKTLYQIILTVINNNPVFKKYYLLKISQGKGHRCAQGHCIRKLLRIIYHLLETGQSFDPALLR

SEQ ID NO: 224052 - protein, 344 aa, unidentified
MEYYVGLDVSLRSCAMCIVDNKGKVYLERELPCEVKDIADCLTAFEHRIERVGFEAGAMSQHLFFGLQSKGFDVVCMEARQVSAALSAMRNKTDKTDAKGIAQILRTGWFSPVHMKSREAHGLRALLSTRKALLKKTMDLANEVRGLLKIFGVRLPRTVKHGSFDGLVRPMIEMDDILAHAIIPLLDARAVLFQHYLELDRRVKRAASQDEVCMRMMTVPGVGPIAALTFKAAVDDPNRFKRSRTVAAHFGLTPRRFQSGEHDNPGRISKAGDRDVRATLYAAANALLMRTMAGSQIKSWGMRLMRTKGRRRAVIAVARKLAVLLHRMWIDGSEFRQEQVGGTA

SEQ ID NO: 224053 - protein, 394 aa, unidentified
MNFFVGVDVSKEKFDACCIGDKGEKVFTLTCSMDREGFEKFIGRLPKDKSSFLVGMESTASYHIPLFTYLAAQDYRVVVINPLLINGFSKRSLRKTKTDKKDAITIAQFLMQEKETLSVKAPDDLMGELKDLARRREKLADHLTSLKGDMKRILSVTFPELEYITGIFTKATLRLLMEYPSAYTIRKADSSAIADVFKCKGRGNKPRVTIKALIDAATSSVGVASPAKELALRQEASLLMHVEAQMKETTKVLMNTLNERMKQDTDLLCSMKGIGENTAMNFLIEMGGAVEIYENDKKLIAASGLDPSTYESGKYAGKSGISKRGNRHLRRVIWLMATRVIINNDLFKAYFKKRKQDGLPYKKAVLATAHKLIRIIFVMLSRKTYFVEGGIKYS

SEQ ID NO: 224054 - protein, 347 aa, unidentified
MQVTTVGIDLAKNVFQLHGCDAAGKAVLRKQLARRRLLGFVANLPRCLVAMEACAGAHYWAREIEKLGHEVRLIGPQFVRPYVKANKNDASDAEAICEAASRPSMRFVAVKSAAQQDVQAVHRVRQQLVKTRTALVNQVRGLLAEYGIVIVQGVAHLRRALPLILEDCDNGLSGVMRELLGEIGERLKFIEERLRQYDLRIQRLFRQDERCRRLAEVEGVGPLIATALVAAVGNASEFKSGRELAAYLGLVPRHRASGGRTVLLGISKRGDRYLRTLLVHGARSAMRTIERRRTARGVWAGRLKLRRGSNVAAVALANKNARVLWALLTRGESYRPTPFSARVPLAG

SEQ ID NO: 224055 - protein, 403 aa, unidentified
MNNVAGIDVSKGKSMVSVLRPFGEVVAKPFSVGHTGSELKELADYLKSLDGETRVVMEHTGRYYEPVARFLHDEGVFVSAVNPKLIKDYGNNTLRKVKTDKADSRKIARYGIDNWAELRQHTPMDTIRMQLKTLNRQQSLYTKTKTMMKNNLIALLDQTYPGVNALFDSPVREDGSQKWVDFATAFWHVDCVRNMSLTAFAERYRKWCKRHGYNFSQSKAVEVHAGAQDLIAMLPRDALTKTMVRQAIDALNAISASMERLKAEMQALAAQLPEYPVVMAMHGVGDSLGPQLMAELGDVTRFTHRNAITAFAGVDPGADQSGTHEAKSTRVSKSGAPELRRALFLVMDCLLKTQPQDDPVYRFMDKKRAEGKPYLVYMTAGANKFLRIYYGRVKEYLASLEGN

SEQ ID NO: 224056 - protein, 335 aa, unidentified
MEFVFFIGIDISKDKLDFAVRQGKQLLFHCEIANTPEAIKAFLKELNQVEGFNLNKAIFCMEHTGIYNNHILVCLHKKKANICLEAASHIKKCLGNIRGKNDKVDAIRIAEYAYTQRENLRMWTPKREIVQQLSHLAAARSRLLKAKKMLSTPLNEAEAFVSKAIAKQTVKACSSTLNAIGADLKRIEKEINKIISSDENLHRIFVLATSVCSIGSVIATQVIISTNEFIDIDNAKQFACMGGMAPFVEESGKFKGKGRISHMANKKIKTLFHMAALVAIQYDPELKSFYERKVNQEKKNKMSVLNAVRNKLILRVFACVNQNREYEKNYARLVA

SEQ ID NO: 224057 - protein, 318 aa, unidentified
MEALFVGTDVSKTQLDVHLRPLGEMFTVSRDAAGVEALIARLAPLGVTLIGVEATGGFETIVVAGLAAAGMPVVVVNPAQVRSFADALGKRAKTDPIDAAVIAHFVDATRPDIRPLPDEDTRLLSDLIARRKQIVEMIGAERQRERRATNTLMKKSIARLLKALDKELASLDRSLDDSVRGSPAWRAKEDLLVTVPGIGKTIARTLIADMPELGTLDRRQIAALAGLAPYTRQSGQWRGKSFIGGGRCAVRAALFVGALVASKHNPVLREFRDRLVAAGKSKIVAIVAVARKLFTIINAMVRDGRAWTAEQAHAKASI

SEQ ID NO: 224058 - protein, 362 aa, unidentified
MGEDIRYWVGIDAHSGSHVAAVAAAGSSEVVELGRFAGDGDGLLRRLRRYPAGSVSACYEAGPLGYWLQRRLTAAGIACAVIAPSLIPRSAGERARKTDRRDAVKLARLWRSGDLTAVVSPDPAHEAVRELSRGRGAAVSDVVRARQRLAAFVLRHDKRYAGKAWTGKHRQWLAGLSFEHDASRRWLELSLTTLDEACGRRDAMTAALEEAIAGWSLGWQVEALRALRGIGPVVAATLSAELGDLRRFSRPGELMSYVGLISGERSSDQRRITLGITRTGNRRARTALVEAAWSYTRPAKAIPPRPEVPAALALIAAKAQARLSRRYRHLTRHGKRSTVAVTAIARELAGFAWHIAHSARPT

SEQ ID NO: 224059 - protein, 342 aa, unidentified
MYYIGLDVHKKSISYCMKDASGQIHQQGKAGATRWELDIWMKTLPQPWTAAMEATIFTGWIYDYLKPHAAGVKVAHPLMLRAIAASKKKNDRIDASKIADCLRCDFLPECYMDSTEIRERRRTLRYRSLLVRQVVQLKTRAASLLMETGVSYDRQHLHRLGFIPELLARKDAIDQSIRPLLRVSHDSILRLRHIETALIRSLQRDPLLAERVRRLQTIPAVGKITALTWALEMGDIARFPSIRQAISYCGLCGDEQKSADKTVRTPLSKKRNKHIQHVLVEAAKLAPRYDPDLALLYAREKQKGNANRATLAVARKLLAYLLAVDREKRDFVPIREFSSTAA

SEQ ID NO: 224060 - protein, 368 aa, unidentified
MENDITVFVGLDVHKDSIAIAVARAGRDAPRFVGTVGPGLAELLKALRKLGEPERMLLAYETGPSGFALARKLIAAGWRCQVVAVSKIPVRPGQRIKTDRRDALALAGYLRAGELTPVIVPDAGDEAIRDLSRAREDAVRARLKARQQIKAMLLRHGMHYPGKTSWGPAHERYLAEIAFDHPAQQIAWAEYRHAIVDAHERVLRITAALREQIEHWRFGPAVRALMCFKGIDLVVAVTLVAEIGDLHRFEHPKQLMAYLGLVPSEHSTGETRSRGSITKTGNSHARRVLVEAAWCYRHSARMSRPVTDRNKGQPKPVRDIAWRAQLRLCERYRRLAARGMHSNKICVAVARELAGFVWEAARHTQPAD

SEQ ID NO: 224061 - protein, 369 aa, unidentified
MGEYSEAFVAFDTSKVKHAVAIADSGRAGEVRFLGDVASSPATVTRLIRKLASRYAKLHFCYEAGPTGYGLCRQIHELGHDCIVVAPSLIPKKPGERVKTNRRDAVTLARLLRAGELTAVWVPDATHEAVRDLVRAREAAAQDLRRKRQQLLSFLLRHGRIFDGRKHWTMAHRRWLAGQKFDHPAQQIVFQDGIDAIEDAIVRLRRLEEQLVAIVPSWSMAPVVEAYQAMRGASFLVAVTFAAEIGDVRRFDNPRQLMGFLGLVPRERSTGETVRRTGLTLAGNRRARRVLVEAAWSYRHPARVSQTLQDRLDGLPKAVREIAWKAQIRLCGRYRRLSAAGKKLPVVIAAVAREMAAFLWAIGRQVAPA

SEQ ID NO: 224062 - protein, 362 aa, unidentified
MRIIGCDLHARQQVLAMLDTVTGEVVHMTLKHEGDNVREFYSKLPRPVLVGIEATGSMQWFLNLMEELGIECRVGHPAQIRACEPRKQKHDRRDAELILKLLAEDRFPAIWLPSKELQDLRALLRHRHQWVRMRTRVQNALQSIALANGLRRGTALWSHDGQSRIAALPLAPHTAYRRSELQAMYEKFEAEIEKLNQRVEEQACGRAGARLLMTHPGVGPITALATEVFLGDPARFADSKALASYVGMIPREYSSGPRQRLGGLSKQGNPLLRFLWGEAGAHAARKDPELQRFYRRKLVQKGLGKASVAVARKLGIRLWIMLRDQIEYHEFCRRGQKQQKSSDACAGMPETPNGAKSHRPVD

SEQ ID NO: 224063 - protein, 368 aa, unidentified
MLKQSHYKVGCDAHKHYSLFAVFDRQGKPVKRTRVNHEPGAIRAFLSRFPEGTPVALESVGNWYWIVDEIEAAGCLPQMAHAAKAKMMMGNVHKTDKLDADGLATLLHNGTLPSVWIAPGSLRDERELPRTRMAFSKMRTALKNRMHSTLAKYALSLDTQSDIYAPKWRPQLMRLIRSLPDETRRCMEQELELLGLVQDQIDQLEARILERVQMTPTIQLIQSIPGPAKILAIVIDREVGSIDRFPSPACFASYTGLVPKVKASGGKVHYGRMIKQANNYLKWAFIEAANVIVRQRHHPAWQSKHVVQIYERTRQRKGHSVAVGAVARYLAEATYWVLKKDEPYREPIPGQPAGSKSAASSKQGQAPA

SEQ ID NO: 224064 - protein, 343 aa, unidentified
MQAITTIGLDIAKSVFQVHGVDGAGQVVIRRQLKRRHVLAFFQKLRPCLVGIEACASSHHWSRELSALGHTVRLMPPGYVKPYVKRQKNDPTDAEAICEAVGRANMRFVPTKTPEQQSGLVLHRTRHLFIRQQTSVINAIRAHLAEFGIVAPVGRQGVEQLLEAVANPNDQLIPEIARGCLLALGAQLRRIKQQVLEFDRMIRAWHQSNQTCRRLDDCPGVGPALATAIVASVADPKVFRSGRDFSAWIGLVPRQHSSGGKERLGGISKQGDRYLRGLFVVGALAVIRYAKIHGTKHRPWLTALLARRPTKVAAIALANKIARMVWAMMAKGERYKEPVALAA

SEQ ID NO: 224065 - protein, 346 aa, unidentified
MDKVLYAGVDAHRTATHITIVDDAGKVLTRKRVSSSSDGLRSIFGNYNEPIKAVVEATYNWGPVYDWLDEIADEVILAHPTKVRAIAEARVKNDKIDSETLAHLLRADLIPVAYAPSKETRAVKRVLRQRTFFVRVQTMVKNRVHALLTQHAITRPDVADLYGKAGLAWLQQIPLPEPDSQLWRDDLSLLATLRERIIATDRLIAQLAQGDEIVTWLASLPGIGPFLAVLVRYEVDDMTRFRSAKKFTCYTGLIPSTYASNTRVYHGSLTKLGNRWLRWAFIEAVGPALRASSALRRYYDQIKARRGAHDARVCTARKLAELAWIVWTERRCYEERPVQATEKAAS

SEQ ID NO: 224066 - protein, 410 aa, unidentified
MIRKEQFIYVGIDLHKESHTAVILNCWNEKLGEITIANKPSEFHKLVTKVDKYCKEEKTPVYGLENAYGYGRGLAVWLIEKGYIVKDVNTALSFAQRKSVPMYQKSDSYDAEAVALVVINNIDTLPDAIPNDAYWTISQLVRRRDNIKVQHIRIKNQLHEQICVTYPSYKTCFKDISTKTALYFWDNYPSQEYLTGKDQEELAEELRAVSHNRCSINTANVILDMVKNDGNTNHEYQSSRDAITRSLVRDLQHYNTQLKEVEKSIEELYPVFECTLMTMPGVDIATATNMLAEIGDIKRFPSADKLAKFAGVAPVRFSSAGKGNDLPSKQGNRRLQAIFYFLAIQMIQVSPKGVPRNEVFREYYIRRTSEGKNKKQVLICISRRLVNIIYGMLKNKTEYRDQSKAKINRE

SEQ ID NO: 224067 - protein, 298 aa, unidentified
MQIKSIGIDLGKTTFHLIALGTRAQVVIRKKFSRSQLLEYTANLPSSLIGMEAGVGSHFLGRALREQGHQVRLIPAQFVRPFVKSNKNDYRDAEAIAEVVERENMRFVPIKTEDQLDLQALHRVRDRLVARRTSVINQIRAFLLERGISFRKGPASLRRQMPEILENADAKLSTAMRRLLDFLWQEWKGLQLQIESLNVELEQVASSNPSCVRLRQIPGVGPLISTAVVSAIGNGAAFKRGREFAAWLGLVPRQWSTGGKAKLLGISKRGNPYLRTLFIHGARAAVLRVKREGSSLGK

SEQ ID NO: 224068 - protein, 320 aa, unidentified
MTISSAAGVDVGRDWLDVAIARSSEAGVAGRHFRLPNTPAAIAGIPARLRRAGVTRVVIEATGAPAARLVRTLAEAAMPLGVVDPRRIKALRLAEGRKAKTDKLDAGLIARFALLMTDAVRPAPSPAALELRALSTRRRQLVEMIAAEKTRLKQAFEPVLMASFRLTIELLGEERARIEAMIEARTSATPEDRRKGELLRSIPGFGPVISATLMADLPELGALDNKAIASLAGVAPHIQQSGAQAGRAHIQGGRPCVRAALYMAALSAVRHDAGFKADYKAMRAAGKPAKVALIAIARKLIVAANAILKHGEPWKPAQRS

SEQ ID NO: 224069 - protein, 412 aa, unidentified
MGAVVIGMDPHKRSATIEVMDGEETILGGGRYATDVAGYQAMVKFGKQFGERTWAIEGCNGIGKHIATRLLADGELVVDVPPKLSARVRVFATGQGRKTDATDAHSVALVGTRMSGLRPVVDDEQLAVLRILVDRRRSLGDDHTRMVSQLHRLLLELIPGGAKTSLSAAQAKVLLGKVRPRDAAGKTRRRVAAELIADLQQVYDRTKAADKELNVLLALTGTTLTQLHGIGPSGAARLLVEVGDITRFPNRAHFASWTGTAPIDASSGEHVRHRLSRGGNRQINRVLHIMAIVQLRSPTEGRAYYDRKKAAGKTSMEAMRCLKRRLSDVVYRQLLADAIRPSGTGPGGHVGATTNSSAVDSNPDVDASEKSCPGPVNTDATLTNPGRLDRSSTRSRRPATAPARSRRQAQSA

SEQ ID NO: 224070 - protein, 402 aa, unidentified
MFFVGIDIGKRNHEAAIIDEQGKPIGKPIRFSNTKAGSEKLLQFINDHDLLPDNSMIGLEATGHYWLSVFSFLTALEFNVVPFNPIQSDTLRNFYIRKTKTDTIDAVLIAQVVRMDLPDQTYLPSEDIVRLKQLSRFRYSIVDQTSDLKRKVIASLDQVFPEYETLFSDMFGKSSTQLLLQSPLPEDLLEIDAQKLIDLLNEASNGRLTIEKSTQKVHQLRDLAQDSFGIRVATDVYKLQIQLLLQQILLLEEQLKTVEDEMAELVAAQDQYLTTITGIGPVTAAVILSEVGDIHRFERPNQLLAFAGLDASVHQSGDFTGTRNKLSKRGSPYLRRAIWQAAFIASNRDPALSLYYQNLRKRGKHHGTAVGAVCRKLVNIIFAVWTKGKPYEVHINPDLKTD

SEQ ID NO: 224071 - protein, 343 aa, unidentified
MQIRSVGIDLGKTTFHLVALGDNGKVLLKKKFTQRQLITFTANLQTTLIGLEACAGAHFLGRALREQGHDVKLIPAQFVRPFVKSNKNDFLDAEAIAEAVDRQNMRFVPIKTDDQLDLQALHRVRDRLITRRTSVINQLRAFLLERGLVFAKSPAKLRERMPEILENAEEDLTPRMRNLLALLWNEWKDLEQQLVDLNQEVELIASRDAACTRLRQIPGIGPLVATAIVASIGNGAAFHKGREFAAWMGLVPKQYSTGGKAKLSGISKRGNRYLRKILIHGARAMVLRCKRERIPMGAWMTALETRAPRNVLIVAAANKLARIAWAVLSSGQDYRAVQEPVAA

SEQ ID NO: 224072 - protein, 370 aa, unidentified
MAKVRSWAGLDVHAAKVSACVVDAESGEMTVHRLPGETAAVLAFCAGLPGPTRVAYEAGPTGYGLARALAAAGVECVVAAPGKIERPSQDRVKTDQRDAERLVRLLMIGGLHPVRVPTPGEESLRDLVRAREDLRGDLMRARHRLSKLLLRHDVRYDDTRSRWGERHRAWLAKVDLGECGAQLTMSEYVGAIDALELRRHTLEAAIGELIGVSPWAQDVARLRCLRGIDTLSAVGLAVEVGDFHRFEHPKLLMSYLGLVPSEHTSGESRRQGHITKSGSRHARRLLVEAAWHYRRAPRLGTTLERRQDGQEQAVIAIAWKAQQRLHHIWRRLDDQRGKRRTVVAVAVARHLAGFCWAIVCRDQPPAGRER

SEQ ID NO: 224073 - protein, 429 aa, unidentified
MNEVMAGMDLHRNNVVCGLVDREGRRLVEQRLPCELETIVRWLEPYRERLRTIAVESTYNWYWLVDGLQERDFDVVLANPARIVQYSGLKHADDTSDAFFLAELLRLNILPTGHIYDRKLRPVRDLLRRRLLLVRQATAHKLSFKSLYARTTGQTLGLSQLERLTPEEGAKLFGSAAEQLIAREQLRLLGELKQSILTIEKSVVGVVKDWPNYRWLQSVPGVGKILGLTIALETGPIERFAGAGDYASYCRCVQSRRISNGKVKGANNGKNGNRYLAWAWVEAAQYARRYHGPCRRFFDRKAAQVNGALACKALACKLAKAAWHVMREGVAFDWARAFPGGVPGGEPERQVRAAGSAPTPIPPHRPAREKDPTSLTPLGDVSSRVSPGRGGHRTPPPPAQTQSKKKAKRLNPPTPIRTRSRTQRLMKRT

SEQ ID NO: 224074 - protein, 391 aa, unidentified
MFYIGIDIAKHNHEVSIIDDNGKALGKSFSISNSQKGVDKFNTYLDSFNITSENCVIGMESTGHYWINLFSFLVNLKFNVFVINPIQSDAFRKMYIRKTKNDSKDSYIIAQIMRFGEYSSSNISDENIFALRQLSRYRTSLVDECSSWKRKIISILDQVFPEYSNLFSDTFGVTSKELLSKYPLPENMLELSTEELTNLLTKASKGRFGNEKAQEIKESAKNSFGVSFAKQTFSFQIKQIINQISFIESQLKELDNEISNMLEELNSEITTITGIGDVLGACILSEIGDISRFEKASQLVAFAGLDVAVKQSGEFTGTEMKITKRGSPYLRRAIWLAATVASFKDPALSIYYKSLIARGKKHLTAIGAVSRKMCNIIFSVLKNKKAYTPNI

SEQ ID NO: 224075 - protein, 398 aa, unidentified
MVVTPTLIIGGVDTHADTHTVAALNSLGQVLGHATFPATKAGYRALLGWLSEHGQLEQVGVEGTGSYGAGLARYLSSQGITVLEVDRPNRQQRRRNGKSDPVDAVAAARAVQAGTATATAKSRTGVAESLRVLRATRRSAEKARTAALNSLLHMVIAAPEDLREQFDGLTGKALISACAALRPDPDQLHDTRQATKLSLRRLARRAAALSAELAEVKADINTLVTQAAPELLAHAGVGPDTASQLLVTAGDNPDRLHNDASFAALCGASPVSASSGRTDRHRVNRGGDPAGQLRLVADRPRPNGPPPTHPRIRCPSHCSRPEQTRDHALLETLRRPRTTPRHPTRTHTHRNRPRPPAQPRLCRLTFNRSIREPCTQLAPPITRDRRDGHRRSSEDVDG

SEQ ID NO: 224076 - protein, 349 aa, unidentified
MRSLGTIPNRPEAIRKMVRKLREHGEPRFCYEAGPTGYCLYWQLSEMGMDCEVIAPSLIPTKASDRIKTDRRDAEKLARCYRAGELTAVAVPSPEQEALRDLVRAREAAKKDQLKARHRLGKFLLRHGRKPEGMKPWTKQFLEWIKTNVHFEHKAHEVTLLNYLHEVEHVALRILHLESAIDEAVREAPADMRAVIEALQALRGVAQTTAATIVSELGSLTRFANPRQLMGYSGLVASEHSSGNKVHRGPITKTGNAHLRRVLVESAWSYHHRPNVTGFLLRRQKSLAISDEVKAIAWKAQHRLNKRYKALAAKGKNKNQIVTAIARELLGFIWAIAKHTEQKQTANAS

SEQ ID NO: 224077 - protein, 372 aa, unidentified
MTQSNILFIGMDVHKESIVISLADDDRSEVRRYGSIGGTMPDFKKTLRKLVSTGKELFFCYEAGPCGYELHRFITSQGHQCIVVAPSLIPKKAGDKVKTDKRDADNLTRLLRSGDLTSVFVPNEEDEAMRDLSRAREDVVHALKSAKQRLKSFLLRHNKRFDGSANWSEKHLRWLTEDINMPYPEQKIVFQEYLSSVTEANERVKRFDKEILFYTQQWRLFSVVKALMAMRGVRMVVAVTIMAELGDLTRFESPKQLMCFLGLTPSEYSTGDKQKKGPITKTGNQHARRVLVEAGWSYRFPAKVSKEMQKRHEDVPLNVRDIAWKAQLRLTKRFRVMANKGKANNLIVVAMAREIAAFMWAIANEVPILPRD

SEQ ID NO: 224078 - protein, 346 aa, unidentified
MTIVEADRAIIGGVDTHLDVHVAAALDPIGGLLGVESFAAAPRGYRAMLEWLGAFGTVDKIGVEGTGAYGAGLARFLRRAGIEVVEVDRPNRQARRTKGKSDSADAVEAARAVLSGRAGGAPKSRDGAVEAIRTLLVAKRSARDARSRALHQMRQLSYTGPDQLRSRLKGLSISDLVAQAAALRPRASGDPVVYATKVSLAALGRRVVALEEEIAGVDELLTDLVTQSAPEMLELFGVGIDTAATLLVTAGDNPERLRSEAAWAHLCGVAPIEASSGKVTRHRLNRGGDRHANQALWRIVMTRLAWDPRTRAYLERRTKEGRSKREVIRVLKRYVAREVFKHLPRG

SEQ ID NO: 224079 - protein, 482 aa, unidentified
MVVPHEEPKTPTKPKTPTKPKTPTKPRKSRERSVPVPVPASATALNIINPDAAGIDVHSNMHMVCVPADRDANPVRRFGANTADLQEIVAWLKKCRIKTVALESTGVYWIPLFELLESEGFEVNLVEPGQLSRCGARPKTDVLDAQWIQRLHSYGLLRASFRPPDSVLALRAYWRQRQMLVRYAASHAQHMQKALEQMNVKLTQVASDITGVTGMLIILAILEGERDPIKLAQLRDPRCRHSEDEIALAVQGTWRPEHLFALRQAYDLYQFHHRQISECDQQVEAELANFPNRAGEKTHSVKPRKRGRKSNNVRFEATGPLFKALGVDLTLIEGIEVGTALVILAEIGVDVSRFPTEKHFASWLRLCPPQNQSNKTNRSRRNRKGASRVTIALRMAAQSVGQTMTPLGLFYRRIRSRIGGLGAVKATAHKLACLVYRMLKYGQEYVTQSMEEYEAKVKANMLKALKRKAAAMGFQLSPLPTQ

SEQ ID NO: 224080 - protein, 394 aa, unidentified
MRSVGLDLGVRHIAYCEVADGKVVDRTTVKSLSQLVSRIGPDCPAARVAFEACREGWHVHDKLVEWGHDPRMLDTTRVRQIGVGQHKRKNDAIDAEVIALAVDARRIPEAHVLSPDRRTLRAQLSVRGALVETRSQYVTTIRGLARAAGVLLPSCDPENFVAKLEKSALDDSTRTLVAPLVTILRTLETELDRVEQTLSGFAERDPILNLCATVPGVGLIVAATYVSVIDDAKRFKNAHAVGAYLGLVPSEATTGGPDKRRLGSITKHGNRMARARPVQAAWTILRLRDRDDPLKRWAEQLVKTRGKRIAVVALARKLAGVLWAMWRDGTVYDRAMQAEQTAGGVRLSARQQQHRADVLERAAKKLQRKAGVTDPQRPARRVKRRAASSEMSLV

SEQ ID NO: 224081 - protein, 474 aa, unidentified
MNNKRKSKKNQVVTANIFEQQEFITKAEVIKAQLKASTWRELETNGKFGKNDKLSFITDEMLILGCDIGSETHYLRAIDTRGRELSKSAFAFENNSEGFQNALDWAAKLAVSNGKSQIVMGLKPTGHYWFCLASWMITNGISVVQVNPYAVKQTKEIEDNSQLKDDRKDPKLIANLVKDGNYGMPYLPEGIYADMRRLTMFRDQLTEDRIRCLNRLHREMKIYFPEYKEAFGKIDGTFCLEILKTAPFPGDLLKLGVRGIEQVWHNAKLRGRGYNRAAAIYGFARTSVGLKEGADAGRMAVKWFVERMMELDKQLSEIEEQLNQKCREIPYAANILDISGVGEHILSGILSEMGDISRFDDVKEIQKLAGMGLVACSSGKHEGKTKISHRGRKRLRYWLFQAAKLAVAHAEEFKELHMYYTTRPDNPLKKMQSLIVIACKILRVIYAILKKGGTYDPKKLLTDIKRPKQVNQAA

SEQ ID NO: 224082 - protein, 406 aa, unidentified
MRVVYQRCAGLDVHKSSVVACALLPEGKQLRTFGTMTWQLAQLAEWLRSLEVQVVAMESSGVYWKPVFNILEAAGFELLVVNARHIKAVPGRKTDVKDAEWLADLLRHGLLKPSFIPSREERELRELTRYRRTLIEERAHEVQRLQKVLEGANIKLEDVISNVVGLNGRRFLSALMAGDYDPEVVAATANYGLQRKQDLLAQALHGTLGAHQRFLLGQLLSHIDFLEQRIAALDEEVKQRSRPFEAAIARLDRIPGVGIRAAEEILAEIGTDMSRFPSDRHLASWAKVCPGNNESAGKRRSGYAGKGNRWLRSILVECAWCATRKKDSYFKAQYHRLAARRGRKRALLAVGHSLLTVIYHLLRDGVVYQDLGTNYFDQRDHTHVVRQAVRRLERLGYRVSLTDGAA

SEQ ID NO: 224083 - protein, 402 aa, unidentified
MELVVGWDWADTHHDVVVEDHPGHRLWAGTVAHTREALELLEGRLVTWAQGVRADVRVVIETSQALVVDWLSTTGFTVYPVNPKVADARRKPSGAKTDRLDAAILARLGWQEADTLRPLRPTDETWIELRQLTRVDAALTTEHTRLVNTLTAVLKSYYPVVLDLFEDLSRPTALAFLAQWPDPRDSRALSVSQLTRWLRHQRYPSAEAAAARMAVRLHAPALEATPGKARAQIRWVRALVAQLQALEAHRREIREQITELFTANADHDLWASVPGAGPLLGARLVAAFGTDRTRFASAEAVQALAGTSPVAYQSGKVRRVHLRRACDKHVRQTMHQLALASLTRCAWARAYYDAYRARGHGHHAALRALGNVWLRILFRMWQDGTPYDEARFVAARARHRAA

SEQ ID NO: 224084 - protein, 345 aa, unidentified
MKKGITIGMDLGDKKHQVCILDKTGKIITEEEVAGNRTAMASFFKQYRGAVVAMEMGAHSRWVSQIAETEGLEVLVGNARKLRMIWQSRKKSDAQDAVMLARIARMDPALLCPIHHRGDQVQMDLEIIRARDLLVRERTRMVNHVRGVVKSMGERLTPSSAASFGHKARIPEALNEAMKPMLEMIRELTKKIRGYDLMIKDAATKKYPETEQLCQVGGVGPLTALAYVLTLEEPERFAKSRMVGSYLGLVPRLDQSGQIDKQLRITKHGDGYLRRLLVGSAHYILGPFGHDCDLRTFGLKLMQRGGKNAKKRAVVAVARKLAVLLHALWRSGAIYEPKRMQPLAA

SEQ ID NO: 224085 - protein, 423 aa, unidentified
MKLSAEQPFTALVGIDWSDKKHDFCLQGAGSTQREFGVVAHCPEAIDRWARELHQRFGGPIAVCLEIAKGPLVHALQRYGFIVLFPVNPATIAKYREAFVPSRAKDDPTDAQIALELLLRHREKLQALQPQSAPMRALTTLVEQRRHLVDDKTRTTNRLCSTLKEYFPQALDWFEDRDTALFCDFLQRWPSLKQVKRARQTTLRSFFWAHNMRRTELIEERIHGIRSARALTDDVAVIGPHQLLVQALVAQLRVTLQAIDGFDAEITQVAKRLPDYALFAALPGAGAILAPRLLVAFGEQRERYASAAQLQQYAGVAPVLERSGNKCWVHWRMACPTFLRQTFVEWAGSTIPRSFWASAYYQRQRDKGCSHQAALRALAYKWIRIVYRCWQTRTAYDESAYLLALKRRGSPLIAAVPIALRSP

SEQ ID NO: 224086 - protein, 332 aa, unidentified
METKETIGIDVSKKTLDVHIHNKKMHRVFENCPKDIAKMIKWALKNTDFDREEMIFTFEHTGLYSLQLSATLSELGMRYVAIPGLEIKRSLGLSRGKDDKVDAAKIALYAYRLREELESCQLPSEDLQSLKRLLSLRDRLVKQRAGYKASLKEEKRVLKQKDNKILLKAQEEMIGHFSKKIKKVEREMDRIIKENRELDKIYGLVTSIKGVGPQTALYMIAYTQGFTKFENWRKFASYCGTAPFPNSSGTSIRGKTKVSHLANKKIKSLLDQCSKTALQHNPEIRQYYRRRVDEQGKNEMSTINVIRNKLLARIFAVVKRRTPYVDTLKYAA

SEQ ID NO: 224087 - protein, 301 aa, unidentified
MYVGVDVSRARLDVALGDRVYQFPNPDGIPDILALLPQAAVVGMEATGVYGRPLAFALHQAGFRVYVLNPAAVKAYARSLLRRAKTDTADARLIARFLAERHGDLPPYDPTPDVLYQVGLLVRFARGLTAQRVAVLNRLHAWEYAWPQGLGLDVVRSVPATLEALRAEVERVALNMLRSDSLGWRWFQALQSLPGVGEGIALTILAYSGDMRRFRSARAYAAFTGLTPKLYQSGEIPEVGRISRMGPPPLRAAFYLAALHARHVEPYASLYVRLLDRGKAKRLALIAVANRLARHAWAVCR

SEQ ID NO: 224088 - protein, 335 aa, unidentified
MAKSSIIVGIDLHKRSFDFVMMSSTGEIIKQGSRSTEASSVLEFASGLTLRHQAVLEPLENSYWFIEQLQPYAASVHLANSGKVRLIAESRLKNDRIDARILADLFRVGYLPEVYIPKREIHQWRCLIQHRIRLVCDRTRVKNRIIGLLNREGYRVAASDPFGKKGRAQIDSFELSSMLRQMVDRNLVSHDLLSSHISDLEAEIKQIVAADPIASNLCTIDGVAEFTALAIRAIVGRMDRFRSVKAFAAYTGLIPGSRQSADRVQHRPITKQGSTTLRWLLLQAAKHVVKKSGYFKRMHSRIVRRSSEKNARVVVAHALARIIYHVWMEARPYYR

SEQ ID NO: 224089 - protein, 412 aa, unidentified
MEGETVIAGVDTHKDVHVLCLLDGLGRKIWSGSFGADPEGYDRLAEAIGDPGSCMVVGVEGTASYGAGLTRRLVELGYNVVEVLRPKRDKVRPGEGKSDPLDAERAARKAASGRGCSVPKSQDGWVEAVRQLYVARRLAVATSTSCVACAKSMLTTAPSALRERFRGRERPKDLMPLLARGRKAGDALEESVLASLRSVAAVWKEARSQVESLDERIRALLEANAPALLGVEGCGTTTAAALVVAAGDNPGRLKGEAAFSMMCGASPIPASSGKTDRHRLNRGGNRQANWALYEIAIKRMAYDERTRRYVARRTSEGKSRREAVRCLKRYIAREVYRVLMDPNPDGAAPEGPELAKMRKAMRVTQKKAAAELGLSAATLGHLERGKRRSTKLERRYYELLCELEGALPQTAS

SEQ ID NO: 224090 - protein, 340 aa, unidentified
MDKLTTIAVDIAKRVFSVYWVDAQTGEIGARTMSRAKLEEFMRTREPSRVVLEAGGSAHHWGRWLARHGHEVRLIAAQHVRPFVRTNKTDAGDARAIWEAASRPEVKWVAVKGEASQAVLGLHRMRRQLIDMRRMQSNQLKALLYEFGVVAPAKVTAAQLADWVAAGRVPKLLEASLCMQLERIARLKREELELTRAIERHNAEDALAMRLIKVPGIGALGASALSAELTAGATSYTNGRQYAACKGIAPRLSGTGGKVRPGPISKRGDPYVRTLLIHGARSVITHQRRAKRLSPWLSGLLQRRPFNVAVVALANKMARTAWVLAAHDRTYQANYGAQAA

SEQ ID NO: 224091 - protein, 428 aa, unidentified
MQYALPLVLPDVPAGGVCAGIDWATADHVACVADMTGRVTGRFSAAHDKAGIAVMITWLRRGKVTEVAIERGDGPLVDALLAAGLTVVVITSRQVKNLRSRFGAAGAKDDRFDAFVLADTLRTDRARLRPLVPGTPATISLRMAVRARRDLVRHRVAACNQLRAHLAVAFPAGITLFHDLDSPISLAFLARFGSQDAAAGLDEQAIGAWLAAIAARGRPAPASVLQARLHAAPRGATGADGAAQAGVTAALTATLTALPAQIKALETQIAGQLAAHPDGHIFTSLPRPGTVRAARLLAEIGDCRPRFPDPESLAGLAGVAPVTRRSGTRIARHFRWAVNRQLRDALCDFAAGSRHASPWAAAIYDDARARGKDHPLAVRITARAWTYVIWRCWHDGIAYDPAKHNALQAILSRQHAAQAAAPAPQEDQ

SEQ ID NO: 224092 - protein, 325 aa, unidentified
MFVGLDLHKDYSEYAVMDITGSVLRQGRVKNSLEKMREFSESIPARSSLVIESSSTWYWAHRLLSERHDVILSNPIKNKAIASAKVKTDKIDSLMLATLLRGGFVAECYVPSSETIDLRELVRFRANLVRERTKMKNQIHAYLLMNNVSIGSTPFSKGFVDELRKVENPRVQAYLRLVEDLNREIREASVTIREKAANNKDAELLMSIPGISFYSALLIVSEIGEIARFEDSSSLVAYSGLAPSTHSSGGKTYHGPIMKSGSRYLRWMMGQCARAHIRAEPDGTVAVFYDRIRRKKGDQKAIVAASAKLLKIVFWVLKERRVYHS

SEQ ID NO: 224093 - protein, 467 aa, unidentified
MEELFEDCHDVEVVYQRCCGLDIHKKMIVACLIIVAADGKRGKQIRTFGTTTAALLELLDWLKAAGSTHVGMEATGVYWKPIYNLLEGHFELVVANARHIKAVPGHKTDVKDAQWIASLLQHGLLKASFVPRQEQRELRDLTRYRTTLVEERARIVNRLQKTLEDTNLKLGDVVSDMTGKSAQAILRGLLAGETNPAVLADLARGRLKAKRAELEAALVGTIKPHHRFMLTEQLDHIDRLDKAIKRVGAEIETRMGPLLPPEPEQTSGKQSPSEQALSEEEPQAVQTASDKPTEPANKESLSLAQAVVLLCSIPGISQRAAEGILAEIGMNMDRFGSAKHLASWAGMCPGNHESAGKRTSGRTNKGSPWLRKLLVQAALAASRTKKTYLSAQYRRLAARRGKKRAAIAVGHTILVIIFHVLRDQKPYEELGSNFFDQRERQAVEKRLVHRLEKLGYDVSLAPVDHAA

SEQ ID NO: 224094 - protein, 376 aa, unidentified
MTKILFVGMDVHADTIAVAVAEQDGEVRSHGVIPNRIESIRKLVGKLAPVKRLRVCYEAGPTGYALYWQLAALGVACEVIAPSLIPRKPGERVKTDRRDAEKLARCHRAGELTAVWVPDADHEALRDLVRAREAAKKDQLRARHRLGKFLLRHAQRPPAGVKAWTKKYLEWVHAKVRFEQPALEATLADYLHEVEHAAERIVRLDKAIDEAVGQAPLEMRAVIEALQALRGVAQTTAATIVSELGSLSRFPSPKKLMSYAGLTPSEHSSGNRIQRGAITKSGNAHLRRVLVEAAWAYQHRPDVSGFLLRRQKKLALSDEVKRIAWKAQLRLSGRYRKLTARGKTKNETVTAVGRELLGFIWAIAVETEAHNEAIAA

SEQ ID NO: 224095 - protein, 357 aa, unidentified
MKKLFIGIDFSKEKLDATIILACGMNEIGSREYGCFPNNTTGYRKLCNWVKTNAWNTIAEEWLFCGEDTGSCSIGLSKWLYGKGYDIWIENAYAIKHSSGIQRVKNDKADSAIIAEYAWRQQDKVVPFEPLNESLAQLREIFLYRHKLVGQRVAMELRKEDKSQSNKSKAISFINRKSKHLIAEINKTIAECDKAIDSIIEADEELKENYAIITSIKGVARQNATCMLVYTNNFKKFGYDPRKIACYYGVAPFGKQSGTSVNTPAHTSHFANKLIKSLLGRAAHIAKIYNPEIRDYYQRLISKGKKPQVALNNVKNKLIRIIVALVRKKVPYDQNTYKYYEEREVIERKKNEKLIYC

SEQ ID NO: 224096 - protein, 335 aa, unidentified
MQTAKKIVGIDVGKDWLDVCYPDGRKEHIRNIRSCRTKLIKKAAKLGAIVCFEATGPYEEPLADECLARGVKAVRLDAWGTRKFAESQGRIEKTDAIDCEMIRDYAASLKDEKLHFIKPRSEAQKRLKKSVRTRKNLLKARAIIANQFEDDLDPETAKHLRNALKSIDRNIKRIEEECAAAIASDERLKDLDRRFREVKGVGPCLSRTMLAECPDIGEFNDKSIAKMCGNAPISHESCTIKGKARPRRGRSELTKALYMAAVSASRNNHVLREFYQRLVANGKARKLALTAVARKIAVLLNTIAKYPDFKPAQDPKDIAKANRAKRGRGRPRTTA

SEQ ID NO: 224097 - protein, 377 aa, unidentified
MDQKQAIPKNGLPILYVAFELGNNTWKMACSDGRKVRQVTVTARDLEQVQHALLRAQNHFAMAKGSSTVSCYEAGRDGFWLHRYLQGQGIDNVVVDSASLEVDRRLRRAKTDRIDAGKLLRMLIRYHGGERQLWRVVRVPSREDEDARHLHRELESLKRERTRHRNRIHDILMQQGLCLPNPSKKRFLKDLEALRTWDGHQLPMGMKARLVRVYQQLRLVEDQISILASEKREQLKQMDNAKMRQVAQLLKLPGIGPVSSWAFVMEFFGWRRFRNRREVAALAGLTPTPYDSGRKLREQGISKAGNRRIRTLAIEIAWAWLRYQPRSKLSQWFSERFACGGTRMRRVGIVALARRLLIDLWRFLEYGVVPEGALIIA

SEQ ID NO: 224098 - protein, 425 aa, unidentified
MHSISNKKINQVTDQTLVVGMDIAKKKHYACFVDERGRVLKKPFPVLQSKEGLEWLYQRIVEAMKEFGKTEVIVGIEPTGHYWLNLAYFLDEKGIPLVMTNPMHVKRSKELDDNLPTKHDAKDALVIARLVKDGRFSYPRILKGMEAELRVGAAFRSKLVEEQGAVRNQMIRWLDRYFPEFTQVFPSFGKMALAVLEYTPFPSDLAGKELEEVLALYRQSEGLQSPQRPKAKKLIELAQHSIGVTEGQQMARIEIATLVRRYRQLEKEIEALTEQLIELVQTFVEYEWLKTVPGVGDATIVELLSEIGSFSHYQDPRQLIKLAGLTLREHSSGQHKGQKRISKRGRKRLRALLFRVMMPMIRHNEAFRQLHDYYTTRPENPLRKKQSIVVLCGKLLKVLHAMCTKHQAFDAKRMMQDIFGLETAA

SEQ ID NO: 224099 - protein, 463 aa, unidentified
MSIGKQHRGITPTAISPQLQAINRYAAGIDVGAEEHWVAVPAGSDVQPVRRFGACTADLEALVDWLRQCGITTVAMESTGVYWIPLFELLEARGLVVVLVDPREVQRAPGRPKSDVHDCQWLQRLHTYGLLAAAFRPVEQVCILRSYLRQRAMLVTYAGQHIQHMQKALTQMNIKLQHVVSDITGVTGMAILKAILAGEREPHKLAQFRTRHCQHDEGEIARALQGNWRAEHLFALQQAVELYEFYHRQIAECDRQIEAHLQTFTDRSAGKVLAHRRRQRKRRANEPRFDARPPLFRVTGVDLTTIEGIDESTALVLVSEIGTDMSRWPTEKHFAAWLGLCPHHKISGGKVLSRKVRPSANRAAIALRLAACCLHHSHSAVGAFFRRLKARLGTPKAIVATAHKLARLVYRLLKYGEDYVARGVEEYEQAYRERIVQNLARKAKALGYRLLPTTDATPQEAVA

SEQ ID NO: 224100 - protein, 381 aa, unidentified
MDIVSVIQFLSSPSFIIRTVFRELAASRIIYVTGNKVLSNYFVQNKFMKILRKSIGVDISKDDFKVCVGILDDTLTTNVTLEAAYANDKRGIAQFLRELKAKVSNHMKPVVVLEATGVYHELLAYTLHDKGFQVAILLPNKAKAFCKSINVRAKSDKVDAKALSQMGLERNLMAWNPPSKHYHVLKTLTRERESLVLQRTRLKNQTHAHQTAFVKNSSTDRRIKRHIKFLDEQIKEIETELRKLVRESDELNKKIVKSSKGKGVSFVTAITIVVETSGFNMISNIKQLVGYVGLDVRIDQSGSKAKKGKISKKGNSHIRKALFMPAMNAVRSNTTLKNFYEKLNERQSCKKQGIVAVQRKLLILIYSLWKGDTEYRPNMAA

SEQ ID NO: 224101 - protein, 431 aa, unidentified
MLKINPLSTLYVGIDVSSKSNYVCALDFYKNKYINSSFANNQPGAEELALKILECLKEHPDITTIVAALESTSVYSIHIANYLSSCEELMRFKPYVFVLNPKCTANYKKSYIGLGKSDPIDAFVIADYARAGNIESEPWRGSQFLALKRLTRHRLHLVECMTREKTYLVSNLYLKFSELQMLEGDDQPFCDIYGATSSSVLMEYLSPEEILVSSEEDLIAFLAEKSRNRIKDISKTADLLKKAARDSYRLDKALYEPLNVSIASSFNCIETFKREIKVIDNAIEKEIKGLNPNAFIILQSIDGIGPVFAGGIIAEIGDITAFHSSDALAKYAGLTWKSNQSGDFDGEDTPMIKAGNRYLRYYLGEAANSMRKHNVEYGTYYRKKYNEVPKHQHKRALALTSRKFVRLVYGLLARNQLYSGVSLDTSIKDSN

SEQ ID NO: 224102 - protein, 356 aa, unidentified
MCQGDGVELPPKEASMEQATTIGLDIAKYVFQVHGADSAGHVLFRKRITRGKLLGFLAAQAPCVVAMEACAGAHYWAREIAKLGHHVRLIAPAYVKPFIRRQKNDAADAEAICEAAQRPSMRFVPVKTQEQQANGIVFRARDLLVRQRTQCVNALRGHLMEYGYVFPKGITHVETLAAVVEDLQSSLPDRVRVILQLLVDTFTALEAQITALDAEINQRSKSDPTARRLMTIPGVGPITSTAITALVPAAEGFPAGRDFAAWLGLTPLQKSTGGKQKLGAVSKRGERTIRRLLIIGASAVVQQASRRGAPKGSWLAQMLARKPKMLVTVALANKMARIIWALLVKGGTYRTPTAAA

SEQ ID NO: 224103 - protein, 343 aa, unidentified
MQLISTIGLDIAKSVFQVHGVDAAGQAILRRQLRRRHVLAFFQKLSPCLVGIEACASSHHWSRELQALGHTVRLMPPAYVKPYVKRQKNDTTDAEAICEAVTRPNMRFVSTKTVEQQSCLMLHRVRHLFIRQQTAVINSIRAHLAEFGIVAPVGRRGVEQLLEVVADTADRRLPEVARACLAALGSQLRALKAQILEFDRRIMVWHRSNATSMRLDAIPGVGPALATALVASIAEPGAFRSGRDFSAWVGLVPKQNSSGGKDKLGSISKQGDRYLRSLFTAGALAVIRYAKIHGTRHRPWLTGLLARRPTKVAAIALANKLARMAWAMMVRNERYKEPAALAA

SEQ ID NO: 224104 - protein, 320 aa, unidentified
MSRGCFVGIDVSKAWLDVAGRPDPAPSRVANDPAGIAALVADLRALAPELVVLEATGGLELPVVAALQVAGLPVAVVNPRQVRDFARATGQLAKTDRLDAALPARFAEAIRPAPAAVVPDDVRHLDALLTRRNQLIAMRVMETSRLDRLTDKDVRADIRKHVAWLTKAIDRADAALAAAVKASPVWQARDALLQSIPGVGPVATLTLLAGLPELGTTTGRRLAALVGLAPFADDSGSRQGGRHIRGGRAPVRRALYLAALSAVVHNPAMRAFKERLAARGKRPKVILTAVARKLLVIANAIIQSGQPWRSGAVEPVAISA

SEQ ID NO: 224105 - protein, 427 aa, unidentified
MFTAAFASLTKMNFNKLLSGNITKYQKEGFIMISVGIDVSKGKSTVCIMKPCGEILESPFDIGHTADELDSLISLIKSFDEETRVVMEDTGHYHLPVATYLSSHNIFVCCVNALRMKKFCSQSLRRAKTDKIDSIKIASFGITYWNELVKAYPSNVIYDELKFLARQYYQVTGMLVKSKVNFSNLLDQVMPKINDVLSNQGENHKLTEFVSRYIHFQNILDMGEMKFTSDYCKWAKKKGYRLNERKAAEILALAQNGIPTLPNSQSVKIAVSEAVKLIHSIEESRNTILAQMQDLCNTLPEYSVVKEMDCIGDTLAPRIIAEIGDVRRFKNKHSLIAYAGIDAPPYQSGAFHASERHISKRGNSYLRKTCYEIMQSLIKHKPADNAVYDFIQKKRSEGKCGKEAMIAGLNKFLRVYYGKVMEFYSEH

SEQ ID NO: 224106 - protein, 412 aa, unidentified
MEVVYPRCSGLDIHKRFVVACLSVIEKGQRHRETRQFSTMTNEILVLKEWLKESRCTHVAMESTGVYWKPVFHLLEGDFEIVLVNAQHMKAVPGRKTDVKDAEWLADLLQHGLLKASFIPSSEQQAVRDLTRTRMRLIQERTRLINRIQKVLEDANIKLASVVSDIMGVTGQAILTALVAGQEDPERLAHLARGVLIKKQDQLQAALQGKLTAHHRMLLEELLQLITTLDRSIARFDREIAERLRRFDALIKRIDEVTGLSRRSIEVLLGELGWDMSHFPDAAHAASWVGICPGNHETGGKQLSGRTRQGNRWAKMVLIQAAHAAGHTQTYLGEQYRRISARRGAKKAAMAVGHSILVIFYHMVKTGESYHEKGVNYFTIVNKEKIQQRLVRQLERLGNTVVLQPQTQTTLA

SEQ ID NO: 224107 - protein, 405 aa, unidentified
MRRTDHRSAHPRTAAQGHDTSLFVALELSRSNWLIGSSTPGSDSIGKYQVAAGDTTALLGLLNRLKARAERYCHGTVRVVSIYEAGLDAFWVHRLLEANGVESHVVDPASIAVDRRSRRAKTDRIDVEKLLDTLMDWARGARRVCSMVRPPSPAEEDGRRLIREREALVIERTRHVNRIKGLLATQGIFGFEPMHRDRRKQVEQLRGWDGQPLPPRLKAELARELNRLELVISQVAAVEDERDRALQAKQHLVAVHASEGTTANPASADHAGPLLLRLKGIGPEFASVLSLEGFYRNFANRREVAGYAGLAPSPWKSGGIDVEQGISKAGNARLRKTMIQLAWLWLRHQPGSALSQWFRERVGERRGKIRRITIVAVARKLLIALWRYVTLGLIPEGAELKALKV

SEQ ID NO: 224108 - protein, 404 aa, unidentified
MYSFGIDWSAEHHNLCVMNDKQRPLSQVKFPHSLEGFQQVEALRQQLGVSATECWVAIETAHNLLVEFLVEQGYVVYVIPPHVTYAQRQRYHASQAHTDDSDAALLARLLWTDREHYQPLRGDTQLTQHLRAQMRFVEQLRRAIHRQHNQLRAILLRTYPQAVKLFSALTSQISLQFLLAYPTAQAATALSLAEFRAFCQQHQYTHPQRIAQRYARLIAPAPTAHPVTVSVYQEQVPIWAELLLLQVQQHKVAQRRLSALFAQHPDADIFASLPGAGALLAPALLAKFGDQRERFPTAAVVQALAGTCPITEQSGKKTYIHFRHSCDKEFRRIAQHFAKASLHQSGWAMAYFQDALSRGHSTSHAYRCLANRWLAVIWKMWQTRQPYDEGYHLRQRATRQRSRS

SEQ ID NO: 224109 - protein, 315 aa, unidentified
MNDPQDVAIGIDVAKAVLDVAVRPSGEERHLANDAAGIAEIVGWLKTLNPQVIVVEATGGYEAPLVAELGIAHLPVAVVNPRQVRDFARATGRLAKTDRLDAQALAHFGQAVRPIPRPLPDDAAQALAALVERRRQVVAMRTAEENRLGATRVVLVRTRIQAHLEWLETDLREIDDELRQRLRTSPLWREQDDLLQSVPGVGPILSLTLLAEVPELGRLSHGQIAALVGVAPLNRDSGSLRGRRAVWGGRRAVRTALYMGTLRATRCNPTIQAFYGRLLEAGKAKKVALVACMHKLLTILNAMLKHQTPWQAQAA

SEQ ID NO: 224110 - protein, 342 aa, unidentified
MNIPVRIGMDTSKSVFQLHGVDENEVVIVRRQFRRAEMIRYFERLPPVLVAIESCGSSHHWARLLQSFGHEVKLIPPQYVKAYVKRGKNDAADAEALCEAVTRPSMRFVPVKSKERQAACMLMTVRERLVSVKSQLSNAFRSYAAEFGIVGPAGRQNVTALIKRVLEDSSLPEMARDLFRLQADEYAAVEARLAKIEAKLMKWHREDDVSRRIATIPGVGPIGSSMLSMKAPPPETFRSGRDFAAWLGLTPKDHSTGGRQRHGGITKAGDSVLRSTLIVGATALLRHIRKGRHKPTPWLASLLERKPPKLVAVALANKFARIAWRLMISGGVYNRPVAAMPI

SEQ ID NO: 224111 - protein, 416 aa, unidentified
MDAIVERCAGLDVHLDTVVACVLYGKLDIKPKKEVKTFSTTTKGLLELLDFINQKECTHVAMESTGIYWKPVWNILESGAFDLIVANAKKIKNVPGRKTDVKDAEWIASLLRCGLIEKSFVPPERIRDLRDLTRLRKELLGEVNRNKNRIHKVLQDANIKISSVLSDVFGETGKSILNQIIDNQCITEEFIYSLYEGRGKSKLKSTPMEMYEALNGKIRGHHVILLGMHNSNIVFLEKQINELEKEIDILLQKERDSLELLETIPGISKISASSIIAEIGTSMDVFKTEKHISSWAGLCPKNNESAGKKKRSGIKSGNNWLRSMLCECAWSATKKKDSRFKNKYWSMVPRMGRKKALIAIANMMLRLIYHLLKTKSTYKELEIQYFIDKDKRREDRIIKELKSKGYLVEKDSLQMA

SEQ ID NO: 224112 - protein, 331 aa, unidentified
MYNYIGIDVSKQSLKISDETKEYDVPNEKGLKTLKKLFRKNYGKDWKETRLIYEPTGPYSNYLREFVFKHKIRIYEMNPKKSANFAKALGNRSKTDDIDAKMLYKFHVLLKEEDFRIPEIDKVAEQLGAYVSSYRIIQKTRTMLSNHLQSREYENGIDPKLKESIKKEMEKLKQIEEALEKEMEAFGRDNPEIKEDFENLLSIKGIGVISATALLYLFRKYPDANRNEITALAGLDPVKRQSGSSINGGRKISKAGDSSLRKILYVSCLSSIRYNDRIRVFYEYLITNHKKPKVALIACMRKILLIAHQIYVKKSEYKPLYIDNKSLCSSY

SEQ ID NO: 224113 - protein, 319 aa, unidentified
MRSIGLDVHRQFAEVAVAQGGQAVPSGHRFEATPAGLLAFARSLGKEDQVVLEATVNTWAIVDVLAAHAGRVVVSNPLRTRAIASAKVKTDKIDAATLAQLLAADFLPEVWIPDPETRSRRAQVAHRAGLVQQRSRLRNRVEAVLHRNLLECPWTDTFGKRGSQWLAHLNLPPADREQLDSTLRQLDCLEGEVARADQLIAETTLGDPRIQRLMTIPGVGVTTAAALVAVVGDVARFPRPNQLVGYLGLDPRVRQSGNKPAYTGHISRQGQAHARGLLVEAAHAAVRRPGPLRAFSTSVSAPAVAARWPSSLWLGSSPS

SEQ ID NO: 224114 - protein, 429 aa, unidentified
MNCTQNKKIEQVKETTMIVGIDVGSEKHYFRAFNWRGIELTRKPVLFSNSMEGFNSFYNTIVELMQENKLEEAMVGIEPTGHYWFDLGQFMGGKNIKFVMVNPHHVHKTKELDDNSPSKNDRKDPRIIAGLVKDGRYFYSYMPTGVYAELRNASNRRFVLVEEQTRTKNRLQKWIAVYFPEYKGIYTHIDAKGGLMVLKQAPTPEEITKLGEEGIIKIWKDAKLRGNGHKKAMKILNAAMRSIGLKAGLTEARMEMQDLIEDYELQTKRLERVNDLIKELCRQVRYADKLLEIKGIGITTVAGFIAEVGDITRFDSTKGLQKLAGLELVADSSGKHNGRTKISKRGRKRLRYLLFEAAISVVGKNEEFKEIHRYYTTREKNPLKKMQSLIAVACKLIRVFHVILTKGVSYDASKMLEDIRHPKEQLKAA

SEQ ID NO: 224115 - protein, 357 aa, unidentified
MVDLLSEAKSSYEGVTNPYHRTEHCGKIHEYRCGKEVGVLGIDVSKDYLITSRGRERKYKNNLKGYEEILEMKPCLIVLEPTGVYAIRPSQYFKEKGVKVLQVSPNVLSREKEFRGKKTDFYDAEKLENMVDKAKEYEYNPLRELVTLYLFLKDIEVKYKNRLKRTLFLVSDNDKISKERLEKLANGDFAQEELYQLEYTPIVLEEIRVLAKTLLETEERLKEVKKMIEEQVPENHVLLTIPGIGRLAAGIIIGVVGDVKRFPKPESFVAYCGLDPVVERSGKAVISRGISKRGNKYLRSLFYFLAEMNYSRNPTLLKFYESHKDRLQGKKLYTALARKLARIVWSVWYNNKPYEPK

SEQ ID NO: 224116 - protein, 438 aa, unidentified
MKVMYERVAGIDVHKDMIKVAVRSPGDKPWTRKTEILTFRTFYGVLRAMARELRRRGVTHVVMEASGVYTEPVYYALCEEDFTEVAVVNPAHAKALKGHKTDAKDCARLAELFECGLLQGSYIPAAGLKEMRDLSRYRMKTVQARTSEIQRLAKALESAGIKLGSVASEITGKGPVAMIEALISGERRGAVMADLAKGRARTAGKLADLSMALEGRFTDHHALMCRLHLDRITALDAAVADLEARIAATAADWQREIGLLKTIPGFGDIVAWAWIAEIGPAPHQWFASHHKLACWVSLAPGNNVSAGKRKYGRTGDAGTYIKPMLIQAAWAAIQVRGRLQARYNRLVRRMGGPKNPAAKKKAIVAIAHTLLKIAYTVLKTGTGYQEPGADFYTRRESPGHRQAWLERQIQKLHPGCTVTITISPSPDPAPEAALPPGA

SEQ ID NO: 224117 - protein, 357 aa, unidentified
MHCAILEKTRLVSWEQNPQARLGELHCQTGLVLYTAMSKTYIGIDIAKNTFDACFIVDDIWQHHTFTNTHKGFIELLRWVQSCYYNTSLHLIIEATGIYWEKLAHWAVSHHHKVSVVNPLYIHAYAKSLGIRTKTDKQDAILLARYGTKENPPSWQPKSNNEIKLTVLLKQRDHHKRQLIKERTRQESQSIYVKSYTDDNIRHWRESMIQIDDQIWLLIDKTPELKHRASLLATIPGIGKKTLPYLLATIGDGSSFQSAKHLASYAGLSPRHHQSGISIHKQSAIGFSGQKELRSALFMPAVVVSFGRYPTFEKFVKRMEKKGKTKKQIIIAIMRKLLTISHAVIRQNRPFDKHIHE

SEQ ID NO: 224118 - protein, 397 aa, unidentified
MYIVGIDIAKRKHEAAVIDGEGTVIIKPFSFTNNCSGYNRLLAMLTKAKLPLDEVSFAMEATGHYWLALFTRLQKEGFRVQVINPVQTNSIRSFYIRQVKTDPRDALLIAEVIRFGHFSESTLHPENIYELRELCRGRHAIVSMQADVKRKVVALLDQVFPEYETAFTNLFGDTSMAILQTCPTPKELSEMPLEELCHLIEVSSHKRFRMAKAQELQALARNSFGFAMAGDVFSTMIRLYAKHLDFLKQQVREMDRKIAEIMDTLDTPITTITGIGPTLGAYILSEIGDISRFSSAAKLAAYAGIDPTMRQSGEYNGVRNRMSKRGSPYLRHAIWLAASSAVLHDPALKLYFQKKRDEGKPYMASVGHACRKMVSIIYAVMRDNKAYTPYIPNEISA

SEQ ID NO: 224119 - protein, 342 aa, unidentified
MEIVYVGLDLGSSNFQQVAIKADGSVKVNRSFTTSEANLIKAFSDQRGEIHVHLEAGELAPWAASIIAPLVRRVVCSHPKDNAWIAKDADKCDRVDAFKLAELLRLNRFKEVHYAPDQPRRNFKQLVQHYDELTGQQARLKTKIKARLRMQGVIVTGERLFSTKGRKEVLARVAARDLRTAIKQLYEVLDQSVAAQEQARLLMLRAAQAFPEIKLLRTVPGVGPIGACRFSAYIHTPSRFSSKRKLWKYCRLSVSHRSSNGKPLRRPRLDRSGCGRLKDVSRKAFDVSIRLRQDNGFKRTYQHALETTHDKTHARLTVQRKIISTLRAMWITRTPYCDELSR

SEQ ID NO: 224120 - protein, 321 aa, unidentified
MAYFRDVVGIDVSKENLDLYVLSGQQRRTVANTAAGYRDLVSWLKSLGVRMAVMEASGGYERDVAKALRQAGFDVRIVDPKRVRHFAKAAGRLAKNDRIDAEMIAEFGAVFAAAQRCEIPLDAKREHLAGLVAARQALVDHRTSLQNQISACPKGPARQALAAALKPIPASIKQLDRLIAAAIAAHPQFAALAARLDTVPGVGPVTIAALIAWLPELGRLDRRALAALVGVAPFDDDSGKRTGQRYIKGGRGKLRNIAYMAVMGAATKHNPVLKAYYDSLLNRGKLKKVALIACLRKLLTILNTMVAKQQDWNPASIAIAA

SEQ ID NO: 224121 - protein, 389 aa, unidentified
MEHPMQKLNDLSRSLSPLQLDRTLIAVIEMSLSSWLVAGIVPGVERQPLKKLEVDENALLKLLNRWREEAEKAGHRIERIAVAFEAGRDGFWLARWLRAHNIEAHVIHTSSVAVSREHRRAKTDRLDTELLKRSFLGWLRGERNHCKMVAIPTIKDEDAKRPNREHESLVGEQSRIVNRMKAALIRLGIRGFNPKLKKAAERLDGLRTPEGEPIPPNTLAELRRDMVRRRLVSDQIRQIEDARLEHLKQAPSDGPHAMVHLLARVIGVGVETADMLVQEVLSRSMRDRRAVARYAGLTGSPDESGRRRREKGLTRSGNARVRRGMIQLAWRFLMFQKDSTLAQWFRARTETARGTRKTMIVALARKLLIALWRLVREGVVPDGVVLRPA

SEQ ID NO: 224122 - protein, 341 aa, unidentified
MSELALVGIDLGKHTFHLHGQDVSGREMFRKKLSRVQMMRFFGNCPTCTVVMEACAGSHFVARELATMGHVTKLISPQFVRPFVKSNKNDFVDAEAICEAASRPSMRFVSPKTEAQQTLSVLHRMRESLVRDRTKTINQLHGFLLEFGISLPLGWTVIKRLPSVLAEHELPIRLSTLLQRLHAHFGYLDEQITQLDKQMAGQLADDDLGSRLLSMPGVGPITASLLAVEMGDGKQFGCSRDFAASIGLVPRQYSTGGRSNLKGISKRGDKSLRCLLVQCARVYMQRLDSQKGALADWVRSLLQRRHSNVVACALANKLARIAWAISAHHTMFEVGADAMAA

SEQ ID NO: 224123 - protein, 317 aa, unidentified
MTQTSTLTAGIDTSKEKLDIAVHGQSGCWEVANDQPGWRKLAQLLTEAGVRRVGIEATGGYERGVVEHLRAASFIVLVLQPIQVKAFGRARLRRAKNDKLDAALIAAFAASLDEVRDAPDSRLAELTEQLTFLEQIEEDIKRFKTRLEHIDKLGLRRFVLDDIARLKARRLSQIRHIAKQIRAHHDLAVRLDLVLSIPGIGERTALALLVRMPELGRVSREEAAALAGLAPFDNDSGQYKGQRRIAGGRARLRRSLFAAALPAAFRWNKAVMALYARLTAAGKAHNAALIACARKLLIYANTVVQRGKPWAEKPIGV

SEQ ID NO: 224124 - protein, 353 aa, unidentified
MRKMQEYIVKGNRIFVGLEDSKKTWKVCVRCDRMIVHETSMPAEYEILQAYLMNRYPECMITVMYEAGFHGFWLHDLLEEDGIDCIVTPANKVTCAKDDRVKTDKRDARRLAQNLENGDYVSCHVPDKERREDRQISRTLSQVQKDITVEKNRIRRFLEYHGLDRGLPSGAWTDRDYLKLKDMGLDLSLRVSLNAYLRILAELLAVKKDLLKELRALCDKERYKVGVRAKKSCPGIGWLTAIRLTLEWGEMRRFPTGKHIASFTGLTSREYSSGDTVRRGRITGQSSEYVRSWLIECTWRAVRKDPVLLAKFNAVWRNSGSKKKAIVAVARKMSVRLWALETTGKPYCTGVVE

SEQ ID NO: 224125 - protein, 372 aa, unidentified
MKEYTEAFVGLDVAKDRHAVAVAQDGRDGEVRYLGEVGVDAAAIRRLVRKLERPGVRLRFCYEAGPTGYGLKRAIEALGHDCAVIAPSLIPNRPGDRVKTNRRDAERLARLLRAGELTEIWTPDPAHEAMRDLVRTRESAVRDRTRKRQEIRSFLLRHGRVYPGLKAWGTKYFKWLQNIRFEYAAQHAVLQELILAESQCRERVGRLEKAIEDGLRDWHLAPVVEHLQALRGVRLVCAVTFMVEIGDVRRFANPRQLMAYLGLVPSERTTGENVRRGSITRTGNARVRRVLAESAWTYRFPARVGTRKYFETRHLPEDVRDIAWKAQARLTKRYRRLVANGKKTTVATTAIARELAAFMWAIACLPIETAQA

SEQ ID NO: 224126 - protein, 385 aa, unidentified
MSQFSRFPQASVDYNSTIIGALELSEKKWVLAVQLPGVSRHSRHALDACGDGLVSFVERLKAKCAAAGRKITRVIVTHEAGRDGFWLARFLARLGIEVHVMQPSSLPVDRRARRAKTDMIDVEMLLRTLMAWLRGEPRVCSMVPIPSEAEEEARRAYREREDLTRERRSIVNKIDGILATLGVKGYKALRRDRREQLNCARQPDGDPIPQKAKARIERLLDRLELVLKLIGQVESERDAVLEKDAPAHEAEGMIRSLTDLRFIGPDIATLLVREAFVRQFRNRRALAGYVGLGGTPFSSGGSEREQGIGKDGNRRVRAAMVELAWMWLRWQPDSALSVWFRARVGAMGGRVRKIMIVALARKLLVALWRYVTDGVVPEGAKLKAA

SEQ ID NO: 224127 - protein, 339 aa, unidentified
MQTYAGIDLHSSNCYLAVIDEQQRRLYSKRLPNSLDHILTALQPFKEGLSGVVVESTYNWYWLVDGLQEKGYRMHLANPSAIRQYEGLKHTDDKWDAFWLAQLLMLGILPQGYIYPKAERPTRDLLRRRLLFVRHRTAHILSLQSMVARCCGRGISVNAIKKLTPPETAALFSDPQLGLTARFQVETISFLTQQIRSIEKAVLPQVKLRPEFEILLTIPGIGKILALTIMLEVGDIRRFAKAGNFASYCRCVKSQKLSNTKKKGEGNRKNGNRYLSWAYVEAGNFAVRYSARAQAFHQRKSAKTKNVVAIKALANKLARASFYILRDQCAFDEKRLYGG

SEQ ID NO: 224128 - protein, 347 aa, unidentified
MTKNKGRVVGLDVHPDSFAGAVVQGRDPASAMVLRTSTRVELERLEEWARRHTCTEDTLVLEASGNAFAVAARLRAIDREVEILDSHHAGKVGKVYCANDRVDAVKIARIYLSALSPIVWQPDQKTLERREIFSAYQAVVKESTRAKQQLRSMLNEHCVRLEKGFRLCHPYAIGRLLKVREWTPARRMLLQQLHGSLLAARARRTMLRRHMAQEIVAEEALLRLTRLCGINLITLYGVVAAVGDVRRFSHSKKLVAYLGLNPSVSQSGNFQGSGALKRHGRGALRALLIQSGKKLLEVNNPLQKWGLAVALWRGRNKAAVAVARKLCVALWHVLMTRDRCPGATGYS

SEQ ID NO: 224129 - protein, 350 aa, unidentified
MENNSVFGVDLSKDVFHIVEMSKGGRILRKEKLSREGFAERLNHFPKGCALYMEACGGSHHWSRVAKGHDIEVHQIAPHRVKPYVGHQKNDYRDAEAICEASQRQGMKFVSTKSSFQQEVEGLHRVRERRIGVRTALINQIRGLLCEHGIVLSVGATAVYSYKATLLDDTRLSPGLRMTICELYEELMHLDERILATERALERVSKENDTIKRHRTIPGVGALTASALAVLYGDATVFKNGRQFSASIGLVPKQHSTGGKQRLGNITKHGDGYVRRLLLMGGLSTLRATLRSTAPDNKRSLWIKRLYAEKGAKLTAVAIANKNARIAWKILTSGAMFHMVSMPATTADIQ

SEQ ID NO: 224130 - protein, 354 aa, unidentified
MKRNSKYVGLDVHQAMTAATVRTEGGRVVSRSVLETSERSIMEFFSGMRGTVHVAFEEGTQAQWLYDLLSPRVARVIVCDVRGLKRSGNKGDRVDADHLSEQLLRGGLRAVYHGSRDRADLKELTRAYRNLVEDSTRVMLRLKALFRARAIRTTGSGVYDPTKRAVWVAQLAGQGARLRAETLYAQLDLLRAQRKKAKAAMVTEAKRDPAWGVLETIPYFGPVRIAMLLATIGTPWRFRTKRNLWAYSGLAVVTRSSSDYEMFDGRVRRRSRRPLTRGLNRNHNRVLKAVFKGAATTATGKPGPLQDFYHGMLERGMREELARITLARKLAALTLRLLKTGEVFDPTQLSRPQT

SEQ ID NO: 224131 - protein, 358 aa, unidentified
MKYVGIDVHKKMCQAAILDDEGELLDETRFMNTPEGIEEFAQSLTTTRGEVKAVLESTGNLWIQVHDRLEEHGIPVALSSPTNSRLVSESRVKTDRTDARALARLHRAGVLSTSFVPSEEDRSRRELLRHRLRLVKNRTQVRNRIHALLDKQGLRVPYKTGFSGKAVAWMMGQSLGFMDDAILRSDLALLGVLDEQIGYVEEKLASLAVDDARVRLLMTMTGVDYFAAMLILAEMVTVDRFSCDKSFSAWMGLAPRVRQSGEKTWIGGVGGPGNRRMRWLMVQCAHSSCRHDPRLRRLFERHSRRKGGKSAVAAVAHEMARIMYFMLKRNEPYRGVNRGLWERKLKSMEKRALNGLRN

SEQ ID NO: 224132 - protein, 344 aa, unidentified
MANLNQFCNFTKIIGIDIAKSVFQIYSCDTQTGEITNVQVKRDKVLESFANCGKCLIGMEACGSSQYWARQLQALGHTVRLMDPKLVKPFVRHNKSDKADAEGIYHALVSGVRAVTVKTETERDIQTLLTMRALLVKQRTARINHVRGLLAEYGHVMPRNVNQFDNKVDECINSLEGDAVQLVINMMRDTVKSIRDDQDRIKTLQREISRLANQTRNAKHFLTVPGVGETIMAYMCVLLADPTQFSSARQFAAYLGLVPMHTGSGGKTVTTKIPGRCDKALRAVLVQGAHAVARSKCRTDWVKNILAKKPKKVAMVAIANRMARQCWAVASKGQDWRRMPVTAA

SEQ ID NO: 224133 - protein, 350 aa, unidentified
MEFFVGLDVSLDETHICVVDEGGRIIKETRAESEPEAIARAIRHKGRRIEHVGLETGNLSQWLYEGLVKEGFSVSVMEARHVRAAFAAMRVKTDRHDARGIAQLVRLGWFKRVHVKSLDAQETRALLTARTFLVEKVRATENSLRAALRNFGLKMGSVTRKTWEARARDLADGHQVLEGIVEAMLRVRALLLSELDAIDAQLTTLAKSDPVTRLLMTMPGVGVIVALSFRSAVDDPDRFPRGRDVGAWLGLTPRRWQSGKTDIVGRITKAGDARVRTMLFEAAASIIGRVRMMSPLKSWGLRIAKRTCMKKAIVAVSRKLATILLAMWKSGTAYWAKGHPPACAAEVAAA

SEQ ID NO: 224134 - protein, 286 aa, unidentified
MQTMYYIGLDVHKRTISYCVKDASGRVYAEGSLPATRFDLDRWMKTLPQPWTAAMEATVFTGWIYDHLQPHAAALKVAHPLMLRAIAAAKKKNDRIDASKICDCLRCDFLPECYMASTAIRERRRTLRYRNLLVRQMVQMKNKISGLLMEAGVSYNKQRLHRAGYFRELLATNSGIDEGLCSLLRLCRETVVRLQKTESAVVLSLERDSLLMDRVERLMTIPAVGPITALTWALEVGDAQRFSSIKKAISYCGLCGAEKSSANTVQRTPLSQQRNKHLQTTLIEAA

SEQ ID NO: 224135 - protein, 369 aa, unidentified
MDEVTDEPLYRDRVCGIDIGKAELYATIRVPSENNPARRAAETRSFATTRRGVLALADWLRCWQVPAVVMEATGDYWKGPFYRLEAEGLECVLADARQVKNLPGRPKRDPSDSSWLAACFERGAVRPCFVAAPEFRVIRLHTRYRRDLTEERTREKQRVEKLLESAAVKLSSVLTDIHGVTGRDIMNRLIAGQRDPKALAQLARARARRKITDLEHALEGAEFFAGEHAALLAAMLERIDQRTAQAGELTEVIERLLAPWEEQLAQAESMPGWGRRSAEDTLAETGPDMTRFPTPAHLASWGGRTPLDHQSGKRAGRARHKKGNRYLAAVTGETAVAAGKTRPAKAPATASSPAAAARTRPASRSATPS

SEQ ID NO: 224136 - protein, 340 aa, unidentified
MFTNFVGIDVSKTKFDLALIKELDKDHVFQGVFENTPKGIKLMVKFLEKEHEINLDETIFCMEFTGIYCRPLTSFFVKQNCKVWIEMPVNIIRSLGLQRGKNDRVDAHRIALYAYKNRDDIKLWKPQRDLILKLRDLLALRERLITAQNSLKTPIKELIAVGDTKAAEMVSKSCQKSMASIETEIGQIDKNLDDLIKNDPQLKELFRLAKSVPGVGKLTALFMICFTDEFSMYSNPKQLACYCGVAPFEHSSGSSVRGKTRVSHMANKVLKHMLHLGAMSVIQWDPELRDYYKRKVAQGKNKMLVINAVRNKIIHRLCAVIKRGYEYQSQNNFKERFVIS

SEQ ID NO: 224137 - protein, 340 aa, unidentified
MNYYTGIDVSLEYSSVCVLDSNGKIVREAKVLSEPEALIAWFGSLGFSVERIGLEAGPLSQWLYAAMKEAGLAVELLETRHVRDAFKAMPVKSDRNDARGIAQLMRLGWFRPVHCKSMEAQETRSLLTARKLVQSKLFDVKNSLRGILRGFGLKVCKTTELEFAGRIKELVAGHPHLEKIANSLLAVHEVLRNEFKKIEKQVNTIVRSDTRARLLMSTPGVGPIVALTYASAIDDPGRFKSSKRVGAHFGLTPKKYQSGETDYTGRVSKIGDSSVRTALYEAAHVILTKPLKGCSALKSWATRIARRAGMSKAKVALARKLAVIMHRMLVDGKPFNAALT

SEQ ID NO: 224138 - protein, 313 aa, unidentified
MIITPRCVGIDVSKHHLDIFDEGIGVSERVANTPHAITELVARWRCDALVVFEATGVYDLELRAALRAADIRFARINPARARDFARASGQRAKTDPIDARMLAAFARAMRPATEQVSTPARNALARLAKRRDQLVLMRAQEKNRRSEAGDRAMVERICRLIEVLDHEIAEIEADISALITAEPEIADDAQLMRSLPGVGPVACMQLIAQMPELGHVGPKQAAALAGLAPFNVDSGAYRGKRKIGGGRKRVRNALYMAALNAVRRADRFKAFYAKLRQAGKPAKLALMAVARKLLTILNAIMRDRKAYIPAQQS

SEQ ID NO: 224139 - protein, 343 aa, unidentified
MQIRSVGIDLGKTTFHLVALGDNGKVLLKKKFTQRQLITFTANLQTTLIGLEACAGAHFLGRALREQGHDVKLIPAQFVRPFVKSNKNDFLDAEAIAEAVDRQNMRFVPIKTDDQLDLQALHRVRDRLITRRTSVINQLRAFLLERGLVFAKSPAKLRERMPEILENAEEDLTPRMRNLLALLWNEWKGLEQQVVDLNHEVELIASSDAACLRLRQIPGIGPLVATAIVASIGNGAAFHKGREFAAWMGLVPKQYSTGGKAKLSGISKRGNRYLRKILIHGARAMVLRCKRERIPMGAWMTALETRAPRNVLIVAAANKLARIAWAVLSSGQDYRAVQEPVAA

SEQ ID NO: 224140 - protein, 394 aa, unidentified
MKLVGIDVGKNSHHFCVMDKETGEFNVTPSSFSNNKEGFDFLINSLKPYSKKSILLGMEDTGHYHVALLKFLLSNGYTVALINPKTTDLTRKMEGGITKNDKLDTITICDVLDTPERKKQYRITKVDRFDLYEQRQLTRHHHNLKEELNIYCNRLQKSIDLVFPEFNTLFGSKYGVVYMNLLKTFGSAEAIASTDIRTIRKCFEIKGKGGRISLTPEKLKECAKNSIGISSEVETIQIKHLVSQIMLIKEQIAEIDKKIEEFSIKNNSPILSIPGISHFSGTSILAELGDIGNYSKPSRIIKFAGVAPYHYESSQYNAQHTAITKKGSKYLRKTLYQVILPVINNNPVFKKYYRLKISQGKGHRCAQGHCIRKLLRIIYHLLETGQSFDPALLR

SEQ ID NO: 224141 - protein, 366 aa, unidentified
MKFYGVDLHSNNIQVSILDQDNLSLNARITLNSPAFQDFLSDLTRDDYVAVEASTNTFWFYAQVKDRVNQCLVINPFEFKLICHSAVKTDKRDSSKLAKLLRYSILQKDPSILPCVYVPDQKIIQLRSLFTSYEIVKKQKNMTKNRIHSLLKQNAIILDTKDIFKSSFREKILGSKVDEVALFQIQFFFHQLDETESQLKKLKTKILEQGKHFLNEIRLLTSIKGFSVITSLALISDIADINRFSNEKKLCSYLRTAPRIDSSNNKDKIGHVNKNSRTLTLNFLTQSILHFRSGSKKLDAFYTKKRKGKSAGKVRIAVMRKMIVIVFHILKKNELYFYTDKQNHQAKLLHYAHFLKHFSESAWLSS

SEQ ID NO: 224142 - protein, 313 aa, unidentified
MITEEVYVVGVDVSKATLELGCFSLTLPPSIPNTPAGFKILLKSITKCITPVHIICEATGPYHGPLVRFLHQAGIKVSVVNPRLTRDFARARGKLAKTDAIDALLLADYGRTMQPDPTTPPEEHVVLLDELVTRRAQLVEDRARERNRLEQASAPDVAASLRLHIRHLDEQIKKLLKRIAEVVEKHPSLKAKVSLLAQVHGIGTLTASVLLATLPELGTLSKNEVTALAGLAPFNRDSGAFRGKRSIHGGRIGVRCAIYMSALCASRGNPILKSFYQRLRAAGKPHKVALVAVMRKLLIYLNSLLKEHSLSPA

SEQ ID NO: 224143 - protein, 369 aa, unidentified
MGEYSEAFVAFDVAKIKHAVAVAEGGRTGEVRFLGEIDNREGPIERTVKKLAGRYGRLHFCFEAGPTGYGLYRQLQALGHDCMVVAPALIPKRRGERVKTNRRDAVTLARLHRAGELTGVWVPDAVHEAVRDLVRAREAAADDLRRKRQQFLSFLLRHSRIYSGSGHWTLAHRRWLANQAFEHAAQQIVFQDGIDAIEDAIARLRRLEEQLVTIVPSWSMAPVVEAYQAMRGASFLVAVTFAAEIGDVRRFDNPRQLMSFLGLVPAESSTGDTVRRKGLTLAGNRRARRALVEAAWTYRYPARVSETLRARLEGLPKAVRDIAWKAQIRLCARYRRLRATGKKLPVVVAAIAREMAAFLWAIGREVAPG

SEQ ID NO: 224144 - protein, 370 aa, unidentified
MRRRILYVGLDVHKNTIDVAITNNRSNGKVRSYGKIPSNLDALNNLISKLQEHATELRFVYEAGPCGYPIYRYLKSKDINCSVVAPSMIPKRSGDRIKTDRRDAINLVRLFRAGELTSIYVPTPVDEAIRDLIRCRDDIRRFERQARQRLLSFLLRHGHHYPGKKHWTKPFYTWLAGIKCPHRAQQIALQEYIEATNECGERIKRITQQIQAQVEQWDRWPHVKAYQAMRGVSLMVAATVVAEIGDMNRFANPKQLMAYLGLIPSEHSSGKSVRRGSITKTGNGHVRRVLIEAAWSYKLPARVCKELLKRQKGLPKSIRDISWKAQTRLCARYRRLMARGKSRQTVITAIARELGAFMWAIDKQVKATIG

SEQ ID NO: 224145 - protein, 408 aa, unidentified
MDPVLQDYSRFGGVDWGGHEHQLCVVDGAGAKELELRVAHDVAGLDQLVQALARLGEGLPVAVERAEGLLVEHLQAHGHPVFPVSPRIAARARERYRVAPIKDDRFDAFVLADTLRHEHRHWRSLAVPSPLLAELRALTRDRDRLLETQQATEAQLRSILESYHPAPARLFSSMDRQIALAFVADYPTPAVASRVRTTRMAGFLRRNGYTGRVPAQVLAERMRANLLSGSAGTVAGKAHSAKTFAHLLGAMNEALAEFDDAIASVVAEHPDAPIFESFPGVGPILTAVLLAEIGEDRGRFPTPEALLAESGLAPVTRSSGRSHSVRFRYAANSRLREAAMWWAFNSLKTSPWAAAAFREARDQRGQRYHRALRGLAARWMRVGWRCWRDCTAYDAALHTGAALPERSA

SEQ ID NO: 224146 - protein, 308 aa, unidentified
MSQSPVYIGVDVSSDSLAVHGPDLDPVYLNTPEGVAKLIKAFPKDAHLVLEATGGYEMPLVLAFHERRLAVSVVNGRHVRDFAKAMGRLAKTDKVDAATIAQFALAKGLVPDPVPCAAQLRLAELVARRLQLVELRLAESNRLIHLHQADLRADLKRHLAFLDRAIAKIERLVAQAIAADSDLNAKCERLREVQGVGLITAATLLALMPELGSLCRARAASLAGVAPFARDSGQFKGKRCIWGGRAAVRRVLYMATLTAIVRNRILRAFYLRLRKAGKPAKLALTAVMRKLVSLLNHMLKNPNFSLAT

SEQ ID NO: 224147 - protein, 368 aa, unidentified
MEEFISSFVGLDVHKDSIAIAVAEDGREAPRFVGTVGYEIKQLLKALHSAGKPESQLVVYEAGPCGYGLVRQLRSRGYCCEVVAASKLSRRPGDRIKTDRRDALTLARLARSGDLVRVAVPDERDEAIRDLSRAREDALRARLKCRQQLKALLLRHGRRYTGRSSWNPAHERFLSTISFSQPAQDIAFAEYRLAVREGHDRVERLTQALRTQTEQWRMKGLVAALSSLRGIDFIAAVTLVAEIGDFRRFSHPSELMGFLGLVPSEYSTGERQRQGDITKTGNSHARRVLVEAAWNYRFQARLSRLMHIRQDGQPKAIRDIAWRAQLRLCHRFRRLRSRKLHQNKICVAIARELAGFIWAIAQQVTVAA

SEQ ID NO: 224148 - protein, 355 aa, unidentified
MSQEKYIGMDVHAATISAAVKNAEGQLLMECVLETKAATILEFIQGLRGTLALTFEEGTSATWLHDLLQPHVNRLVVCDPRKNALLRDGNQNDRVDARNLAELLRTNQVKPVYHGNHGTRALKELGRSYLTLTRDSTRVMNRIKSVYRSWAIPCAGTSVYSPRHRAQWLAQLVEPGVRIRAEHLYEQLDSLQPVRQAARRELLRESRKHAAVKLLRQIPAIGPIRSALLVALLQTPHRFRSKRQLWAYSGFAVQTYDSGEFRMVRGKLQRNRERITVRGLNRNHNHDLKNLLKGAASSAMQRPGPLQDFYASLVKKGMRPSMARLTLARKMAAITLIMWKKGVSFDPKQLQPQAA

SEQ ID NO: 224149 - protein, 406 aa, unidentified
MNYLGIDVSKANARYVLIDNDGEQATKSFTLTNDQKSFTQIIERFKELKLTTDTLLIGIEATGIWWENLYCFLTEQQFKVIVLNPHQTNKFREALRYKAKTDDIDACVIAGLLRSGKYAASYIPEETIQVLREIVKLRHQLVTNRQNFERQAQALLGLLFPEYQKTAIKNPFTIASLAILKAYPTAKHLAESKPKNIEKIVRSIVGNNFNIAEIKTLIETAQHSIYSGRAKEARGLNLNILLTHVETLHHSIAQLDKRIDDILSPQNPDDALSFPGANLLSIPGIGPKTLAAFLSIAGSDGSAYPDGKSIVGYIGFFPKIYESGETRRDNVISKRGPAYIRRALYIAAVAGLKHNAEFKALYDRKVSQGKTAKQALICIAKKLAHLCLSMLKSGESYNPTRVFMPV

SEQ ID NO: 224150 - protein, 367 aa, unidentified
MKKSSTAAAHKIGKVEGRRLTVGLDLGDRSSWYCVLDEAGEVLLERKLATTPKAMKEIFGGMPGSRIALETGMHSPWVSRLLSELGHEVIVAHARNVRLIGESRRKDDRFDARTLARLARIDPELLGPVQHRSRQAQADLTVIRARAGLVRTRTALINTARGLTKSYGERLRGCSPRKMNRELAQGLSPELQGALQPLLEEIESLSERIREYNERVKQIAQESYPQVARLEQVKGVGTLIALTYVLTLEDPRRFRKSRDVGCYLGLRPGRRNSGQSEPQLHISKEGDPYLRTMMVQSAHHILGPFGADSDLRRWGLRLAERGGKNGKKRAVVAVARKLAILLHRWWVSGEIYEPLRNRRQATLPAAA

SEQ ID NO: 224151 - protein, 374 aa, unidentified
MGEHIVCGVDAHDATLDCRIGVDREAPERRRFENTRDGRRELIEQLELLSQAHGQAKVLVGYEASPVGFGLYDDCRDDGIGCVILAPTKIARSVGDRKRKSDDRDATRIFEALRGHVLAGNELPAIWIPDEKTRDDRERVRGRLDLTEKLTAVKAQVRMLLKRNRVEKPEEVGASWTVPFRAWLASLKLKAGAQVCLSSLLRQAKALDEEIRILDRQLMELSQEQRYREPTEALCAIWGVGLLTAMVYLTEMGDLSRFRNRKQIGAFLGLVPSSYESGETDDHKGHITHQGPSRVRKVLCQGAWGRVRSDPEEAAVYRRIVERNPKHKKIAVVGCMRRLGILMWHVGLEAQRRAGCFAVESQGRPEGEAAVCRV

SEQ ID NO: 224152 - protein, 380 aa, unidentified
MKNQIIHLGLDVDDQAFHFCFINSLTGETTQGSCRPQARALQKALATKVKDLSQIRACYEAGYLGFSLQRELKSLGIACEVVASSLIPTLPGHRVKTDRLDSEKLALYYQKELLTTVSAPTQEEEAVRDLIRTRRFFMQQLADTKRYLLALCRRHHLKYRENSSSKKSHWTKMHRAWLKRKVEEVELPTLKTNLSFILLEVNRLELKIDFYNQEIEKLSETSEYQGYVQALRCFRGINTLTAMGIVSEIREAKRFSHPQKLTSYAGLDVREYSSGGKQNQFSITKMGNSFLRTMVVESAQFVTRRPQLSKDLIKRRQDASPEEVEIADRCMQRLYKKATHLYYRSKPLNKVKVACAREFLSFIWESMRYVENQKSLSFEK

SEQ ID NO: 224153 - protein, 310 aa, unidentified
MEKLFAGIDISKSSLDVALSHSKEIKRFTNDEDGITELARYLSGYPLELVVMEATGGLEKLVAAALTEAGIATVVVNPRQARNYAKAIGLLAKTDKIDARTLARFAQDIHPEVRPLPGEQTLQIKAAMARRRQVMGMITAEKNRLQSADSSVRPLIEEHIIWLKGQLKDIDRNLDNQIRSSPIWRAKETLLRSVPGVGPVVSRTLIGSLCELGELNRKQVAALVGVAPFNRDSGTLRGKRAVWGGRAAIRGPLYMAALVATGCNPVIGAFYQHLLAAGKSKKVALTACMRKLITILNAMLRDNRAWQYAE

SEQ ID NO: 224154 - protein, 364 aa, unidentified
MKKSSKKHQGGTVAESKPGQVVGLDLGDRHSRYCMWSMSGEEMEEGRIQTTAASMEKHFGSEPRMRVALEAGTHSPWVSRLLQSYGHQVIVANPRKIPTLTKSESKNDRNDAKQLARMAAFDPKLLHPIEHRSLERQQDLNLIHTRSVLVRARTMLINSARGLVKSAGQRLPACSSEVFPEKVPAAVPPALKAACRPLLEQITQMNKTIAAMDKQIDKLDKKYPEITVLRTVPGVGPVVAACYVLTLGSPQAMETNRQAGAYLGLRPRQQQSGDCDPQCRITRTGNTYLRSLLVQSAQYILGRFCPDSELRRWGLKLAASGGKRGKKRALVAVARKLAVVLLSMWRNRKNFVPFPQPAAQLATA

SEQ ID NO: 224155 - protein, 408 aa, unidentified
MADKIAGIDVHKKVLMVVVMDARTPESKPERRRFATMPGELRRLSTWLKQLGVEEAVMESTAQYWRSVWLELEPHMCLHLAQAFSNRAPRGRKHDFKDAERLVRRLIAKELILSFVPNGEQRIWRNLTRMKLQLVRDRVRLQSQIECLLEEMRIKLSVVVADLLGSSGLRILHALANGETDAKSLALLGDDRLKCTEEQLIEALTGESHPMHRQMLALELERLRLLDEQIAKLNNLIAQAMKPHQDAVMRLAEVPGLGIDSAQQIIAEVGVTASTFPSAAEFTSWVGTCPGNQESAEENSSSRSAKGNKYMRRVLNQAAHAAARSKGTHFQAVFRRLLPRLGYKSAVWAIAHRLCRLVWKILHGGIRYVEQGIGVEPKLLIYRAQSLAKQLRKFGYNVQITPANRAPA

SEQ ID NO: 224156 - protein, 422 aa, unidentified
MNAKLIETKPKLFIGIDWADKEHVLHLISSENNKHSTEKLQQQPEAIAEWVKQLRQRFPEHRLMVILEQSRGALFAALAEYSELELYPVNPKQLSRYRDSFFPSGGKNDPVDAKLLANFLKERHEGWRQWRPDDLCTRQMSQYSELRRKLVEERKRLLLKLQSTLKEYFPQALALFKTEMQDEQNLDLLKRWPSLQSLKRVKPQTLRRFLKEHRVKIEERQTEFIESVRSAKPLTKDQAIVKANGLYVQSLVQQIRVLNQSIGQFDEQLKELIRVHPDAEIFKSLPGAGEALVPRLIAAMGSDRDRYQSAKDVQCRVGIAPLTIQSGRSLQVQKRIACPKFLRQTFHEFADHARKWSPWAKAFYQMKRSQGMKHHAAIRALAYKWMRIIFRLWKAKTIYNENQYIQRLKATGSPIVNFLENS

SEQ ID NO: 224157 - protein, 376 aa, unidentified
MDRATTAPADRLFCAVELSKTSWLLGIQFPDHQKASVYPIKGGDSEGLMAKLVAARDRWAKVSGKKPSIILCYEAGYDAFWLARFLKGHGIDCLVVDSASMQVNRRSRRAKTDRIDLGKLLRALIAWCGGERHVWSVVRIPSVDEEDLRRSHRERSRLITERTAHINRIKGLLFAQGIRGINVKARYKTLQIDKLVTGEGRPLSPRLAQEITREIERLGLVQQQIAAIEHERDESPTTCKQTEKKRAQLLLLKGIGPTGSAVMAREVYYRQFSNRRQVAGFLGLATSPYDSGQTERSQGISRAGSGPVRATMIQMAWLWIKHQPKSAIAQWFVQRTEGQNGRIKRIMIVAVARKLAIALWRYLEQGLVPQGATLTR

SEQ ID NO: 224158 - protein, 440 aa, unidentified
MTRRCIGLDVHREFAQIAIWEDGVVRQAGRIATTPEALRLFANSLAASDEVALEATGNTHAIVKLLRRRVARVVVSNPHKTRAIAESRVKTDKVDAQILAQLLAADYLPEVWVADEDTQARRRQVARRAHLVRQRTRLKNQVQAILHRNLVPRCPAADLFGIKGRGWLAEQELPADERQAVVALLRQLDFHGHELRLIDAELARIALGCQDTKRLMTIPGVDVTVAMSITAAVGTFSRFESPNKLVRYLGLNPRVKQSGEQPAAHGRIAKQGRAHARGMLVEAAWVAVKTPGPLRAFFERVRARRGMQIAVVATARKLAVLCWHMITRGQDYAFARPSLTAKKLRALELKAGLPSHRGQKGPAAAYSLRQVRSREKQLAEHAERAYARQVADWQAKAPKTGVAAATGARLSRPPAGQAARQDSAPDPALRSGVDHAHTAA

SEQ ID NO: 224159 - protein, 384 aa, unidentified
MNRIVKIGMDVHSTNYTLCAMEPVLDGEDRIFANIKVTPDYKNVIQFISKLKNKLGASDTYSIECGYEAGCLGYSLYHQLTDAGVKCTILAPTTMLTPQGKRIKTDKRDALMIAQCLSYGGYHAVHVPDEKDDAIKEYLRMRDDHKLVLKKIKQQINAFCLRHGHFYDGNKWTIKHREWLKTLKLSDLYRETLDEYMTTYEEQESKIERLDRRIEELASDSAYKEKVKKLGCFLGIKTHTALSLIVETGDFKRFAKGNTYAAFLGLAPGESSSGDNVNRTGISKAGNSHLRTLLIEGARGICKGKIGHKSKDLRLRQAGNSAEVIAYADKANVRLRSRYYRFMRHEKKKNVAVAAVARELACFIWGMMTDNISIVTERGKQNVA

SEQ ID NO: 224160 - protein, 375 aa, unidentified
MKAKVRFLGLDVHAATIAVAVAEPDGSVRSLGTIANRAESIRALVKKLGPVEQLRACYEAGPTGYVLYWQLAELGVACEVIAPTLVPMKAGDRVKTDRRDAEKLARSYRSDDLTAVWVPDEGSEALRDLVRTREAAKQDQLRARHRLSKFLLRTGRRPAPGMKSWTAPYMAWVRQVQFAQPAQQATLLDYLHEVDHQGERVKRLEQAITEAIKLASPQVQEVVKGLQALRGIAEISAVTIVSELGQVSRFESARQLMAYSGAVPSEDSSGERKRRGSITKTGNAHLRRIVVEAAWSYRHRPATGPRLRKRQEGVPEPIKEIAWKAQHRLHKRYLRLSAAGKEQRKIITAVGRELLGFIWAIAVKAEMSGKQQITA

SEQ ID NO: 224161 - protein, 430 aa, unidentified
MEVIYPKACGVDVHKSFIVAVICDSTSVKPQYLRKRFSTFNNSLINFRNWLLANDCHNVCMESTGKYYVPVYNALEGHISNVVVANPKWVACIKGEKDDNKDAKWIADLFKLGIVRSSFIPEKDIRILRELTRYLYKLTNMRTSEKNRFTNALTVGNCKLDMVFSDIFGKTSSAIINTILSQNEYNDKDILKNIDKHCKSSNEDILNSINGISWQDAQKQRINIIQKHIDYLDKAIKAVREIIDSIIAPYESAITLLCSIPGIDRKSAITIISEIGTDMSQFSSHYRLASWAGLAPGCNESAGKKKSVKISRAGVYLKPALVEIAHCAVKDKNNPYYANKFNVLSKRRGKKRAYIAIARKILVAIYHMLSTGEFFNPSDASKVETSDKDKIKFTKNNFMQSTKQLLSLGLTVDELQTFITSKISDLTPVV

SEQ ID NO: 224162 - protein, 340 aa, unidentified
MNINTIGLDIAKTIFHLVGLDKNGKQVQKKKLRRGQVLAYFANLPPCIIAIEGCGSAFYWQRELTKQGHRVKLLPAQYVKAHLRGNKNDYNDALAIAEASRVPELREVTPKTIEQQSIQALHRLRERTVNDRTSLSNQIRGLLAEFGIIFNQGINAVKKGLPAVLEDAENGLPHAFRDALGLKYLQFGQLDDLVKELNKLINQASEAHKEIALLQSIPGFGNLVSSSYYSVVGDGKAFAKSRDASASIGVVPRQHSTGGKTVLQGISKRGDKYLRKMLINGARSVVIHAHKKDDALSIWVTRLVEKRGKNKATVALANKLARIAWAVTVSGKPYQTNYAL

SEQ ID NO: 224163 - protein, 462 aa, unidentified
MTKRRKKAKSRSFQITKLPAQLQHINLNAAGIDIGSERHLVAVPEGRDEVSVREFGSFTVDLEALAAWLKTCGVTTVAMESTGVYWIPLFELLERRGFEVKLVDARHVKNVSGRKSDVLDCQWLQQLHTYGLLAGAFRPPDEVCVLRSYLRQREMLRQVASQHIQHMQKALQQMNLLLHNVVSDITGVTGMKIIKAILAGERDPRVLASNRDDRCKQSRATIAKSLVGNYRAEHLFALRQALDLYAVYQAKIADCDEAIIKQLEKKPDLSDDQPPSGDRYVQARDRVRGGIDVRELLFKKSGVDLFAIPGLAADHLLTLASEVGFDMSPWKTEKHFSSWLGVCPGTKRSGGKTLDSKTKRNPNRAAQAFRMAAASLSRSRTALGAFYRRLKARRSGAQAVTATAHKLARIYYAMLTKGANYIELGQQAYEQRYKERRIAHLKIQAKSLGFQLVACTADESSF

SEQ ID NO: 224164 - protein, 332 aa, unidentified
MKFIYYLGCDVSKNELDFAVFKQNVFVLHKEIKNEPKSIDNFFKELKELPDFELSNTIVCMEHTGIYNNPLLVYLDKKKGNICLETALQIKKSQGSVRGKNDKIDSIRIAEYAYTFRDKIKLWQPKREVIQRLATLAGHRDRIINVKNSIEVPLKESAKFVLKSIQKESINLFSKTLNAIEDDLKKIEKAIQEVIKSDEELSRLFGLITSVQGIGPVTAIGVIITTNEFKDITEAKKYACYAGVAPFVRESGIFRGKGRVSKLANMNMKSLFHMAALTAVRVNEDLKKYYERKTQEEKKNKMLVLNAVRNKLIHRIFACVNQNRKYNKTYTA

SEQ ID NO: 224165 - protein, 340 aa, unidentified
MNKSLDFDPCGIEVSARTLVVERRRPGQSDAVREFANTAAGHQALLGWLQSAGRALRVCLEATGLYGLDLALALEAAGVAVMVANPRAVRHFAQAMMKRSKTDRLDAQVLTEYAARLPFRPWRPPSPAALKLLAVARRLEDLTEMHAAEKNRLHAASLSAALPAILRRDVQRSLENLERAVQRLTRAAQEFIVADPLLAERYALLLSIPGLGPTSALHVLAELLLLAPDLEVRQWVAYAGLDPRQYTSGSSVHKRARISKAGNKHLRRALYMPALVASQHDPHLGGFYQRLLARGKTKMQDLVAVMRKLLHAIFGIFKHHHPYDGAKLFPYPIPQEVIAT

SEQ ID NO: 224166 - protein, 315 aa, unidentified
MKKISTAASHNIGKVEGQRLTVGLDVGDRWSWYCVLDEAGEVLLEQKVATTPKALKEMFGKMPCSRVALETGMHSPWMSRRLSELGHEVIVAHARNVRLIGESRRKDDRLDARTLARLARIDPQLLAPVKHRSAKAQADLTVIRARAGLVRARTALINTARGLTKSYGERLRGCNSRNMNAEQAQGLSPELQAALGPLLAEIESLSARIREYNERIERLSQESYPEVALLKQVKGVGTLIALTYLLTLEDAHRFGKSRDVAAIWGCSQDGGTRGRASRNCISPRKETRIYERCWYKARTIFWGRLEPTAICGAGV

SEQ ID NO: 224167 - protein, 340 aa, unidentified
MFVHYKVMQNFYFIGIDVSKKKLDICVMSKSKVLKEEQVSNHPQAIASVIAGLKEELSMSNDSFIICAEHTGQYTYPLMCACNSVGCKLWLENPSQIKYCSGVTRGKNDKVDARRIAEYAMRFLDKAKPYKRPTEELVRLKQLEAERSLYLTDLAKYKAQLTDQDGFMEDKIFKRKARRLKAMINSLEKTLKEIAAEMADVIDASEELSRQIKLLKSVEGVGSVVAMNMIIATEAFTRFDNPRQFNCYVGVAPFAYTSGTSQHSRNRVSQRAVKYIKCLLHMAAVAIAHKKTGDMKTYFERKVAEGKNKMTVLNAVRAKLVARMFAVIRNNRVYQPILSV

SEQ ID NO: 224168 - protein, 415 aa, unidentified
MSLGGYIMQVTFGIDVSKSNSTVCELIGESKNELTITNDRPGFIQLLHELAAFSKHPQIIFEATGVYSRRLQAFLEDYGYEYVVLNPLKAKKEMNMGLRYNKTDKTDAYHLALIQRLYRHPVNQSESQTYKQLNALSRFYDQLTSDLVIAKNRLHQALQSTFPEIENLFSIARGKNYWQIVARYPHCDLVRKDDKKQIINWLMKLKGIAFNHAQRTTDKLIELAHLAYPVVSCSDIEVQQAQYYARRLLNLSNQRQRIITKMVKLAKTLPNHDLENLESIPGFAQTTAVRVLAELGDLRRFSNPNKINAFIGIDPGRYQSGEMDSNLSITKHGNAVARKLLYRAIGQIDNAAKTNPCHIADYYESKKLSSQTKGFKKIAIASIHKLIRTIYALIINDQPYDYNVATHNQKGFSRN

SEQ ID NO: 224169 - protein, 338 aa, unidentified
MNYVGIDHHRQYSHITWLDEKGEVVKSGRVGNLRRELEEFLQGARDVKAVIEAGRSSYTMVDVLADLGIETTIAHPKDVKAIAKAKVKTDERDSYKLAHLLRTGYIPEVHKRSRENRSSQRVLRQRAFYVGKQTAVKNWLRALLAQQGEEIRLEVERVENLFTEKGMKVLKGLALPEREAKMVGALLKTYHHLEERINETNALVKELYEKMPYARLIQTVPGFGVFLSVLVAVEIEDLGRFEDVSKLHAYAGVIPSTHSSGDRSYHGKIIKEGNRWLRWAAVEAVRPALRADFDIRCFYDRLKRRKGANSAKVATARRLLAIIYRMLKENRPYIPHKR

SEQ ID NO: 224170 - protein, 433 aa, unidentified
MLFRAAMPGAEYILKGDIQLARILNILNKSCCGIDVHKKTVVACVLKADEFGEYTHKIKTFSTMTCELEKLHACLKEQNCEKVAMESTGVYWIPVFNILEQDFDIVLSNARQIKNVPGRKTDPSDSRWIAKLLALGLVNGSFIPPKDIRELREMTRYRSKLVSMRTSEKDRAHNILETCNIKLGCVATDIFGVSGMRIMKALIYNTEEASPEELAQLAKGRLRKKIPELVKALTGNMDAHHASMLEMILDHLAYINEKIEELDRRIEEKCKPYQQEIELLDTIPGVDKISAQAIVAEIGVDMSVFETPERLASWAGLSPGNNESAGKKKSTRTRSGNQYIKTVTCQCAHAAAHTKDTYLSAKFYSIKARRGAKKAAIATARHIMVAAFHIIQNKESYKELGGDYLLKLRPKNIAHSMKKRLESLGYTVIENVI

SEQ ID NO: 224171 - protein, 407 aa, unidentified
MELKPMYKRVIGLDVHQAQITACALIEAEDGTTRIERHQFGAFQRDRRALAEWAASLCPDVVVMESTGIYWKSPYAALESVGIRAQVVNARHVKNVPGRKTDVGDAQWLATLARAGLLRGSFVPPNVMRELRLIARQRQKLGRQLASEKNRMHKLLVDGGIRLGVVVSDIHGQSARAMVKAVIAGKSPKEVLSLASGRLKATREQLFDALQGELTSSHRFVLAELMAHIEEIEQRITRFDRRLLDGLAGETNTLALLQTLPGVDLIGAAMLLVEIGSDMTAFGGADRLASWAGVCPGNDESAGKRKSGHMRKGNPYVRRLLCEFAHAAARTASVFKSKFQALLVRRGHKRAIVAIAHKLLRTIYFMLHRRQHYRDSTIDYEALTVKRNASRWIKKLRQFGFIKTAAA

SEQ ID NO: 224172 - protein, 346 aa, unidentified
MNKITMIGVDLAKDVFQVHGVDADGHPVLRRQLKRAQVLPFFAKLPPCTVVMEACGTAHYWAREIGALGHEARLVPPAYARPFAKRGKSDAIDAEAVCEAGGRPTMRFVPVKNLEAQALATLHRTRALLDKQRTMLVNALRAHLAEFGFVAGKGIHKVPDLAQLVEEASAERLPEIARGVLRGLLHMIAQVNAQLGILEKELRIFHRGNAASQRLETAPGIGLITATALTALTPDAATFKNGRHFAAWLGITPRQDSTGGKTRLLGISKAGDGYLRRLLVLGATSLLRSLQGKTTRLALWVQKLLARRPKKVVIVALANKLARIAWAIMAKGETYRAGMIEAEAAA

SEQ ID NO: 224173 - protein, 352 aa, unidentified
MYYVGADLHKEQTWFYVMDENGTKIDSKSIPNSQDSLKSYFVTIPTPFTLAVEATYNWYFFIDMAEKFAQTAYLANSYELKAFAKRHKKTDKIDARLIADILRKGFLPKVFIPNQSIRQLKELLHHRINLVRDRSRNIFRLKNTLDKLGADSSGDFTTVKRLQMIPVKTLPEHSQYVLTGYIEQIIQLSQRILKMKTYLRNKLLEDKEIQNLITIDGLDYFSAALIKSEIVDINRFASFGRLCAYAGLAPKVSQSGDKAAYHGALMTNRRKDLQWILLETVFHFIRGSSERMSRYEELKIRKGANTAKVIMARQMLKVIYHVLKEQRPYYQDVTVTQEKQIQSVAAAALQGV

SEQ ID NO: 224174 - protein, 343 aa, unidentified
MSITTIGLDTAKSVFQIHGVNEAGKVELKRKVRRGDLIAFFEKQPRCTVVMEACGAAHHWARILSGLGHTVKLLAPEAVKPFVKKGKKNDAADAAAICEAASRPDVKFVPVKTVEQQGILALHTVRSLLVKQQTMLANAIRGLASEFGHVVPKGLNNLEPLVDLVDADEDMPKQARQAIAELHERFGELAKGIQSCEAEIVKHARNDVTARRLATIPGIGPITASLIAATVVDISLFNTARQFAAWLGLVPRQSSTAGKARLSRITKAGNKEIRKLLVLGATSMVGRAEGWHSALGAWLRDILQRRPVRLVTVALANKMARIAWAVMTRDEVYRPQGGVAAKA

SEQ ID NO: 224175 - protein, 341 aa, unidentified
MNAFVGLDVSQKNTAICIVDQNGTKLCQSMVRTCPLTICEFLVTRGFDKAKIGMETGPLAVWLYHSLRDRGLDIDCIHARHVHAALSMQLNKTDQNDAFGIARLVQSGWYRPTHVKSLDCHQIRLTLTAREKLVRIKVTLVNQIRGLLKTFGVVLPMGRNSVFERAVLDASPSITAVKPVVLMLIQTWRDVSKQIRELDKQLASYAKNDSVCTILKSIPGVGTLTAISFKTAVDDPARFRSVNDVGAFLGLTPKKYQSGEVDRNGGISKHGSRQTRSLLYEAASCLLTRYGKDTTLARWGERLRQKLGFKNAVVAVARKLSALMLSMWKSGEFFRHESVPV

SEQ ID NO: 224176 - protein, 405 aa, unidentified
MEVIYPRCCGLDIHKKTVVACIITPEEKEIRTFSTMTEDILAMVDWIKSKGCTHVAMESTGSYWKPIYNILEIEELNPMVVNANHIKNVPGRKTDVKDAEWIAGLLQHGLLQGSYIPSREQRELRELIRYRRSLIEERAREINRIQKVLEGANIKLSSVVTDIMGKSSRAIIEAIINGEEDTVVLSELAQKRLKNKKEELKKALKGLIGPHQRLILKAQLEHIDFLDEQIGLLDEEIKRRMLPFEEDLERLDTIPGVGRRTAEHIIAEIGKNMDQFPSAAHLCSWAGVAPGNNESAGKRKSGRTRKGNEKLRSVLVEAARAAAHTKDTYLSAQYHRIAARRGANRAAVAVAHSILTIVYYLLKRKERYNELGVNYYEERKKEAIVKQSIKKLESLGLKVIVENAV

SEQ ID NO: 224177 - protein, 343 aa, unidentified
MNEVITIGVDLAKNVFQVHGIDGLGAVIIGRQLRRSQMLPFFKKQPPCLVGMEACATAHHWARQLVALGHAVKLMPPKYVKPYVKRNKNDMADAEAICEAVTRPTMRFVEIKARDQQSVLMLHRTRQLFVRQRTTLINALRAHLAEFGIVAGVGRNGLERLLKVIEDGEDDRVPAAARDCLLALRDQLEMVKGQVLDADRHILAWHRSSEVSQRLDDIPGVGPLIATALVASVPDPHVFKSGRDLAAWIGLVPKQNSTGGKDRLGHISKAGNRYLRMLLVVGALSVIRRAKQVGYTRRPWLTKLLQRRSTKIAAIALANKIARTAWAMMAHGTFYQEPQSEVV

SEQ ID NO: 224178 - protein, 404 aa, unidentified
MYNAVGIDVSKGKSTIAVLQPGGVIVRKPFDVFHTSQSLKELSNYLASLEGDTRIVMECTGRYHESMANSLSNAGFFVTVVNPHLIKNFGNNTLRKVKSDPADAKKIARYTLDNWAELRQYSCMDNTRNQLKTLNSQFSFFMKQKVAAKANLIALLDNTYPGVNKLFNSPAREDGSEKWVDYAYSFWHVDCVRKTGLKAFTVRYEAFCRKHHYIYQPSKPEELFNASKELVAVFPKETSYKLLIQQSIQQLNLASAHIEQLRREMNALASTLPEYEVVMGMYGVGKTYGPQLIAEIGDVSRFTHREAITAFAGVDPGVEQSGQHNSKSNKASKCGTGRLRKTLFQVMTTLLQNAPENEPVYQSLNRKRSEGKPYYVYMTAGANKFLRIYYGKVKAHLRSLEQNE

SEQ ID NO: 224179 - protein, 457 aa, unidentified
MPARGKQPRSGAGSPAHTIDPNAAGVDIGATEIYIAVPTDRDPHPVRKFSTFTEDLLAAADWLKQCGIKTVAMESTGVYWIPLFQILEAGGMKVCLVNARHVKNVPGRKSDVCDCQWLQHLHSAGLLRASFRPEQQICAVRSLVRYRDSLVQLSAMHLQHMQKALDQMNLQLHHVISDLGGKTGMAIVEAIVAGERDPHQLATLRDPRTRASKETIAKSLVGDYRREHLFTLRQSLTGFRQNGQLIADCDVEIESLLKEFSSGDGPGAEAVPEPQAELKRKPRRNEMNFAPRTQLHRIFAVDLTEIPGIDTLTAHTLFSEVGRDLSKFANVAAFTSWMGLCPDNRVSGGKILHAQTRRVNNRVAKALRMAAQALSRSHGWMGQYYRRMRAKLGGPKAITATAHKLARIIYHLLTTGQAYDETIFAQQEAQNNQRNEKRLRHQARKLGFELTLIPTEV

SEQ ID NO: 224180 - protein, 405 aa, unidentified
MAVMIGVDPHKGSHTAVAIGSDEEPLGKVRVEASPGQAEDLLTWAARWPERTWAVEGAAGLGRLLAQQLVAAGELVLDVQPKLAARVRLLQAGDTGKSDPHDAASVAVAALRSRACRPVAAEDHTVVLKIWARRHRDLARARNQVACRLHAVLCELVPGGVRKQITAGQATSFLERVTPSGLIGAARAELAAQFLEDLRRIDGQLREANKKLAAAVRASGTTVTEVFGIGPVNAGTIIGDVADVSRFPTRDRFAAYNGTAPTEVSSGGRKVYRLSLRGNRRINHAIHMAAVTQIRHSHSDGRAYYEKKIAEGKTRKEALRCLKRRISDAIYARLRADAGNITRPAAQGPGGQKGNGSDSSAAGSHPERRLFGQATPGPSATLRPPARTPRQQPRTRRPKDLEKTR

SEQ ID NO: 224181 - protein, 414 aa, unidentified
MKQVLYVGLDVHKESIVVATAPQGDTEAQLYGKIGGTLDALDKLIKKMEKPDLELRFVYEAGPCGYVIYRHLKKRDYECQVIAPSLIPTKASDRVKTDRRDARQLARLFRAGELTAIYVPDEEDEAVRDLVRARDRTMIDQGKARQRLKGFLLRLGHRYLGRGNWSAEHLLYLASVKLSHAAQQIAFQEYLEAITVATERLERLTKAMEAALTAWKREPVVRAMMSLRGVALINGMTLVAEAGDLTRFDSPSQLMSYFGLTPSEYSSGEKRQQGAITKAGNGACRRALVEAAHHYRIAPRVTPRMQERQEGQSKEVRAIALKAQQRLHSRYRLLTGRHKRTVIVVAALARELCGFVWAIACQVSAPDKVQWRQKAIVKENMADVPNTPAQPNTSKLATATKKQYPLNSEKVFKK

SEQ ID NO: 224182 - protein, 360 aa, unidentified
MRIIGCDLHAGQQTLAMLDTETGEVVNRTLMHEGNQVREFYSDLSRPVLVGIEAIGPMQWFLDLLAQLGIECRVGDAAKIRAAEPRKQKHDRRDAELILKLLVEKRFPAIWMPSKELLDLRALLLHRHQWVRLRTQVQNALQAIALANGLRRGPGLWSYDGQAKIAFLPLPPHASLRRSALQAMYGHMEEEIEKLTVQVAEQVEHRSGAQLLMTHPGVGPVTALATDVFLGDAQRFDDGKSLASYVGLIPEERSSGRRRRLGRISKQGNPLLRFLWNEAGAHAARRDPELRRFYRRKLAQKGLGKARVAVARKLGIRLWIMLRDQIDYQEFCRRGQKQSGAACAGMPEVGNGANRHRPVE

SEQ ID NO: 224183 - protein, 347 aa, unidentified
MTDILKQVAGIDVAQNELVVSLGRISQSLEIKIYASKTFANKISGFTALEVWIKKHTDPNIAVRLVMEATGVYHEKLAYYLSDQAHQVSIVLPNKISNYFRTLDIKTITDKTASQAICRFGLERKLDVWQKPKKIFRDIKQLTRERDQLIADRTVLKNQLHAERAEAFPNESSIKRITKRIQLVNKQELEIKAEMAELVKKDTALVSKINKIITIPGVGKLTAVIVLAETNGFELIRNKKQLVSYAGLDVRLKESGTSVKSKPKISKKGNRHLRKAMYMPALAAMRVNEQHKAVFVRLVSKHGIKMKAAVAVQRKILELIYIIYKTDKVYQPDYQETKNTARQLLNS

SEQ ID NO: 224184 - protein, 391 aa, unidentified
MYIVGIDCSKYKHDCFIATETGEVIKDTFTFDNSGTGFALFFSILETLNCPKSEIKVGFESTSHYMVPLMKHLSVKGYKFILLNPVIVSRFRRSTTLRRIKTDKIDAKTIAQVLASSDYESYHMQVYHFPELKSLTRLRDRLVKQRSYYLVMLTNVLDEVFPEFKEFFDDSLKSKTAFYLLDTYKIPSRIANMNSNSFDNLRKVSHGHFSYAKFGKLKELAKNTIGSSSEADELEISSLLNIYKTINDEVCRVESKIEEIMNIIDSPTVSIPGVGMMSAASIIAEFGDLSRFANADKMLAYAGLDCGRSQSGTADYKGKMVKHGSGYLRQALMNVTEMMMIHTPAFYDFYHKKRDEGKAHRVALSHLARKLVRLIYKLETSHTRFDLNNSK

SEQ ID NO: 224185 - protein, 477 aa, unidentified
MNVKRKGSKKQVANNNVAVLSKEELLRKITEIEEGMKSSGWRDLETKGKFRKNDKLTFISDEMLILGCDIGSETHYLRAIDTRGRELSRDAYPFSNTVDGFQSAKRWALELAATYDKQQIVLGLEPTGHYWFCLATWMINNGISVVQVNPYAVKQTKELEDNSQLKDDRKDPKLIANLVKDGNYGMPYLPEKLYADLRRMSMLRDQLTEDRIRHINRLHREMKIYFPEYMDAFGKLEGAFTLEVLKKAPFPDDIISIGTDGLREIWHNAKLRGRGYSRANEILQKAQSSVGLKEGIDGGREAVQWFAEQVIQIENKLKELEAVIHRKFREIPYAENILEIEGIGENTLAGILAEMGDISRFDDVKEIQKLSGLGLVACSSGKHKGETRISHRGRKRLRYWLFQAAKSGVAHSEEFKRLHIYYTTRPDNPLKKMQSLIVIACKILRVIFTILRTGQKYDPEKMMKDIRYIRKTEVQAA

SEQ ID NO: 224186 - protein, 290 aa, unidentified
MKIMTGIDLHSNNAVCGLVDMKGKRILHKRLPCDLEEILRTLKPYKKRIDTIGVESTFNWYWLVDGLQDHGYKVALANPAKMEQYDGLKHADDTTDAFFVGDMLRLGILPCGNIYDRKTRPVRDLLRRRLGLVRKRSSFFVSFKSLYTRVTGQPMSLTELKRMKASDAVKLFEHPCDQLIAKELIELIERLTASIERIEETVLKTASKISYYRRLQSIPGIGKILGLTITMETGDVKRFPSPGDFASYGRCVKSQRFSNGSSPLVFLHEGHFESENRLWRAPKVFMYILH

SEQ ID NO: 224187 - protein, 445 aa, unidentified
MKRDVGLDVHKRTAEGCLLDHGGCIVGRAGCECTQEDILLFARNNLRKEDHLALEATTNTWAVVGLLEPFVEKIVVSNPLKTKAIAEAKIKTDKVDAYVLAQLLRTDFLPAIWIPDKKTRELRALTSRRSALTGDRTAIKCRLHSILHQRLIRPPMKELFSPSGRAWLQTVEMDTDGRAAIDSELRLLACLEKELDLLNATIARRGHQDPRLKLLLTLPGCGIAVAMTLLAAWGDISRFPSAAKAVSYLGLVPITRQSADKCYHGHITKQGNSDARWMLIQAAQHAGKDPGPLGHFYRRLHRRKGHNVAVVATARKLATIAFHMLRNNEPYRYASPRSTQTKLANLRVAVTGKRRIGGTPKGAGRPANYGTGIGTREIPSLAKLYAAEGLPSPKDPENLNPGEKKFINRIGIAAHVKSIHQTKRIVRKSATLATPDPATETNKQE

SEQ ID NO: 224188 - protein, 345 aa, unidentified
MLFAGLDLSRKRVDVCVVDENRELVLETAKPPDLDGLRSLARQLAPLGPISAAIESMTGARFVHDRLEELGWEVQIADAQKVKGLAPLACKTDRIDARVLAELGARDLVPAIWLPDPAVRGARERARFRLHLVKHRTQLKNRVHATLMSFGRPCPMSDLFGVAGRRLLAGLQIPEPWTGTLRASLVLIDDLDAQIGVCERQLRELGADHAYVALLQTVPGIGWVLGYTIAAEIGAIDRFASAKKLVGYTGLCPRVYQSGSKDRRGALAKNGPVYLRWALIEAAMHACRTAPYSARYQHTARRLGGSRGRKIARIELARDLATAIWHMLTRDEPFAPAGPALHLAA

SEQ ID NO: 224189 - protein, 395 aa, unidentified
MTTAHKGQGSTSGVVLHLAFELGLWGWKLAFTVGLGQAPRLRSVAARDRAAVLREIALAKKRFGLAADAPVVSCYEAGRDGFWLHRWLLSAGVASMVIDSSSIEVNRRKRRAKTDRLDAGALVRLLVRYHLGETKVCSVVHAPDDLAEDERQLHRELTALKDEQTSLVNQIKGHLCGHGLVLATVNESFSSWLAQARRWDDSAVPARMQARLGRIFTRWQLVHGQILALETEQRKRIRGETAPAVDQVRRLLSLRGIGRNGAWMLVKELFAWRRGFNRKQLGALVGLTPTPYTSSTSSREQGISKAGNKRLRRLLVELAWCWVRHQPRSALTVWFLCRFANGKRLRRIGIVAVARKLLIALWRYLERDEVPTGADLVDWRSKMGAKRPASVLTSA

SEQ ID NO: 224190 - protein, 317 aa, unidentified
MTTRSVFVGIDVAKATLAVAVRPRAAQWEEANTPAGIAAVVRRLRRQRARTLVVLEATGGYEHAVVAALATAGLAVVVANPRQVRDFARATGQLAKTDRIDAVLLATFAERVQPTPRPLPDAAARALEALLARRRQLLEMLTAEKNRVEHATGAVQASVRAHIAWLEQELGDVDRELDQQIEASPVWRATEDLLRSVPGIGPVVSRTLIGALPELGTLSHKEIAALVGVAPLARDSGVRRGPRRVWGGRAPVRAALYMAALVGTRCNPQLRAFYTRLQAAGKPRKVALTACAHKLLTIVNAMVRSNTRWMEHHAVSA

SEQ ID NO: 224191 - protein, 388 aa, unidentified
MQSFEGPYDAFVGFDVGKLAHRACCVLAGGAVAFNVGVANDEAAIDRVLAEAAAHGRALAVVDQRRNIGTTVVRRARAAGIEVAYLPGIAANRASSLFPGDAKTDERDAEVIARTAMGVPQALRPVPEEGALEGARRLEAQRCDLLRDRTHCVNRLRALLLESNPAFERELDCEAAWALSLMSRVGGPWQMLDAGRRRYAALTRDAPRGAADRLWATLSLATRPTDPQVRAEATLVRMLASRIAEDTALVAELAALVEAEVGGDETYRCLLTVPGVGPRTAAQLVLSVDISDFEDHDHLASYCGLVPRNRQSGTSLNSVSSSRQGNKQLKNLLIFSCSCLARGSGYYREYYERCRDRGMPYKAAMKAVARKRLKVIYAVMRDVRPYVA

SEQ ID NO: 224192 - protein, 361 aa, unidentified
MNNVTTAREGKLTMGLDLGDRYSQICVLAEDGELLEEARVRTTAAALRRRFGFEGSARVVLEAGAHSPWVSRLLEELGHEVIVANPRRLRLIYENHSKSDRVDAAYLARVGRLDPGLLAPLRHRSATTQADLVLLRSREALVRSRTALINHTRGAVKAAGGRLPRCSAVSFASKVRAHIPAELEPALLAVLETIAHLNVQIRTLELRIQEMAEERYPETQLLRQVPGVGPITAATYLLTLEDPARFPRSRAVGSYLGLRPRQKDSGSSRPQLRITKAGDEAVRRLLVGAAQYILGRFGPDSDLRRWGLRLAEQGGKAAKKRAVVAVARKLSVLLLRLWVTGEVYEPLRNARLRGQVPPECS

SEQ ID NO: 224193 - protein, 371 aa, unidentified
MSTRPGLLPQIEGTVTSKMANQAERVVGGVDAHTDEHHVAVVDLQGRLLGATAFPTTAAGYALLLSWLQSHGEVERVGVESTGAYAAGLVRALRAGGISVVEVNQPHRHARQRLGKSDPIDAELAARAALSRTATAVPKQTSGIVEAIRQLQVVRTSALKARHAALQQLNDLIVTAPEQLRSELRHGRTMRAKAALCQKLRPDTQRIHEPAQAAKLALSSLARRIHELDREILELDRQLEQLVRAAAPRTTQLFGVGTQGASQLLIAAGQNIDRFRSEAAFAKICGAAPIQASSGRTNRHRLDPGGDRQANRALHMIAVCRLRYCQRTQAYATKRTADGLNKRDILRCLKRYIARETFHTLRADLKALDST

SEQ ID NO: 224194 - protein, 354 aa, unidentified
MSQIPNTAIAVIGIDIGKNSFHVVGHDARGAIALRQKWSRGQVEARLANLPPCLIGMEACVGAHHLSRKLQMLGHDARLMPAKYVRPYSKGQKNDFNDAEAIAEAVQRPTMKFVATKTAEQLDLQALHRVRERLVGQRTGVINQIRAFLLERGIAVRQGLRSLRSELPGILATRTDVLAPRMLRIIEDLAGDWRRLDQRIDGLSGEIEALARQDQACSRLMTVPGIGPIISSAMVAAIGTGDVFSKGRDFGAWLGLVPKQISTGDRTILGKISRRGNRYLRVLFVQAAWVVLVRIKDWERYGLKSWIEAAKRRLHHNVLAIALANKLARIAWAVLAKGRAFELTRTDDAGVRPA

SEQ ID NO: 224195 - protein, 468 aa, unidentified
MALLFNHIQGKNGSRWTNFIKQTGVENILILAVDAAKYTHKVMICTYFGEILVSPFDIDASRTGFDQVTKVVEREKEKHQIKEVVVGIETTGHYYEDLVHRFRMKDYHVRVINAATTAKEREALLNWSKTDRLDLLAIVQAIIHGRGTSSELPSGSINNLQKLTRTRRDLVKTQTAVENNIRVHLDYIFREFQGKTIWVDGKREKQKPFYNLFGKASRYLMRHHLHPSDILKLGADGLRELSIQKNLKLRDESIHTLIELAQHSISQPRELVAVDQVLLNQKLDQLELVEEQVKKLETEIEDLFIQTDGAIILSIPGVGLVTGAELYAEMGDISDFDHAGQLIKMAGTNPIVKQSGDRRPSYYAVSKQGRKSFRNAVYQIGRSLSVNNPEMKEKYNALKERGKHAQQAYIALGNRMIRLAFSMIKNLTLYRTAQPNYVLFKQINRKLWQPNVQRFYEKFVSNEIIQSA

SEQ ID NO: 224196 - protein, 357 aa, unidentified
MTTYYIGADVHSNSTELAIEKRNKIVARYSVPTTIPAISNVLDSLQGKKHMALEEGPMAGWLYRNLCRKVDKLIVADPRRNKLITSDGDKDDKIDAAKLAALLRGKYLRSVYHSESDARSELKHWVSLYHDRGKDAVRNINKIRARCRMYGLTIPRLALRGPSHRGQWLFKINQPVLARQLNMLWIGYDATAKQTRMAKQQLLQLSKRYPVIHLWEELPGIGLIRATTSFAYLDTPWRFKKKNALWKYCGVGLQRTTSGTDKKGRPKPARLQLPWAVNRTLKNMILGAVISAINQKDNVFKTYYERMVQDGVISSNARHAVARKMLTVMWGMWKTNSRFDERLCQESNRPTASALSR

SEQ ID NO: 224197 - protein, 497 aa, unidentified
MPNKSSIYSRCNPQLLKLFEDASHPAKVMCVPLDYAKAQHLALICNGRGDVLKSAFAVENSAQGAAQLLSQVRACSKERRIRPEHIFFGGEDLPSYAENFLSRLRQEKFLVVRVNAWEAKQQRSNFQASSDSLDLLGIARCCLNRRAEAIRDLPQAYPNLRLATRDRDKIVRMRTAVSNRIHGYVDRLFPGFLCASKSGLAPFSKASLGLMEQRFSPAQLSRRPLPGLAQWLGRQGVPEPQEAAHQLKELAKEVLPPPAEQTVLLQRSLAQLVGLYRCLEESIAGMDREVAYWLARTPGAWLTSIAGLGITLAAGWTAELGPPNQWRSVRQLCSYCGVVPKSKQSGGPDKAPVVGSVQQRCNKRLKNVVLQAVERVRLYGPEDLRRSAQELQARGAHINFAIAKRLVRLAKYLALTGTVYRPKVLMDPATPKATLATYYQSMWETLLAKWRKKADLQDVFAPEQPLGQWRKMVQELYALELPLLRSKAEPASSALTP

SEQ ID NO: 224198 - protein, 342 aa, unidentified
MMIIGCDYHPGMQQIAWFDDESGECGELRLEHGTGEAEKFYRELKRRGVRVRVGIEASGHTRWFERLLAELEMELWIGHPAKIAAQRVRKQKTDRGDAQLLLQLLRENRFPRVWVPSPENRDVRQLLWHRHRLVQMRTRIKNQLHAIALNEGVQRRSRLWSKAGRAQLESFALDRWTARRRHDLLALFDRLTPQIAELSQAVEQEAERRPEVQRLMTHPGVGPITALAFVLVLGTPHRFRCGKQVGSYLGLIPCEDSSAGKQRMGHLSKQGNTLLRYLLVEAAQAAVRCDPQWRRRFVHLAMRRQRNVAIAAMARKLAVSLYWLWRNAEDPPAAPQSGSHVG

SEQ ID NO: 224199 - protein, 387 aa, unidentified
MYYIGIDISKFKHDCAVIDDSGEIVTPSWSFTNDAEGFSQLKLLLNSLDTETRIGLESTGHYGMNLKLFLESNNFSFMEFNPLLINRFVKSKSLRKTKSDSIDCMMIAHYLMTVEYKPYPSSFYHTEKLKSLTRFRDSLIRLRSRQLVELTNILDKVFPEFKPFFGSRFSVTALYILSNYSSPEKIANMNSKSYEALRKLSRGRFSTVDFAKLKQLAKNTIGTTEDYLLLQMQIVLDIYRQLDSKIDETEVSIKECVSDMNPPMLSVPGIGIESAAVILAEFGDFSKFKNASQMLSFAGLEPGYFQSGTSETTGKMVKHGSSYLRYALMNCAQTVVNYEPTFAMFYSKKRAEGKPHRVALSHVVKKLLRVIYTLQTKNIAYDADFVR

SEQ ID NO: 224200 - protein, 325 aa, unidentified
MRQPQSQVKPQTQVGLDVSSQTLDAHIRVDGKAFSVPNTDAGLDQLCEVLSVYDVSMILMESTGGYEDNAACYLQLQGYDVVVINPRHARRFAQSMGRLAKTDRIDAAVLAHMALMIDSGPDRERYIKPVNDEQRKQLSRMSSRRRQVVDLITVEKQRLTHADDYSRESINTIISLLNAQLKRIESDISHYVKKNFSELADRLLSIPGVGFQVVTVLIADLAELGHVNRRRISALLGVAPFNHDSGKFKGQRRIRDGRQSVRNVLYMGVISATRFNPVIKAFYDRLVNRGKPKKVALIACMHKLVNIINAMMRTGKPFDISLHGV

SEQ ID NO: 224201 - protein, 388 aa, unidentified
MPRQRKPNDFSRSLIALDMDTTLIAVVELSLSSWLVAGIVPGVERQPLKKLRTDENALLTLLNRWRDEAVRSGHKISRIAVAFEAGRDGFWLARWLNARGIEAHVIHASSVAVSREHRRAKTDRLDTELLKRAFVGWLRGERDHCKTAAIPSLREEDAKRPSRERESLVGEQSRLVNRMKATLIRLGIRGFNPKLRHAEQRLETLRTPEGKPIPANTLAELKRDMQRRRFICDQIRSIEQERLERLERTPDTEPHAMVRLLARVTGIGIETADLLVHEVLLRNMRDRRAVARYGGLTGSPDRSGGTNREKGMARSGNARVRRGMIQLAWRFLLFQKDSALAQWYRQRTEHAPKARKTMIVALARKLLIALWRLVREGVVPEGVTMRPA

SEQ ID NO: 224202 - protein, 363 aa, unidentified
MNVHKETVTHCSSKYEDEKASHYQRTPASYKNVLRYLAFLRTIYGEYTRFVCGYEAGCLGYSLYHQLENFNVEYVILAPTTMLEQRSKRRIKTDKRDAEIIARSLAQHNYSPVHIPTETDNQTKEFIRMRDDHKAELKKIKQQILSFCLRQGYQYDGSGNWTAKHVKWLRSLKPAGLYKEILDEYLLTYTILTDKLNRLDQRIEELASKEEYKESVSKLTCFLGIKTHTALSVIVEVGDFQRFVSARKFAGYLGLVPGQHSSGDDRNGLGITKAGNTHVRRLLVESAQSYTRGKIGYKSRVLRSRQAGNSPQVINYADRANERLRRRYYKMVLKDGKKYNIAKTAIARELACFIWGMMTDNIY

SEQ ID NO: 224203 - protein, 424 aa, unidentified
MKPHLDVEFAAFVGIDWSDTKHDICLQAANSEEREWAVVPHRPAAIDAWASALRQRFGGRPVAVCLELAKGPLVYALQKYDFLVLFPVHPATLAKYREAFTPSHAKADPTDAQLALELLLRYRAKLKALTPQSVPMRMLLRLVEQRRRLVGEQNRISNRLTDALKQYFPDVLAWFPDKDTLLFCAFLTRWPTLKQLKRARRATLQSFFHDHHVRSQSRIDERLRAIKSATPLTDDPAVIRPTQLLALALVEQLRVTLQAIESFDAEIATVSQTLPDYSLFRALPGAGATLAPRLLAAFGEQRERYQSAAEVQRYTGIAPVTESSGKTHWVHWRLQCPTFLRQTFVEWAGATIPRSFWAAAYYRQQRAKGCSHHAAVRALAFKWIRILYRCWQTRTPYDEATYLNALSRRGSPLLASIGKVAKNT

SEQ ID NO: 224204 - protein, 319 aa, unidentified
MAQNDRVVVGIDVAKDKVDACIRSLSQRRTFPSTAEGRRQLISWLRKHKATKAVMEASGGYEREWAKALREKDVEVRIVDPKRVRHFARSAGRLAKNDDIDSDTIAWFAETFGEAKGQAYDAARETLVQTVNARQGLLELQTSLQNRGEHAAPEPVQKMQGRLLKKIVLEVARLEAAIAVMIKATPHFAELAEIIESVPGLAEITSAGLIAAMPELGQVSNKVAPALLGAAPYDDDSGRRRGERHIKGGRRKVRNLFYMACLGAATRHNPVLKAFYQRLIAKGKPPKVALVACMRKLIVILNTMIARGEKWDATRYVLS

SEQ ID NO: 224205 - protein, 424 aa, unidentified
MAVMIGVDPHKASHTAVAINAAEEPLGQLRVRASAVQAERMLEWARAWPERAWAVEGAGGLGHLLAQQLLSAGERVLDVPPKLAARVRLLATGDVNKNDPNDARSVAVAALRSAEVREAWRDDHAAVLKVWSKRYRDLGRARTQVACRLHQVLCELIPGGVPGEITAGQAERILASITPAGAVQAARWELAAELTEDLRGVDVRIRETRKKLTEAVRAAGTCLTGLFGVGPVIAAAVIGDVRTVSRFASRDRFASYDGTAPIEVSSGGRKVCRLSRRGNRRLNHAIHMAAVTQIRYQHTKGRAYYDKKLAEGKTGKEALRALKRQISDAIFACLQEDARRAAAAKSPGGQPGNHSASRAAGSHPDHRLFGQATPGPATHPTTPVTPSPAQLPTRASERLGPGPGAARPRSGARRASSTRPRASR

SEQ ID NO: 224206 - protein, 361 aa, unidentified
MSEGKDIILVADYHSENIEFRWFNQANGEDRTGRYATTRAGILRQVEQAAGELELGGRIVWIMESTTGWARVKELLGERVRFVLANVLQMPLPPKAKRRKTDKIDTGRLLREYLHGSLPRSFQPSAWWREVRRVVDCRQDLVERQTAIKNWIGSLLHHETWEERENLWSGVGMAKLSAMKLSASDRVLVELKLGQLAQLSEQIKQVEKVMQALYEAWPEAQWVDAVRGIGMVTAVSLLAHIGPIERFARAQDLISYAGLAPGMWQSDGTCHHGRIGGGGTDSHLRYLLIEATTWLCQIPRYRPTYERVVVKRGKKIGRIVVSRLLLRSLHKMLTSKVRFNPAPRPARTAATKATTTAGCLR

SEQ ID NO: 224207 - protein, 414 aa, unidentified
MFAVGVDVSNGRSMVAVLGARRSVVVQPHEVPHTADGFAELAARLHALDGEDRIVMEHTGRYYESFAMSMYRAGFFVSAVNPLAIKGYQEGISVRKVKTDKADALKIAQFAIDKWEILPHYTPMDTIRYDLKTLHRQFQLSSKTKTALNNNLIALLEQSYPGANRYFDSPVRPDGSQKWVDFVDTFWHVDCVARVSRKAFVERYQKWCKRHGYNFSEAKAVEIHEDARQRFPLVPKSDTCKLMVREAVAQLNAVSRTVETYRAEMDRLASQLPEYETVMAMTGVGKSMGPQLIAEIGDLRRFAHQKSLVGFAGTDPIKDDSGDKVSDSKPSSKRGSPYLRRTLFVIMTILLQLQPPDDSVYQFLDKKRSEGKPYYVYMTAGMTKFLRIYYGKVRDCLKEKGLWEQPNVDEVNPV

SEQ ID NO: 224208 - protein, 403 aa, unidentified
MNNVAGIDVSKGKSMVSVLRPFGEVVAKPFSIGHTGSELKELADYLKSLDGETRVVMEHTGRYYEPVARFLHDEGVFVSAVNPKLIKDYGNNTLRKVKTDKADSRKIARYGIDNWAELRQHTPMDTIRMQLKTLNRQQSLYTKTKTMMKNNLIALLDQTYPGVNALFDSPVREDGSQKWVDFATTFWHVDCVRNMSLTAFAERYRKWCKRHGYNFSQSKAVEVHAGAQDLIAMLPRDALTKTMVRQAIDALNAISASMERLKAEMQALAAQLPEYPVVMAMHGVGDSLGPQLMAELGDVTRFTHRNAITAFAGVDPGADQSGTHEAKSTRVSKSGAPELRRALFLVMDCLLKTQPQDDPVYRFMDKKRAEGKPYLVYMTAAQNKFLRIYYGRVKEYLASLEGN

SEQ ID NO: 224209 - protein, 322 aa, unidentified
MRFYTKHHQFYCGIDLHARTMYVCIMDHEGTILTHRNMPATAQTLADVLQPYREDLVLAVECIFTWYWVADLCNRIGVEFVLGHALYMKAIHGGKVKNDKIDSQKIVALLRSGMLPMAYVYPQPMRSTRDLLRRRLYLARQHAQLQTHIQNTNTQYNLPSFEKRIDRQSNRIGIADRFTDPMVRASVEAYAALMDALHKQILAVERQIIAQVPEHDPVAVHLLRSIPGVGKILALVIFYEIHDINRFPKVGNFISYVRLVKCAHESAGKRRTGKNSKIGNVHMKWAFSEAACLFLRRNERAKHYHHRLVSKYGNAKALSIIA

SEQ ID NO: 224210 - protein, 336 aa, unidentified
MYSLFVGIDISKSTFNYAFMLQGKVVHEEVVENSKLGVEKMISVLRNRGDADLGNTIFCLEHTGIYSNHVLQTLHSFAAAVCAESGSSIKNSLGLQRGKSDQVDARRIAQYAYRFTDRLKLWKPKESIIEQLQHLTAVRDRLVKIKVQLEVPLNEAKDFIRNDYFVQVEKSSTKIISSIDQEIKEIEGKIKSLINSDKHLRPLLVLITSVPGIGEVTATEFIIRTNAFNNFDNAKKLACHVGIAPFEHSSGSSIRGRSRVSHKAHKRMKKLLYLAAMAAIRTPGEIQEYYTKKVREGKPKMSVLNAVKNKLVHRVFAVVQNQVMYDKNYYLSLAIS

SEQ ID NO: 224211 - protein, 340 aa, unidentified
MGEQYVGIDLHRRRSVIARMTPEGGVLETVRIDNDPVALSLELAKAGPDPEVVLEATYGWYWAADLLQACGATVHLAHPLGVKMFGYQRVKTDARDAANLGDLLRMGRLPEAWLAPPAVRELRELVRYRAKLVALRSGLKAQVHAVLAKEGVRVPMSDLFGVAGTRLLEELRLPRAYGLRVASLRELLGALDQQIAMLGREIGSALAGDVGYLAIQAIPGVGPVLAAIFVAEIGEVGRFAGAPQLCSWAGLTPRHRESDTTVRRGPITKQGSRLVRWAAVEAVQRLPGTTKQAADFHRIADRRGKGIGRVAVARRLLTLVYYGLRDGQVRCLAPAPAEAM

SEQ ID NO: 224212 - protein, 404 aa, unidentified
MLDMEIIFGIDVSKHSSNVAILIDGRTFKEFKITNNRPGYKILDDALNSFRSPKVIFESSGIYSRSIRSFLQRENWNYTEINPLAAKKDMDGFRHNKNDRLDAVSLAMAMAQHHYQSTFKEKAVYGELHDLERTYQEFNEDIVRAKNRLHQKLQLTFPEVEQFISTTDGALYWHVVQQFPHASLVLAIELPALAQFILKATPKNMSEKRAFALARHLHDLASQSAPAVDYNAHAVHSVIYLANEVEHLSGLKADIIEEMTKISSLLAEIPILESIPGFGIKTAVCLLAELGDISRFHSSNAINAYVGIDLIQYQSGDFEMMQHIRKRGNPYARKILFKAVLNMMSVAKYHPSNISIFYQRKKQSSSESHTKKIAIAAMGRLIRTIYHLIKNNELYDSTQFSPEK

SEQ ID NO: 224213 - protein, 367 aa, unidentified
MKKVSTGAGRQAKNFSEQKLTIGLDLGDRSSWYCVLDEAGVILLEQRLSTTPKAMREVFGGMPHSRIALETGMHSPWVSRVLNELGQEVIVAHARNVRLIGESRKKDDRMDAQTLARLARIDPELLCPVKHRSAKAQADLTVIRARAGLVRARTALVNTARGLAKSYGERLRGCSVRNMNPEKAQGLSPELRTALEPLLAGIESLSERIRECNEGIERLAQESYPQVALLKQVKGVGTLIALTFLLTLEDAHRFRKSRDVGCYLGLQPGRRNSGQSEPQMHISKEGDPYLRTLLVQGAHHILGPFGADSDLRRWGLKLAERGGKSGKKRAIIAVARKLAVLLHHLWVSGEVYEPLRNSKQRAMPTAA

SEQ ID NO: 224214 - protein, 348 aa, unidentified
MKLYCGIDLHSSNSVIAVLDEQDKPVYEKRLDNVVDDILEALKPFKDEIVGCVVESTYNWYWLVDGLMEAGYRVYLAHVGALPQYTGLKHTNDTTDARYLAKLFRLGILPTGYIYPKQQRALRDLLRRRLLLVRQKTLHHLSLQSLIARHSGQRLNANAIKKLETNQLSEYLESPILLGGEITHQARCWLDGAIARIEREIQKHIQPCEDYQLLQTIPGVGPALGTTIALETGTIERFPSPGNYASYARCVKSEKIINGKYKGQGNKKNGNKYLAWAFMEAAHYSAIWNPRIKQYYQRKQAKAHVLVAKKAVANKLARACYHMLKRGEPFDVVRAFLATSRCAFACLR

SEQ ID NO: 224215 - protein, 407 aa, unidentified
MEVIYRRCAGLDVHKETVVACVRIANHGAPTQEVRTFTTTTSGLLGLVDWLDGYAVEHVAMEATGVYWKPVWHVLEGHFELVLANAAHVKNVPGHKTDVNDATWLADLLAHGLIRASFVPPVAVQNLRALTRTRKQFVRERSAHIQRIEKVLEDANLKLGVVLTDIMGKSGRAVLQAIVEGHTDPEWLITLVSLRVKASRAEVLEALRGRITAHHRFMLKLHLEHIDALDHAIATIEQEVGAGLEPFRQAAQLVNTIPGMSSTASHVVVGEIGIDMARFATPAHLLSWACICPRNDESAGKRRSTRLRRGGKWLKTTLVQSAWAAVRVKGSYLQAQFHRIRARRGAKKAIIAVAASMLTAIWHMLRNGTEWRELGAAYFDRADAKKTATRLIRRLQQIGYTVQATPL

SEQ ID NO: 224216 - protein, 363 aa, unidentified
MAQAKRVITGGVDTHKDFHVAVALDDLGRLLGTEQFASSAAGYKKLLAWLSHFGRLEAVGVEGTGSWGAGLARYLASEGVKVLEVVRPKRQVRRRRGKSDPVDAEAAARAVLAGEELGTPKAATGPVEAVRLLRIARRSAMKARTQAANQVHAVIDTAPEALRAELMGLSERARMQKATRLRPDDPSSPLGAVKLALACLAKRWSVLSSEIAVLDAELAKIVATTAPSLVALKGVGVETAGSLLRAIGDNPARLSSDASFAALCGTSPVAASSGRQQERHRLNRGGDREANSALYMIVLCRLAWHQPTKDYMARRTAEGKTKKEVIRCLKRYVARAAYRAIIADMAPGARPKTGTGTTALKAV

SEQ ID NO: 224217 - protein, 322 aa, unidentified
MNKYKETFGVDISKDVFDVYGSISGHKQYMNDETGFKKLLKALPEESLVVMEATGYYHYRLAQFLYKNEVIVSVVNPLSIKRFIQMKLAKVKTDKSDAKAICEYALINEVSLYTALTEVQSECLQLFRLMDVYLKHRTATKNKMHGEEVLGVPSKFVYRSLRRNRKHLDREIQAIEQKILSLVKEDQQQQLSLLTSVPGIGQKTALFLIVVTDGFSKFENASQLCSYVGITPTIRESGSSVRGRARISKVGNKKLRNLLFLCSFNACKHNKACRALYERIINKGKSKKLALIAVANKLLKQCFAIAKSGIPYDETFVSVLAR

SEQ ID NO: 224218 - protein, 397 aa, unidentified
MYIVGIDIAKRKHEAAVIDGEGAVIIKPFSFTNNCSGYNRLLAMLTKAKLPLDEVSFAMEATGHYWLALFTRLQKEGFRVQVINPVQTNSIRSFYIRQAKTDPRDALLIAEVIRFGHFSESTLHPENIYELRELCRGRHAIVSMQADVKRKVVALLDQVFPEYETAFTNMFSDTSMAILQTCPTPKELSEMPLEELCHLIEVSSHKRFRMAKAQELQALARGSFGFAMAGDVFSTMIRLYAKHLDFLKQQVREMDRKIAEIMDTLDTPITTITGIGPTLGAYILSEIGDISRFSSAAKLAAYAGIDPTMRQSGEYNGVRNRMSKRGSPYLRHAIWLAASSAVLHDPALKLYFQKKRDEGKPYMASVGHACRKMVSIIYAVMRDNKAYTPHIPNEISA

SEQ ID NO: 224219 - protein, 348 aa, unidentified
MAHFVGLDVSIKETWVCVVDAAGKVILEQKVPTEPADIIALLTSLGATYGRIGIEAGPLSQWLVNALTTVDLPVICVETRHMKALLTAQQINKTDRNDARGIAQMMRVGLFKPVHVKTLVAQEQRMLLTSRKLLQRKLLDLESDLRGTLRNFGLKVGVVSGSRYEARVRELVAGFPRLAAIAEPLLNVRRVMRQQLAVLHKMLLDTVRGDPVCRRLMTVPGVGAVVALTYRATVDQPQRFVHSRAVGAHIGLTPKRYQSGEIDYDGRVSKCGDALLRTMLYEAAQVLLTQSGKWSWLKAWGTRVAQRRGIRRAIVAVARRLAVVLHRMWVDGSDFRWRKDSAPVPAAA

SEQ ID NO: 224220 - protein, 482 aa, unidentified
MKPKQQEKTKEATCRTTQGNWQQMNRKQRREMTRKIQSEDIRLEVVHCDAAGIDIGNESHYVAVPPARDSQPVRRFGCTTAELKEMAVWLKQCAIRTVAMQSTGVYWIAVYDILEEAGLEVYLVNARDTKNLPGRKSDVQESQWLMKLHTYGLLRNSFRPSQEIRTMRTYWRQRNDLVQSGGRHIQRMQKALTQMNIQLANVLSDVSGMTGQAIIKAILAGERDPHKLAAFRDPRVKASEEEIARSLEGNWEEDLLFVLQQEQDGYEFCHKQMAECDQRLAQYLERREDRSAGAHLPEEKRKGRLKKKSGNKPRFDLRTGLFRMSGADLTRIDGLDVMTAMTILSEAGWDMSKWETEDHFVSWLRLCPDNRISGDKIIGKGRLPTNNRVTTALKMAANSLRTSKTYLGAQFRRLRSRLDTPVAIKAMAAKLARLVYRMLRYGKKYVDRGAAFYEAQHRQLQIKHLKSKATKLGFQIIQVPTA

SEQ ID NO: 224221 - protein, 467 aa, unidentified
MKSNRNRRPHRKKPATGPSLLERMNPNAAGIDCGSDTHHVAVPADRDPTPVRAFQTFTADLHRLADWLTACGMTTVAMESTGVYWIPLYEILEGRGFDVVLVNARHVKNVPGRKTDVVDCQWIQELHSVGLLRGSFRPTAAIAALRAYLRHRETLVQSAATHVQRMQKALVQMNLQLPIVISDITGVTGLRILRDIIGGQTDPHALAQHRDYRCQASAAEITAALTGHYRPEHVFVLQQNLELFDTYQHQLAACDAAIEAHVLTLAAQAPTPASPVPAARTRKTPRNNEPRFEIRRPLHQLTGVDLTQIDAIGPYSALRLLSEIGTDMSRWPTEKHFTSWLTLAPRNKISGGRLLSSQTQPSANRAAAILRMAAMNLGRSDTALGAFYRRLAYRVGKAKAITATARKLAILVYRTLKDGLVYQNPGAAAYDAQHRVRILHRLRQRAANLGFSLLNRATGELLEGAVS

SEQ ID NO: 224222 - protein, 341 aa, unidentified
MTIGIDLGDVWSHYCALNEDGEVVDRGRFRTSPSGVEKWFTDLPRVRIAMEAGTHSIWISEQLQELGHEVIVANVRELRAISHSDRKSDPVDAEKLARYARLDPKILRPIAHRTVAQQEALTLIRARNLIVRLRTAAVNAVRGLAKPCGYRLPASSTLCFAKRCVAVLPPGLAQALGPVLEQIAEMTKKIKHYDRLIKRLTETEYPETQALIQVYGVGQLTALTYVLTLGNKERFQRSRDVGCYLGLRPKRSQSGDRDPQLGITKAGNIYLRTLLVECANHVLGPHGRDSTLRQWGLHLASRGGKQSRNRAIVAVTRKLAVLLHRIWITQEPYIPFYGVAA

SEQ ID NO: 224223 - protein, 413 aa, unidentified
MIVGIDVGSEKHYFRAFNWRGIELTRKPVAFSNSMEGFNSFYNTIVELMQKRELEEALVGIEPTGHYWFDLGQFMGEKNIKFVMVNPHHVHKTKELDDNSPSKNDRKDPRVIAGLVRDGRYFYSYMPTGVYAELRNASNRRFVLVEEQTRAKNRLQKWIAVYFPEYKGIYTHIDAKGGLLVLKQAPTPEEIVRLGVEGIIKIWKDAKLRGNGHKKAMLILNAAMKSIGLKSGLTEARMEIQDLIEDYELQTKRLERVNDLIKELCQQVRYADKLLEIKGIGITTVAGFIAEVGDITRFDSTKELQKLAGLELVSDSSGKHNGKTKISKRGRKRLRYLLFEAAISVVGKNEEFKEIHSYYTTREKNPLKKMQSLIAVACKLIRVFHVILTKGISYDASKMLKDIRHQGEQLKAA

SEQ ID NO: 224224 - protein, 397 aa, unidentified
MYIVGIDIAKRKHEAAVIDGEGTVIIKPFSFTNNCSGYNRLLAMLAKAKLPLDEVSFAMEATGHYWLALFTRLQKEGFRVQVINPVQTNSIRSFYIRQAKTDPRDALLIAEVIRFGHFSESTLHPENIYELRELCRGRHAIVSMQADVKRKVVALLDQVFPEYETAFTNLFGDTSMAILQTCPTPKELSEMPLEELCHLIEVSSHKRFRMAKAQELQELARNSFGFAMAGDVFSTMIRLYAKHLVFLKQQVQEMDRKIAEIMDTLDTPITTITGIGPTLGAYILSEIGDISRFSSAAKLAAYAGIDPTMRQSGEYNGVRNRMSKRGSPYLRHAIWLAASSAVLHDPALKLYFQKKRDEGKPYMASVGHACRKMVSIIYAVMRDNKAYTPCIPNEISA

SEQ ID NO: 224225 - protein, 451 aa, unidentified
MSKPQVIDDEEHERVHERVAAVDVAKDSGMVCTRLPHPSRPGARPSTVWTVKARMGAVGKLGRQLKDSGIELVTLESTSDYWRIWFFVLEACGLAVQLVNAAQAKNLPGRPKTGKLDAQWLARLTELGLLRASFVPPAAIRALRDYTRARTRLVQERTRCYQRLEKLLEGALVKLSSAASKLTTESAKDMVKAMIAGQRGPRTLAALARTRMKAKHDDLAEALDGMFDDRHGELAGLLLDQIAFLDERVTQLTARITAAVAAMPAAWGVDGDGTTGPDAGTGPDAVVLPAAARLAEIPGVSQDLARAIIAETGLDMSRFPTAAHLVSWAGLCPSARQPGPRTRAGKKSQGDTWLRGSLGQAATGAARTDTFLGERYWRIARRRGKAKAQVAVAGSILVIIWNLLKDPAARFTDLGPGYYQARTDKVTKIKNHIRQIEALLGHPITITPKAA

SEQ ID NO: 224226 - protein, 318 aa, unidentified
MTSQHLALAAGIDVGQRFLDIGLAPSGKAFRVPNAPEGIAAVVERLAKEGVGRVVLEAIGPYAQRLVSALAIAGFEVGLINPRRIKAFREFEGRRAKTDRLDARLIARFALAMTDAIRPLPTAEQLALRALSTRRRQLTEMIAMEKTRLKQAIEPMLLASHRNAIKSLSAECAAIEAELTRRVADDPQLASTFEILTSIPGIGQRVATVLVTELPEIGRTDRKAIASLAGLAPHISQSGNAPPRAAISGGRPCVRAALYMAALVASRAHPEMKASYKALRDQGKPGKLALIAVARKLLVTANALVKNKTRYTPKTLDS

SEQ ID NO: 224227 - protein, 455 aa, unidentified
MAPRSKSNQRKSRPTSTPPLLHPHAAGIDVGAREVYVAVPPGADARPVRRFATFTQELLAVRDWLGPCGVTSVALESTGVYWIPLFQILERAGLEVVLVNARHCKNLPGRKTDVQDCQWLQYLHSVGLLRGSFRPTDQVCAVRTILRHRESLVAGAARCVNHLHKALTQMNIQFQHVISDITGVTGLAILEAILNGERDPVALARWKDHRIKASRDTLAKSLRGDWREEHLFTLRHNFELWKVHQQLIAACDAQIESMLGEFDTRADQDAVLAPARTTHKKPQKNEPQFLAREECWRVLGVDLTAVPGFQTPTVLVLLCELGPTFADKFATAKHFGSWLGLCPDNRITGGRVYSVKTREVKSRVAKALRLAAQNLGRAQNYFGDLYRRWKARLGAPKAITAMAHKLARVLWHLLKFKQPFDWKAFEKEEQKMKRKKLLRLQNLAAALNYQLTPLP

SEQ ID NO: 224228 - protein, 341 aa, unidentified
MKNTTTISIDLAKNVFQVGVFNKHGNLKSSQTMSDRKMTLLVAQHPEANICIEACGSAHHWGRQFTKEGHEVYLVPAHIAAKYRSGNKNDPKDVLAIYAAAKQPDTHFVAVRTLEQQDLASQHKLRQGYVKQRTELANRIRGFGMEYGVKFPKGIGKLRRRVPEALEDGENELTDTARRLLRNLLDHLLALDAEIAEVTKLLVEQTKQIPACRELVRIPGIGWLVAGALYVRLGNGSAYRCGRDASASIGLVPGHSGTGGHNKMTGITKRGDKYLRALLVHGARSALSHVCDKQDGLSVWIRKQRATNPMNKTTIALANKLVRMAWAILSSGGQYREPVAQ
